United States Patent Application Publication US 2008/0066201 A1 - sequence listing, part 5

SEQ ID NO: 27849 - DNA, 404 bp, Glycine max
  Clone ID: LIB3108-042-Q1-K1-H10
cccacgcgtccgccgccatttcctttgggtttatggagtgagcgtggaagaggaaagagcaagcagcaacagctcgtggcggttccgattatttattaagatcaatgttgcatgcagtatctgcccctagcttttggttaagctatcccgggaaccttcattatcctccttcttcagttaaaaaaacatgtttttctgttcgttgttcggtttcacagacaaaaaatggagctaaagtggaatatactccttggctcattattggcttgggcaatcctggtaacaaaataccatggcacaaggcacaatgttggatttgaaataattgatagcctttctcgagcagaagggattcagatgaacacaattcagtcaaaggcccttatttggaataagttctattg

SEQ ID NO: 27850 - DNA, 424 bp, Glycine max
  unsure at all n locations
  Clone ID: LIB3108-042-Q1-K1-H2
gagagaacaagaacataagggaaccacagcggcggtaacagaagaacaagcagagaatgggtcgagtgagaacgaagacggtgaagaaatcctctcggcaggtgatagagcgtcactactcgcgcatgaccctggacttccacacgaacaagaagcttctggaggaagtggcgataatcccgtcgaagaggctaaggaacaagatcgcggggttctcgacgcacctgatgaagcgcatccagaagggccctgtgcgcggcatctccctcaagctccaggaggaggagcgcgagcgccgcatggacttcgtccccgacgtctccgncatcaacaccgaccacatcgaggtcgacaaggaaaccctcgacatgctccactccctcggtatcaacgacatccccggcatcaccccagttgatcctgt

SEQ ID NO: 27851 - DNA, 415 bp, Glycine max
  unsure at all n locations
  Clone ID: LIB3108-042-Q1-K1-H4
tctgctattcatagacttttcaataaatggctgaccatgttgcgcacacaaccatcaagccaagaagtggagaagatttttgaagaacctgcatcagaaggaattttaccaaaaactcagcaagagactcaaattaaggaaagacgtgcaattttgaaggtggcatggtcccattttctggccctcgatgcaacaataaagattcctttgttggtattcattcctctatacctggctgttaatgtaaaatatggtgctgaagtttccaaggagttaactcctttatggattttgggcccacttattgtggctacccaaatcttggcaatcccgtggctatgtgcactctatgttttcagcttcaatcagactgtcaaaatactcaagaattctncttattactgcattttggcct

SEQ ID NO: 27852 - DNA, 414 bp, Glycine max
  Clone ID: LIB3108-042-Q1-K1-H5
atccgctagaagttcgcatcttcaacgatgcatagctcacggcattcgtccttctccaaggcactcgtgcttgactgctccatctgcttataagcgactgtggctcgtggacgcgagttctgcattgcgggctattcatcggaggactcaaagtccatggataagctcattgaactctatgaattatcgatgtcacaacatggcaagatttaccaaagcattgaagagaatcttcttacgttctagattttgaaggataacctagagcacatcgatgagagcaacaaggtggtcagcaactactggcttgacttgaacgacttggctgatttgagccaccaatagttcaagaacaagtatctggtgcttaacgtggactactgtctaacgacatagacttctgaataattcact

SEQ ID NO: 27853 - DNA, 397 bp, Glycine max
  Clone ID: LIB3108-042-Q1-K1-H6
gggtaatgtcttcaagaacaagagagtctcggtggagcgcgtacacaaggcaaaggctgagaaggcaagagagaagaccttatctgaccagtttggggccaaacggactactaacacggcaagcagggaaaggaaaattgctaggagagaagagcgtttggctcaaggccctggagagaagccatcagcagccccaagtgctccatctgcaacagcatcccagccagcccaagcatcaaagaaatcaaagaagtgacatttttggagattggaaggaagggcattgaatattcaatgtggctgacatcctgagttacgtggcatatgtatttttgacagattgtctcggtttcttaaaccttgttagtttcattcgaaatttaagttgtacatctgc

SEQ ID NO: 27854 - DNA, 411 bp, Glycine max
  Clone ID: LIB3108-042-Q1-K1-H7
agacagtgtccaacctgcaaaggtacaagtagtggggtggccaccaattagatctttgaggaagaacattctgcaacaacagaagaaggtggagcagcagggtgatggaagtggaacgtatttgaaagtgagcatggctggtgcaccttacttgaggaagatagatctgaaggtttacaatagctacccagaactcctcatggccttgaaaaatttgttcaagtgcacatttggtgaatattcagagagggaaggttacaatggatctgaatacgctcctacttatgaagacaaggatggtgactggatgctggttggagatgttccatggaacatgtttgtatcctcctgcaagaggctgaaaataatcaaaggatcagaagcaaaggggttgggttgtttgtgaccaac

SEQ ID NO: 27855 - DNA, 354 bp, Glycine max
  Clone ID: LIB3108-042-Q1-K1-H8
tctgctattcatagaccttttcaatacattggactgaccactgttagcctagtcagcctgtagagcggtccttgaaggatttgaagctcaaggaagtgtataaagggaagttgactatgttgtcaatcttgggttactttgttcaagctcttgtcacaggtgttggcccataccatacccttctagatcatttggctgaccccgtgcacaacaacatcttgaccaatctcatatttcactgaatgtattatatgttattttacatattctttacgttgccaaaactcatctatgtttctacctttctatatcatggggacattttgttccctgatggggcgctttaagaaatga

SEQ ID NO: 27856 - DNA, 468 bp, Glycine max
  Clone ID: LIB3108-043-Q1-K1-A1
cccacgcgtccggcactaagtcttttttgatagaaattgtgaagatgtactgttatcattggatcaactatattgtgcccttctttttttatttgatttggcaaacacggctacttttctccaaataagatggatcatttgtattgccggctttgtgcacaattatctacttgtaagaagtccaatttcgggcaacaacgtttgtaatgcagaaataggtcattagcattgtaaatctccaggcgataaatggaatatcaaatggaagacgccgcatagcttctggtgtgacaatatcattgtgttgggcaaagcattttcgaagaaattacgtggatttaggaagattctgattattcttctacatctacaattattaaggtgaagataatttcggctctttacaaagtaagaatgaaattttcataatggagaattagttgatcaatataattaatggtttaattt

SEQ ID NO: 27857 - DNA, 288 bp, Glycine max
  Clone ID: LIB3108-043-Q1-K1-A11
tccatcttttactttatgcaaatcacaatgcatctctgacccatatcaaactctcacggacaatcacacacactcaaacctaaaatctttctcaaaacatccaacagctccctccacgtctatctcactaaacaatacataactctttgactacccaagcatctaagactactttattccaccaagaaactcctcctctcccttaattcgacctacctcttcctagtcctcacctctctcaataatcaataccaaaatccatccacagcttttggattcataactcct

SEQ ID NO: 27858 - DNA, 443 bp, Glycine max
  Clone ID: LIB3108-043-Q1-K1-A2
cccacgcgtccgcccacgcgtccgatgatattggaggtgttgaaaattttggaaacaaactgctcaagagaagaaaggaccaaagccttcctgtatttattcctccagagcaaacggtggatgctttacttgaatcgggttattctctaatcaaagaacaacggttgataatggaaactaaactttcaaaggaatacatgaagaacatagatgactaatataaagaatgttgccgtggtgcaagtcctcaggaattatgattgggccagtttggaatccgtgtaaagttgctatcgtggatactgtccactttcgaacagggtgcttctctttagcaatttcccagtttttataagaatcgttatttatcatgatgtaacccatttttaagataaggaattgcatgaaatgttatccagaaacagtgcaatgttaaccttaca

SEQ ID NO: 27859 - DNA, 330 bp, Glycine max
  Clone ID: LIB3108-043-Q1-K1-A5
cctccgcaagaccgtcgacggcactgacagagtcggcttcgctcagttcctcggggtcatgggagtggcgtgcaagattccgatgagggaggcgatgacgctggcggtgctcatgaacactaaaggattggtggagctcatcgtcctcaacattgggaaggaaaaaaaggtgttaaacgatgaaatgtttgccattttggttcttatggctctattcaccaccttcattacaaccccaatagtgttgtccatctataaaaacactaatgacatatcctttcatcaaaccctgagaaaactaggtgaccttgacactaatggataagccac

SEQ ID NO: 27860 - DNA, 396 bp, Glycine max
  unsure at all n locations
  Clone ID: LIB3108-043-Q1-K1-A6
cagcattgttcatgttcacatgccgtgggattttaggctactccacccagctcccattgcctcaggggtttttgggctcgggtgtggacttccctgttgggaacgtgtcttttttcttgtttttttctgggcacgttgcagggtcagtgattgcttcattggacatgaggaggatgcagaggtgggaactggcttggacttttgatgtgctcaatgttttgcaagctgtgaggttgctgggtacaagaggccattacactattgatttggccgtangggttggtgctggaattctctttgattctttagctggcaagtacgaagatagcaaaaggaatggtgctcttaaacacaatttgattgcgtgaacaatgtggatatagcttaaaaaattta

SEQ ID NO: 27861 - DNA, 265 bp, Glycine max
  Clone ID: LIB3108-043-Q1-K1-A7
cagcatcgttcatgttcacatgccttgagattttacgctactccacccacttcagattacggcatatgtgcctgggctagactatgtacttgcataatcgtaacgtgtcgttaatgctcgctttactatggccacgtatcacactcagtgaatgctcgattgtacatgaggaggatgccgtaatcatgaactagcttacacttatgatgtactcaatgttgagcctgctctaatgctcatgtgtacaagaagtcattacactatt

SEQ ID NO: 27862 - DNA, 215 bp, Glycine max
  Clone ID: LIB3108-043-Q1-K1-A8
ctttaccattcaattataattcactttagattatgttctgcatcaaatttcacgcggacagtgactctgtacatagggctatattatcgatgcactgtattagtattcaaattccaaatggctaacatattcgattgctgttagtattcaaggttctgtagatcatgtgacaatgcaccagcaatatttgcatttgtgacatattcacatgctat

SEQ ID NO: 27863 - DNA, 430 bp, Glycine max
  Clone ID: LIB3108-043-Q1-K1-A9
ctaccctccaacgtgctctcttccctccttcacttcatccaaatctttctcattttcggtcccaaatcacactctcaattacaataacacacactcaacttgagaattttccccaaaaatcccaagagctcgcgccatggtttccccggaaaacagcaattggctgttcgattacccgttgatcgacgacgacgttattcccgtcggcgactcctccttcgccgtctccgcttccaccttctcctggcccccacctcccgccaatgtcagtgtcgaaattgatgcttcgcttggggattctgatggcctaaaaaatcctgctttgaagaaaaggactaaatctgattcaagtactgcttctagctccaaagcgtgtcgggagaaagtgaggagggataggcttaatgacaagtttgttgaattgggctcc

SEQ ID NO: 27864 - DNA, 399 bp, Glycine max
  Clone ID: LIB3108-043-Q1-K1-B1
gccacgcgtacgctagaatcggagctccacgatgtatccgacgacaccgattacgccgcggctcaacaacaaggatctgctagcgtgatgctgcgtagtgacagtgccaaacagagctcccctcggtaaggtgctgaaagcgtatttttgaaggacaatgtcgcaattcatgcgactcagattgcgtctgaatgaatcagtggaagactgaaattgattaagcatagctcgtccttgtctatgacttggataccttacaaagtgcatagttcacaggccaggcctgctgatgaagacagaaacctttatatcataagggcggtgccctttacagacatcaggtccattcggaggcataatcctgcttttgggtggcaatatgtcattgacggtctatca

SEQ ID NO: 27865 - DNA, 413 bp, Glycine max
  Clone ID: LIB3108-043-Q1-K1-B10
gcagaggagaattgccttctagaagcgttatctcgcagagatgggtactgtttgtctgcttaggaagtttctgtgctggaatgctcttcactaccaggatatggaccatacctgaaaacaacaaaggactagcacgaccaacagcctcagaagctgaaaaattgagtttagtttctgaaggttgcaattcgagaattttgcaagagatggaaatgaagcgcgataaagacatttatggtgaagttttcaagagtcataattccatacaaacattggacaagactatttcgaacttagagatggaattggctgctgctagggtaactcaggaatctctacgaagtggtgctcctatttcagatgatataaggttgagtgaatcttcttcgggtaagagaaagtaccttatggtc

SEQ ID NO: 27866 - DNA, 426 bp, Glycine max
  unsure at all n locations
  Clone ID: LIB3108-043-Q1-K1-B12
ctttgttcactcttcttctcttgcggcttttgttttagcgcagcttcttctaggtttaaggaagatgggtaaggaaaaggttcacatcagtattgtggtcattggccatgtcgactctgggaaatccactaccactggtcacctgatttacaagcttggaggcattgacaagcgtgttattgagaggtttgagaaggaagctgctgagatgaacaagaggtctttcaagtatgcctgggtgctggacaaacttaaggctgagcgtgaaagaggaatcaccattgatattgctntgtggaagtttgaaacaacaaagtattattgcacagttattgatgcgcctggacatagggatttcattaagaatatgattactgngacatcccaagctgactgtgctgttcttatcattgattcgaccactgg

SEQ ID NO: 27867 - DNA, 380 bp, Glycine max
  Clone ID: LIB3108-043-Q1-K1-B3
cccacgcgtccgagaagatgaaagcaatgcctatgattgacagcgagggatttatgtgtggggctaacttcaatgttgactctcagacaaagatccaagtgatgcctcgtgttggaagtgaagctaattgggccacatggagctaacaaacttgactgatttaatcatagcccaacttttttttaaaacccttttctaagtggttaagagtacacaacttaatatgatggtgctgactctgcttttaggcttcagctcttttgggttatgtagtttttctcgtttggttccattgatctgtacatattcatgcttcaatgttgaacatgactatggtaatttctaatatcaataataagaagtttcagttttttgctttt

SEQ ID NO: 27868 - DNA, 328 bp, Glycine max
  Clone ID: LIB3108-043-Q1-K1-B4
gatggatcggctgggtgggtcggagctacctgattgcgatcagggacgagaagaaacccggcatgaacgagatcatcatcgatgttcctctggcttctcgcttgctcttcaggggtttcagctggcccgttgctgcctacagagaactcatcaacggcgacctcattgccaaggatgtctagataagagagggtggatggctacattggaggaaagcctggagaatttgtatgtggatgggatctttacgcgctctttttgtaattactttttttataaatggtacatgatatgatgtaatctaatgcatgtgaaccacaatcaacct

SEQ ID NO: 27869 - DNA, 399 bp, Glycine max
  Clone ID: LIB3108-043-Q1-K1-B6
cccacgcgtccgggaacaattcgagtcttcttgttatctctcgcagcgtttccagccaatggcaaaacctcagcagcgagatattcgagaacggcggcgaggtagacgggggctccggcgccgacgcgctcggcgtactttccggccttgaggaacctggcgatacgaccgacggggaattggaggccggctttgctgctccttgaggtggccttcttagcggcgctggatcctagggttttgcctctacccgccattgatgaagtgtgacctagtgatcggcggtgttatgcctaacattcacaaccttcttcttcccaagaaggctgggggctcatccaagggtgctgctgctgacgatgactcttaaatagggattcactgttcacaaagttcttg

SEQ ID NO: 27870 - DNA, 351 bp, Glycine max
  Clone ID: LIB3108-043-Q1-K1-B7
gcacttttcagttacaaagcatttcattgttttacaatatacaacactacaatggctgcttgaacaatggctctctcttcatcatcattggctggccaagctatcaagcttgccccctccacccctcagcttggtgttggaagggttagcatgagaaaaacagcctccaagactgttacctcaggaagcccatggtacggcccagatcgtgtcaagtacttgggcccattctctggtgagcccccatcctacctcactggtgaattcccaagtgactattgttgggacactgctgggctttctgctgacccagagacctttgccaaaaaccgtgaactggaagtcattcac

SEQ ID NO: 27871 - DNA, 469 bp, Glycine max
  Clone ID: LIB3108-043-Q1-K1-B8
ctcattaattgcaagaatggcacttcgttgcttggtgatgtccctttctgttctcttcacgcttggtcttgcgagagaaagccatgccagagacgaagatttttggcatgctgtttggccaaacactcccattccaagttcattgcgagatcttctaaagcctggccctgcaagtgttgaaatcgatgatcaccctatgcaaattgaagaaacacagtacccgaaaaccttcttctataaagaagaccttcatccaggcaaaacaatgaaagtacaattcagcaagcctccctttcaacaaccatggggtgttggtacatggttaaaggaaattaaagacactactaaagaaggatatagttttgaagagctatgcatcaagaaagaagccattgaaggagaagagaagttttgtgcaaaatccttgggaacagtaattggttttgccatttcaaagctgggaaagaac

SEQ ID NO: 27872 - DNA, 435 bp, Glycine max
  Clone ID: LIB3108-043-Q1-K1-C1
cccacgcgtccggatgctggagccttgcttacttttggttggggactctatggacagtgtgggcaaggaattaccgatgatgaactaagcccaacttgtgtatcttccatattgggtatccacatagagagagttgctgcaggactgtggcatacagtctgtacatctgctgatggtgatgtgtatgcatttggtgagaatcagtttgggcagttgggaactggtgctgatcaagctgaggtatgctgtaattagtgtcatcccatagattcactactcagttgtgccttggtgacttgttggtcatgggttcgaatccggaaacagcctctttgcatatgcaaggactctaccaagactactggattcttcgagtttggataatttgcgtgcaaagaatatatcttgcggtgctcgccacactgctttagtaac

SEQ ID NO: 27873 - DNA, 273 bp, Glycine max
  Clone ID: LIB3108-043-Q1-K1-C10
cgttctttgagatgagagtcttgatgaatagtaccattctgatgtattgcttggctggaaagttaatgcatgcttcttatcttctgtctaaaaaaaaaaaaaaaaaaaaaaaaaaaaaaaaaaaaaaaaaaaaaaaaaaaaaaaaaaaaaaaaaaaaaaaaaaaaaaataaaaaaaaaaaaaaaaaaaaaaataaaaaaaaaggtcatcctctttaaagaaacaaatctaaataacactttcttaaaatataaataattttatttttaataaa

SEQ ID NO: 27874 - DNA, 497 bp, Glycine max
  unsure at all n locations
  Clone ID: LIB3108-043-Q1-K1-C11
ccgtccggttgctaggatctgcgaggctgaccgccgtgggcgtgactgtctgtgggcggacgcccgtggtgctgacccgggtggngtaatcatanngctatggcgagtacggcgcagtgcacacgttgttgcggtattcaatttaagaaaccttngcttcggctgtgcagtataatctcctcgcgaatcttggggcgttcttgagcctcnntcgtctgaacgtnngcctcagnnnatctgcttccccaacattggccacctcacactccctcaactggcttcttccctttccccacaaccccttccctaaatcgttgccaagagagctgctgtcccttcacttggaaagggaaatcaaacagtggccaactaaagtatcaattttcaatatcacnaagtacaaagaaacctggcagtttggtgaacccttcagtaccaagagaactttcggtgggaagccagggaaagcgctacgtaaaagcttcgttttgtcaact

SEQ ID NO: 27875 - DNA, 373 bp, Glycine max
  Clone ID: LIB3108-043-Q1-K1-C2
ttcaagacagatgctgctgtacgcttgcttacaagaattaagcgactctctggtcagagtggtcatggtattacagctgatctacttcacccaactagagtatcgaagatatcgggtgatcacataaagagagttactacaaaactttctcatacaatcataacatgtgctaaagataatgaggatgcatttgatgagaatgaacaacatctgctcacaactcttgctcatcatgctaatggatacagatatcagagctaatatataatataactaactagttatatactggtgactcataccccaatacttcatattcagacacagaatcatgacatatgcaaggactctaacaagactactggattgttcg

SEQ ID NO: 27876 - DNA, 446 bp, Glycine max
  Clone ID: LIB3108-043-Q1-K1-C3
attaagttcactgtcgacaagtttcgccccaacactcaactcagctcgctcttgttcttcggctccaggtatcaaacgaagtatagatatcatatcattgcagcttcattttcatccaccaattaactaacaatggcgcacacatcccttttcactccctcttcctctcttaggttcaaccctcttcttcttacctccaccccctcttcttcttcttcttctcgctccaacaacctttctttccccgctctctccaggaacctaaggaaatcggtagaagatagaaagattaacaaaaaatctgctgtgaaagcagtgtatggtgatgaattttggacacctgagaggagttcacgtccgggtatttggtctataaggagtgatttgcaagtcccatcttccccttattccctacctatgcacaagggcaagggccaccccccatg

SEQ ID NO: 27877 - DNA, 369 bp, Glycine max
  Clone ID: LIB3108-043-Q1-K1-C4
tggctgtgcgggataagttgttgattgccgggggttttcaaggagaacttatttgcaagtgtgtagatcgacctggtgttagcttttgttctagaactacttatgatgacaatgcaataacaaatgctgttgagatttatgatcatccaagtggggctgttcatttcatggcttcaaataatgactgtggagttagagactttgacatggaaagatttcagctttccaagcatttctccttctcatggcccgtaaatcacacttcattgagcccagatgggaaactggttgtgattggtggagacaacccataagggatactaatggatttctaaactggaaagactgtcaaggccttatgtggacact

SEQ ID NO: 27878 - DNA, 411 bp, Glycine max
  Clone ID: LIB3108-043-Q1-K1-C5
gcagggtggcctcagtcacacgtgcagggttcacagttagagcacaacaacaacaagtgagtggtgaggtacaaagcagccgtagggcagtgctttcacttgttgctgctggtttggccactggctcttttgttcaagctgtgcttgctgatgccaaatctatcaaagttggaccacctcccccaccttctggtggattgcctggaacgttgaactcagatgaagcaagagaccttcagctgccattgaaagataggttcttccttcaaccattgtctcctactgaggctgcacaaagggcaaaggaatcagccaaggagattgttggtgttaagaagttgattgaaaagaaggcttggccatatgttcagaatgatctgcgtctcaaggctgagtatttgcgctttgatc

SEQ ID NO: 27879 - DNA, 199 bp, Glycine max
  Clone ID: LIB3108-043-Q1-K1-C6
cccacgcgtccggatggtgtcattcttttattattacttgacttctgtaataagtgttccggggtcaaacccattgtggtgatttctaggttcgatactagatatctgtggaattgtgtatttgctgttgaagattgtctctgcctttttatgaaatgactaataatgagagattactaattttaattaataatctatt

SEQ ID NO: 27880 - DNA, 345 bp, Glycine max
  Clone ID: LIB3108-043-Q1-K1-C8
cccacgcgtccgcccacgcgtccgctgttatgaaatttgcagagattcgggctagaagtgggtagcagtcttcatacagcagaagtcaaaagcatattatagttatgattattattaatcatttcttgtcgtgtaggacttaatactgtctgaattattttctgtggcattttattgatttacacagtaatgtctggttgctaatgtttcctatggaagtttgtttgaactttatggcagctggttcctggtgtttcatgttgatacttttctgttgtcacagttgttttagacttttacttcattcactgattctaacttatttatagttttggtgatgagctt

SEQ ID NO: 27881 - DNA, 388 bp, Glycine max
  Clone ID: LIB3108-043-Q1-K1-D1
ctttcatataaaaaaaaaaaaaaaaaaaaatttaaaaaaaaaaaaaaaaaaaaaaaaaaaaaggaaaaaggaaaaaaaaaaaaaaaaaaaaaaaaaccccacgcttcccccaacccttccccttgagggaaagaacctttttttccttcccttaaaaaaactttttcgaacccccccggcctttgtggcccttattttctttattcgaccaaaagggggaaacccctggaaccgggtttaatatttccatattccggaattaccgttccaaaattctttccaacttttcaaacttttgaaacgttttcttaaagctcctaaattttcgcctaattcaatcggttttttcgggtatttccaaggttttttcctttaaattaaaggggtt

SEQ ID NO: 27882 - DNA, 429 bp, Glycine max
  unsure at all n locations
  Clone ID: LIB3108-043-Q1-K1-D10
aagaaacagaaacttttttctttgataattttgttctttgttccgacaatgcgtccaccgcggaagagggtggatttctcgcgcggcgacaaggtggagatctgcagcaacgaggagggcttcctcggctcctactacccggccacggtcgtgtcgcgcctcgacaacggcctctacgtcgtacgctacgacacgctcctcgaggacgacgcctcgttccagcccctcaccgaaaccctatttccgaaagagctccgtccccatccgccacgtgtccccaggacccacttcgcgctccaccagtgcgtcgacgccttcgacaacgacggctggtggctcggccagatcaccggcaagaaagacggcgagcattactatgtttacttttccaccaccaatgaagagatngcgtatcatgtntctggaata

SEQ ID NO: 27883 - DNA, 418 bp, Glycine max
  Clone ID: LIB3108-043-Q1-K1-D11
cggatctcaattgcaaacgcaggaaaggtgtttttgtttcgcagtgagctgagcctagtatcaacacaagcaataatttcagtaaatcaagacaatttttttttttttttgtctccgtgattacgattatttgatcatgctcttcgcttcagttttactttccaaatccacctgaataaaattttctgaatcacatcagattcaattgaattatacccctcaatgcaatggtggtctgcaaatgtcgcaaggctactaagttatattgcttcgtgcacaaagttcctgtctgtggggaatgtatctgcttcccggagcaccaaatctgcgtggtccggacttattcggaatgggttatagatggggagtatgattggcccccaaaatgctgccaatgccagtctgttttggaagaggg

SEQ ID NO: 27884 - DNA, 475 bp, Glycine max
  Clone ID: LIB3108-043-Q1-K1-D2
cccacgcgtccgcttgcatagactattgattaagaaagctattgtcattgatttgctagctgcaacaatgggttctagcagattatcattcattttagtacttgtgcttgtaaccttttcatccatgatcattgactcaagggttgcagaggcacgtaccctgccaaaatcagccttattgccttccaaagttgatatacctactgttgttcctcttccactggtggcaccactgccaaatttgcctgttactctccctccagtgcctgaactacctgcagtacctaaagtaccaattcctgaagtaatagttaataacgccaaaataatcccttgagtacctatgatctatccagtcactactacttaatttgtcacttgctaaattaacttgttgttgccatcccagggtggttctggttctgttggggtttaatttctgtcattcaattacatgctatgttcagtttatatg

SEQ ID NO: 27885 - DNA, 399 bp, Glycine max
  Clone ID: LIB3108-043-Q1-K1-D5
gcctctcgttcatataccagccgtggaatgattacaaatcgtctctgctgcagagttcaagcatgcactgacatattgaaagcgctaacttgcaacatgacaggaggtacactaacatacgttgctttaaaattgctacagaaactgcactgacataatatgatgatgacattgatgataatgatgaatatagacattacgcaaagtcatacattggcagcaaaagtgatagacaggccgatgcatttgaactttgcgatcaatcgtcatagcctgtgataggaaccataactactaaccctttagacatactgatttcactgaagatatactaatttgtgaatgaaaatgtaaaggatacagcagtctaataagctcaatgctaataccgagactaga

SEQ ID NO: 27886 - DNA, 426 bp, Glycine max
  Clone ID: LIB3108-043-Q1-K1-D7
cagtttcaggaaacacataaacaccacaaagcatcgcaatttcgttcaagaaatgagcaccgtcagcagatcacagtttcattcaacgaataaaaacctcagcagatcaccagcttcattcagcaaacaaaatcctcagcagatcacagcttcattccacaaatggaagtatctgatactatgtatttcattccaatgcttcctattatcttgttgatatccttcttgttgttaagaagcacagtttgctttagacataagttttttgatgtgaattcttgttatagttatactgtagagctgctgagtgcttatacaaacgacaataagcttctgtttctcatgtggagacatgtgtttaaaataagaaagaaactgtaaggagacaatgaaaagaaaactggaattcatactttcctttaaaaa

SEQ ID NO: 27887 - DNA, 458 bp, Glycine max
  Clone ID: LIB3108-043-Q1-K1-D8
cccacgcgtccgcccgagtgcaaatccaaaattccaaactcagaaaccgccatctgtgggggcacaatcactccctttttctctctcttctttttctttcatgtgaagcttttctatcacattacagacatagcccacaatttttgaccctctctctctctgattcagtggagatgaacacttgccagttccggctcttgaactctttctccacttagtgtgccagccaagaaggactcttcatggctgcaaagcgcgtgtaccaagtttggaaaggaagtaataaattcatatgtggagggaggttggtattcgggcccgatgctaggtccctgtttgtcaccttgttgctgattattgttccagttataatcttttgcatatgtgtagcaaggcatcttcggcatgaactttcttcatataattctggatatgctattttagctgtggctattctc

SEQ ID NO: 27888 - DNA, 147 bp, Glycine max
  Clone ID: LIB3108-043-Q1-K1-D9
cccacgcgtccggtcgtcgtgaaggtggttactttcataatggaggggacttaggacgacgagtgcggcacgcgtagagaccgtggttacggaattcatacacgttatcgctacactcagctgggcgtagccacgtggatccgattg

SEQ ID NO: 27889 - DNA, 403 bp, Glycine max
  Clone ID: LIB3108-043-Q1-K1-E1
ccaatatattccattctctctgtgtatttccctacctctcccttcaagatgcagatcttcggcaagaccctcaccggcaagaccatcacccttgaggtggaaagctctgacaccatcgacaacgtcaaggccaagatccaggacaaggaaggaatccccccggaccagcaacgtctcattttcgccggaaagcaacttgaggactgccgtacccttgctgactacaacattcagaaggagagtactcttcacctcgtacttcgtcttcgtggtggcatgcacatcttcgttaagacactcaccggcaagaccataaccctagaggttgaaagctccgacaccatcgataacgtcaaagccaagatccaggacaaggagggtatccccccggaccagcaacgtc

SEQ ID NO: 27890 - DNA, 372 bp, Glycine max
  Clone ID: LIB3108-043-Q1-K1-E10
cttacgcctccgatcaataaaaattacttattatcatgaaagataatcaaaatgcaagttctctaaccacataaagccgtcctggaaagcaaattcagatcgagcatgctttgactgactgtcgaatctcgacaaacgtattttggaattaaagctacaaatggactcgacattgctaccgaaaagaaattgccatctatatctgatgatgaagcatcaatccaaaaaattcagctattaacaccaaatatacgtgtcgtatatagaggcatgtttcctaattttcgactttaggatcagaaaaacatgaaacaagcctatcagtatcaccagtttatataaataaccaaatcctgacactcaactttacat

SEQ ID NO: 27891 - DNA, 418 bp, Glycine max
  Clone ID: LIB3108-043-Q1-K1-E11
cccacgcgtccgcccacgcgtccgcttctcaattttcgtacaatacaaacactttctggcggatttcgtttcatggaatcgccgcattcatagcacaactcttcaaaatgtattccttcaaagacaaagttacacagaaactctcccatctctttcccaactcctcctcctcctcgccccaggatagtccatattcgcaagaggataaacctttgtcttcatatttatcttacattatcccttccatcagctttgatggatcgaagtcaaacaagaatcaacatgaacttaaaccaattcaatcggcttcctctggatataattatgagaattttgaatatcatgatgttccatcggataattatgttgactgtactaacatggatttgttgaaagatgataatgataatattaatga

SEQ ID NO: 27892 - DNA, 426 bp, Glycine max
  Clone ID: LIB3108-043-Q1-K1-E12
ctcttctttctctaacggccagacacactagcaaagcaaattaatatccatttggcgtgtcatattcaagaggatcttctattgactattgaatgatgaagatgagttccaaaagcgagacaataaaaccaaagactgattttgaactcgttctaaattattctaatcaaggtatttggaaagatgactcgggtgcaggtgcaaatgcagcttgtcgaatagacaagacattttctgccactgaccccctatctgaaatagtttggtctccagataaaagtttcggtctcaaatgtgttgattcaagttttactaataaaaagacctctcttttgggggaatgttgaactaagcattatggttcttgctctgctccaaagtgttactgatgaaagttctgccacagataaaccaacagatgacgtt

SEQ ID NO: 27893 - DNA, 301 bp, Glycine max
  unsure at all n locations
  Clone ID: LIB3108-043-Q1-K1-E2
cccacgcattcgattgcatatgcgaatgatttaccatgtacctgccatatgcatacacacggcaagagtctgatcgagtagaccatcaaccatgatagcgactgctcttacaacatcnacatcaaagatgataagatccaggacccgctaaggctacccctgtacgagaatcgtttatattgcttcggaaagctgcttgaccactggctgtaccctagactactactgcctccacaaggatagatgtctctaactcgtcctccgtcgccgcaaatacatgcagatcctaatggatacactt

SEQ ID NO: 27894 - DNA, 147 bp, Glycine max
  Clone ID: LIB3108-043-Q1-K1-E3
cccacgcgtccggtttttacacattgtacttgttagcttttcttcgagtcttctgttcaaaggagtctcaaaaacagtataattaaatttaaaatgtaatgatcaacaagttttaaacaaaaaaaaaaaaataaaatttatataatt

SEQ ID NO: 27895 - DNA, 230 bp, Glycine max
  unsure at all n locations
  Clone ID: LIB3108-043-Q1-K1-E4
aattggaggaggcatttacaaaggaattggttttggaggggttggaggtggtgtaggtgcgattggtggtgttggtggtgtcattggtggtttcaagcatgttgaacccaacaagccttgaaaaatcaattgagttaattacgtacgtacgttcaataatttcagatttttgattataattactaatattagtgttttattattacatttatgtnttgctattgttaatt

SEQ ID NO: 27896 - DNA, 274 bp, Glycine max
  Clone ID: LIB3108-043-Q1-K1-E5
aaaaaaaaaaaagacaactcactgtattcgttataaaaaggaaaaaaaaaaaaaaagggaaaggaaaaaaaagaaaaaggaaaaggaaaaaaaaaaaaaaaaaaaaaaaaagaaaaaaaaaaggacaacaaaaataaaggatgaagctaagataaagacaagtacgaagatatagccaatatataggataaagaaagtaaattgaaaaagctcaccaaataaaaggacaaggctggaaaaacataggtgaaaccaaaaagaagttatttgaagt

SEQ ID NO: 27897 - DNA, 318 bp, Glycine max
  Clone ID: LIB3108-043-Q1-K1-E6
cccacgcgtccgcccacgcgtccgttcacgtttggcagctctcaactctgctgctgatagggatcaatatgatgagtgaaaggtcattgcagatgccttctcatggctacactagtagaaactatcttatttggtatctacagaatcattttcttgaaaatttatttgcctgcctgtttatgtctaggcccaaaatttggatactctctttggagtatagtaagccttaattttggtcaatgtcaggttagtatgaatctgaagatgtaccttggctttatggatcactactttcactatagcaatgctcgtataaga

SEQ ID NO: 27898 - DNA, 358 bp, Glycine max
  Clone ID: LIB3108-043-Q1-K1-E7
gacactcgtacagacagtcgcacatttacattttgcaaatctcaactctggcaagggctacgatcaatttgctgaggggactggacttaccaacgcctattcatgtctacacttgaagaaactatcttatctgaaatccacaaatgcatctctacttaaatctattctcccggctctgtatttctaccttcaatctgatataactagactctctatgagagcttatctatcctattctcatatatgaccccactttgtatatgttgaattaaactgttatgcatctttacgtagagtgtctcagacataattcttgtggaatctggtgatggtatcatcgtatcaatagatttttact

SEQ ID NO: 27899 - DNA, 260 bp, Glycine max
  Clone ID: LIB3108-043-Q1-K1-E8
cccacgcgtccgcaaatacggtgcttatgtttatggttacagtactatctacgaggccaaggactggtctccaaccggtgatgtctacgctgacggtacgactggcttgcctatctggactgtgactctacttggtcttcttgctggtggtgcacttcttgtctacaacacaagtgcttatggcacaataaactttgcaaatttatgttttaagcttaaacttagtctcatgaactatctattaatgaataagtattcat

SEQ ID NO: 27900 - DNA, 394 bp, Glycine max
  unsure at all n locations
  Clone ID: LIB3108-043-Q1-K1-E9
gggaacctcaacccaaattttagtctttttaattttaattattattattattatttcggccagaactttaggggtgcattgcaaatggcttccgttgttgcaagcttgccgccaccattgctgctccctgctagaaaatcacatatgggcaacttcccaagttcccctgtttctcttctttcagggagatggaatcgtgtttcttttgttgtgaaggcttctggagaaagttctgaatcttcaactactcctactgcttttaagtctgttcagaatatttgggatcaacctgaggaccgactgtgacttatnggtttgggaattgcagccgtagcagcgttttgggcattaacaaatttgattgctggcattgacaaattggccactttttcca

SEQ ID NO: 27901 - DNA, 452 bp, Glycine max
  unsure at all n locations
  Clone ID: LIB3108-043-Q1-K1-F1
cccacgcgtccgtgcaaaaatggcatcatttaccatgacagcttgcatccttggcggcccagccgtgaccaaccggttggcagtagcaacgcagaggagatcactcgtagtgaatgctgccaaagctgttgaagcggaaaaggtcagttatgacaatgacatggatggtagcaatggaaggaggaacttgatgttcgccgcggcggcggcggctgctgtttgctctgttgctgggatggcagtggcagatgagccaaaaccaggaaccccagcagccaagaaaaagtatgctccgatttgtgtcaccatgccaactgctaggatttgtcgcaattgagggactcggtttttattttacttctgatgatcggaaatgtgcattangggtgtagtaatgttttgattcacatgatccttactggactagatgttcataaaactatcgactttgc

SEQ ID NO: 27902 - DNA, 396 bp, Glycine max
  Clone ID: LIB3108-043-Q1-K1-F10
cccacgcgtccgagaaaccctaaattgtagagaagagtgaagattgagagttagggtttaagcgagatcagagaagaaggcatcatgtttccgggaatgttcatgcgcaagcctgacaaagctgcagcactgaagcagctgaaatctcatgcggccatgttcgggacatgggttgttgttattcgagtcaccccttacgttcttcattttctctgcgccgagaaagaggaacttaagctcgagctttagcttctcaatcttccccgccagtggatcttcaggagtaggatgtgtccttgggtttgggacaataatggagtaatgtttttatgtaaccttgaaattgtgaggccatgatgatatattgagtttaatcatatttccttttgcatttgg

SEQ ID NO: 27903 - DNA, 412 bp, Glycine max
  Clone ID: LIB3108-043-Q1-K1-F12
ccgacgcatcctcccattcgaccttccatacgacctatgcgaacagcccgcgcgtccgtattctaaaaccatttttcagtacttcactaaatgataaaaaactgctaattcttcatttgaaaaaaacaaaaaacaaacactacaaaaacaataactacacaaacaactacacatatactaatcaaaaactgaactcacagtctagataatccaactttacaaaccctgacatgcaacactttaacactcttatacttctacctaacaccaacaaactggccgccatatcaacaaatactcaactacaaaaccatgactgtacccaactataatcccttacaatacatatcactttaccacattcacgtacacctaaaaaggccaagaccgatcaaccttcccaacaatttca

SEQ ID NO: 27904 - DNA, 410 bp, Glycine max
  Clone ID: LIB3108-043-Q1-K1-F2
cccacgcgtccgtgcaaaaatggcatcattttccatttcagcttccatccttggcggcccaggcttggccaaccggttggcagtagcagcgcataggagatcactcgtagtgaatgctgccaaagctgttgaagctgaaaaggtcagttatgacaatgacatggattgtagcaatggaaggatgaacttgatgattctcgcttcggcttcggctgcttgttgctctgttgctggtatttcattgtcagatgagccaataccaggaaccttatcttccaagaaaaagttttcttcgaattgtgtcaccatgccaactgctaggatttgtcgcaatttagggactcgggttttattttacttactgatgatcataaatgtgcattagggttgtagtaatgttttgatttcac

SEQ ID NO: 27905 - DNA, 477 bp, Glycine max
  unsure at all n locations
  Clone ID: LIB3108-043-Q1-K1-F3
ccgactctcattcccaacctaactttcttccctctctctctctcacatctataagcaaccaggccaatcccatctctctctcgcaaaccacgacgacgacgacgatgttgggtgtcctccgcagcaaggctgggttcctccgccgcctcacctccctctccgtcccccttcggcaccggtcgagcaaggctgcggcggcgggtggacatgtggtggaggttgacatggcggagtacgacgtggcgctgaagcacttcgacgacctaatccagcgcattctcgtcaagaagaacacaccggactggctccccttcgtgcccgggtcctncttctgggtcccaccgcgcctctctccctccaacgtcgacgaccttgtccacaagctctcctacgaggaccaccgtcacccncacgattgctcccctctactctcaccctacgcggctggcccttcgacaattcttcatcgatgagaat

SEQ ID NO: 27906 - DNA, 61 bp, Glycine max
  Clone ID: LIB3108-043-Q1-K1-F5
ctgggacataagagtattctatgatattttcaatttttaatgaatgttaagtttaggatct

SEQ ID NO: 27907 - DNA, 59 bp, Glycine max
  Clone ID: LIB3108-043-Q1-K1-F6
ctcacacatacgagtattctacgatatcctttattcttaatgaatcttaactttaggat

SEQ ID NO: 27908 - DNA, 340 bp, Glycine max
  Clone ID: LIB3108-043-Q1-K1-F7
aacacgcgtacgaagccaagctgtgactgctgtttgaggtagcttgcatggggttcttgagggaaaaagccctaggttacagcaatgatcgtcatcattctgtagctagacaaagtcagtactaacattgatgagagaactcaagttgcttatggatccaagaatgagatcatcctgtttgaagaaaccctgtatggtaaatgcaggctcaaggatggggtagctgttggatcatctgcttaatccgatgaacctgcgattcattgactatgctatctgctattagaataaaagctatgtgctatatcttgagacaagtacctgcaactgagtcacatat

SEQ ID NO: 27909 - DNA, 349 bp, Glycine max
  Clone ID: LIB3108-043-Q1-K1-F8
gccgaacggcctcacacactttgaggctgttgatacacgtgccaaggagtatgtgagcctggtcaaatccaatgaccctgtgggattcaacattgtagatgtctaggcttgaagctccattggccatgttgttgcttactacatcttgtccaccactagcgatggctatgaccctgcattctttgtctgatttaatttcatcatcatgttgttccaactgtgtttcttgcgtactttttagtatgtaatgtaatcaatggcatgatgtatatattctcttttaatattcatcgatttcatcatatgctaatttgatcactattaccggctgcaaataggtttgctatta

SEQ ID NO: 27910 - DNA, 92 bp, Glycine max
  Clone ID: LIB3108-043-Q1-K1-F9
ctagctcgtgcgctatcgaccttagattttaactttaacacatccataacacattaggcgccggatactaaaaacaacattacatacacaaa

SEQ ID NO: 27911 - DNA, 114 bp, Glycine max
  Clone ID: LIB3108-043-Q1-K1-G1
tctcgtcacgtaccccttcaatgcatgagtccttaagttaaaaaaaaaataaaaaaaaaaaaaagaaatattaaataaaaaaaaaaaaaaaaaaaaatatatataaaaataaaa

SEQ ID NO: 27912 - DNA, 412 bp, Glycine max
  Clone ID: LIB3108-043-Q1-K1-G10
catgcccatttttcacaccaccaacactttatgtttctccacattgtgttcctccttggcctgctctcatccacttcccatgccactgtccaagacttctgtgtggcagacctcaaaggtgcagacacccctgcaggctacccctgcaagccacctgctaatgtcacttcagatgactttgtgtacactggcttagctgaagctgcaaatgtcacaaacataatcaatgctgctgtgaccccagcttttgttgctcaattcccaggtctcaatggccttgaactatctgcagcaaggttggaccttggtcctagtggtgttatcccactccacactcatcccggtgccaatgaactactcattgtgcttcaaggtcacatccttgctggattcatatcttcaggtaacatat

SEQ ID NO: 27913 - DNA, 224 bp, Glycine max
  Clone ID: LIB3108-043-Q1-K1-G12
ccgacgcgtccgaggaaatctcatggtatgacaagaaattcatcctcactcggggaggggtaaaacatcgaagtgattgctctatccaaagacatgtctttagattgctaatgttgtattcatctgcagtgattagcataattaccctacttatagtgtgttctttatgagttctatataaatcatgagacagtacgtacatcttcttcaaattactgttctct

SEQ ID NO: 27914 - DNA, 278 bp, Glycine max
  Clone ID: LIB3108-043-Q1-K1-G2
cccacgcgtccgcccacgcgtccggttttgtacaacagttttattgagctgaaacaagtgtgtctccaaaagtgctgctatctttccatgacaattatttttttattcataaaagtggttacttaagattaaaaaaaaaaaataatattacaaaaaaaaaaataaatttaaattaataataaaataatatatattagatttaaattaaaaattaatatataaaaaaaataaataaattatatattgttaaaaaaaaaaaaaaaggggcgtccctttta

SEQ ID NO: 27915 - DNA, 440 bp, Glycine max
  Clone ID: LIB3108-043-Q1-K1-G4
cttcccttcactctcagttctgccacatattaacattccggcgcaaaatgaaggtcatcgccgcctacttgctcgccgttttgggaggcaacgcagccccttccgccgatgacttgagggacatccttggctccgttggagctgacgcgaacgatgacaacatcagcaacttcttgtctgaagttaagggcaaagacattgtggagcttatcgcctccggtagggaaaagctggccttcgtgccttctggcggtggcgccgccgttgccgttgctgccgctcccggcggtggccctgctgcaccggctgccgccgaatcgaagaaggaggaaaaggttgaagagaaggaggaatcggatgacgatatgggattcagtctctttgattaattgttagggtttttaaacccttggtcgggacatattgtcgaattagagttc

SEQ ID NO: 27916 - DNA, 455 bp, Glycine max
  Clone ID: LIB3108-043-Q1-K1-G6
cccacgcgtccggtctgaggttgaagctactctcaacttgaatgccatgaaccagtctcgggacccgtggcacgtgtcgttctcgtatgccagagccctccaaaacactgccttgaagacatggggaggccgcccagagaacgtgaaggcggcacatgatgcactccttttccgtgccaagtccaactcgctcgcccagcttgtgaagtacaccggtgagggtgaatcctaggaagccaagaaggagttgttctgcaaaggctactcctactaagatgtatgtaaggaatatgatacatgttaggcagcagcaacaccagcaggtatagtaggtggtgacggaagatgaagtggaagaagactaatttgtctaaaatgtaatgcttttatagtcttggagactatttgcgtttattgttacatgtacctttacagcttataatacctttgctgtg

SEQ ID NO: 27917 - DNA, 475 bp, Glycine max
  Clone ID: LIB3108-043-Q1-K1-G7
gggtgggatgggttttatccagtccaaccactcagtcattatgtacaacaacaccatgatgagcttcaacatgattgaggctgccaggatcaatggtgttaagaggtttttttatgcctctagtgcttgtatctatcctgaattcaaacagttggagacaaatgtgagtttgaaggagtctgatgcctggcctgctgagccacaagatgcatatgggctggagaagcttgcaacagaagagttatgcaagcattataacaaggattttggaattgagtgccggattgggagattccataacatatatggtccttatgggacatggaagggtggaagggagaaggctcctgctgctttttgtcgcaagacacttacttccaaagatcgatttgagatgtggggagatggattgcaaacaagatccttcaccttcattgatgagtgtgttgaaggtgtactgagattgactaaatca

SEQ ID NO: 27918 - DNA, 394 bp, Glycine max
  Clone ID: LIB3108-043-Q1-K1-G9
gacacgcgtgagtccgtgtatgatccatgttgttttttcagagaggacaccgtgaggcgtgcgaatcactcatactaacacaatcgcagactagtatgcatagttgactgtcgtactgcaattggtttcgtcgtgatgggattcgtcggtttcttcgtgaagctcattttcattccaattaacaacatcattgtcagatctggttatgatgaagggaactactatcgcatcataacttacgttgtcaagcataaggatgtagacagataacctacatcaatagatcattttatgcacctaatcttagtgctaaacccatgggggctccaacttatatctggaagcgttaatttagatgttaaaagttatttatcctctgttagaccttgacaca

SEQ ID NO: 27919 - DNA, 414 bp, Glycine max
  Clone ID: LIB3108-043-Q1-K1-H1
cccacgcgtccggcgaagggaatggtgccttgggaattagaatggctctccttggatcaaagataacaagcgaggttggactccgtttgctcctttgtcctcttggttccaacgttgtaattagaacagcatgctgtactgtgggagttgctttgcctgtgtactctacgttcaaggcaatagaaagtaaagatcaagatgctcagcataagtgtcttctctactgggcagcctatggttcattcagtctcgctgaagtgttcacggacaagcttatttcttggtgtcctatctactatcacctgaagtttgcatttcttgtttggcttcaacttgcatctaccagtggtgcaaaacaaatatatgcaaaccacttgcgccccttcttgttgaggcatcaagcacgagttgatc

SEQ ID NO: 27920 - DNA, 305 bp, Glycine max
  unsure at all n locations
  Clone ID: LIB3108-043-Q1-K1-H11
acgctggatacctatgcacccaaaaattaggtttttncatctaagcgacaaaatgcgtaggggaatttaaaataagcgtacatcctgagattcccgatatacgtcaacctttccaactgctgctgaatccacgggcatgcaagagacaacctgctgaacttacacatattacttgccacacttaatgcactctcactcaatcttcttcgcagaggaaccgaaaacactctgtctcaaccatgaaaactttctcttccgagatctatacaactgcctcactgctagactacgcactttaaaatgct

SEQ ID NO: 27921 - DNA, 359 bp, Glycine max
  Clone ID: LIB3108-043-Q1-K1-H2
aaaagcaagagatccccggaaaaattatttgtacttttggacatgtatgaaataatgcaagaacttcattcagagattgaaactctttttaaaggcaaagcttgctctgcaataagagaagctgcaactagtttgacaaaacgccttgcacaaacagcccaggagacctttggagattttgaagaggcagttgagaaagatgctacgaagactgcagtaacagatggaactgtccatcctctaacaagctatgtaattaactatgtgaagtttttatttgactaccaatccaccttgaagcaactttttcagaaatttgaaggtggtgaggaatcttcacagctagcatctgtgacagt

SEQ ID NO: 27922 - DNA, 423 bp, Glycine max
  Clone ID: LIB3108-043-Q1-K1-H3
cccacgcgtccggaaaaaatggcggtgcctcttctctcgaagaagatcgtgaagaagaggctgaagaagttcaagaggcctcaaagtgacaggaagatttctgtgaagacaaactggcgcagaccaaagggtatcgattcccgtgttaggagaaagttcaagggatgcactttgatgccgaacattggttatgcttcagacaagaagacccgtcactatctcccgaatggtttcaagaaatttgctgttcacaatgtgaaggatttggaactgctcatgatgcacaacaggacttactgtgctgagattgcccacaatatatccacaagaaagagaatagatatagtcgagagagccgtgcagcttgatgttggtgtgacaaataaaacggggcagattacgtagccaggatgatgaatagtc

SEQ ID NO: 27923 - DNA, 463 bp, Glycine max
  Clone ID: LIB3108-043-Q1-K1-H5
cggacgcgtgggtagccatgttcgatccaatatccagcactggtgtcttgagaggatgagtagcgagaggaaagtgaagcaaagaacgatgagtaccaacagaagaagagagtaatggagttccctgattagtttccaaaatcaacaatacaaaaccacacaaatttcattcatatgttatcaaagccaagtgatgtacctattggaaggtgttgagggatgccaaaatggagcctctaatccagacactgtacttcctctttggtggtgccaccaccttaattttcatgctgcttggtgctaatgttgtgatctccttgctcatcctatcagcaatgccacggaacattgttgagccatcaccacaatgttaccatagaggtccttcttgatgtcagtatttccaaaatgattttctaaagcattggcagatgcaagaaagtctaccaaactcttcaacagc

SEQ ID NO: 27924 - DNA, 238 bp, Glycine max
  Clone ID: LIB3108-043-Q1-K1-H6
cccacgcgtccggtaaagcctgatctccgttataaggtgctccccgctgtcatgggtcgggagcgcaagccgtggggcctaaaggactgtgtttacatgtacttcgaagataatgctggggtcatagtgaatcccaatggtgaaatgaaaggttctggtatcactggtactattgtgaaggcgtgtgctgatctgtagcccaagattgcaagtgctgcaaatgctattggttaagctg

SEQ ID NO: 27925 - DNA, 319 bp, Glycine max
  unsure at all n locations
  Clone ID: LIB3108-043-Q1-K1-H7
ttcccgggttcgactccactgcgtctcgtatcataaacatacaacccattcnnattcatacctcgatcactnnntccttgcctnnattgcacattcgtgtcatcgacgttcattcatnacatttctctcttcccttagctttagtttttactcaatgnngctgctgcggttcagtgctnnngcagtctcttttccattccatccaagtctactctctcttcccaagccaggtaacctccatcattactcccagtagaggagggttgtattcatagtaaggggcttcatttgcaataccagagaaatgtttgtaagcaag

SEQ ID NO: 27926 - DNA, 276 bp, Glycine max
  unsure at all n locations
  Clone ID: LIB3108-043-Q1-K1-H8
cacacacatagaaactcaacaactagaatgtatatgatgattcttacccacttgttcaaggtcaatttatctgtgctatcaatttctcacgcttccgtagtagactattgcgttgcttactacacatgccccgttggcctggcaacgtgctcatgcatgagcaccgctaaggtcacggatgaccacttcatctacttgggccttggcaccgccgggaacaccanatacatcatcaaagccgatgagactgactccttcgacgcgcaattcaacggc

SEQ ID NO: 27927 - DNA, 416 bp, Glycine max
  Clone ID: LIB3108-043-Q1-K1-H9
cccacgcgtccgggcaaaggaatcagccaaggattttgttggcgttaagaagttgatggaaaagaaggcttggccatatgttcagaatgatctgcgtctcagggccgagtatctgcgctttgatctcaacactgtcattgctgcaaagcctaaggatgagaagaaatcactcaaggaactcactggcaagctcttccaggatatcagcaatctggatcatgcagcaaaaattaagagcagcccggaagcagagaagtactatgctgctactgtatcttctctgaacgatgtccttgccaaacttggttaatgtgattaatttcttgctttcttgtgtaagctttgtgcatgattttctcagacactttattgactgatattttaagaaaatcaaatgatgagggaaaattttctat

SEQ ID NO: 27928 - DNA, 412 bp, Glycine max
  Clone ID: LIB3108-044-Q1-K1-A10
cccacgcgtccgcccacgcgtccgcccacgcgtccgcaaaaccccgctttcgagaggcaacagatagcaatagcataccttcggtcatcttcacttcacgctctcttggaggtagctagtcactcttccattttcgcttcaaaggaagaagaatcccaattctctctcgttgggaatgaaccttctctctctaaccttgccacttgccctttttcgttcatctctttctgtaacgagacttccctcatttgcctcttcatacaagtgcacatccggcgcagttttaaggagatgtgtcaaagacgaaaaggacgaggagcagcttctagaagggatgccataggagtactatgaccatgaatggcaagcccaacaacgtgagaagaccaaggagttgcatcggctacggata

SEQ ID NO: 27929 - DNA, 413 bp, Glycine max
  Clone ID: LIB3108-044-Q1-K1-A11
cccacgcgtccgagaaattatagcttcacttaactgtttccgtgtgctctacgccccacaaggcccacatcgatatgaatcgcgtggggaagagcaagaaacgttggagattcgtcgaaaatggttgcggaagaaactagagagggcgatgaaggtgttgtcagaaattttggtgtggccaaagaagagtttttctttgcggaggttgaggacgtgtattagtgaagccaaggaaatgaaaaggaaaatgcaattccagtatgatccaagagttatgcgcttaattttgatgatggatcaatagaggaggatgatggtgtttttcttgatttctcggctcggtatgcatgtccattagggataaacaagctatatttggaatgggagcacagtgaagcttaaacattcttaat

SEQ ID NO: 27930 - DNA, 425 bp, Glycine max
  Clone ID: LIB3108-044-Q1-K1-A12
ctttctctctctttgtaacttgtaagcatggagtcctcaaagatctatgcttacctcttcctttgcatgctcttcctctcctccgccactcccattctcggttgtggctactgtggcaaaccccccaaaaagcacaagcctggtaaaacaccaaagacacccacagtacccgttgttaagccaccagtcacaatccctcccattgttaagccaccagtcacaatccctcccattgttaatccaccagtcacaatccctcccattgttaatccaccagtcacaatccctcccattgttaatccaccagtgacagttccacccgttgtgcttccaccaatagtgaagcccccgggttttctccctccaattcttaacccaccaagtacaccaacaccgtcgccggggaagggagggaacactccatg

SEQ ID NO: 27931 - DNA, 462 bp, Glycine max
  Clone ID: LIB3108-044-Q1-K1-A2
agtttatgtacccgcagacgatttaaccgatcctgcgcctgctacgacatttgcacatttagatgctactactgtactatcaagaggattagcggccaaaggtatctatccagcagtagatcctttagattcaacctcaactatgctccaacctcgaatcgttggtgaagaacattatgagactgcgcaaagagttaaacaaactttacaacgttacaaagaacttcaagacattatagctatccttggcttggacgaattatccgaagaagatcgcttaaccgtagcaagagcacgaaaaattgagcgtttcttatcacaaccttttttcgtagcagaagtttttaccggttcgccggggaaatatgttagtctagcagaaacaattagagggtttaaattgattctttctggagaattagatggtcttcctgaacaagccttttatttggtaggtaatat

SEQ ID NO: 27932 - DNA, 207 bp, Glycine max
  Clone ID: LIB3108-044-Q1-K1-A3
catacacatggctcaaagccgaattgtaaaatgggccggatatgggccacagcgtacgatttgggccgcagcatggcccgggtgctggctctgtaccggcaaatactgcgtggtctgaacttatcggacttgcagttgggcttcgaaacgaggctgtcgaagaatgcctatgcacgtgcactgcactgggtggtctgagatgaacgc

SEQ ID NO: 27933 - DNA, 468 bp, Glycine max
  Clone ID: LIB3108-044-Q1-K1-A4
acgcgttcgtccacgcgtccgtccacgcgtccggataagtaaaaatggcgcagtgtgtgaccaaaaacacattcgtgcaaggaaaacccttccttccagttccagcagctcccactaaaaatgttcggagagtggttcagtgcggtgtgtggtgcaggaagaaggagatacacccgcaattccacgaggaagcgaaggtgtactgcaacggggagctggtgctgacgacaggtgggacccagaaggagtacgtggtcgacgtgtggtcggggaaccaccctttctacctcggaagccggtcggcgtctatggtcagcgacgaccaggtcgagaagttccgcaagaagttcggagagctaaaagagatcatggagattcctgttctcaagggagagattggtatcccctcaagacgcaagggcgtttccaaaggaggcaagaaaaaataatttattcgaatcaaacatg

SEQ ID NO: 27934 - DNA, 459 bp, Glycine max
  Clone ID: LIB3108-044-Q1-K1-A5
tgcaattttgcctaaagaatattcaattgattccgttatcaggtcattacaagtgggctctagatcaactgttctacaagcataacttcagtcgtgtaatcatccttgaagatgacatggaaatagcacctgatttctttgattattttgaagctgcagcgagtctccttgagaaggataaatccattatggctgtttcctcatggaatgacaatggacaaaagcagtttgtacatgatccatatgaactttatcgctctgacttctttcctggattaggatggatgctggccagatctacatggaatgagctatcaccaaaatggcctaaagcttactgggatgactggttgagacttaaagagaatcataaaggacgacagtttatccggcccgaagtatgcagaacatataattttggtgagcatggttctagtttgggacagttttttaagcaat

SEQ ID NO: 27935 - DNA, 451 bp, Glycine max
  Clone ID: LIB3108-044-Q1-K1-A6
ggtgttcaacaaggaacatcccgacaacaaagcagtgtctgctgtgggcaaagctgctggagcaaaatggaagacgatgtctgatgctgaaaaagcaccttatgtggcaaagtctgagaaaaggaaagtggagtacgagaagaacatgagagcttataacaagaaacaggcggaaggtcctactggtggggatgaagaagaatctgagaagtctgtatctgaggtgaatgatgaggatgatgacgaggaaggcagtggcgaggaggaggatgacgattagagaatggactgatgataatagcatttatgtaggttctgatgattttgatcatccgtgtaggtggtctggtcatttccttataaacatatttctctttccaaaaaatatttccctgctcctccttccgtaaattgctcgtctttccaaaacgtgaatagtttaaagaaggga

SEQ ID NO: 27936 - DNA, 460 bp, Glycine max
  Clone ID: LIB3108-044-Q1-K1-A8
cgaaacagagggattataaaaagagaagttactcgatagttcaaatcagaagatggttcctgtcacaccaactcaataacagatcaaaccaaacccaaactgttaggtttcctttgtttggtgtgaagccatggctgattcttcttccaacctgaaatccgacgcgataatggagcagatgaagcaacacctcgccaccgacgctggcaaacaagtcaccaataaaattggactcgtttatcagtttcacattgctcctaagaaacttggattcgacgaggtcgtctacaccgttgatctcaagaaaggagaggtcaccaaagggtcatatgaaggaggaaagcctgatgcatctttttcgtttaaggatgaggactttgttaaggttgccttagggaagatgaatccgcagattgctttcatgaggcgtgcgatgaagattaagggaagtttgagtgct

SEQ ID NO: 27937 - DNA, 428 bp, Glycine max
  Clone ID: LIB3108-044-Q1-K1-A9
cccacgcgtccggtgaagcccccgggttttctccctccaattcttaacccaccaagtacaccaacaccgtcgccggggaagggagggaacactccatgtccaccaccaaagtctcctgcacaggctacatgccccattgacacgctcaaactaggtgcttgtgtggatcttcttggtggcttggttcacattggcttgggagaccctgttgcgaaccagtgctgccccgtgcttcaaggcctggttgagcttgaagctgcggtgtgtctttgcaccactcttaagctgaagcttctcaacctcaacatttatgtcccacttgcccttcagcttcttgtggcttgtggcaagtctcctcctcctggttacacctgctccctctaaaccagtgaaaggattgaagaaaatatggtcaaaatcgacatgag

SEQ ID NO: 27938 - DNA, 335 bp, Glycine max
  Clone ID: LIB3108-044-Q1-K1-B1
gtcagaatcagaatcagaagaagcgagcaatgatgtcgggtcgtggaaagggaggcaagggtttgggtaagggaggagccaagaggcacaggaaggtgctccgcgataacatccagggaatcacaaaacccgccattcgccgtttggctcgcaaaggcggcgtcaagagaatcagtggcctcatctatgaagaaacccgcggcgtccttaagatcttcctcgagaacgttattcgcgacgctgttacctacaccgagcatgctaggaggaaaactgttaccgttatggatgttgtatatgctctcaagaggcagggcaggactctatatggtttc

SEQ ID NO: 27939 - DNA, 443 bp, Glycine max
  Clone ID: LIB3108-044-Q1-K1-B10
tcgcgccatacccctgagggtgctaaacttgaagctgagtggaatgccaagtttgcagaatatgagaagaaatacagtgaggaagctgcagagctgaaggctattattactggtgaattaccagctggttgggagaaagcactttcgacatacactccagaaagccctgctgatgctacaagaaatctgtctcagcaaaatctaaatgcccttgttaaggttcttcctggtctacttggtggcagtgcagatcttgcctcttccaacatgaccttgttgaaatcatacggagatttccaaaagaatactcccgaagagcgcaatgttagatttggtgttagagaacatggaatgggagcaatctgtaatggtattgctcttcatagccccggattcattccatactgtgcaactttctttgtcttcactgactacatgagagc

SEQ ID NO: 27940 - DNA, 428 bp, Glycine max
  unsure at all n locations
  Clone ID: LIB3108-044-Q1-K1-B11
gtcgtctcttcctcttcgcaacaatggttgccgccaagaaaaccaagaagacccatgagagcatcaacaacaggcttgctcttgtcatgaagagcggcaaatacacccttggttataagaccgttctcaaatctcttaggagctccaaagggaaattgattatcattgctaacaactgcccccctttgagaaagtcagagattgaatactatgccatgttggcaaaggttggagttcatcattacaatgggaacaatgtggatttgggcactgcctgcggcaaatattacagagtgtgctgccttagcattattgatcctggtgattcggatatcattaagacactgcctggtgaacagtaaagtagtgttgaagttacttgcttgntattttctggttttagttgattcggactttgaaagaatatc

SEQ ID NO: 27941 - DNA, 434 bp, Glycine max
  Clone ID: LIB3108-044-Q1-K1-B12
cggcgtcatctcgatccggtcccccggcccctactcaccctccaacgccaccatgctctgcctcatcaaaaccctaccctacaacgtcaccatcttcgccgtcaattccctcctcatccgctacggcctcgacctcatggcctcggaaacccgtcccaacattgttctcaacatcaccaatgccctcgtcaacggccacaacttcaacgtcgccgcctccatgctcgctgcgtccggcgtcgtccaggagtttgaagcggacgaaggtggtgccggaataacgctctttgtcccggtggacgacgcattcgcggatctcccaccctcggttgctctccagtctctgcctgcggataagaaagccgttggtctcaaattccacgtgctacattcgcattaccctctcggttctcttgaatccgaggttaaccctt

SEQ ID NO: 27942 - DNA, 442 bp, Glycine max
  Clone ID: LIB3108-044-Q1-K1-B3
cggacgcgtgggagaaagggatgtttatgcagctatcgttgatgacaaagttgctatgaaaattggacctggtcattttgaaccacctagtggatctcaaagatggtcctcagctttggagggaagggactataagatttgggaggcatcataatataattgtttgtatcttaagtgtatgttcctttggaaaatcaccaccaccttgtatatgtttcttaggaggcaagtataaagacagaagagtagatgatggtatggcaagtcacaattgaagtgagttgaaatgtgccactgttgctgaacgtatatatgctgcattgaagcaaatattatagagaaggttgcagagggttcatttcagccaaatgctggctcttctgaaattaggaagccttcatattatatatacattattatggttacaaagtatacaatattt

SEQ ID NO: 27943 - DNA, 458 bp, Glycine max
  Clone ID: LIB3108-044-Q1-K1-B4
gtttcaacctcatcgtcatcgtactactactacccacgttctgctcctttgcggatcgtgtccacaaaagatggcagacaatgaggatggaagggataagactactcgtgggaatgaatgggaggttgtatctctgacagcatcgacatatgcagctgctcctggtcctgatgaagttgagatgaaggatgatgggaacgaagatgtatatggacaagatgaaggagaaacgtcacatgctttatttatgtctcgtcactttgtctttcctcccagtcagcatgaaaacttgcctgtggaacctgactatggtgagattcatgatgattctggagacaaagatgttgcctctgaagagactcctgaaaaaaggaccataccaagtggaaaggatgaagaaaacttgacattaccaggattggaaagttcaaaggagtttgaaggcatgcggtattttg

SEQ ID NO: 27944 - DNA, 360 bp, Glycine max
  Clone ID: LIB3108-044-Q1-K1-B5
ggcacctggattcaaagttgcaattttgggggctgctggaggaattggtcaatccctttctttgctgatgaagatgaacccattggtttcagttcttcatctttatgatgttgtcaacacccctggtgtcacagctgatgttagccacatggacactggtgctgaggttcgtggctttctggggcagcaacaacttgagagtgcactcactggcatggacttggtaatcatacctgctggggtgccaaggaaacctgggatgacaagagatgatttatttaaaataaatgctggaattgtgaggaccctttctgaaggaatttgccagtgctgtcccaatgcaattgtcaacttgattag

SEQ ID NO: 27945 - DNA, 461 bp, Glycine max
  Clone ID: LIB3108-044-Q1-K1-B6
cccacgcgtccgcccacgcgtccgggcattgggtgttcctgctcttcccctgacatacgtggctcacgttctggcacttgttgccagcatcttggtcgtgctctgggtcctcaattttaggggtggcttggcttgggattctgataacaaggccctcatcttcaatcttcatccagttcttattgtcattggcttactagtccttgggggtgaagctattataagctacaaagcattacccctgaagaaggaagtgaagaaattgatacaccttgttttccatgccatcgcattaatacttggaatagttggaatttatactgcctttaagtatcacaatgaaagtgggattgccaatctctacagcttgcattcatggcttggaattgtggttattgtcctttattgcattcagtggatatatgggtttgggaatcttttcttttccttgggggacttcc

SEQ ID NO: 27946 - DNA, 374 bp, Glycine max
  Clone ID: LIB3108-044-Q1-K1-B7
cccacgcgtccgctttccagttggcagcaagaggagcttttagggaaggaataagaaaagctggaccaaggatgcttgagcctataatgaaggttgaagttgttactcctgaagaacatctaggtgatgtaattggtgatctcaactcaagaagaggacagatcaacagttttggtgacaaacctggtggccttaaggtggttgatgccctggtacctcttgctgagatgttccagtatgtcagcacactcagagggatgacaaagggccgtgcatcctacacaatgcaattagccatgtttgatgtggtgcctcagcacattcagaaccaacttgccacacaagagcaagaagttgccgcttaatgtaattgc

SEQ ID NO: 27947 - DNA, 453 bp, Glycine max
  Clone ID: LIB3108-044-Q1-K1-B8
cacgcaacgttcagaaaccaaatcggtttgagtcctcattacccgcctctctctggaaaccagcaaaaccacctttctctactatctatcggttccttttgtactctgagtgggtagaagacatggtgaggctcactgctgacttgatctggaaaagccctcatttcttcaacgcgattaaagagcgtgagttagatcttcgaggcaacaagatagctgtaattgagaacttgggtgctactgaggaccaattcgacacaatagacttatctgacaatgagattgtcaaacttgaaaatgtaccatatcttaaccgggtgggtacaatgctcattaacaacaacaggattactagaattaatcccaacattggagaagtctttgccaaattacacacttctaggtttacaaacaacagaattgtaacttggtataaattgatcctttagcatt

SEQ ID NO: 27948 - DNA, 392 bp, Glycine max
  Clone ID: LIB3108-044-Q1-K1-B9
caaaaatcttctgcttctttctcatcacctatgcttgtcaaatccatggccactcccaagcctcttccctcagtctctagaactgtatgctctagaaagaactcaactgtgttcccacttggggaacaacctaggagcagccccgcgacagccacgcctcccataaagcttttgacaaggatggagcagctgaagctgctgagcaaagcagagaaagcatggttgctatctgcagcagagaagtttggattctccctctcaacaatagagaggcttggactcctctcaaaggcagaagagttgggtgtgctatctgctgcaactgatcctggaactccagggacactcttgaccctcagcttggggttgctgatccttggacccttatttgg

SEQ ID NO: 27949 - DNA, 446 bp, Glycine max
  Clone ID: LIB3108-044-Q1-K1-C1
cgattctagatagccatgagagcacagttgacagttgacagcgttgcattctgggcgagtcttagaaattgaggcaattgaacatcttccacacttggctttagattgaaggagtatgtccctactccagaagggcctgtgctgtgtctttgacatccgtaaccataataatgtaagctcactgaacctctcaatcacaaattaccatgccgcaaaaccgctatccaaaacagccacatattctcctctccaatcgttgacacgtggcaaaccccggaggaggatgctgaaacctatatccgcggctcttcccgctccaccgccgcttgacctcacagaaaataacgtgaaacaggttttagacgacgctcgaaaggagctgggtcaaatctttgacacctcttgtggtatgacaggagtggttgaactagctgacttggatgggc

SEQ ID NO: 27950 - DNA, 448 bp, Glycine max
  Clone ID: LIB3108-044-Q1-K1-C12
caaataccaatccaatcctctcccaacttacaaagccatgtctccaggtcccgttgtcgacgcttcccctgaggttgatgcagagcaacaacttccctccctcgatgacgccactcagaagaagataccccaaccacaggaggacgatgctccccttgtcgaggacttgaaggatgatgacaaagacgacgacgatgaagacgacgacgacgacgacgaagatgacaaggaagacgatgctcaaggtggtgctgagggttcaaagcagagcagaagtgagaagaagagccgaaaagcaatgttgaagctgggactgaaacctgttactggtgttagtagggtcacaatcaagagaacaaaaaatattcttttcttcatctcaaaacccgatgtcttcaagagtccaaattctgagacctatgtcatatttggggaggcgaaaatagag

SEQ ID NO: 27951 - DNA, 461 bp, Glycine max
  unsure at all n locations
  Clone ID: LIB3108-044-Q1-K1-C2
tccatggcgaacaatatagatcagactccaaaacagttaaccaacaagcttacttttatgccagagacctcgaagtccatcccaaggacacatttgtgttcagtatagatggcaccgtactctctaatattccatactacaaaaaacatggatatggggtggagaaatttaactcgaccttgtatgatgaatgggttaacaagggcaatgcaccggcactgcccgagactcttaagaattacaacaagctggtgtctcttggcttcaagattatattcttgtcaggaagaacactggacaaacaggccgtaacagaagcaaacttaaagaaggctggctaccacacatgggaaaaattaattctcaaggatccacangatccttccactccaaatgcagtttcatacaaaacagcagcgagagagaaactgataaggcagggatacaacatntgtgggatc

SEQ ID NO: 27952 - DNA, 418 bp, Glycine max
  unsure at all n locations
  Clone ID: LIB3108-044-Q1-K1-C3
gttctgacagacctaaaatgagtgatgtggtaagagaaatcgaaaacatcttgaagtcagccggtgcaaaccccactgaggaatcaccctccatctcttctagttatgaggaggtcagcagagggagctcaagccatccttataatagcaacgacacctttgatttgagtgcaggacttccatatccaaaagttgaccccaagtaatccataattcactacctcaaatccaaattgtttatatatatacaagtttactaaatgttgagccagtgtgtgtacatagtgcatgtttggatttcagttcaaaatgccatgcaccaattccaaaataaaggtagggtctagatgctnttacaaacttcatcttgctacaaatgttcgtttggaattgtaaaacatacatgcacatgatcttt

SEQ ID NO: 27953 - DNA, 453 bp, Glycine max
  Clone ID: LIB3108-044-Q1-K1-C4
tccacgcgtccggtaatttccccctagccaccaccaatggccaacaaagagatggaagttgtgaagggtttggatttgcaaaggtacatggggcgttggtatgagatagcctctttcccttcaaggaatcagcccaaggatggtgagaacaccagagccacatacactcttaggaatgatggtactgtgcaagtgctcaacgagacttggagtaatggcaagagagggtacatacaaggaactgcttataaggttgaccccaaaagtgatgaggccaagttcaaggtcaagttttatattcctcccttcttgcccattatacctataaatggggactactgggttttgttcactgatgatgaatatcagtatgctttgattggccaaccaagcaggaattacctttggatattaagcaggaaaccccatctggatgatgagatctacaacgag

SEQ ID NO: 27954 - DNA, 355 bp, Glycine max
  Clone ID: LIB3108-044-Q1-K1-C5
tccacgcgtccgcccacgcgtccgtataactccaaggaaataagccacataccgctgaatcttttttgctttctctccttcgcactttcttactcttccttgtgattggtgattgcattactgggagaaactgtgacacagaacatgagagagataattcgtattcatattggacaagctgcaattgaggtggagaattcatgctgggagttgtattgccttgagcatggaattaaccctgatggcaccatgcctagtgataccttagtaggtgtatcacatgatgctttcaacaccttcttcagcgagacgggatccggctagcatgtgccaagggctttatttgttgatctgg

SEQ ID NO: 27955 - DNA, 249 bp, Glycine max
  Clone ID: LIB3108-044-Q1-K1-C6
cccacgcgtccggtaggttggagtgtttgtccatttcataccaacattatctctgttttgaattactgtcacgaaagcttgtttttcccccatatattaagttaatggttgtctgttattaagtttggagagatataagtcataagtgcaaagtatacacatccatattttgaccagatgatcttattgtagttgcataagatgttgcggtctagagaccggaagcaggaaagatctgtatcttgtgct

SEQ ID NO: 27956 - DNA, 399 bp, Glycine max
  Clone ID: LIB3108-044-Q1-K1-C7
gccgctcctggtgtgggtgccttggtgggctcagctgggatgatctcatcaattgataggcttcctctaatatcctgggcttcttgaggtcgtatgcattggctacactgggtggtttgcttacaagaacttcgttttcaagccagacagggaagcttttctacgaaaggtaaaggaaacatatagcgaaatacttggaagcagctaaaagagtgaggaattgatgcttagattctgttcacacaaaagagatctgtctttcagtattttattgaagatgcaaccttgtcgcaataagcttcctgaccatactttatcgcatgtgatgtaatctaacctgataataaatgtaacttttgtaataatcattctacttcaagtagatattatttttttaat

SEQ ID NO: 27957 - DNA, 423 bp, Glycine max
  Clone ID: LIB3108-044-Q1-K1-C8
cccacgcgtccgcccacgcgtccgcgcagctaccctgaggcttctcttctcttctcttctctgtcgtgagtcaccatggtgagggttagtgtgctgaacgatgctctgaagagcatgtacaatgctgagaaaaggggaaagcgccaagtcatgattaggccatcctccaaagtcattatcaaattccttttggtgatgcaaaagcacggatacatcggagagtttgagtatgttgatgaccacagggctggtaaaatcgtggttgaattgaacggtagactgaacaagtgtggggttattagtccccgttttgatgtgggcgtcaaagagattgaaggttggactgctaggcttctcccctcaagactgtttgggtatattgtattgactacctctgctggcatcatggatcatgaaaaggct

SEQ ID NO: 27958 - DNA, 416 bp, Glycine max
  Clone ID: LIB3108-044-Q1-K1-D1
gtcaactcaaacttctggcactttgacagatcgaccacgctagaagaatggacgactggctgaccagtggaggttgtcatgagaggctgaggctttgattaatggggcctatccaggtcggattgcaaatcaagctcataacggttccgcacatgccgtaggggaccctaatgacttatggactggcctatatctttctgtgtgtcagagatatcatcatgatccgactgcatctgtaggaggtgcatctagtacttacttgtacacatccactccaacttttgaggctcagttaagcttgcatctgggacgtgtgagaccttcctatgatggattgcatatggtggcttgaagttactcttctagacatacaatgccatagaccactgttggctggcagagcaatgatagacatg

SEQ ID NO: 27959 - DNA, 423 bp, Glycine max
  Clone ID: LIB3108-044-Q1-K1-D10
ggtgtgggtgtttgaatctggtgaaggatgtcaattgttccaatcaaccagggtgatgccaacggctccaaccccttcgcttcgtggggtcaattcgtggattttcctctccctccttccatctccggcttcttccccggcttggaattcggattcggattcggatcatccgtgaacacacgtgtggactggagggagactcccagagcgcacgtgtggaagctggtgcttcccggcttctccaacgaggacgtgctggttgagctccaagacgagagggtgctccaagtcagcgtggagagcggcaacttcgtcacgaggtttaaggtccccgacaacggtaacctataacaactcaaagccaacatgcgtcacggggttctcgttgtcactgttcccaagtttcatcaacccactactact

SEQ ID NO: 27960 - DNA, 439 bp, Glycine max
  Clone ID: LIB3108-044-Q1-K1-D11
caagaacgccccagatggtttcagtgatagtggttgtcataattatgatggatttagagtgacagatcctcatcgctccagtcaaagagaagcagtgctagtgaagtttcgactgaagcggaaagagagatgcttcgagaaaaaggttcgatatcaaagccggaaaagactggcagagcagcggcctcgggtgaaggggcagtttgtacgtcaacatgatcatcctgtcgctgaggctggtggtgattcatgaactttgttctttttaggtttcgtgtagtattaaattacagctgactgtaacactgattgtgtcaacaaggattagctgtagggtggtgtctgtgtatgtgttgttggaatctgcttatccattaggcaaaagaagagtaggccagtatggagatttatatttggactgccacttacaaatttagga

SEQ ID NO: 27961 - DNA, 440 bp, Glycine max
  Clone ID: LIB3108-044-Q1-K1-D12
ctgtttgccaataaaaggtgatttgattgaggccaaagttgtgcatgatcaactttgttcaatggctgagaggtctgacagtgagctgttgggcccaaacaatcagtaccttccaaaaatagtttcagtgtttgctgaggttttatgtgctggtaaagaccttgctacagaacaaacagctggtcgtatggttaatttactcagacagctccagcaaactttaccaccctctacactcgcttctacttggtcatctttgcagccgcagcaacaacttgcattgcaatctatcctttctacatagttgtcattgctttgctgcatatccatcatttcttcatagcatctggcttggcagttggtgtcttgctctttttgggaacaagctttttccagtttggtggtctctatatttgtacccattctttttgccataagat

SEQ ID NO: 27962 - DNA, 400 bp, Glycine max
  unsure at all n locations
  Clone ID: LIB3108-044-Q1-K1-D2
ccttatggaattaatggtggcatggctttgagggatggaactgatgcatctggcaggaaaggaaagggaaagggtgtttaccagtttgtagacaaatacggtgctaatgtcgatggttacagtcctatctacgacaccaaggactggtctccaaccggtgatgtctacgctggcggtacgactggcttggctatctgggctgtgactctacttggtcttttagctggtggtgcacttcttgtctacaacacaagtgctttggttcaatagactntgcaaatcgatgtttaagttataacatagtccatgtaactatctaaaaatgaagaactattcgtgaagtactttgtggatatgttccttctggtctataaatgagtggatgtgaaaaaactttttt

SEQ ID NO: 27963 - DNA, 445 bp, Glycine max
  Clone ID: LIB3108-044-Q1-K1-D3
attttaattctcagatccaagcttgggagacagagaaagagaaagagaatggacgccattgattctgtgttcgatccgctgagagaattcgcaaaggacagcgtgaggctcgtgaagcgctgccacaaacccgatcgcaaagaattctccaaggttgccgtccgtactgcaattggtttcgtcgtgatgggattcgtcggtttcttcgtgaagctcattttcattccaattaacaacatcattgtcggatctggttaggatgaagggaactacaattgcctcagaattcaggttgtcaagcaaaaggaggtagacagagttcccacatcaatagatcattttatgcccccaatcttagttctgttttcatttttgatttttcttatatctggaagcgttactttagatgtaaaattttatttatcctttggtagaccttgacaca

SEQ ID NO: 27964 - DNA, 329 bp, Glycine max
  Clone ID: LIB3108-044-Q1-K1-D4
cccacgcgtccgcccacgcgtccgcccacgcgtccgacaatttccaaccatcacgaaaagtctttcccgttcttgatcaggatctcaattttcttccttatgaagactatgagtctgagtcaccggacaatgagacagatgttgaaagctcaccaggttttctagtgaagaaaaagagggcacccagtgatcttgtagcaaaaatttctttatcagatttggtgaagtactttggtatgccaattgtagaagcatcaagaaatctaaatgttgtgcttactgttctaaagagaaagtgcacagaatttgggattcctcgcttgcctcat

SEQ ID NO: 27965 - DNA, 316 bp, Glycine max
  Clone ID: LIB3108-044-Q1-K1-D5
cccacgcgttcgcaagtacttgtttatgtgataacactttgaatttgattatcagaatgtaaacgcatgcattttagagttgaaaccactagcctaatttggttgaggtctctgtcctctatgtgcaattaatttttctgaaattgattcagtctatcttggaagtaggtatgcaaccccaaggttataaattataaattggccattttcttattgattttgttattaaaaaaaaaatattaatcttgtatattattaatgtaaataataattatcttatatatttacttattttatgtaaaaaaaaaatgggcgg

SEQ ID NO: 27966 - DNA, 363 bp, Glycine max
  Clone ID: LIB3108-044-Q1-K1-D6
ctcaaaaacacatatattactaagacacgttgagttaagatggggaactacatttcttgcactctatcaacagcaggaagcagcaagcactggagaggcataaaggtgatattcccaagtggggagattgagcagttggaagaaggagttaaagcagcagaactgatgcttgagatgccgagcttctttgtggtggacactcggtctctacaaattggacgaaggtttagtgcactgaacgcagatgaagagcttgagtgtggtaacgtgtatgtgatgccttccatgaagaggcttaactctttggtcaaagcatctgacatgggtgctttgttactcactgccaaaagggtatctgcaaaa

SEQ ID NO: 27967 - DNA, 264 bp, Glycine max
  Clone ID: LIB3108-044-Q1-K1-D7
atcacgcgtccggtgcattgttcagttcagatgacatgttaagacatgctatatatgcatggtccatttatagaagcaaagaaaaacgtagagatacatactcggagcatcaagaaaggtgcggacgtggtatacgatatatgctaactttgcctttaatacgaggcatgcactgtatgatgaagtggactgggaggggcatatcagggcactgggatggtcaaaatgaatgaagagactcctggcgaagttcaagtgactaca

SEQ ID NO: 27968 - DNA, 399 bp, Glycine max
  Clone ID: LIB3108-044-Q1-K1-D8
cccacgcgtccgcccacgcgtccgggcgaattaacaagcttcaaattcaattgcttttcatgcaaatggatgtttatacacacatctcattaccatctttcatatcgcatcgcttctcttcttcacgattccaatgctcatcactttcttcttattctcctttcaagcttgtctgttccaacagagactccaaggaatctcaacgaaacgacgataacaataacaagggtgataaatcttcaacagactgggacaaggcatggtcaaaattcaaaatgcaagggggaaaaaaacccttcttcaaatttttagataagtatgtgagctggaatcctaagcgttcagagttccctctttctgaggaggttgaccctatcaagagaacagagagatcaaacc

SEQ ID NO: 27969 - DNA, 348 bp, Glycine max
  unsure at all n locations
  Clone ID: LIB3108-044-Q1-K1-E1
aagtaacatagggctaacacataaagagacacataaaaagggttacattatgggaacacccatgatttattaacccataatataatgccaccagaccagaccagaccttccaaagcataaaatatctaagacctaaactattacatgggaagaaaaatgcattaactgctttttgagtcaagggactttcacatgaccctctttaatgacacaataaaagtccgtgatacacgagtttccctcttcgcattttcactggtaccaaattgaaacctcttgctgtttttgaagagaatccattcctactncttgaatatccttcttgaaaccaaaggattgacaatcaca

SEQ ID NO: 27970 - DNA, 412 bp, Glycine max
  Clone ID: LIB3108-044-Q1-K1-E10
gtgagttgactcagcgatggcggcagatgtgactcgggtcatggtcgccgtgcacgagtcgagcatgaagggataccctcatccttcgatcagcaaccaaagggctttccaatggaccatcaacaagatcgttcgcaacaacgtctctgccttcaaccttctttgtcttcacgttcaagtccccggttaagacggttttaatgacatggatagtatctactcatcgcctgacgattttaagaacatggatcagagagatagaattagaggggttcatctgatggaatacttcgtcaataggtgtcatgaaattgtggtggattgtcaagcatggataatgaatggtgatcccaaagaaataatatgtcatgaagtgaaacgactaatgcctgatcttctggttgtgggtaac

SEQ ID NO: 27971 - DNA, 436 bp, Glycine max
  Clone ID: LIB3108-044-Q1-K1-E11
cttgaacctcttaccgtgcgcatcttctcaatccataacaacttcgccaccgttgcaccgaaaccaatcgccacaaactcgggatctcagattcgacgcgccaaaccatgtcgaaggcgcgtgtctacacagatgtcaatgtccttcgccctaaagagtattgggattacgagtctctcacccttcaatggggtttttacgtggtaggaccagagacagaaggtggtcgagaatcaccttgtgctgccttgtgccgatgatcaagatgattatgaggttgtgcgaaaagtgggcagggggaaatatagtgaagtttttgaaggcataaatgtcaatagcaatgagcgctgtataatcaagattctgaaacctgtcaagaaaaagaagattaaaagagagataaaaatacttcagaatatttgtggaggcccaaata

SEQ ID NO: 27972 - DNA, 362 bp, Glycine max
  Clone ID: LIB3108-044-Q1-K1-E12
tgccatcgtacgagccacggcaacgtgtgtgagcttgagcctgacctcagccctgacgggtgtatctatgggtccttcctcatcgtccttctctggaagcggtagttattgtgtccgcgcgggtcccacctcgggggcgaccttgcccctgcgcttgccgctgaccatagagaacgcccacaagaacggggccgacaacaccaagaacggccgcgactaccagcgcaagcgtctcggagtgcagatatacggcgaccagttcggcaagcacggctccatgatcggccgccagatcggaaccaagcttcatgcacgaaagaatgcggggcttggcgtagagcataccatagactacacgattg

SEQ ID NO: 27973 - DNA, 463 bp, Glycine max
  unsure at all n locations
  Clone ID: LIB3108-044-Q1-K1-E2
cccacgcgtccggatgctgtgtatgaagggcaacagaaaatgatagaacttggaataactggtcctgaagggcatgctctttcaaggcctgcagtgttggaaggagaggcaactgctcgtgccattcgtttagcagattttgtgaatactcctttatatgtggttcatgtaatgagcattgatgcaatggaagaaattgcaaaagcccggaaatcaggacaaagggtaattggagagccgattgcctctgggttagcccttgatgaatcctggctttggcatcctgactttgacattgcagcaaagtatgtcatgagcccccctattaggaaacgaagacatgataaggcccttcaagctgccctttcaacaggagttttgcagctggtaagaactgatcatcgtgcctttaattccacccaaaaagctcgtggaatcgatgacttncgtaaaatgcctaatg

SEQ ID NO: 27974 - DNA, 319 bp, Glycine max
  Clone ID: LIB3108-044-Q1-K1-E3
actagtttggcatggcttccaattaatatttaaaaaagaaaaggaaaagaaaatagcatcccattgtgttgagacttttttccccccatatttaattattactcttcctctggtggggttaggtgaaatttgtatatgttaatgcagtgtagtgcggtacgtaacagttggaccgcaccgtgtttaaacaaactacataggagattattagttgtatgttagtcagcctcatgcttttccaagtacgcgatggttactttggaagaacacattttgtttctttaaaataaaatcgttgcctaataaggtaatgtaccta

SEQ ID NO: 27975 - DNA, 411 bp, Glycine max
  Clone ID: LIB3108-044-Q1-K1-E5
cctttcgctctcttctctgcaaatgcttcattccaagatggttaggactctgtaggctgataaagacaacactcataccgttggaaagaaggatgctgctggccatgttgcttaatttagttcttgcttcctttgtcttcttgagttttatcagagacgggagtgcagggatcactagctctttcattcggtcagagtggccggcagttgacatcccccttgatcatgaagcatttgcagttccaaagggttataatgcacctcaacaagtgcacatcacgcaaggtgactatgatggaaaagcagtaatcatctcatgggtgaccacagaagagccagggcacagccatatacagtatggcacatcagagaataaatttcaaactagtgaagaaggcacagttacaaact

SEQ ID NO: 27976 - DNA, 455 bp, Glycine max
  Clone ID: LIB3108-044-Q1-K1-E6
gggtttacagagaagctaagaggcgcagccgtagcaaaagctcgtggaattgctagcaatggcgaggatcaaggtttacgagctgaggcagaagacgaaggctgatctgctgaatcaactgaaggacctgaaggcggagcttgccttgcttcgtgttgctaaggtcaccggtggtgcccctaacaagctttccaagataaaggtggtgaggttgaacattgcccaggttttgacggtgatttctcagaagcagaaggctgcgttgagggatgcctacaagaataagaagtacttgcctctcgatctccgccctaagaagaccagggctattcgcaggaggcttactaagcaccaagcatcattgaagacagagagggagaagaagaaagagttatatttcccactaaggaaatatgctatcaaggtgtaactttagagcaatcttatcgggtaat

SEQ ID NO: 27977 - DNA, 450 bp, Glycine max
  Clone ID: LIB3108-044-Q1-K1-E7
ctcttttttgttgttgtggtgtttcatttgtgaaactaacaacaacacaaggccatcatcatggcagctgcttccccaatggcaagccaactcaagtccaccttcactaggactcttgtagctcccaagggcctctctgcctcttcaccacttcacctcgtgccttctagaaggcaatttagcttcactgttaaggccatccaatcagagaagccaacctatcaagtgattcagccaatcaacggtgacccattcattggaagcctggaaaccccagttacatccagccctttgatcgcatggtacttgtccaacctgcccgcatacagaaccgcagtgagcccactactaagagggatcgaagtgggcctggcccacggataccttctggtgggcccattcgtgaaagccgggcctcttatgaacaccgagatcgcccggcaagcgggc

SEQ ID NO: 27978 - DNA, 383 bp, Glycine max
  Clone ID: LIB3108-044-Q1-K1-E8
cttacacttcttccagtcctcaacagcaacaagaagtagatgcggttcaattctctgatgacaaacactttgccctacatggaaagatcttgctgctagtttttctcactgccttctttcttctctttgtgttcgtcctcatgattccatggctgaagagacgtgcatggggttctcacgattcaggaacagatgaagattccattgaggtccagaataacagtaccccttcatacaactggttcagaggaagaatgaaagaagatgccaacaccatgcaacatcagtagaaaaatcaattgtctccttttattatggtacgaatacatattctgcttatttttgatcatgagatttattcttgaatttccatgcgaatatta

SEQ ID NO: 27979 - DNA, 438 bp, Glycine max
  Clone ID: LIB3108-044-Q1-K1-E9
caagaatcttgaaaatgtcatgcggaaattccttcagtccttggagcttttcgaggaaaatgagaggaaaaagttggcaatcttcacagcacttgctttttcccagaagctgtctggtctcccaccagaaactgtgttccaaccacttcttaaagataaccttgtggccaaagggctagttctgtcatttatgactgacttctttaaggagtatctgattgacaacagtcttgatgatcttatttcaattctaaaacggggtaaagtagaggagaatcttttggacattttcccccctacaaaaagatctaatgaagccttctctgagcatttcaccaaggaaggactggtggccttggtggagtataatgaaaagaaaaattttgaggtgaaacttaaggaaatgaagtcctctttaacagcacaggttacagacta

SEQ ID NO: 27980 - DNA, 461 bp, Glycine max
  unsure at all n locations
  Clone ID: LIB3108-044-Q1-K1-F1
ccgagttctcttggcaagttggttcggataccagtcattgcaaggttttcatagagtcagaggatgtgggacggacccttgacttgtcctgtcttggttcatatgaagagttgtacatgagactggctaacatgtttggaatagaaaggtctgagatgttgagtcatgttctctaccgtgacgcagctggtgctcttaagcaaactggagaggaacccttcagtgagttcatgaagacagcaaaaagattgacaattctgacggattcaaacaacaaagatagtagaaggtgggagaaagaaaaataatgaaattatgtataggatgtggttgccttagatgacccggaagatacttttgtatgtgcaagtgtaactgttccttcctctttgtgacttaaaagtctgntttgcagggtttggatcacaagaattcgaaatgctgaacatggattggatact

SEQ ID NO: 27981 - DNA, 271 bp, Glycine max
  Clone ID: LIB3108-044-Q1-K1-F12
cccacgcgtccgcccacgcgtccgcccacgcgtccggttgtttttctttttttcattggcattgcaaagcaaaacccttgcaaatggcaatggcttccaacaaggttattgccaccatcttggttctttctttccttgcctactcaccatcattaaccattgcttgtggaccatgccacccaaaacctattccttttccccttcttccatcagggaagtgccccaaggacacattgaacctaggggtgtgcgctgatgttctaggacttgt

SEQ ID NO: 27982 - DNA, 353 bp, Glycine max
  Clone ID: LIB3108-044-Q1-K1-F2
tcgcctatacccatggctatgacagagagggacaccccgtgtgctacaacgcctatggggtgttcaaggatagggagatgtacgagaatgttttcggggacgaggagaagctgaagaagttcttgcggtggagggtgcaggtgctggagagaggggtgaggatgctacacttcaagcccggtggggttaattcgctcattcaggttacggaccttaaagacatgcccaagagggagctaagaattgcttctaaccagattctgtctctgttccaggataactatcctgaaatggtggctcgcaagattttcatcaatgtgccatggcactttattgtgttgtattcaatgttc

SEQ ID NO: 27983 - DNA, 128 bp, Glycine max
  Clone ID: LIB3108-044-Q1-K1-F3
cggacgcgtgggactaagacagaatgggacacctacgtgagctactacgcctatggagcgttcagggatcgaaagatctacgagattgtccttgggaaccattatgtgctgccgaacttcttgcggtt

SEQ ID NO: 27984 - DNA, 369 bp, Glycine max
  Clone ID: LIB3108-044-Q1-K1-F4
accacgcgtccgcaaaaacgcataatccgcgaaattgtgcctaaaatcgatgacttcgcaaaatggtgactagagccaccacccaccaccgcaagcgcaagctgaaaaggttactgaagttggatggtacgttcttggcgaggatcaacaacagattggcccttacaccttctctgagttgtgccgtgagttgagttatttgaaactgtctctctctctgttttttttatttttgaatgaacaaagtgtaatggagctagggctaggtattgtacatttagaatttagttgtttggtcctcaattaattacattaattccgaggctgtactgtttaagattttggcacatttgtttattgtgtaattta

SEQ ID NO: 27985 - DNA, 459 bp, Glycine max
  Clone ID: LIB3108-044-Q1-K1-F5
gacatgtttcactggcaagccacaatcatgggacctgctgatagcccatatgcaggtggtgttttcctagtttcaattcattttcctcctgactatcccttcaagccaccaaaggttgcttttcggactaaggtgttccacccaaacatcaacagcaatggcagtatatgtcttgacattctcaaggagcaatggagcccatccctaaccattttcaaggtccttttgtcaatttgctcattgttgacggatcccaaccctgatgatccactcgtaccagagattgcacacatgtacaagactgacagggccaagtatgaggctactgcccgcagctggacccagaagtatgccatgggatgaccatatagagctgcttttcaatgaagcagcaaaatcataatttatgtaaaagaacaaaagatattatgaatgaaattgaatgctttattttatatt

SEQ ID NO: 27986 - DNA, 307 bp, Glycine max
  Clone ID: LIB3108-044-Q1-K1-F6
attcagcgggctcaagtgctccccactctcatcttcttctctcttcttcaaaccttctctttggacccaacaatcccaaaagcgcgtttcaactaccattgcgaactcaatagcaatagccaatgcgcataacatagagagagcgaggcttaagaaactcttcgaagaagcctacgagagatgccgcaatgctccaatggaaggcgttttcttcaccatcgaagacttcactgttgctcatgacaagtacgacttctattctgaagttggctgcatgattaaaggctctgtgttctacacagatatc

SEQ ID NO: 27987 - DNA, 385 bp, Glycine max
  Clone ID: LIB3108-044-Q1-K1-F7
ctggcggcttccaccgcagctatgtcagaaatgcttggaaaccccgtgagcctgagaggcgccaccaggtctgctccatcaccgtctacacctgatactttcaagaccgttgcgcttttctccaagaagaaggcagcaccacctcctccaaagaaaaagcctgctgctgtatcctccgtcaatgaggatctcgccatgtggtatggtccagacagattgatcttcttgcctgatggtctcttggaccgatcttagatccccgagtactttaccggagaagtgctctggagattatggttatgacccgtttggtcttagcaagaagcctgatgacttcttctaatactaggcttgtgagttgattcatgccatatgggcaatgctt

SEQ ID NO: 27988 - DNA, 379 bp, Glycine max
  Clone ID: LIB3108-044-Q1-K1-F8
ctgatttccccggcagcaacaatggaacaggtctcttccaaaccatagttggtttgaagataagagatttatatgagcagctaatagccaccaaggctgagactccagtggctgcaaaagcttaggaattgaattgaacctgccataataatatatatacatatcgaccgagcgacgcagtcaaattgcattagttctcatcaaaatcatcattttctttcttctttcatgttttccacaatttcactgtgtttcatgttattttgtctattgttattaggctgttctgcatcataattaatgaaaaaaacacatatgtatgtatgtatgtacttatccgagaaaaaaaagtgaggctgagattccagtatgttgaaaa

SEQ ID NO: 27989 - DNA, 405 bp, Glycine max
  Clone ID: LIB3108-044-Q1-K1-F9
ggatgaggtgaggagggaggcgaggaagtgggtggtgagcggggaggtggcggaggttaccgcggtggcgagggaggtgctgaaggaggatgaggaggaggtggtggaggaggagagggcgagggagagagaggaggagagggagaggagggagtttgtggtgcacgtgccgctgccggatgagaaggagattgagaggagggtgctggagaagaagaagaaggatctgttgagtaggtacgcgagtgaggggctcgtggaggagcagactgaggccaaggacatgctcaacattcagcgttaggctgtagaagcagagagccgcttgaaaaagtgttgaggagcaattgcgtatgatcaatgatgactttttatcatagtggataattttgcagagactctttt

SEQ ID NO: 27990 - DNA, 453 bp, Glycine max
  unsure at all n locations
  Clone ID: LIB3108-044-Q1-K1-G1
cccacgcgtccgcaaaacttcttcacactccttcttttccctcttctgttgcccgatcttctgcctccaagattttggtatttgggattgatcacctggagttggaaatggttaaaagttatggagtgttctgatttgcaaaagatatcatgttgcggtgcttagagggacttaagcctttatttgcttccatattacgatgttgtgacctggatatatataaccagccaagaggccttgaagatcctgaacttcttgctagagagactgtgttcagtgtaagcgaaatagaagcactttacgagctcttcaaaaagattagcagtgctgtaatcgacgatgggttgattaacaaggaagagtttcagttggcattgttcaagacaaattaaaaagaaagtctgtttgctgatcgggtatttgatttatttgacacanagcacaatgggatac

SEQ ID NO: 27991 - DNA, 91 bp, Glycine max
  Clone ID: LIB3108-044-Q1-K1-G11
cccacgcgtccggtaatgaacccatttcattgttaaaaataatgtagcaaattttatgtatatggctctgaatggaaaccattatcctttc

SEQ ID NO: 27992 - DNA, 439 bp, Glycine max
  Clone ID: LIB3108-044-Q1-K1-G12
cgtccggccagaccttgatgatgcacaattggcaaaggaagtagaataccttcttaggaagggatggattccttgcttggaattcgagttggagcacggtttcgtgtaccgtgagcacaacaggtcaccaggatactacgatggacgctactggaccatgtggaagctgcctatgtttggttgcactgatgcttctcaggtgttgaaggagcttcaagaggctaagactgcataccccaacggcttcatccgtatcatcggattcgacaacgttcgccaagtgcagtgcatcagcttcatcgcctacaagcccccaggcttctaagtgtgaaaaatttgcaaagcatttgtagccgccaccccactttgtttgtttgtacttaaactacattcccatttgtttttgctttttgagatttcaatcatcctgatttttggg

SEQ ID NO: 27993 - DNA, 460 bp, Glycine max
  Clone ID: LIB3108-044-Q1-K1-G5
gtcctagctcccctacagaagttctgaaaattaacacggcaaggaaaccaaactcaaaaaatttccaaaactgttgtagaattagggacaacatggctggaggatcacttggagacaacattggattgaaggaagatgctatcaagagggtgtgtggtttggcctgcaaagctaacaatcacaagtcaacggataagctctacttttacgacaaggttcagatttcttcggaaacttaccatgttttcagcttcccgggatcttgggatcccgctgaatggtttgttaacaaaccctttggggtatcgaagataaattctacccagttcccttctctcagaagtattggtaacgatgaacttgcttgggtgaacgaaggcttcgcaaagagattcgatcgcctattggaaactaactttgaagatgtggtgaagaaggctatactagatgggaagcaagt

SEQ ID NO: 27994 - DNA, 375 bp, Glycine max
  Clone ID: LIB3108-044-Q1-K1-G6
aatcgggacgccatcttgctcactacatcgtccctattagcacactagattttgccaaaaagatcaacttttgaagcaattgatcatgtgggcaacattcattctttcctatccctggaaaaatcaattttcggcttcgggctcaatcggaaatggagaaggtgatgaacattctgaagccgaagccaaatccacagcaactattgagggattggcagcgcaggcttcgtcaagagtgtcgcaacattgagcgccaaattcgcgatatacaaagagaagaaaaaaatgtgcagaatgctattagagaagctgcaaaaggaatgacatgggctttggaaaagcacttgccaaggacttgtgagatctagcaaactg

SEQ ID NO: 27995 - DNA, 459 bp, Glycine max
  Clone ID: LIB3108-044-Q1-K1-G7
cccacgcgtccgcttctatcatctctccaccatggttctctccaaaaccgcctccgaatccgacgtctctgtccactcaaccttcgcttctcgctatgtcagaacttcgcttcccaggttcaagatggcggaggagtcgataccgaaggaggcagcataccacatcataaacgacgagttgatgttggatgggaacccaaggttgaatttggcatcatttgtgacgacttggatggagccagagtgtgataaactcatcatggctgccattaataagaactatgttgacatggacgagtaccctgtcaccactgagctacagaatcgatgtgttaacatgatagctcatcttttcaatgcaccactagaagagactgaggcagcagttggtgttggcacggttggctcatcagaggccattatgttggctggattggcattcataagaaagtggcaaaa

SEQ ID NO: 27996 - DNA, 388 bp, Glycine max
  Clone ID: LIB3108-044-Q1-K1-G8
cttctacttcccccctttgctctcaaaccttatcacctaatccttatcctcccaaaccagagaaccatgtctacctccgcagcttccctcgcactcccaaccctcactctccgaacccgacaacctctatgttctccccaatgcttctcctcgtccctctccctcacacccaacaacaaacccatttccaattctgctgtttttctcaaaccaacaactctgtcgtcgtctcgcttcgttccccacgtcgtggtgtcgtctgatttggggcaggaggaggacaccttcagtgacggagacggccccagcttctgccccgaccttaagctctttgtcgggaatcttccggtcaacgtttacagcgcccagtttgcggagctttttgaga

SEQ ID NO: 27997 - DNA, 238 bp, Glycine max
  Clone ID: LIB3108-044-Q1-K1-H1
cgtacgcggacgcgtgggcggacgcgtggggttttttgtcttctaatatttgctgacagttgctgatgtggttatccgtcatgacctgaggatctgtgctaccatagcattgtgggcgggttgatgctgttattaaatgtcataccgggctttataattcgaaaaatcaacttcatgtattgattattcatgtatgatttgaaagatgaatcataggttgccgcttgaaatgaaaaat

SEQ ID NO: 27998 - DNA, 402 bp, Glycine max
  Clone ID: LIB3108-044-Q1-K1-H10
caaaactcaaatgggcatggccacaatcacaatgggaggaaaccacaattcctccatcactccacgccactacaacacccacaaggtgttccttttctgcaactacattctcttgggtgcagcttctagctgcatcttcctcaccctctctctgcgcctcattccctctctctgcggcttcttcttcatccttcttcaggtctttacgattgcgggcgcggtctccgggtgcgccgccgtggggactaacaggtggtactctgcacacatggtggccactgttctaacggctatctttcagggttctgcttcggtgttggtgtttacgaggaccggcgattttctgggtcaattgaagtcttatgttagggaggaggatggtgctgtgattctcaaattggc

SEQ ID NO: 27999 - DNA, 437 bp, Glycine max
  Clone ID: LIB3108-044-Q1-K1-H11
gaaaaaagaaaagcactaaaaaaaaatgaagaagggtttctcccttgtgctgctgattcttctgatccagtacaacaacgttgtcaacgcctacaacaacaaaaactgtgtcacagaggattgcctcatcggcaacaaggatttggaatcagagttctactttggatcccatgtggccagaatgctctacgatgtgagccaatctgtgagtggcaaaacaggcaataaaaataacaaagctgttaattgtccaaataagcaaggctaccgaagctgcttgccttccaaaaacggtggtggccctaagcaaagttgtggcgattacaccagggtttgctaagaactcgttccaacccttgtgatttcatttctgatttttaagattgtgatatgatggaatcttatttatgtcaatttgtttagtttaatttccatat

SEQ ID NO: 28000 - DNA, 443 bp, Glycine max
  Clone ID: LIB3108-044-Q1-K1-H12
agaaaaacaagtagttgagaactaagaagaaggaaatggcttcctcaatgatctcctccccagctgttaccaccgtcaaccgtgccggtgccggcatggttgctccattcaccggcctcaaatccatggctggcttccccacgaggaagaccaacaatgacattacctccattgctagcaacggtggaagagtacaatgcatgcaggtgtggccaccaattggcaagaagaagttcgagactctttcctacttgccagacctcgatgatgcccaattggcaaaggaagtcgaataccttctaaggaaaggatggattccttgcttggaattcgagttggagcacggtttcgtgtaccgtgagcacaacaggtcacctggatactatgatggacgctactggaccatgtggaagctgcctatgtttggctgcactgatgcttct

SEQ ID NO: 28001 - DNA, 428 bp, Glycine max
  Clone ID: LIB3108-044-Q1-K1-H3
caaagtttgaaattgacacccacaatatcatcatcaatcaagtaatctttgatgatgaagatgttgaatccaagttacttaaagcaagaatgaaaatgcaacagaaatatctggaccagttttacatgttgtatgatgactttaacattaccaagctgccactgctcccagaagaggttactggggttgaagctctgaaagcattttcaagacattttacatgaccatatcaagccttatgcagtaaaggagatccagtagaacggttggagagtaaagtatcagcattacagcgccagttacacgaggctgaagaagagttggagagactcaaaagtggcaattaggtttgatggtatccattcatgaataatgtcaatgtatgcctttatggttcacattattttttagcttaaatttgataaagc

SEQ ID NO: 28002 - DNA, 426 bp, Glycine max
  Clone ID: LIB3108-044-Q1-K1-H4
ccacgcgtccgcttctttgtaggttatacatatgccggggagcttccaagctgtgcatttgggttcaatagccatggactggcattcactctggattctgtaccccccgctgaagatgagattgtggctggtggcattgggcgcaacttcatttcgcgagaccttcttgaagctacaagcatggatgatgcaatgaataggatcaaatcgtcagaaatttctgtggggcattcttataacttgtttgaaacaagcacgcgcaggattgttaatgttgaaaccgcatctaggaagcggatttcagtttatgaagtggggaatacacctttcttccatgcaaacatgtaccttcacctaccgattaatcaggtacaagatgagaattcaatagcagacataaaagggcaactgtcttgacaaaagaat

SEQ ID NO: 28003 - DNA, 367 bp, Glycine max
  Clone ID: LIB3108-044-Q1-K1-H8
gagccattgaactttgactataatattcagagttcagattactcactctaatcttctaagttttcattttggggtttaagtttctgaaggaaaaaaaaaatgataaagtttgttctatttttgttctgctttgcctctgcactgaccctttcagtatcggagtccaaatcagcttcagtgcaacctcatgctgctgaatctttctctgttggatatattcagatgaagactgcagcgaactgttcttacctggtagttatatctacgagttgttcatcgcctaagttcacaacggataagatcggtatcacgtttggcgatgctaatggcaaccaggtatatgaaccaagactggatgatccaattt

SEQ ID NO: 28004 - DNA, 224 bp, Glycine max
  Clone ID: LIB3108-045-Q1-K1-A10
tcgctttctaacaagtctctaactccatcggatggcaggccggttctagggaatgggaaaaagagcaagaagcagacaagagatgccgaagtggaacctggactcaacaccaaaaatgggcgaaaacgatgattctcacaataagaagaaacttatgaaaaagagaatgaggaagaaaattcccacagttagcataaccgtgcctgctttcatcattgacaacg

SEQ ID NO: 28005 - DNA, 99 bp, Glycine max
  Clone ID: LIB3108-045-Q1-K1-A11
tccatactgacttcgccagctctcttaatctcgataaggccttgactgatcacatttctcatcacttacccatcctgcatatcaactaggacgctccct

SEQ ID NO: 28006 - DNA, 412 bp, Glycine max
  Clone ID: LIB3108-045-Q1-K1-A12
tcgccgactcgttcgtccactcgtccggaattattttgaggcgagggtaaggtcgcgtcgtgttgcgtcgtgtcgtgcgctgttcctctgtttctcgtttttgtgttcagaccgaaccctatctccgcatcgcatccatgtcgaccaagcttggtggaaaagctaagccttttgaagatacccatatctgatatgaacgattacgactagattgatgtggctaacattcataagaaaaacgatgaggagaaggcgctaaaggagttgaaagccaatgcgcatcagaatggaagctttggaggttctggtctcaagacaagtggaaagaaataaggtctctttatcatgattgtatgcattcaatattgatccctgtaatttcagttgctaccatgattaacttctcttatta

SEQ ID NO: 28007 - DNA, 361 bp, Glycine max
  Clone ID: LIB3108-045-Q1-K1-A2
cccacgcgtccgcccacgcgtccggaagaaaccgtcccttgagcggcggggggcatggccgccattcaaatctgaattgaaagaaagagcaaaaaacaagtgaaaatgtgtggaatatttgcgtatctgaattacaacctcaacagagagagacaatacatcttgcaggttctcttcaatggcttgaggagattggagtaccgcggatacgattccgcaggcatcgcaatcgacgattcctcttcttctcaattctctctttcgcctcctcctctggttttccgtcaagaaagaaacatcgaatcgctcgtcaaatccgtctatcagaaatgggagaaactgaactgaacttgggggaatg

SEQ ID NO: 28008 - DNA, 129 bp, Glycine max
  Clone ID: LIB3108-045-Q1-K1-A3
gtatattctcaagtaacattaagggtgtcaaacttctaggaatgttggacagtcattggtcagcatacatgtgatagtgcagcaactaaagttcttggcatctcgttataagcaacctcgctattccta

SEQ ID NO: 28009 - DNA, 425 bp, Glycine max
  Clone ID: LIB3108-045-Q1-K1-A6
gttactgaagaaaatggcaaccatctccgctgctatcacaaccccatcgatcacccgcgcatgtctagtgcaaaaacgttctcttgggttctcatctcccgttcttggtttgccagcaatgggtaaggtgggaagagtgagttgctccatggaggaaaagccttcttctgtgaaggaaagcagctcaagcatgttggggatgggggcatctttgatggcagcggccagcgccgcagccatgtcaggcccagccatggccttggtggatgagagacttagcactgaaagaaccgggctacccttcggccttagcaacaaccttctcggttggatcctgttcggcgtcttcggactcatctgggctctctattttgtctacactttctctcttgaagaggatgaagagtcaggactgtccctttaaa

SEQ ID NO: 28010 - DNA, 331 bp, Glycine max
  Clone ID: LIB3108-045-Q1-K1-A8
caaattccaatttccaattcaaaaccctaactccgttcgaagcaccaaatcgtgatggcaccaaaggcagagaagaagccagcagagaagaagcccgcggaggagaagaaatcgacggtgggagacatggcttcggcggagaagaagccaaaggccggaaagaagctttcgaaagagggaggcgccggcggagaagggaagaagaagaagagaaacaagaagagcgtggagacatacaagatctacatcttcaaggttctgaagcaggttcaccctgacattggtatctcaagcaaggccatgggaatcatgaacagcttcattaacgaca

SEQ ID NO: 28011 - DNA, 421 bp, Glycine max
  Clone ID: LIB3108-045-Q1-K1-B1
accaggcgcacgttagcacaaactatcatggccactgcaacagcagctgccacctcgtcctttatggggacgcgtctcctggaggctcactccggagcggggcgagtgcacgcccgattcggcttcggcaagaaaaaggctcccgccccaaagaaagcctccaggggatcgggccgagacaccgacagacccctttggtatccgggcgccaaagcgcccgaatacctcgatgggagtcttgtcggagactacgggttcgatccgtttgggctagggaagcccgcggagtacctgcagttcgagctggactcgctggaccagaaccttgcgaagaacgtggctggggacatcattggaaccaggaccgagctcgcggacgtgaagtccacgccgtttcagccctacagcgaagtgtttgggc

SEQ ID NO: 28012 - DNA, 364 bp, Glycine max
  unsure at all n locations
  Clone ID: LIB3108-045-Q1-K1-B10
gttgccatactgtggaaatggcaaccctttaattctggatcggtaattcacttactacgcggatgtaccatgccattgcagctttgcctgcttactactactactactaccactacgaacacttggcgctatagattttactccaaaactcgtactgactaacatatccatgaacatatctctgccactatatcgatcaatatacaccacaccttcgaaattgaatgacgaatatgattctaggccataagngtcacgaatctagtttgtgtctgtattattttcggtgatgggtcaatgtaaacttttgtgccctttgttgcctgaacatttagatagtaatacattaaccttttatttttcc

SEQ ID NO: 28013 - DNA, 119 bp, Glycine max
  Clone ID: LIB3108-045-Q1-K1-B12
tccacgcgtccgtccacacgtccgacagttcctatcgtaaagacgctgccgagaccacgctgtctgcatacacagccgcacatgacattgcgaatgccgtactgccttctactcattca

SEQ ID NO: 28014 - DNA, 415 bp, Glycine max
  Clone ID: LIB3108-045-Q1-K1-B2
acgcccacgcgtacgaaaaaacaaactataaagtacacttaaacaaacaaatgacaaaataaaaagaaaaggagacacagtctactggaggcttactacagaacgatagcgagtgcacgcccgattcgactgtttttttgaattttgctcccatttccaaagaaagcctccaggggatcgggcacgagacaccgacagacccctgtggtatgcgggcgccaaagcgcccgaatacctcgatgggagtcttgtcagatactactggttcgatccgtttggactaaggaagcctgcggagtacctgcagatcgagctggactcgctggaccagaaccttgcgaagaacgtggctggtgacatcattggaaccaggaccgagctcgcggacgtgaagttcacgccgcttcattcctac

SEQ ID NO: 28015 - DNA, 345 bp, Glycine max
  Clone ID: LIB3108-045-Q1-K1-B3
cccacgcgtccggtcgttctgcattccatttccttttaaattttacattttcaaattctttttgcagcttaaaatttaaagaatttgaaaagctcactcagttctcgctcgcgattctctcactctctcgtccgacgctcgcaatactcgctacgaccctcgctctactctctctgtctcacgcgcagtggtgcatagcgtctctcatctctgcgatttagatctctgttagacaagcactggatagtgatctgaaatcatcgttgaaattattctgcctcatatttcaagacatgtatggttaatattggacagctgaaatgagatgcaatgcatgctggccag

SEQ ID NO: 28016 - DNA, 378 bp, Glycine max
  Clone ID: LIB3108-045-Q1-K1-B4
cccacgcgtccgctccatttccatttcctttctcttagattccaagaatcttaagctatgggaaagtcttacccaaccgtgagcgctgattaccagaaggccgttgagaaggcgaagaagaagctcagaggcttcatttcttataagagatgcgctcctctaatgctccgtctggcatggcactatgctggaacttacgacgtgagctcgaagaccggtggtcccttcgtaaccatatagcacccttccgaactcgatcacggcgctaacaacggtcttgacatcgatgctaggcttctggagccactcatagcggagcatcccatttcgagctacgccgatctttactacttagctggcgtaactgccgttgaggac

SEQ ID NO: 28017 - DNA, 288 bp, Glycine max
  Clone ID: LIB3108-045-Q1-K1-B5
gtcaaacacttgttggagttcgatgagtcttagactgccaattcacctcaagagagtgctgacgacaagtctagcaaaaaggttgaataagttgaagcatgcccaataccaatacttccgagtcacagaacaaatactgcttttttctgagaaaaccgtctcttttaaagctaacttatttcagcatcacacctctgtaactgattgtgattaaaaaaaaatgtattacttatttttcaaattggcgttttgcttttactggctgactgccccagtctgggtttccat

SEQ ID NO: 28018 - DNA, 422 bp, Glycine max
  Clone ID: LIB3108-045-Q1-K1-B7
ctagaaagaaacgagggtttatgcaaaagctacaataacagcattctcttctctctaacgctgtcttatatcatgacgaggctccttagaacgatcttcatcgcccagaagctccacctgcgcaaccccaaatgcattttcccactactcctccgaagccaacaaaggaaaccagcagcagttggagcatgtacggaaacgtctacgaccgcccagttgcgcagcagtgacgaagataaagggaaaggggaaggtgaaaactcagtgggtgtgctgcaattgcgggcactcgacagggaaatggtgggggcagtgccccgagtgccaaatcgttggcacaatgaacgagtttcgtgagagcaaactcactggcaccaagtccagtggtgggttagcagtttccgaggatccagtgggctcat

SEQ ID NO: 28019 - DNA, 375 bp, Glycine max
  Clone ID: LIB3108-045-Q1-K1-B8
atccactttcactggaatcacaatcctgaaacaaaaacatcttagcatttaacatactacgagacaacatgaccaccacattggaaagaggtttctcggaagagcaagaagctctggtggtgaagtcatggaatgtcatgaagaagaattctggagagttgggtctaaagtttttcttgaaaatatttgagattgctccatcagctcaaaaattgtgctcattcttgagagattcaacggttcctttggagcaaaatcccaagctcaagccccatgccgtgtctgtctttgtaatgacctgtgattcagcagttcagctgcggaaagccgggaaagtcactgtcagagaatcaaacttgaaaaaattaggtgcta

SEQ ID NO: 28020 - DNA, 390 bp, Glycine max
  Clone ID: LIB3108-045-Q1-K1-B9
ctctcttacacacccaagcactactacttctactttctttctagatatgggttctggggctgtgcaactgtttctgatcttggggctcttggctagctcatgcttagcccaagccccaggtgctgcaccgtcacaaccacccactacaaccccatcaccaccaccacccagatcagcacctgcaccagcacccaccacaccatcaaccccaccaccagcaaccccaccaccagcagcaactccaccaccagcagcaactccaccaccagcatcatcaccaacaccagcaccagcaccaccaacggctgcacctacacctgcttcctctcctgcagcctctcctccttcaccttctcctacagtgacaccaatccccacctctcctaacac

SEQ ID NO: 28021 - DNA, 394 bp, Glycine max
  unsure at all n locations
  Clone ID: LIB3108-045-Q1-K1-C10
tccacgcgtccgggcttgttgctttcgagttgataccacgaacttattttgataagctgatagtgtgaaatttgttgaaaaaagaatttataagatcataagtcacttttataagtcattaaatcaaaataatttcggttcaataagctttcctcatggaaaatgattactggaaatgatgcttttttaaagtcagggtctaaaacatccttcatattggtccttatcttaacattagtagaaaaagcagtgggaaatgaccagagcatatcatgaatntcataagtagagaccagagtgaaattaaaaaaggccaagtaaggactaaagtctaaaatgactgaagcatacaatatgaagactaaagtaaggatttactctcttttattttttg

SEQ ID NO: 28022 - DNA, 333 bp, Glycine max
  Clone ID: LIB3108-045-Q1-K1-C11
atactacgtacaacatggatacggtgttgtgtattccaactagtccttgtgtgatgcaggggttatcaaggtcgttgcaccgacactgtacgagactcttaataactactacaagctagtgtctcttggcttcaagattacattcttgtcaggtagtacactgtgcttactggccgtgacactagcttactttcagaatgctggctaccacacatatgaaaacttaattctcaaggatccacaagatccttgcactccaaatgcaagctcatactgaacatcatcgatagagacactgatgaggctgggatacaacattgttgacatcattgt

SEQ ID NO: 28023 - DNA, 173 bp, Glycine max
  Clone ID: LIB3108-045-Q1-K1-C12
ccccactttactacactattaatcactacaacaagccattatatcataactttttcattacattcttctctcctcatacactaatcttactgtccataacactatcttactttcataatcttaaacaccccacatattaaaacttaatttttaattatccacaaaatccttcc

SEQ ID NO: 28024 - DNA, 385 bp, Glycine max
  Clone ID: LIB3108-045-Q1-K1-C3
gaaaaaaaagattctaaagaaatataactaatattctttagaataatcaaaaagaatattaaatgcaaataaattttagatagaaaaaagacttaaaaaggaggatttgaaatgcgagatctaaaaacatatctttccgtggcaccagtagtaagtactctatggttcggggctttggcgggtctcttgatagagatcaatcgtttttttccagatgcattgatattcccttttttttcattctagttattgacacggaaaggggtgaagaagattatagatccaattaagtattaaatatatgtaattaatatgtaattaatctcctcttctttatttcgtcttttatttcttctttttttacaattgtaatagaataagttag

SEQ ID NO: 28025 - DNA, 368 bp, Glycine max
  Clone ID: LIB3108-045-Q1-K1-C4
ggtttcaattccagagcttagtgactccaattatgctacccactgagtttataaggaggcccgtaaggatatgaccaaaagaaaaattcttgccactcctctcactggcatgcttctagatatgctcagaaaactcagaggtcctgaggctgcagctagctacttacgcagtactttgagaaactcaagcacaacaatctcaaacatcattggaccagtggagcaaatggctgaggctaatcatccaattaaagggttttacttcatggtagctggttcacctgagagtcttaccatgacgatcattagctacatgggaaagatcagaattgcatttggagtagagaagaacttcatcgacaagcaat

SEQ ID NO: 28026 - DNA, 370 bp, Glycine max
  Clone ID: LIB3108-045-Q1-K1-C7
cccacgcgtccgctaatgtggagtgatccttaagatattgaaacatgggcagtcagtccgggtggagcaggttggctttttggatccagggtcacttcggagttcaatcacataaataaccttgatcttgtttgtcgagcgcaccaactcgttcaggaaggccttaagtatatgttccaagataaaggccttgtaactgtatggtctgcacctaattactgttaccgatgtggaaatgtagcttctattctgagtttcaatgaaaatatggaaagagaagttaaatttttcaccgaaacagaggagaacaatcagatgagaggcccaggacaggcgttccatatttcttataagttggtgcaaaatttgt

SEQ ID NO: 28027 - DNA, 327 bp, Glycine max
  Clone ID: LIB3108-045-Q1-K1-C8
aaaaaacataacataatacaaaaattatacttaaaataaaaaaacatacaacaaacagtccgggataaaacaaatagacttcatgcatccaaaagtcactacggagttcaatcacaatccataaccttgctcatttgcggcgagcgcacacaactcgttcaggaaggccctacgtctatcctccacgatataggccttgtaactgtatggtctgcacctaattactgataccgatgtagacatgtaccttctattctgagcatcaatgtcaatatctaaagagaacttaaatctttcaccgaaacagatgataacactcagatgata

SEQ ID NO: 28028 - DNA, 411 bp, Glycine max
  Clone ID: LIB3108-045-Q1-K1-C9
tcggccgtcagtcaccgtcttctctgccgccatgaatcttgtcaggtttctcatgaagctgaacgacgaaaccgtttcaatcgagctcaagaacggaacagttgttcatggcaccattacaggtgttgatatcagtatgaatacacatttgaaaacagttaaactaactctgaaagggaaaaacccagttactttggatcatctcagtgtgagaggcaacaacattcgatattatatccttcctgacagcttgaatcttgagactttactggttgaagaggctcctaagatcaagcctaagaagccaactgctgggaagcctttgggaagagggcggtggcgaggacgtggacgcggtcgtggtcgtgggcgttaagttgcacatcacaaaatttgtggcatttgcttgta

SEQ ID NO: 28029 - DNA, 340 bp, Glycine max
  unsure at all n locations
  Clone ID: LIB3108-045-Q1-K1-D1
gaagtgtacccgtagggaaaagaggagaagtgaacctaaggaaggaagggagatggaagtggagaaccagttgttgaggtctgccaccggtcccgaagccaattcccggtcagaacgtaaccgttcactgcactggtttcgggaagaacggtgacctttctcagaaattctggagcacanaggatcctggccagaacccattcactttcaaaatcggccaaggttctgttatcaaaggatgggatgaaggtgtgcttggcatgcaaattggtgaagttgctcgtctccggtgctctccggattatgcttatggtgctggtggctttcctgcttgggaata

SEQ ID NO: 28030 - DNA, 356 bp, Glycine max
  Clone ID: LIB3108-045-Q1-K1-D10
cacactttggtggccacagcatcaataacattgtcagcctcactacaagctgcagctaggtgcatgcatcccaccaaggtgggcatggccactcgcaacctcatatctacacaatgcatttctaaggcttatggcttggaacccgcttgaactaaactcatttgctcccttaagcccgatctgaaagatttcgctcaaaaatgtgtcgactccaccaaaattgcaggattcgcccttgccacctgatctctcgctgcttctggagcgagtgcagaacgtgttccaaagaggctaaccttcgacgaaatccagagcaagacatacttggaagtgaacggaactggaactgctaatca

SEQ ID NO: 28031 - DNA, 428 bp, Glycine max
  Clone ID: LIB3108-045-Q1-K1-D11
aagctgttaccttcaatcacacaatctgtttaatggtctggcgatcctgatgacggaggtcttcatacatataatgactccaagcatttcgtcatatctgcatagataccggagcttattaacaaggacagaaccctggtggttcaatattctattatgtttgagcatgacattgaattctgtagcggttacatcaagcttctttctggttatgtcaatcataagaagtttggtggtgatactccttacagtttgatgtttggaccacacttatgttggtcacagacatagaagctccatcttatactatcataccatggtcagaattacccgattagaaaacatctgcaatgtgaaacggataagtagactcatttctatacattgattctaaggcctgatgcctcttatagtatacttgttgataa

SEQ ID NO: 28032 - DNA, 419 bp, Glycine max
  unsure at all n locations
  Clone ID: LIB3108-045-Q1-K1-D2
acgcccacgcgtccggcaagaaactccatagcgaaaaagaaaattcacgttatattgttagttgattcgtcatttctttctttgagtagtaatggcaagcctcaaggttgcatttgtggttgctgtgctatacatggttgtggtgagtgcacacatggcacatgctaggatcaactgcggccgtgtcgcggtcgcggtgtctccgtgccttggctaccttcgtcgcggtggaaggccacaggcgaggtgctgcaacggagtgagaaacctncacgccctggccaagaccaccgtggaccgtcggacggcgtgcaattgcctgaaaacctttgccagaggtcttggtaggggtgtcaatgccaacaacgcagctgcacttccaagaaaatgtagagtcaacatcccctacaagatcagca

SEQ ID NO: 28033 - DNA, 427 bp, Glycine max
  unsure at all n locations
  Clone ID: LIB3108-045-Q1-K1-D3
cccacgcgtccgcccacgcgtccggccaaagtttagacaagatcaaccaggatacagaccgtgacgttttcatgagtgcaaaagaagccaaggaatatggactcatagatggtgtcattatgaatcctctcaaagctctccagccattagaggctgcagcagaaggtaaagaccgggctagtgtttgaacatgagaatgttgcactctaatttccaaggtataaaaaatcatagtgttagactgtaagatgtttttggttgctgagtccaacttaattgtcatttacggatgttgatacctgtgcccatgtaccaaaaatgaggcgaaattgatactatttatttaatattcactgcttcagagtttatactgacatgaagttctntaatggaacctgaatgtgattttaacttcaagcatactttt

SEQ ID NO: 28034 - DNA, 341 bp, Glycine max
  Clone ID: LIB3108-045-Q1-K1-D4
cggacgcgtgcgcgacttctccttattctaaatgataaggttcagtggacttgttacaacgtcgggggcagcgaaccgctcacgttgccggaatgccatcactttacatgaccattcaatgtgctagtgctactgtcgggtgagtccacgggctgcgcctgctacgacgcactctgatcacttgcgcttactaggaattccgaacatggtgtcccacttgacttggtgaatatcgccagaggacgagctataactgactgacgtaagctgcatacaaatgggacagaccaacacattcgcgtctgacagagtgacagaacgtgaaaacctttgccatatgt

SEQ ID NO: 28035 - DNA, 426 bp, Glycine max
  Clone ID: LIB3108-045-Q1-K1-D5
cccacgcgtccgagtggatgagaattctttatattcatgcattggaattgctggtgctcaggctgcacaagaaatagcagctccgttagaagaggaagtagcagatgatgtttatccaggtgttattccggtgggacgaggtttatctacaatgacacggccaactacctgatatttttggactatgttttggcctgcttgctttaagatcgggaggagtgtctggaagtttgatgacaagttatcgttcgaaggattagctgcatgtgtgacaacacaagaagttgctgcattcatttaaacattcaacccattcggaatacaagctgttcgatcaaacctgggaagcggttattgacttgcgtgtgattgatttcctcaattatccttatctccagttgaatcactaataaaatgctgttacta

SEQ ID NO: 28036 - DNA, 183 bp, Glycine max
  Clone ID: LIB3108-045-Q1-K1-D6
gataaggcccccttcggtatcgcggccgatttgaagatacacgagtatgagaaaaccatggtggcttacaataagaaattggaggggaagaactcagaggaacgactgtctgacatagtcaagtctgaagtcaatgacgatgatgaacatgaggagtaggatgatgatgatgacgacgagtga

SEQ ID NO: 28037 - DNA, 423 bp, Glycine max
  unsure at all n locations
  Clone ID: LIB3108-045-Q1-K1-D7
attttggttaaggtgagaattttccccggaagaaagctagactatgaactgagacacaatgggaaacggggaaatgaaatgaatttcctaacagctgttgaattctccatagaagaaccctatggcaaagcagtggcattgcttgacttgagatctagacatgtcacggcaaaggagaagtggatggtgcttcctggaatcattttgacttttattgcttccaatataatgaaaaaagaaggatatgaaggcatcattgctaaaagtaaagatttgaaggtgaatggcccaaatgaggaaaatgaaaagacagtcttgaatggaacggngttgagttctactaatatgtgcaatgaagatgaggggataacatacaaatctgaaatttccattggaggctgtggaaatgcagtggaaagtggt

SEQ ID NO: 28038 - DNA, 182 bp, Glycine max
  Clone ID: LIB3108-045-Q1-K1-D8
aacgcgcatagggtgaagaagaaattgtcttaggaactgaaggacaacacgcaaagcaggggcgagcatgagatatcaagatctccctagcttaagtcttagctgaagaaatttaagatcctaacgagactaattcatccatgttagatgaaatgatgcatgagcgctaccataactaaccc

SEQ ID NO: 28039 - DNA, 349 bp, Glycine max
  Clone ID: LIB3108-045-Q1-K1-E1
cccacgcgtccgcccacgcgtccggtaagaagctacaagtccccatcttacgctcgggatcacatgatcgccgagagaaaacgaagagagaagctcagccagagcttaatcgctctagctgctcttattcccggcttaaagaacgtgctcttcagttcgctatatacaaagcactgattaaattgatttccaagtacaaggagttatttattagtaacaagaatttaatataatttttttgaagtcattttgtagcactcaagagtgtctgtataattattacgattatttgtttatcataattttgaaattgattttacatagatttaaataaaaaacatacatttat

SEQ ID NO: 28040 - DNA, 333 bp, Glycine max
  Clone ID: LIB3108-045-Q1-K1-E10
ttcccggctcgacgcactcgttctcacttctttaaaaggccaaggctaaaggtgtttctttgttgcttccaactgatgttgtcagatcttacaaatttgcttctgattctaacaacaagacttttcctgcatcaatcatcccaaatgggtggatggggttggatattggtcctgattccatcaagacatttggtgaaacatttgatactactcataccattatttggaatggaccaatgggtgtttttgaatttgataagttttccacatgaacagatgctatagccaataaactggcaaaacttaatgggaaaggagtgacaaccatcattt

SEQ ID NO: 28041 - DNA, 426 bp, Glycine max
  Clone ID: LIB3108-045-Q1-K1-E11
tctttctgaaaaccctatcccaacctgatcttcacttcttggagatggcaaagtcgaagaaccacgccgatcacaaccagtcctacaaggcccataagaatggcatcaaaaagccaaagaggcatctccacacttccaccaaagggatggatccaaagtttctgaggaaccatatgtactcgaggaagcataacaagaagagcggttaaacagccaccgaataagagtaaagtgccactctcaaatgggcctattaagatttgatttgttatttaatccccatatgttttgtgtcgaatctatctttagtagtatagtcatttatatgagttaacttaatccatagagaatgcagtacttactcttataacatcgttgattgttttttgtaatgacccttgaaaatttatcaatggattattattc

SEQ ID NO: 28042 - DNA, 388 bp, Glycine max
  unsure at all n locations
  Clone ID: LIB3108-045-Q1-K1-E12
cggaggagaagaaaatagtcgttcgagattctccgtacgaagcaaactgctcgtaagggcagattatgaaaggctcctatgaagcagcttgcatccaatgctgcacgtaagtctgcaccaactactggtggtgtgaagaagccacatcgttaccgtcctggtaccgttgctcttcgtgagattaggaaataccataagagtaccgagcttttgatcaggaagctcccctttcagaggctggttcgtgaaattgctcatgacttcaagactgatctgcgtttccagagccactccgtgcttgcattgcaagaagctgctgaggcatacctngttgggctctttgaggacactaacctgtgtgccattcacgctaagcgggtaaccatta

SEQ ID NO: 28043 - DNA, 431 bp, Glycine max
  Clone ID: LIB3108-045-Q1-K1-E2
cgctgattaacgggcttgccgtgcatggacgtggtatggaggctttggaggcgttttatgtcatggtggagtctggttaagcccgatccttgaaataaaagcgtgaacccagatacccaattccaaggcacctaagctcgaaaccgcggatatcacactcaacatgacaaccccatcgggtaagatatcactctcgagaagctgcatttgctgaaaaagcgcatgggattcatcggggaatccgtgtttggcgaaacaagagattaaagaggaccaagagaacaaatctcggtggggcatttcgttgaacagtttgagggacacgtggagggacccggaggtgccgtacgagctaataagcgcgttttggacatagacgttggagtgaaacccgagtttgagaatgagggtgtgaagtggtcgaaggggac

SEQ ID NO: 28044 - DNA, 431 bp, Glycine max
  Clone ID: LIB3108-045-Q1-K1-E3
caaaattgcgaagaaccctaattgattgattgattgattgattcccatggcgtcccgaagaggtggagtctcactcccagaaagaccaagcaacaactcatgctccgtcctggcgaacatctcgcgctcctccatcgtcacccgcggcaaggaagccgtcgtcgacgccgcattcgtcgccaagaagctcctccgcagcaccggcaaggccgcgtggatcgccggcaccaccttcctcgtcctcgtcgtccctctgatcgtcgagatggaccgcgagcagcagctcaacgacctcgagctccagcaggccagcctcctcggcaccttcgcccccaaatgaaaatttgaggttttctctcagatcagatttcttgcttttagggtttacggttgcaataattgttcttaactgttctggattttgattaaaa

SEQ ID NO: 28045 - DNA, 427 bp, Glycine max
  Clone ID: LIB3108-045-Q1-K1-E5
cctgacatctggagtcctatttcttcatgtcggagtattccagcaatacataaaagctttaatgagcagactactgtagtgcttgatggaaagttgatatccatggaaatcagatcaaaaatagctgctaaggtaagacaaatgaagaaaggcctaggaaaagttcctggattagctgtaatcttagtgggccaaagaagggattctcaaacttacgttcgcaacaagataatggcctgtgaagaagttggaatcaagtctttggtgactgaattacccactgattgtgcagtaacagatgttcaaaatgccatcatgagatttaacaaagatccatccattcatggtattcttgtgcaacttcctcatctagatgttgcggtagaggaaaaagttttggatgctgtatgtctagaataagatgtgg

SEQ ID NO: 28046 - DNA, 427 bp, Glycine max
  Clone ID: LIB3108-045-Q1-K1-E6
cccacgcgtccgcccacgcgtccgaacaagtagttgagaactaagaaggagaagcacatggcttcctcaatgatctcttccccagctgttaccactgtcaaccgtgccggtgccggcatggttgctccattcactggcctcaagtccatggctggcttccccaccagaaagaccaacaatgacattacctccattgctagcaacggtggaagagtgcaatgcatgcaggtgtggccaccagttggcaagaagaagtttgagactctttcctacctgccagaccttgatgatgcacaattggcaaaggaagtagaataccttcttaggaagggatggattccttgcttggaattcgagttggagcacggtttcgtgtaccgtgagcacaacaggtcaccaggatactacgatggacgctactggacca

SEQ ID NO: 28047 - DNA, 426 bp, Glycine max
  Clone ID: LIB3108-045-Q1-K1-E7
tctgcacttttcagttacaaagcatttcattgttttacaatatacaacactacaatggctgcttcaacaatggctctctcttcatcatcattggctggccaagctatcaagcttgccccctccacccctcagcttggtgttggaagggttagcatgagaaaaacagcctccaagactgttacctcaggaagcccatggtacggcccagatcgtgtcaagtacttgggcccattctctggtgagcccccatcctacctcactggtgaattcccaggtgactatggttgggacactgctgggctttctgctgacccagagacctttgccaaaaaccgtgaactggaagtcatccactccagatgggccatgttgggagccttgggctgtgttttccctgaactcttgtcccgcaacggagtcaagttt

SEQ ID NO: 28048 - DNA, 428 bp, Glycine max
  Clone ID: LIB3108-045-Q1-K1-E8
cccacgcgtccgcccacgcgtccgcccactcgtccggaaaaattattttcccttataaacgttatctctatctatcctttgaaactattacctataatttcagagctagctagttcacagcttcagttcgtttttgttgatcctgtgaacttatggctgacggggtggttctgttggatacatgggccagcatgtttgggatgagggttaggattgcattagctgaaaagggtgctgagtatgaatacaaggaagaaaatctcaggaacaagagtcctttgcttttgcaaatgaacccaattcacaagaaaattccagttctgatcccatattggcaaaccaatttgtgaatctgcaattatagtgcagtacattgatgaggtctggaatgataaagctccaatcttgccctgtgacccttatgagag

SEQ ID NO: 28049 - DNA, 191 bp, Glycine max
  Clone ID: LIB3108-045-Q1-K1-E9
tcccactctttctcccactctttcgaaaataaaaaaaaaaaaaaaaaaaaaaaaaaaaaagaaagataaaaaaaaaaaaaaaaaaaaaaaaaaaaaaaaaaaaaaaaaaaaaaaaaaaaaaaaaaataaaaaaaaaaaaaaaaaaaaaaaacaaacaaaaaaaataaaaaaaaaaaaaaattcacataact

SEQ ID NO: 28050 - DNA, 336 bp, Glycine max
  Clone ID: LIB3108-045-Q1-K1-F1
cccacgcgtccgaagaatttggataaggctattgaccacaaggccttacatgatactttgtcttcttttggactcattctttcttgcaaaatagcaactgatgcttctggtctgtctaagggctatggttttgttcaatttgacaatgaagaggctgcacagaatgctattgacaagttaaatggcatgctgatcaatgataagcaggtctatgtaggccatttcctgcgaaagcaagatagagagaatgctctcagcaagacaaaatttaataatgtctatgtgaaaaacttatcagagtcaaccacggatgaagaggtgatgattaattttgga

SEQ ID NO: 28051 - DNA, 433 bp, Glycine max
  unsure at all n locations
  Clone ID: LIB3108-045-Q1-K1-F10
ctttgttactctcacacatgtctcgctccgtgcctttggtttcaaccagttttgtcttgcttctgcttctggtggccactgagatgatggggccaacaatggtggcagaagcaagaacttgtgagtctcatagccaccgtttcaaggggccatgtttgagtgacaccaactgtggctctgtttgccgaaccgaacgtttcactggaagacactgccgtggctttcgtcgcagatgcttctgcaccaaacattgttaattttaaaaaattaattaagagtgctttgatagaagatgatagatctatcatctntctactcgtgttgttaattaaccactttgtgtttgagaataagggttacccattctactatgggtttctttgtttgcctcttattttatctagttagagatccttttatgaaacgagtgatc

SEQ ID NO: 28052 - DNA, 328 bp, Glycine max
  Clone ID: LIB3108-045-Q1-K1-F11
tctccgactcgttcgtttttaaatgggaatatcatttttctattcttatttatttgcatcagccaggctatagaccatacctttgtttcacaacattacaagattattattgccactgcaaactggaaaataaagcatacttgctcttattgagccaaactacactgaattctaaagcaaaatatagagatgacaccaccaaaattttaacacagtaagtgttaaaattaaaaactatatatatagtttcttgagagttttgggtaaggagagagcttcttccatgggagtgaaactccaaatatacactatatatctatcagctttt

SEQ ID NO: 28053 - DNA, 435 bp, Glycine max
  Clone ID: LIB3108-045-Q1-K1-F2
cccacgcgtccggtggggatctgagaggagaggtgcggcgatggcttttgcagttacgcgcaagataataacggtgtcattcgataagcaaaaccaaaggaggagtttcgaaggattgtttgggaaaaggtatcgggtaagggtgaagcgaagtcaagatcattcagtgaagtgtggtattgagcgaagcagcagcgatggaaagaaagggggcggaggaggaggcgtgtcaaattcgaactacgtggtgccgctggacaacatggcgaactcatcctgcataacacgtcctttagccgagatactcagggacctcaataaaagaatcccggatactatcgtcaaacatgatcgcttcatcccctggtatcatgccaacaggatgctcagcttctacgccccaagttggtgtggcgagatacgtgatgtcatttt

SEQ ID NO: 28054 - DNA, 426 bp, Glycine max
  Clone ID: LIB3108-045-Q1-K1-F4
gtttgttgttgtaactcgttcttcttcttttgctgttctgtgtttgtgttcgttttttcggtcggctgaaaatgtcttgctgcggtggtaactgtggttgcggaagctcctgcaagtgcggcaacggctgccgaggctgcaagatgtacccagacttgagctacactgagtcaaccaccaccgagaccttggtcatgggagtggcacctgttaaggctcaatttgagggtgctgaaatgcgtgtgcccgctgagaacgatggctgcaaatgtggaccaaactgctcctgcaacccctgcacttgcaagtgaggtgttgggagagcaagcttcaagcagagatagcccttaattaggaataatgataaactattaatgtgtagctaaaaacttatgtattatgtctgtgatggttttcgtgcactct

SEQ ID NO: 28055 - DNA, 306 bp, Glycine max
  Clone ID: LIB3108-045-Q1-K1-F5
gatggatacaggtatcattaaccctgatcataaaatcttggttaatgaaggagaaaaagaggccagtgcagatattcattagaatgagaaattacaaaccttgggcctttgaaataatatacaggcactaaggtagccagatgctgtgacattcttattttgaagttagaatcaagagaccttttgttaatttgatgttggatttaacatgatcacagatgtttttgccttgtgaattctatcttttaacgggcatgaaatgcttgcttgtgcagtcagcagagttttgctgatgatgtggtagac

SEQ ID NO: 28056 - DNA, 140 bp, Glycine max
  Clone ID: LIB3108-045-Q1-K1-F6
cctgacgttcagtgcactcatccttgctgtttaagtatatctgcgcatgatatatgctgggatgaaacctgtccttcacattgacgtgaagttgttatctagaggacgtatctatcttgaagggtcttgtcatgacacaa

SEQ ID NO: 28057 - DNA, 412 bp, Glycine max
  Clone ID: LIB3108-045-Q1-K1-F7
cccacgcgtccgcccacgcgtccgcccacgcgtccgcaaaatatgtcaactagagatcaggccacttctggtgaacacatgcctgttggtctttcctcttcccaaaattagattgcttctcaactctgttatattcctaacccattcgtgagaagttgcaggttacatatcagtatccagccattgcctgaagctttatatatgatgtactttctaacatgaaaatttctggactgattcataaagaaatggatcagcttcctttttttctgagggatcttgtagaaataaagacttgaagggtgaaaatataccttttttttacttcgctaagaatattatattggattaaaaaaaaaaaataaaaatataaaaaaaaaaaaaaaaattaaaaaaataaaaaaaattaaag

SEQ ID NO: 28058 - DNA, 388 bp, Glycine max
  Clone ID: LIB3108-045-Q1-K1-F8
acctacgcgtccgaacgaaacttatcttgggaagctgcttcgttcgaagagcagagaaatggtggttgggcagcttgttccttcgaatttgttcctgaatcgttctgctgcgaccagacacagacaccttctttgtgtttctgcaaatgacacaacctcaaccaataacacggataacggttctccattctcaagtttcggaagactcaaggcccataaagtgaagactctcctggtccacataagatgaaaggaccaaagccatatacgccccgttcaccttgaagatgatgatgattatgtatccacccctagaccccgacgctctcagtctcgtacacgaggaggataaagatgggatatgattcccaattatactccaccggca

SEQ ID NO: 28059 - DNA, 279 bp, Glycine max
  Clone ID: LIB3108-045-Q1-K1-F9
acccttctctacccactctttctatctctatcttctccctttttttatatataaatatttttttttttttttttttttaaaagaaattttataaaaattttatccttccttttatttttttttttttaaaaaaaaataaatttatttttatataaaaaaaataaaaaaaaaaaaaaataataaaattaaaaatataaaaaataataatattataaaaaataaatttataatataatatattttaaaaaattaaattaaataaataaaaaataaaaatta

SEQ ID NO: 28060 - DNA, 263 bp, Glycine max
  Clone ID: LIB3108-045-Q1-K1-G1
ctcactcatgcgctaccgacagtgctggacttattggaaggcatttatgagagggatagtgagagggattgtctgaagcagaggatgagcccaaaccacagctctgaccacatggttaagctgattgcctatgctcctgacaacactgcctatatcactgtctatgatatcgatgagctcactggtgtgctcactaatgtgctctcgattgggatcacactcagtatcacactcggtgataaccctgccactgacactatcac

SEQ ID NO: 28061 - DNA, 324 bp, Glycine max
  Clone ID: LIB3108-045-Q1-K1-G12
acttcaaaactataaaaaccaatattataacatatataaaaaaccatctcacatctctcatataccttattcattataataaatattctatatttaattccctccataaacatctttataaacaccctatttattcttaccttaattatttttatatataaaaaaatcatccatcaaatcttatatcttcatttaaaaatttattttccctaaaaatatttatatcccttttcttttcttcccatctaaataataattattttcaaaaccactttatattattctcataatttcttctttcaactttccaatcatacttacatt

SEQ ID NO: 28062 - DNA, 279 bp, Glycine max
  Clone ID: LIB3108-045-Q1-K1-G2
tttcttttaatattaaattctatcttttgttttgcacccaaaaaaaataaatgaaatagggaagggtataaaaaaaaaacagaaaatgaaaacaaaaaaagaacacaaacaacatttttacgctctatttgtaccctccttcgttcgcttcctatctcaatgtttgttctatcattgagctcactaaattgattaccaatgtgctcttttataacatcacactttgtaacacacttagtgataatcacttctaatgaccatatcactatcaagacttct

SEQ ID NO: 28063 - DNA, 137 bp, Glycine max
  Clone ID: LIB3108-045-Q1-K1-G4
caactttgacagctacatcatgtgagacatttcgcttacgaagcgcatgacgtaccgcggggagggggtattactcgaaatgggcctacacgtcaaatcatcaatacgatcacggtataatctcgcgctcgtgcatc

SEQ ID NO: 28064 - DNA, 338 bp, Glycine max
  Clone ID: LIB3108-045-Q1-K1-G5
cgatttcgacagcaccttcatcggctacgcctcgctcacaaagcgcccgatgggccgcgtgttgaacccgctgcgcgaaatgggcgtgcaggtgaaatcggaagacggtgaccgtcttcccgttaccttgcgcgggccgaagacgccgacgccgatcacctaccgcgtgccgatggcctccgcacaggtgaagtccgccgtgctgctcgccggcctcaacacgcccggcatcacgacggtcatcgagccgatcatgacgcgccatcatacggaaaagatgctgcagggctttggcgccaaccttaccgtcgagaccgattccgaccgcgtgcgcacca

SEQ ID NO: 28065 - DNA, 382 bp, Glycine max
  Clone ID: LIB3108-045-Q1-K1-G6
ccagacctacagcgcattcatcgttgacgtttgggtcacacagcgcatgataggcgctgggatgaaccctctacgcgaaatgggcgtgcaggtgatatctccagaccgtgactcgtcttcagtgatcttgcgctgacacaaaacacctacgcccatcacctagtgcgtgccgatggtctagcgctcaggggaagtacgacgtgatgctcgaagttctcatcacacccggatattgcacggtcatcaagccagataatgacgcgcgatcatacggaatacatgctgaatggcttcgacgacaaccttaccatgcagacagctgcggacggcgtgcgcaccattcgtctggaaggctcgcgcaagatcatcatccaaatcatcg

SEQ ID NO: 28066 - DNA, 372 bp, Glycine max
  Clone ID: LIB3108-045-Q1-K1-G7
tcttagctttcctttccagttcatacttcatcctattattactttccctctttgcattccaaatggccactgttgaggttgcacagcaaacaccaacaactgtgacagagaatgaaacaacgactgaggtaaccaagattgaggaaactaccccagaacagccagccaccgaggttactgccccagaaacagtcaacgaagaagcaaaagaggaagcagcagttgagactaatgaggcaacagaagttacagaggaagggaaggctgagaaaacagaagaagaagaagaagtgaaagaggagactaaagaaaccgaatcagcaccagtggaggaagagaagcatgatgagaacataccagctgaaaccgtag

SEQ ID NO: 28067 - DNA, 422 bp, Glycine max
  Clone ID: LIB3108-045-Q1-K1-G8
cccacgcgtccgcagcgggtccctctgtctaattcctatttgaggtatgaactgatttggaggacttccattcaccaaaactgacattgacatagacttgaggcttccttcaatccaagtcatccaccgggagttgaagccaaaccttctcaacatatacaacaagaattcccaagataccgaatcatacgccttctcaaaatcgatcttgaagatcagacaaggtttgtggttctttcttgcttcatctattatctcattagtgattaagacactttgcagcaaatgtctaccttcaatgaatgcgaattgagtttcctcaattattgctggcagcactcttctaattctgtttgcaagcaccttggccactatcttgtacatgcacccaattaaggatatgggtttgtattctcccaaat

SEQ ID NO: 28068 - DNA, 352 bp, Glycine max
  Clone ID: LIB3108-045-Q1-K1-G9
gttccattccaattccaagttacaacttttctgtgtctatggatcgcgctcagcttcggttggttcgtgtacccctcttcctcttctgctctgacctcttctcccttttcactcatcatccaccgtcgccaccccaccaccaccaccaccaccaccatcctcacccgccgcaccaccaccaccacccaccgcaccaccatcaccacccaccccaccaccaccatcatcacccgtcccaccaccatcaccagccggtgacaatagatttcccttccgagaaacccaccaacaatattgcaactccgggtctcggcaacacttgccacatcaatttctgctctttctgctctta

SEQ ID NO: 28069 - DNA, 357 bp, Glycine max
  Clone ID: LIB3108-045-Q1-K1-H1
cccacgcgtccgcttagatagagttgttactatttgctcccagtacagagcttaaccgagcttcacaaagatgaatcgggaaaagttgatgaagatggccggttcggttagaactgggggaaagggtaccatgagaagaaagaagaaggctgtccacaagacaacaaccacagatgacaaaaggcttcagagcaccctgaagagaataggggtgaatgccatcccggctattgaggaggtcaatatctttaaggatgacgtagttatccagtttctaaatcccaaagttcaagcatccattgctgctaatacttgggttgtcagtggttctccacaaaacaaaaaagttgcaagata

SEQ ID NO: 28070 - DNA, 204 bp, Glycine max
  Clone ID: LIB3108-045-Q1-K1-H11
acccacccttctcccacacatccatttctattctataaatttaatctaaaaaacaaaaaaaaaacacaaggaagatttaaaaaaaaaaaaaaaccaaccaaccaaaaacaaacacaaaacaaaaaaaaaaaccacacaaaatcaataacaaaaaaaccaaaaaaaaaacacaaataccaccataaaaaacacaaatctacaacc

SEQ ID NO: 28071 - DNA, 277 bp, Glycine max
  Clone ID: LIB3108-045-Q1-K1-H2
cttaattatgattttaatttgggaatacattaacatcatgtgaattatgactgaaccgagcttgagaaagatgaatcgggaaaagattgatgaagatggccggttcggttagaaactggaggaaagggtaccatgaagaagaaagaagaaggctgtccaggggacgacgtcttacaggtgccaagctgctttacagcaccctgcagagaataggctttaatgccatgcacgctattgaagatgtctggccctctaatgacaacgtagttattgggaa

SEQ ID NO: 28072 - DNA, 272 bp, Glycine max
  Clone ID: LIB3108-045-Q1-K1-H4
acgcatacgtatagtctggactcagcaatacattccattgaggactcaccggtacgtggcccgctcgtggaatctcgaaccaccgtattcaattcaaatcttaacctcaccagtaaaataccacaataatatgctataattataataattaagtataaattaagtacttccaggtacgaatttccattggcaagatctccatctgttgattagatcacttcatcctcggcgcggttttgcaatgctgtgaagtccaatagataactagaggc

SEQ ID NO: 28073 - DNA, 319 bp, Glycine max
  Clone ID: LIB3108-045-Q1-K1-H5
ctagaggaagagctccataagcgtgttgtcggtcaagatcctgctgtcaaggcagtagctgaggctatccaacgttcaagagcaggtctttcagatccccatcgcccaatcgctagcttcatgtttatgggaccaacgggtgtaggaaagaccgagctagccaaggcccttgcttcatatttgttcaacacagaagaagcacttgtacggattgatatgagtgagtacatggaaaagcatacggtttcaagattgattggggctccacctggatatgttgggtatgaagaaagagggcaactaacagagaccgttcgtc

SEQ ID NO: 28074 - DNA, 429 bp, Glycine max
  Clone ID: LIB3108-045-Q1-K1-H6
tgtctccatcgtttcgcattgcacaagcactctctctttcccttaccctttttcaggtttcaacgctccaactatccatggcaaaccgctggctcagacccgaggtgtatccactgttcgctgcggttggtgctgctgttgggatctgtggattccaactggttcgtaatatctgcatcaaccctgaagtcagggtgaacaaggagggaaggaaggcaggagttttggagaactttgctgagggagagaagtatgccgagcacttcctgaggaagtatgtgcgcaacagaactccggagattatgccctccatcaacagcttcttcgctgacacaagtcgcaactaagttgctttgaataaacaaaggttaatgtgagatattaattctattgtggttacaaacagattttatcatgcatttgtaaaac

SEQ ID NO: 28075 - DNA, 412 bp, Glycine max
  Clone ID: LIB3108-045-Q1-K1-H7
ctccaaggaagtcccctaatcagaaccagatatggacaccaaacccaccgagatcagcagcggcaagatgttcggaggttacaacaagagattcaagcatttcagccttaccctgggatgctccatgaacttccacatctacttccctccatctccttctccctctcacaaattcccagtgctgtactttctctctggcctcacttgcaccgacgagaacttcatattcaagtcgggtgctcagcgtgccgctttcgccgagggtgttgccttggttgcccccgacacttctccgaaaggcttgaatgtggaaagagaagcagacagcttggaccttggaataagtgcaagattttatctcaatgccacacaagagaaatggaagaattggcgcatgtatgactatgttgtc

SEQ ID NO: 28076 - DNA, 367 bp, Glycine max
  Clone ID: LIB3108-045-Q1-K1-H9
aggtgggccatgctcgccactctcggagctctcactgttgagtggctcactggtgttacatggcaagacgccggggaggtggagctagtggaaggttcatcatacctagggcaaccacttccattctcaatcaccacactgatctggatcgaggttctcgtaattggctacatagagttccagaggaacgcagagctggacccagaaaagaggctgtacccaggtggcagttacttcgacccactgggcctggcctcagatccagagaagaaagccacccttcaattggcggagatcaagcacgcccgtctcgccatggtgggcttcttgggctttgcagtccaagctgccgtcactggcaagggcc

SEQ ID NO: 28077 - DNA, 482 bp, Glycine max
  Clone ID: LIB3108-046-Q1-K1-A1
gtgataaacccctctctcttatcgaagaagctgagcgcaaagcagcagaaaatgggttttgtgatgcaatgctcaagctatggcacttgtatttctatttgtatctctcatcgtttcccccaaacctctctatcttttcacgttccagctcaccactggaaccgattcaagagtgcacgaaggaatcagaggatgatggttctttgtagcgtggacgaccgaagctacaacctagattccccgaggaaaataaaaattgtggaacacgtttgtctcctcaaagcaaagcatgatttatctgaagaggaagagaacgacatgcttggttatttgtacacaacgcagtaccaaatgggcggtgttggtgcaatttcattagggcgcatttcttcttcaaatcctgagcgctacacgcatgctctctttatgcgggttcagaaaaaggaaaatcttgaaaaggtttacgagaatcccttttacat

SEQ ID NO: 28078 - DNA, 400 bp, Glycine max
  Clone ID: LIB3108-046-Q1-K1-A11
agaaatttaagtgaggagctagagaatgatgatgaagtctgctatgtgtgcagtggtggtggtagcacttcttcttctggcggaggtggggcccatggctgaggctgtgacatgcaccccaacagagttgagtccgtgtcttccagcaatcacttccggtgctaaaccttccaatgcttgttgcacgaagctgaagcagcaaaaaccatgcttatgtggctacctcaaaaacgctagcttgaagcagtatgttaactctcctaatgcccgaaaaaccgttgcttcttgtgggattccctttccaacttgttaattaattaagccttcttataattaaagtgtgggatatatatatatatatatatatatatatatatatataaaccagttaatttataca

SEQ ID NO: 28079 - DNA, 428 bp, Glycine max
  Clone ID: LIB3108-046-Q1-K1-A12
ggccgttcaaaccttcaacataaaatggaatattccaagggttttgttggtggtgagtctcgaaagccacatccagaaatgccctctatttcttttcaaattcctatgccagggaggaatcgatctggtggtctctacccttggggatggaggcaaagagcaataataccacagcacaccgtgcgaaactctaacggggcaagtgagaacacaaatttgaaggtgtaagtcactcatggagtaataatactatgtatgaaaatgtgaaacgtttgaacagttgttgcggttgttatgttgtcttcttcattatcgtatattatcgtgcatgggtgtacgtagctcagtacctgctttgaggataaaagctttactaagcttgaatatgaatatcttcagcagtttgtatttgataatgactcatatat

SEQ ID NO: 28080 - DNA, 458 bp, Glycine max
  Clone ID: LIB3108-046-Q1-K1-A2
cgattaaagacttgcttccaagatggttctgctagagaagctctgggatgacgttgttgctgggcctcaacctgagcgtggccttggcaagctcagaaaactcaccaccctcaaaactattgatgaaggagacagtagcaagctgcagaagacgttgtcgatgccgtcgacaccgacaaccccgatgactcccacgactccaacgacaccgggatccgggcgtaaagctgacaacgtttggaggagcgtcttccatcctgggagcaacttcggcacaaagaccatcggtgctcaaatgtttgacaaaccactttccaacacttccactgtctacgactggctgtacactggggagaccagaagcaggcaccgctgaaaggataagctaagaaaaccgggggttgcatggaaatattggcctttttcggtaaacacctgccacgtttgaatctactact

SEQ ID NO: 28081 - DNA, 441 bp, Glycine max
  Clone ID: LIB3108-046-Q1-K1-A3
ctctagagaattatcataccctttaagatgaaaccgtacctacgtccagtattcctgttattcggtatccttctcgaccaatccatttcgccgagtgctgctattaatattaatggtctgataaacaaatatgcacaaattctaaaggggcccccgagaatccaaattccggcaaatagactgatgaagctgaagagaccactgttgacagtgcaggagctgatgggcaaatgtaaggacgggccgcctcaaggaatttgcccgaaacttaagaacgcgtatcaacaaaattgcccgaatgccgcgtatgaagcactttgcccgatagtgaaggtagtgtatcaatggtgttgccggaatgacgcataactctgcaagccacggtgggcgtattgatgtgcttttagataccactttctctcttggatttgcttacgtatt

SEQ ID NO: 28082 - DNA, 339 bp, Glycine max
  Clone ID: LIB3108-046-Q1-K1-A4
cccacgcgtccgcccacgcgtccggtgatttcagtgagtgatcggtgttcacttgatctcatcataatcgtcagcgtcaattgaagaagatgccgatcagaaacatcgccgtcggaaggcctgaagaggcgactcaccccgacacgttgaaggcggctttggctgagttcatctcaaccttcatcttcgtgttcgccggctcaggctccggcatcgcctacaacaagcttaccgacaacggcgctgccacccctgccggcctcatcttcggcttcatcgcccatgcattcgccctcttcgtcgccgtctccgtcggcgccaacatcttcggcgggcacg

SEQ ID NO: 28083 - DNA, 480 bp, Glycine max
  Clone ID: LIB3108-046-Q1-K1-A5
cccacgcgtccgaaaaggccatgagggcagtatctggtatttcaggggtggagacagtctcagtggacatgaatgacctgaaaatgactataattgggaatgttgatgctgtaatagtagttggcaagcttagaaaatgttgtgatcatgctgatatactatcagttggaccagccaaagaggagaagaaagaggaaccaaagaaagatgagaagaagccagaagacaagaaagatccaaaggaggaatatgctgaacttctgaacgccttttataatcagaccagacagcagcaataccccccttattatcacagaacagtggaagaggatccaactagctgtgttatttgctaagtattggaatatcatatggagtttgaaatgatggataataaaatgagatcaagaaaagatggtggctgcatggagttgaagaagaattatgtttctttggagttccctgtgtccttcttttctt

SEQ ID NO: 28084 - DNA, 72 bp, Glycine max
  Clone ID: LIB3108-046-Q1-K1-A7
cccacgcgtccgcccacgcgtccgcccacgcgttcgcccacgcgtccgcccacgcgtccgggcgcgcgttcg

SEQ ID NO: 28085 - DNA, 477 bp, Glycine max
  Clone ID: LIB3108-046-Q1-K1-A8
ctagaaactgaggacttagctagtagttagagatgcctgagttttgcgtgacaggtggtactgggttcatcgcatcttacctggtcaaggccttactagagaagggtcacacagtgaggaccaccgtgagaaacccaggggatgtggagaaggttggttttctgactgaactaagtggagccaaagagagactgaagattttgaaagcagatctattagtggaaggaagctttgatgaggcagtgagaggagttgatggtgtctttcatatggcgtcccctgtgcttattccttatgatgagaacgttcagcaaaatttgattgatccctgtataaaaggaactttgaatgtgcttaactcttgtgtaaaagcaactgtgaaacattttgggctcacctcttcttgctcttccataagataccgggatgatgtgcaagaaagtgtgcctcttaatgaatctcattggactgatctag

SEQ ID NO: 28086 - DNA, 354 bp, Glycine max
  Clone ID: LIB3108-046-Q1-K1-B10
accacgcgtacgcacaggtgttggcccatattataacctcctagatcatttggctgacccggtgcgacaacatcatcttgaccagtctcaagttccactgaatgtattatatgttattttacatattctttacgttgccaaaactcaactacctttctacctttctatatcatgtggacattttgttccttgatgtggcgctgtaagaaatgacatgtaaaacaactagaaacattcgacagaaaagagttgattacagcctaataatgtgaaaaaaccatgcttattatgcgtatgatagctattaccaaaaaagaaagccaggctaaaaaaaaaaggggcgtcctttttaaa

SEQ ID NO: 28087 - DNA, 447 bp, Glycine max
  Clone ID: LIB3108-046-Q1-K1-B11
gagataactagaaacagtgtgatgaaaatgtaggtccttgttttcttcgttgctacaattgtggtagcatggcaatgccatgcgtacgatatgttccctctccgaatgaacactggctatggtgcccgtactccggaggtgaaatgcgcaagttggaggcttgctgtggaagcacacaacatctttggctttgagaccattcctgaagagtgcgttgaagcaacaaaggaatacatccatggcgaacaatatagatcagactccaaaacagttaaccaacaagcttacttttatgccagagacctcgaagtccatcccaaggacacatttgtgttcagtatagatggcaccgtactctctaatattccatactacaaaaaacatggatatggcgtggagaaatttaactcgaccttgtatgatgaatgggttaacaaggggcaatgc

SEQ ID NO: 28088 - DNA, 400 bp, Glycine max
  unsure at all n locations
  Clone ID: LIB3108-046-Q1-K1-B12
ctctgtttcttttcttctcgcagagcgaaattcctatcccacacaaatggcatgctcagccggctctgcttctctcttctccgcaaaccccacacctctcttctctcccaaatcctccctctccctccctaacaactctctccacctcaaccctctccccacgcgcccttctctctccctcacgcgcccctcgcacactcgccgctccttcgtcgtcaaagcctcctccagcgagcttccgctagttggaaacaccgcaccggatttcgaagcagaggctgtgtttgaccaggagtttatcaacgtgaaactatctgattacattgggaagaaatatgttgtgctcttcttctacccgttggacttcactttntgttgtcccacagaaatcactgctttc

SEQ ID NO: 28089 - DNA, 470 bp, Glycine max
  Clone ID: LIB3108-046-Q1-K1-B2
gtgaaaggttaagatcgagaaattagggtgaagtgaaggagaagctcttgagaagcatatgtcttttcatatttaatattaaaagagttgcattggagcatgttgggtcgggaattattgtagctgacttgaaagttgaaactgaagatgggagaagcaacagaaagatatgcagttgtgacgggtgcaaataaaggaattggattagagataggtagacaggttacttcagctggaatcaaagtgttgctcacagcaagaaatgagaagaagggtcttcaagcactggaaacactcaaagactcaggtctattccaccttgtactgtttcatcaggtggatgtggctgatgcaacaaatgtagcttctttggcagattttgtcaaatccaaatttgggaaactcgatattctgattaacaatgcacggattggtggagttgtaaatgatgacactgatttaatcactac

SEQ ID NO: 28090 - DNA, 396 bp, Glycine max
  Clone ID: LIB3108-046-Q1-K1-B3
cccacgcgtccgaaccaaaccatcgagtgcgttgcacccccaccgtaagcacagctatgtcgtggcgcatgcgaaccttgctcaaggtcattgttctcggcgatagcggggttggaaagacctcgttgatgaatcaatacgtgcacaagaagtttagtcagcaatataaggctaccattggggctgattttgtcaccaaagagcttcagattgatgacagacttgtcactctacaaatatgggacactgctgggcaagagagattccagagtctcggggttgcattttacagaggtgccgattgctgtgttcttgtgtatgatgtgaatgtgatgaaatcgtttgatacccttgagaactggcacgaggagtttctcaaacaggcaaacccttctg

SEQ ID NO: 28091 - DNA, 211 bp, Glycine max
  unsure at all n locations
  Clone ID: LIB3108-046-Q1-K1-B4
cccacgcgnccgcccacgcgnccggaccacactcangagancncnaacannanaagcaacgcgggcggcaccacaaacgggcnggcgccccncgngaagaaccnggangcagagcnnggacacgggaagggaaccangacaaccacgcannccaacacnggagaccagaggcncnnggaagcgncacaccgngacccgagaagagccaggg

SEQ ID NO: 28092 - DNA, 354 bp, Glycine max
  Clone ID: LIB3108-046-Q1-K1-B5
accgtccggaatccggggttccgaagattgcagaaccacagccaggaaactctaagctaatctgacgccaactttcatccaattggaatattatgaaatctctttttaagatttcacattttgattcttctcaattttatctgcgattctcgcttggtacctttgttttgtttttaatattttagttttcctggatttttattttttttttattttttattgtttttagtctttggtcaattttcactgtctcctgatgatcattttaccatgtggggtgagttaatttgagattgttgtgcgctgatttcttcttaaaggctcaaagggttttctgggtttgatcgaacaagc

SEQ ID NO: 28093 - DNA, 390 bp, Glycine max
  Clone ID: LIB3108-046-Q1-K1-B6
gaacattcacgtgcgcgctgctgtcttatcttgccattgcgtcaacgtcgcgatcgtgtgtgcgactaacatcacacaacagaaccttgttccgttcttctcagaactctctcattggagagagcacgagagtcatgacggacggtcatctattcaacaacatcacactctgaagccggggcggcaccaatccagggcagagtagactatatactggaagaattatatcgaagagacagtgcgatgggcaattaaacgaagttgatcaatctgacatagtggagctgacatggatgaacgtgcccactagtaaccaacttgaagttgaaatcaaagatgggacgttctataagctcacactatctcgagacgcagatgatgtaagtgtga

SEQ ID NO: 28094 - DNA, 335 bp, Glycine max
  Clone ID: LIB3108-046-Q1-K1-B8
aaaaaaaaaaaaaaaaaaaaaaaaaaaaaaaattaaaaaaaaaaaaaaaaaaaaaaaaaaaaggggaaaaaaaaaaaaaaaaaaaagaaaaaaaaagggacgccaggataaaaggtccaagctttggaatcgcgaccataaaaattaataaattttaaaagggagacctaaaataaaaaaaaggggcgcactttaaaaaacgtggaaacgggaaaaacctggggtataccaaactaaaaagcctaaaagaaaatacctttttggaaagatggggaaaaaaaaaaaaggccaaaccgaaaagcctttccaaaaattggccaagcctaaagggaaaa

SEQ ID NO: 28095 - DNA, 373 bp, Glycine max
  Clone ID: LIB3108-046-Q1-K1-C1
gattgtctgatgcagtaactcgttcatcttcatttgctgctcagagatagagaatggacattgtgtcacctgaaaatgtcttgctgcggcggtaactgaggctgcggaagctcctgaaagtgccgcaacgcctgcggaggctgcaagatagacccagacttgagctacactgagtcaaccaccaccgagaccttggacatgggagtggcacctgttaaggctcaatttgagggtgctgaaatgggagtgcccgctgagaacgatggctgcaaatgtagaccaaactgctcctgcaaccactgcacttgcaagtgaggtgtagggagagcaagcttcaagcagagatagcccttaatcaggacaaatgataaac

SEQ ID NO: 28096 - DNA, 447 bp, Glycine max
  Clone ID: LIB3108-046-Q1-K1-C10
cggacgcgtggggtcctccaggtggaccggttacaagaagatcaccacagaggacgagggcgcttttgacttttcatccgactccagctctactatgcctaacgtgaagatcacaagagttcccagacgaggaagcttctgggctctgtctaagccaaggtcacatatgtgggcaagcatttatgaaagctttaagcaagtggtcccatggagacgcaagcaacaaacacagaaaaaatgtgcttcccaattgaaaactgtttgatattttagatttttactcttgtcaaatggagttgtttaagtaattatatccttctgacaggaaaaaaaaaacgacgtcctgaacaaaaaaaaatagcatttagtatataaataaaaaattattttacacgtcaaaggcgtctctcatagcatatacgattcatactgactggatataatata

SEQ ID NO: 28097 - DNA, 388 bp, Glycine max
  Clone ID: LIB3108-046-Q1-K1-C11
aaaatagacaatacttgtctatggttattattggttgtatgtctgtatttggatgctctggatcggtttgcaagtaataagagtgttttcactgtcactttgtaaaaaaaaaaaaaaaaaaaaaaaaaaaaaaaaaaaaaaaaaaaaaaaaaaaaaaaaaaaaaaaaaaaaaaaaaaaaaaaaaaaaaaaaaaaaaaaaaaaaaaaaaaaaaaaaaaaaaaagggcgccccttttaaagaacccaagttaacttaccctttattgcaacttaaaaacttttttatagggtacccaaaattaaattaactggccgtcttttaaaaactctgtaattgaaaaaacctctgcgtaaccaaattaaatccccttgaaaaaaatccccttttt

SEQ ID NO: 28098 - DNA, 361 bp, Glycine max
  Clone ID: LIB3108-046-Q1-K1-C12
gcgtcccccacgcgttcgattctgagttagccaaatttatttctcacctttcgcatccctcaactctgcatcccattctgaaccaaatttcagttccacccaaaaccctaattttctttctctcccgcacctacatcttcatgttttaagcaccttcctccattcacaaattgggaataggtcatcgggacaaactccatcacttcataacaataactgtagccagtgagaaaatatcacttcatgctcttaatgctagtgattggcattcttaaggatcatttaatttcttttacaaccaaccccagcttaaaacatttactgattctaggcacttttaagatctatacaatatatttta

SEQ ID NO: 28099 - DNA, 384 bp, Glycine max
  Clone ID: LIB3108-046-Q1-K1-C2
cccacgcgtacgcgcctgcgtctctctctgaattgactagcttaaatggctggtcctaggattgcccatgctaccttgaaaggtccgagtgtggttaaggagatcataattggaataacacttggcttatctgctggtggtgtgtggaagatgcaccactggaatgaacagaggaaaaccaggaccttctacgatttactggaaaagggtgagattactgttgatgcagaggaacagtgaaaatgttcttgatttgttgcctatgctctacatttataggctttttttatccgtgatatattcaattggctcttgaaatgtcaatgagccaacatactatgagattgaaaagaatgagcttcttgaactgattgaatactatgt

SEQ ID NO: 28100 - DNA, 387 bp, Glycine max
  Clone ID: LIB3108-046-Q1-K1-C3
cccacgcgtccgcccacgcgtccgcccacgcgttcggatctgatttctgacatctgattctgagtatcattggagggaacctcaacccaaagtttagttttttttttttattattattattgttgttatttctgccacaacatttaggggtgcattgcaaatggcttccattgttgcaagcttgccgccaccattgctgctccctgctagaaaatatcatccgggcaacttcccaagttcccctttttctcttctttcaaggagaccgaatcatgtttcttttgttgtgaaggcttctggagaaagttctgaatcttcaactacccttactgtttttaagtctggatataatgtttgggatcaacctgaggaccgtctgggacttat

SEQ ID NO: 28101 - DNA, 408 bp, Glycine max
  Clone ID: LIB3108-046-Q1-K1-C4
cggacgcgtgggtggatatggaagatgatctttttgatgcattacctccatttcaaggaaaaggggatgataaagttgttgaccctcctgttggggaagatgcaagtttcctaaaggctgggaagaattggcatgctgaagaggaacatccaacagaagtcagggaattgggtaaaagcaaatggtcagaagattttggtgaagatgacattgatcaaactgaagtgatgaaaggcaatattaatgctctgtctggggtaattcatcaatatggcaagggacgaaaatctgtacattggggggataagggtggcaaaacagggttttcaataagggctgcaaggaatgtagatgcttattcgttagtgatcggacctggtgctggatataacctgaaatttaattcat

SEQ ID NO: 28102 - DNA, 440 bp, Glycine max
  Clone ID: LIB3108-046-Q1-K1-C5
tgaaaatgaaggtccttgttttcttcgttgctacaattttggtagcatggcaatgccatgcgtgcgatatgttccctctccgaatgaacactggctatggtgcccgtactccggaggtgaaatgcgcaagttggaggcttgctgtggaagcacacaacatctttggctttgagaccattcctgaagagtgcgttgaagcaacaaaggaatacatccatggcgaacaatatagatcagactccaaaacagttaaccaacaagcttacttttatgccagagacctctaagtccatcccaaggacacatttgtgttcagtatagatggcaccgtactctctaatattccatactacaaaaaacatggatatggggtggagaaatttaactcgaccttggatgaagaatggggtaacaagggcaatgcaccggcactgcccgag

SEQ ID NO: 28103 - DNA, 182 bp, Glycine max
  Clone ID: LIB3108-046-Q1-K1-C6
gaaaagaaaaaaaaaaaaaaaaaaaaaaaaatataaaaaaaaaaaaaaaaaaaaaaaaaaaaaggagaaaagaaacaagaaaaaagggaaagaaaaaaaaaaaaaaaaaaaaaagaaaaacaaacagagaaaaaaaaataaaaaaaacaggaaaaaacaccaaaaggaaagaacaaaagaaa

SEQ ID NO: 28104 - DNA, 473 bp, Glycine max
  Clone ID: LIB3108-046-Q1-K1-C7
gggagaggtacagattgacaaggcttgagcaatataggaattttgagaacattcttacatctggggatgctgtggacaaggagtgtaagcaaatggagaagggtggcaattactatgaattcttctataatacaagaatggttaagcctaccatccttcattttcagctgagaaacttagtatgggcaacttcaaaacatgatgtctatcttatctccaactactcagttaatcactggtcatcattaagtggtaatttgtctgagataatcaattttgctgggcatgtggccccgacccctactaagagatatgcaggaaatttgttggaaggattttctcagacccagattagcacattagccgtcaaggataatcttcttgttgctggtggcttccaaggagagcttacttgtaagcgtttgaataagaaaggagtaagcttttggacaacggccacacatgatgaatat

SEQ ID NO: 28105 - DNA, 413 bp, Glycine max
  Clone ID: LIB3108-046-Q1-K1-C8
cacaacatttgcggttctgcctgcaaatttttttcccctcaatcgtatattgctcaggtgggggtcctgttcccccccaagcacccctgagattcgttcgcaaaaagcttaataagaacaaaaaataaaaataatattcttcgatattatttcatttcaatttcgttttcgatttcgttttctgttttgatttgatcttccaatggcgtccgatggctttaccgacaagaacaccgtgttcagaaagctcaaggcgaaatctgaaaataacatgtgcttcgattgcaatgcgaagaaccctacctgggcgtccgacacgtatgggatctttctctgcatcgattgcaccaacgtacaccgcaatctcggcgtgcacatcagcttcgggaggtctacaaatttagactcatgga

SEQ ID NO: 28106 - DNA, 341 bp, Glycine max
  Clone ID: LIB3108-046-Q1-K1-C9
cgcgtccgtcagtttgcccttccctaagttagatgttttctttatctgaccttttaagaaccgatttgtctgtgtgagatatagccttgagcgcgtaagaccttccattctcgaagaaggaaaaggtgagaagcttgactgcggtcgacacgccttcgtcgaccttccaaatggcttgcattaatgtctttgaacagcaaacacatgaaccttcttaaaccgtcatcaacaccaccaacagattcaagcttcataagacattcttgaataactgctacagggctcttattccacggaagctaccatcagtgactaaaaaacggccatcggaatccatgtca

SEQ ID NO: 28107 - DNA, 383 bp, Glycine max
  Clone ID: LIB3108-046-Q1-K1-D1
gattgttgtgactcgttcttcttcgtcgttatcttcttcttttgttgtttgcgtgtttgttttggctctcacctgaaaatgtcttgctgcggtggtaactgtggttgcggaagcgcctgcaagtgcggcaacggctgcggaggctgcaagatgtacccagacttgagctacaccgagtcaaccaccaccgagaccttggtcatgggagtggcaccagttaaggctcaattcgagagtgctgaaatgggtgttcccgctgagaacgatggctgcaaatgtggagctaactgcacctgcaacccctgcacttgcaagtgaggtgttggagagctaaagctttaaacagagatggcccttagaaataatgattaaaactatatgta

SEQ ID NO: 28108 - DNA, 240 bp, Glycine max
  Clone ID: LIB3108-046-Q1-K1-D10
aacagaattgcgaagaaccctaattgattgtttgattgattgattcccatggcgtcccgaggaggtggagtctcactcccagaaagaaccaaccacaactcaagcctccgccttgccaaaaatctcgcgcctcttcatcggcaacccgcgcaaggaaacccgcctccacccccgattcctcggcaaaaaacttcttcggaacaaccgcaaaggccccttgatcggccgcaccaactttct

SEQ ID NO: 28109 - DNA, 385 bp, Glycine max
  Clone ID: LIB3108-046-Q1-K1-D12
attgagtttctgagataaccacggttctttttgattcatcaatggcaaccgcaattgtccgtgttttatgtttcgcctcacgatttcatgaatgcttacgcctcccatctcaagcgttccggcaagattgagcttcctgagtggactgatattgtaaaaacagctaaatttaaggaattggctccatatcatccttactggtattatgttaagtcttcctcaattgcaatatacatttatttgagaggccgtctttgtgttggtgctttccatagcatctattgtgtaatcatgacaaatggaagccggcccccacattttttcaaaatcatttttgctatttcaagacacattctgcaacaatttcaaaacattatcatttttt

SEQ ID NO: 28110 - DNA, 465 bp, Glycine max
  Clone ID: LIB3108-046-Q1-K1-D2
caagtccatggctggcttccccaccagaaagaccaacaatgacattacctccattgctagcaacggtggaagagtgcaatgcatgcaggtgtggccaccagttggcaagaagaagtttgagactctttcctacctgccagaccttgatgatgcacaattggcaaaggaagtagaataccttcttaggaagggatggattccttgcttggaattcgagttggagcacggtttcgtgtaccgtgagcacaacaggtcaccaggatactacgatggacgctactggaccatgtggaagctgcctatgtttggttgcactgatgcttctcaggtgttgaaggagcttcaagaggctaagactgcataccccaacggcttcatccgtatcatcggattcgacaacgttcggcaaatgcagtgcatcaacttcatcggctacaagcccccaggcttctaaaggtgaaaaat

SEQ ID NO: 28111 - DNA, 341 bp, Glycine max
  Clone ID: LIB3108-046-Q1-K1-D3
cccacgcgtccgcaactttgcccccttgtaaaacttcttattgtgatgtctaaaagcgaagacgtgaagcttttgggaggctggttcagcccatttgccctgagggtgcagattgcccttaacctcaagggtctagaatatgaggttgttgaagagaccttgaatcccaaaagtgacctgcttcttaagtccaaccctgtgcacaagaaaatcccagttttcttccatggagataaagtcatttgtgaatctgcaatcatagttgagtacattgatgaggcttggactaatgttcccttcatactttcacaaaatgcttatgatcgtgctaatgctcgatt

SEQ ID NO: 28112 - DNA, 451 bp, Glycine max
  unsure at all n locations
  Clone ID: LIB3108-046-Q1-K1-D4
gtttctttcttcttctacatccactgcacaattgccacatgaatcattagttagggtttattcggcaagaaaagcaatgagtgcgtccaggttcatcaagtgtgtcactgtgggtgacggtgccgttggcaagacttgcatgctcatctcctacaccagcaacacttttcctacggactacgtgccaactgtctttgacaatttcagtgcaaatgtagttgtggatggaagcactgtgaatcttgggttgtgggatactgctggccaagaagattacaatagattaagacccttaagctatcggggagcagatgtattcctgcttgctttctctctcataagcagggctagctatgaaaatgttgccaagaaatggattcctgagttgaggcattatgctcctggtggtccaattattcgtggnggaacaaaacttgatcttcgggatgat

SEQ ID NO: 28113 - DNA, 435 bp, Glycine max
  Clone ID: LIB3108-046-Q1-K1-D5
caaccctaacgcgtgcagagcagagagagacgcagccatggggcgaagacccgcgaggtgttataggcaaattaagaacaaaccataccccaagtcacggttttgccgtggtgttcctgatcccaagatcaggatttacgatgttggtatgaagaagaagggtgttgatgaatttcctttctgtgtccatctggttagttgggagaaggaaaacgtttctagtgaggccctggaagctgctcgtattgcttgcaacaagtacatggccaaatttgctggaaaggatgctttccacttgagagtcagggtgcacccattccatgttcttaggatcaacaagatgctttcgtgtgccggagctgataggctccaaactggaatgagaggagcttttggaaagccacagggtacttgtgctagagtggctattggaca

SEQ ID NO: 28114 - DNA, 173 bp, Glycine max
  Clone ID: LIB3108-046-Q1-K1-D6
cccacgcgtccgggagggaccaaatggatcatatcctcaacatctcctaactattgaaataggtgaagggagaaaccccatccttgctacctaggttaattgtatgatagagcactgctgttttttcagttctttgagataatttgaatggctattcagcattaattagtggc

SEQ ID NO: 28115 - DNA, 386 bp, Glycine max
  unsure at all n locations
  Clone ID: LIB3108-046-Q1-K1-D7
ancccgctngannngaaggccgccncgcgcttttagataaaagntctgccaaatcaagaggggggaatagatcatagtgtgtgtgggtgtgttaaacaatggctaagttctttgctgctatgatcttggcactcattgccatttccatgcttcaaacagtggttatggctgctaatgagcaaggaggccacttgtatgacaacaagagcaaatatggaagtgggagagtcaagagataccaatgcccatcacaatgctcgaggagatgtagccagacccaataccacaagccctgcatgtacttctgacagaagtgctgcaggaaatgcctgtgtgtgccccacatatattataggaataaagccgtgtgcccttgctacaacaac

SEQ ID NO: 28116 - DNA, 468 bp, Glycine max
  Clone ID: LIB3108-046-Q1-K1-D8
cccacgcgtccgcccacgcgtccgcaaaaaattagataaaaagccaggttgcatttcaattttgcaaaattattcaaatcgaaaggaaagaaagagaacaacatagtgcagtttccaagattaaagaatcaaatctgttgtctagattataaccttcaagtgtggggcagtgatagttatattgtcccactggatttcatgttttaagtgtatcacttatttttggcccctacttactttcccccctaggaggctgctttatactacacatacggttgcacttgtctgtgattttgggaatcaatttttcactcatcgaagtgtgatctcagatgcgagtgtcaaattgttcataactcttcaatcaaaccttgttcttcctcttgaatgatttaaacatggcagcagtgtggttctttttggacatatatagctctaccctttgtctcatatgaaggcactgaagat

SEQ ID NO: 28117 - DNA, 364 bp, Glycine max
  Clone ID: LIB3108-046-Q1-K1-D9
ttgacggcggtgaagggaggagggtgttattgatggaaagtcttatataattgatatgaagaaagggaggatgaggattcggttgaaggtggcgctggctttgggggttgtggtgatttgtactggggtaggtgtgggggttatgcattttgtggagaagcttggatggttggattcgttttatctttcggttatgtcggttaccacggttgggtatggagaccactcgttcaagaccatgcacggtcggatttttgctgcgattttggtgcttgtgtctacgcttgctgtgtcccgggcgtttctctatctggctgatgccagagtggattagcgtcatacgaagatggcaaagtggattctt

SEQ ID NO: 28118 - DNA, 412 bp, Glycine max
  Clone ID: LIB3108-046-Q1-K1-E1
ccaattttgagagggtaatatttgagaattgatataaccttatcagaagggacatttttttggggaaatgtggttaataatgttgataaggatagagttccatacatccacagttgcccggctgtgagcaatttttgtctgtttattttaagcagttcagaagcacattgagcggggtagttcattgagatctttagctttctggcaacggtgtgtgaagcatgaattatcaaccaaggttcctgcaagatgattacattgacggaccaattgtagtataaatcttgccattattttaaggaaagaagtacgtgggagtggatttttgtaacggggcattctatatgtcaatgcacatacagttctgtatatataaagatggacactggaatcatgcatttcttttaacttt

SEQ ID NO: 28119 - DNA, 412 bp, Glycine max
  Clone ID: LIB3108-046-Q1-K1-E10
cccacgcgtccgcccacgcgtccgcccacgttttcgtttaggatttcagcatcagtggctgcggcctgcatgcttcacggtgcaagcagccggcccgcaaccgcccgcaaatcctctggcctttccggaaccgtccgcattcccggcgacaagtccatctcccaccggtccttcatgttcggcggtctcgcgagcggtgaaacgcatcaccggccttctggaaggcgaggacgtcatcaatacgggcaaggccatgcaggccatgggcgccaggatccgtaaggaaggcgacacctggatcatcgatggcgtcggcaatggcggcctcctggcgcctgaagcgccgctcgatttcggcaatgccgtcacgggctgccgcctgaccatgggcctcgtcggggtctacgatttc

SEQ ID NO: 28120 - DNA, 377 bp, Glycine max
  Clone ID: LIB3108-046-Q1-K1-E2
ctaaaacttaatttaacttaacaattgctagctttctaaaattaacattcttaaactcaagcgtgtaacagcttttaatacgaagtttgtaaagtttgaatatggttgaatttagtagtaatggccattgagttgatacttgtctttcaattttcaggggatttacaaagttcagtcgaagtgagtatttgaagttgaagtctgagaacagaattgtgccggatggggtcaatgccaaggttcttgggtgtcacggacctttggcaaatcgtgagcctggaagagctttcttaccagctactgcttaagccatttagcagttagcactaggatactcattgaatatgtgggttttctttttacctggtgaatggata

SEQ ID NO: 28121 - DNA, 399 bp, Glycine max
  Clone ID: LIB3108-046-Q1-K1-E3
cccacgcgtccgggtggcatcccaactggtcgatttagcaatggaaaggttccatcagaccttggagttgaagagttgggcattaaggagcttctgccagcatatttgaaacccaatctccaatctagtgatttgatcacaggggtctgttttgcttcaagtggctcaggctacgaccctttgacatcaatattagagtcatcgatgccattaactgggcaagtggatttgttgaaagaatacatagggaaactaaaagggctggttggagaggacagagcaagtttatcttaaccaacagtctattcattgtagtagcacgcagcagtgacatttctaatacctatcggactagatccctgctctatgatcttcctgcttacactgatcttttggtca

SEQ ID NO: 28122 - DNA, 381 bp, Glycine max
  Clone ID: LIB3108-046-Q1-K1-E4
ggaatcttctggaggagttccatgcgaatcatggccttcgccctccaagcattcttggagtgagggaacatgtttttacaggaagtgtctcttccttggcttggtttatgtcaaatcaagaaactagctttgtaaccttggcccaacgagttttagcaaatcctctcaaagttcgcatgcactatggacacccagatgtatttgacagaatatttcacataactcgaggaggcattagtaaggcatcacgtgttattaatattagtgaagatatatacgctggtttcaacttcacattgcggctgggaaatgtcacacatcatgaatacattcaggttggaaaaggaaaggatgttgggttaaaccagattgccctctttg

SEQ ID NO: 28123 - DNA, 435 bp, Glycine max
  Clone ID: LIB3108-046-Q1-K1-E6
ctagactacatcatcacctaatacccagaccatctcgccgcacacagcgcactgcagcgtggggtcttcgcacgccgccgtcgacgtcgtccgccatcgtcacatctcgccggagcgtcgcgtcgctggctaagtgccaagtgctgctgctgattttgtggcttgttgataaaaatgagacttataacacataacatgctgtcatcgaacataaagggtgttgtaaatggatttcctttgcggattgaagcagagaaagttgtagaaaagactgtggaaatgaacggtgagtttctgaaaaagatgtttgagaagattgattggaaggcttttggttatgcatcacgagcagtgggatacacctagctacctgaagaggccgactctttcatgctggattctgatgaatttctgaacaggtttgaccatgctctc

SEQ ID NO: 28124 - DNA, 445 bp, Glycine max
  unsure at all n locations
  Clone ID: LIB3108-046-Q1-K1-E8
cccacgcgtccgctgttcttgcgcgtgaacattcctcaggtaagccaaaaccatggttaaggataacaatgttatcccaaacggacacttccgtaagcactggcagaactatgtgaagacttggttcaatcagccagcacggaagacaaggagacgattggctcgtcagaagaaagctgtgaagatattccccagacctacggctggacctctcaggcccattgtacatggtcaaactttgaaatacaacatgaaagtgagaggtggaaggggattttctcttgaagaactcaaggcagcanggattcccaaaaagcttgcaccaaccataagtattgctgttgatcatcgttgcaagaactcgtctttggaaagtctgcaagctaatgtgcagaggctgaaaacatacaaggccaaattggttgggtttccaagacgggcacac

SEQ ID NO: 28125 - DNA, 299 bp, Glycine max
  Clone ID: LIB3108-046-Q1-K1-E9
aataacctattttatatttatatttatggtacaagtgcaactactgtttagttggttcaaaaaaaaaaaaaagaaaaaaaaaaaaaaaaaaaaaaaaaaaaaaaaaaaaaaaaaaaaaaaaaaaaaaaaaaaaaaaaaaaaaaaaaaaaaaaaaaaaaaaaaaaaaaaaaaaaaaaaaagcccccccttttaaaaaaaccaaacttaataaacccttcaatccaacttaaaacttttcaaaaagttaccccaaaattaaataaaattcccttcttttaaaaacatttttaactttaaaa

SEQ ID NO: 28126 - DNA, 108 bp, Glycine max
  Clone ID: LIB3108-046-Q1-K1-F10
acccacgcgtccgcccacgcttcctcttaataaaattactctctccttttaccaacaaaaaaaaaaaacaaaaacgaagattttaaaaaaaacctttgcccccccaaa

SEQ ID NO: 28127 - DNA, 335 bp, Glycine max
  Clone ID: LIB3108-046-Q1-K1-F11
cgcgtacattagaaaacgtttcaacttttatgatgaattttttcggttctcacagggtttatcgtttagcggtttttacaaagcgaaacttccaacttcatcttcaacccttcgcttcttttgaactggcatggcaagctctttgacaacattagccattacctattctcctgtcaacaatggttccaggggtttcagaaagtctgttaatgcttctaaatgaatatgtttcataaaatcaatgaggatatataaatccttggatgaattgtacaatgtgaatgttgaaagaaaagttcctccttagagactatccgagcttggagtttcaaaat

SEQ ID NO: 28128 - DNA, 329 bp, Glycine max
  Clone ID: LIB3108-046-Q1-K1-F2
attgagcagtgcagagactcctgaacgtcaactgctatggcagcttcttcctttacaacatcgggcattctcttcccattcacaactagttctaaatcccctccttctcaactattcccctcttttccttgcaaacatcataccctccgtctcagacccgtctcagtctcagccgcttcaaccccaaccccctccattcaagccgacaaatccccggtctccgccactcccttcaagcttctcccctttcggattggtcacggctttgacctccaccgattggaacccggttatcccctaatcatcggtggaatcaacattccccacga

SEQ ID NO: 28129 - DNA, 410 bp, Glycine max
  Clone ID: LIB3108-046-Q1-K1-F4
gatcgcctactggcggaaccatattgtggtcactgttctcgccgctttgggaatcgcgcccaaggggaccgtcgatgttcatgagatgctcttcaagaccgctgactatttgaccagagggggtgactctggcattttctcgccgatgcacatgatcctctgcagaaagccccatgacaaggacgaccataactgagcgtttcattgggaaattccaaaactataacaaccaccaccttgtttctttccggtactctcttttttttttttcataattattattatcttgggtttaacttattggtattagttattattattactatgaacttggtgtaatatgggatttgatcttttcaaattattgttattttgctatgttgatcatttaaaaaaaaaaaatagggcgg

SEQ ID NO: 28130 - DNA, 244 bp, Glycine max
  Clone ID: LIB3108-046-Q1-K1-F5
attaatagataatttacacgaaccaatatgttttatgtgaagaaacttacaaatgtttttggggttatctaacatcctatcctaggtctttgaatacaaaaattgggaaaggttgtacagtctacaataatcgatggacagagtggtcattgagatggtagagcattctccgtactctcctgcgtctgggtggtttcaacactgcatgtttccttagaaactgggctttaacattctatttggt

SEQ ID NO: 28131 - DNA, 445 bp, Glycine max
  Clone ID: LIB3108-046-Q1-K1-F7
cccacgcgtccgaggcgaaggactttaggttgttatttgggaattagggttgttcgcgtgggggagatgattgaggtggttttgaacgatcgattggggaagaaggtgcgcgtgaagtgcaacgacgatgataccatcggcgacctgaagaagcttgtggcggctcagactggcacaagagccgacaagatccgcatccagaagtggtacaccatctacaatgatcacatcactctcaaggattacgagatccatgacggcatgggtctcgaactctactacaactaaacacaacaaggtgtgttttatgcgtaatatactatgtgctgggaatgggataagcgctgaatgtaattctgacttgcgaaagttcccatgatttgaaataatgtacatcttcaaatgatattggggattatatacccgtgacaacttaagttgcttt

SEQ ID NO: 28132 - DNA, 474 bp, Glycine max
  Clone ID: LIB3108-046-Q1-K1-F9
cctctgattccccatcgacccctcgtcctaaaagaaaattaaaaaaaaaattaaaaatataattttaaaaaaaaaaaaaaaaaaaaattgaaaattttaaaagtttttttcccctccttttattttatttctttctcttttttacttcttttctttttttctcttctttttctttattttcttttttttctttctttttcttttttttctttttctctcttttttcttttttctttcctttttttttttttttttttttttcttctttccctccttttttttctcctctttttattcttctttttcttcctttccttttttttcctcttctttctatttcttttttttttcttttctcttttttctttttttttttcttttctttttctttctctttcttttcttctcttttcttcttatccttcttctctcttcttttttttcttcttttttcctttttttttactctacttt

SEQ ID NO: 28133 - DNA, 447 bp, Glycine max
  Clone ID: LIB3108-046-Q1-K1-G1
atccatccgcgcatattctcatttcaatttgcttttgcatttgcgtttcatttggcgttttgcgggtttctggaagcttcgttcgggcatcaatggcgtccttcgatgaagctcctcccggaaactccaagaacggcgagaagatcttcaaaaccaagtgcgctcagtgccacaccgtcgacaaaggtgccggccacaaacaaggacccaatctgaatggtttgcttggaagacaatctggtacaactcctggatattcctattccactgctaacaaaaacatggccgtgatttgggaggaaaagaccctctatgattacttgctcaaccccaaaaagtatattccaagaacgaagatggtatttcctggtcttaagaaacctcaggaacgtgcagatcttattgcatatcttaaagaatctactgcttaatgattaaattttcata

SEQ ID NO: 28134 - DNA, 406 bp, Glycine max
  Clone ID: LIB3108-046-Q1-K1-G10
gcagcatcaaaggccattaaggaatggggctatacccttatcagaaatcacacacctcatcggctacaccacttcttgcttcggctccgttcccggtcctgaccactacctctccaaacaacttggactccgctcaacggtcaaccgcctcatgctcttcagccacggttgccacgctggcggcaccattctccgcgttgccaaagatatcgcggagaacaaccctggctcacgtgttcttgccgtctattccgagaccatgtttgcctcgtttcgcgctcctagcgaatccaacgttgaggttctcgtaagacaggctctgttcggagacggtgccgccgccgtcatcattggcgcggatcctaagcactccatcgagcatccactcttcgaactcgtgttggct

SEQ ID NO: 28135 - DNA, 373 bp, Glycine max
  Clone ID: LIB3108-046-Q1-K1-G4
ggctccgccgagtggggcggtggcgccgccgtgttactacatggcgttcgcagtgaaccagggagtacccagcattgcaaagtggatacacgtgtcataagtcgtaactgtgaagtaacgaagtctctttgatgcattttggaaattgaaattgtatttaaatttatttattttctttttttggggggcaagtgggggattaaaaatttaaaattgagattcttcaattgttaataggaattggggactgggaagtcggtaagtgtgactggtgaattgcaaattcattttttttaagccccacaaccagaaagggaaatgcaaatgatgttttaatgggaatttcgcaatgcatggaagaatgatttaagag

SEQ ID NO: 28136 - DNA, 442 bp, Glycine max
  unsure at all n locations
  Clone ID: LIB3108-046-Q1-K1-G5
cccacgcgtccgcccacgcgtccganctcatatcaccaaaaacatagtactatacagccccggtgtctctttctctttctcttgactctaaagtctaagcatccatggccatggcgtctgcaaagctcaacaccttgtcttcccagtggatcgcccacaattccttctctcctcgccgtggatcctcttctcgccgagtctctcttccgatccgcgcttcttcttaccaacacgaactcgtccaaaccgccaaatctattgcatctcccggtcgtggaattcttgcaattgatgaatcaaatgccacatgtgggaagcgtttagcatccattggattggacaatactgaggtgaatcgccaggcctataggcaacttctgctcaccacacctggccttggtgaatacatctctggtgcaattctttttgaagaaacccttta

SEQ ID NO: 28137 - DNA, 187 bp, Glycine max
  Clone ID: LIB3108-046-Q1-K1-G6
aaaaaaaaaaaaaaaaaaaaaaaaaaaaaatttaaaaaaaaaaaaaaaaaaaaaaaaaaaaggggggaaaaaaaaaaaaaaaaagggaaaagcaaaaaaaaaaaaaagaaacaaacgggacgacacaggcatgagacccaaaaacgcagaaaaaagggggcccgaaagaaaatatacgtggccgggg

SEQ ID NO: 28138 - DNA, 441 bp, Glycine max
  Clone ID: LIB3108-046-Q1-K1-G7
gtgaagagtgagagagagagagagagagaggctcttggaatccaaaaatgagagaaatcatcagcattcacataggtcaggccgggatccaggttggcaactcctgctgggaactctactgcctggaacatggcatccagcccgatggcatgatgccaagtgactcctccttcggtgtagcccacgacgccttcaacaccttcttcagcgaaaccggatccggcaagcacgtccctcgcgccgtcttcgtcgatctcgagcccaccgtcatcgacgaagtccgttgtggcacttaccgtcaactcttccaccccgaacaactcatctccggcaaggaagatgccgccaacaactttgccagaggccactacaccgttggcaaagagatcgtagatctgtgcttggatcgcgtccgaaagctcgcagacaactgcactggtc

SEQ ID NO: 28139 - DNA, 380 bp, Glycine max
  Clone ID: LIB3108-046-Q1-K1-G9
aaaagaaacatgatgaactttgacggcttctatattgctctggcggagtttcagggccgggggctgcacgctgctgggcagcctgacccgtctccagcccaaccgcgcgaggccaccatgggctcggatagcccagccctggggaggcaggcccatggccatgacggtggaggcaatcgaggagcgcttagagggaattcccgtttacgccctcagcaacgcttccgaggagtttctcttggtctcgggctcttcctccgggaaaaaccttggcctcttctgcttcaacaaggacgacgccgaggctctcctcaaccaggttacgcttatcgacccccacgctcgccagggctccaaagttgtccccgttgctttgaaca

SEQ ID NO: 28140 - DNA, 390 bp, Glycine max
  unsure at all n locations
  Clone ID: LIB3108-046-Q1-K1-H1
aaattaagaggccccaaaagctgcacacattgtccttcctgtccaggaatttgagatctagcggcggacatggcaataatgaagttcttgttccagtgcccttgctgctcttgcttttgcttcatgaagccaaagcaagggaaggcaaaggtcaaggaagtcaaagaaaccaaggtggaagaaaaaaaggttgaagaaaagaaagactgaccatgtaactccatttcaagctttctttggttattattagtattatataagcatgcacaacaaatttgggtctacttaatttgagcttctttgttcctttaattaccactgctatgatgcctttctactacaattagnatgaaaatgtgcaaagcgtttgcaagtaacttcttaaaaatg

SEQ ID NO: 28141 - DNA, 388 bp, Glycine max
  Clone ID: LIB3108-046-Q1-K1-H10
atatagcccaagccctatacaaccaaaccctatcacacacccatttgattcagtttccatggctagcctcaaggttgcatttttggctgcagtgctctgcatggttgtggtgagtgcacccatggcacatgcagctatcacgtgcgggcaggtgacgagtagcctggccaattgcatcggttacctccagaagggaggaacgccgtcgtcgggatgctgcaacggagtgaagagcctcaatgccgccgccaagaccaccgccgaccgccagacggcgtgcaactgcctcaagtcggccgccagccaaatctccggcttcaacgccaacaacgccgtctcgctccccggcaaatgcggagtcttcatcccctacaagatcagcaccttc

SEQ ID NO: 28142 - DNA, 224 bp, Glycine max
  Clone ID: LIB3108-046-Q1-K1-H11
ttcttcttatatctactcttatactgtatttcccttaaagatatctatgttacactccctaactttttatcattaacatttttacatattcaaatctatctctattcaatgtacataatcaacatacccataaatctatcatatactatcataacacaattattatattgtagatagttaaaacattattttctccaactatttaatttttaaaaacaataaca

SEQ ID NO: 28143 - DNA, 404 bp, Glycine max
  Clone ID: LIB3108-046-Q1-K1-H2
caccgcacgaatatcttgttgtttggagcgatctcgagaaaaactctgtaaacatgttggtttaggaggacctccttacaggtgatgagcttctctctgactccttccgttacaaggaaattgagaatggaatgctgtgggaagttgaggggaagtgggttgttaaaggagcagttgatgtagacattggtgcaaacccttctgctgagggtggaggagaagatgagggagttgatgatgcagctgttaaggttgttgacattgttgacacattcagacttcaagagcaacccgcattcgataagaagcagtttgttaccttcatgaagaggtttatcaagaatttgacttccaatcttgatgcacagcaacaagagttggttaagaagcacattgagggagca

SEQ ID NO: 28144 - DNA, 453 bp, Glycine max
  Clone ID: LIB3108-046-Q1-K1-H5
cccacgcgtccgcccacgcgtccgcccacgcgttcgaagcaaatactaaaactgatatgtgggggctgaacctccgttatgtttttgtcattctcatgcaaagagattccgaggaaggatcagaaggtctctatagcctaaagttcacttctaaggaacaggaacaaagtgatgatgattcctatactgttgcttttgaggatcatgctgatgccaacaacttctgttttctattaaaatcgttttttgaagatttggggtcttttagtgctgatgcagttccaatgtcaatacaagaactgaatgaagaaataatatcacgtgccaagaaagtcgtagttgtgaaaaagaggcagcttcaactctatgctgggcaaccacttgctgatgttgaaatggcattgggctctataatagagcaagatcaaaatgcaccatcatcgccgtgatatg

SEQ ID NO: 28145 - DNA, 330 bp, Glycine max
  Clone ID: LIB3108-046-Q1-K1-H6
gctgctctggtgaagaagcttaagggtgtacttggaggctcaggctaaaccatgggaagggggccatgaagagactgaagtcaagcaagcatattgtctattacctttaagtttatttatctccttggtctacaatttggatttagtatgcatgtgtaggtagaactcttctttcagcaggctttgtagttgagtaataaacttaagctgatttggttattgttgttgtgatggttattgttatcaagtttcagttgaagcagatgatttcgtacttgagaaaattgagctatgagatgaatttaatatggggcctattctcagtgttcc

SEQ ID NO: 28146 - DNA, 480 bp, Glycine max
  Clone ID: LIB3108-046-Q1-K1-H7
cccacgcgtccgcttctttctctctcgctctttcttcaattccaagctttattcctcatgtcgttcagaggcctcagccggccaaatgcctcatcaggcatgggtgttgctgatcacagcaagaacaccttcatggaattgaagcagaagaaggttcaccgttatctgatctttaaggttgatgagaagaaaagggaagttgtggttgagaagactggtgacccggctgagagctatgaggatttcgctgcatctttgcctgagaatgattgcagatatgctgtctttgactatgatttcgtcacttctgagaactgtcaaaagagcaaaatcttcttcattgcatggtccccttcaacgtctcgaatccgagccaagatgctctatgccactactaaagacaggtttagacgagagctagatggtgtccattatgaaattcaggctactgaccccacagaaatggatcttgaagtactg

SEQ ID NO: 28147 - DNA, 337 bp, Glycine max
  Clone ID: LIB3108-047-Q1-K1-A1
agccttccgaaaaccgaagcacaaatggggatcgatcttttgccggaggtaaaagcaaaaaaaccaaaggaacagttcccaagtccaatgatatctatcttaagctcttggtcaagctttatcgcttccttgttcggagaactggcagcaaattcaatgccgttatactcaagagattgttcatgagcaacgttaacaagcccccattgtctttgtcaaggttgattaagtataccaaggggaaggaagataagattgctgtggtggtgggcaatataaccgatgatattcgtgcttatgaagttccagccttaaaggtcacagcactcacgtttac

SEQ ID NO: 28148 - DNA, 416 bp, Glycine max
  Clone ID: LIB3108-047-Q1-K1-A10
ctgcagttgtgtcttcttgccaagcaagcttaataggtagttcatcctctgcttgcaatgttcctggctacaaaaccacttctaatgtgatagcaatcaaagcaagaagagccaatctctgcatatacagcttcaatgctttgactttcagaccatccaagagggacatcaccttgtgtggtaattaaaagaagcagcttacacaagtaggcctagtactttggtcacttgtgtatacatacaaattccaagaaaataaaatgaaaaaaaaaactatatgttgtctttttgcagcccattaagggcatagaaccatagatctcttgtctctctctctcttcattgttttgctgcattattttgtttggtaacactgttttcatatcatgctatgttagaaaaaatatcatgctagt

SEQ ID NO: 28149 - DNA, 328 bp, Glycine max
  Clone ID: LIB3108-047-Q1-K1-A11
ctcacgcgtccgattgctctttaagctgcgttacttgttaattcatacccgtgggacactcatttatcgatgtgcgtctggctaacgtcctaaaatggagtacatgaaccagcaacctatatatgtacagcttcaatgctgataatatgataccttgcatccactacatcactgttcttgcaaattcatgtggccaaaacattcaagactatatagccgtaaagctagtcgtatatacatgcaaatttgatgactagtccaacctgctctacactatctatggaacaactatagccgatttaagggcaattggatatgacctttacta

SEQ ID NO: 28150 - DNA, 420 bp, Glycine max
  unsure at all n locations
  Clone ID: LIB3108-047-Q1-K1-A12
cttaagtttcactttcctctttctctcttcatatcaaacactcataccccaggcacactaggtatcacanattcacacccgagtctctctctctctctctctcctagtacaactttgggaacagtttcgattgtctctctctgacaccctactatttctgcggcagcatcattccacacgcagagtcggtgtcgttcttcttctaattcatcgctcccgatgaaacgagggttccagaattccccttcaagctcgttaggtccacctcatttcagatctagacatgatcctcaaggtggttcacactttgttgaggatgaaagcacatatatttatgttctgatagtatcagatcattatagtgcgagatctatccagacttttttataactgtaggctagtccgataattcatttgaag

SEQ ID NO: 28151 - DNA, 394 bp, Glycine max
  Clone ID: LIB3108-047-Q1-K1-A2
cccacgcgtacggccacgcgttcgccgtgatttattggcgtcggcaccgtgtaaggaagtcagatgtagttcgaagagagagaagggatgggggattaaaaactgcaataatttaaagtgaatgcctaaatagattttaatctcttggtaaaaatagtttcttcggtgccatgggttacaaattacataagtggccggttacattaaggccatttaggatatgtctgagttgctggtaagtaacctacgcccttgaattaaagatgttgaaaaagccattacggtgccattggcttcgtagaaatggtttacctgaccataaaattgaattgaaaattcctttaacaaaaaatcaaaaaattaccgaaaaaaaagaaaaagataattttgattt

SEQ ID NO: 28152 - DNA, 448 bp, Glycine max
  Clone ID: LIB3108-047-Q1-K1-A3
gtggttattaccttcaacatcaacaactgtctttgccctgagcagatgcagcgaccgggggcgtcccctgccgtaaacaatgtgaaaggcagcagtgccttacctacacagggtcttttgcatcctgcacaggttgctgcaatgcaaccctctgggagccaccctcagtttgttcctactggcttttcttatgcttcttatcatgttcattctgtgccctcagttcaagtgaagccagcggagcagaaacaacctgcgggtgagtagaatgatataatatcctttatttgctgcacccctgtgcttgcggttatcaaagaagaaaggtatatagcttgagtgaagcatgtgaattggcatgggattttgaagtgcaggatggggtccctcttaaatggggggggtaaaatgtcaatgtggtatgttgatgatggaatgccgtatgtgg

SEQ ID NO: 28153 - DNA, 273 bp, Glycine max
  Clone ID: LIB3108-047-Q1-K1-A4
cccacgcgtccgcccacgcgtccgcggacgcttgggcaaggccatcatcatggcagctgctgccccaatggcaagccaactcaagtccaccttcactaggactcttgtagctcccaagggcctctctgcctcttcaccacttcacctcgtgccttctagaaggcaattaaccttaactgtaaaggcactccatcagagaaacccacctatcaagtgattcaacccattcaacggtgacccattcattggaagcctgaaaaccccagttccatc

SEQ ID NO: 28154 - DNA, 375 bp, Glycine max
  unsure at all n locations
  Clone ID: LIB3108-047-Q1-K1-A5
tttgttattgccaccatgcataggatcagcatcttatggtacattttttctgcagttttcagggggaaatctcagcctcactctgctgctttctccacctccttgctcttcgactaaactcagatacagtttaaggaaagtgttgctcaatttgcaacagaaaatattgcccctcatgcttccaaaatagaccacacaaattatttcccaaaggaggtgaacttatggaaaagcatgggagaatttaatctccttgggattactgcaccagaggaatatggagggcttggcctaggttacttgtatcactgtatagcaatggaagagattagccgtgcttcaagttctngtggtctttcttatggtgctcattca

SEQ ID NO: 28155 - DNA, 445 bp, Glycine max
  unsure at all n locations
  Clone ID: LIB3108-047-Q1-K1-A6
tttaacaatgtcaaagtatattgtctcctgattagattaaaaaatttaagagaaattacggtggcctctattcagagaggaaaactaggtctagatattatgatgattcaaaatcagaagacattaattcatctaggcttaaggaaaaagataaataacacagttatgaaaaaagacatatttgatatcgaaccagttcgactgtgtagaaaaaacatttgacaattttttatgtatcaaaccataggtctttcattaattcagaagaataaacgaaaaatttatcacaaatacccagaaaaaattcatgttaataagaaaaatttttatgaatatattacaagaacaagagatcanaanataacaganaanaaagaaaaagataattctgatttacttgntcctgaaaacattttatccgctagacgtcgtagagaattgagaa

SEQ ID NO: 28156 - DNA, 326 bp, Glycine max
  Clone ID: LIB3108-047-Q1-K1-A7
atctcattcacacattcacagttatactctctctctctttgtcgcttggatcactgatctcgtctcaattttcagatatgtcgacatctgataagccagaagtggtggaaaggggtagcaaggatgaaaaacacaaggaagatgatcaagaggaggggaagggtggattcattgagaaggtgaaggatttcattcatgacattggtgagaagattgaggaagctattgggtttgggaagccaactgctgacgttactgcgattcacattccatcgattaatcttcacaaggcagatcttgttgttgatgtgctcatcaagaacccg

SEQ ID NO: 28157 - DNA, 313 bp, Glycine max
  Clone ID: LIB3108-047-Q1-K1-A8
agagaggagagctaaaatgcaaggaggatttttatcatttttgtcacacgggaatgtcaggagaaatgctgttctacaacgggtgcgcatggtgaaccccctgttacagccaattgtctcttcgcggcttgaatctgttacacctgctcgcattgaggagcatggttttgagagcaccacaatttcagacatcttgaatgataaaggcaagggtgctgatggctcctggctttggcgcaccacatgataccccgtatattacgcttgaaaagctgtcccccaaaacaatgttggagctttggttgttgagaaa

SEQ ID NO: 28158 - DNA, 380 bp, Glycine max
  Clone ID: LIB3108-047-Q1-K1-A9
ctgagtttccacactgcataccttaggtcttccgaattcgaagttaatttgcgggatggctaaggaaaaggctcagatcaacattgtggtggttggtcatgtggaccctgaggaggcaaccaccattaacgagctgaagaagcctgttgtggagaaagaagctccagggcatgccatatgaggtcatgcacgtactgtctcggagggtaaccagaaaattatgttaacaaaataatctggaaccctaatgtatcagtgtcatcatcagtgtgtagtttaagctagctttgctatggttacgttctttgagatgagagtcttgatgaacagtaccattctgatgtattgctttccttgaaagttaatgcatgcttcttatc

SEQ ID NO: 28159 - DNA, 274 bp, Glycine max
  Clone ID: LIB3108-047-Q1-K1-B1
gaaaatcctcaatcatctgtgtaaccaaacgctctctctatgtctctggaaaattctcggggtgtagataaaattttaatcatgtcacatcaagcgtatgctgacaatcaccattatgcttgacatataacgtcaccacctcactcacgctgctatcattctgcatcacggcatcgttcggtatcacagtaccatctagcatgacctcaaacctctcgagataactgccatcatgaatgactttaatgagactgaatcacttgctacaactgga

SEQ ID NO: 28160 - DNA, 465 bp, Glycine max
  Clone ID: LIB3108-047-Q1-K1-B10
cccagattcaaaaactcagctctgctctttcgtttggatctcaaaacatgtgcttcttcgattggttctatggcattctagcttccctcggtctctggcagaaagaagccaaaattctcttcctcggtctcgataatgcagggaagaccaccctccttcacatgctcaaagacgagagattagttcagcaccagccgacccaacaccccacttcggaggaattgagcattgggaagatcaagtttaaggcttttgatttggggggccatcaagttgcccgcagagtctggaaagactattacgcaaaggtggatgcagtagtttacctggttgatgcctttgacaaagagaggtttgcagaatcaaagaaggagcttgatgccttactttcagatgaatccatggcaaatgttccatttcttgtgctaggcaacaggattgacattccatatgctgcatcagaag

SEQ ID NO: 28161 - DNA, 328 bp, Glycine max
  Clone ID: LIB3108-047-Q1-K1-B11
cccagacgcaaaaactcagctttgctcttgcgtctggatctcaaatcatgttcttatactattggatctatggccttctagctttcctcggtctatggcatacagaagccaaaatcctctttctgggtctcgataatgcaaggaagaccatacttcttcacatgctcaaagacgagagattagatcagtaccagccgacccaacacgactacttcggaggaattgatcattgtgaagatcaagtttaaggctgacgatttgaaggtgccatacagttgcctgtagagcctctaaagactattacgcacaggttgatgcagcattttac

SEQ ID NO: 28162 - DNA, 366 bp, Glycine max
  Clone ID: LIB3108-047-Q1-K1-B12
gctgattggtgtggaaccagtttaaagtccagtgctctcaggaggaaagcctggtccacacaagattcaagggattggtgctggttttatccctggtgtcttggaagtcaatcttcttgatgaagttattcaaatatcaagtgatgaagcaatagaaactgcaaagcttcttgcgcttaaagaaggcctatttgtgggaatatcttccggagctgcagctgctgctgcttttcagattgcaaaaagaccagaaaatgccgggaagcttattggtgccgtttttcccagcttcggggagaggtacctgtcctccgtgctatttgagtcagtgagacgcgatactggaagcatgacttttgagccctg

SEQ ID NO: 28163 - DNA, 309 bp, Glycine max
  Clone ID: LIB3108-047-Q1-K1-B3
aatttgtaggcatcccagctacttgcatttcttactatatcatcagaaggtacaaccaactgcttttattccaaagcaagttggaaacatgtacactgcgtctctttatgcagcatttgcctccctcattcacaacaaacatagcacattggcaggtaagagggtgatattattctcatacggaagtggcttaactgccacaatgttttctttgcaattactagacagtcaacatccgcttagcttgtcaaacatggctagagtgatgaatgtcgatggaaaattgaagtcaagacatgactttccccc

SEQ ID NO: 28164 - DNA, 292 bp, Glycine max
  Clone ID: LIB3108-047-Q1-K1-B5
acctgtgtatgtgactctagcccaaaggaaataatataggagagctagactgcaagctcactgtactcaaatgcgacctgttggaatgccaccatctgttggtcctcgtgtgccaatgtatcccccaggtggtccacgtattggtcaacaattattttatagccaaggcccttctgctatcattccttcccagcctggatttggctatcaacaacaacttatgcctggtatgatgccatgtgcatctcctgtgccgaattttttcgtgccaatggttcagcatgtacaacat

SEQ ID NO: 28165 - DNA, 371 bp, Glycine max
  Clone ID: LIB3108-047-Q1-K1-B6
ctctctccctctctctattttttatttttttttacgtttcctcttcaaatttatcactggcctcttttccatttcacctttacactctctccttcctttttttttttctttcactatccctttcgaactctctccgattagggcacacgcgatgcctctcttcctctccgacgaggagttcgcgtggtgctccggtgacggctctgccgtggccgcgaaggccgacgccttcatccgcggcctcttcaacgagctcgacaccgtccgctccaaggcccacgccgccgacatcaacgccgagcagaactgccttctcatcgagcagaagtatctctccctcaccgccgagttctccaaactcgagtcgaaca

SEQ ID NO: 28166 - DNA, 451 bp, Glycine max
  unsure at all n locations
  Clone ID: LIB3108-047-Q1-K1-B7
gtcgctgctccgtaccagtttcactgcataaatttgagagaaaactctgcaaacatgttgggtggtcaggacctccttacaggtgatgagcttctctcggactccttccgttacaatgaaattgagaatggaatgctgtgggaagttgaggggaagtgggttgttaagggagcagttgatgttgacattggtgcaaacccttctgctgagggtggagaagatgagggagtcgatgacgcagctgttaaggttgttgacattgttgatacattcagacttcaggagcaacccgcttttgataagaaacagtttgttaccttcatgaagaggtttatcaagaacttgacttccaagctcgatgcanagaaacaagagttggttaagaagcaccttgagggagcaacttaatacctggtctctaagaataaggattttcaggtttttggtgggg

SEQ ID NO: 28167 - DNA, 420 bp, Glycine max
  unsure at all n locations
  Clone ID: LIB3108-047-Q1-K1-B9
cccacgcgtccgcccacgcgttcgcgcatcgcttcggattatctagatctaaagaactaggcaaaacaaaataaaatataaaaaaagatatattatagcaactgaactattgtgaagcataaaagaacaaaaatcttatttagttgtaaagcaataaaaatatacagataaatgaagaggtgaaagaaagagagaaaaaaaatcaatgatatagaattctaatatgtaaaggtctatggattatctcataaaaggtagtgtaataaagcatcaatctaaatcaattcatatctatttatatatgaattaatttataacgtanacaaattaagagctctgaatcataaaaaactgagaatattgattcacgaaaaaacaaatcaatattcgaaaaaaaaaaagattattaattttaagata

SEQ ID NO: 28168 - DNA, 191 bp, Glycine max
  Clone ID: LIB3108-047-Q1-K1-C1
gaacatctctcttctagatggaatattatattttgcaatttcacacactctctgtactgttgtcagtttgattgccatcttcggcttttaatttttgcagaagtattttgtgtttggggatgttagaatttgcaattttgtttttgtttatgcactgattatagtattaatgactagtttctcttcctttc

SEQ ID NO: 28169 - DNA, 57 bp, Glycine max
  Clone ID: LIB3108-047-Q1-K1-C10
cccacgcgtccggttttctctttcgtggctttaataaattatccgcccttgtgccat

SEQ ID NO: 28170 - DNA, 255 bp, Glycine max
  Clone ID: LIB3108-047-Q1-K1-C11
cccacaccttcggattgcacctttgaaagctttcacaatcatctatccctgtcgcaacatgggttattgctgcaaaacctacaatctcacgatagagcagcactcgcaccctcagcacgactcctcctgccattacgtcatctactactcactcttgatgtacacttaacactcactccctacaatcattaagccatcacctcttccattatctgatcacccagacaagcctacgttacgtcatactagctacca

SEQ ID NO: 28171 - DNA, 421 bp, Glycine max
  Clone ID: LIB3108-047-Q1-K1-C12
tccacgcgtccggtcatccgatgatggcatattgcatttcaaactcaccaacgctccacggcagcatgacaggtccatgtaggatcttcagcggcaacataggcatgaatagagttaagggcataccttagattaagtaccatgatattgatcttacattcacaacttctatggactacataacatagctgagagggaacgtgctgaaattctgctatacgtctacaattgatggattcagagcaaccaataatgactgatgctcagacttcgagggcctatgcttagataatcggctatacagacaactcatgcaagtgtggtgcatgtaaccctgaatggtatagaaacacagatgactactacgacacatttgatgccttcctaaattactggatagacaatgaaactactaaaccca

SEQ ID NO: 28172 - DNA, 164 bp, Glycine max
  Clone ID: LIB3108-047-Q1-K1-C2
atttctacaaattatagttcctaaagtttgtttatgactgagcaatattgatttgtagcacgtatatgtatacgtatacctataccccgtgcatatagatggagaagaaatgggcattgttctgcatgggccatgtcatgccctacatatatttgtaatgtaat

SEQ ID NO: 28173 - DNA, 389 bp, Glycine max
  Clone ID: LIB3108-047-Q1-K1-C3
ggccctcatcatcttcaagctcctccaatgctgtccctatggctaagtttggcaagaaaagtctcttaagctatggatcatcatgtaatgatttcaagggagattgtgaaggagttggtggtgctagttcaccctcttccaaattgtgctttagcattcctcgtgccacctgcagttaagacagtgagttctaaggttttcttaagctaattcaattaagacttgtcattatagtttgcatctggagtggacaatgtgattcttatatagtatttctttgtaaattttctagctaatattcttcttcatgtttaaggacaatctattttctatgctagaattttgccttgggagttttgtccctttaaaatattaaccagccttgtttc

SEQ ID NO: 28174 - DNA, 388 bp, Glycine max
  Clone ID: LIB3108-047-Q1-K1-C5
aaaagtcaaagagatggatcagtatagaagttctttgcggccagagacagtggatgccctctgatgttctaaagactggatgcagtatggagcatccgaagcttccaatgcgctcgtgaagatggagttctagattttattcatgttacttcttttaggtggttgtactcgttatgttggtaggttcttgtattttacttgtagttcccagttctctgttatgctactttcgtgacatttgatgtgtagatttggacctgaatgtctaaattctagtttacttttcttgattagatgctataaaagatccccttcttaacgtgatacgttgatgtaatgatttatgtccttaatattccatcaccaagataaatttaagagccatttg

SEQ ID NO: 28175 - DNA, 296 bp, Glycine max
  unsure at all n locations
  Clone ID: LIB3108-047-Q1-K1-C6
gtcgactccacgtccgtccgctcgctcgcaacctcacaactnngtcttccttctctattggtttttagcttcctccaaattcnttcgcgcgagcatggttncttcaaaantgatanttgatttgctaaatncccccggctgagcttgagaagaggaaacacaagctcaagcgtcttgttcagtcaccaaactctttcttcatggatgttaagtgccagggttgcttcaacataaccactgtctttaacccactctcagactggtggtggaatccggaaatgccagaccgtcttgtg

SEQ ID NO: 28176 - DNA, 340 bp, Glycine max
  Clone ID: LIB3108-047-Q1-K1-C7
cccacgcgtccggcgcactccgtctgttccttaccgtcaccggcgcgcgcaccctctgttcgagcgactcctaattaagttgggaaataaaaaagacttcaaatttcccagatggctgcagcctttgcttccagatgctctcgtgtgggccgttctctgtctggtggattaagcaacagttcccctggtttatttacctcatcacatggcatgacatgcaacaatttgttttctcagcaacaacgtaccttcatacagatgaggactgttctcaaggttgtcgataactcaagtgctaaaaaggtgatgtgcatacaggcattgaaagggaagaaagggc

SEQ ID NO: 28177 - DNA, 434 bp, Glycine max
  unsure at all n locations
  Clone ID: LIB3108-047-Q1-K1-C8
ccaaagttggctacaacgtttgatatttatgtgttcctgtgattgagaatggcgcactctgtnggttttgctcccatttgttgcttgaaatcctcaaacagacctggggcagttaccggtaattcggttacccgaaaggcttttgagatgaaagaggtgtgtcagaattctgaagttccaaactttcagtccttgaaggttaaggctacagaagataacactacaaaaagcacaaaagttaggagcattgcttgttctgattgtgatggaaatggtgcaatatcatgtactcaatgcataggtactggagttaattcagtacatcactncaatggacaatttaaaagccgtggcattttgttggctaatcaagggcaaaaaggatattttatgtggatcttttaatggaactggctttcttggtggaatcatga

SEQ ID NO: 28178 - DNA, 251 bp, Glycine max
  Clone ID: LIB3108-047-Q1-K1-C9
gatgaaaatgaaggtactcgttttcttcgtttctacaatattggtagcatggggtttccaagcggtcgatatgttccctctccgaatgaacactggctatggtgcccgtactccggaggtgaaatgcgcaagttggaggcttgctgttttagcacacaacatctttggctttgagaccattcctgtatagtgcgttgaagcaacaaaggaatacattcatgtcgaacaattataggtgagactccataaca

SEQ ID NO: 28179 - DNA, 313 bp, Glycine max
  Clone ID: LIB3108-047-Q1-K1-D1
gttaccactcatggcagagcttgagagttcttatgttatgcctaagcttatatcatttgtcgcatctctcctcaaaagggtagctcaatctaatgatcttaaccagcaacaactcctacaccaaaaggtctcagctttccatggcttgactcgccccaccatctcaattcaaagctaccttgagagaattttcaagtatgccaactgcagtccatcatgcttcattgttgcatacgtctaccttgatcgcttcactcaaaggcaaccctgcttgcccatcaacttctttaatgtgcaccggatactcatcacc

SEQ ID NO: 28180 - DNA, 389 bp, Glycine max
  Clone ID: LIB3108-047-Q1-K1-D10
acctgccttccgtgtgaaggaaggggatcacgttattattggtcaatgcagggctctctctaagacagtgaggttcaatgtcttgaaagtgatcccagctggatcttctagtggtgcaaagaaggcttttactggaatgtgagcttcgatttccagtttttattgaagaaaaatgttaccttgttatttagtagatctgatttcttttctggaaggtgacatattaaaaccttatcaattttggattttctttgaggtttcgttctggctttatgtttaggattttgttatacattatgtttttcgaatactatttgccttttaatttttgaaactatgcagactcttcatttgctttaccagtaatatatttagtttactcgggtttc

SEQ ID NO: 28181 - DNA, 462 bp, Glycine max
  Clone ID: LIB3108-047-Q1-K1-D11
cccacgcgtccggcacaccacactgatggcgtgcacaatcgacttccgctgtctcgacgagggttttggcggcaaaacctacaagcgcaagagagagcagcagtcgcagcctcagcacgacgccgccgtcgatgacgtcatcgacggcgcctctctgatggacaccgacgacgcactcccgccgtcggcgaagcgatcggcgctgccatcgtcggagaacccggacaagccggcgttcggtcatccgagctacgacggcgtgatcgccgggagggtgtcggggcggaagtggaagcaagtgcggcagcggagggcgtcggcggcgcatgttagccggaaggggacgacgttcgagcagagggagagggagaaggtgataaagaaggcgtacaaggagaggatgatggagctgaatgaggagaatctggttgacaaggtcgagaagaggaagatgaaagagga

SEQ ID NO: 28182 - DNA, 417 bp, Glycine max
  Clone ID: LIB3108-047-Q1-K1-D12
cccacgcgtccgaaatattatgttttgagcgtgcacaatctacttccgctggctggacgtgggtattggctgctgaacctacaagcgcatgatagagcagcagtcgcagcctcagcacgacgccgccgtcgatgacgtcatcgactgctcctctctgatggacaccgactacgcactcccgccgccgtcgaagcgatcggcgctgccatcgtcggagaacccggacaagccggctttctttcatccgagctacgacggcgtgatcgcctggagggtgttgtagctgaagtggaagcaagtgctgtagcggaaggcgtctgcggcgcaggttagcctgattggtacgatgttcgagcatagtgagagggagaatgtgattaagaaggctttcaaggagaggatgatggatctgaatga

SEQ ID NO: 28183 - DNA, 333 bp, Glycine max
  unsure at all n locations
  Clone ID: LIB3108-047-Q1-K1-D2
tgctttctgacacctggaatgaacattcgccttgttggagaggctaatgattatgttgggaagggcattgctggaggtgagttggttatcactccagttgacaagaccggttttgaacctgaggatgcagctattgtagggaacacttgcttgtatggtgcaactggtggacaggtcttcgttagagggagagcaggggaaagatttgctgtgagaaactcgcttgctgaagctgtggttgaaggtgcaggagatcattgttgtgagtacatgactggaggctgtgtggttgtcttgngaaaagtgcgtagaaatgtagctgctggaatgact

SEQ ID NO: 28184 - DNA, 417 bp, Glycine max
  Clone ID: LIB3108-047-Q1-K1-D3
gaagaggttgtcgaccttaagggcgagcttgttatgcttcgccttcagaaatcggctcgagcgagttcaagtccagcgaattcggtcgcatgcgcaagaggattgctcgcatgcttactgtgaagcgggaaagagaaattgaggagggtatcaataagaggttgtccagaaagcttgataaaaaatggaagaaaagcattgttgtaagaccacctccatctttaaagaagctccgggaggaagaagcagcagcagaagctgcagaagctgaaaaagctgcatgagcttacacataaatatgcaagttacagagttcaatggttaaaattattgttcagtcataattttcttggttaaatggatggtggttgtctcgtgccttatataatctaatccgaatgaattaaggttggtccc

SEQ ID NO: 28185 - DNA, 356 bp, Glycine max
  Clone ID: LIB3108-047-Q1-K1-D4
gtgagggccttccatggcttccgcttgtgctatctctgcaattacagctgttgccatctctagtccgagttccgggcagaagaatggatcaggaggttgttttcttagtggaaggaaattgagggtgaaaaaggagagagcagcaattggaggacgatcgatgggcactacagtgtgcgcagttgctgagcctgacagacctctatggttcccaggcagcaccccttctccatggcttgatggcactctacctggagacttcggctttgaccctcttggtcttggatctgacccggagagtctgagatggaatgttcaggcagagctagtgcactgcagatgggcaatgttgggtg

SEQ ID NO: 28186 - DNA, 344 bp, Glycine max
  Clone ID: LIB3108-047-Q1-K1-D6
tctctctgcgatggagtttcgcgtttccgtcatttggagccttctcctcattgtctctggcggctctcctcaaatcaagggtgaggcttctggttccgtcttcttcgtcgatagctccagtaatcaattcattcgcgccagatcatccaactatgagcaaccttcactgttgctagaagaagctggtgctgttgtgtcagtcttgcttggttttgctcctccttccacccttccagctgccagctcatccaagttgaatgatgttctgattcctaacccattcaagaggcctcgtgctgtgtttttgctggaagtgaatggaatcaatggtcttggaaatattg

SEQ ID NO: 28187 - DNA, 282 bp, Glycine max
  Clone ID: LIB3108-047-Q1-K1-D7
cccacgcgtccgtgacaaactaaagttgtacttaataaaaaaaaaaaaaaaaaaaaaaaaaaaagaagaaaataaaaaaaaaaaaaaaaaaaaaaaaaaaaaaaaaaaaaaaaaaaaaaaaaaaaaaaaaaaaaaaaaaaaaatatcctcacttttaaaaaatccaaatttacttacccttacattcaacttaatatttattctatagagtaacctaaattaaattcactgtcaaacattttaaaactatttaactgaaaaaaccttgccttttcccaattt

SEQ ID NO: 28188 - DNA, 422 bp, Glycine max
  unsure at all n locations
  Clone ID: LIB3108-047-Q1-K1-D8
gttaccactcatggcagagcttgagagttcttatgttatgcctaagcttatatcatttgtctcatctctcctcaaaagggtagctgaatctaatgatcttaaccagcaacaactcctacaccaaaaggtctcagttttccatggcttgactcgccccaccatctcaattcaaagctaccttgagagaattttcaagtatgccaactgcagtccatcatgcttcattgttgcatacgtctaccttgatcgcttcactcaaaggcaaccctccttgcccatcaacttctttaatgtgcaccggttactcatcaccaacgttattgggggctgcaaaattcatggatgacttgttagtatctcaatgtgatccatacacttgttaatntttgtttcttttttaaatctaatacccttaaagtcta

SEQ ID NO: 28189 - DNA, 409 bp, Glycine max
  Clone ID: LIB3108-047-Q1-K1-D9
cccacgcgtccggggaaatcttttcttcaatggcggcagagtcatctcgcagtggcgctaaacgcccctttatggaagaagacgacaatgaattctacaaaaagccaccagaaaaaagggttaggtttccaaagggaaagaaagtgaagccaggagatgaagtggcggtggacaaagcaaatgttgaggagggtgaagttgacttggtgaatgctaaaactgtcaccaatgctgcaaaagagcgggaaaaactcataacgtttctaaagggaaagaaagtgaagccaggagatgaagtgatcgtggacatagcaaatgttgacgaaggtgaagaagttgacttgatgaatcctaaaattgctgctgccaaacaacggccaaaactcagagatcacataacttctgaact

SEQ ID NO: 28190 - DNA, 450 bp, Glycine max
  Clone ID: LIB3108-047-Q1-K1-E10
gcgacgcctcgctcacaaagcgctccgatgggccgcgtgttgaacccgctgcgcgaaatgggcgtgcaggtgaaatcggaagacggtgaccgtcttcccgttaccttgcgcgggccgaagacgccgacgccgatcacctaccgcgtgccgatggccttcgcacaggtgaagtccgccgtgctgctcgccggcctcaacacgcccggcatcacgacggtcatcgagccgatcatgacgcgcgatcatacggaaaagatgctgcagggctttggcgccaaccttaccgtcgagacggatgcggacggcgtgcgcaccatccgcctggaaggccgcggcaagctcaccggccaagtcatcgacgtgccgggcgacccgtcctcgacggccttcccgctggttgcggccctgcttgttccgggcttcgacgttaccatgctcaacgtgctgatg

SEQ ID NO: 28191 - DNA, 319 bp, Glycine max
  Clone ID: LIB3108-047-Q1-K1-E11
aattgatatcattacacaagatttgtatgtatcagcaacaagggtcagatcgggcaaagcaattaccggcaacctgttttgccgtgagctatatcaattcaacaactgattcgaccaacgaggcttcctacgctacagtaccacctcctcatcccaaacctcttgtcgattggtccaccggtctctgtgactgcttctccgaatgtggaaactgttgcatgacgtgctgcattccatgcgttacctctggccgaattgcagaaatcgttgacaagggatccacatcatgtgctgctagtgacgctctgcatacgctgat

SEQ ID NO: 28192 - DNA, 461 bp, Glycine max
  Clone ID: LIB3108-047-Q1-K1-E12
atggtgtctaagctctactgtgtttgaaggatgcggtccaatacacctcagtggcatatatgggtgttcttagaagtatatttatcagcaatttggtaccgaccggatttgatctgtcttgccttctcttgcagtctgaagatagtgtgattggttgcctagtgaagataaagatctgtatattgagattggctggtcggagttagttcatagaatgctagcaccaatcccttctcattgggttttggttacagtggttagctcctaacaggggttactcctctaaggttttggggttttttagggttttctgcctaagatgcttatatctttcggtttttgttcgggtttatccttctctaagccttttatttttctctcttttaattttacttgattggacggttcctgtcttgtaaattcagatctactttgttgcagagcagcttactttgatactt

SEQ ID NO: 28193 - DNA, 283 bp, Glycine max
  Clone ID: LIB3108-047-Q1-K1-E2
cccacgcgtccgagtgatatctgaagacaagtgcttgaacagcaaagttttagaaagaaaacggtgactaacacacaatggaactaaaaatgacaagcatgcatgagacaataatcaagcgaggttgtcttcggtggtggcaagggaaggcgaaagcgaagtgcgcgagcgagcctcatcgtaatcatctcccagaggagactcttccactctgatctcctcaatcatcttcacaacctccaacatgcacggcctcttctccgcctgcgccgtcacgcacgcc

SEQ ID NO: 28194 - DNA, 334 bp, Glycine max
  Clone ID: LIB3108-047-Q1-K1-E3
aaaacgtattattttcattttcatctttttttgagtatcaacaaatggcaaccactgtcagaccactctcccccaattcagtggtcttagaccccaattctcagctgcccctgtgaagaacttggttgctgtgcaacccatgagtcgcaaggggaagggtgcattgggagctcgatgtgactacattggttcatccactaatctgattatggtggcttctacaaccctgatgctgtttgctggaaggtttggattggctccatcagcaaacaggaaagccactgcagggctaaagctggaggtgagggacttatgcttgcatactggtgaccct

SEQ ID NO: 28195 - DNA, 371 bp, Glycine max
  Clone ID: LIB3108-047-Q1-K1-E5
cccacgcgtccggtttttatttctctcttctctctgcatcgcttcaggttcttctgaaaagaggtgtcgcgtgtatgttggtaacttggattcacgagtcaccgagagagatctcgaagacgaattccgtgttttcggagttattcggagtgtttgggttgcacgtagaccacctggttatgcttttattgactttgatgatcgcagagatgcacaggatgctatccgtgaattggatggcaagaatggttggagggttgagctttctcacaactctagaggtggaggtggtggtcgtggtggtcgctcttggtggttctgatttgaaatgttacgagtgtggtgaacctggtcattttgctcgtgaatgt

SEQ ID NO: 28196 - DNA, 329 bp, Glycine max
  Clone ID: LIB3108-047-Q1-K1-E6
attcccgggccatgctatggcgacaatgtcggcgacacagtactattcggagacttttattctgcgtcgtcaaagcctaagttgtggacatacttgattaaagatgggaaagttgttggggtctttctggaaggtggaactcctgaagagaaccaggctattgctaaagttgctaaggtccagcctccggttgcagatgtacatcaacttgctaaggaaggcctttcctttgctagtaaaatataatggttttaatagggaaggataaaaatgcttggtggtttgcatagaagattgtatctgatctggctttattttactctgaatta

SEQ ID NO: 28197 - DNA, 347 bp, Glycine max
  unsure at all n locations
  Clone ID: LIB3108-047-Q1-K1-E7
agccggtcacccttcccttcccacaagacccacagttctacttccacagccatcgaaatggtgacagcagcacagtcactctttctatattccttgctttctgctttcatcttcactctgtttttgggggtcagatcttaataccgaaggcttcgtattctgtttgaatattgatatctattgggagtggagtagtattgagatcgagcgtaaaagaaaggcgatgtttttgtttgattggttttatgggattctggcatcgcttggattgtggcagaaggaggccaagatcttattcttaggtctcgataatgccgganagaccaccttgcttcacatgctcaaag

SEQ ID NO: 28198 - DNA, 283 bp, Glycine max
  Clone ID: LIB3108-047-Q1-K1-E8
gacccacctccgatcagcctctcctaaaaacgtcattttatccaactcttgctattcctcttgtcatatctctcctcttctctgttgcctctaaattaaaagtcttcttcctccaatagcctttacacccttttccaacctctaaattttttcttccctctataattactccttacagaaaccttcttatcccacatatcatcaattacctcgttcctctcaaagtttgattctttttctcttgaattggattgttataatttttgttcatacttacatgtta

SEQ ID NO: 28199 - DNA, 368 bp, Glycine max
  Clone ID: LIB3108-047-Q1-K1-F1
cccacgcgtcctcccacgcttccgtacgttattatataagactacagaacgaggattaagctgcaagatttactatgatggagacccacacctctaccaatttcacaagcactcttcaattgacctaatttccctcccaaaagatttcttcaagttcaactccatcaatatgtatcatatagtcatcaataaccccaatgtcttccatgtccggcataagtgagtcttcatttgttgatgtgccactatattatctcctatccattcaccttaattcctttctttgttggtggacttttttatacctttttttttaatatctattatttattgttctttaacttctcatcttgttgttttcttctata

SEQ ID NO: 28200 - DNA, 467 bp, Glycine max
  Clone ID: LIB3108-047-Q1-K1-F10
ccttgctcttgtttgttccttttattgcttctttcttgatcatgtcgcttgtgggtaaaattagtactgaaattggggttcatgcaactgctgcaaagtggttcaacctctttgcaacgcaactccatcatgttcaaaaccttactgatagagtgcatgaaaccaagctgcatcatggtgatgactggcatcacaacgagtcgatcaaacactggacttgtacaatagatggtaagattacaacatgtctggagagtattgaatccgttgatgaaccgaacaaaacaatcacctacaagctcttcggaagagatattggtcataagtataaagtctttaagctcatttttcaagctattgacaccgatcatgggggtgttattatcaaatggaccgttgaatatgagaagattgatgagaatgttgatcctccgtatggctacatcgaatacctgcacagtggcagt

SEQ ID NO: 28201 - DNA, 403 bp, Glycine max
  Clone ID: LIB3108-047-Q1-K1-F11
cccacgcgtccggatacacatatctagaatcttggtactcgatatgaatggcggtgatctggttcttgctacaattgtggtagcatggcaattccaagcgtacgatatgttgcctctgcgaatgaacactgtctatgatgcccgtactccgcaggtgaaatgcgcagattctacgctatgctactcatactcacaatatacttagctaagagaccatgacacattagtgctgtgaattcccccaggtatacgctaattgcagagaacatatatcagactcccaaacaggtaacctacaagcttacttttatgccacagaccttgaagtccatgctcttgtacacttatgtgttcaatatctatggccccttactctgtaatatttcatacttcatgatacatg

SEQ ID NO: 28202 - DNA, 152 bp, Glycine max
  Clone ID: LIB3108-047-Q1-K1-F2
tccacgcgtccggaattctccagagagaagtttaatcttaatcgatcatcacttcacttcacgaaggcatcatggcagacgagacccagaacaagtatgagagctctgaagttgaggtccaagatcgtggtgtttttgactttctccgtaag

SEQ ID NO: 28203 - DNA, 303 bp, Glycine max
  Clone ID: LIB3108-047-Q1-K1-F4
cgaccgacgcgtccgcaagagagagagagcgagagagagagagtgaatggcttcacttggtggcaatcgttatgttggatgaatccaaaacagccttgacatcgatggtttagctcgctttgctgttgaagaacacaacaaaaaacagaatgcccttttggagtttgaaaaggtagtaagtgcaaaacagcaagtggtttctggtaccttgtacaccatcactttggaggcaaaagatggtggtcaaaagaaggtttatgaagccaaagtttgggagaaggcatggttgaacttcaaggatgt

SEQ ID NO: 28204 - DNA, 419 bp, Glycine max
  Clone ID: LIB3108-047-Q1-K1-F5
ataacgcaaggcagaaagcaagctcatcctatatttttaaaaatggcagcagcctcctccattgcggtctcttccccatccttggctggcaaggccgtgaagctgggcccatcagcccccgaagtcgggagggtcagcatgaggaagaccgtcaccaagcaggcctcctccggaagcccatggtacggcccagaccgcgtcaagtacttgggcccattctctggcgagcccccgtcctacctcactggcgagttcccaggtgactacggctgggacactgctgggctttcggccgacccagaaaccttcgccagaaaccgtgagctcgaagtgatccactccaggtgggccatgctcggggccttgggctgcgtctttcccgaactattgtcccgcaacggggtcaagtttggagaaac

SEQ ID NO: 28205 - DNA, 412 bp, Glycine max
  Clone ID: LIB3108-047-Q1-K1-F7
cttgaactcaaggagatggctctgggaagattctttgcagtggttctactactttgcttcttgctgcttcactctcagatggctcgtgctgccacctacacagttggagattctgggggttggacctttaacactgttgcctggcccaaaggaaagctctttcgggctggtgacacacttgctttcaattatagccctgggactcacaatgtggtggccgtgaacaaggctggatatgatagctgcaagactccaagaggagccaaagtgtataagtcagggacggatcacatcagacttgccaagggacagaactacttcatctgcaattatgttggtcactgcgagtctgggatgaaaattgccatcaacgctgcctgagtttaataatatggttaaccttccatacata

SEQ ID NO: 28206 - DNA, 208 bp, Glycine max
  Clone ID: LIB3108-047-Q1-K1-F8
acatacaatattaaaaagaaaaaactgtaatttctatttctatataaagaattttgatacgcagcaaataataaaataaaaaaacacaaaaaataaaataccaaaaaaaaacacaaaaaaaataacttcacatctacattatccaatcttacttacactttcatcctacctcttaacttttctatactatcacctaaattcaattaac

SEQ ID NO: 28207 - DNA, 384 bp, Glycine max
  Clone ID: LIB3108-047-Q1-K1-F9
cccacgcgtccgaaagaaatatttctaatattctttagaataatcaaaaagaggattaaattcaaataaattttagatagaaaaaagacttaaaaaggaggatttgaaatgcgagatctaaaaacatatctttccgtggcaccagtagtaagtactctatggttcggggctttggcgggtctcttgatagagatcaatcgtttttttccagatgcattgatattcccttttttttcattctagttattgacacggaaaggggtgaagaagattatagatccaattaagtattaaatatatgtaattaatatgtaattaatctcctcttctttatttcgtcttttatttcttcttttttttacaattgtaatagaataagttagg

SEQ ID NO: 28208 - DNA, 382 bp, Glycine max
  Clone ID: LIB3108-047-Q1-K1-G1
caagtaggctatactaaggtgaaaaaggttttatggcagctgcaacatctagtgctgtgtggacggttttggatctcacttcttgtgtggaggaaagaggagccatgcccttcttgctgctagcattggagggaaagttggtgcttctgttagtcctaaaagagttattgtggcagttgctgctgcaccaaagaagtcatggatccccgctgtaaaaggtggcgggagtttcatagacccataatggcttgatggctcactaccaggtgactatggatttgacccactaagactagtaaaggacccaccattcctgaaatggtatagagaagctgaactcattcatggtaggatgacaattgctgcagctgtaggcatcttc

SEQ ID NO: 28209 - DNA, 221 bp, Glycine max
  Clone ID: LIB3108-047-Q1-K1-G11
tcgcccacgcgttcggatcgagatttctagaaactcttgtgatgaaaattaaagtccggtgtttcttctttgctacaatttttgtagcatggcaattccattcgtaccatatgttccctcttcgaatgaacacttgctattgtgcccgttactccgaagtgaaatgcgcaagttggaagctttgtttttaatcacacaacatctttggcttttagaccatt

SEQ ID NO: 28210 - DNA, 382 bp, Glycine max
  unsure at all n locations
  Clone ID: LIB3108-047-Q1-K1-G12
cccacgcgttcggagagctcaggctagaattttggctgattatgttgataagaagatatgggatcttggaaggaagatttggacatcaaaaggagaagaaaaagaagctgccaagaaggagttcatagaagcccttaaattgttggaggaacagctgtgatacaagacttattttggaggagacaatctaggttttgtggatatagcgcttgttccattctacacttggttcaaagcctatgagactntgggcaccctcaacatatagagtgagtgccctaagtttattgcttgtgccaagaggtgcctttagaaagaaagcgttgccaagtctcttcctgatcagcttatagtttatgagttcattatggatctaagaaag

SEQ ID NO: 28211 - DNA, 315 bp, Glycine max
  Clone ID: LIB3108-047-Q1-K1-G2
agccttgtgtcaaggcaactaaagcttctcttgctttgcaagagagggaggagtgagtgacgtggaaggagtgatacacagaacagtggaagtgaatggcataaaaatgcacatagcagagaaaggagagggtccagtggtgttgttcctccacggcttccctgagctctggtactcatggcgccaccagattctctctctcagctccctcggctaccgcgccgtcgctcccgatctccgtggctacggtgacaccgaggcaccaccttcaatagacagctacacttgctttcacatagtgggtgatctcgttgc

SEQ ID NO: 28212 - DNA, 286 bp, Glycine max
  Clone ID: LIB3108-047-Q1-K1-G4
cacaactgtgatgttccacatgtgaatcgcactgactatcagcttattgatatctctgaagagggctttgtgagtctgttgactgataatggaaataccaaggatgatctgaagcttcctactgatgaggcattgcttgctcagattaaagatggattttctgaaggaaaagatcttgtggtttctgttatgtctgcaatgggagaagaacagatctgttcactgaaggacatcggtcccaaaaattaatatgatgctatggctgtagctatagctgatagcacgc

SEQ ID NO: 28213 - DNA, 446 bp, Glycine max
  unsure at all n locations
  Clone ID: LIB3108-047-Q1-K1-G5
cacaagacatcatcatccatggctgcctccgtctccactgtcggagctgtcaacagagctctggggaacctgaatgggtctggacctggggtttcagctcccagttcatccttctttgggagcagcttgaagaaggttattggctcaagggtccccaacacaaagatttcctctggaagcttcaagattgttgctgtagaagagaagaaagagattgaagagacccagcagaccgacaaggacagatggaagggtcttgcctatgatatctcagacgaccaacaggacatcacangaggaaagggtttggttgactcccctttccaagctccacaggatgctggaactcactatgctgtcatgagctcctacgagtaccttaacacttgacttcgccagtacttggacaacaacctggatggattttaccttgcttcagcttttat

SEQ ID NO: 28214 - DNA, 433 bp, Glycine max
  unsure at all n locations
  Clone ID: LIB3108-047-Q1-K1-G6
cacagttatagtcacagttacttccaacacacatggcctccattcccctcctctcaccaggcgccaccgccacaaactccgccgtcagccacctaccctccaccacgaccacctccggcgagaccatattcttcgacggcggggcccactacggcgacctcgcggcgaacctcctcctaggtttcaccctcttctggctccccctgacccttgcggcggtatcacgcgccatgtacctgcgctacaggttcaccaacctccgcgtgagcgtgatctcgggcctgacggngcaggaccgcagcgacttcggctacaacgtgatcaaggacgtgcaagtcgtgccgcgcttcatcggaaagtggggcgacgtggtcataacgctcaaggacggcaccaaggtccatcttaagagtgtccccaagttcagagagat

SEQ ID NO: 28215 - DNA, 342 bp, Glycine max
  unsure at all n locations
  Clone ID: LIB3108-047-Q1-K1-G7
atggcctccactctctctatatcctcttcattcactccttgttgatgccaagcctccaactccganacaatgcgtcacccttcccactcttccccctccaccttttcactctcagactcgtccttggaagaccactgctttctgtcgtaggcttgctcgcaattttatggcaatggccaccacaagaaaagcagccgcaacaaaagtttgccgcaccacttgaccttcttatgcccaaacccccaaaaatgtgaagactattcaagaagcttgggaccaaggttaagattaatatgcagtgagttcactggcccgtgctggtgtggttgcattggtgggctc

SEQ ID NO: 28216 - DNA, 333 bp, Glycine max
  Clone ID: LIB3108-047-Q1-K1-G8
caactcttaaatcaagtggagcttaattttttttatactgatgatgcccatgaattacttgtcatatatactctgtttttattaacttttttttttcttttttctgttccttatgtttttcagtccagatgatgatataaggcactggtctaaatttccatctttttatcccttattgggccaagtggaggctgattgtggcaagtctttggacctgaacaactatccttacatattcatgacttgtaaggagcaatacttcgtgaatgttggaacagactgcttattaaccataaccggattttactacatttgtttctcttgcaacaattg

SEQ ID NO: 28217 - DNA, 101 bp, Glycine max
  Clone ID: LIB3108-047-Q1-K1-G9
agattagttattgaagttagttttggaactttttcatgtatttgaaacggatggtgttatggctgttttatttgaggtaataataactactgcttaaggtc

SEQ ID NO: 28218 - DNA, 385 bp, Glycine max
  Clone ID: LIB3108-047-Q1-K1-H11
tccgaatggcttacgcttatctcttcaaatacattatcatcggtgacaccggaggtggaaaggcctggcctctactttaaatcaacggacaagcgcttttcagcccggccatgacttaaaccatccggtggtgaaatttggtccagggatgatcacaattgataacaagccaatcaagttgcaaatatgggatacggctggtcaagaatcattcagatctattacaaggtcttattacagaggggctgcaggtgcattgcttggttatgatataaccaggagggagacatttaatcatttggctagctggttggaagatgcaagacagcatgcaaatgcaaatatgactattatgctgattggcaacaagtgtgatcttgctcat

SEQ ID NO: 28219 - DNA, 318 bp, Glycine max
  Clone ID: LIB3108-047-Q1-K1-H2
tttcattcgtaagcttctcacttcatcaacctgaataatggtgctgcagctgcaatatgttgctggtgatccaaattctgtcctaagttggttggagcgctggtcagcatctcatttttggaaaccagttccccagcctaagaaaattcgggatactaagtctcatagaaagcatggcaatatttcagttggagatactcatatgagcaagtcaaaacgaaccaacaggaagcttcctactgcaagttttgactcagtcccagtgcaagcacatcctgaatttgaaaaaccaaaacggaacatgaggaaaattccaag

SEQ ID NO: 28220 - DNA, 422 bp, Glycine max
  unsure at all n locations
  Clone ID: LIB3108-047-Q1-K1-H6
gcatctcagaggccaattctttcgccgcttcttctctctttccaacgcttccccctgtggggttctcgtgttgctggtaacaatatggttgttgacgctttgaatgaggatttgagaatcaacggagcagttgaaccgttgcctgaggactttgatgcaacagctgtaatcatagatcccgtgcctttggcagttgtagacaatggcattgtcaaggaggaggcgcacatcattaaaggaaaagagaaaagagaaatagtactgggaagaaatattcatacctcgtgtctagaagtcacagagcccgaggcagatgatgaggtcactgnggaccgggaagctcatatggcaagtgtgttggccagatacaaaagagctttgactgaaaagacaaagcatcatttaaggtacccctataattt

SEQ ID NO: 28221 - DNA, 386 bp, Glycine max
  Clone ID: LIB3108-047-Q1-K1-H7
gagctggatggtcactttcccaaacatatatttgctcttagatccaaatccagcaccaggagagttatcaagtttgagtttgagaagttctccttcatggatgaaatggtccatagcccaactgggctggaagagttcatcaaacttggcagaggcagccaaccccaccaacagcaaaagtcccacaaacactcccaacatcttgaaccagcgccaagttgttttcctggtggatgagacgccaataagggtgcacacgaacctggaacacaagggcattcccttcccgaaggaccaagccatgggcgtgtacagctctatctggaacgcggacgattgggccacgcagggtggtcgtgtgaagacagattggagccacgcaccct

SEQ ID NO: 28222 - DNA, 455 bp, Glycine max
  Clone ID: LIB3108-047-Q1-K1-H9
gactattgattaagaaagctattgtcattgatttgctagctccaacaatgggttctagcagattatcattcattttagtacttgtgcttgtaaccttttcatccatgatcattgactcaagggttgcagaggcacgtaccctgccaaaatcagccttattgccttccaaagttgatatacctactgttgttcctcttccactggtggcaccactgccaaatttgcctgttactctccctccagtgcctgaactacctgcagtacctaaagtaccaattcctgaagtaatagttaataacgccaaaataatcccttgagtacctatgatctatccagtcactactacttattttgtcacttgctaaattaacttgttgttgccatcccagggtggttctggttctgttggcgtttaatttctgtcattcaattacatgctatgttcaggttatatg

SEQ ID NO: 28223 - DNA, 219 bp, Glycine max
  Clone ID: LIB3108-048-Q1-K1-A10
cccacgcgtccggtttgtggtatctgaaactgagcaccaaaaccatgaggaaggagagacattgggttggtggactaatatgtattatgttggataaaatggtaatgcagcagtgctttcgaaattagatgcttaattaagaaaacgtaataatattgtataatgtatcatgtgggcgagggaagaaaaagtaaacgcctggattgggtggcttggacc

SEQ ID NO: 28224 - DNA, 336 bp, Glycine max
  Clone ID: LIB3108-048-Q1-K1-A11
acgaagtgcagacacaagtagtttcgattaggaggaagaaaagtctgagacgtataggcataacatgacagaagccatgggtgctgttttgacttataggcatgaattaggaatgaactataatttcatccgtccagacttgattgtgggatcatgcctacagactcctgaagatgtagacaagttgcgtagaattggagtgaaaactatattttgcttacaacaagattcagaccttgaatattttggagttgatattaatgccatacgagaatatgccaagacatgcaatgacattcaacacttgcgtgctgagataagggactttgatgcatt

SEQ ID NO: 28225 - DNA, 337 bp, Glycine max
  Clone ID: LIB3108-048-Q1-K1-A12
caaggtcactgatttgtgcaaatgatgtctttgcagaggaccaagttgttggcttttgtcattgtccttgtttccttcacatgtagtctctcccttgctatgtccagtaaccagttggagcagtttgcttcggaggaagaagtgtttcaactattccaagcgtggcagaaggagcataagcgtgaatatggcaaccaagaggagaaggcaaagaggttccagatattccaaagtaatttgaggtacatcaacgagatgaatgcgaagaggaagtcacctacgacgcaacatcgtttgggtctgaacaagtttgctgatatgagtcctgaggagttta

SEQ ID NO: 28226 - DNA, 438 bp, Glycine max
  Clone ID: LIB3108-048-Q1-K1-A2
cagctgctattgatcagcttaccaaatattttgcttgtgaatgggcaaaagacgatataaggagcaacggtgttgcaccctggtataccataacttcacttgtggaacctgtaattctcttttaccctgttttatttccttttccaaggactagtcattttctcactatgaagattggttaattatgttgactaattaaaattgagttgaatgagaatggagaagttaactgattggtcattagtaaattctatgcatgcagatagtattcttctattttgttgatcctgtcaccaccttcatccctctagtcttcataccatgttctaaaatatcaatgcataatcttgtgctttgaagttcatacattcatgctccttttaagttttaaggattggtattcagcattataagagtattcagataaaaagagtgttt

SEQ ID NO: 28227 - DNA, 408 bp, Glycine max
  Clone ID: LIB3108-048-Q1-K1-A3
gccacgcgtacgaacaaaaaccctaaaaatgccgtcgatggggaggaagcgaatggtatcaggcaaatattgtatatccactcgagccacactttgaagcatcaacaaccgaaaaccgaatatgccgctcaagaatacgaagaaatctacgaggaagttgaggaagaagaggaagaggacgacgtctaagaggaagaagacgaagaataggaagaccaggaaaacgaggaaggggaagaagaataacaagcagaatacgacatactcaaacaacagcagccgcaacagctagacgaatacgacatgaccatatcgaaacttctggagacgcattgcaaggaccagcttatgaaacttctttgcgacacagtggataatcaccgcgacgtggatgagaggatccgacac

SEQ ID NO: 28228 - DNA, 262 bp, Glycine max
  Clone ID: LIB3108-048-Q1-K1-A5
tgttattcttattgatgagattctaaagttagtggtgaggagtcaaagaaggttgttgactaaggagaaagaagcatgaagaatcaggtacatggccactataggaagcaataaaagatggagatataggatgataaatggaagtatcaagccaaattctttgatatattcttttctctagcctttaggaaaactacagctcatttttttatgacaagaaatttgtcactttttatgattattacagtaaatatcttttatg

SEQ ID NO: 28229 - DNA, 457 bp, Glycine max
  Clone ID: LIB3108-048-Q1-K1-A6
ctcacaaacacacactgaactaaaaaacatcaaaagagacatggctgagcaaaccttcatcatgatcaagcctgatggcgtccaaagaggccttattggcgagatcattagcagatttgagaagaaaggtttctacttgaaaggtttgaaacttgttactgtggaccgtccttttgctgagaagcactatgctgatttgtctgccaagcctttctttagtggtttggtggattacattatctctggccctgttgttgccatgatctgggagggcaagaatgttgttacaactggccgaaagattatcggagccacaaacccagctcaatctgagcctggaactatccgtggtgactttgccattgacattggaaggaatgttatccatggaagtgatgcagttgaaagtgctaacaaggaaattgcattgtggttccctgagggccctgctaactgg

SEQ ID NO: 28230 - DNA, 441 bp, Glycine max
  Clone ID: LIB3108-048-Q1-K1-A7
aaagcgttggccatggcaaacatgattgtggcttccaccaaacctctggttccagtgctgcaccagttcccgttcccccacacccaaagtccccattctccaaatttcactccccaaagccccaaccttgaaactgaaactcccgatttcaaagccccagatgctgtccctccttggagggatagcaccactggtcttggccagaccctccctcgcagaagaaattgagaaagcagcactctttgacttcaacctcacccttcccataataatggtggagtttctgctgctgatggttgccttggacaagatatggttcaccccgcttgggaaattcatggacgagagggacgcggcgatcagggagaagctgagcagcgtgaaggacacgtcggaggaggtgaagcagctggaggagaaggccaatgctgtcatggcggc

SEQ ID NO: 28231 - DNA, 430 bp, Glycine max
  Clone ID: LIB3108-048-Q1-K1-A8
ccggtgtccagggttgcatcttagccactttaattctccacgacgaggaaatcccagtcaccgctgagaagatcaacgctctgttgaaggcttctaatgtctccgccgagtcttactggcccagcctcttcgccaagctcgcccagaataagaacatcgaagacctcattttgaacgccggcggtggtggggccgccgttgcagttgccgctcccgccggcggtggtggtggtgccgctgctgcagccgcacccgccgccgaggaaaagaaggaagaagtgaaggaagaaagtgacgatgacatgggtttcggctcgtttgattagatctttttatatagttgtagccagattttgagtctttgaattgaaatcttgttctgttctatataattcttattgaagggattcttagctaatctactatcata

SEQ ID NO: 28232 - DNA, 333 bp, Glycine max
  Clone ID: LIB3108-048-Q1-K1-A9
caaaagatggacctccaacctttgagcagcccaagatgactctggagaagcgcttgaggtatggtaacatgcttgtccaagaacaagagaatgtcaagagagtccaattggctgacaagtacttgaacgaggctgcacttggaaatgctaacgaggatgctattaacaggggaactttcttccaatcttgaattggaggcaaagcaaacttggcaagtaaatatttctgttcctgaaggttgtgctgatccaagtgctagaagttgtgatgggacttgcgtgtaacattcttagaattctcaatgtcttaggtgcaaagagaagatgccaagt

SEQ ID NO: 28233 - DNA, 453 bp, Glycine max
  Clone ID: LIB3108-048-Q1-K1-B1
cacttcgctagtaataagagaagagagagagagagagagagagagagagaggagaatgttgagtctctcagttgcttcaccttcttcttcaaccatttcctttctcccaaagccattcaatggcattcagctccgtcgcactgccacatgctccatcccacccacgaagcgcagctcatttgtgccggtggtggtgatgtctaagaggacggaggaattgaaggaaattagacaaatgactacggaacgaattaacgaagaggttgtcgaccttaagggcgagcttgtcatgcttcgccttcagaaatcggctcgcaacgagttcaagtccagcgatttcggtcgcatgcgcaagaggattgctcgcatgcttactgtgaagcgggaaagagaaattgaggagggtatcaataagaggttgtctagaaagcttgataaaaaatggaagaaaag

SEQ ID NO: 28234 - DNA, 340 bp, Glycine max
  Clone ID: LIB3108-048-Q1-K1-B11
ctgaactcctcacccactagctatgggatagaaagagaagagaaacaagaggaagaggcaaaagcaccaacaccccaatgaccaaagcacaaagcagaactctgatttctccttcaagccaagctcagaggtaaagggtatcaaatttggaggccagttcatagtgaagtccttcacaatcagaagagcaagacccttggagcttctcaaggttctttctttcccaccaaccaacaacaccaacaaaccaaaggacaagctccctttcccttccaccacagcattcttgcccacaaacttcaccatcttggcacaccatgcttggcacacccttaccctt

SEQ ID NO: 28235 - DNA, 333 bp, Glycine max
  Clone ID: LIB3108-048-Q1-K1-B12
ccgtctccgtctccacctcctgtccttcgttgcacttcgctttttccaaaaccaatcgcatcagcatcactctcgtcgccgccgtcgtcgaccaccgcaagagccatcgcactccgccgtcatccgttagggcaaaaatgagtcgaggaagtggaggtggatacgatcgtcacatcactattttctcccctgaaggacgtctcttccaagtcgagtatgctttcaaggctgttaaggccgcaggaatcacctcaattggtgtccgaggaaaggattcgatttgtgttgttactcagaagaaggttccggataaccttttggacaacacaagtg

SEQ ID NO: 28236 - DNA, 440 bp, Glycine max
  Clone ID: LIB3108-048-Q1-K1-B2
cgacttcaccgccggaaacggaaccggcggcgagtcgatttatggcgccaagttcggcgacgagaacttcgtgaagaagcacaccggtcccggcattctctccatggcgaacgccggttccggaaccaacggatctcagttcttcatttgcacggagaagacagagtggctcgacggaaagcatgtcgtgttcggacaggtcatcgaaggattgaacgttgtcaaggacatcgagaaggtcggatccagctccggcaggacctccaagcccgatgtcatcgtcaactgcggtcaactctcttagacgacgttgacccgcggctttaatctctgaatctgcgttatttcttgtcgtgtcgattgtgccttgacagtctcttctgttctttctcgcagacgcgtttaggggattgaggtgttaaggatatcatttcgaaacc

SEQ ID NO: 28237 - DNA, 445 bp, Glycine max
  Clone ID: LIB3108-048-Q1-K1-B3
cccacgcgtccgccatccaaaccttaaaaagattcagtgaagaacaacgttaatggcatctcgtggtgtgcaagcagttcatcctcctccattaacatccacctccgacccacctcctctttttgatggcactaccaggttgtacatcagttattcttgcccctatgcacaacgtgtatggatcgctcggaacttcaagggactaaaagacaagatcaatttggtccctataaaccttcaagacaggccagcttggtataaggagaaagtctaccctgaaaataaggtgccatccttggagcacaatggcaaggtgttgggagaaagtcttgatttgatcaaatatgtagatgaaaactttgaagggacacctttgtttcccagagatcctgccaagaaagagttcggagagcaattgatatcccatgttgatacattcagcaga

SEQ ID NO: 28238 - DNA, 456 bp, Glycine max
  Clone ID: LIB3108-048-Q1-K1-B4
catccatagacatggccaccgtcacttctgcagccgttgctattccctcattcactggcctcaaggcaagcgcaggcaaagtgagtgccgcagttaaagtctcagctccccaagccacaaggttgggcatcaaggcttcgctgaaagacgttggagtcgctgttgtggccactgccgcgagtgcagtgctggctagcaacgccatggccattgaagtgttgctgggtggtgatgacgggtctctggctttcgttcccaacaatttctccgtggcctctggggagaagatcgtgttcaagaacaacgcaggtttcccccacaacgttgtgttcgacgaggacgagattcctagcggcgtggatgcaaggaaaatctccatgagcgatgaagaccttctcaatgcgcctggtgagacttacagcgttactttggatgctaagggaacctacagtttct

SEQ ID NO: 28239 - DNA, 438 bp, Glycine max
  unsure at all n locations
  Clone ID: LIB3108-048-Q1-K1-B6
cccacgcgtccgcttaaggatttgcctggttctagtggtataatgcaaacaatggggagggaccagagactcaagtatgcagcatcatttgaaagttgctacttctttcggcttctgtattacgcaggaacccagtatcccataatgggagctatcaggatgacttatccataccaatatgagctgtacaagagggtagatgagtcacctggaaaggagaagtatgctattttgtctacctttccagagaggcctactacagatgaaattaatgatgcttttgaaggaaaaccaaggtaactgatgtctaatttttattagctaaaaattgcaaacacagtccatcttatctgactntcttatgtcatttaagctttgacaaaatagaattccattgaattggttttctggcaactttgcagtaaggatcctagaaaa

SEQ ID NO: 28240 - DNA, 423 bp, Glycine max
  Clone ID: LIB3108-048-Q1-K1-B7
cccacgcgtccgcccacgcgtccgttcaaattctgcttcacctttcattcatttcacttcagagagagagagaacaaaacagaatgggcgtcgtggtgatcgacggcagcaccgtgcgcgacttcgtgaacgacgaaaccgccttcaccaagagcgtggacgagcagttcacggcgctggacctcaacaacgacggcgtcctctcgcgctcggagctccgcacggccttcgagtccatgcgcctcatcgagacgcacttcggcatcgacgtttccacgccgccggagcagctcgcgaagctctacgactccatcttcgacaagttcgacggcgaccggagcggcgccgtcgaccgccgcgagttccgcgacgagatgaggaagatcatgctcgccatcgccgacggcctcggatcgttcccca

SEQ ID NO: 28241 - DNA, 443 bp, Glycine max
  Clone ID: LIB3108-048-Q1-K1-B8
caattactactttctctctctttgtaacttgtaagcatggagtcctcaaagatctatgcttacctcttcctttgcatgctcttcctctcctccgccactcccattctcggttgtggctactgtggcaaaccccccaaaaagcacaagcctggtaaaacaccaaagacacccacagtacccgttgttaagccaccagtcacaatccctcccattgttaagccaccagtcacaatccctcccattgttaatccaccagtcacaatccctcccattgttaatccaccagtcacaatccctcccattgttaatccaccagtgacagttccacccgttgtgcttccaccaatagtgaagcccccgggttttctccctccaattcttaacccaccaagtacaccaacaccgtcgacggtgaagagagggaacactccatgtccaccacc

SEQ ID NO: 28242 - DNA, 244 bp, Glycine max
  Clone ID: LIB3108-048-Q1-K1-B9
caaattttaggctggttgcttggttccattaccctttacgtcagaagaaatgaacctgtaatttattcctattcatttgcttatttaggtcaactttcgcatggttctattctatcttattccttctgttaaattaccaacatatttgaatagtatcacctaagaagcgggcagctctttgactattgcttttaatacctagaatgaaatcaaaatattgaaagataatgctgattaacgagag

SEQ ID NO: 28243 - DNA, 359 bp, Glycine max
  Clone ID: LIB3108-048-Q1-K1-C1
gaatccgggggccgacccacgcgtgcgctgacgttcattctaacaaagatgttttaattttgacagatgaaaaggccaccaggctctcgggtgcgtctatagatgatgcagctgtgattaatgatttaatcgtcaagttagaggggtgccgtacaaagctgcaaccagagttcatgatgaaaccagttcagtttgagaaggatgatgatacaaactaccatatggacctgatagctgggcttgcaaacatgaggtttcggaattacagccttcctgaagttgacattctgaatgccaattttattgccgtacggatcattccagaaattttaaaattcattgtcatggacatagggctt

SEQ ID NO: 28244 - DNA, 302 bp, Glycine max
  Clone ID: LIB3108-048-Q1-K1-C10
cccacgcgtccgcttctgcatcttcaaactcccttttggcttttctaagtgctgtgagtctttctttcatctttttcttcaggtcctaaagcatacttgtgatttcctccattatttcctttgagatttggacagtagttggtcatacacccaattctaaattagagttgggatgtctggaggagtagtttgatacagtgatgcatctccacagatacttgagtaaagctatatgctgtggtgtagatttttactatggagttaaatgcaagttatgacgtcgagcattcacattctacaca

SEQ ID NO: 28245 - DNA, 338 bp, Glycine max
  Clone ID: LIB3108-048-Q1-K1-C11
cagatcctgaaattcgattcgttccaaattttcttcacaaaatgtctggtcgtgtgagaggtggcaagggtttgggaaagggaggtgccaagaggcacagaaaagttcttcgtgataacattcaaggtatcacgaaacctgcgattcgtaggttagcgagaagaggtggcgttaagaggatcagtggtttgatctatgaggaaaccagaggagttctgaagattttcttggagaacgtgattcgagatgctgtgacctacaccgagcacgctaggaggaagacggtgactgccatggatgtggtttatgcgctcaagaggcagggaaggaccctctat

SEQ ID NO: 28246 - DNA, 339 bp, Glycine max
  Clone ID: LIB3108-048-Q1-K1-C12
caatgagttattacaaccagcagcaaccgccggtcggagttccgccgccgcaaggttggccgccggaggggtacggaaaggagggatatccaccgccgggatacccgccagcgggatacccgccagcgggatacccaccgccgggatatccgccacaacaaggctatcctccgccgccctacccggcgcaggggtatcctccgccctacgctcctcaatacgctcagcctccgccccgtcaacaaaattcaactggccctggttgtttggaaggctgtttggctgctctctgctgctgctgtctattggatgcgtgcttctgagatgagatgacaaatt

SEQ ID NO: 28247 - DNA, 461 bp, Glycine max
  Clone ID: LIB3108-048-Q1-K1-C2
cgatgccgtgcctcaacctctccaccaacgttaacctagacggcgtcgacacctcttccattctctccgaagccacctcaactgtcgccagcatcatcggcaaacccgaggcctatgtgatgattgtattgaaaggatcagtgcctatatctcatggtgggagtgagcagccagcagcttacggtgaattggtgtccattggtggtcttagccctgacgtgaacgagaaactcagtgctggcattgcttcaattctcgaaaacaagttgtctgtgccgaagtcccgattctacttgaagttttatgacactaagggttccaattttggatggaatggatctacattctgaattccgagttatcttggtaacgatgccatggatgtcggatgaactcgtgattctgttttagaactttttttatctgtaaaaagtactctgaatttcatataccccctttga

SEQ ID NO: 28248 - DNA, 433 bp, Glycine max
  Clone ID: LIB3108-048-Q1-K1-C3
gccgacccacgcgtgcgcttacgatcagactaagatagatgttaaaattttgacagatgaaaaggccaccatgctctcggtctcgtctatagatgatgcaggtgtgattaatgatttaatcgtcaagataaatggtgtcctatacaaatctgctaccaaacctcatgattaaaccattttattttgaaaaggatgatgatacaaactaccatatggacctgatagctgggcttgcaaacatgagggcacggaattacagcattcctgaagttgacaagctgaaggccaagtttattgccggactgatcattccagcaattgcaacatcaactgccatggccacagggcttgtcttcctggagctgtacaaaactttggattgacggcacaaagttgaggactaccgaaacacatttgccaacttaacactttc

SEQ ID NO: 28249 - DNA, 459 bp, Glycine max
  Clone ID: LIB3108-048-Q1-K1-C4
cccacgcgtccgcgaaatggctagcatatggtgagataatcaatggtcgttatgcaatgttgggtgcagttggtgcaatagcacctgaaattctaggcaaggctggtctgatccctcaggagacagcactcccatggttcagaacgggtgtgttcccacctgcaggaacctacaactactgggcagactcctacacactgttcgtgtttgagatggcactgatgggatttgcagagcacagaagattccaagactgggccaaaccaggctctatgggcaaacaatacttcctaggactagagaaggggcttggaggttctggtgagccagcttatccaggaggacctttcttcaacccactaggctttggtaaggatgagaagtccttgaaggatttgaagctcaaggaagtgaagaatggaaggttggctatgttggcaatcttgggttactttgttc

SEQ ID NO: 28250 - DNA, 455 bp, Glycine max
  Clone ID: LIB3108-048-Q1-K1-C5
ctgactttcagcctaagaaagatgcgaaaatagtgacagatgaaaaggccaccagtctctcagctgcgtctatagatgatgcagctgtgattaatgatttaatcgtcaagttagaggggtgccggacaaagctgcaaccagagttcaggatgaaaccagttcagtttgagaaggatgatgatacaaactaccatatggacctgatagctgggcttgcaaacatgagggcacggaattacagcattcctgaagttgacaagctgaaggccaagtttattgccggacggatcattccagcaattgcaacatcaactgccatggccacagggcttgtctgcctggagctgtacaaagctttggatggagggcacaaagttgaggactaccgaaacacatttgccaacttagcactgcctctcttttccatggcagagccagttccaccaaaggtcatc

SEQ ID NO: 28251 - DNA, 458 bp, Glycine max
  Clone ID: LIB3108-048-Q1-K1-C6
ctgggaaatatcttacaaataccacattcaattgaacaagttttcattgcacaaaaggtggagaacacaaggccaaatagaagtgacatccacctctcagcagaggaagaagccaccatagaggcaaagaccagagactactttgatggggttgcaccacaacgccacacaaagcctcaacgaagtgagtattcagctcaatatgtggatgctttctccaatgcccatcactcttcttcttcttcttctataccagaattcatgcaattccaacgcctcgagaatgatccccaagagaagaaattggagtacaatggaagtcaagtaccggaagaatttgtggaaacagagtattaccaagatctcaacagcgtggacaaacaccaccatacgacgggaacaggatttatcaaagtagagaaaaatggaaatgactttcacatagaaccagataatga

SEQ ID NO: 28252 - DNA, 371 bp, Glycine max
  Clone ID: LIB3108-048-Q1-K1-C7
ctttggatgagattgtggaagtggaatgagtctaatttatttgtaattttgattctggtcagtgctatcgcagttactagcctaaggtttttttatgtcaaaaacaaaaaagaatttgtatcatattctctctgttatctacccccttgatttctattttctatgaaaaaaaaaaaaaaaaaaaaaaaaaaaaaaaaaaaaaaaaaaaaaaaaaaaagaaaaacaaattaaaaagaaaaaaagataaaaaaataaaacaaaaaaagaaataaaaaaaaagggggggccgttttaaaggacccaactttccgtccccttccatcgaacggaatggttattaatttggggaaccaaaatttaatcaactggcc

SEQ ID NO: 28253 - DNA, 449 bp, Glycine max
  Clone ID: LIB3108-048-Q1-K1-C8
cccacgcgtccgggcagcaacattgatggcagcaacaacaagttctggtactcttaaagcaagtcctttccttggccaaggcaagggtgccaatgccaatgctcttagggatgttgtctccatgggaactgggaagtacaccatgggcaatgatttgtggtatggaccagacagagtgaaatacttgggacccttctcagctcagaccccttcatacttgaaaggagaattccctggggattatggatgggacactgctggcttatctgctgacccagaagcatttgccaagaacagggctcttgaggtgatccatgggcgatgggccatgcttggagcactaggatgcatcaccccagaggtgctagagaagtggttgagagtggacttcaaggagccagtgtggttcaaagctggagcccaaatattctccgaaggtgggcttgact

SEQ ID NO: 28254 - DNA, 333 bp, Glycine max
  Clone ID: LIB3108-048-Q1-K1-C9
cccacgcgtccgcccacgcgttcggtcgcggggcgccctttttttttttttgtttttgttttttttttttttgggtgagaagaaatcaataacttaagaagtttaaagttggatacacaaataattttttaatacaacagaaaaagagataattctttgcaatttctacaatgcatgcatcgccacttgggggcttagagggacaatacatactcttaatactattaaaggtttggatcgacaaactaggtgacaggctatattagacttacaacaccccactggatccaaccaacgtcgttcttgcttaacccaatggttaaccaggttttt

SEQ ID NO: 28255 - DNA, 461 bp, Glycine max
  Clone ID: LIB3108-048-Q1-K1-D1
catgaaggaaacgttatcacaaattggattgttcctccgaacagtgaaccctcacctaacaatcagaacccaggatttggtgaaacgatgaacagtgataggaaaattggggttgccttggacttttccaaaggaagcaaaatcgctctgaaatgggctattgacaatcttatcagcaacggtgacactctctacatcgtccacaccaagccttccggaggaagtgaatcaggaaatcttctctggtccaccactggttcacctctgattccattgtcggagtttcgtgaaaaggaggtgatgcgtcactatgaggtggatactgatgctgaagtgttggacttgcttgacaccgcttctaggcagaaacaggtgaatgtggtggcaaagctatactggggggatgcaagagagaaaattgtggaagcccgtggggatttgaagcttgactctttggtcat

SEQ ID NO: 28256 - DNA, 339 bp, Glycine max
  Clone ID: LIB3108-048-Q1-K1-D10
gacagaccaaagcaaacaaacaaaacagccaccgccattccaattcgaagaagaatagtagttcaagagtttgttggcaatcatggcgatgcgcgacctcgtttctggtgccgcggcatgtggcgactcttcttcttcttcctcaaaccctctcgcttccctcgccaacgcccttattggctcttcgtccaaaactcaggagaggctgaaggagattcccacatccactcctactgaccctgcttcccaattttactccacagctctccccgccaatcagcttcccggctccgaattcgataagcctctattgaatttaaactcccaggctttcggagt

SEQ ID NO: 28257 - DNA, 309 bp, Glycine max
  Clone ID: LIB3108-048-Q1-K1-D11
ttacccaaataattgatgcctttaaagtttacctctcaattccaatttactcgattagttggaccaaaaaaaaaaaaaaaaaaaaaaaaaaaaaaaaaaaaaaaaaaaaaaaaaaaaaaaaaaaaaaaaaaataaaaaaaaaaaaaaaaataaaaaaaaaaaaaaaaaaaaaataaaaaaaaaaactgactcactttttaaaggaacaaactttacttacgcttacatgaaacttaatagttcttttataacatcactaaaataaaattaattgcactgagtttaaaaaatatacaatttgaaaaacct

SEQ ID NO: 28258 - DNA, 325 bp, Glycine max
  Clone ID: LIB3108-048-Q1-K1-D12
aaaaaactctagaatttgcatgcactgttcttcatacaatggcattacgcgagcttatgtgtgatggggttattgctgctggtttgtcttgcaaaggtttcatctgatgttaacatagaaaaggagcaagatgaagaatttcgctttcctgttgaccatcttatcgtgagaggcgggaacagaaggctaatgcaggacatagattgtggaggattgtgcaagacaaggtgcagtgcccattcaaggccaaatgtgtgcaacagggcttgtggcacatgttgtgtgaggtgcaagtgtgttccacctggaaactttccgcaacaag

SEQ ID NO: 28259 - DNA, 454 bp, Glycine max
  Clone ID: LIB3108-048-Q1-K1-D2
gtgatgctaatcaaaacacgtcttggagaagcaatagcagctggaacactgcaaatgcctcaagcgatgatggtaatgaaggttcaaatgaaaattctgatggagtaggtggtgggaactggagaggtggttaccggggtagaggtggctccgacagagggggttttagaggtagaggttttcggggtagaggagagcgtggcggtttcggtggacgaggggagcatggaggctttggtggccgaggggaacgaggaggctttggtggtagaggtagatcagacagggaaggttttggtggtaggtggggatcagaaggaggacgtggaggccgaggcaggggaaggaacgatcaatctggtggttggaacaacagaagggattctggtgaagatgggccctctgactggaagaagggggcagataatggtggatggaagaatagtaatggatc

SEQ ID NO: 28260 - DNA, 415 bp, Glycine max
  Clone ID: LIB3108-048-Q1-K1-D3
gccagtgccatcagcattctcaacacctactctctcactcactcaccagtggcctgaacaatatgatcagtgggcatgatcaacgccaaatgcgtgaacccaaagttacgcaaccccaccaagctcgtaccatgaaaaccttcccttcaggtgaaccttgcaaagggcctaatagcctcacgcgaaagcaccaaactttgcactgtgacagcaatcgcaggagcaatattgacaaccctgggaacctgctacgccgctttctccgttcaacagatagtcgacatagcagaaggcgacaaccgaggactggcactggagatgtgcataattcctgcaataacgtggattctgttcaacattctgcagccggcgctgaaccaactgaaccgcatgcgcagcaccaaatgcgtgatca

SEQ ID NO: 28261 - DNA, 409 bp, Glycine max
  Clone ID: LIB3108-048-Q1-K1-D4
accacgcgtccgagagagcgtcctagtcgcaaccctaataagaagaaccacagcttcaagcgagtgacatccaccagccatgggtcgtatgcacagccgcggtaagggtatatcctcttatgctttgccctacaaaaggacaccccctagctggctcaagatctcttcgcaagatgtggaagaaaatatctgcaagtttgcgaagaagggtttgaccccgtctcagattggtgacattcttcgagattctcacggtattgctcaggtcaacagcgtcactggcagcaaaatccttcgcatcctcaaagctcacgggcttgcgcctgaaatttcagaggatctttaccatttgattaagaaggcagtttcaattaggaagcatcttgagaggaacaggaaggacaaggac

SEQ ID NO: 28262 - DNA, 458 bp, Glycine max
  Clone ID: LIB3108-048-Q1-K1-D5
cccacgcgtccgcccacgcgtccgcccacgcgtccgcccacgcgtccgcccacgcgtccggagaactaagaaggagaagcaaatggcttcctcaatgatctcttccccagctgttaccactgtcaaccgtgccggtgccggcatggttgctccattcactggcctcaagtccatggctggcttccccaccaggaagaccaacaatgacattacctccattgctagcaacggtggaagagtgcaatgcatgcaggtgtggccaccagttggcaagaagaagtttgagactctttcctacctgccagaccttgatgatgcacaattggcaaaggaagtagaataccttcttaggaagggatggattccttgcttggaattcgagttggagcacggtttcgtgtaccgtgagcacaacaggtcaccaggatactacgatggacgctactggaccatgtgga

SEQ ID NO: 28263 - DNA, 453 bp, Glycine max
  Clone ID: LIB3108-048-Q1-K1-D7
cccacgcgtccgcccacgcgtccgcaatctacaataaacgatgattctcattatctccctcagtttttctcttctctctttctcccatgcttctgtcctagatttctgtgttgcagattatgcaggtcctattggacctgcaggatattcctgcaagaagccttcaaaggtcacagcagatgattttgcttacagtggccttggcattgctggtaacacctcaaacattatcaaagctgcagtgacccctgcatttgatgctcagtttgctggtctcaacggtcttggcatttccgcagcacgtttggacttagcagcaggtggagttataccacttcacactcatcctggagcttcagaattacttgttgtaattgaagggagcatcctagctggattcatttcttctgccaacattgtctacctcaaaactcttaagaagggggatgttat

SEQ ID NO: 28264 - DNA, 453 bp, Glycine max
  Clone ID: LIB3108-048-Q1-K1-D8
gcttgatggatcgctaccaggtgactatggttttgatccactaggccttgggaaggacccagcattcctcaaatggtacagagaagctgagctcattcatgggaggtgggcaatggctgcagttctaggaatctttgtggggcaggcatggagtggagtgccatggtttgaggctggagctgacccaaatgcaattgctcctttctcctttggtactcttctgggaacccagttgatcctcatggggtgggttgagagcaagagatgggtggatttcttcaacccagactcacagtcagtggaatgggccactccatggtcaagaacagctgagaactttgccaatgccactggtgagcaaggctacccaggaggcaaattctttgaccctttgagctttgctggcactatcaaggatggagtttacattccggatacagagaggctggaaag

SEQ ID NO: 28265 - DNA, 456 bp, Glycine max
  Clone ID: LIB3108-048-Q1-K1-E1
gcaccacattcacctgaggcttccaaagcaatggcttcccttgcagcatccactgctgctgcttcccttggcatgtcagaaatgcttggaaaccccatcaacttcagtggtgccacaaggccagctccatctgcttctagtcctgcctccttcaagactgtggctcttttctccaaaaagaaggctacaccaacacctccaaaaaaagctgctgctgctgctcctgccaatgatgagcttgccaagtggtatggtcctgacagaaggatcttcttgcctgagggtctcttggaccgatccgaaatcccagagtacttgaccggagaagtccctggagactatggttatgacccatttggtcttagcaagaagccagaagactttgccaaatatcaggcatttgagttgattcatgccagatgggcaatgcttggtgctgctggattcatcattcct

SEQ ID NO: 28266 - DNA, 322 bp, Glycine max
  Clone ID: LIB3108-048-Q1-K1-E10
accacgcgttcggcggcggcgacgacgaagaatccgacacgtgctgctgcgtgtggggattcaacttgcgcgaattcaacgtcaacgaggacgtctttgccaacgactccatcgagctcttgcgccaaagcggcatcgatttcaagaggaacaacgaaaacggcatcgacgcccaccgttttggggagcttctcatgtcctccgggatcgtcttaaacgacaacattcattgggttactttccacagtggttacgatttcgggtacttgttgaagcttttaacgtgtcaggatttgcccgatacgcaagttgggttctttaa

SEQ ID NO: 28267 - DNA, 318 bp, Glycine max
  Clone ID: LIB3108-048-Q1-K1-E11
cccacgcgtccgaggttatcggtgtgttttagagtgttcaaccatctgacagggattggggagcaaaggctccaaaggatgtcaagatccagggcatctggtatgctcagcttgagtcatagagtgttttgtcttctgttttgtttgttggctcagattttgttagtaacttcatgcatggtgttgctgcattatcccttgacccaactttcctagcactactgagagtactgtcatggttgtatattatatcgacctccaattacaatgtttaaaattcaaggtttaaattgatggtgtgtgtgagttttcgagctc

SEQ ID NO: 28268 - DNA, 334 bp, Glycine max
  unsure at all n locations
  Clone ID: LIB3108-048-Q1-K1-E12
cttggaagtgttattaatgctagagatcgttggctcaaacctggtggtcttattctgccttcaagtgcaacgttgtacatggctcctgtcacacatacggacagatacagtgacagtgttgacttctggcgcaatgtttatggaattgacatgtctgccatggtatcacttgctaaacaatgtgcatttgaagaaccttccgtggagacaataactggtgaaaatgttttgacatggccacatgtggtaaaatatattgatagttattctgttaccgtccaagagttagaatcttgtaacagccaagtttaagttcaattncatgatgcgagca

SEQ ID NO: 28269 - DNA, 423 bp, Glycine max
  unsure at all n locations
  Clone ID: LIB3108-048-Q1-K1-E2
gtttcgttctctcttcgaatcaaacatgagccggcaggggcagagatccggtgcgacgggggtgcaccataaccgccagtactccgaacactatctcgacgcctcttccaagtggtttaataactcttcctccaatcacattcctcctcttcaggactacaatttgtacggcggcggaggaagaatgtatcggagcaacgcgcagaggagcttcaatgaatattgtttggatccgtccacgccttctcggagttacgccgttaagaaaaacggcaacggttacggtgaggaagacgattctnctcgcgatttcagccccggcctcttggatctccattcngttgatacggagcttcttcctcagattacgtcctcgaatttgtatgattccgagccttacattttcggcaaacaacctgtcag

SEQ ID NO: 28270 - DNA, 458 bp, Glycine max
  Clone ID: LIB3108-048-Q1-K1-E3
cccacgcgtccgggtttttgagagttgcagtttgcactttgtaggatcatctcctagcattgatcgattgagatggcagacgaagctaacagaactgctttccttgaaattcaaagtcgcatgatcgatactactggaaaaataaaacaggtgcaaacccagatgcgttccaaagaagcagaaaaaaagcgtgcttttctgaccatggaggagctgaagcaagttcctgatgatacgaatgtttacaaatccattggaagaatgtttgtattggagaccaaggcaacattaatgaatgaacaggagaccaagtttaaggatggtgaagcttcaattactgcattacagagctcaaaagaatacttggaaaaacagatggcagaggtggaaaccaatttgagagaactgctacaacaagatcctggtcttgctaggcaaatcatgtctatgaatgtagt

SEQ ID NO: 28271 - DNA, 449 bp, Glycine max
  Clone ID: LIB3108-048-Q1-K1-E4
ggccattttgtcattcagtgaatcaatgtgtatttctctcattataacaggaaagctgatgggttttagggaataaaggccgtaaagaaaacaacgaaataaaattctggagaatataaatattttgagaaacacaaaacaaaacaacattgttatgaaaggaataaaaacaagttgtccaacatggtgaggacactatctaacattgtatctcgcaagttggccctcactgttctcattgatgctgctgatgttgactataacgttgcacctgctgatgctgcctatcgagaatctgtcaatgtgtttggaaagccaaagacgaacactgacttacttccatacaatgcggatcgattcaaactctcaattacctgaaagtggaacccaagcaaatatgttgagtacccaagttaggttcttatagatgaggacaattttgaattaac

SEQ ID NO: 28272 - DNA, 456 bp, Glycine max
  Clone ID: LIB3108-048-Q1-K1-E5
cccacgcgtccgcccacgcgtccgtccacgcgtccgcaaatccatggctggcttccccacgaggaagaccaacaatgacattacctccattgctagcaacggtggaagagtacaatgcatgcaggtgtggccaccaattggcaagaagaagttcgagactctttcctacttgccagacctcgatgatgcccaattggcaaaggaagtcgaataccttctaaggaaaggatggattccttgcttggaattcgagttggagcacggtttcgtgtaccgtgagcacaacaggtcacctggatactatgatggacgctactggaccatgtggaagctgcctatgtttggctgcactgatgcttctcaggtgttgaaggagcttcaagagttaagactgcataccccaatggcttcatccgtatcattggatttgacaacgttcgccaagtgcagtgcatc

SEQ ID NO: 28273 - DNA, 455 bp, Glycine max
  Clone ID: LIB3108-048-Q1-K1-E6
cccacgcgtccgccaagagcaaagaaactaagaagattttgagcacaatggcatccacacaatgcttcttgcaccaccatgccctcaccactccaaccagagcttcatcacagcgcttagttgtgagcaccaaaccaaaccacattgtttgcaaggcacaaaagcaggttgtccaagagggtgaggacactactaacattgtctctcgcaggttggccctcactgttctcattggtgctgctgctgttggctctaaggttgcacctgctgatgctgcctatggagaagctgccaatgtgtttggaaagccaaagacaaacactgacttccttccatacaatggggatggattcaaactctcaattccctcaaagtggaacccaagcaaagaggttgagtacccaggtcaggttcttagatatgaggacaattttgactcaaccagcaatgttgct

SEQ ID NO: 28274 - DNA, 453 bp, Glycine max
  Clone ID: LIB3108-048-Q1-K1-E8
cccacgcgtccggttccgtgtctgtcagatatttctcaagtgcgaaaatgatgcacatgacattttactggggcaagaaggtgacgatcttgatcgattcatggaagacagattcctggacgagttactttctgagtctactcgcctgcctcgtcgctgccgcgttataccagtacctcgagaatcgtcggattcgcctgaagctcctcgccggcggccggaggccctcgccggcgccggagatccgcgctcctcttctccggtggggcgtcgccggcgacaaggagaagttgggggtcaagtttgcggaagcggttctgttcggggttaactcggcgatcgggtacttgttgatgttggcggtcatgtccttcaatggaggggtatttttggcaattgcggtgggtctcaccattgggtatttcttcttcaggaatgaaggagagaatgacg

SEQ ID NO: 28275 - DNA, 336 bp, Glycine max
  Clone ID: LIB3108-048-Q1-K1-E9
aaagagagagagagagagagaaactgagagaaattcgcaaaccctaatttcggaaagagtcggcgatggctgcctccaaggatcgcgagaacttcgtctacatcgccaagctcgccgaacaggccgagcgatacgaagagatggtggaatcaatgaagaacgttgcgaatctcgacgttgaactgactgtggaggagcggaatttactttctgttgggtacaagaatgtgattggtgctcggagagcatcgtggaggatcctgtcttccattgagcaaaaggaagaaacagaagggaacgagttgaatgccaagcggattaaggagtacaggcaga

SEQ ID NO: 28276 - DNA, 338 bp, Glycine max
  Clone ID: LIB3108-048-Q1-K1-F10
ctcccaagggtttaacctttctggctgtgttaatatgcgtttcagcactgtgactgagtccttctgttgcggaggaagggcaaaataatggccttgttatgaacttctacaaggaatcatgccctcaggctgaagacatcatcacagaacaagtcaagcttctctacaagcgccacaagaacactgctttctcctggctcaggaacatcttccatgactgtgctgttcagagttgtgatgcttcactgttgctggactccacacgaaggagcttgtctgagaaggaaacagatagaagctttgggttgagaaatttcaggtacattgagaccatcaaa

SEQ ID NO: 28277 - DNA, 338 bp, Glycine max
  Clone ID: LIB3108-048-Q1-K1-F11
cccacgcgtccgctttgaatggattctaattcttcttctccaagtcccaacggccacgcttccacaaccaaaatcaacggtttctttcatcccaagctgggttcccaacctgccaccagctcgcgatctcgtcttgccatggcttctcctgtgaactccgatcctaaggtcgtcaccggcacagccggttacatcctcgaagacgttccgcatttcaccgattacattcccaatctcccaacataccctaatcctttgcaagacaaccctgcttattcagttgttaagcaatattttgtgcatgttgatgacagcgttcctcaaaaggtcgttgttca

SEQ ID NO: 28278 - DNA, 292 bp, Glycine max
  unsure at all n locations
  Clone ID: LIB3108-048-Q1-K1-F12
gtagttgagaactaagaagtttgaaatggcttcctcaatgatctcctcccgagctgtgaccaccgtcaaccgtgccggtgccggcatggttgctccattcaccggcctcaaatccatggctggcttccccacgaggaagaccaacaatgacattacctccattgctagcaacggtggaagagtacaatgcatgcaggtgtggccaccaattggcaagaagaagttcgagactctntcctacttgccagacctcgatgatgcccaattggcaaaagaaagtcgaataccttct

SEQ ID NO: 28279 - DNA, 353 bp, Glycine max
  unsure at all n locations
  Clone ID: LIB3108-048-Q1-K1-F2
gccgtttgctccccaaaaaggaaagaagcagattctgtcctttgaaatcaacaagaaaagatgtcaggtgaagaggtagctgttgcagttgaggtacctgctacttcaattccaggtgagccaatggacatcatgactgctctacagcttgtgctgagaaaatctctggcctatggtggtcttgcacgaggtcttcatgaaggtgccaaggtgatcgagaagcatgctgcacagctctgtgttctagcagaagattgtgaccaacctgattatgtgaaactggtgaaggctctttgtgcagagcacaatgttagtcttttgacagttncaagtgcaaagacccttggagaatg

SEQ ID NO: 28280 - DNA, 453 bp, Glycine max
  Clone ID: LIB3108-048-Q1-K1-F3
cccacgcgtccgcggacgcgtgggtcacgggatgcctcgattatattatcctccgaggatgacgaggagattgtaaactccgtcgtggaaggcgtcacgccctcctacgcgctcgagtcccgcctgggcgactgtcgccgcgccgcggggattcgacgcgcggcgctgcagcgcctgacggggcagtcgcttgagggcctgccgctggaggggttcgactacgactccattttagggcagtgctgcgaaatgccggtagggtatgtgcagattccggtaggggtggcggggccgttgttgttggatggattcgaatacactgtgccgatggccaccacggaagggtgccttgtggcgagtaccaacagagggtgcaaggccatctatgcttctggtggggccagcagtgtggttttgagggattgcatgtctaaggcacctgtttgtagattc

SEQ ID NO: 28281 - DNA, 421 bp, Glycine max
  Clone ID: LIB3108-048-Q1-K1-F4
caaggaagctcgttctttcgtcgtcgtcacaagtcacaactcgcaaaccacaatgcctaaggagatccacgagattaaggattttcttctgacggcgcggaggaaggatgcgaggtcggtgaaaatcaagaggagcagggatgtcgttaagtttaaggttcgatgctccaagtacttgtacacgctttgtgtctttgaccctgagaaagccgataagttgaagcaatctcttcctcccggtttgagtgttcaagacctgtagagctgttgagtgtggcagcatgcgtttgtttctctttttgttacctgatgctctagattttgtggcttggttttatatgttggtgatttttacgaggacatttttgttttaaattggtacgaaatgtgaaagtttgatattgagcacaattgaaatgaa

SEQ ID NO: 28282 - DNA, 354 bp, Glycine max
  unsure at all n locations
  Clone ID: LIB3108-048-Q1-K1-F7
cccacgcgtccgcaaacacctcgtccgtcacaatgcagctagctgtggcggccaacgctgtcgtttcaccgtcgccgttccgacctcatccccttctccggtcatccttctccggcgtctccgttaagctcactccccaatccataacgttttcacgcttgaagcccctcaccgtcttcgccgccaccaagaaggccgtcgctgtcctcaaggggacctccgccgtcgaaggcgtcgccactctcatccaagaagacgatggcccgacgacagtttctgttagcatcactggccttactccggggcttcatggttttcacctacatgagtatggtgataccacanatgggtgta

SEQ ID NO: 28283 - DNA, 338 bp, Glycine max
  Clone ID: LIB3108-048-Q1-K1-F9
atcttcatctccaacaagtgaatgtgataaaaaataaaaatcaaagagcatagtgtcggggatcattcacaagattggggagacccttcatgtgggagggcacaagaaggaggaggagcataagggtgagcaccatgctggagaatacaaaggggagcaccatggtgaacacagtagtgagtacaaaggagagcatcatggtgaacacaaagctggagagtaccatggtgagcacaagccagagcacaaagaggggttcctagacaaagtcaaggacaagatccatggtgagggcggcgccgccgagggcgagaagaagaagaaggagaagaagaaga

SEQ ID NO: 28284 - DNA, 288 bp, Glycine max
  Clone ID: LIB3108-048-Q1-K1-G1
gcgacacgtatgacgatcgtcaccatgggcaacggtcaactgggaatgccggttctaatcctcgctactggcgcaagccttggtgacttaaaggcctcttcaattctatacccaggcatctccatcgtccacagcgtgattggcacacctagagccttaaggtgatgtggtacatcgtggaaagatcaacggctcacatgtacaggtgggactgaagaaccaactgactatagtgtacttgcgttcatgggtacgcttaaacgactcatggtcacagtactgtatgct

SEQ ID NO: 28285 - DNA, 336 bp, Glycine max
  Clone ID: LIB3108-048-Q1-K1-G11
gcagcacaatccaaattggaagacagactaagaaagaaaaggagcaaaatatggcacgcaaagactggatcaggaaaaccaatgaaagtgtcatttaacaaatttgatttttcaaactcatacatatggtttgaattttacaatgttccattggcaaaagacgtatccttaatttgtgatacaattcgagcgtggcacattatcggacgtcttggtggatgcaatgccatgaatatgcaactgtcacagtctccaatggatgcacgaccgagttatgattatattcaaggagcaaatgtggaaccaactacattttacaacattggggatctcgag

SEQ ID NO: 28286 - DNA, 339 bp, Glycine max
  Clone ID: LIB3108-048-Q1-K1-G12
cccacgcgtccggcgaaaaaaagcacatgccatccaaaaacaaaacactgcccctcgcgtgatgtctcgtgggggttatgaatatttagaaaaaaagttgatggatgagaaaagaaagaaaaaactagaggaagctactcaatctggaagcactgacaccgtcattgatcctccatctaccatcaaacgacacctgacgtggaagcttgctcgcaccaaaaaactggtgacatgacatctgaggcagcaaaagaaattcctgacaagattgatgcgcttgaggagcaggcctcataggggtcctttgttacccatggacgtcatgatatactgattgct

SEQ ID NO: 28287 - DNA, 360 bp, Glycine max
  Clone ID: LIB3108-048-Q1-K1-G3
gtagcagctgaagccacagtccaccggtgagttatgattttccacccgcgctctgccagactgccattgtcggatacgatgccaccaccttcgctctccttctatgcttccttctttgacaactctacgtcttttcagacctaggtcttgatgacagtttgtacttttgcctgtagtccaacacgtatctgaaatgaatggggtataaaacaaacttcattctgtacttttcactcattttcatctcagagctctgaactcttataaggagactagactttagattgaagatgggacactgataacatatatgttgacccaaaagcatttgtcaagaacagggctcttgaggtgatccat

SEQ ID NO: 28288 - DNA, 456 bp, Glycine max
  Clone ID: LIB3108-048-Q1-K1-G5
ctatttttcaagtaacttaaggtttcaaacctaggaagttggaagtcatggcagcaacattgatggcagcaacaacaagttctggtactcttaaagcaactcctttccttggccaaggcaagggtgccaatgccaatgctcttagggatgttgtctccatgggaactgggaagtacaccatgggcaatgatttgtggtatggaccagacagagtgaaatacttgggacccttctcagctcagaccccttcatacttgaaaggagaattccctggggattatggatgggacactgctggcttatctgctgacccagaagcatttgccaagaacagggctcttgaggtgatccatgggcgatgggccatgcttggagcactaggatgcatcaccccagaggtgctagagaagtggttgagagtggacttcaaggagccagtgtggttcaaagctggag

SEQ ID NO: 28289 - DNA, 462 bp, Glycine max
  Clone ID: LIB3108-048-Q1-K1-G6
gcaaaagcaagaagaactagtctaagcagaaatggcctcttcagtgatggcatctgtggccctcaaacctgcccctttcactgttgagaagtcctcagttagaggccttccctccctctcaaggaactcctcttcattcagagttgtggccagtggtggcaagaagatcaagactgacaagccttatggaattaatggtggcatggctttgagggaaggagttgatgcatctggcaggaaaggaaagggaaagggcgtttaccagtttgtagacaaatacggtgctaatgtcgatggttacagtcctatctacgacaccaaggactggtctccaaccggtgatgtctacgctggcggtacgactggcttggctatctgggctgtgactctacttggtcttcttgctggtggtgcacttcttgtctacaacacaagtgctttggcgcaataaactttgcaaat

SEQ ID NO: 28290 - DNA, 446 bp, Glycine max
  Clone ID: LIB3108-048-Q1-K1-G7
gtggcagatcagtcacttaaagcatatcagacagcttctaccactgctgagagtgaactacagcctacacatcctattcgtttgggtctggctctaaatttctcagtgttttattatgagatattaaattcacctgaaagggcctgccatcttgcaaagcaagcctttgatgatgctgtctcggagctggataccctgaatgaggattcttacaaggacagtaccttgattatgcagctgttgagggataaccttactttatggacttctgatatccccgaagagggtgaggacctaaaaatggaaagcgcagccagggttgatcaaggagaagatgagttaggccgctaacccatcattctgtcatatgtctaagatttgatgcattaatttttctcaatcatattttctccattgtagtgaagcctctatctgaatggtgcact

SEQ ID NO: 28291 - DNA, 464 bp, Glycine max
  Clone ID: LIB3108-048-Q1-K1-G8
gcggcggcaacagggagagaagatgaagttcaatccacgtgtgtcgagcagccgccgcaagagccgaaaggctcatttcacggcgccgtcgagcgtgcggcgggtgcttatgagcgcccctctgtcggcggagctgcggtccaagtacaacgtgaggtcgatcccagtacggaaggaggacgaggtgcaggtggtgcgaggaacatacaagggtcgcgaggggaaggtgactcaggtctaccgtcgaaagtgggtgattcacattgagcgcataacccgcgagaaggtgaatggttccaccgtcaacgttgggattcacccctccaaggttgtgctgaccaagctcaaattggacaaggaccgtaaggccattctcgatcgcaaggccaagggtcgcgccgcctccgataaggagaagggtaccaagttcgctcccgaagatatcatgcaaaccgttgattagt

SEQ ID NO: 28292 - DNA, 437 bp, Glycine max
  Clone ID: LIB3108-048-Q1-K1-H1
cccgcacgtgccgttgcagatgagctgaaatcgagaagaagaagaagaagaagaagatggagaagtatcagatctggagcaggagaatagcgttggcagcgtttgcgtttgctctgctgttccaatcggcctcagcagacgacgtcgttgtgctctctgaagataacttcgagaaggaagttggtcaggacagaggagctctcgttgagttctatgctccttggtgtggacactgcaaaaagcttgctccagaatatgaaaagcttggtagcagcttcaagaaagccaaatctgttttaattggcaaggttgactgtgatgagcataagagtttgtgcagcaagtatggagtctctgggtacccaacaattcagtggtttccaaaaggatctcttgaagccaaaaagtatgaagggccacgcactgctgaatcactt

SEQ ID NO: 28293 - DNA, 127 bp, Glycine max
  Clone ID: LIB3108-048-Q1-K1-H10
cccacgcgttcggcttcggaatgcacactcactcctaaaacgaaccactgggggtagagacatactgcatcaggattaccaatgttcatatcatttgacgaagcgatgtttttgaaactcatacatt

SEQ ID NO: 28294 - DNA, 336 bp, Glycine max
  Clone ID: LIB3108-048-Q1-K1-H11
gtttctggacgttgtcgtttagacgtcactgctttgcttcgttcctattccgacctcaggttccttatctttcttcttcttcttcttctcaaccgtcgtcgattctcagtttccgattgcagaatttgatttcagaatccaaaaaaatgaacacgttaatctcaccgccttctacaaaccgttacctttgtggggtcccttactctttcctctctccgcttcgacacaacaacaacaccaaccttaaccttccgaggttccattccacagttgctaccaacttcttgtcacactctccggttcgggccacgctctccggacgtgccactttccgat

SEQ ID NO: 28295 - DNA, 465 bp, Glycine max
  Clone ID: LIB3108-048-Q1-K1-H2
cccacgcgtccggaactacagaacctctattgatgtctggtcagtagggtgcatttttgctgagattcttggtagaaagccaatcttccctgggactgagtgtctcaaccagctgaaactaattataagcgttcttggaagccagcatgaatctcatcttgagtttattgataatgcaaaagcaaggaggtttatcaaatcactgccctatactaggggcagacacttctctcagctatacccacaagcagatccattagccatagatttgttgcaaaaaatgcttgtgttcgatccaaccaagagaattactgtcttggaagctcttcaacacccgtatatggctagcctatatgatccaaggtgcgacccttctgctcaggttcccatcagtctcgacatagatgaacattggggagaaccgatgattagggaaatgttttggaatgagatgctacattatca

SEQ ID NO: 28296 - DNA, 433 bp, Glycine max
  Clone ID: LIB3108-048-Q1-K1-H3
cccacgcgtccgcccacgcgtccgcacgaggagcagcctcaggaggagaaggatgtctcacaggaagttcgagcacccaaggcacggttcactgggatttcttcccaggaagcgtgctgctcgtcacaggggaaaagtgaaggcattccccaaggatgacccatccaaggcacccaagctcactgcattcttgggttacaaggccggtatgactcacattgttagagaggtcgagaagccaggatcaaagcttcacaagaaggaaacttgtgagcctgttacaattattgagacccctccaatggttattgttggtgttgtgggttatgtgaaaactccacgtggtctccgaacattgaacactgtctgggctcagcatttgagtgaggaattgaaacgtaggttctacaagaactggtgcaagtccaagaag

SEQ ID NO: 28297 - DNA, 456 bp, Glycine max
  unsure at all n locations
  Clone ID: LIB3108-048-Q1-K1-H4
gcgcctttgatctctgtccccgctgcgtctctcgtaatcatgcctaagcaaatccacgagattaaagatttccttctcactggcagaaggaaagatgcgaagtcagtgaagatcaagaagagcagaaatgtggttaaattcaaagtcagatgctccaaagtcctctacacactttgtgtgtttgacccagagaaagctgataaattgaagcaatctcttcctccaggtttgagtgttcaagacctgtaaggtactgggcgagagatcaagaagaagcaattcattgattcttctgaagtttgattctctgtagttgaagcttgagatttttgtcagttggtcttttattatagattattgctaagacatggtttgttntatctggtttggaaaaatgaaacttgaatttatgtctaatggagtattctagtgcttgggaactatatatatgaattt

SEQ ID NO: 28298 - DNA, 457 bp, Glycine max
  Clone ID: LIB3108-048-Q1-K1-H5
caaaagaagaagtatcactcatataatactctgtatcatttcatttcgataatcatccatagctactgaagaaaatggcaaccatctctgctgctatcacaaccccatcgatctcccgcgcaactcttgtgcaaaagcgggtctcatctcccgttcttggcttgccagcaatgggtaaggtgggaagagtgagttgctccatggaggaaaaaccttattctgtgaaggaaagcagctctagcatgttggggatgggggcatctctgatggcagctgccagcgctgcagccatgtcaggcccagccatggccttggtagatgagagactgagcactgaaggaaccggacttccctttggcctcagcaacaatcttcttggttggatccttttcggcgtctttggtcttatctggactctctattttgtctacacttccactcttgaagaggatgaaga

SEQ ID NO: 28299 - DNA, 416 bp, Glycine max
  Clone ID: LIB3108-048-Q1-K1-H6
gatgacaccccagaggggcatttgcctctcacaaacgctctcagagggacacagttgctcaacaacgttctcaaacacccagcttttgatgtagttgatgacaaagaagaaaaagaaaaagatggtgagaacaaggaaaatggaggagcaatctctgccacaggattaaaggataatggttcttcttcaaagaggatcttcaaaacggactatagcttctgagtgcatagaggaatggatgtactttaatttggaggttaaattttacgtataagataaacatatagtagttattagtattaatttattatcaaacagtgcaactgtgcaagtggtttcttcattgtatcttcgggggagcaatgtgctcttaaactttctttgcctttataattaggctgaccgcattttacaaa

SEQ ID NO: 28300 - DNA, 451 bp, Glycine max
  Clone ID: LIB3108-048-Q1-K1-H7
cccacgcgtccggaaacatgcaaacaaagtttctaaccatatacgacagtggtggaggggaaagaggagaaccaattcaaagaaaggagggaagacagaactttagtgctgataatctatctcctgatagttgaacaattgcacaacatttccaccacgttgggttattgatattactacaccaaagatggacaagaatttagaagggaatcaaatgagaacttcacaatcaccacttggaatgatttgttttccagtccaggatttgctatctaatgatgagtatgagggtggatgtatactcggtaaccttttagaggctacacttttttgagatttaatcatggatattttttagacaagttttggaaatgtattgtgccctcaatgataatgtttagcaaaaataacttagttgaaaactgaaaagttaagtaaaaattgaaaagta

SEQ ID NO: 28301 - DNA, 163 bp, Glycine max
  Clone ID: LIB3108-048-Q1-K1-H8
gccaccgtcgttttatcctctgtaaaaaaagacttccaatagccttgacaaagttgcgtttacccaggagagtcctaacaccactggtaatctgctcctcactttccagctacagcagtctcgcatcttcttcctgctttgtcgcctctacatatctgggtct

SEQ ID NO: 28302 - DNA, 260 bp, Glycine max
  Clone ID: LIB3108-048-Q1-K1-H9
atttatcctcatcattattcattcaaattaaaaaaaaaaacaaaaaaataaggatagggtaatattaaaataaaggaaaaagaataaaaaaaaaataaaaaaaaaaaatattaaataaaataatacacatgaaaataaatactaaattaataaatatctacaggcactctttttttaaggatctatactttaactacccttttatattatagcttatttttattattgcaactctaaacattatttctctgtcacatttt

SEQ ID NO: 28303 - DNA, 129 bp, Glycine max
  unsure at all n locations
  Clone ID: LIB3108-049-Q1-K1-A1
ccgaaaanacggggccgaccaacgcgtccgaaaaaaaaaaaaaaaaattaaaannnnnatttgtaattttctntttaaaaaaaacaaaaanaagggaggctagaaaaaaaataacggacccctttcatt

SEQ ID NO: 28304 - DNA, 197 bp, Glycine max
  Clone ID: LIB3108-049-Q1-K1-A10
agaactaagaaggagaagcaaatggcttccttatatgatctcttccccagctgttaccactggcaaccgtgccggtgccggcatggttgctccattcactggcctcaagtccatggctggcttccccaccaggaagaccaacaatgacattacctccattgctagcaacggtggaagagtgcaatgcatgcaagtgt

SEQ ID NO: 28305 - DNA, 338 bp, Glycine max
  unsure at all n locations
  Clone ID: LIB3108-049-Q1-K1-A11
gcagatagcaaagcatcatctccatcanctactcatgatgactcctcttctcacaagttcagcagctatggaatctgggccaaccttgtcttggcaacttttcgtgtgctggtgctcttctgatggcactcttcctattgaatatttaatttagattatatttatgtatctacatttggtgccacttgctttgatttgaatccatttttttgaacataagtgttattcaatatatgtatgaatgtgatttcttctatttnaaaaaaaaaaaaaaaaaataaaaaccaaactattattaaactataattttctatctaaaaaataaaaaattataaaaa

SEQ ID NO: 28306 - DNA, 428 bp, Glycine max
  Clone ID: LIB3108-049-Q1-K1-A12
cttttatgagcaatttgatccagattttattaacattaggacaaaggctcgtgaagttctgcaaagggaagatgacctgaatgaaattgttcagcttgtgggcaaggatgctttagctgaaggagataagatcaccttagaaactgcaaagcttttgagagaggattatcttgctcaaaatgcctttacaccatatgacaaattctgccccttctacaagtctgtttggatgatgcgcaacattatccatttctacaatttggcaaatcaggcagtagagaagggagctggttcagatggtcagaagatatcttacacccttatcaagcatcgtatgggagatctgttctaccgattagtgtctcagaaatttgaggatccagcagaaggggaagctgctttggttgcgaaatttcagaagttacatg

SEQ ID NO: 28307 - DNA, 242 bp, Glycine max
  unsure at all n locations
  Clone ID: LIB3108-049-Q1-K1-A2
cacaaaaaaggacatttgctcaaagaagctgtgagggaagaggaagacgtgctgccaaaaangccttactctaggtccattgttggtgcgaccttggaagtaatccagaaaaagagagctgagaagccagaagttcgagatgcagctagggaagctgctcttcgtgaaattaaggagaggatcaagaaaacaaaggatgagaagaaggctaagaaagcagaagttgcttccaagtcgcaaaa

SEQ ID NO: 28308 - DNA, 319 bp, Glycine max
  Clone ID: LIB3108-049-Q1-K1-A3
gccgtccgccgctccaccggcgcctcgggagtcatatatgtcagccaccgcagcctccagctacgcggctgccctggccgacgtggctgccgcgaacaacacgctcgacgcgacaaccgcggacatcgagaaaatcgacgagatattctcggaggcgcaggtgtcggactacttcgccaaccccaccttggccgtggagaagaagcggaagctgatagatgagattgcggaatcttcggggttccagccccacacgagaaacttcctctacatcctcgtggacgcgcagaggatcgacctcatcaacgagatcgcaaaa

SEQ ID NO: 28309 - DNA, 408 bp, Glycine max
  unsure at all n locations
  Clone ID: LIB3108-049-Q1-K1-A4
ggccgaccacgcgtccggagagactgacatgataggatataattattttatattgtacataggaagtggaaatgtgaatgtgtggcagggtgataaaaatgaaaagagacttcatttcatactctctggcaaaaccctcgtcgacggtgaccaatcggtggatcaaacatggacaagagcatgctagcggatttggattcgctccctgaggctgataagcaaagaatgactgtcatgatcgatcanctccaaatccgtgacagtctgagaatgtataattcactggttgagagatgctttaatgattgtgttgacacatttaagcataaatccctgcaaaagcaagaggaaacctgtgttcgaagatgtgcagagaaatttctcaagcattctatgcgggttggcatg

SEQ ID NO: 28310 - DNA, 412 bp, Glycine max
  Clone ID: LIB3108-049-Q1-K1-A5
aagaggtcgagtttcacagcagcaatggtgtacgtcaaggctcaaaatcaaaagcctacttcaagagatatcaagtcaagttcaagagaagaagagagggaaaaaccgattaccgtgccaggattcggttgattaatcaggacaagaacaaatataacactccgaaataccgatttgttgttcgctttagcaacaaggacattgttgcacaaataatatctgctagcattgctggcgatattgttcttgctgcagcatatgcacatgagctgccacaatatggtcttgaagtagggcttacaaattatgctgcagcttattgcactggtctcctgttggcccgaagagtcctcaatacacttgaaatggatgaggagtatgaaagaaatgttgaggctactggagaggatta

SEQ ID NO: 28311 - DNA, 426 bp, Glycine max
  unsure at all n locations
  Clone ID: LIB3108-049-Q1-K1-A6
gtccgtttctttcggttccagaggtggtggtccttttattagtgaaaaccgggttcatgtaggtaatcgtgcttggggtgttgacgatgtancacttgagtctttgttccgtgaacaagggaagaaggtcttggaagctagggtaatctatgacagggaaagtggacgatctagaggctttggattcgtgactttcggtagccctgatgaggtcaaaagtgcaattcagtccttagatggtgtggacttgaatggcagagctatacgagtctcattagcagattccaagcccaagcggttctgaagcttttcatctatacccgagagaagatttccgtagttgggacttgggagttatacagctgcaagatgtcattggcaatcagtttggacaagaaatacacttacatgcattgagactagatg

SEQ ID NO: 28312 - DNA, 292 bp, Glycine max
  Clone ID: LIB3108-049-Q1-K1-A7
gcccacgcgtccgcccacgcgtccggttaaagaacagcgtctctgcaatctgctgcaggcattgatggttgcagcttgtgttgctgctatgcctctcttgaagaagataccaacctcagtgctttggggttactttgctttcatggcaattgaaagcttgcccggaaaccagttttgggagagaatactatatcttttcactgctccaagtcgaagatacaaagtgatggaggaacaccatgcagcctttattgagaccgtgccattcaaaacgggtgccatgtttacctta

SEQ ID NO: 28313 - DNA, 405 bp, Glycine max
  Clone ID: LIB3108-049-Q1-K1-A8
ctgaactaacaaagcaaccctatgttttatgtggtttgtgtcaccggagccagcggcgccgtcggatcatgggtggtcctcctcctcctccagcgtggttacaccgtccatgccaccgtccaagatatcaaggatgaaaatgagacgaaacatttggaggaaatggaaggagcaaagagtcatctccatttttttgaaatggatcttcttgacatcgactccattgccgctgccataaagggttgttccggcgtaatccaccttgcatgtcctaacatcattggtcaagtcgaagatcccgagaaacagatattggaaccggcgataaaaggaacggttaatgtgttgaaggcggcgaaagaagcaagggtggagcccgtggtggccacttcatcgatttcgtcg

SEQ ID NO: 28314 - DNA, 358 bp, Glycine max
  unsure at all n locations
  Clone ID: LIB3108-049-Q1-K1-B1
agtgggaaggggcagtgatgtaatgcagcgtgagggcatcctaacagaaccggtgagacttgaaccctaccacaagagggtactagaagcttgtgaaagattgggagggactgtatcggataccgataaccaccctatngggctggatctgtggctgcaccacccgatgcaccattgatggattacattaagcctcttcgcggccatgtgatggagctcaacaagtatctggctcaagattcgaggatcgagatttgccagctccccgtgggtgatgggattaccctgtgccgccgcatcatctgatcattttctcttcatctagatttttcatgacagatattcctttcattaaaac

SEQ ID NO: 28315 - DNA, 270 bp, Glycine max
  Clone ID: LIB3108-049-Q1-K1-B10
gagtttttgttgggtttgggaggctaagttttgtttgcgttgagaaagagagagatgggaagagaaaaggagacaacaaaggtagcttacacagtggagcagcttgtagccttcaatccatacaatcccgatattcttccagatctcgaaaactatgtcaacgaccaggtttcgtcgcaaacttacagcctggacgcgaatctctgccttcttcgcctctaccagtttgaaccaagaaaaatgagttcccagattgtggcccgcatattg

SEQ ID NO: 28316 - DNA, 126 bp, Glycine max
  unsure at all n locations
  Clone ID: LIB3108-049-Q1-K1-B12
caaacaagagaggcactagaggtcatgncttattaatattaaggggttcaatttttcacttgacacgatgtacaaagtataacatgattcaccatgtgtaatatgaaaaagtaatgtaatattgtg

SEQ ID NO: 28317 - DNA, 346 bp, Glycine max
  Clone ID: LIB3108-049-Q1-K1-B2
tacacataccaaaaccttgagagggaaccttactggccctctgaaaagctcagaatttccatcactggggctggtggtttcattgcctcacacattgctcgccgcctcaagaccgagggacattacatcattgcttctgattggaagaagaatgagcacatgactgaggacatgttctgccatgaattccatcttgttgaccttagggtcatggataactgcttgacagttaccaagggtgtggaccatgttttcaatcttgctgctgatatgggtgggatgggttttatccagtccaaccactcagtcattatgtacaacaacaccatgattagcttcaacatga

SEQ ID NO: 28318 - DNA, 439 bp, Glycine max
  unsure at all n locations
  Clone ID: LIB3108-049-Q1-K1-B3
gagccacattctgtccctggtggactcaagtagattctttcataggacagntaaaattatagcttgcaaaaagggttcactagcaaacattgcaatggcctcaacctcttctgctctcactatatcctcttcttccacccttcttgatggcaaggctccaagacagtcaccagctgcttcccctcaatgtgtgagcctcccccctccccctttgcactctcagaaccgttcatggaagaccactgcttattgtcgcaaggttgctcgaaaagttatggcaatggccacaggagaggcaccagctgaagctaccccaactgaggtgccagagattgtcaagactcttcaagaaacttgggacaaagttgatgataagtatgcagtgagttcacttgccttggttggggtgattgcattgtggggctcagttggattgatc

SEQ ID NO: 28319 - DNA, 399 bp, Glycine max
  Clone ID: LIB3108-049-Q1-K1-B4
gcatccacagacacacaggttgcaatttggtgttattccgcgagaagaaggttagtggttgcttttaggggaacagaacagactcaatggaaggacttaagaactgatctaatgcttgtgccagccgggctaaatcctgaaaggataggcggagatttcaagcaagagattcaagttcacagtggttttctaagtgcgtatgattcagtaaggactaggatcatttctctaattcgacttgcaattggttatgtagatgatcattctgagtcgctccacaaatggcatgtttatgtgactggtcatagtttgggtggtgcactggcaaccttgcttgctcttgaactttcatctaatcaattagcaaagcggggagcaatttctattactatgtataac

SEQ ID NO: 28320 - DNA, 308 bp, Glycine max
  unsure at all n locations
  Clone ID: LIB3108-049-Q1-K1-B5
gccgaccacgcgtccggagaacaaaaaaaaaaaaaaaaaaaaaatttgtattcgctcttctcttggaaaagtgaaggccggaagtacgaacgaaagagaagagcgatttanaagtgagagaagatggggttgtcgttcacgaagctgttcagcaggttgtttgcgaagaaggaaatgaggattctgatggtaggtctcgatgctgctggtaagacaaccatcttgtacaagctcaagcttggagaaatcgtcaccactatccccaccatcggatttaatgttgagactgtggagtacaagaacatcag

SEQ ID NO: 28321 - DNA, 323 bp, Glycine max
  Clone ID: LIB3108-049-Q1-K1-B6
gtccgaaaaaggaggcggggtcaaccagttcatcttggttgttgcccgaatccccgggtcatcatgcgttttaaaacgtcggcgttgagtgcactgctttgttgttggcggaggagctgaagaacgaacgcagcgagcggcgagtaacgatgtgcggtgacgccacgaactgggacgaagacgcatacagagaaaccattctcaaggagagggaaatccaaacccgaaccgttttccgaaccgcttgggccccaccctacacctctaacctcgacactctcatccttgcctctagcgacggttccgtcgcatcctactccatc

SEQ ID NO: 28322 - DNA, 419 bp, Glycine max
  Clone ID: LIB3108-049-Q1-K1-B7
cccacgcgtccggttgagaactaagaaggttaagcaaatggcttcctcaatgatctcttgcccagctgttaccactgtcaaccgtgccggtgccggcatggttgctccattcactggcctcaagtccatggctggcttccccaccaggaagaccaacaatgacattacctccattgctagcaacggtggaagagtgcaatgcatgcaggtgtggccaccagttggcaagaagaagtttgagactctttcctacctgccagaccttgatgatgcacaattggcaaaagaagtagaataccttcttaggaagggatggattccttgcttggaattcgagttggagcacggtttcgtgtaccgtgagcacaacagggcaccaggatactacgatggacgctactggaccatgtggaagctgc

SEQ ID NO: 28323 - DNA, 271 bp, Glycine max
  unsure at all n locations
  Clone ID: LIB3108-049-Q1-K1-C10
cgacggccaggcgtccggaaatttgcaantgtagatattttcaagnganngagacgacacgggcgaattcttcttggctcggccccgggtttcttcttctcatcccgctagtactaattcatccaccaagcttctcaactctatgctgctcttcgccttcctcacacttcaaccctcttatcctgcacttgctgcttcttctgacttcttcactatatttggggattttggtgacttaagcacaggttttgcttcagcgtttctgctaata

SEQ ID NO: 28324 - DNA, 399 bp, Glycine max
  Clone ID: LIB3108-049-Q1-K1-C11
attcctttctcacaagaacgttggttttactatctcagcaaaatcttcctttgttggctggcaattgccgcttccaaagctcacattatcttcttccgttcgaacccttctgccggcaacatcccgtgtccgttgccagcaagagtctactactgttacccctgtcgcagaagaagacccgcgcttcgcgtgcgtcgaacccgaaccccgattcaaaggcccggacatttggaacaagagctggtatccaaaagctgcagatcatgtgaatacagaaaaaacatggtatgttgttgatgccacagacaaagttcttggaagactagcatcgacgattgctattcacattcgagggaaaacttggcaacctacacacccagtgtggacaatggtgcgttt

SEQ ID NO: 28325 - DNA, 278 bp, Glycine max
  Clone ID: LIB3108-049-Q1-K1-C12
gcgtacggcaggaagcaagctcattctagagttaaataaatttcttcagcctcctccaaggctcgctgttcctcatccttggctggcagggccctcaagctgggcccatcatcccccgaagtcgggagggtcagcatgaggaagaccgtcaccaagcaggccttcttcggaagcccatggttcggcccagaccgcgtcaagtacttgggcccattctttggcgagcccccgtcctacctcactggcgagttcccaggtgactactgctgggacactgc

SEQ ID NO: 28326 - DNA, 413 bp, Glycine max
  unsure at all n locations
  Clone ID: LIB3108-049-Q1-K1-C2
ctgtttctcaaagagacagtttttgtgagggaatttnaagaatagtcgcaatggagtggtggctttaatcatcttaaaggaaccaacctgtcatnagttgctcacacgtgagaaccacctttgatggagagtggtgttaagagactattatccaacaagtttgaattggacaagactttgagctcagctatagagactttgcccaaagatcgaaatggaaagctttcaaaggagtatctaagggtgacattagacacggtggctccatctgctggtttacctcctgttggtgcaattgaagagatggacaaggttattggtgaagtctttaagatggtgaatgcagatgatgcgaaggtggtgaaagaagacgagttcaagaaactattaactgaaatactggggagcataat

SEQ ID NO: 28327 - DNA, 458 bp, Glycine max
  Clone ID: LIB3108-049-Q1-K1-C3
gaggcttcaatttccaattagggtttcgcttatttttaccaattaccatgggagtcttcggcttggtcgttcgcaaatccggcgccgaatggagcgccaagcaacattccggcgacatcgaggcctccgccgactccacctacgatctccaaaggaagctcgtgcaagccgctctcgccgttgattcctccggtggagtccagtcctccttctctcccgtgtctcctacctccgctgtgttccaggtgatagtgggtggtgctgtattcgttggaggtggcggtggtgctgttgcagctgcacctgcaggtggtgctgctgcagctgatgctgctgcagctgatgctgccccggctgctgagaaaaaggaagaaaaggtggaggaagagtccgatgatgatatggggattgggactgtttgattagagattttctgcctttaattgagttttgatgga

SEQ ID NO: 28328 - DNA, 316 bp, Glycine max
  Clone ID: LIB3108-049-Q1-K1-C4
gcgtccgcccacgcgtccgcctgaatcggtgtgaacattgtttgacgtacgctgcgatgaaacccaccgagcgagggttggaggagtcccaggaacagatccataagataaggatcaccctttcttccaagcacgtcaaaaacctcgagaaggtttgtgcggacttggttcgtggtgcaaaggacaagcgcctcagggttaagggacctgttaggatgcccactaaagttcttcacatcactaccaagaagtccccctgtggtgaaggtaccaacacatgggatagatttgaacttcgtgtccacaaaagagtgat

SEQ ID NO: 28329 - DNA, 410 bp, Glycine max
  Clone ID: LIB3108-049-Q1-K1-C8
gagaactaataaggagaagcaaatggttttcctattgatctcttccccagctgttacgacggtcaaccgtgccggtgccggcatggttgctccattcactggcctcaagtccatggctggcttccccaccagaaagaccaacaatgacattacctccattgctagcaacggtggaagagtgcaatgcatgcaggtgtggccaccagttggcaagaagaagtttgagactctttcctacctgccagaccttgatgatgcacaattggcaaaggaagtagaataccttcttaagaagggatggattccttgcttggaattcgagttggagcacggtttcgtgtaccgtgagcacaacaagtcaccaggatactacgatggacgctactggaccatgtggaagctgcctatgt

SEQ ID NO: 28330 - DNA, 383 bp, Glycine max
  Clone ID: LIB3108-049-Q1-K1-D1
cgtccgcccacgcgtccgaaattttccatctcatggtcttttaatattccccaagggcaagggagcaggtgacaccttgggggtcaagttctacaacgatctcattaatgagattatagcaaatggtaaacatgaattgatatttgagttacccatgcattcatttattttcaaccttttcgttgataactttgttttggattttatttggggcaggcttaaaaccatttgtcacgctgtttcattgggacctcccacaagctcttgaagatgaatatgggggatttctcaaacctgaaatagtgtaaataaatactcaattatatatgattcactatagtatttttaaataatgaaaaagaaaatatagtaaatgtttatgg

SEQ ID NO: 28331 - DNA, 266 bp, Glycine max
  Clone ID: LIB3108-049-Q1-K1-D10
caggccaagccaggtaagcacaacctaagtaattttccaaatggcttcagcttctggggcgagggcgttgtcactgagctctgttaccaacaacaacaagccttcatccgaagccttcttcaggccactacccctacgccaaccaaagaggaccctcttcaccacgaaggcagtgtcaaactccaagcctcaaatcaatgcatctttgaaggagaaggcagttgccggactcacagcagctttctgtgacagcattctatggtggt

SEQ ID NO: 28332 - DNA, 311 bp, Glycine max
  Clone ID: LIB3108-049-Q1-K1-D11
cccacgcgtccggtgatggttcaaatgtatttgctgattatcaaccgggttctctaggcagcacagaccaactcgtcaaggatttagaaaattatgacattgttttccacataggagacatgccttatgcaaatggatacatctcacaatgggaccaattcacagctcaagtgcaagaaatttcgtcaacagtaccatacatgattgcaagtggaaatcatgaacgtgactggccaaacacaggatcattctatgatacttcagattcaggtggagaatgtggagtccctgcaaaaaccatgtatttattt

SEQ ID NO: 28333 - DNA, 388 bp, Glycine max
  Clone ID: LIB3108-049-Q1-K1-D12
tggcagcaacctcaacatccctcttcttctctaatctccattctctcaactcacaaccttgctcttcctcactctccttccgaaatgtccattccaccctctctttcccttcttctaaaccctcccgtggcgttgtagccatggctggctctggcaagttctttgttggtggcaattggaagtgtaatgggaccaaagactccatcagaaagcttgtctctgacttgaacagtgcaacattggagtctgatgttgatgttgttgttgcaccttcctttgtgtacatcgatcaggtgaaaaacttcattacagataggattgaaatttcttgccaaaattcttgggtgggaaaaggtggggctttcacgggagaaatcagtgtggagca

SEQ ID NO: 28334 - DNA, 382 bp, Glycine max
  Clone ID: LIB3108-049-Q1-K1-D2
gccgacccacccgtccggtttcggagtcgttgcaaagctgcccgtttttctataaaaatggcaaggataaaggtgtagcgggggggaggaataagacgaaggcggagctactgaaccagctcaaggatctcaaggcggagctagccctgctccgcgtcgccaaggttaccggcggcgccccaaacaagctctccaaaattaacgtggtgaggctatcgatagcgcaggttttgacggttatttcccagaagcagaaagcggcgctgagagaggcttacaagaagaagaagtatttgccccttgacctccgtcccaagaaaacccgcgccattcgcagacgccttaccaaacaccaggtgtctttgaagaccgaacgtgagaa

SEQ ID NO: 28335 - DNA, 412 bp, Glycine max
  Clone ID: LIB3108-049-Q1-K1-D3
agaaaaccgaccctctcctttccctcttcattattcaatggctcccccaaaggccgagaaggagcccgcggagaaaaagcccgcagagaaggctccggcggagaagaagcccaaggccgagaagaagatatcgaaggaaggaggaagcgagaagaagaagaagagaacaaagaagagcgtggagacctacaagatttacatcttcaaggtgctgaagcaggttcaccccgacatcggaatctcaagcaaggccatggggatcatgaacagtttcataaacgacatcttcgagaagctcgcccaggagtcgtcgcgattggctaggtataacaagaagcctaccattacttccagggagatccaaacggcggtgcgtttggtccttcctggggagttggccaaacacgctgtc

SEQ ID NO: 28336 - DNA, 237 bp, Glycine max
  unsure at all n locations
  Clone ID: LIB3108-049-Q1-K1-D4
ccgggccgaccacgcgtncgaaaaaaaaaaaaaaannntaaaaannnnntattattgtgttctgncgctctaaaagaaccaagcggaggggcccgtccatgcaacggcttcactcttacatacgcgcacctaaaaccaattaactggccatcgtgttacaccaaatgtaactggaaaaaccctggcttaaaccaacttaactggcaaaaccacatcccccctaactcaactggctta

SEQ ID NO: 28337 - DNA, 369 bp, Glycine max
  unsure at all n locations
  Clone ID: LIB3108-049-Q1-K1-D5
cccacgcgtccgcccacgcgtncgatccattcgtatccgctagctcgcgcaggcaccagcaggtgaggttattgtgatttgaatggagggaagtggaggtggcggtgcttcaccgtctgcaccgttgaagcaatacttacaggaattctcgaagctgtttcagtactatctggataaatccactccccatcccccctacaggtggattgggactttcgtcattgcatccatctacgttttgcgtgttgtttatgtgcaggggttttacattgtctcttatggcctcggaatctacctcctcaatctcttgattggctttctctcccctttggttgatccagaactcgatccctccaacgcccctatgct

SEQ ID NO: 28338 - DNA, 321 bp, Glycine max
  Clone ID: LIB3108-049-Q1-K1-D9
ctacaatgtgaaggcacaagcatttatgattgtcattgaagccgcttgtatgcttctgaggattgatgatatagtgagtgggatcaagaagaagcaagcccctggagctgctccttcaaaacccaaggttgagaccgaggcagatgctgacagtgagcaaatccttcctgactgagaatctcggttcaacagacattgttttttggtagagttgatgatgtgcaaggttctttatcttccttaaatcttatcactattcttaggagttttgagtcctttattgggatgctgttttttgtgccttctctaactgttgcaaga

SEQ ID NO: 28339 - DNA, 403 bp, Glycine max
  Clone ID: LIB3108-049-Q1-K1-E1
ctgtgacacacataccccccgtttccgtatttcttcgaaatttctgttagattgtttctgttgtgtgtcagagaaatcagtgcagcaaaaatggacgatgccgaaaccaaaggaagaatcgaagaaactgttcgcagggttttgcaagaatcggacatggacgaggttactgagtctaagattcgaaaacaggcctccgaacaacttggcctcgacctgtctcagccccattttaaagccttcgtcaaacaggtcgtgaaggcttttctccaagaagaagaacaaagacagcaacaacagcaacaagatgaagatgatgatgatgaagaagaagaacaaggaggagtttccaagggcaaggagtacgatgatgaaggcgatctcatcatctgcaggctttcag

SEQ ID NO: 28340 - DNA, 279 bp, Glycine max
  Clone ID: LIB3108-049-Q1-K1-E10
acgacactcagcgtccctcatcagtcttatttgaccatgaaccaggcacaagccagggtggctgccacagcgtcacggtctctgtcacttacaacaccatgagatgcaccaccactgataatgacaagaacaatactagtcacaacaacacaaccaatgatgatgcatactcaggacaagttcaagcaccaatggctacaccaactaatcccgtagaaataagcttccggagaagatcgagaaggcaagccaaacgactgcgagagaacgacggcatgc

SEQ ID NO: 28341 - DNA, 198 bp, Glycine max
  Clone ID: LIB3108-049-Q1-K1-E11
gaggtaatcaaattgggaagctccatggagtagtagaactagttagggacactcctcatcaaatctgtgggtggagtggagatagcagcagctatatgtggaaataggggtaactttatctgctttagaatgcgtatatattataataatatcataaatgtgaacagcatcatgcaagttctcaaaataaatataaat

SEQ ID NO: 28342 - DNA, 281 bp, Glycine max
  unsure at all n locations
  Clone ID: LIB3108-049-Q1-K1-E12
gaattcccgggctcggacccaacgccgtctcgctcacgtccgtcctgctcacgcccgtccgctttaattactcatagcattgcattccctcttngatttggtagtttggttttgtgccttttagataagaacgttctgcnccaaatcaagaaaggggttttaacgatcattagtgtnngtgttttgcaaccaatggcttaagttcttttgctgctatcgatcttggcacttcttttgccatttccatacttcaaacaagtggtaaatggctgctaatgaac

SEQ ID NO: 28343 - DNA, 288 bp, Glycine max
  unsure at all n locations
  Clone ID: LIB3108-049-Q1-K1-E2
ttcaaaaaaaaaaaaaaaaaaaaagaanggttttataaaaaaaaatataaataaaaaaaatatatatttttttttttatatattttcttgttttctcagctttataaagtggggttgcggttttttatattatatatttctttcccttttttcctctcttttcccttctttaaatcccctttcaactccataaaacccccctattttacctccctcacctttcctattctctattctattcccattctacatattttccttctcatctcttttttccccacctttttt

SEQ ID NO: 28344 - DNA, 428 bp, Glycine max
  Clone ID: LIB3108-049-Q1-K1-E3
gttgagaactaagaaggagaagcaaatggcttcctcaatgatctcttccccagctgttaccactgtcaaccgtgccggtgccggcatggttgctccattcactggcctcaagtccatggctggcttccccaccaggaagaccaacaatgacattacctccattgctagcaacggtggaagagtgcaatgcatgcaggtgtggccaccagttggcaagaagaagtttgagactctttcctacctgccagaccttgatgatgcacaattggcaaaggaagtagaataccttcttaagaagggatggattccttgcttggaattcgagttggagcacggtttcgtgtaccgtgagcacaacaggtcaccaggatactacgatggacgctactggaccatgtggaagctgcctatgtttggttgcactgatg

SEQ ID NO: 28345 - DNA, 151 bp, Glycine max
  unsure at all n locations
  Clone ID: LIB3108-049-Q1-K1-E4
cccacgcgtncggtactttccaaacttaattatgtataacgcctgtattaatccaacaaaagatgggcctttgaaactaaagaaaaacaaactaagattggcccaaactgaagaaatacaaaaaaatggcttgagatcaagcctaaccacg

SEQ ID NO: 28346 - DNA, 243 bp, Glycine max
  Clone ID: LIB3108-049-Q1-K1-E5
acacaatctctaatggcactgagggtgtgggcttcttccactgccaatgcactcaaactctcttctgtctccagacctcatctcttgcctcctttttctttctccagatgcttatcttccgtcttggatggacttaagtacgctgattcacatgaatgggtcaagcacgaaggctcagtcgccaccattggtatcactgaccatgcccaggaccatcttggagaggttgtgtatgtggagctg

SEQ ID NO: 28347 - DNA, 346 bp, Glycine max
  Clone ID: LIB3108-049-Q1-K1-E6
ccatgatatcaacaccagctcttatctctcaagcaccaagcatctcaaaagcactcatctatttgaagcccatccaaccgtgtgcctttcaagggccttagaccttctcacaaaggttcacaactcaaagtgagcagcaccaccaaaagggttattccaaagggtggtgtcggtgttagagctgaactcaactcagcacttgtcataagcctcagcactgggctctccctcttcttggggaggtttgtgttcttcaactttcaaagggagaacgtgtcatagcaagtgcctgagcagaacggactcacacactttgaggctggtgacacacgtgccaaggagtatg

SEQ ID NO: 28348 - DNA, 284 bp, Glycine max
  unsure at all n locations
  Clone ID: LIB3108-049-Q1-K1-E7
gggccgacccacgcgtacgtgttgctcatgttcaacacccacattcagtgntttcaccatcagcatggctatcaactgaaactaaaaccctcagttgggaatttcatacctcagaagcaaaatataagcatcagaatccgatcaccctctgcctccaacccgaaccagaatgagtcttcttctcccggattatactctgccaagaaattcgaccttaccgcattcaacgtctacctcgttctctacgatgttcgcccttacctcatcgccgactgcgtcaactt

SEQ ID NO: 28349 - DNA, 287 bp, Glycine max
  Clone ID: LIB3108-049-Q1-K1-E8
ggagttgatgcatcaactacagccgtggctagtattggacagaacatcaatactaagggtgctcattgaatgaatgaaggcctggacttacaagactgattgaattcatggtgccataaatgaaagggaaggagcggataccacttgcaagacaagtacggaactaatcgttaaccatacagtacactataccacacctaagactgatctttacacccctatgtataacatcgcggaccgactggcacgcgtatatggccatggactctactcgaccgtcttgcttt

SEQ ID NO: 28350 - DNA, 512 bp, Glycine max
  unsure at all n locations
  Clone ID: LIB3108-049-Q1-K1-E9
cgccgcgacgctcttcaaggtctctcgacaaggtcantcacctggcttcgncgccgtctccganccgccgtcacatcactcaccaacagcggcnaccaaagctcgagcctctccgagtttcgacgaggtggatcccgtgaangtcgacgtctcgatcccgacggcaacgatccgctacgatggatttcatctgccagaatgtgtcgccaagtaaccgccgattcccattctctcttttccagcggtattttcctcttctttctttcgctctttggttgttttgctttttcagggggacccaattaatagaattaaatcaatttggcctggcgcttaactttttaattttaatggtgtggtggctaaaccgaagggtgggttttaaggaaaacgggtgggctagcctactccaattttgcccctaattggcttttggggttttatttcgcattatttatgaggatctgaatcctgagcctagtctatattatgcatgctggaaattcagaacc

SEQ ID NO: 28351 - DNA, 415 bp, Glycine max
  unsure at all n locations
  Clone ID: LIB3108-049-Q1-K1-F1
ggccgccacacgcgtccggttttccacaattccactctatttcatggtaatttgtcaattgntattaggctgttctgcggtggaattaatgaaaaaaacactatgtatgtatgtacttatccgagaagaaaaagctaggctgagattcagttatgttgatacannnnanaaaaaaaaaaaaaaaaataaaaaaaaaaaaaaaaaaaaaaaaaaaaaaaaaaaaaaaanataaaaaaaaaaaaaaaaaaaaaaaaaaaaaaaaaaaaaaaaaaaaaaaaaaaaaaagggggggccgttttaaaggatcaaagtttacttccccgggcttgcgacgaaatattttttttatggggcccccaaaattaaattaacgggccggggtttaaaaacgccgggacgggaaaaaccttggggt

SEQ ID NO: 28352 - DNA, 484 bp, Glycine max
  unsure at all n locations
  Clone ID: LIB3108-049-Q1-K1-F10
ccgggcggacccacgcgtccgatccatcatgtccaagggcttgacatcactanatttgcttcagcaatgtttcaagntcgctntctatttttattggtcaagcaatgtaacactgcatcttgctagcactcctcataatattaatataattcacttatagacttcaagtattttaatcctattatttcatttgcatgtcttaaaacagatttaggatgacactatctttgttgcttgtctattaattattgaaaggccttctccttaataaatattatattttttatttttttatttattttatcttatttaatttactattattgttattattttatattactatttttctttaatattattacttttatttttttattttttttctatttttttattttattatataattaatattattttgtccttttttttaataatatctcatttttttcttttcttttttaattattatttatttttt

SEQ ID NO: 28353 - DNA, 455 bp, Glycine max
  unsure at all n locations
  Clone ID: LIB3108-049-Q1-K1-F11
gacccacgcgtccgncattttcataatcaaataaaaaaataaataatttttcaaaaaaaaaaaaaaaaagggaagaaattttaaaaaaaaaaaaaacctctcctctcattttaaaacaaccttttataacaaatcctatcaattcatccctcttctcctttttttctcctcctctttttttttttcttttccttttctcttctctttttgttttccccccctctttttattttcccaacttttcccccccttctattctccctttttttttttttttttttccccctcttttttttctcttccccccctttttttcccccttttttctctaaaaaccccttctctcccccctcttattttttttataaaatccccccctttttccatttctttatattacaaaaaacccccccccattcccccttctcaatatttgtccccttttttttcctttt

SEQ ID NO: 28354 - DNA, 373 bp, Glycine max
  unsure at all n locations
  Clone ID: LIB3108-049-Q1-K1-F2
gaaaaaaagagggtcaatgtgagtggttcagtgcanaacaatgggtgggtccttgagaccgccgactacaaagatgcctcggagcctgaggtattgagaatacggggttttaaatttaacaaaattgagcagctggcaacgacatactctgagcctggcgaatttgacttggaggcttgaacatgcatgcgtgtgaaagaagttataggactcatgctgcaaccattattattctgtgactcttttgtgacccgcctttctactctgtggctcaaaagctctaaacaaagggatcaagagcttggtagagattctcttcgctcccctcccaatcttaattaaagcgctcgatgaggataagtgctaatgtact

SEQ ID NO: 28355 - DNA, 449 bp, Glycine max
  unsure at all n locations
  Clone ID: LIB3108-049-Q1-K1-F3
cccacgcgttcggtcgcgttgtgttgcgtcttgttgtgcgctgntcctctgtctgtcgtggggggtttcagaccaaaccctagctccgcatcgcaaccatgtcgaccaagcaaggtggaaaagctaagcctttgaagaaacccaagtctgataagaaggattacgacgaggttgacatggctaacattcagaagaaaaaggaagaggagaaggcgctaaaggagttgaaagccaaggcgcaacagaagggaagctttggaggttctgggctcaagaaaagtggaaagaaataagggctctttatcatgattgtatacatccaatattgagccctgtagtttattaccatgataacttctgtcttattgtggccttctntattgctctaatgttagtactgaactgaggtatttcgtgatgtaagctgcaacaagttactttgttgtagc

SEQ ID NO: 28356 - DNA, 408 bp, Glycine max
  Clone ID: LIB3108-049-Q1-K1-F4
tctaagtgtagtagaggagaggaaccgcgctaattctctcttcttcttcttcttcaatccgttgataacatttatagtttcattcttaatcgttgggaaaaatgttcatcgagaattttaaggtagagagtcctaatgtgaagtacaccgagactgagattcagtccgtgtacaactacgaaaccaccgaacttgttcacgagaacaggaatggcacctatcagtggattgtcaaacccaaatccgtcaactaccaatttaaaaccaacacccatgttccaaaattgggggtgatgcttgtgggttggggtggaaacaacggctctaccctcaccggtggtgttattgctaacagagagggcatttcatgggctacaaaggacaagattcaacaagccaattactttg

SEQ ID NO: 28357 - DNA, 429 bp, Glycine max
  unsure at all n locations
  Clone ID: LIB3108-049-Q1-K1-F5
atcaagttctttgaaactagtgcaaaaactatcattaacgtggaagaggtcttcttttcaagagcaagagatattaagcaaaggcttgcagacacagattcaagagctgagcctcagactatcaagattaaccaacctgaccaggcaaccagtggtggtcaacctgcgcaaaagtcggcttgctgtggttcatgaaaagaatcagtatctgtagaaagaggtgcacaggtttctgcaatagcactcatctgggtgctaatgttattctgatgacattataagtgggagcatgtatttgtccctctgtatctcccaactgcagatgtcttattttaaagttaatattttaaattctttgctcactgacttgggggaatttgttgtgactagtaaattgcttcaatttcctaannnaaaaaannannnnnt

SEQ ID NO: 28358 - DNA, 269 bp, Glycine max
  Clone ID: LIB3108-049-Q1-K1-F6
acaatggctctgtcgtcatcatcattggctggccaagctatcaagctggccccctccacccctaagctagctgttggaagggttagcatgagaaaaacagcctccaagactgttacctcaggaagcccatggtacggcccagatcgagtcaagtactagggcccattctctcgtgagccctcatcctacctcactggtgaattcccaagagactatcgttcgggacactcgctggcttttctgctgacccaagatacctttgccaaaaa

SEQ ID NO: 28359 - DNA, 491 bp, Glycine max
  Clone ID: LIB3108-049-Q1-K1-F7
cgggcccgacccacgctgtccgcccacgctgtacgccgtgccctagcttaaatcactcttcgccattgcagcaagggcacacaggggttcgttacaaacccaattgcgcgaggcgatcggattcgccatcatggggaagaagaagaagagagtttcctcgaaggtgtggtgttattactgcgatcgcgaattcgacgacgagaagatcttggtgcagcatcataaagccaagcacttcaagtgccatgtctgccacaagaagctcttcatcgtcggcggcatgggcatccacgttcttcaggttcacaaggaatccgtcactaatgtgcccaatgcaaagcctggtagagagagtacggatattgaaatatatggaatgcaagggattccaccaaatatccttgctgctcattattgtgaagaagaggatgatgttccatcaaaagcaggcaaagtggatattccaccaactcagctttgtagtggaatga

SEQ ID NO: 28360 - DNA, 457 bp, Glycine max
  unsure at all n locations
  Clone ID: LIB3108-049-Q1-K1-F8
attgaatcgactaaaaaatgaaatgaattatttcatattgatagtattgctatgcttagtgggcgactcgttagttttttagaacggttccaatttaacaaatttataaaccggttcatcgtataaatgaattaaaaaagaactaataaccaacgcatcgcttcggattatctagatctaaagaactagtcaaaacaaaaaaaaatataaaaaaagatatattatagcaactgaactattgtgaagcataaaagaacaaaaatcttatttagttgtaaagcaataaaaatacagataaatgaagaggtgaaagaaagagagaaaaaaaatcaatgatatagaattctaatatgtaaaggtctatgggttatctcataaaaagtagtgtaataaagcatcaatctaaatcaattcatatctatttatatatgaantaatttataacgtaaacaaatta

SEQ ID NO: 28361 - DNA, 424 bp, Glycine max
  Clone ID: LIB3108-049-Q1-K1-F9
gtccaaggataaaatgaccataggatcaaggtatgtggagctgtttccttctacaccagatgaagctagacgggcagagtcaagatcaaggcagtaatcgtggtattttaccttgttttaggtcttttaccttgttccttctggtgctactataatgttctgaattttagattatgtactttatttttactagttcgacttgctgttatatttgcatgtctgaactggatgcattaaattaattaatagaaagggcctttgaatatatggttcggtgcatgtgaggaaggatcctatcagtcaaggcagaggcttgtctggattttgatagataaaattgtcactgccttcattgggtaccttgatagttgataccaagtggagatgaaatactgagatccaacccttgaccaatgtagtcact

SEQ ID NO: 28362 - DNA, 411 bp, Glycine max
  Clone ID: LIB3108-049-Q1-K1-G1
gaaaaaaaggaaataacaaaatgaagaatattcttctgattctaatgggttgtggaggaggtgggcgtcaacttctccaacacattgtctcgtgtcgttctcttcactttacacaggggctgtgcttgagagttgtaggagtcggtgatagtaaatctttggtggttacggaggatttgctgcatgaggggttgaatgatggcttcttgttagaactttgccgggtcaagagtgtcggcgaatctctattaaaacttcttgattttgggaaatgccaggcatttgtgcatccggagtcacaaggaaagattctagagattgcatttcaacttggtaaaaagacaagtttggtatttgtagattgctctgctagctctgacactgttgcggtgctaaagcaagcgattgata

SEQ ID NO: 28363 - DNA, 289 bp, Glycine max
  unsure at all n locations
  Clone ID: LIB3108-049-Q1-K1-G10
gggccgaccacgcgtncggttggaaggaggtaaaggaagnncgngataaaatctgcaatggaaggagaagagggggccgagcagccacagttggtgctcggggacaagctattccttcttcgacaacccgatgttcaagacattgacaaggttcgctacaaggaggatgttttcactcacatcaaccaaaacgatatggtccccttgtatgaaaccctagtggccgatttcgtgttggacttggatcgngccctcttggactctatgcgcgctaaaattcacgatgagc

SEQ ID NO: 28364 - DNA, 191 bp, Glycine max
  Clone ID: LIB3108-049-Q1-K1-G11
gagaaattccagacagcaataatacatatgtttgttagatcaggacatcaattcaggttttgaagtgttgtactggtattttgtaggctattgccgttccataattttaagaattcggcagagatcctgtgtattttcagttgactccttgatcatttatgaatgcacatgcagaagtgatgttcatgttt

SEQ ID NO: 28365 - DNA, 454 bp, Glycine max
  Clone ID: LIB3108-049-Q1-K1-G2
tgagagtgtttggttgaaagtagcaaagattttttctttcgggcaaaagggtcaaaagatgaaggggactatggtggttatgcagaagaatgtgttggatatcaacagcatcaccagtgttggagggatcgttgaccaaggcttaggcttcataggcagtgcagtcgatgcacttacttttgcagccaccaaaatctccatccagttgattagtgctaccaaggctgatggtgggaaaggaaaaattggaaagagtacaaatttaagaggaaagataacattaccaaccttgggagctggcgaacaagcatacgatgttaattttgaatgggacagtgacttcggaattcccggtgcattttatattaagaacttcatgcaaaatgagttctacctcaagtctctaattctcgaagacattccaaaccacggaaccattcacttcgtatgcaac

SEQ ID NO: 28366 - DNA, 445 bp, Glycine max
  Clone ID: LIB3108-049-Q1-K1-G3
gatgttttgggatgaaagtttttgccatgctatctataagaaaacctatcatttgtatttgcatggattgacatagcattgcttaggctcaaacatagttcgaaaagtttcattggccttttgatagtatatctgctcatggctgtgcattattattcattgcatactgtgctgcaggatattgttatatgcgtaaaacctaggattgttttagctgtaaatcacacatacactgtgcttttatatctctgtcaaatgtaattatcagctgcagcaacctggaaatggaggtattgattccacggcaacttgtcacaaactaatgggagatcttcaagcagttttcaacgcacttacaaaagatatgcaacagctcatgatttcaaatccacaaaaggcatccctcctgcaaggtagcccagaattgacaaaacttttaacacac

SEQ ID NO: 28367 - DNA, 291 bp, Glycine max
  Clone ID: LIB3108-049-Q1-K1-G6
gaccacgcgtccgcccacgcgtccgggtgagtgaggtttttgttttgtgttttggaagagagaactctaaatcggacggcgtgggaaaagaccagcggttgacgatgaaacagaagtgtcttgttgttctggtctttgttgttctcttggcttgtgcggttggttgggatgagggtatacccggcggatggaaccccatcaagaacattaacgatcctcacgtgacggagatcgcgaatttcgccgtgacggaatacgataagcaatccggtgagaagctaaagttggtga

SEQ ID NO: 28368 - DNA, 460 bp, Glycine max
  Clone ID: LIB3108-049-Q1-K1-G8
cccacgcgtccgggctgccgaaacacatattgacaacttatctgcacttatggtaacatatccttcaactcacggtgtttatgaggaaggtattgacgaaatttgcaagattattcatgataatggaggccaagtatatatggatggtgccaacatgaatgctcaggtgggactcacaagcccaggttggataggagcagatgtatgccatctcaatctccacaagacattttgcatccctcatggaggaagtggccctggcatgggtcctataggtgtaaagaaacacttggcaccatttttaccatcacaccctgtgatagcaactggtggaattcctgcccctgacaaacctcaaccacttggtaccatcgctgccgcaccatggggctcagcactcatattgccaatctcttacacttacatagccatgatgggttctaaaggactcaccgatgca

SEQ ID NO: 28369 - DNA, 370 bp, Glycine max
  unsure at all n locations
  Clone ID: LIB3108-049-Q1-K1-H1
ctaatggtgaacctttaggaatgaattcatcattaatggaaattctttgtaaaaaatgctagaagcagtgtgttctgtatatagtgctgtagctttgattcataaggttcccctctttgtaaagttttatggttttgctagctgacaagggtgattgggagtattgctagttattgaatttttatcagtgtaggtttcgtttgaatacctttgtgaatcctataaatgaaccatgaagatgaaagggtagtgaatactaatagtgaacctttaggaatgaattcaacaggaatggaaattctttgtnnaaaaaaaaaaaaaaaaaaaaaaaaaaaaaaaaaaaaaaaaaaaaaaaaaaaaaaaaaataaa

SEQ ID NO: 28370 - DNA, 169 bp, Glycine max
  Clone ID: LIB3108-049-Q1-K1-H10
cccacgcgtccgcccaatctatgcctttcatatgttaaagagatgcactgaaaccagaggggatgatgcatgaaactcatcaaacatcaaagaagatagaaaaactcctaatgcggattaacaaagtcatctaaataccaaaaagtcttctttaaactctgcaccaaaa

SEQ ID NO: 28371 - DNA, 213 bp, Glycine max
  Clone ID: LIB3108-049-Q1-K1-H11
ggaggatcctccatgcctgcttattttagtatgagtacaattggcgatatgacagtgatgaactttctgaggacataattcaagcttcaagtgctttggaaaatcttcaattggacagaaaagctcggaatctaacatcttcttggcgacacgctggagatggtatcaatgaagatgaaggcagggctgatcacgtgtaaggaccgacatcac

SEQ ID NO: 28372 - DNA, 191 bp, Glycine max
  Clone ID: LIB3108-049-Q1-K1-H12
ataatgaacaagtactcacctttttgtgatagcttgatgatgatgattttcagaccaagaaaaatggcaacatgctcaagaagattggggtcttgtggaggaaacctaaaaaatagtcaatgttggctgtttacgagttatgacccgcttctaatgttatgattatgttaactgtaatgtttatgttatgc

SEQ ID NO: 28373 - DNA, 405 bp, Glycine max
  Clone ID: LIB3108-049-Q1-K1-H2
cttccttcgccgctttgtgctgctgctgctgcattacctagggtggagccttttgctcaggtgttcagcgcttctttcttacaatggttctacagaacgatattgatttgctgaatcctccagctgagttggagaagagaaagcacaagctcaagcgtcttgtgcagtcaccaaactctttcttcatggatgttaagtgccagggctgcttcaacataacaactgtgtttagccactctcagactgttgtggtttgcggaaactgccagactgtgttgtgccaaccaacaggcggacgggcaaggttaaccgaagggtgctcttttaggaagaagggagattgaatggtttgttaaccagacttttctttgtcaatgattgaaaattttcggttgttaggttttt

SEQ ID NO: 28374 - DNA, 427 bp, Glycine max
  Clone ID: LIB3108-049-Q1-K1-H3
cactaaatgtattatttgcccatagagcctgttttggcccagtcttggaatcttctgtgcggtgcaaatcccatcagtgccatctcaaacacgaacagtgtgtaggagtctgcccaggagttgtaaattaagagcatggctgcacaagctcttgtatcatcatcatctcttaccttctcagccgaggctacaagacaaagtcttggaccaagatcactccaatctccatttggcttctcaagaaaagcctcctttcttgttaaggcagctgctactccccctgtcaagcaaggatcagacagacctttgtggtttgcatcaaagcaaagtctttcctacttggatggcagccttccgggtgactatggatttgaccctctgggactttcggaccctgaaggaacaggagggttcattgagccgaaat

SEQ ID NO: 28375 - DNA, 413 bp, Glycine max
  unsure at all n locations
  Clone ID: LIB3108-049-Q1-K1-H4
cccacgcgtgcgnccacgcgtncgatcttattcctctaatcactctagctgttgcaaattgctaggatttttcaatggcttctgcagatgttgagttccgttgctttgttggtgggcttgcttgggtcaccggcaacgatgccctcgagaaagccttttcaatctacggcgacatcgttgaatcgaaggttatcaacgaccgtgagactggaaggtccagaggattcggatttgtgaccttcgcctcagagcagtcaatgaaagatgcgatcgcaggaatgaacggccaggaccttgacggcccgaacatcactgtcaacgaaacttagacccgcgccaaccgtggtggtggtggaagccgtggtttcngaagtggtggtggatacaacccgccgagccgtggatattgtggt

SEQ ID NO: 28376 - DNA, 170 bp, Glycine max
  unsure at all n locations
  Clone ID: LIB3108-049-Q1-K1-H5
tttgagtggagcttatgngttactatactcaatcaacttgaaatctgatgggtcgctgaggatttganctatgaaacaagagagcctnngctgagtctgaaattagaccacattagaaggatctcagnncagaatcttaccgtaaagagaaatctacttcggtttctttc

SEQ ID NO: 28377 - DNA, 480 bp, Glycine max
  Clone ID: LIB3108-049-Q1-K1-H7
gacccacgcgtccgcttggttgcaatgtaaatttgaatatggttacgtctaaacaaaaaaaaaaaaaaaaaaagagggatttttaaaaaaaaaaaaacaccacacataaaaaaaaaaaataaatttcgtctcccttcttattatccattcttactaacttcttactttctcccttcttttttcttctattccccaacccttttttcaattaattatccttcttcttccaatcttctctactgtcaaacaccctttcatctcctctccctctttttcttttttcccatacctcctctcctcttttttgttcacaccacattattacttttatacccttcttcctttccttctctttttttaatattaaattccttattttgatttcttttctcaccttttttttttttaataatttaaaaatttttcctcctttcctttttttaaatttttatttcccatttccccttatcctctttttct

SEQ ID NO: 28378 - DNA, 328 bp, Glycine max
  Clone ID: LIB3108-049-Q1-K1-H8
caattttcgatggcttcttcagatgttgagttccgttgctttgtcggtgggctcgctggggccactgacgaccaagctctcgagagagccttctctcagtacggcgaaatcgttgaaacgaagattatcaacgatcgtgagactggaagatccaggggttttggatttgtgaccttcgcctcggagcagtccatgaaagacgccatcgaagggatgaacggccaaaaccttgacggccgtaacatcactgttaacgaagctcagtcccgtggtggcggtggcggcggaagcggtggaggtggtggatatggtggtggtcgcggtggtg

SEQ ID NO: 28379 - DNA, 121 bp, Glycine max
  unsure at all n locations
  Clone ID: LIB3108-050-Q1-K1-A10
atcaataccaatataacatttctacagttttttttgttgataataacatttccaaagttaatacagataatataactattgttttcaggaaaaaaaaatanaaaataattaaataatatat

SEQ ID NO: 28380 - DNA, 281 bp, Glycine max
  Clone ID: LIB3108-050-Q1-K1-A11
cccacgcgtccgcccacgcgtacgcggacgcgtgggcaaatatgcacaaattctaaaggggcccccgagaatccaaattccggcaaatagactgatgaagctgaagagaccactgttgacagtgcaggagctgatgggcaaatgtaaggacgggccgcctcaaggaatttgcccgaaacttaagaacgcgtatcaacaaaattgcccgaatgccgcgtatgaagcactttgcccgatagtgaaggtagtgtatcaatggtgttgccggaatgacgcataac

SEQ ID NO: 28381 - DNA, 292 bp, Glycine max
  unsure at all n locations
  Clone ID: LIB3108-050-Q1-K1-A12
cttatctttatgtttaaccctttcctgattgatcaatcgtggtattgtttaactcttaaggttgagttatatatattacaaattgagcagcnnanaaaaaaaaaaaaaaaaaaaaaaaaaaaaaaaaaaaaaaaaaaaaaaaaaaggggggggcggtaataaaggaaaaaaagaaaaaaaaagcgtgcatggaaagtaataaactatgataagggggaaaataaaataaaataaatgggaaggggggtcaaattgaggggactgggaaaaccccgggggtaaaaaaaataaa

SEQ ID NO: 28382 - DNA, 319 bp, Glycine max
  Clone ID: LIB3108-050-Q1-K1-A2
cccacgcgttcgcccacgcgtccgagagtttgttgtgagctataagctagtttatcgtgaggagaatatgaagttgtttgttttctttgttgctgcagtagttttggtagcatggccatgccatggcgcaggctaccaaaggttccctctccgaatgaaaactggctatggtgagcgttcttcggaggtaaaatgcgcaagttttaggcttgctgtggaagcacacaacatccgagcctttaaaaccattcctgaagagtgcgttgaaccaacaaaggactacattaatggcgaacaatttacatcagactctaaaaca

SEQ ID NO: 28383 - DNA, 354 bp, Glycine max
  unsure at all n locations
  Clone ID: LIB3108-050-Q1-K1-A3
caacatactagagccatgctaccatttccccgatgctgccacagccaaagaaaatggaaccttaccaaggagtttcaagcaattaggagttactgagaggcctctcccagtgagaaagagaatgtttggtagagcttggccttttagagcaccagtcaaacctggtcttgttccattatggccccaattggctcanactaggcacgtcgcatgtgttagtgatgaagtagcaagttcatggctaaacaacgttgcagtcaggaaagccattcatgctgaatcggaaaaagtggcgggtccgtgggaattatgttcgagtagggaagagtaccatcacaatgctggaagcatgat

SEQ ID NO: 28384 - DNA, 209 bp, Glycine max
  unsure at all n locations
  Clone ID: LIB3108-050-Q1-K1-A4
aacacatcaaactattagcaatttagcaccttctactactttgtaatcgttcaagagttgtgaactgtgaagaatgagttcaacaagccgtgcttggacttggagcgtggcancaagtgttggaatggtggaagcctttaaagacccaggtatatgcaggtggaacagtgtgatgagatcagcacaacaacatgcttaacataatatga

SEQ ID NO: 28385 - DNA, 302 bp, Glycine max
  Clone ID: LIB3108-050-Q1-K1-A5
gtgagagacggcaaagacggaggagaggtcgcaaacgcaaaaatggtgaagtttctgaaaccaaacaaggccgtcattgtccttcagggacgctacgccggcaagaaagccgtgatcgttcgaaccttcgacgaaggaactcgcgagcgcccctacggccactgtttggtggcggggataaagaagtaccctgcgaaggtgatcaagaaggactcggcgaagaagacggcgaagaagtcgcgcgtgaaggcgttcgtgaagctcgtcaactaccagcacctttatgcccacgcgctacacgc

SEQ ID NO: 28386 - DNA, 316 bp, Glycine max
  Clone ID: LIB3108-050-Q1-K1-A6
acgcccacgcgtccgcccacgcgtccgaaaaactttcgaaagattttatccaattgaaattttaaaaatgactgggataaacttaagaattcaattattgaaattgaataagtaaacaatttaattggattggtcgaatggtatcaaaaaaatggagtactaactcccatttcttatttattattgaattaaccgatcaacttgctttgttatcgaacatttctttttgatttcaaaaattttccggaaaaaatttgaatctatttttatatgcgaatcaatcctactacttttggtcctgagggttctgcgcttg

SEQ ID NO: 28387 - DNA, 306 bp, Glycine max
  Clone ID: LIB3108-050-Q1-K1-A7
acggcattattcaatggccaccacagcagctctattcggaaccatggtgagcaccttcttaggaggaagcaacctatgacgaccaagagcctaaagacaattcccaacgctctttttggtctgaaaggtggacgaagtggtcgtgtaactcgcatggcctcgttcaaggtgaagctcataaccccagaatgagaagtggagtttgaatgcccagatgatgctttcattgatgacaaggcttaagaaaaaggcattgaacttccctactccggcaaggcttgttcttgcggtaaatgtgttgggaaa

SEQ ID NO: 28388 - DNA, 270 bp, Glycine max
  Clone ID: LIB3108-050-Q1-K1-A8
gctatcttcactaacatgtcctctttaacgttcacaacggaggtagcatccagcttccggggcctcgcttatcacaatcccgaacccttcactctctcactccaaaccactcttctccctcttctacgcagaacaaccactcattcccgatcgctaacattttctctccgaccctctcgccgcttcttcggtacctccgccaccactgcacctcctcaatccgaggatttcgacgttttcaccgtcattcctccccgacatcgcataccg

SEQ ID NO: 28389 - DNA, 220 bp, Glycine max
  Clone ID: LIB3108-050-Q1-K1-A9
ctgttgcaaatttctactatttttcaatggcttctgcagatgttgagttccgttgcttgggtggggggcttgcttgggtcaggggcaactatgccctcgagaaagccttttcaatctacggcgacatcgatgaatcgaaagttatcaacgacctgtacactggaaggaccagaggattcggatttgtgaccttcgtctcacagcagtgaatgaaagatgc

SEQ ID NO: 28390 - DNA, 240 bp, Glycine max
  Clone ID: LIB3108-050-Q1-K1-B1
ctttctcattccccatctcctcaccttattcagtcactgatcatttctagggttccgcaatggacgctggctgtaagatcacgaagggcgccgcaggaagaaagggcggcggccctaagaagaagccgctttcaaggtccgtcaaggccggtctccacattcccgtcggaagaattggccgatatttgaagaaaggaaggtactctcagcgtgtctgtaccggcgctcccgtttacttgg

SEQ ID NO: 28391 - DNA, 328 bp, Glycine max
  unsure at all n locations
  Clone ID: LIB3108-050-Q1-K1-B2
gttctagaccgccggtccggccatcatcttggggaactatcagcagcagaatttctacgttgaatatgatttggagaatgagaggttcggatttggtcctcgtaattgcaaaaggaaagcttagatttagtatttgaaaattaacacaccagaggttcctaattcgattcacataacgtccacaacattgtttggtggtcatagnttattattactatattatttatttgtcgcactcattgatttttttctttttcttaaatgcgtaattgcatgaacagagtaaggatgtttagaatgatttcaaataaattaagatatatgatta

SEQ ID NO: 28392 - DNA, 170 bp, Glycine max
  Clone ID: LIB3108-050-Q1-K1-B3
cggacgcgtgggtctctctccaggacggtggggctcatagagaccacggcggatcctcgccggcggcgagttcggcgtgaacggagaagttcgcgccgcggttcgacgggttgcggttcattgaaacgctgattactgcgcacagatgaacgcgcggtgttcaaacgcgc

SEQ ID NO: 28393 - DNA, 355 bp, Glycine max
  Clone ID: LIB3108-050-Q1-K1-B4
gaggggatatgaaatagggatctggtgagggtggaggcgagggttggttcatttgatctgcgagtggagaagagaatcgtgatgggaggaggacacggtcacggcaccacctacaaaggagttaccgttcatcacccaaagcgctggcacactatcaccggcaagggtttgtgcgcggtcatgtggttttgggtattctacagggcaaagcaagacggtcctgttgtattgggctggaggcattctttgggagggtcatcacgatgatcatggcaagggccattaagcattccttatgcatgagctccaaagacaggaagaacagaatttgaagtgtctgttgctgtgggtgtgc

SEQ ID NO: 28394 - DNA, 381 bp, Glycine max
  Clone ID: LIB3108-050-Q1-K1-B5
gatggatccagacgcgttggcaaaggcattcgtggagcactactacagcaccttcgacaccaacaggaacggcttagcgaatctctaccaggagggttccatgctcactttcgaagggcagaagatccaaggcgcttccaacatcgttgccaagctcacctccctcccttttcagcagtgccaccactcaatctccaccgtcgactgccagccctccggcgtcaacgccggcatgctcgtcttcgtcagcggaaaccttcagctcgccggcgaacagcacactctcaagttcagccagatgttccatttgataccaacacctcaaggaagctattatgtgttgaatgacatattctcgttaaactatgcattgagatgtca

SEQ ID NO: 28395 - DNA, 220 bp, Glycine max
  Clone ID: LIB3108-050-Q1-K1-B6
gagacattactggttattatcatacgatgcctggtacagatggacatgactggcacggctcaggactaggcgttcatgcatggtgagggacctgtcacacgagcgtatcttactgggggtggggcgctagctactacaatgtaagctgctggtgccagtagagcactgcacatcgccgtgcacataagcactcagaacaagtatctgtcctaaactgata

SEQ ID NO: 28396 - DNA, 365 bp, Glycine max
  Clone ID: LIB3108-050-Q1-K1-B8
cccacgcgtccgcgacaaaattgtatgcaaattgtaatgtacgttacaatcaaaaaaaaggggagaataaaaaaagaaaagggggtgattataaaaaaaataatttaaaatggaatttttaaatattattatattttatataatatattatggggggccctttttaagtgtcttaactttcttttctcttgtatggaatttctttatttctctttttattggtctcctcttattttattattactgtcctgggcgttttataatattattttaatttgggtaaaattctatgcgttttcccctcatttatattttcttgtgagaattatatcctctttttgtcagattgtgttaatattttaata

SEQ ID NO: 28397 - DNA, 287 bp, Glycine max
  unsure at all n locations
  Clone ID: LIB3108-050-Q1-K1-B9
cccacgcgtncgccctccctcctatccaaacctctccttctcctcttcgcaaccaccaccctcagagccaaaccctccgacgacatggacacatcgttcttcgacaacatcaacccgcaagacgacatcacattcaaccctccggagcccccggagggcttcgtggcgcctccgtccttcgacgacggccccctggagactgaggacgaaatcgccgcagcctacgaggagctctacggccccggctacagcggcgtcttggtcctcggcaacgacgtgtacgtgat

SEQ ID NO: 28398 - DNA, 294 bp, Glycine max
  Clone ID: LIB3108-050-Q1-K1-C1
cccacgcgtccgccctccctcctctccaaacctctccccctcctcttcgcaaccaccaccctcgaatccaaaccctccgacgacattgacacatcgttcttcgacaacatcaacccgcaagacgacatcacattcaaccctccggagcccccggagggcttcgtggcgcctccgtccttcgacgacggccccctggagactgaggacgaaatcgccgcagcctacgaggagctctacggccccggctacagcggcgtctcggtcctcggcaacgacgtgtacgtgatggacgcg

SEQ ID NO: 28399 - DNA, 312 bp, Glycine max
  Clone ID: LIB3108-050-Q1-K1-C11
cccacgcgtccggattctcacaaacatttcttgagaaagaaagaatggctgccaacacattgatgagttctgccatctcagccttcccatctctcctttcctcctcaaaatccagatttgccgcagcagttcctctttccagctttgttgtcaccaatgcctcttcttctcgcttttccatgagtgctgattggatgcctggccagtctagacccccctaccttgatgggtcagcacctggtgactttggattcgaccctcttcgtcttggtgaagtaccagagaatcttgagaggtttcaagagtcagaac

SEQ ID NO: 28400 - DNA, 336 bp, Glycine max
  Clone ID: LIB3108-050-Q1-K1-C12
gtcaggcttgtgctgcccggtgaattgtccaatcacgccgcttctgagggtaccaaggccgtcaccaagttcaccagctcttgaactaactatatcttatcgattttctcaggctcttgtttctgtatctatggctgttaggcctatgcttagatttgaatcagtaggttttttgggggttagcatttgtaattgaaggaatgttagtggttgacttgtttatggaagtggtaggattcattgatgatataggaatgcagtaatttcagtatggtttgtgtgttatactttcaacaatctctaatggtgtgacccggtaatgcaatatttgttttg

SEQ ID NO: 28401 - DNA, 321 bp, Glycine max
  Clone ID: LIB3108-050-Q1-K1-C2
aaaccacaacacattcaattccaccatgagaacttctttggggagtttttcttcacccttcacaagcttccgttccgcctcatcatggttcgaggtgtacgccgctttctccacattcatgatgcttctgagaaccgcgatcaacgatctcataccccaccaagttcgcaccttcatagtcacaaagataaaggctttgttctcagatcgccaaaatattaaccaggtctcactccagatcaacgagatttgggatggccaaatcaaccagctcttccaagcctgccaagagtatctccctgctcaaatatcccactctta

SEQ ID NO: 28402 - DNA, 369 bp, Glycine max
  Clone ID: LIB3108-050-Q1-K1-C3
cccacgcgtccgcctaaattagagaccatcgctccttcttggctactgtccttgttagtaggttcccatggtttgcccacagaagtgtagcttcaattttgaataatgctccttctaagataccaaggaactatcactcgagagagtttgtctttcattggaattacttgtatttcaacatctaatccttttaggaggatagtatatttgagctttacagttttagtcatggaattagaccatgggccgcatattgaattttggatcagtcctctaattttatgtgttagtgcccctttttttatggctagaactttttgctgtgtttgtgggggctggacaagatttcttgatgtatgtgggatgcac

SEQ ID NO: 28403 - DNA, 339 bp, Glycine max
  Clone ID: LIB3108-050-Q1-K1-C5
agaatataccttgttgcagaaagatgtaaattgtccacttgggtggccacttggtgggtttcctggaccacagggcccatactactgtggaactggtgctgataaagcatatggccgtgatattgtagatgcacattacaaagcttgtatttatgctggcatcaatattagtggcatcaatggagaggttatgcctggtcagtgggaatttcaagttggtccttctgttggtatatctgctggagatgaggtgtgggcagctcggtacattttggagaggattacagagatggccggagtaattgtttcatttgatcccaagcctattccgggagattg

SEQ ID NO: 28404 - DNA, 406 bp, Glycine max
  Clone ID: LIB3108-050-Q1-K1-C6
cttacctgaagatggcttcggtgtcctttgccgtgggacttttaccttacgcttcagttcgatttcccgtattgagcaacgccaactcactgaaactcagttcctcagctagcatctctactccaattcttcagcaaaagctctgctctcttctttcccccctccctctaagccctcgccctcgccctctcaccattgtatccgctaagggctacaaaatgaaaacccacaaggcatctgcaaagcggtttatggtgaccggacgaggcaaaatagtgcgtaggagagctggcaagcagcatttgctcgtcaagaagaataccaagcgcaaattccgactcttcaaaatgcacgctgtcagcaggagcgactatgacaacgtaattggagccttgccatatttgaa

SEQ ID NO: 28405 - DNA, 288 bp, Glycine max
  Clone ID: LIB3108-050-Q1-K1-C7
gtgagtgtgtaacagtgataacaagtttgagattgaaaggtgaaatgggtgcgataacgagcgcggtgatagcagtggtgggagttcttctaggttggatcacaatagagattgcatgtaaaccctgtcttcaacaggctcgccaagccatcgatcggaatctcaatccagattaccatcccgactacgacgactccaccgtcattcgcgccccacttaaccccgccctcacagcatcttcttacgccgcctgtaaagccttttgagaatcgaatgcccttcttctca

SEQ ID NO: 28406 - DNA, 334 bp, Glycine max
  Clone ID: LIB3108-050-Q1-K1-C8
ctcagttctctcacacactcattcggtgctcctaatctcagattctagggttagggttcccaatttctccaccgatcagaaaatgagttcaactggtggttctaccaagggcggaaggggcaagcccaaagccttcaaatccgcttcaagatcgcagaaagctggtcttcaattccccgttggaagaatcgctcgattccttaaggctgggaaatacgccgagcgtgttggtgctggtgctcctgtgtacctctctgcagtgctcgaatatctcgctgctgaggttttgaattggctgggaatgctgctagggataacaagaagaatcgtattg

SEQ ID NO: 28407 - DNA, 168 bp, Glycine max
  Clone ID: LIB3108-050-Q1-K1-C9
gcgcttaatgatttacaaaaataagaatgttaaagtgggtggagggacaagtaatccttggggggctgtgtatatggagccaccgtaggtcactcgtgagatcaacttttttgtgttttatagggccaccaaaattcaattcattgtccggggctttccaccttgagg

SEQ ID NO: 28408 - DNA, 118 bp, Glycine max
  Clone ID: LIB3108-050-Q1-K1-D1
atgaatatatctcttttcttttatatgattgttaaagtgtgtggagggtcttgttttcctttggttctctgtatctggtgttgccacatatgagtcgagggatctacttttttggggt

SEQ ID NO: 28409 - DNA, 356 bp, Glycine max
  Clone ID: LIB3108-050-Q1-K1-D11
cccacgcgtccgaatggccaccacagcagctctatccggaaccatggtgagcacctccttcatgaggaagcaacctatgacgaccaagagcctaaagacattccccaacgctctttttggtctgaaaggtggacgaggtggtcgtgtaacttgcatggcctcgtacaaggtgaagctcataaccccagaaggagaagtggagtttgaatgcccagatgatgttttcattgttgacaaggctgaggaagaaggcattgaacttccctactcgtgcagggctggttcttgcgtttcatgtgttgggaaaattgtgaaaggtgacgtggaccaatcagatggtagctttcttgatgatg

SEQ ID NO: 28410 - DNA, 405 bp, Glycine max
  unsure at all n locations
  Clone ID: LIB3108-050-Q1-K1-D12
cccacgcgtccggtctgaggggttacttccgttctgactaaaaaaaaaataaaaaaaaaaaaaagaaaaaaaaaaaaaaaaaaaaaagagataataaaattattaaagattaaaatattatgaatggaaaggggtatatatataattttatttaattttatataattttaattgtgttttttttttttatttttttgtgtgttatatgtnttaattggttgtaatggtggtgtttttcttttggatctaatttttttatttctgtgtgtttatattattatttttgttttttattgtttgttttttatttattttttatttgttctgtttttttatatgtgtttattgtatatttttgtagttttaatatattttatttgtatgtgggaatttttcttttttttt

SEQ ID NO: 28411 - DNA, 63 bp, Glycine max
  Clone ID: LIB3108-050-Q1-K1-D3
cccacgcgtccgcttatgactaaaaaaagaaattattttgatgaaagataaaaaaaaactaat

SEQ ID NO: 28412 - DNA, 367 bp, Glycine max
  Clone ID: LIB3108-050-Q1-K1-D4
ggaacattcagagatagatgtaacttcaggattttttgttctgtttggttcaggtctcatgttgtctttcatcctttcaatctacgtattgcaatcatcacgtgacaaattggaaagatttgtaagggaaacggttgtagaaagcagcgtgcctggtgaggtggtagcaaaggttgaatgatgcatccctggtgtcaatgatgcaatgtataacattgtaatattgtattcgtgaattgacaagatcaattttggaggagggggagaagggaatgttgttcttgcatatacaaagctatgaaccagttgtttcttttcttgatgaaagaggtgactcacgtgagtgagttggattggattaatttta

SEQ ID NO: 28413 - DNA, 364 bp, Glycine max
  Clone ID: LIB3108-050-Q1-K1-D5
cccacgcgtccgagcagtttgtatggagggtgttgcctttactcacaatcctcatgtctttagtagtattcttctacttgcaggattcttacagggcccatttacatcctctcgtaaagttaccgcggagtaagtgcagtcttcttccccatcgtcatttctggataaccagcaaacgcattgtgaccccacaagggatcatttctggttcagtggagataaatgaagggaaaataatatctgtcatcaagggatatagtaagcaggggaagtctaagcaagaaaaaataattgattatggaggtgcttgtgtcatgcctggcttgattgatgtgcacgtacatcttgatgagccaggaagaac

SEQ ID NO: 28414 - DNA, 174 bp, Glycine max
  Clone ID: LIB3108-050-Q1-K1-D9
caaaccagcaaaaacctgttttcatataatggcctcaacaactctaacaacggtgaccctccgtacgctatcggatcctacacccttctcttcttaccctacgcacctttccgccaaacccttctccctccaattccccaatctttcccaccgcgccgccaccactcgctcgcc

SEQ ID NO: 28415 - DNA, 321 bp, Glycine max
  unsure at all n locations
  Clone ID: LIB3108-050-Q1-K1-E1
cctccctcaaatcccaaaccagcaaaaacctttcttcacaaaatggcctcaacaactctaacaaccctcaccctccgcacgctatcttatcctacaccctcctcttcttaccctacgcacctctccgccaaaccctcctccctccaattccccaatctctcccaccgcgccgccaccacgcgccgnccccgtgtcgtcgtctccgccgttgaggcgccggagaaaatcaccaagctcggcgacgaaatcggcggactcacgctcgaggaggccaagaacctcgtcgacttcctccaggacaagctcggcgtcttcgcggcg

SEQ ID NO: 28416 - DNA, 281 bp, Glycine max
  Clone ID: LIB3108-050-Q1-K1-E10
tcgcccacgcgtccgcccacgcgtccggccaagttctgtgcatcagcttcatcgcctacaagcccccaggcttctaagcgtgaaaaatttgcaaagcatttgtagccgccaccccactttgtttgtttgtacttaaactacattcccatttgtttttgctttttgagatttcatcattctgtatttttgggttctgttttcggacttcaatggaaattaatggatgagaactaatgaataagcctttgtgtcgtgttgcttttggttaaaaaaaataaaaa

SEQ ID NO: 28417 - DNA, 142 bp, Glycine max
  Clone ID: LIB3108-050-Q1-K1-E4
cactaagcgagcacagtctaaatgctgccattgttgatttgagccggacatagacctctgccgatgcgatctgcgaagctgcgagatactattgccacaattgcgcacttaacgacactacatagagagaggctctgaataa

SEQ ID NO: 28418 - DNA, 226 bp, Glycine max
  Clone ID: LIB3108-050-Q1-K1-E6
tcggagtgacacagttttgtttagacaatcagaagtcatttttggcgcgtaatatatctgggttttgttcagaacccaaaatcatgattgcttgcttatataatcacattatattattatgtattttctattacattatcgacttgtatattttgtttcgtggattttaaattcttatgtcttatatcttttttatttgttttattttttgttttttgttcttttt

SEQ ID NO: 28419 - DNA, 292 bp, Glycine max
  Clone ID: LIB3108-050-Q1-K1-E7
tccacgcgtccggtcaatatgttaagaaaatggttagttatttattttctttcaaaaacgaaaacccatacaaacgctatctgatcctacaccctactattattaccctacgcaacctatccgacaaacccaactccctacaaattacggggtgtctgttttagagcctccaacattccctccccgtgcttgcgacgtcttagtcgttttatcgcgggaccaaattacaattcactgcccctaattttacaacactcacgcttggaaaaaccctgaactctcccaacttaat

SEQ ID NO: 28420 - DNA, 80 bp, Glycine max
  Clone ID: LIB3108-050-Q1-K1-E9
cgtctgaactatttaacttactattgaacttatcctacttcaattcttatatgaacaatgttactggggagttaagtttt

SEQ ID NO: 28421 - DNA, 337 bp, Glycine max
  unsure at all n locations
  Clone ID: LIB3108-050-Q1-K1-F2
atcacaccaaccaaacctcactctccctttctcccctgaccctctccctgccatggtcatgggagcctttggccacttcgaaccgggctccaaatgcagcaccgagaaccggtctaaccaaaccgtggcctcggacttggacggcaccctcctggtgtcccccagcgcatttccttactacatgctggtcgccatcgaagccggcagcttcctccgtggccttgtacttcttgcctccgtccctttcgtgtacttcacgtacatattcctctccgagaccgcgggcatcaagtnccttgatcttatcggcttcgcgggccttaaagtcanggacctt

SEQ ID NO: 28422 - DNA, 312 bp, Glycine max
  Clone ID: LIB3108-050-Q1-K1-F3
gagataaggaacagcaacacatgggagtttatggaaatgagtggttgtttagtagtttctgtgcaaattggcgccgtttaagacaccagaattcctgttctatgcctccttttgagtgaaaaaaaaaaaacatcaaaacaaaaacttgttctctctcagcttttcatcttccgatcttaatatacattgactaaaagaaaaataaagggatcaaaattaagttccttgatctaataagatccttgcttttaattgtactaactcatgaagagacttggcagttcggatacactgggtgctcttatgaccatt

SEQ ID NO: 28423 - DNA, 297 bp, Glycine max
  Clone ID: LIB3108-050-Q1-K1-F5
atagactatctttatataataatataaataagaataaaaaaataaaaaaaaaaaaagaatctatttaaatataaaattaatatatataaggtacaaatagtaaatcgaggacccaatttaaggaaaacctttctttcaattttggtcctttaagaaggctaagatttcccgccattgcgaaggcctttttatttctttataggcaaaaaaacaagagtttttttgatacacaaaacacaaagaaaatctggggggtttttatattccaaatatattactctaattataaaaaaggga

SEQ ID NO: 28424 - DNA, 76 bp, Glycine max
  Clone ID: LIB3108-050-Q1-K1-F6
gtacttttttcagttttatatataatgaagttattttatgaaaaaaaaaaaaaataaaatggaggaaggaaaataa

SEQ ID NO: 28425 - DNA, 206 bp, Glycine max
  Clone ID: LIB3108-050-Q1-K1-G1
aaaactgtaactactattaacacccgatacagatcagaacagagcagcaaccatggggattcacagactcgaattgtgcataaccatggttcgactagccatagagctcgtcgtgagcgtggcggaaacagtggtcatagttcaacagagaaccgctgagcctcttggaacgatgaatcgcgcaagtacacctctccctttctatg

SEQ ID NO: 28426 - DNA, 303 bp, Glycine max
  Clone ID: LIB3108-050-Q1-K1-G10
ctcattcttcatccatagacatggctttcgttacttctgcagccgttgctattccctgattcactggcctcaaggcaagcgcaggcaaagtgagtgccgcagttaaagtcttagcttcccaagccacaaggttgggcatcaaggctttgctgaaagacgttggagtcgctgttgtggccactgccgctagtgcagtgctggctagcaacgcctaggccatttaagttgtgctgtgtgtgtgattaccggtctttggctttcgttcccaacaattttttctggtcctctggggagaatatcttg

SEQ ID NO: 28427 - DNA, 345 bp, Glycine max
  Clone ID: LIB3108-050-Q1-K1-G12
tcgcgccgaagaaggtattgacgtcgatgatgaaaatgaaattggtgaaaacattactgctgctcctttgtgtgaaacatcttctgttatgcagtgattggtgctcctcaaacttgtcctgctaacaatgaggataaatgcggcgattcagatgaatggaaaggggagtttttccctgacattcccaaaattaaatatgagggtccgtcaagtaagaatgtgctttcatttaaatggtataatgcagaggaggaaattcttggtaagaagatgaaagaatgggtaagatttagtgttgcattttggcatacatttctttgaaaaaggtgctgacccaattttggt

SEQ ID NO: 28428 - DNA, 339 bp, Glycine max
  Clone ID: LIB3108-050-Q1-K1-G2
ctttttctttctctttctttcgcactttcattctctaaaaaaatctaagtccctttggtcttcatcttctgttctgatccaggtatggcttctaaacgcatcttgaaggagctcaaggatttgcagaaggatcctcctacctcatgcagtgcaggccctgtggctgaggacatgtttcactggcaagccacaatcatgggacctgctgatagcccatatgcaggtggtgttttcctagtttcaattcattttcctcctgactatcccttcaagccaccaaaagttgcttttcggactaaggtgttccacccaaacatcaacaagcatggcagtatatgt

SEQ ID NO: 28429 - DNA, 376 bp, Glycine max
  Clone ID: LIB3108-050-Q1-K1-G4
gtttggtatttcacatcatctcgaacgaacgggggacctctcttctttcggattcgccaagctgttgtttgtgattggttcagttcattattaaactctcgctctataaatacacttccaaacctctttcgagatctgaaaaacactcccatggaccgtcgtaaagagaaaaatgctccatggttatcggtgccgcaatttggggactgggatcagaagggccaagtgccggactactcacttgatttctcaaagatccgggaaactaggaagcagaacaagacaaatatttccagggcaagcctttgcaatgaagaagaattcatgggattcaacaaccttcagcagcgtcaacactggccacagcagtgagcac

SEQ ID NO: 28430 - DNA, 411 bp, Glycine max
  Clone ID: LIB3108-050-Q1-K1-G5
ggtggtttaaaccctggttctatcagcatgcacagacggcactgaagaaaggagagtttgtagaatacattcctaccagagaatattatcacaggcacacgagatgcttgtactgggagggaaagcttatcctcccatttgctgatcaattttggtttaggtatctgtttggctggttgatgccacccaaggtttctctcctcaaggcaactcaaggtgatgctataagaaactattaccatgaaatgcatgtcatccaggacatgcttgttcctttgtacaaggtgggagatgctttagaatgggttcaccgtgagatggaggtataccccatttggctcttgccacacaaattgttcaagctgtctgtcaaaactatgatttaccccgagccaaggatcgaactacacc

SEQ ID NO: 28431 - DNA, 328 bp, Glycine max
  Clone ID: LIB3108-050-Q1-K1-G6
gcaaagctcgtggaattgctagcaatggcgatgatcaaggtttacgagctgaggcagaagacgaaggctgatctgctgaatcaactgaaggacctgaaggcggagcttgccttgcttcgtgttgctaaggtcaccggtggtgcccctaacaagctttccaagataaaggtggtgaggttgaacattgcccaggttttgacggtgatttctcagaaacagaaggctgcgttgagggatgcctacaagaataagaaggacttgcctctcgatctccgccctaagaagaccagtgctattcgcaggaggcttacttagcaccaggcattat

SEQ ID NO: 28432 - DNA, 246 bp, Glycine max
  Clone ID: LIB3108-050-Q1-K1-G7
agggtctgaaaccccacgatcaagggcccgcacttgtgattcagccagtcagggatctggtgttgggtcacctaataacaaggaccagcgacgcagtttctttaaactactcgagaaaggatccgaaatgccttttcaaacttttcacccacttaaaaatggtccaaaactgacgcgcaagaaacgcaagtgaatcatggaggtacctatttcatcactgaatgcagcacctcttgacactgagtt

SEQ ID NO: 28433 - DNA, 225 bp, Glycine max
  Clone ID: LIB3108-050-Q1-K1-G8
acgctcccttcaattttttctctttatttcccctcaatttattctcttcttcaattttagccggacatacaacataaacaacaacggttttagccctcacttacaaacccatttctcttatgttttaacaacacttttgatgaagtcgttacaaaaagcaactgttttggcttaattattagtattattgttgttaattttttacaaggattgagataataacac

SEQ ID NO: 28434 - DNA, 125 bp, Glycine max
  Clone ID: LIB3108-050-Q1-K1-G9
tcgctcacgcatacgttgacgcttgggcagctatggtgattatgtctgcctcgatcacattgggatgtacaccaccatcatccatggtggtacccgggattgcaacgctcagctctgtgacactg

SEQ ID NO: 28435 - DNA, 345 bp, Glycine max
  Clone ID: LIB3108-050-Q1-K1-H1
gcataacttgcatagactattgattaagaaagctattgtcattgatttgctagctccaacaatgggttctagcagattatcattcattttagtacttgtgcttgtaaccttttcatccatgatcattgactcaagggttgcagaggcacgtaccctgccaaaatcagccttattgccttccaaagttgatatacctactgttgttcctcttccactggtggcaccactgccaaatttgcctgttactctccctccagtgcctgaactacctgcagtacctaaagtaccaattcctgaagtaatagttaataacgccaaaataatcccttgagtacctatgatcta

SEQ ID NO: 28436 - DNA, 283 bp, Glycine max
  Clone ID: LIB3108-050-Q1-K1-H10
attcccttcacaccattctcacaaaacaactttcaaactctgagaaagaatggctgccaacacattgatgagtactgctatctcagccttcccatctctcctttcttcctcaaaatccagatttgccaccgcagttcctctttctagctttggtgtcaccaatgcctcttcttctcgcttttctatgagtgctgactggatgccaggccagcctatacctccttaccttgatggttcaacacctggagactttggattcgaccctcttcgtcttggtgaagta

SEQ ID NO: 28437 - DNA, 380 bp, Glycine max
  unsure at all n locations
  Clone ID: LIB3108-050-Q1-K1-H11
aagaaatataactaatattctntagaattatcaaaaagaatattaaattcaaataaattttagggagtagaaagacttaaaaaggaggatttgaaatgcgagatctaaaaacatatttttccgtggcaccagtagtaagtactctatggttcggggctttggcgggtctcttgatagagatcaatccgttttttccagatgcattgatattccccttttttataattctagttattgacacggaaaggggttgaagaagatttttgatccaattaagtattaaaatatttgttattaatatgtaaattaatctcctcttccttaatttcgactttaaatttctttcttttctttacaattggtaatagaataagttaggg

SEQ ID NO: 28438 - DNA, 118 bp, Glycine max
  Clone ID: LIB3108-050-Q1-K1-H4
agcgttacaatgtccttttcttgtaaaaaaatttttttataaattttttaaatattttatgggttctttttttaaaaaatattggttttataataaattattttttaattattctttt

SEQ ID NO: 28439 - DNA, 385 bp, Glycine max
  Clone ID: LIB3108-050-Q1-K1-H7
tcgtgttgatcgagataactagaaacagtgtgatgaaaatgaaggtgcttgctttcttcgtggctacaattttggtagcatggcaatgccatgcgtacgatatgttccctctacgaatgaacactggctatggtgcccgtactccggaggtgaaatgcgcaagttggaggcttgctgtggaagcacacaacatctttggctttgagaccatacctgaagagtgcgttgaagcaacaaaagaatacatccatggcgaacaatatatatcagacttcaaaacagttaaccaacaagcttacttttatgccagagaacctcaagtccattccaaggacacatttgtgttcaagatataatggaccgtactctctagtttccatacttc

SEQ ID NO: 28440 - DNA, 243 bp, Glycine max
  Clone ID: LIB3108-051-Q1-K1-A1
gcgcccacgcgttcggtcccaagtgaagtccattctttgtcttttcttcccccctttttccccgagttcggcacccccacactgcattcctgtgtcaaaaccctagattttcaaatctagggttttgttttcttaacttggtacgggtattgttatgggtctggttcaggaactgaacttccacccttgctaatttcacttttctcttctcaatcttagcctttggtttttctacatttttcc

SEQ ID NO: 28441 - DNA, 328 bp, Glycine max
  Clone ID: LIB3108-051-Q1-K1-A11
gcagaaagcaagctcatcctagagttttaaaaatggcagcagcctcctccatggctctctggtccccatccttggctggcaaggccgtgaagctgggcccatcagcccccgaagtcgggagggtcagcatgaggaagaccgtcaccaagcaggcctcctccggaagcccatggtacggcccagaccgcgtcaagtacttgggcccattctctggcgagcccccgtcctacctcactggcgagttcccaggtgactacggctgggacactgctgggctttcggccgacccagaaaccttcgccagaaaccgtgagctcgaagtgatcca

SEQ ID NO: 28442 - DNA, 358 bp, Glycine max
  Clone ID: LIB3108-051-Q1-K1-A12
cccacgcgtccgcccaacacttccgaaccttgcattgtatctacccacttctcaacgaacgatggcaatggcaacccaagccggtctcttcaccccacccctctccggtctcaaacccagcgaccgagccaccgcgccatggaaacaatcctccaccctctccttctccacctcgaagcccctcaagttctcgcgaacaatcagagcagcagccaccgaccagaccacagaggcaccggttgggttcaccccaccggaactggacccaaacaccccttccccgaccttcggaggcagcactcggcgggctcctgcgcagggccaaagtggaggagttttatgtcatcacatgggactc

SEQ ID NO: 28443 - DNA, 374 bp, Glycine max
  Clone ID: LIB3108-051-Q1-K1-A2
gtaccgattcgagttccgagcacgcgtacgcttcactatttggataagcatgctgagctacataagtgtgctgttcctcccaataactcatagcttaggggatcacctacctgagcttttagtggtggaagtggcgtgcctgctcagtactcgcccttagatggtactaattcagcatttacttactatggcctgagtgggtacgctggaaatccagcattggcatccttggtggctagccaacttggaactagtaatctgccacccttatttgaaaatgttgctgcagcatcagtgatggcagctcctggaatggactcaagaattcttggaaggtggttgtcttcttgagtcgctgctccatctgatgtgca

SEQ ID NO: 28444 - DNA, 281 bp, Glycine max
  unsure at all n locations
  Clone ID: LIB3108-051-Q1-K1-A4
cccacgcgtncgggcaggatgggtggggctccctatttaaagaaagtagaccttgagaatgactctacatatccagaattatgttctgctctagaaaagatgttcagctgttttactatgagtaaatgtggatctcatggaattcttggcagggagatgctgaatgaaaccaagctgaaagaccttcttcatggatcagaatatgttcttacatatgaggacacagagggcgattggatgctctggggtgatgttccctgggagatgtttattgaaacatg

SEQ ID NO: 28445 - DNA, 371 bp, Glycine max
  unsure at all n locations
  Clone ID: LIB3108-051-Q1-K1-A5
aacatttttggtttggggatagatagagtgatacgcgtcacattttcataataataaagaaatggcagcggcagcngcagtgacggtgctactcccacctaggattccgaccaccaccaacgttacccgctgctctgctttgccttctctccctcctcgcgtctccaacaccaaaaccactttgttctcaccttccctcaacaacttttcagtgccccgaaaatcttctctgcttcagaccagagcttcttcagaggaatcatcctcagtagatgccaatgaggtgttcacagatttgaaggaaaagtgggatgctcttgaaaacaagtccacagtacttctttatggtggaggggctatagttgctattt

SEQ ID NO: 28446 - DNA, 313 bp, Glycine max
  unsure at all n locations
  Clone ID: LIB3108-051-Q1-K1-A6
gctacattttnttgcatcactgtggagcctgatggcaagggtggagcccnaagcggcggagagagaatgaccatgtgaggtgtgtgtggttcttgcttaatttgactggctctatggtagcttttgtgtgttgtacggcttcttctagaggctataaacattgatttcatgtatttgattcaggttattatgtatctatccgttttacattttgttatgacaaattataatttattttttatttttttttttttttttttttttttaatgtttttttttttatcttatctttttttattgggttgtccttttt

SEQ ID NO: 28447 - DNA, 244 bp, Glycine max
  Clone ID: LIB3108-051-Q1-K1-A7
atcgactaaaaaatgaaatgaatcatttcatattgatagtattgctatgcttagtgtgcgactcgttagttttttagaacgggtccaatttaacaaatttataaaccggctcatcgtataaatgaattaaaaaagaactaataaccaacgcatcgcttcggattatctagatctaaagaactagtcaaaacaaaaaaaaatattaaaaaagatatattatagcaactgaactattgtgaagcat

SEQ ID NO: 28448 - DNA, 388 bp, Glycine max
  Clone ID: LIB3108-051-Q1-K1-A8
atcccgtaaccatgtctcagactgttgtcctcaaagttggtatgtcatgtgaaggatgtgttggagcagtgaagagagttttaggaaaattggatggtgtggaatcatatgacattgatttgaaggaacagaaggtggtagtgaagggaaatgtccagccagacacagttcttgcgaccgtttccaaaactgggaagaagactaccttctgggaaggtgaagcagcagcatccgaaactagcacagcaactgcctagaacatttcgctctattctgttcagaagaagtagctgcgtaaatcaaatactattttatggacttgaaataacgatgggacttgttatctggtgtattttagtgtgtcacaacaaagatggctgtatatgac

SEQ ID NO: 28449 - DNA, 336 bp, Glycine max
  unsure at all n locations
  Clone ID: LIB3108-051-Q1-K1-A9
cccacgcgtccgcttcatcacatggcaaacgcagcatctggtatggcagtccatggtgactgcaagttgaggtttttggagctgaangcaaaaaggacacaccgtttcatagtttttaagattgaggagcagcagaagcaggtcattgtggagaagcttggtgagcctgcccagggctatgaagatttcactgccagccttcctgctgacgagtgccgttatgctgtttatgattttgagtatctgactgaagggaatgtccctaaaagcagaatttttttcattgcgtggtcccctgacacatcaagggtgaggagcaagatgatttatgcaagc

SEQ ID NO: 28450 - DNA, 283 bp, Glycine max
  Clone ID: LIB3108-051-Q1-K1-B1
gttctctcatactcctctcactatacgttatccgagcgagatagagaacagatagagataacactaggcagcacaagagaatggcgctgctgtgtggttcaacttccgtgactccattcctttctcacaagaacgttggtttcacaacctcagcaaaatcttcctttgttggctttcaattgccgcttccaaagctcacattatcttcttccgttcgaacccttctgccggcaacatcccgtgtccgttgccagcaagagtctactacttgtacccctgtcgc

SEQ ID NO: 28451 - DNA, 451 bp, Glycine max
  Clone ID: LIB3108-051-Q1-K1-B10
cccacgcgtccgggccaccaattggcaagaagaagttcgagactctttcctacttgccagacctcgatgatgcccaattggcaaaggaagtcgaataccttctaaggaaaggatggattccttgcttggaattcgagttggagcacggtttcgtgtaccgtgagcacaacaggtcacctggatactatgatggacgctactggaccatgtggaagctgcctatgtttggctgcactgatgcttctcaggtgttgaaggagcttcaagaggctaagactgcataccccaatggcttcatccgtatcatttggatttgacaacgttcgccaagtgcagtgcatcagcttcatcgcctacaagcccccaggcttctaagtcattgaaaaatttgcaaagcatctgtagccaccccacttggtttggtgtacttaaactacattcccatttgttt

SEQ ID NO: 28452 - DNA, 301 bp, Glycine max
  Clone ID: LIB3108-051-Q1-K1-B2
ccgtccgagccgtaccctcagcacaaccctagctcaccgtcagctgtctgtcaaggggatacctgtgctcctccatcatgcgacgagcgatcatgtctcgtcgaggtggggtgcgccgatgaaacctcgccaccgccaggtctctgttccgccgcccggggtccccgcggttcgagtctagcttcttgaaattgaagggaggacgccggatataggacacgcgctgttgggccgtgtgtgagaaggacattctcagagaggtgtttaagcacgaattagtgaggttcaacgtctttgggga

SEQ ID NO: 28453 - DNA, 359 bp, Glycine max
  unsure at all n locations
  Clone ID: LIB3108-051-Q1-K1-B3
tctgccacgcgtntcgccacgcgttcggcaaggatgagattcatgttattgcaaaatatgttaatgactatggtggggatgtgaagacagagatcacaggggtgctgtatcatgaaatggtccacgtttggcagtggaatgggaatggtcaggctccaagtggattaattgaaggtattgcagactatgttaggctgaaggcaaactatgcacctagccactggaagaaagcaggggagggacagaaatgggaccagggttatgatgttactgctcgttttctggactattgtaatactctcaaaagtgggtttgtggcacaattgaacaagcagatgaggactggttatagtgatcaa

SEQ ID NO: 28454 - DNA, 452 bp, Glycine max
  Clone ID: LIB3108-051-Q1-K1-B4
gttttgaacccctccctgtccccggtaaatctgggttttgacaaactacttgaaattgatcaagggaatgaggatcgttggactgacgggtggaatagcgtctggaaagagcaccgtttccaatctgttcaagtcccatgatgttcccattgtagatgctgacgttgtcgctcgcgtaagttccttctccctttttttcaatttcggtcaaattaaactctgtctgtgagtgattactggaatactatgcaggaggtgttaatgaaagggagtggtggttggaagaaagtcgttgcagcttttggggacgaaattcttcttgaaaatggagaagtcaatagacccaggcttggccaaattgtcttctccgatccggataagcgtcaatttctcaaccggttttgaagctatggatgaagggatacaaggtcattgttcttgatgtgcctttg

SEQ ID NO: 28455 - DNA, 316 bp, Glycine max
  Clone ID: LIB3108-051-Q1-K1-B5
ggtcttctggctagctcatgcctagcacattccccaggtgctgcacccacacaaccacccactacgaccccatcaccaccaccaccgagatcagcacctgcaccagcacccaccccgccagcaacaccaccaccagcaacaccaccaccagcaacaccaccaccagcagcagcaactccttcaccagcaacatcaccaccagcaacaacaccaacgccaacaccaacagctgcacctacacctgctttttctcctgcaaccttaccagtcccttccgctagttctccaccagcaccaggcacacccggacccgttc

SEQ ID NO: 28456 - DNA, 224 bp, Glycine max
  unsure at all n locations
  Clone ID: LIB3108-051-Q1-K1-B6
tcgccacgcgtncgggaatttcgatgctcagttaatctcttttaccatactcttctcttcttgctcttgcaagaaagagccatgtgcatgcatcgctacctgaggaagattattgggaagctgttttgccaaacacttccattcccactgcactgcgagagcttctaaagccttttcctgcatgtgttgaaattgaataacttcctaagccaattgatgattca

SEQ ID NO: 28457 - DNA, 219 bp, Glycine max
  Clone ID: LIB3108-051-Q1-K1-B7
cccacgcgtccgcccacgcgtccgaaaaattaaaaaaaaaaaaaaaaaaaaaatgtggtggtcttaaaagaaaaagcggtggggattcataccttcctgatgaagattatagggaagctttttttccaaacactcccattcctacttctcttctagagctttttaaacctttccctgcatgtaaaaaaattgatgaactcccttagcttttttatgata

SEQ ID NO: 28458 - DNA, 318 bp, Glycine max
  unsure at all n locations
  Clone ID: LIB3108-051-Q1-K1-B8
gaagaatacgcggcagaaggcggtggccgccggcgcgccggcggtgctcgtggaccggctggcggactttgagaagtgcgacgcggagagggcgctggccacggtggagctgctctgccggattccggcgggatgcgcggcgtttgcagcgcacgcgctgacggtgccgatgctggtaaagataatcctgaagatctccaaccgcgcgacggagtacgccgctggtgcgctgctctcgctgtgctcggagtcggagcggtgccagcgcgaggcggtggcngcgggcgtgctgactcagcttctgcttctcatgcagag

SEQ ID NO: 28459 - DNA, 376 bp, Glycine max
  Clone ID: LIB3108-051-Q1-K1-C10
cccacgcgtccgaacagaaccaagcgagttgttgtgactgactcagtgagcgagcgagcaagcgagttactcatggcgaacgcggcgcttcggaacgtgaaggtgctcccgaactcggcaaatatggaggaagctcgtcaccgagtcttccaattcttcagaacggcttgcagatcgttaccctccgtcatggaaatctacaacctctacgacgtcgtttccgtctccgaactccgctcctctgtcttctcccagatcccgaagaacatccacgtcaccgatcccaaagtgatcgatatgctgcttttcaaggggatggaagagctgaaaaacgtcgtggaccattcaaagcagaggcatcatatcattggtcagt

SEQ ID NO: 28460 - DNA, 157 bp, Glycine max
  Clone ID: LIB3108-051-Q1-K1-C11
gcaaatctttgttaagaccttgaccggaaagacaatcacccttgaggtcgagagctctgagaccattgacaatgttaaggcggagattcaggacaaagagggtatcccaccaaaccaacaaaggcttatctttgcaggaaagcagctagaagatggc

SEQ ID NO: 28461 - DNA, 222 bp, Glycine max
  Clone ID: LIB3108-051-Q1-K1-C12
cccgatttaagaagaaccgcaagatgcgcgtccacgtcagcgccggccacagccggattggggagcaccgcaagcacggcgggggccggggaaatgccggcggcatgcaccaccacaggatcctcttcgacaagtaccacccggggttcttcgggaaggtagggatgaggtactttcataagcttcgcaacatattctactcccccatcgtcaacatcgaca

SEQ ID NO: 28462 - DNA, 223 bp, Glycine max
  unsure at all n locations
  Clone ID: LIB3108-051-Q1-K1-C2
cgttgttagggttattttatntgattgcatgtctttcagttctgtttttattttttctgagagggtgtttgttaaactatttgggcgagcccttttgagaaccattttcttcccaacatatggagttttcaatagacggtcttctattatttgtttnaaaaaaaaaaaaataaaaaaaaattaataataaaaatatgttgtataatttataagaatttatatt

SEQ ID NO: 28463 - DNA, 347 bp, Glycine max
  Clone ID: LIB3108-051-Q1-K1-C4
cccacgcgttcgtccacgcgtccgcttcttctttctcagcttcaaacctccttctcctttctttgtttcttcccttgatttcttaatttcatgcaaaaaaaaaaaaacccttctatttcaatttgcttgttcataccttcattagttgtttgttttgaaaattggggttttctatgtttgggttagtgttcgtgttcttgtagtttagattgtgccattttgccataacattactccatgcccaccaagtctttgatggtttgcctaggacacctttctctagcaccgtcgtggcaaatctcaagaagaggaggagtcactcggttctgtttttgaaatggtcacta

SEQ ID NO: 28464 - DNA, 290 bp, Glycine max
  Clone ID: LIB3108-051-Q1-K1-C5
atccaattgaacatttaaaaatgactgggattaacttaagaattcaattattgaaattgagtaagtgaacaatttaattggaggggtggaatggtatcaaaaaaatggagtactaactcccatttcttatttattattgaattaaccgatcaacttgctttgttatcgaacatttctttttgatttcaaaaattttccggaaacaatttgaatctatttttatatgcgaatcaatcctactacttttggtcctgaggcttctgcgcttgaaaaaataaatttgggacgta

SEQ ID NO: 28465 - DNA, 208 bp, Glycine max
  unsure at all n locations
  Clone ID: LIB3108-051-Q1-K1-C6
nccgatttaagaagaaccgcaagaagcgctgtcacgtcagcgccggccactgccgtattggaaagcaccgcaagcaccccggcggccggggaaatgccggcggcatgcaccaccacaggatcctcttcgacaagtaccacccggggttcttcgggaaggtagaggattaagtactttcataagcctcccaacaaattctacttcccca

SEQ ID NO: 28466 - DNA, 403 bp, Glycine max
  unsure at all n locations
  Clone ID: LIB3108-051-Q1-K1-C7
attacaatacattccatgtagattatacttaaagattgatacgaaaatggcctaactgaggctagtcaaaaaaagcgaggcggtntcattatttcatgaggaagattctatgaaatcaaatgaggagtctaatggtcttttctaattctttaatatatcattttaaagattataatgtttttttttaattatatattattttttttttttatttatattttataatatttttttatcatattattttattttattattattaatttaatattattgtatttttatattatttttttattattataattttttattctatttatttattttttataattatttataatattgtaattatattttttttgtattattaattttatattttatattttttatatta

SEQ ID NO: 28467 - DNA, 379 bp, Glycine max
  Clone ID: LIB3108-051-Q1-K1-C8
cccacgcgtccgttttggatctcatgggcgtaatggcaattttgggtattcaactgaatgcggtgtctgttgtaaaccttattatgtcaataggaattgctgtggagttctgtgtgcatatagtacatgctttcacggtaagcttgggggataggagccaacgagcaaagacagcattgtgtaccatgggggcttccgtattcagtggaatcacacttacaaaattagtcggagtcctcgtcctttgcttctcaacatcacaaatttttgtggtgtattacttccagatgtatctggccttggttctcattggctacttacacggtcttgtgtttctacctgtggtttagagctcgtttggtccttcattaagatatac

SEQ ID NO: 28468 - DNA, 419 bp, Glycine max
  unsure at all n locations
  Clone ID: LIB3108-051-Q1-K1-C9
gaaggattttggagaaggatatgaagggaaggatgtggtgtatgaaaatttgaggcagttgtgtgttcatagagttgccaatgagagcaaccgttcatgggtctggtgggattatgtgacagatttccatgtcagatgttctatgaaggagaaaagatacagcaaggattgtgctgaggaagtcatgaaatcattagatctgcctatggataaaattaagaaatgcatgggtgatcctgaagcagatgtggagaatgaagtgctaaagaatgagcaacaagtccagatcggtagaggatctcgcggtgatgtcaccatcttgccaacgtnggttataaacaatgtccagtatagagggaaaatgggagagaactgctgtactcaaggctgtattgtcttgattaaggagactactgaac

SEQ ID NO: 28469 - DNA, 367 bp, Glycine max
  unsure at all n locations
  Clone ID: LIB3108-051-Q1-K1-D1
cccacgcgtncggctgaaatctgaagctaacttaagggaaatgagatggccaatggcaacgctagtcatcgcttcaagctcttgcttttccttctaactctgcactcttcattcgctgagattttcttcgaagagagattcgaagatggatggaagagccgttgggtgctatccgattggaaaaggagtgaaggaaaagcgggtaccttcaagcacacagcaggaaaatggtctggggatcctgatgacaaaggtcttcagacatataatgacgccaagcattttgccatatctgcaaagatacccgagctaagcaacaaggacagaacccttgtgctgcagtattctattaggtttgagcaggaca

SEQ ID NO: 28470 - DNA, 448 bp, Glycine max
  unsure at all n locations
  Clone ID: LIB3108-051-Q1-K1-D10
cccacgcgtccgcgcaaagctgaagtgtctgcttcttccgattccggcacgcccccatcaccatggtgaacgttccgaaaacaaagaagacatactgcaagagtaaggagtgcaggaagcacaccctgcacaaggttacccaatacaagaagggtaaagatagcattgctgcccaaggaaaacgccgttacgatcgcaaacaatctggttatggcggacaaactaagcccgtcttccacaagaaggctaagaccaccaagaagattgttctgaggtngcaatgccagggttgcaagcatgtctccaacacgctattagaggtgcaagcactttaagattgtggtgacaagaaggcaaggaacatctttgtctagtttgcgaatangattcgcagctttttatgtttcagcaatgttggaatcttttagtttctctctgaatttttttg

SEQ ID NO: 28471 - DNA, 312 bp, Glycine max
  Clone ID: LIB3108-051-Q1-K1-D11
ggtagaagctgaacccgtttcgctttcaatcgaagggaagaacaaacattcaattcatggcagctgcaaagcttcaagctttatggaatcacccagctgggcctaaaaccattcacttctgggcacctacctttaagtggggcatcagcattgccaacattgctgatttctcaaaaccacccgaaaaactttcctatcctcagcaaatagcggtcacagctactggaattatcttgtctcgttacagcactgtaatcaccccaaaaaatttgaacctgtttagtgttaacatttgcaatgcagggacaggct

SEQ ID NO: 28472 - DNA, 370 bp, Glycine max
  Clone ID: LIB3108-051-Q1-K1-D12
cccacgcgtccggcaccacattcacctgtggcttccaaagcaatggcttcccttgcagcagccactgctgctgcttcccttggcatgtcagaaatgcttggaaaccccatcaacttcagtggtgccacaaggccagctccatctgcttctagtcctgcctccttcaagactgtggctcttttctccaaaaagaaggctacaccaacacctccaaaaaaagctgctgctgctgctcctgccaatgatgagcttgccaagtggtatggtcctgacagaaagatcttcttgcctgagggtctcttggaccgatccgaaatcccagagtacttgaccggagaaagtccctgagactaatggtatgacccatttg

SEQ ID NO: 28473 - DNA, 388 bp, Glycine max
  unsure at all n locations
  Clone ID: LIB3108-051-Q1-K1-D3
ctagggagctctctccattggttcttcatctgcatgcacacactngcatagttttgggaacgcagaatttttgaagggtagcatcaacaagaagttctggaaatggagatcaccaatgtcagcgagtatgaagctattgcaaagcagaagttgccaaagatggtgtttgactactacgcatctggtgcagaggaccagtggactctgcaggagaacagaaatgccttttccagaattttgtttcggccacgtattcttattgatgtgagcaagatagacatcacaactactgtcctgggcttcaaaatatccatgccaatcatgcttgccccaacagccatgcagaaaatggctcattctgagggagaatatgcaacagcaagagctg

SEQ ID NO: 28474 - DNA, 221 bp, Glycine max
  Clone ID: LIB3108-051-Q1-K1-D4
cataacagccatgaaaaccacactcttctcactctctcccttattcctgttcctactcttctcggtagtctaaggactcacccccagatgtgacacccaagaccatggctcaacccttgaagtttttcatgtgttcagcccctgtttcccatttaggccaccaaagccaccttcatgggcagagagtgttctttagctgtaggccaaggaccaagccaggc

SEQ ID NO: 28475 - DNA, 303 bp, Glycine max
  Clone ID: LIB3108-051-Q1-K1-D6
cttctcttctccggttatggcgtccgccttgggcacttcttcaattgcggttctgccttcgcgcgacttctcttcttcttcgtccaagccttccattcacactctctctctaacttcagggcagaactatgggcggaagttttatggaggaattggaatccatggcataaagggaagggctcagctctcggttaccaatgttgccactgaagttaactctgtagaacaggctcagagtattgcttctaaagaaagccagaggccagtatacccattttctgccatagttggacaagatgagat

SEQ ID NO: 28476 - DNA, 313 bp, Glycine max
  Clone ID: LIB3108-051-Q1-K1-D9
cttttcatttctcactctactcctttcgcttgttttctcttcaccaatcattcatggcacactctgcacaagttaaacccacaccaaatcaatcctctgcgacatttttctcattttcatacatttaatcttcatcatcatcatctatgtactaaagaccaatctccaagcacctggatatcagataacgctacattttatttatttaccctatgctgctataagactattaagtatttctatatatattttatttactatcacacactctacttatctattatattatcattgggattattatatatatgct

SEQ ID NO: 28477 - DNA, 322 bp, Glycine max
  Clone ID: LIB3108-051-Q1-K1-E10
gtgagtagtgagagggcgaagcgatgaatgccccacatcgttacgagcgtttcgtcgtccctgaaggcaccaaaaaggtttgttatgagagggacacgaagatcatcaatgcggcgtccttcaccatcgagagagaggagcacactatcggcaacatcctccgcatgcagctgcacagagaccccaatgtcttgtttgccggatacaagcttcctcatcctcttcaatacaaaattattgtcaggatacacaccactagtcagtcttcgccaatgcaggcatataaccagtctgttaatgatctggacagggaacttgatca

SEQ ID NO: 28478 - DNA, 262 bp, Glycine max
  Clone ID: LIB3108-051-Q1-K1-E11
ggagggcaaaggtttcacggaagagcaagaagctctggtggtgaaatcatggaacgaaatgaagaagaattctcaagaactcggtcttaaatttttcaagaaaatattggagattgctccagcagctcagcaattgttctcattcttgaaggattcaactgttcctttggaggaaaaccccaagctcaagccccatgccatggctgtctttgtcatgacgtgtgaatcagcttgtcaactgaggaaaagctggtaagtcact

SEQ ID NO: 28479 - DNA, 305 bp, Glycine max
  Clone ID: LIB3108-051-Q1-K1-E12
ggagggcaaaggtttcacggaagatcttgtttctctggtggtgaaatcatggaacggaaggaataataattctcaagggctcggtcttaaatttttcaagaaaatattggagattgctccagcagctcagcaattgttctcattcttgaaggattcaactgttcctttggaggaaaaccctaagctcaagccccatgccatggctgtctttgtcattacgtgtgaatcagctgttcaactgaggaaagctggtaaagtcactgtgagggaatcaaaccttgaaagaattgttgcctactcatttt

SEQ ID NO: 28480 - DNA, 388 bp, Glycine max
  Clone ID: LIB3108-051-Q1-K1-E2
aagacctcatggcccttcaatcagccaaagaaaaaggacaacttgtggaacaccagagccggttcacgtgttccccgaccacgctcttacacggcctcgccaagggtgccagaggcatggttggtctcggtaggtcccgcagctcgcttccttctcaggttttcgacaacttcagcacgcaccgaaaactcactctctgcctttcctcctccaaaggcgttgtcctcttgggcaacgtggcaacctacgagtccgaggttcttaaatctctcaccttcacaccccttgtcaccagctttcccacgcaggaatacttcatcaacgttaactccgtcaaaatcaacgggtagaggctgtccaacgagcatgagggtggtggaggggtttt

SEQ ID NO: 28481 - DNA, 265 bp, Glycine max
  Clone ID: LIB3108-051-Q1-K1-E3
aaaaacatatctttccgtggcaccagtagtaagtactctatggttcggggctttggcggggctcttgatagagatcaatcggttttttccagatgcattgatattcccttttttttcattctagttattgacacggaaaggggtgaagaagattatagatccaattaagtattaaatatatgtaattaatatgtaattaatctcctcttctttatttcggcttttatttcttcttttttttacaattgtaatagaataagttagg

SEQ ID NO: 28482 - DNA, 316 bp, Glycine max
  Clone ID: LIB3108-051-Q1-K1-E5
attgataatcatagctatggcaacggcgagtgcaagttgtgcggtatcatttaaaaacagcttcggtgtgagtaaaccctcggatcttgggttcttgagctctcgtctgaacggcctcagaatctgcttccccaaattgccacccacacccctcactgcttctcccttccccacaccccttcctatcgttgccaagagagtgtgtcccttcactggaaagaaatcaaacagggccaacaaagtatcattttcaaaccacaagacaaagaaactgcagtttgtgaaccttcagtacaagagaatttggtgggaagca

SEQ ID NO: 28483 - DNA, 356 bp, Glycine max
  Clone ID: LIB3108-051-Q1-K1-E7
taattattttattattttatattttttattataataatataaatatataatattatttatctatttttattattatattataatattattttttttatatttatttatactattaaaattatttttatattaatattaatatataataatatatttatttatttaattataaattttcttttatttataaattttataattaattttttttttaaattttaattttatttttaattattattattatataatatttattataaattatattaattacttaatatctatatattaaatattatatatatattataattcatttataatataatttttttatataaaatttatatatt

SEQ ID NO: 28484 - DNA, 155 bp, Glycine max
  Clone ID: LIB3108-051-Q1-K1-E8
ggcttattgtggatacctaggcacttagattcaaggaagggcttaataagcgacggggtgcttcttcaagttaaaaaggggcgtatatacagccattccctaaatcggtccacctttctaactgttggtgaatccactggcattcaagagacaac

SEQ ID NO: 28485 - DNA, 312 bp, Glycine max
  Clone ID: LIB3108-051-Q1-K1-E9
ggcgacacctggatcatcgatggcgtcggcaatggcggcctcctggcgcctgaggcgccgctcgatttcggcaatgccgccacgggctgccgcctgaccatgggcctcgtcggggtctacgatttcgacagcaccttcatcggcgacgcctcgctcacaaagcgcccgatgggccgcgtgttgaacccgctgcgcgaaatgggcgtgcacgtgaaatcggaagacggtgaccgtctttccgttaccttgcgcgggccgaagacgccgacgccgatcacctaccgcgtgccgatggcctccgcacaggtgaag

SEQ ID NO: 28486 - DNA, 121 bp, Glycine max
  unsure at all n locations
  Clone ID: LIB3108-051-Q1-K1-F1
ccgnccttttttttttttttttcatattaccaaacacatgaatcatgactgcatcaaaacagaataaaatcttacccgaatataccatgttaataataatatttctgccactcatanccna

SEQ ID NO: 28487 - DNA, 244 bp, Glycine max
  Clone ID: LIB3108-051-Q1-K1-F10
cccacgcgtccgggaaattgttgatgcttaaattaagtttcaaattatataccttttcttttctgttttgtctctgcttatgatttgaattttagaataaatttttaaaaatgtgaatgatgaaggagacaatacctgttgttacttctttgaaaaaaaaaaaaaaaaaaaaaataaataaaaatatccatataatataatataaatttttatatattttttttatttaatattatatattaaa

SEQ ID NO: 28488 - DNA, 442 bp, Glycine max
  Clone ID: LIB3108-051-Q1-K1-F12
gttcttcttcgtcgttatcttcttcttttgttgtttgtgtgtttgttttttctctcaccggaaaatgtcttgctgcggtggtaactgtggttgcggaagcgcctgcaagtgcggcaacggctgcggaggctgcaagatgtacccagacttgagctacaccgagtcaaccaccaccgagaccttggtcatgggagtggcaccagttaaggctcaattcgagagtgctgaaatgggtgttcccgctgagaacgatggctgcaaatgtggagctaactgcacctgcaacccctgcacttgcaagtgaggtgttggagagctaaagcttcaagcagagatggcccttagaaataatgataaaaactatatgtaagttcaaaacttcaaaattatgtagtatgtattatgttgcactctggtgttttgtgtctaaacaaacaccctt

SEQ ID NO: 28489 - DNA, 351 bp, Glycine max
  Clone ID: LIB3108-051-Q1-K1-F4
tcgcccacgcgttcgaattttctagggtttatacaattttcgatggcttcttcagatgttgagtaccgttgctttgtcggtgggctcgcttgggccactgacgaccaagctctcgagagagccttctctcagtacggcgaaatcgttgaaacgaagattatcaacgatcgtgagactggaagatccaggggttttggatttgtgaccttcgcctcggagcagtccatgaaagacgccatcgaagggatgaacggccaaaaccttgacggccgtaacatcactgttaacgaagcttcagtcccgcgtcagcttcgaccactacctacttacccaccggcgagagggtcctac

SEQ ID NO: 28490 - DNA, 52 bp, Glycine max
  Clone ID: LIB3108-051-Q1-K1-F5
aaatgggattctgcaaatactgcaatgctgttaaacttatttcaaaggaagc

SEQ ID NO: 28491 - DNA, 353 bp, Glycine max
  Clone ID: LIB3108-051-Q1-K1-F7
aacactcttacccaaaatcttacttgaattttatatttttaagcccaactatattagcggggtctaaacaaccttgaagtggggtgtgcttctctctctatgtatatattgcctagctctgttaataacaacaacaatcctttatcctaagccacctttatgcttcttctttttcttgaacctaatacgattctcttttccacattatgcagttgttaaactctatagtttattataatgcattttttttatgataatgctttgtataatattttattgtttttttatgtctttcttttattgttgattcttttttttttttttttctttcttttaatattttcttttattat

SEQ ID NO: 28492 - DNA, 270 bp, Glycine max
  Clone ID: LIB3108-051-Q1-K1-F8
gataattcaacggttgacataaccgtaaccatagttcatcaaaatgcatatcaacgagaatatgactcgaacgcagcgtgggcgggaaacggagcatcccacgggcgagccattgagcattgtatggatcataagcgggatgtgcaacgtctaattcatgcggttatctaaaattttaggtgaaatgcgaggagattctcacattgacactagattccacacaaggtgccacacatgaagctgttgttagaggtctttaatgacttatca

SEQ ID NO: 28493 - DNA, 82 bp, Glycine max
  Clone ID: LIB3108-051-Q1-K1-F9
gacaattgaatggtaaacagaaacctaattattggtaatataactgtatatcacggagtgtgtgactaagatgcaacgtggg

SEQ ID NO: 28494 - DNA, 119 bp, Glycine max
  Clone ID: LIB3108-051-Q1-K1-G11
gcattatatgtagactttaggaaaatcgtcagttttgaacgcctgaatcatgctttttccgcccagatcttgtcttagtactaagaagagctgaaattaatgatgtgagtttttttact

SEQ ID NO: 28495 - DNA, 212 bp, Glycine max
  unsure at all n locations
  Clone ID: LIB3108-051-Q1-K1-G12
cccacgcgtncgttccctnttaatggattccttgtgnttttgaccctctattttgttgtggtgagagaaccccaatttcagtgagtatgtgaggttcaacactatgcaagccgttgtccttgatgtgctcttgattttccctgacctccttgaaagaggggttaatcccaaagatgggttgggattggatttgataatgagtttggatagca

SEQ ID NO: 28496 - DNA, 252 bp, Glycine max
  Clone ID: LIB3108-051-Q1-K1-G2
gaacctcattgagaaagctgagaaaacagccaaatctcactattggaattcttgtaccgggtgtgggtgcttcgtgtcaatggtctggatgctcatatttggtggcaagaaacctgtgagtagtgattttttttccctacgctcattcatagtatttctttcatggaattattattccgtattattttatttaaatcttgataccaagtctcttcttgtgcaggcaaaggtggagaagaaaccagaacgcac

SEQ ID NO: 28497 - DNA, 204 bp, Glycine max
  Clone ID: LIB3108-051-Q1-K1-G3
attcggtcgccagcgtcgacatgaagaaaatacacatacattctaatcttgtcattgagtagtatgaggctgcctaagttgcatggtggtgctggattgcatggtgtgtgccatgatgctgcacccatggcacaggccgaatcactgcggcaggtcccgcgcatgtttcgtcttcatatcttcaagcggcgaaaccgtccagcc

SEQ ID NO: 28498 - DNA, 251 bp, Glycine max
  Clone ID: LIB3108-051-Q1-K1-G4
cccacgcgtccgaatgcccctttcattttctctgcatctgtagtatctatcaccaatcaatgccagtcttcttcccatcaaacaacaaaaaatcaatctgggaaacaaaaacaaaatgccgtcattagaggaggaactcttcccatcaaccccaggaaagttcaagatcgagcggtcccaccacatgaaccgccaactctatcgctgtttcgcctccaccagcaccatgttcctgtgggccctcttcttaa

SEQ ID NO: 28499 - DNA, 453 bp, Glycine max
  unsure at all n locations
  Clone ID: LIB3108-051-Q1-K1-G5
aacaatcttaacgcgtgcaaagcttatagatacacatccatcggtccaacacctggggggtgtgatttgctatctgggaacgcaccatatccctagtcacggtatttgctctttcttactcgaaaattaaatcaagctttacttatattggtttttgttaaatactatatttttatgttttattattataattttttttttaatgttttgggtgggttctttttttaaatctatacttttttattttcttttcatatatttataatttttttttaaggcacctaaaataaattaaatggccgtctttttaaaaacttctggattggaaaaccccttgctttcccaaattaatatttttttgnggtttattttttttttttatttttatataatttaaaaagtttttattatttttttttttttaatattttttttttttttttatattttttt

SEQ ID NO: 28500 - DNA, 297 bp, Glycine max
  Clone ID: LIB3108-051-Q1-K1-G6
ggccggtctccaattccccgtcggaagaattggccgttatttgaagaaaggaaggtacgcgcagcgtgtcggtaccggtgctgccgtttacttggccgcagttctcgagtacctagctgctgaggtgcttgagttggctgggaatgctgcacgtgacaacaagaagaacaggattattccgagacatgtgctgttggctgtaaggaacgatgaggagttggggaaattgcttgctggtgtcaccattgctcatggtggtgttcttccaaacattaaccctgttttgctacctaagaa

SEQ ID NO: 28501 - DNA, 402 bp, Glycine max
  unsure at all n locations
  Clone ID: LIB3108-051-Q1-K1-G7
atggtactttccaaacttaaaaatgttaaacgcctgtattaatccaacaaaaaatgggcctttgaaactaaagaaaaacaaactaagattggcccaaactgaagaaatacaaaaaaatggcttgagatcaagcctaaccacgaaaaaagaaaaaagaaaaaaatgaccaggggcttaaaatgtatttaggttggaaaagactntggatcttgcatcacacatttatgtggaagtttcatattctttcgtgtggagatgatggaatttctgatcttcaaagatgggaagaatttcacagaaagcanggaagaagctattggagtgctgcagaaggctaaaaattgtgattagtaaattctcaaaatttttagttgttatagaacaaacctaaactctttaata

SEQ ID NO: 28502 - DNA, 377 bp, Glycine max
  Clone ID: LIB3108-051-Q1-K1-G8
aaaattcttctccttttgtgcttccaactcttttctttgttatattattctctttgacttggtgccaacccttggaggcaacatgactatcctcattgagcaatctgatcactttggggctgaagtagaggcaaagactgaaccaataaatgagagagaactggtgttggatggtggatttctgataacacagaccaactcatttgggcacatgtttagggcttataatgatgctgaaagtgagaggcatgaaggagtggagaacttctacagaaaaaatcacacttaccaatcaattgatttcgtgaagaaaatgagagaggagtacgcaaaattgaacagggtagagatgagcatatgggaatgttgtgaactcc

SEQ ID NO: 28503 - DNA, 457 bp, Glycine max
  Clone ID: LIB3108-051-Q1-K1-G9
cttattctacttgagacacattacttatgtttaagatccaccactccttatccttgggtaacaatctaaaactgaaggggtgccagatttacctaaacactataaacaacttttggatacctcgatcaatcatggcttacaccaaagtgtcaagtcgactacttaatatatatgtttcagatgcttacacctttagttgatttattttctcatacttgacttcacttcttttatattagctctattttttaacctcttctataaaattttttttttatttattattattttttttttttatatttttttttcttttttgttttttttctttatctattttttttttatttttttttatatttttttaatagtttttttttatatttatattttttttattcttttttttttttttttattttttttttttatttattattttttatgttcttttatt

SEQ ID NO: 28504 - DNA, 446 bp, Glycine max
  unsure at all n locations
  Clone ID: LIB3108-051-Q1-K1-H1
agttgagaactaagaaggagaagcaaatggcttcctcaatgatctcttccncagctgttacgactgtcaaccgtgccggtgccggcatggttgctccattcactggcctcaagtccatggctggcttccccaccaggaagaccaacaatgacattacctccattgctagcaacggtggaagagtgcaatgcatgcaggtgtggccaccagttggcaagaagaagtttgagactctttcctacctgccagaccttgatgatgcacaattggcaaaggaagtagaataccttcttaggaggggatggattccttgcttggaattcgagttggagcacggtttcgtgtaccgtgagcacaacangtcaccaggatactacgatggacgctactggaccatgttgaagctgcctatggttggttgcactgatgcttctcaggtgttgaag

SEQ ID NO: 28505 - DNA, 110 bp, Glycine max
  Clone ID: LIB3108-051-Q1-K1-H10
cccacgcgtccgggttcgttcatagagtgaatggagtctgttatgagaaacataaaaaaatatgatgagctaccttcaataaaaattaggacctctattattcgcctagt

SEQ ID NO: 28506 - DNA, 281 bp, Glycine max
  Clone ID: LIB3108-051-Q1-K1-H11
gtttctgtaaccatggcatccaccactctatcccctacaaccccttctcagctatgctcaggaaagagtgggattttcagtccctcacaggcacttcttgtgaagccagtgaagaggcagatgatggggaagagcaagggaatgagaattgcatgccaagccaccagcattcctgctgatagagtccctgacatgggcaaaagacagctcatgaatctgcttcttcttggtgccatttcactcccctctgctggaatgcttattccctacacctacttttt

SEQ ID NO: 28507 - DNA, 378 bp, Glycine max
  unsure at all n locations
  Clone ID: LIB3108-051-Q1-K1-H2
gcgtttggaaaaaaaagaacaaaaatcgctgtgaaaaatgaacggaacggtgaagaaagttagcgatgtagcattcaaggtgggaagggaacatcgattgggatggaatggcgaagcttctggtctccgatgaggctcgcagggagttcttcaatctccgtcgcgctttcgacgaggttaactcccaactccaaaccaagtttagccaggaacctgagcccattgattgggattactatagaaagggaattggcactcgtttggtggatatgtacaangagcattatgagagcattgagatccccaagtttgttgatacagtaactcctcaatataagcctaaatttgatgcccttttgtttgagcttaaagaagcag

SEQ ID NO: 28508 - DNA, 335 bp, Glycine max
  unsure at all n locations
  Clone ID: LIB3108-051-Q1-K1-H3
nccacgcgttcgagagacaccaatgttgcctccccttccttctatttaccaactttacacgtgctggctatttcccttttctgggaaattccgcattatctttcacaattttccccaacagaatcagcacccgaatttcccggatccgagatacccagaaggaaaagattaaaactttggtgttttcatcgatctcttgggaaagatgtgttgtggggggagaatttgcatgcgttgcacgtgtcttggttctggtggtgatcgccatcggggttggtattcgggttcggagggttcaagcatggattccacaagatcaaagacactgttagttt

SEQ ID NO: 28509 - DNA, 305 bp, Glycine max
  Clone ID: LIB3108-051-Q1-K1-H4
ctaggcacccagagacgaggaagggcgtagtaagcgactaaatgcttcctggagtggaagagaagcctacatccggggattggcgatatacttcaacctttctaactgctgctgaatccacgggcatgcaagagacaacctggttaactgaaacatcttattagccagaggaaaagaaagcaaaaccgattcccgtagtatcggcgagcgaaatgggagcagcctaaaccgtgaaaactgtgttgtgggagagctatacaagtgtcttgcttctaagcgaagcatcatataatgctgcaccctag

SEQ ID NO: 28510 - DNA, 172 bp, Glycine max
  Clone ID: LIB3108-051-Q1-K1-H6
gtccttgataactaacaacgagaaacgaattgctcgctcaatgaactattgcacggacgcgacaactgtcaaccccgccggtgccggcatctttgctccatttactgacctcaaatccattgctggctttcccaccacaaagaccaacaatgacatcacctccattgctagc

SEQ ID NO: 28511 - DNA, 399 bp, Glycine max
  Clone ID: LIB3108-051-Q1-K1-H8
cgaataataacaaataaataaaaggatgtattatgataaaaaaaaaaaaatctaatggttgtgtgctttcgcaccaacggttgggtgctttaagcctttccagtgtgcatctgcagctggttcaatgattcaaaatttgtattttcttttttttggagcattcattatttctcttatttcattttttttataatattagcaacattttttgatagtttttaaatctatttgttttttcttgtacttcattttattgatcttttgtttttttatgttgaattttttttggtttttatttttcttttttcatttatatgatttatatttctttttcttatttttttatttccttattttatgttattgatgcttttttatcatatcattttattttttttt

SEQ ID NO: 28512 - DNA, 303 bp, Glycine max
  Clone ID: LIB3108-052-Q1-K1-A1
attggaatgagatagttgcataatctgtgtgtatcctccagtgccatttccatggagctagaggtgcaggtggtgggaggcatagactcctgcttcgtctccctccctctctctctcatccaaactctccagtccacgcgctcatcaccgatccctcaaatcctcgctctcgaacttcgctctccgactcacccccctcacacctggttcgtcgcttggtccggcgccacttcctcttcttcttccgccatagaggtttctcctcaatttgcggagtgtgtttcgttgccgaatcatgctact

SEQ ID NO: 28513 - DNA, 238 bp, Glycine max
  Clone ID: LIB3108-052-Q1-K1-A10
ctcacgcgtacgctcatccttcccataataaagtttgaataactgctgcataacatgggccagaataaaacatatcaatagcacgaacccacattagaactacaaaatctacaccccaatcacccaatattccaaccatcttgcatccacaaaaacagccagtctcatgtgcgataaccataacatcaatcgaccacgttaacagccatgttaccttttatttcgtcttcttcgactt

SEQ ID NO: 28514 - DNA, 408 bp, Glycine max
  Clone ID: LIB3108-052-Q1-K1-A11
gtagaattaggccagtgcttttctagcattgggagggcaaagacaaggatgtgctagtttatgagaaactcccagacggagttccataccatgagacaatgaagaagagcaagtattgcatttgtccaagtgggtttgaagtggcaagtccaagaattgttgaggcaatctatgcacaatgtgtgcctgtgataatatcacaacaatatgtgcttccttttagtgatgttctgaattgggactctttctcggttcagattttagtgagtgatgtacccaagcttaaggaaattttgttgggtatatcggaggacaaatacatgagattgcaagagggagttaagcaagtgcaaagacattttgtggtgaataatcccccaaagaggtatgatgtattccatatgatta

SEQ ID NO: 28515 - DNA, 96 bp, Glycine max
  Clone ID: LIB3108-052-Q1-K1-A3
tcgacccacgcagtccggagaactcatttaaggttgtatttggaaaactctatgcttaatttcttttaagcattatatgatgatacttgtgtgact

SEQ ID NO: 28516 - DNA, 79 bp, Glycine max
  Clone ID: LIB3108-052-Q1-K1-A4
gagatcgcatttaaggttgtatttggaaattacaattcttaatatcttgtaagcattaggtgatgatacttgtgtgact

SEQ ID NO: 28517 - DNA, 398 bp, Glycine max
  Clone ID: LIB3108-052-Q1-K1-A5
cttatcttcccaaactctcttcttctattttaaagacccttttgaagtaatcgatggagtttcagtctctttccagattctaccttcttctttccttaaccattctcttacttgcaccctatcacgctcaagctaaaattaaagtcacttactgcgataagaaggcagactatcctgtgaaggtgtctggagttgaaatatcaccagaccctgtggagagtggcaagcctgctacctttaagatctcggctacttctagtaaagctatttatggtggagaagttgtaattggagtttcatacgttggggtgcctgtccatactgaaagaattgatctctgtcatgaagtatcctgtcatggtgccaatggcaattttctgatttctcacacccaaaca

SEQ ID NO: 28518 - DNA, 404 bp, Glycine max
  Clone ID: LIB3108-052-Q1-K1-A6
attgtgttcccaaactctcttcttttattttaaagaccctcttgaagtaatcgagggagtgtcagtctctttgcagcattctaccttctactttccttaaccattctcttacttgcaccctattacgctcaagcttaaattatagtcacttactgcgataagaaggcagactatcctgtgaaggtgtctggagttgaaatatcaccagaccctgtggagagtggcaagcctgctacctttaagatctcggctacttctactaaagctatttatggtggaaaagtcgtaaatggagtttcatacgttgcggtgcctgtccatactgaaagaattgatctctgacatgaagtatcctttaatgttgccaatggtcaagctttgatttttcacatccaaacattgcc

SEQ ID NO: 28519 - DNA, 437 bp, Glycine max
  Clone ID: LIB3108-052-Q1-K1-A7
gaagaagtgaagagaagagaagagaagggatttggatctgaaaagagaagatggggggaggaatggaagcaaacaagaacaagttcatagaggattggggcactgccagagagaatctggagttcaatttccgttggactcgccgcaaccttgctcttgttggcatcttcggcatcgctattcccgtcctcgtctacaagggcatcgtccgtgaattccatatgcaagatgaagataatggtcggccgtacaggaagttcatgtgagagagtatggagagtcttttgtaataattcgtcaagttagaccttggatatatgaggctacaaaccatgttttttttttccttaattcgcaaaggcttgcttgcttttaagtactctagacctatcaaacctctccatgtttgcctgtcttcattcaaatttctgttatgc

SEQ ID NO: 28520 - DNA, 453 bp, Glycine max
  Clone ID: LIB3108-052-Q1-K1-A8
cctttctcctaaaacatctcaatgggttcttcttctattacaacatcgcccgcaaccatgaccatggctgcgatcgtgctcctgttcacggtctttgccgtttcctccgccctagacatgtcgataatctcgtacgacagcgcccacgcggacaaggccgccacgttgcgcaccgaggaggagctgatgtccatgtacgagcagtggctcgtgaagcacgggaaggtgtacaacgcgctcggcgagaaggagaagcgcttccagatcttcaaggacaacctgcgattcatcgacgaccacaactccgcggaggaccgaacctacaagctcggactgaaccggttcgctgatctcaccaacgaggaatacagggccaagtacttgggaaccaagatcgatcccaaccggaggctcggaaagaccccgagcaaccgctacgcgccacgtgtcggc

SEQ ID NO: 28521 - DNA, 143 bp, Glycine max
  Clone ID: LIB3108-052-Q1-K1-A9
cttactcctacttcttagtgacttcccatcatctattcgaagctccaaattgtgatggctctaaaggcattgaggacgccatcagacaaatactatctcgaatgattataaatcgaccgttgtacacaaggctccgtcttata

SEQ ID NO: 28522 - DNA, 282 bp, Glycine max
  Clone ID: LIB3108-052-Q1-K1-B1
ctcacgcgtgctgaatcctacacactacttattcacttctagctacttactcaaccacacggaccatgttcagactttactctaactacactttacacacacctattaaactaatgcacacgcaatgcatgtcaaccaccatggatctgttttctgatgacacctatttctcaatcgctgcttctatgtgctaatcccatcttgtctacatgtacatctttatgttgtatttcaggtcctggagtatcactctttgtctgttgaacgctgctgcttctgaga

SEQ ID NO: 28523 - DNA, 426 bp, Glycine max
  Clone ID: LIB3108-052-Q1-K1-B10
cccaattcttccccctccacccacccagcatatttctctattcctatttattagcacgcgctcacattaccttgtgtcaccaactactttgactcctttaccataccattacaataattatcaaacctaaccagtaaaaatggtgaccgtggaggaaatccgcaacgctcagcgttcccatggacccgccaccatcttggccttcggcaccgccacgccgtccaactgcgtctcccaagccgattaccctgactactacttccgcattaccaacagcgaacacatgactgatctcaaagaaaagttcaagcgcatgtgtgaaaagtccatgataaagaagcgatacatgcacctgacggaggaagttctgaaagagaacccgaacatgtgcgagtacatggcgccatcgctggacgtgagacaaga

SEQ ID NO: 28524 - DNA, 457 bp, Glycine max
  Clone ID: LIB3108-052-Q1-K1-B2
ttttaagttaaatagtttttcattgtttcatttaatctacaatggctgcttcaacaatggctctctcttcatcatcattggctggccaagctatcaagcttgccccctccacccctcagcttggtgttggaagggttagcatgaggaaaacagcctccaagactgtttcttctggaagcccatggtacggcccagaccgtgtcaagtacttgggcccattctctggtgagcccccatcctacctcactggtgaattcccaggtgactatggttgggacactgctgggctttctgctgacccagagacctttgccaagaaccgtgaacttgaagtcatccactccagatgggccatgttgggagccctgggctgtgttttccccgaactcttggcccgcaacggtgtcaagttcggtgaagccgtgtggttcaaggccgggtctcagatattcagtga

SEQ ID NO: 28525 - DNA, 438 bp, Glycine max
  Clone ID: LIB3108-052-Q1-K1-B3
accggtctcggaattgacccacgcgtccggccagtcacacaccttttacctcagaaaatttaaattattcccttagagaaaacaaaagcacagaatcgaaagaagagttattttttgagagagattgggatggcttcgacgaagaagatcacactgaagagttcggacggcgaggccttcgaggtgtatgaggcggtggcggtggagtcccagacgatcaagcacatgatcgaggacaactgcgccgacagcggaattcctctccccaatgttaccagcaagattctggccaaggttatcgagtattgcaagaagcacgttgaggccaattgcgctgatgagaagcccagtgaggatgaactcaaggcttgggacgctgatttcgtcaaggttgatcaggccacactctttgatctcattctggctgcaaattacttg

SEQ ID NO: 28526 - DNA, 450 bp, Glycine max
  Clone ID: LIB3108-052-Q1-K1-B4
ggaatctaagcctaaatgggaaggtaaatttgtgacttagctaccaggcacggatgcagaacaagtatggactgcgttagaggatttctgcaacctacacaagtggtggcccatagaatcatgttaccaactagagggtgtaccaggtcaacctggtctaatccgctactgtgcttacaccgttgaagaagctgttgttggtgctcagaagacaacaacaaccatcaagtggaccaaagagaagctactcgcgatcgatcccgtgcaacgttgtttgtcctatgaaattgtggaaaacaacatgggatttaagtcctatgtggcaacactcaaagtgctgccaatgaatggagatgggtgcaagatagattgggggtttgtctgtgatccttgtgaagggtggagtttccaagacttgaagttataccttgagtcttctcttcagtccat

SEQ ID NO: 28527 - DNA, 388 bp, Glycine max
  Clone ID: LIB3108-052-Q1-K1-B5
cccacgcgtccggcgcggcataacctaaacctatctttcttctctctctgtgtgtgcgcttcaacggcaaccagaagcagccatggccactgcaaggactgtgaaggatgtttcacctcatgagttcgttaaggcgtactcctctcaccttaagcgatccggcaagatggagctgccagagtggactgatattgtgaaaactgcaagatttaaggagttggctccttatgatcctgactggtactatgtcagagctgcttccatggcaagaaagatctacttgagaggaggacttggtgttggtgcctttcagaggatttatggtgggagcaagaggaatggtagtcgcccttcctaatttttgcaagagcagtggtgccattgctcg

SEQ ID NO: 28528 - DNA, 451 bp, Glycine max
  Clone ID: LIB3108-052-Q1-K1-B6
cccacgcgtccgcccacgcgtccggcaaagttcaaaatttacaaggaccctgctttgtgttatattttcttgatgaacaatgggaggtacattgttcagaagaccaaagatagtgaattgggaaccctcttgggagaagattggatcagaaaacacgctgcaaaagttaggcaattccatgtgcactatcaaagaagctcgtggaataagctattagggattctgaagttggatagtaatgggtcaatgccccatattaactaggcaaagtcaatgaaggagaaactcaagtcgtttaacacagtttttgaggagatatgcaaggaacagtcttcatggtttgtctttgatgagcagcttatggaagaaataagaatttcgcttgagaaaatcttgcttactgcgtatggaaactttgatgcaaggtttcagagtgttcctgagcttggaa

SEQ ID NO: 28529 - DNA, 258 bp, Glycine max
  Clone ID: LIB3108-052-Q1-K1-B8
cgacgacgataggagacgacaagtgacgacgaaggaagatgatgtctcctgacggcaggtgacgacgacgacgacgatagatgactgaagaagaaaggtgaatgtccagcgtggtggtgagcactgacgatggacgatagacgactcagacgacgatctcagacgacgatcgaagatgaaagacgaggaaggacgtaggatgagcaaggtgaaaagtgaggatttgggaacagagtaccttatccgtcctttagaaac

SEQ ID NO: 28530 - DNA, 360 bp, Glycine max
  Clone ID: LIB3108-052-Q1-K1-B9
atcaagcgtcacagccactacgatagggtacacgaagcatcaccacttcgagcgtagagctagacgacatgaacgatgcatcgctatgatgataaatatgggaatacccggctctatgttggacggcagtcatcgacgactcgatcacgtgacctgaagcgtgtcttaagcagatatggaagagatcgaggacgtcatcataagaatgattatcgctctgatgaatatagagatcctcgagatcgctgatgacgctagatacaactcaggatggacgccatgtttaacgaagtcatgtcattgtggaaattgccaaagggggtcctcgtcgttacagggaccgggaatatatgggacggg

SEQ ID NO: 28531 - DNA, 396 bp, Glycine max
  Clone ID: LIB3108-052-Q1-K1-C1
gtgatatgcaaaacatgtctctaatagcttcactcttctccacaacttcacaactcactgcccttcgttccctcccttcttcctcctctccactttctcgcaaatttcccctcactttccgggaaaaaaacagaactccaatcacacctcacaagctccctttttcagcaaggcctaccaccaccagagtggtgttggtgaagtctcaggccacagcacctgcttcttctgaggctgtggcagtgacacctgtgtcttctgagatgaaggcatgggtctatggggaatatgggggtgtggatgttctgaagctggactccaatgttactgtgcctgatgtgaaggaagatcaggttctaatcaaagttgttgctgctgctcttaaccctgttgatg

SEQ ID NO: 28532 - DNA, 144 bp, Glycine max
  Clone ID: LIB3108-052-Q1-K1-C10
gcaactgatgtcattatcttctgcttaaaaaatttaaaaaaaaaaaaaaaaaaaaaaagaaaaaaaaaaaaaaaaaaaaaaaaaaaaaaaaaaaaaaaaaaaaaaaaaaaaaaaacaaaacataaaaaaatacataaatacaaa

SEQ ID NO: 28533 - DNA, 409 bp, Glycine max
  unsure at all n locations
  Clone ID: LIB3108-052-Q1-K1-C11
cccacgcgtccgtgagaactaagtagaatgaaatggcttcctcaatgatctccgctcgagctgttaccaccgtcaaccgtgccggtgccggcatggttgctccattcaccggcctcaaatccatggctggcttccccacgaggaagaccaacaatgacattacctccattgctagcaacggtggaagagtacaatgcatgcaggtgtggccaccaattggcaagaagaagttcgagactctttcctactagccagacctcgatgatgcccaattggcaaaagaaggtcgataccttttaagaaaggatggatttctngcttggaattcgagttggagcacggtttcgtgtaccgtgagcacaacaggtcacctggatactatgatggacgctactggaccatgtggaag

SEQ ID NO: 28534 - DNA, 348 bp, Glycine max
  Clone ID: LIB3108-052-Q1-K1-C12
cccacacgtccgcggacgcgtgggtcagtatacgtctattttggatcggaacctcttcggcggcgtatcaatgggacactccaacgtttggaattctcacccaaaaaactacggtcctggttctcgcacttgccgagtgtgtgggaatccacatggattgatcagtaagcatcgccttatgcgctgcacgcagtgcttccgtagcaatgccaaggaaattggcttcatcaagtatcgctaatatagctgttgacacctacggaccaatatcatgttcttgcactaggatgtcttgaagactttatgtttcaagaaacttttgactaacgacggttatgtattctatta

SEQ ID NO: 28535 - DNA, 441 bp, Glycine max
  Clone ID: LIB3108-052-Q1-K1-C2
gaagaagcagagggagtagcggcattaaaaatgcagatcttcgtgaaaactctgacagggaagactataaccctcgaggtcgagagcagcgacaccatcgacaatgtcaaggccaagattcaagacaaggaaggcattcctccggatcagcagcgtttgattttcgccggaaagcagcttgaagatggaaggaccctggccgattacaacatccagaaggaatcaacccttcatctcgtcctcaggcttcgtggtggcatcattgagccttccctcatggctttggctcgcaaatacaatcaggacaagatgatttgccgcaagtgctacgcccgtctgcatcctaaggctgtgaactgccgcaagaaaaagtgcggtcatagtaaccagttgaggcctaagaagaagatcaagtgaattctgtgtgatattgttggtctc

SEQ ID NO: 28536 - DNA, 454 bp, Glycine max
  Clone ID: LIB3108-052-Q1-K1-C4
cccacgcgtccgaaaactgtttcttcaggttggccatcttcactgcacttgattggtaaggatattctacgcttccatgctgtttactggccagctatgctaatgtctgctggactaagccttcctaaaatggtatttggccatggattcttgacaaaggatggaatgaagatgggcaagtcactagggaatatacttgaaccaaacgatttggttaataaatttgggacagatgcagttagatacttcttcctcagagaggtggaatttggcaatgatggagactattcagaggaacgcttcatcaatattgtgaatgcacatcttgccaatacaattggaaatcttcttaatcggacactaggacttctgaaaaagaactgccaatcaattctggtggtggattccactacagctgctgaaagaaatgaattcaaggacaatgtatagaagc

SEQ ID NO: 28537 - DNA, 386 bp, Glycine max
  Clone ID: LIB3108-052-Q1-K1-C5
cggacgcgtgggctgactcgtgggaaaatttaaaaaaaaaaggaaaaaaaaataaaaaagaatgtaaatcaacaatgaaaagagctaatgttctagaaactacttatgatgacaatgcatttactaatgctgttgatatttatgatcatccaagtggggctgttcatttcatggcttgaaataatgactgcgtagttaagagactttgacatggaaagatttcagctttccaagcatttctgcttctcatggcccgtaaatcacacttgatttagcccagatgggaaactggttgtgattgttggagacaacccataatggatactattggattctcaaactgtaaagactgtcaagcctttatgtggacacttggattactcatt

SEQ ID NO: 28538 - DNA, 402 bp, Glycine max
  Clone ID: LIB3108-052-Q1-K1-C6
cccacgcgtccgattttcatctgagtatatttaagaattgattggtattttttgtccacttgctcagtttcttatatgttatacatgatgtaactccttttgcaggttgttgtaacttttcaaagatcatgttgcagcagatctctaactttgtgcagcataataataagctcatgtatatttaattaaaaattataatcaacaaagtgtaattaggaactagttttattattattattatgacatttacctacagaagaccgtaggtacaagtaaattgacttttacctacagttagagattataggtataaattaatatcttttacctacacatttgaaatagtaggtgttacctatagttatttgtaaatatttttgttgaaccaaagacagtttcttc

SEQ ID NO: 28539 - DNA, 449 bp, Glycine max
  unsure at all n locations
  Clone ID: LIB3108-052-Q1-K1-C7
cggacgcgtgggcgaggagagtagcatcatagaaggtggtgcttcgcttccatcgtcgggttcagacgccaagaagcgaagagtgacctacttctacgagcccaccatcggcgattactactacggtcaggggcacccaatgaagccgcaccgaatccgcatggcgcacaacctcatcgtccactactccctccaccgccgcatggagatcaaccgccccttcccggcctcccccgccgacatccgccgcttccactccgacgactacgtcgacttcctctcctccgtctcccccgagaccctcgccgattccgccttctctcgtcacctcaagcgcttcaacgtcggcgaggactgccccgtcttcgacggcctcttccccttctgccaggccttcgncggtggctcccttggcgccgncgtcaaactcaaccgcgctgacgccgaca

SEQ ID NO: 28540 - DNA, 454 bp, Glycine max
  Clone ID: LIB3108-052-Q1-K1-C8
cccacgcgtccgcaaaaatggtaaccattgtgggttcttacaatgtcactcctaatcaaccaactccaaaggatccttcatggctatccgatagtgaccaaatcggtgtcctaggtcatgtagccattgtctacatatacgaagcaaatcccaacagcaacaccattgagagattgaggaactctcttagcaagcttttggtgtactactatccattcgctggcagattcagcttgacaaaaagtggtcgcatagaagtggattgtaacgcaaagggagtgacattgattgaagctaaaacctcacacacacttgatgattatggagacttttcaccttcaaagttgaccgaggaacttgttccagatattgattatactccacccatagaggagattcccctattactacttcaattcacaaggttccattgtggtaaaggccttgccattgg

SEQ ID NO: 28541 - DNA, 361 bp, Glycine max
  Clone ID: LIB3108-052-Q1-K1-C9
aaaacacgtagttgagaactaagtagaatgaaatggcttcctcaatgatctgggaccgggctgttaccaccgtgaaccgtgccggtgccggcatggttgctccattcaccggtctcaaatccatggctggctttcccacgaggaagaccaacaatgacattacctacattgctagcaacggtggaagagtacaatgcatgcatgtgtggccaccaattggcaagagaaagtcgagactcttttctacttggcaaaaccttgttaatcccaatttgccaaaggaggtcgattccttttaaggaaaggatggattccttgcttggaattcgaattggaacacggttttctttaccgggggccc

SEQ ID NO: 28542 - DNA, 412 bp, Glycine max
  Clone ID: LIB3108-052-Q1-K1-D1
gttctttcctcacttcaaacttgccaaaaatggcaacagaattggcatcatctcccaattgggttccaagcgcagccacatgtttggcagcctttgccgccctccttctcctcttcctccgcggtctccgccgccgccgatacaacctccccccaggcccaaagccctggcccatcataggcaacctaaacttaattgggtcccttccacatcggtcgatccacacgcttggcaaaaaatacgggcccatcatgcacgtatggttcgggtcgagctccgtggtggtgggctcgtccgttgaaattgccaaggccgtcctcaaaacccacgacgccaccctcgccggcaggccgaagttcgcggcgggcaaatacacaacctacaactactcggacatcacttggtcccagta

SEQ ID NO: 28543 - DNA, 90 bp, Glycine max
  Clone ID: LIB3108-052-Q1-K1-D10
acgccacgcgtacggtcgtcgtgaaggtggttacttatataatggagggggtttatgacggcgagacttgaatcgtagagaccgtggcta

SEQ ID NO: 28544 - DNA, 348 bp, Glycine max
  Clone ID: LIB3108-052-Q1-K1-D11
cttgtctctctctcggatttcttgcgcttattatcatgggggatagtcagtatgctggttctctcaccacatttagcccttctggaaagcttgttcagattgagcatgctttgacggctgtcgggtctggacaaacgtctttgggaattaaagctgcaaatggcgtcgtcattgctaccgagaagaaattgccatctatattggttgatgaagcatcagtccagaaaattcagttattaacaccaaatatacgtgtcgtatatagtggcatgggtcctgattttcgagttttggatcggaaaagcaggatacacgccgagcagtatcaccgtttatataaagaaccaa

SEQ ID NO: 28545 - DNA, 428 bp, Glycine max
  Clone ID: LIB3108-052-Q1-K1-D12
atctgttcagagatcatgaagagttccttttgttgtcctggtacatctcccactttcggtatgacttgagccatttcctgaaagtcattggaagcaagggtgcgaattagctcctatatttaatgaacttgttgatcgggtgagtttggatgggaaatttctccaggaatctctctccagaactaagaatgcggatgaatttacctcaagacttttagatattcattctaagatgctacagattaacaaaaaagaggacatacgcatgggaatagttcgttcagattatatgattgatgagaagactaaatcacttttacaaattgagatgaacactatttccacttcatttgctttgattggttgtcttatgactggacttcataagagcttactttctcaatatggaaaattccttggactaaatt

SEQ ID NO: 28546 - DNA, 448 bp, Glycine max
  Clone ID: LIB3108-052-Q1-K1-D2
gcctgctcattacaggtactaagtaattgttattattaacggaaagtgagggaaagacaaaatcggttttatgaatcggattgattgtttaattttcctttttttgaatttttgttgttagacttttcagatttgaggtagaagaagtttagctttttttatttttaatttccgtagaatttctgttcgagtgggtgggacgggtaaggaggaagacatcctgttggtttctgtgatatgaaaccaatttgggttgaataagcatgttttgtttggggaatgtgtgtgcattttgcttttgctttattaaatactaaattatgtgtttctgtccaccttttcaatatatcaaaagaaaattagagaaaatgaaaaaattcctacatgtatccagtttcataacacatgtattgtgtattatttggtgcttctgcaatattttttaaaa

SEQ ID NO: 28547 - DNA, 375 bp, Glycine max
  Clone ID: LIB3108-052-Q1-K1-D3
cccacgcgttcgcccacgcgtccggtggatttagttttggaggaagtggcaatgttaaatgttgggtgtggtgatgtgagaaaaaggtagagtaaagaagtggaattcgtccctccagctccaagggataatcatgcacacatgtacgagcaaaggagttagttctcctttcatggcttcaatagcttcactcttgtgttacctctattatttaccatttctgatgacctggcttgaacatatatactatctcgctttgataataaattgtctttattataatgtttttttcgggggcgttggatggagattggatttatgtatttttcatacacttacttacattatggcaaaagatgaatatagtgaggagtg

SEQ ID NO: 28548 - DNA, 444 bp, Glycine max
  Clone ID: LIB3108-052-Q1-K1-D4
cccacgcgtccgcccacgcgtccgcccactcgtccgtattttctctctttctctaattagttccctttgttatcaaaatggctgtggctatggctgcttgcagtcttggacttcacttgagtgctgacaacaccttgagaccttttgaaaaaaccactatcttgaaggccctctctatctctgatgctactaaaccatgttacatttctcacaaaacaagattatcatcttcatcttcaggaataacaatgatcccacgagcaacaacagttattggtactgtggaggatggaaatcaaggagaggctgataccattccaactccggtagttattattgatcaagactctgatccagatgcaactgtggtcgagataacctttggtgatcgccttggggctcttcttgacactatgaatgcgttaaaaaacttggggctgaatg

SEQ ID NO: 28549 - DNA, 442 bp, Glycine max
  Clone ID: LIB3108-052-Q1-K1-D5
cccacgcgtccgatcgtattacttaatcttcaatggctgcttcaacaatggctctctcgggatcatcattggctggccaagctatcaagcttgccccctgcacccctgagcttggtgttggaagggttagcatgaggaaaacagcctacaaaactgtttcctcaggaagcccatggtacggaccagaccgtgtcacgtactcgggcccattctcaggtgagcccccatcctatctcactggtgaattcccagctgactatggttggaacactgctgggctttctgctgacccagaaacttttgccaaaaaccgtgaactggaagtcatccactccagatgggccatgttgggagccttgggctgagttttacctgaactcttgtgccgcaacggagtcaagtttggcgaggccatgtggttcaaggccgggtctcagatatt

SEQ ID NO: 28550 - DNA, 328 bp, Glycine max
  Clone ID: LIB3108-052-Q1-K1-D6
cccactcgtccgaacgtttgacttaagcgtctatggctgccgcaacaatcgcggtatcgggatcatcattggctggccaggctataaagcttgccccctgcacccctgaactcggtgttacaagggttagcatgacgaacacagactacacaactgtttcatcaggaagaccatggtacggaccagaccgtatcacgtactcgagcccattctcaggtgagccctcattctatctaactgatgaattcccaactgactattgttagaacactgcaaggctcattcctgacccagagacttctgccaatcaccgtgaactggaagtcat

SEQ ID NO: 28551 - DNA, 449 bp, Glycine max
  Clone ID: LIB3108-052-Q1-K1-D7
gttgagaactaagaaggagaagcaaatggtttcctcaatgatctcttccccagctgttaccactgtcaaccgtgccggtgccggcatggttgctccattcactggcctcaagtccatggctggcttccccaccagaaagaccaacaatgacattacctccattgctagcaacggtggaagagtgcaatgcatgcaggtgtggccaccagttggcaagaagaagtttgagactctttcctacctgccagaccttgatgatgcacaattggcaaaggaagtagaataccttcttaggaagggatggattccttgcttggaattcgagttggagcacggtttcgtgtaccgtgagcacaacaggtcaccaggatactacgatggacgctactggaccatgtggaagctgcctatgtttggttgcactgatgcttctcaggtgttgaaggagc

SEQ ID NO: 28552 - DNA, 390 bp, Glycine max
  Clone ID: LIB3108-052-Q1-K1-D8
cccacgcgttcgagtagctctagtatatgttcaaatgaatgaaccgcccggagctcgtgtgagagttggtttaactgccctgactatggcggaatattttcgagatgtcaatgaacaagatgtacttctatttatcgacaatatctttcgcttcgtccaagcaggatctgaagtatctgccttattgggtcgaatgccttctgctgtgggttatcaacccactcttagtactgaaatgggttctttacaagaaagaatcacttctaccaaagaggggtccataacttctattcaagcagtttatgtacccgcagtcgatttaaccgatcctgcgcctgctacgacatttgcacatttagatgctactactgtactatcaagaggattagc

SEQ ID NO: 28553 - DNA, 248 bp, Glycine max
  Clone ID: LIB3108-052-Q1-K1-D9
actgcgcacaggtgcagtatgtattcagtgaagatattccagagactatcgtggacagggaaaaggaacttgaaatgcagagagaggacctgctttcgaaaccagagaacatcatagacaaaattgttgatggaaggatctcaaagaggcttggagagcttgctcttctagagcagccttttattaaggatgacagtgaattagtgaaagacttagtgaagcaaactgtagctgcactctggagagaa

SEQ ID NO: 28554 - DNA, 404 bp, Glycine max
  unsure at all n locations
  Clone ID: LIB3108-052-Q1-K1-E11
cgatgaaattcaagaggcttctcagatgttgtcttgttaggctgactttgtgggctgcgcggtctgtgcatgcatgcagactcagcacaagattgagatggacaagcgagacgggaaatatggaccccaaccagcaatggcagtgcctcctatgcagcagatgtcacgcattgatcaacaagtacctccttcggttgggtatgcaccacaaccagcttatggacagcctgctcaaggatatcctgctccgggttatactcctactggttacccccctgctgcttattctncaccaagatattccccttctggctaccctaagtgattggtctacagcgcaccaattgatcgtgcttcatagaacaagggaacatgtttgtggtgaaatacaacagttcgattga

SEQ ID NO: 28555 - DNA, 449 bp, Glycine max
  unsure at all n locations
  Clone ID: LIB3108-052-Q1-K1-E2
ttcacaattctcatctcattgattgcttactatcaattaggattaggaaggaacgcaaagtcatcaaatcaaataaaagaattaatcatgaggagtgggaaaaagtctattcacgcgatcacgacatgggtgcggcggcagcccccaaaggtgaaggcttttctcgccgtcgtttccggcatggcggctctcgtccttctccgcttcatcgttcacgatcacgacaaccttttcgtcgccgccgaggctgttcactctcttggaatttctgttctcatctacaagctcatcaaagaaaaaacttgtgccggattatcgctcaaatcccaggaattgacagctatatttttagctgttaggctgtactgcagttttgtcatggaatatgatatacacacnctgcttgatttggctacttttgcacgacactgtgggtatatacatgattc

SEQ ID NO: 28556 - DNA, 486 bp, Glycine max
  unsure at all n locations
  Clone ID: LIB3108-052-Q1-K1-E3
gaatttccgggcaaatttactcttaaccaaattagtggccaagtcattgagcatgattaattctgggacttatcagcttcatctgcgagtgctcaggcatttttctggacatcacgtgctctctttgctgctgttgaatctgtcaaagatttgggtgacagtgctaagaatttgagtagtaaaatgtcaaccaaaaaagagaacttggagatgtatccagatccttcaggtgatccaaccaagttcttccagagggacgacagttttcaacaggatgcataccagattgcactactcctggcagttatttatttggtggtacaatttctaaggacaactttgtaaagctagcctgccattttatcaactgaacttgtatgtctttgttctccaagagttatcattataaagtgtgactatcagctcataatcatcaggtgtcatcaggttgntttgtcaaaggtaatatgttcacatttgtaagtg

SEQ ID NO: 28557 - DNA, 447 bp, Glycine max
  unsure at all n locations
  Clone ID: LIB3108-052-Q1-K1-E4
ggttctggtttatagatctctgtgaagtctctntattacactcaacctaagatgcagaacgaggaaggacagatcaccgagctttacattcctaggaagtgctctgccacaaaccgattgattaccgctaaggaccatgcttcggttcaggttaacattgggcatgtggatgagaatggcgtctacaatggccatttctccacttttgctctctgcggcttcatccgtgctcagggtgatgctgacagtgccctagatcgcttgtggcagaagaagaaagttgaagttaagcaacagtagacacccatgatagtttgttactttgctatgtattaaattctactcttgctagagatatttgagtactatgatttgccgtcttgagcaaatacttagtctaaattttcgttggtatttggtaccggcagttaaattggcttttttgac

SEQ ID NO: 28558 - DNA, 457 bp, Glycine max
  Clone ID: LIB3108-052-Q1-K1-E5
cggacgcgtgggtgaggttatagaacacattccgtatgatcacaaggctgatgtatttagttttggaattgttttatgggagttgctcaccggaaagcttccatacgaatatttaacccccctacaggcagctataggagtggttcaaaagggtttgcgacccaccatcccgaagaacactcatccaaagtttgtggagcttcttgagaggtcttggcagcaagatcctacattgagacctgatttctccgaaattatcgagatcctgcagcagttagcaaaggaggttggagatggagaggagcggcacaaggataaatctggaggactcctgtctgtcctcagaagaggacatcactaaaaggtttctttgaatagatgatgtccgtaacatggtcataggtaggatcaatcgcagcacaagggccatttcccatttgtttctaaattgtcatgt

SEQ ID NO: 28559 - DNA, 408 bp, Glycine max
  Clone ID: LIB3108-052-Q1-K1-E6
cccacgcgtccgatcccaagaagtatgcattatttcctgaaatcaacttggtaaatggggagacaagaggtcttatcggtgggtaccctccatgtaaccgaacaattttggccttctttgcagggcaaatgcatggtagaattaggccagtgcttttccagcattgggagggcaaagacaaggatgtgctagtttatgagaaactcccagacggagttccataccatgagacaatgaagaagagcaagtattgcatttgtccaagtgggtttgaagtggcaagtccaagaattgttgaggcaatctatgcacaatgtgtgcctgtgataatatcacaacaatttgtgcttgcttttagtgatgatcttaaatgggactctttcttggcttaaaattttaatagtgatg

SEQ ID NO: 28560 - DNA, 454 bp, Glycine max
  Clone ID: LIB3108-052-Q1-K1-E8
cccacgcgtccggcaacgcactgaattcgttcaatcaatccatcttcaattgctttgttgcgatcggaggaaaatggccgatcagttatcgaagggagaggaattcgagaaaaaggctgagaagaagctcagcggttggggcttgtttggctccaagtatgaagatgccgccgatctcttcgataaagccgccaattgcttcaagctcgccaaatcatgggacaaggctggagcgacatacctgaagttggcaagttgtcatttgaagttggaaagcaagcatgaagctgcacaggcccatgtcgatgctgcacattgctacaaaaagactaatataaacgagtctgtatcttgcttagaccgagctgtaaatcttttctgtgacattggaagactctctatggctgctagatatttaaaggaaattgctgaattgtacgagggtgaacagaat

SEQ ID NO: 28561 - DNA, 358 bp, Glycine max
  Clone ID: LIB3108-052-Q1-K1-E9
cggacgcgtgggctgggactttcggactttgaaggaacaggagggttcattgagccgaaatggctagcatatggtgagataatcaatggtcgatatgcaatgttgggtgcagttggtgcaatagcacctgaaattctaggcaaggctggtctgatccctcaggagacagcactcccatggttcagaaccggtgtgttcccacctgcaggaacctacaactactgggcagactcctacacactgttcgtgtttgagatggcactgatgggatttgcagaacacaaaagattccaagactgggccaaaacaagctctatgggcaaaccatacttcctaagactagaaaagggtcttggaa

SEQ ID NO: 28562 - DNA, 464 bp, Glycine max
  Clone ID: LIB3108-052-Q1-K1-F1
gaaaactttggacaaaaaatggagtgctactcaaggtcaaacaggagtgacatccacctgtcagcagaggaagaagccaccatagaggcaaagaccagagagtactttgatggggtcgcaccacaacgccacacaaagcctcaacgaagtgactattcagctcaatatgtcgatgctttctccaatgcccatcactcttctttaactataccagaattaacacaattccaactcctccagaacgatccccaagagaagaaattggtgtacaatggaagtcaagtaccggaagaatttgtggaaacagagtattaccaagatctcaacagcgtggacaaacaccaccatacgactggaacaggatttatcaaagtagagaaaaatggaaatgactttcacatagaaccagataatgacactggttgccatcactcttgcaagggcaatccagcaaccaatgattg

SEQ ID NO: 28563 - DNA, 335 bp, Glycine max
  Clone ID: LIB3108-052-Q1-K1-F10
acgctgacgcgtaccacaacactttcaatcattagttcccaatgggtcaaatctgatgacggagaggcttctgctgagctaaaagggaatgaactcaacaacggtagattggccatgatctctatgtacgggttctctgatcaagccattgtcacctgcaagggtccattggacaacctcgctgatcaccttgcgaacccagacaacaacaatgcctgggcctacgccaccaactacgtccacctcaagcgagcatcaaacaaaaggatgacttgtggactcttgagaggttttagaattgcgtatcgtgaagactaatatattgcaatgtactt

SEQ ID NO: 28564 - DNA, 272 bp, Glycine max
  Clone ID: LIB3108-052-Q1-K1-F11
aacgccgaacgtaacagcggggatcaacatcaaacagagctagacaaatgcagcactaacagagaacaaagaactcaactagcggatccatccaacaatgacaccaacacagattgaagaaaccccgaaaacaaaagacaggctcaaaaaggagatacctagcggagcacagccaaaacgcgaccaacccacaacttcaaaacaatgacataagaattgagaatcaactatgactcctagacagacaaacaagaaccagcaactgaagcaca

SEQ ID NO: 28565 - DNA, 456 bp, Glycine max
  Clone ID: LIB3108-052-Q1-K1-F2
cacattttctagtgtccttcctcactctttatccgttattgccattgggatggcgaagaggcgaaggtccgtggccacgcgccttgacgaagtggatcgaaccatgtactcgactttctgcagcaccgtcaactccctctctcatctctacacccacgccatgaaccaacataaactctcattccaggccggtgaacgacacgctcttgaaaaattgtatcaatggattctcaggcaacagcgagatggatctaggctgaccaccattgatattgttacccatttgcagaatgagcttgaatatgcaggaaaagatgcaccagtgtccccaaggcaaccaatgcatcaacagaacttccatactgcaatgcacaacacttattttggtgcatcaataccctttaatgcatttggagcaactgtggcatgacaggggatacgttctggacaacctga

SEQ ID NO: 28566 - DNA, 457 bp, Glycine max
  Clone ID: LIB3108-052-Q1-K1-F4
aaaatgagagagtgaatgatgtctgggagcacaagatgggtggagttggtgctgaagaacaggttgctgagttacttgatctggcaatccatacattcctctctcattttcatctctcttctctctttttcctcacctcactacccctttctctcccttctcctcttcctcccttcccatcttctcttctccaccaccctctccttcatcgcctccccccacccccgccctcgcttcaccctctccctcctcttcgccttctccgccgccttctccgcctccctctccctctcctccgtcgcccccgccgcccacggtctccccggcgtctcccgattagggtttaggggtttcctcgtcggttccctcttcggttcgcattacgtcttcaagcgccgatgggttcttcacttccccatcattcagcgtcctccatttttcagcttcaagatgggag

SEQ ID NO: 28567 - DNA, 450 bp, Glycine max
  Clone ID: LIB3108-052-Q1-K1-F5
cccacccgtaccagaaaccggattaagatttttctacgaaaagagccatggcaacaacagcgccctcaaaccgatcattagaggcgtacgctctcatggcaatcctcagcactctgctttgcacggcggtggcggcgaatgagagcgtgtacgagatactccccaagtacggcctaccgagcggtctgttaccggacaccgtcaccgactacacgctcgacgaggaccggcaattcgtcgtccttttggcgaagccctgctacatacagttcgattacttagtttactactagaccaagatctccggcaagctcagctatggctccatcaccaacctcaagggcattcaggaccagcgcctcttcatctggttcaacgtctatgagatcaacgtcgatttgcctcccttcaacagcatctacttccaggtcggtatcatcaacaagaaac

SEQ ID NO: 28568 - DNA, 455 bp, Glycine max
  Clone ID: LIB3108-052-Q1-K1-F6
gttgaacaagggtttctctgtctgcttcttcactttctctcgtttcaatcgaaaccaaagcaaaatcatgggcagaaaattcttcgttggtggcaactggaaatgcaatgggaccactgaggaggtaaagaagattgttactactttgaatgaggctaaagtccctggagaagatgtcgtagaagttgttgtgagccctccttttgtgttccttcctgttgtaaaaagtttgctgcgccctgatttccatgtttcggcacaaaactgttgggttcgcaaaggtggtgcttataccggtgaggttagtgctgaaatgcttgttaatttgggaattccttgggttattattggtcactctgaacggaagcagcttttaaatgaatcaaatgagtttgtgggagataaagttgcctatgcacttcaacaaggtctaaaagttattgcatgcattgggg

SEQ ID NO: 28569 - DNA, 425 bp, Glycine max
  unsure at all n locations
  Clone ID: LIB3108-052-Q1-K1-F7
cttggaggctagggtttccggattcttgctttttaatctttgcaattcaaaagcatggggcactccaatgtgtggaactctcatccaaagaactacggacctggttctcgcacctgccgtgtgtgtgggaatcctcatggattgatcaggaagtatgggcttatgtgttgcaggcagtgcttccgtagcaatgccaaggaaattggcttcattaagtatcgctgaaggattagtgtccaactgccccactcggtttggattcttgcattaggctgggttgattttactgtctgaagaacctataagaatttttgtgacatttagtgaagttaattatcaaaactcaatttgtggaactaagaatatttttgttttttatataattgttttgagctatctacatcaaaaaaaaaatanaatataac

SEQ ID NO: 28570 - DNA, 227 bp, Glycine max
  Clone ID: LIB3108-052-Q1-K1-F9
acgcaggcccatcatggcttcagagaatcatttgggtctcgccgtcactccctctgatgcggatgctcctaccatatttgacaagatcatcaataaggagattccttctactgtggctcatgaggatgacaaggtgcttgccttcagggacataactactcaagctcctacacatattcttatcattcctaaattcaaagacggcttaagtagtctatccaaagctg

SEQ ID NO: 28571 - DNA, 460 bp, Glycine max
  Clone ID: LIB3108-052-Q1-K1-G1
cccacgcgtccgggcggtgacaaccatggttgactcatctcaagaccttgaccaactccgcgatagtgcgctctttcttccctactctctattttttaatcattttttttatctctatctgagattgctccattcgataatttcaggtgctttggatgattttcagtccttcaacctcaatcctccccctccaagtggggaagcaagtgcgaacaagaagaaggagagtccttctttggcgtcgggggtgcaaggattgggcatgggtttacccgatttgagaacgaagaaaaaggggaaacagaaggctgcttccaaagacagccacgtgtcggaggcgctcaacaagctcagggagcagaccaaagaggctgttaaagggctggagtctatttccacacccactgccgatgatttggggaaggatgccttgatggaagattgggtgaaacagtttgag

SEQ ID NO: 28572 - DNA, 420 bp, Glycine max
  Clone ID: LIB3108-052-Q1-K1-G11
atcaattttggtttaggtatctgtttggtttgttgatgccacccaaggtttctgtccgcaaggcaactcaaggtgatgctataagaaactattaccatgaaatgcatgtcatccaggacatgcttgttcctttgtacaaggtgggagatgctttagaatgggttcaccgtgagatggaggtataccccatttggctctgcccacacaaattgttcaagctgcctgtcaaaactatgatttaccccgagccaggattcgaactacaccgcaagcaaggagacacccaaactgctcaaatgtacacagatgttggagtttattatgcaccaagtcctgttcttaagggtgaagtatttgatggggcagaagcagtgcgtaaaatggagaactggttgattgaaaatcatggttttcagccac

SEQ ID NO: 28573 - DNA, 425 bp, Glycine max
  Clone ID: LIB3108-052-Q1-K1-G2
gaactaagaaggagaagcaaatggcttccttaatgatctcttccccagctgttaccactgtcaaccgtgccggtgccggcatggttgctccattcactggcctcaagtccatggctggcttccccaccaggaagaccaacaatgacattacctccattgctagcaacggtggaagagtgcaatgcatgcaggtgtggccaccagttggcaagaagaagtttgagactctttcctacctgccagaccttgatgatgcacaattggcaaaggaagtagaataccttcttaggaagggatggattccttgcttggaattcgagttggagcacggtttcgtgtaccgtgagcacaacaggtcaccaggatactacgatggacgctactggaccatgtggaagctgcctatgtttggttgcactgatgct

SEQ ID NO: 28574 - DNA, 446 bp, Glycine max
  Clone ID: LIB3108-052-Q1-K1-G3
gtgatatgcaaaacatgtctctaatagcttcactcttctccacaacttcacaactcactggccttgcttccctcccttcttcctcctctccactttctcgcaaatttcccctcactttccgggaaaaaaacagaactccaatcacacctcacaagctccctttttcagcaaggcctaccaccaccagagtggtgttggtgaagtctcaggccacagcacctgcttcttctgaggctgtggcagtgacacctgtgtcttctgagatgaaggcatgggtctatggggaatatgggggtgtggatgctctgaagctggactccaatgttactgtgcctgatgtgaaggaagatcacgttctaatcaaagttgatgctgctgctcttaaccctgttgatgccaagacgaagcagggaaagtttaaggccactgattcttcccttgcgact

SEQ ID NO: 28575 - DNA, 457 bp, Glycine max
  Clone ID: LIB3108-052-Q1-K1-G5
cccacgcgtacggaaaaaggcacttgagatttccaagtttgagcaatcactcgggtcagggaggcgcttcgttgctatcgctgagaaagaattagagctatattgcaggcacgttgcactctatggtgatccaaacaaccgaaatctgttatcgatgctggacgttccaagtggaaactccaaggaaaaagggaatcatgaagttagtggtgatttttcagtcagtctttcagagactgaagcagattccatggaaatggagctatcagaaacagaaaatagtcttcaagatgaaaacatgtcaatgaatgaatcagattctgaagaggacagcatgttggatacctatgtaataaagaaagagaggtatattttactaaaatgcatgatgaaagtgtaagttcaaccacgggttcttcatcagtgtctgaacatagccactattacaataatcaat

SEQ ID NO: 28576 - DNA, 452 bp, Glycine max
  Clone ID: LIB3108-052-Q1-K1-G7
cactccttcagttcagttcagaccaaactttgctacatcgtttgatattttgaagtctttgtgattgagaatgtcgtacactctgtgctttgctcccatttgttccttgaaatccacaaacagacctgggacaattgccggtaattcagttacccaaaaggcttttgggatgaacgaagtgtgtcagaattctaaagttccaagctttcagtccttgaaggttaaggctacagaagataaaactacacaaagcaaaacaattaggagcattgtttgttctgattgtgatggaaatggtgcaaaatcatgtactcaatgcaaaggtactggagttaattctgtagatcacttcaatggacaatttaaagctggtggattgtgttggctatgcaggggaaaaaaggatattttgtgtggatcttgtaatggagctggctttcttggtggattca

SEQ ID NO: 28577 - DNA, 435 bp, Glycine max
  unsure at all n locations
  Clone ID: LIB3108-052-Q1-K1-G8
cttaaatctcatccaaatcctaaagtaatttagaaagcaagacagttcatgtacagctttcaggctatggaaatgatgaagatgacaacaggatctcaattttatttaaagaactcagactaccagaattattttgatgcatttgttgaaaataaatctaactatcccggaggagatggcccggttcaagaaagtgcaatgaatcaggttttgccgtatattctttttcttgtttctcctatttttgtcgtactacttattgctgttcggaaaggaatataaatctctttcttttgtatacaaattccgtttgttttatttcatattgtcaaatgtcaatctctaagcaggagataattcttccagtttggactttggacaacttcattcgagtttgattacaaaaactaacctntacgatggtatggatatata

SEQ ID NO: 28578 - DNA, 422 bp, Glycine max
  unsure at all n locations
  Clone ID: LIB3108-052-Q1-K1-G9
cttcatctgaatataatcctattggtgattatgcaaatttgagtgatgtggatgactgaagtgactttgatgaaatagtgggtgtcattggaattgtgcattcaaattcaggcaaggatgaaatttatgaagaaaggggattgaattcaaactccgtcgttgcagctactgaagatgttcaagctgaaaacacaagtgctgcccaaaatgaaatagtagaagttgttcatcctaacactcagccaatccaaagtaacatatctctgacctaagaatctggaatcagctntcaggtattgtgatacgaatagcaatcaaggactgcagaaaacaaggcccaaaagacaaaccactacccctacctacttgaaggactatgtgcagcttgggtagcagaggccccatgcagcatgcaccgttcg

SEQ ID NO: 28579 - DNA, 353 bp, Glycine max
  Clone ID: LIB3108-052-Q1-K1-H1
cataactaaactatcaagtatccctgtatatacaagttgtctaaattgtgaaaaaaaaagaaaaaaaaaaaaaaaaaaaaaaaaaaaaaaaaaaaaaaaaaaaaaaaaaaaaaaaaaaaaaaaaaaaaagaaaaaaaaaaaaaaaaaaaaaaaaaaaaaaaaaaaaaaaaagaaaagaaaaaaaaaaaaaaaaagagaaaaaaaaaaaaaataaaaaaaaaggaaaataaaaaggggcgcgtcaagggaaaaccctgttttgacccatcaaaattggcctagcagcttattttccttattgcgacttgaaaaaatgccggaccggggtttttaaaaattcgggattgggaaaa

SEQ ID NO: 28580 - DNA, 399 bp, Glycine max
  Clone ID: LIB3108-052-Q1-K1-H10
acgcttatggtggatacctatgcacctagagtctatgaagggcgtattaagcgacgaaatgatcaggagtatgaggaccaggaggacgatgatgttgaagcagaccacatgtgaagagactgaatgtgaaagatgcctgtgtcttacttatgctatgtgatgcgtaagtgtgattgctctgctctgcaacgtgaagaagattgtaattactaatagcgtatgtacggttagcgggataaaactttgatgagcttgatgtggagaatggaaaaaatatggggttagtgcgagtggagtttgggaacaatgttatgcggcacctatctgtttgttcttatattggcttgcttttatgttgttatattgagtcatgtttccgtaatatttgttgttcttaag

SEQ ID NO: 28581 - DNA, 406 bp, Glycine max
  Clone ID: LIB3108-052-Q1-K1-H2
gaacaggataaagctcattgcccttttcatttaaaatcaggagcatgttgttttggcatacgctgtagcagagtccatttttaccctgataagtcgtccacttttcttatcaaaaatatgtataacggtcctggccttgcttgcgatcgggaccaagatgagggccttgagtataaagatgaagaggttgaacgctgttttgaagaattttacgaggatgttcacacagagttcctgaagtttggggaagttgtgaacttcaaggtgtgtaaaaatggttcatttcactggcgaggaaatgtctatgtacagtataaatctcttgattctggtctgcttgcttataactcggggaatggtcgctactttgctgggaaacaggtaagttggtaatttttaacttaac

SEQ ID NO: 28582 - DNA, 295 bp, Glycine max
  Clone ID: LIB3108-052-Q1-K1-H3
cccacgcgtccggaaactcagaaaaactttttcacttcaagttactcactcaaccacatgcaccatgttctgatattcccccaaccacacttttcacacaccaatcaaactaatgcaaatgcaaagcatgtcaaccaccatggcttagctttctcctgcgacccatttctcagccactccttcttactcgaaaccccgtcttgtctacaagaacaactttttctactctctcatgtcgaggagtctttctctctctcccttgaaggctgctgcttctgagaacggcgtctggacc

SEQ ID NO: 28583 - DNA, 461 bp, Glycine max
  Clone ID: LIB3108-052-Q1-K1-H4
ctgcctgtaagagtgaaaaaaccttctcttttccttttctcaagtctcaagagatttcatcatggctccaaagaaggacaaggctccaccaccttcctccaagcccgccaaatctggcggtggcaagcagaagaagaagaagtggagcaagggaaagcaaaaggagaaggtgaataacatggtgctgtttgatcagggcacctatgataagctcctttctgaagctcccaaattcaagctcatcactccttccattctttctgatcgtttgaggattaatggatcacttgcaaggaaggctataagagaattgatggctaggggttcaatcaggatggtgtctgcccatgcaagccagcaaatttacaccagggcaacaaacacctaggtgtggaactgatcttagcttacggagtattggtaggaatagtaatgaagtattggtcttttgcactttggga

SEQ ID NO: 28584 - DNA, 455 bp, Glycine max
  Clone ID: LIB3108-052-Q1-K1-H5
caaaatttttgaattcaaagatgctggggtgaattgtgtggctgtgggaagttccccaaggtttaaagtttatgacattgattttggatgggggaagccagagaatgtgaggagtgggactaataacaagtttgatgggatgatttatttgtatccggggaaaagtggaggaaggagcattgatgtggaactaaccttggagcctgaggctatggggaagttggagcaagacaaggattttcttttggaagcataaaattgctagagcaagtgcaataaaaaaaatggctagaaaaagtacgttgagcaaatttggaaagtagtactgctcagattgttgaaggggtcgacttcaatgcccaattatgaattctgatgtgattcatggatgcaatttaatttaaagttgtgctgctttaggattttatatatgttgtggttctacgtttgattga

SEQ ID NO: 28585 - DNA, 450 bp, Glycine max
  unsure at all n locations
  Clone ID: LIB3108-052-Q1-K1-H6
cttgcactctgccctttgggaggagtttgtaacatggctgctctactctactgcggagcttagtgatgcaaatgcaacacatgtagcaagtggtgatgtgagggtgctgcatccagtgttcaaggtttatggccaggccacggcattctccggccccattgtcaccgtgaaggtgtttgaagacaacgtgttggtgagggagcttgttgagacgaaaggcgaaggaagagtattggttgttgatggaggaggaagcttgaggtgtgcattgatgggagggaatttggtacagattgcatataacatggggtgggctgggattgtggtgaatggttgcgttagagatgtggatgatatcaatgcgtgtaatattggcgtcagagccttggcttctcatccactcagatccaacanatagcgcaactgtgaaaagaatgtccctgtttatgt

SEQ ID NO: 28586 - DNA, 421 bp, Glycine max
  Clone ID: LIB3108-052-Q1-K1-H7
aaattgttaaaaaaaaaaaaaaattaaaatttaaaaaaaaaaaaaaaaaaaaaagaaaaaagaaaaaaaaaaaaaaaaaaaaaaaaaaaaaaaaaaaaaaaaaaaaaaaaaaaaaaaaaaaaaaaaaaaaaaagggggggccgttttaggggtccaaagtttacgtccgcgtgcttgcaaggtaaaagtttttttatggggccactaaatttaaattaatgggccggggtttaaaaaggagggaatgggaaaaacctgggggttcccaatttaaatggcttggaagaaaatccccttttggcaagttgggttaataccaaaagggcccgaaccgatggcttttccaaaaagtggcgaaccctaattggcaaagggaacccgccttgtatggggcattaaagcccgggggttgtgggggtta

SEQ ID NO: 28587 - DNA, 432 bp, Glycine max
  Clone ID: LIB3108-052-Q1-K1-H8
cccacgcgtccgaaagccaagattatcattgatgatgtctttgaaactccctttcctgttgaccttgttcctcgcactctcccaagctcaaccgcattccgatgatccaccgccgccacccttctacaacgtctgcgtcatcggcgctggcatcggtggctcctccgtcgctcacttcctcctgaaatactcgccgtcctccactccctccaccaaaatccgagtgttcgagcgcaacggtcgcattgggggacgcatcgccaccgtgacggtggcgggcgagaccttcgaagccggagcgtccattctgcattcaaagaacctgcacacagtggattacgttaagatcctgaagctgaaggtcaaagagccgaccgcttcggaggattccctctctctctgcatttgggatgggaacaagtccttttcaaa

SEQ ID NO: 28588 - DNA, 422 bp, Glycine max
  Clone ID: LIB3108-052-Q1-K1-H9
ctcgacggccatatggccttcgtccatctttgtccccaacccaaacagtaccggcatggccactcgattctctcacacaccctccaaaccccctctctcgccagcattcgccattgcggcgttcttcacggccaccgtcacggacgtttcgggcgtcatcgacaggacaacgatcgcggaggtcagcgggccgttcgtgccagcacttgcggcggtgctgacgctgacagaccccgagcggcggccgcaaatgcaggcggaggatgcgagcggcagcgacatcgacgcggtgagggagtactttaacaactacgggttccagcgctggaagaagatctatggacacacctacgctgtgaaccgcgttcagcgcgacattaggtagtgtcactccaagaccgtggagaacacgctgagcatgt

SEQ ID NO: 28589 - DNA, 460 bp, Glycine max
  Clone ID: LIB3108-053-Q1-K1-A2
gcagaaaaagaatcagagtttcagccagtaaaaaaattggctttggccgaaaatcatgtatcaaagtccccacaacttgggacgggacttagtgacaaaaggtataaaccttgctatggctggatatctaatgatgacgaggaggaagaagagctaatagagctacctctagctccgtggttaagtggggtaaattagtgtaaacaggacagggtattacatatagttagtagaagagaactatactcttcgaaaaagaacaaggacaaaatgagtaattttagtcattgataagaaaatcaatggttaatatcttcacataatcatggtttattatacatgtgtactgaatatggatctatatactcttctcattaatgtttgataaaaagtcgacctatcatagtgtatgtagtcagtagtaaaaaggataagcctgtccaccttttaagttttattt

SEQ ID NO: 28590 - DNA, 426 bp, Glycine max
  Clone ID: LIB3108-053-Q1-K1-A3
ctctttgatacccttttgttctttttggtgctttaatttgcactagcaagggggttgggtttatttctgtttgcttgcaacaatggctgtggctaataagttactttctgttttgatcattgccctcattgccatttccatgcttcaaacagtggttatggcatctcatggacatggaggccaccactacaatgacaagaaaaaatatggacctggcagtctcaaaagcttccaatgcccatcacaatgctcaaggaggtgtggcaagacccagtaccacaagccctgcatgtttttctgtcagaagtgttgtaggaagtgcctatgtgtgccaccggggtattatgggaacaaagcagtgtgcccttgctacaacaactggaagaccaaggaaggaggacccaaatgcccttaaataacctatgc

SEQ ID NO: 28591 - DNA, 432 bp, Glycine max
  Clone ID: LIB3108-053-Q1-K1-A4
cttctctctttctttctctggctcttaaaaatgggcacaccaaacccaactcaaccaaacgatgggccctgacccactccgacggcaatgggaaagcccggagaagaccacctctctctgccctcctccgaggatccgcggcggaatgcagcggcggcgtatggatgcgccgcgggactgctatgcctcgtcatcttgcttttataggacgcggtgttactctccgcactcttctgggtaccccccttcgctcacttcggagatgccaaagagctgtattttaatcctaagtacaaagatcatgatattgttgcaagccgttatgagcagaagccacgctctttgctagaagacaacaacttgcagctttctaatgacagttttgaagagataggagctccctctaccaaagtgatcatcttgtctctagat

SEQ ID NO: 28592 - DNA, 390 bp, Glycine max
  Clone ID: LIB3108-053-Q1-K1-A5
tcgaagagaatggctacacaaacacaatctctaatggcactcaggatgtgggcttgtgccactgccaatgcactcaaactctcttctgtctccagacctcatctcttgcctcctttttctttctccagatgcttatcttccgtcttggatggacttaagtacgctgattcacatgaatgggtcaagcacgaaggctcagtcgccaccattggtatcactgaccatgcccaggaccatcttggagaagttgtgtatgtggagctgccaaaaccaggtggcacagtttccaagaagtctggcttcggagccgttgaaagtgttaaagcaacaagtgatataaactctccaatctcgggggagatccgtgaggttaacaaaaagctcacagaa

SEQ ID NO: 28593 - DNA, 418 bp, Glycine max
  Clone ID: LIB3108-053-Q1-K1-A6
tctaccactcgttcgcttcgacgaccgtcttacccaatcgcctgcgtctctctctgtattgacgagcttaaagacaaagtcttatatggctggtccaaggattgcccatgctaccttgaaaggtccgagtgtggttaaggagataataatcggaataacacttgtcttacctgctggtagcgtgtggaagatgcaccactggaatgaacagatgaaaaccaggaccttctacgaattactggatatgggagaaatcagtggtgatgcagaggaacagtgaaaatgtgcttgaaaagttgcctatgctatccatacataggcatggtttaccatgcattattccatgggatcttaaactgtacatgagccatcttactatgatatagaaaagaactattttcttacactgaatgagtac

SEQ ID NO: 28594 - DNA, 378 bp, Glycine max
  Clone ID: LIB3108-053-Q1-K1-A7
gcggacaaagggagatgtacaatacacacagcaaccaccgatcaaagaagagggagccgggcagatctccctttctcgccaaacaaacacaatatggatttctttatcggcgactaaaccgcacctttctttggcttcctcagaaccgccagatgcctcgttttttcctgtatgggagccgcatacaaaacccggaagagcacgcgaccgggttgcgtcgatgggcgtatacgatgcctgacctgcgtatgaaatcaatcgtgcccgatgtgatggatggcgcgatgggtattcaccgcttgatcatcgaagatatgatcaagtcttgcattgaccctaaaggcaaatcgtactttccttttgactggtacgcccacc

SEQ ID NO: 28595 - DNA, 356 bp, Glycine max
  unsure at all n locations
  Clone ID: LIB3108-053-Q1-K1-B1
ggaagattctgtggtgagcacctacagagatcatgttcatgcattgagtaagggggtcccgtctcgggaagtgatgagtgaactgtttgggaaggcaacagggtgctgccgaggtcaaggtggttcaatgcatatgttctcgaaagagcacaacttgctcggtgggtttgcctttattggtgaaggaattccggtggccaccggggctgcattttcgagcaagtacagaagagaggttttgaagcangcagattgtgatcatgtgacgttggcattttttggagatgggacttgtaataatgggcaggtctatgaatgncctgacatggcagctctgtggaaattgccaattgtgt

SEQ ID NO: 28596 - DNA, 445 bp, Glycine max
  Clone ID: LIB3108-053-Q1-K1-B2
gtttgttgatcgagataactagaaacagtgtgatgaaaatgaaggtccttgttttcttcgttgctacaattttggtagcatggcaatgccatgcgtacgatatgttccctctccgaatgaacactggctatggtgcccgtactccggaggtgaaatgcgcaagttggaggcttgctgtggaagcacacaacatctttggctttgagaccattcctgaagagtgcgttgaagcaacaaaggaatacatccatggcgaacaatatagatcagactccaaaacagttaaccaacaagcttacttttatgccagagacctcgaagtccatcccaaggacacatttgtgttcagtatagatggcaccgtactctctaatattccatactacaaaaaacatggatatggggtggagaaatttaactcgaccttgtatgatgaatgggtaac

SEQ ID NO: 28597 - DNA, 443 bp, Glycine max
  Clone ID: LIB3108-053-Q1-K1-B3
gatacccctacttgtgctaggctttggacattgttctacgaaaattcagtacacccaacaatttggaaagaatcagccctcgcttttccaagtcccaacccctaagatgaaggtaagattccttgctttgttcctactcatttcaggcattcaagccatatcaacctcagaaggtaaaggcctaatccagagcaatggacaagcacaagaacttcttgggaagttatatggaagcatagaagagtcaataaggttgaacgacaaagttgaggaaactaaagacgggtacaaagaagaaatacttaatactacaagaaaagcacaaggtggaggaagttcaggaggcacaggaagtagaggaaagacaggagctggtggcactgctgatgttaatcgccggccacgtcaaagttctgcaccatcagagcctctcttttgggtct

SEQ ID NO: 28598 - DNA, 414 bp, Glycine max
  Clone ID: LIB3108-053-Q1-K1-B4
ttgatcgatattacttgtaacagttttatgaaaatgaatgtccctcatttcttgggttggggaataatggaagcatggcaatgccatgcataccatatgtttcctcttctaatgaacactgtctatggtgcccgtactccagaaagaaaatgcgcaagttgctggcttgctgtggaagcacacaacatctttgtcttttaaaccatccctgaaaagtgtcgttgaatcaacaaaagaatacatccatggcgaacaatatagatcagactcctaatcatataacctacaagctgacttttatgccagagacctcgtaatccatcccaaggacacatttgtgttcaggatatatgagaccgtactcttttatattccattcttcaaaaaacatggctattgtggggaaaaattaac

SEQ ID NO: 28599 - DNA, 326 bp, Glycine max
  Clone ID: LIB3108-053-Q1-K1-B5
gcggatttggtggaggtggaggtggtggcggaggtggtggaggaggaggtgcgggtggcggatttggcggaggagcaggaggagggtttggtgcaggaggtggatttggcggaggaggtggtggtggtggaattggacaccactagagcgttgccaacgttgcatgcatgacaaagtgatattttaacgtccttgtattagccatgataattggtttattgaaaaatattgtgcgagtaagagaattaattattaatgttggtttcataatattaatgtgctctgtttttatttatagttaacgttgaaggaaagaatcggagata

SEQ ID NO: 28600 - DNA, 395 bp, Glycine max
  Clone ID: LIB3108-053-Q1-K1-B6
gccagtggcaagaagatcaagactgacaaaccttatggaattaatggtggcatggctttgagggatggaactgatgcatctggcatgaaaggaaagggaaagggtgtttaccagtttgtagacaaatacggtgctaatgtcgatggttacagtcctatctacgacaccaatgactggtctccaaccggtgatgtctactctagctgtacgactggcttggctatctaggctgtgactctacttggtcttttagctagtggtgcacttcttgtatactacacaagtagcttgagtcaatagactttgcaaatcgatgtttaagttataacatattccatgtaactatctaagaatgaagaactattcgtgaagtactttgtggatatgttccttct

SEQ ID NO: 28601 - DNA, 276 bp, Glycine max
  Clone ID: LIB3108-053-Q1-K1-B7
tccacgcgtccgtctttttgttcactaaattaaaaaaaaaaaaaaaaaaaaaaaaaaaaaagaaaaaaaaaaaaaaaaaaggggaaaataaaaaaaaaaaaaaaataaaaaaaaaaaaaataaaaaaaaaaaaaaaaaaaaaaagtgaaaaataaaattaattaaaaaggtagaggttttaaaaaaatattaattgttaaaaaaaataggaataaaaaataaattgtttatatgaaaatttatatttatttaaaaggaaataaatttaaaaggaat

SEQ ID NO: 28602 - DNA, 415 bp, Glycine max
  Clone ID: LIB3108-053-Q1-K1-B8
ctttgctattacctctttttccaaactctaaaaatttttagttccacaaatccggaccaggatggcagcagcctcggcctcatccaccatgatatcaacaccagccttatctccaagcacaagcatccaaaagcaccatcatttgaagccatccaacgtgtgctttcaaggccttagacccctcacaaggttcacaaccaaagtgagcagcaccaccaaaagggttattccaaagggtggtgtcggtgttagagctgaactcaactcatcacttgtcataagcctcagcactgggctctccctcttcttggggaggtttgtgttcttcaacttccatagggagaacgtggcaaagcacgtgcctgagcagatcggactcacacactttgaggctggtgacacacgggccaaggag

SEQ ID NO: 28603 - DNA, 359 bp, Glycine max
  Clone ID: LIB3108-053-Q1-K1-C1
cttggaccgatcccaaatcccatagtacttgaccggagaagcacctggagactattgctatgaccgatttggtcttaccaagaagccatacaactttgccaaatatcaagcatttgatttgattcatgccatatgggcaatgcttgctgctgctggatacatcattcctgaagcctccaacatacatggagcatactgtggtccagaagctgtttggctcaagactggaactctgcttcttgatgggggtacgctgaactactttgggaaacccatcccaatcaatcttattgcggctgtcattgctgagattgatcttgtgggaggtgcagagtcctacagagtgattaatggcctga

SEQ ID NO: 28604 - DNA, 387 bp, Glycine max
  Clone ID: LIB3108-053-Q1-K1-C3
gcgattacatgtatctaaatgagttaacttgagagagcatcaatgctaacatgtgcctctttgaatatggtgcgaagttcttgaccaataaaggcaaaactagcaccatgcaaggaacaatcatggctgaaatcaaagaaagggtataagactaacatctgcatcatcattgccgacaactgcagagtacttggtactatagtctgtcagagacccctgtaacatcatctggtattaacatcaatgctgatatggcaactgaattgaggtcatatgaggctgcctgcaagcttgactttgatttgcagtcctttaataccaccattcaagctcgagcaaatcaagtcattaatactctttctgttggagttgaggttcgatcccttt

SEQ ID NO: 28605 - DNA, 452 bp, Glycine max
  Clone ID: LIB3108-053-Q1-K1-C4
cttcccccctttgctctcaaaccttatcacctaatccttatcctcccaaaccagaaaacgatgtctgcctccgcagcttccctcgcactcccaaccctcactctccgaacccgacaacctctatgttctccccaatgcttctcctcgtccctctccctcacacccaacaacaaacccatttccatttctgctgtttttctcaaaccaacaactctgtcgtcgtctcgcttcgttccccacgtcgtggtgtcgtcggatttggggcaggaggaggacaccttcagtgacggagacggccccagcttctcccccgaccttaagctctttgtcgggaatcttccgttcaacgtcgacagcgcgcagctcgcggagctctttgagagtgccgggaatgtggaggtggttgaggtgatttatgataagactactgggaggagcaagggcgttgggtt

SEQ ID NO: 28606 - DNA, 397 bp, Glycine max
  Clone ID: LIB3108-053-Q1-K1-C6
aattgacggaccgacccactcgttcgttcagctttaaaccacaaaactaatgattattcttcacaaccacaaaacggggtatggcccttatgtttccatcgtactccctaccctcactcttataacccaccaacctttatgttcttctcattgcccctactagtgcgtgtgcctcacacccaacaacaaacccattttcatctctcatgcttttcttataccaacaactttgtcttcatatctctttattccccacgtcgttttttcattccgatatatttaaaataagaggtcaccttcaatgacatatactgcctcttcttttccctcgaccataatctctttttcgagaatatatccttcaacatctacagctcgcagcttacggtatctcttt

SEQ ID NO: 28607 - DNA, 289 bp, Glycine max
  Clone ID: LIB3108-053-Q1-K1-C7
taacaaagcatcacccatttggatcctctcttctcttctttgatctccgttacgctttttgttttctcaacagagagagagagatagaatctttcgaagttcgtttgcgtgtgttgtttggtcatgttcctatttcattcaccaccttctttggctcgttccttttacttttatctttatttgcttcttcttattatttatttcatcgttgtaatgatttttttgcttttgctcttttcctttgttttatttataatatatttttttcttttttttttttatttacttt

SEQ ID NO: 28608 - DNA, 412 bp, Glycine max
  Clone ID: LIB3108-053-Q1-K1-C8
gtacctcatttgttttactatttctgcacttatccacaagagagcacaaatgatttcatgcacaaatatatatcaaaaccatgcacaagatgtttcttttcataacatgacaacatactgttttataatcatcaagaacaatgcatatgatgatacctcatatgtggaattacattcacgtgcgcattccatttttgctcatgcaaaatattattttaactgttttgtttctccaaccatattcattcatcttttattcttttacatgatgtcatcacttaatattttgacacatgtttttcatttttcttcataacattaacttcatttatttaaaatataatccattcttctttcatctaattattaacactcctccttcttttttttttaattacaacaaaaaattaat

SEQ ID NO: 28609 - DNA, 417 bp, Glycine max
  Clone ID: LIB3108-053-Q1-K1-D1
ctcttcttcgtctcaaatctcttcgttccttcgattcgttccatttcttccaaaatggccaaagacccagttcgcgttctcgtcactggagctgcagggcaaattgggtatgctcttgtccctatgattgctaggggagtgatgttgggtcctgaccagcccgtgatcctccacatgcttgacattcctccggcagcagagtcattgaatggggttaaaatggaattggtggatgctgcattccctcttcttaaaggtgttgttgccacaactgatgtggttgaggcatgcactggggtcaatattgccgtgatggttggtggattcccaagaaaagaaggtatggagaggaaggatgtgatgactaagaacgtctccatttacaagtcccatgcttctgcccttgaaaagcatgct

SEQ ID NO: 28610 - DNA, 365 bp, Glycine max
  Clone ID: LIB3108-053-Q1-K1-D2
cgcgtcgctccgcaccagtttcaccgcacgaatatcctgttgtttggagcgatccgagaaaaactcgctaaacatgttggtttaccaggacctccttacaggtgatgagcttctctctgactccttccgttacaaggaaattgagaatggaatgctgtgggaagttgaggggaagtgggttgttaaaggagcagttgatgtatacattggtgcaaacccttctgctgagggtggaggagaagatgagggagttgatgatgcatctgttaaggttgttgacattgttgacacattcatactttatgtgcaaccctcattcgataagtatcagtttgttaccttcatgaagaggtttataaagaatt

SEQ ID NO: 28611 - DNA, 324 bp, Glycine max
  Clone ID: LIB3108-053-Q1-K1-D4
cccacgcgtccgaaaaaaaaaaaatataaacaaaaattattttcttcaaaacaaaaacccgggaagagggcaaataaaattaaataaaacatacaaaaaaaataagtccgcccgccctacatcatccatgctttcttccacttcctttcaacgtaattcttcctctctcccttcaactaatccaatttcatttcccctctttttacaacacctacacctgtataaccttgtctttacctaactaaatggccttggaatacatacccctttcacgagtaggcctcctttctttataggccactaccctttcttcttcccacccct

SEQ ID NO: 28612 - DNA, 453 bp, Glycine max
  Clone ID: LIB3108-053-Q1-K1-D5
aaaaactgtaagtgaaagtttctgtctcacatacattaattgctggaaaaatatcgtacgcatcgatatgaaaagaaaatatttgatacgcgaagacataattgaatgtatttttcaattatttctataagataaaatcgatatagatagatcggacgcgtgggggtttggatagcttggacaatgtggaaattgtaatggcactagaagaggagttcaagctagagatcccagacaatgaagctgataaaattgactcttgtcatcttgctattgagtacatttctaaccatcccatggctggttaactaatgtgtcctttttcctatttggcttcatgttgaacttaaacacagtgcaaccttgaaccttccccttactttcactggatgtttctggaatctggtgttgttggtatgttttcctttttccatttaaattgagtaaaggggg

SEQ ID NO: 28613 - DNA, 236 bp, Glycine max
  Clone ID: LIB3108-053-Q1-K1-D7
gtaaaataaatgatgactggtgtttgtcttttcccaaaattctaacacaaagggtgtacgtcgaaacttataaaaaaaaaaatataaacactatgaaccaaagcatataaatggtcggccttctcttaagaatacaagattacggtcgcgtgcttgcaaccgcagatctcttttatattatcaccaaaattcaaaacactatccatcttttaaaaacgattaaacttcataatccc

SEQ ID NO: 28614 - DNA, 384 bp, Glycine max
  Clone ID: LIB3108-053-Q1-K1-D8
cttccatcggcaacgaggtcctcaaggccgtcgtcgcgcagttcaactccgagcagctggtcacggagcggtcacaggtctcctccctcgtccgtgacagcctcattcgtcgcgccaaagacttcaacatcgttctcgatgacgtcgcgattactcacctctcctacggcggggaattctcccgcgcagtggatcagaagcaggtggcgcatcacgaggcggagagatcgaagtttgtggtgatgaaggccgagcaggagcggagggccgccattattagtgctgagggtgagagcgatgcggccaatctgatctcggacgccactgcctctgccgggatggggctgatcgagctaatgaggattgaggcgtccagggaggtgg

SEQ ID NO: 28615 - DNA, 440 bp, Glycine max
  Clone ID: LIB3108-053-Q1-K1-E1
aacagtgttgccattggacgagaaggaggtgttgcacctctgattgcacttgcacggtctgaagcagaggatgttcatgaaactgccgcaggagcactatggaatcttgctttcaatgctagtaatgctctaagaatagtagaggaaggtggagtatctgcacttgttgatctctgttcttcatcagtatcaaaaatggcacgattcatgtctgcgttggcattggcatacatgtttgacgggagaatggatgaatatgctttagtagtcacttcatctgaaagtatttctaagagtgtgagcttggatggagctagaaggatggctttgaaacacattgaagcttttgtccttatgttctctgatctacaagcatttgcggctgctgctgcatcatctgctcctgcagcattagcacaggttactgaaggtgcgcgcat

SEQ ID NO: 28616 - DNA, 279 bp, Glycine max
  Clone ID: LIB3108-053-Q1-K1-E2
gaaggcctgaataggctactcaccccgacacgttgaaggcggggttggctgagttcatcgccaccttgatcttcgtgttcgcctgttcatgttccggcatctcctacaacaagctcacctacaacggcgccgccactcccgccggcctcatctccgcttccatcgcccatgctttcgccctcttcgtcgccatctccgtcggcaccaacatctgcgtcggccacgtcatccccgccttcactctatgagtgcctttattgttcttcatcatctcccttt

SEQ ID NO: 28617 - DNA, 370 bp, Glycine max
  Clone ID: LIB3108-053-Q1-K1-E3
gtaacctcaacactctattggggtctgatagagatggggtcttgctgtggtgaaagtgcagataacatgcaagtgataggtgcggataaggaccacatatggagcaagaaagtggaagcagatgagggtctgaatctgaacactgtggggtgcctcagagggagattactggctgagagacaagcttcaagggtggccaagatggaagcagaatcaatggggaacaagtttgttgagttggaaaaattgcttagagaagagatcaaattaagagataaagctgaaagaaggcttaaacttttaaagaagaaggttggatctttcaattgcatgccctccaaaacagggcaattgggaagcattctgattc

SEQ ID NO: 28618 - DNA, 431 bp, Glycine max
  Clone ID: LIB3108-053-Q1-K1-E4
cccacaccttctaataataaaccttatcattcttattcttatcctcccaaaccataacccgataatcgtccaactctactttcctactaactccctacccttactcctctaacccttcaacctctatcttctctaaaatctatatctactactctcttctcactcatcccaactaactcattttcattttcacctttttctcaaaccaaccacttttacatcttttcactttcttttcctactcctttttttcttactacatcctttccccaacatcactctttttttaatatttttttcccctctttcttcattctcacttttctttatttattaatttttactttcaccttttaatatgtctctttttctcccatcattattattacttcccctttttttttaaccacttcttaattactacattatta

SEQ ID NO: 28619 - DNA, 60 bp, Glycine max
  Clone ID: LIB3108-053-Q1-K1-E5
aaaaaaaaaaaaaaaaaaaaaattaaaaattttaaaaaaaaaaaaaaaaaaaggggggcc

SEQ ID NO: 28620 - DNA, 270 bp, Glycine max
  Clone ID: LIB3108-053-Q1-K1-E6
gttctaaatttctaattctcatctaaatgatattgatttaaccttctactgagaagagtggtcaaactctctcttagctaacactctcttcatcttcttctttcccttcttcttttgttcccttttccactctattcatcgtttatttctcatttttttatctcattctttccacgtctttattatcttaaactatcctttacttcttttctcatccatcttcctgtattttccatctttttttttttttcttttctcttttttttcctt

SEQ ID NO: 28621 - DNA, 448 bp, Glycine max
  Clone ID: LIB3108-053-Q1-K1-E8
gacatctcatgctgctgttgtagcccgtttatggggaaagtgttaagtgtcgggttgcgcggacatcctcgtaaaatatgctcaaaagctatttgctgttggagataacgtcataggcgatgcaaaatgcatctgtcataactcacttacgtttcatgcctttcgtcataagcatccacttgaactctgaccccaaaccgacactttcccaacttataagtcccatctgatccacctcttgaattcttccaccatcaacgcaacgtccttctttttttcctcttattttgccccctttctacatttgcaagtttctttatggatcaatattcacttgcacatcttatttggcatggtgtgttcaaagtggattacctcgtctgtttttggattattttggaagacgcataattaaataatccgtttttttataattattacaataata

SEQ ID NO: 28622 - DNA, 452 bp, Glycine max
  Clone ID: LIB3108-053-Q1-K1-F2
gaaaaaaggggaatttcaatggcgtcaagggtttctctgaaggcgaaggggaagagttcaaagggatcgaaggctgcggaagatcgatccgcgagcgagtgcctgaaggagtggacgacatgggcgatgcgaaaagcgaaggtcatcactcactacggtttcatccctttggtcatcgtcatcggtatgaactctgaccccaagcccccactttcccagcttctcagccccgtctgatccacctcttcaattcttccaccatcaacgcgacgtcgttctttttttcctcttattttgccccctttctacatttgtaagtttctttatggatcaattttcacttgcacatctcatgtggcatggtgtgttcaaagtggattagcttgtctgtttttggataattttggaagacgcagtagtaaataatcccgtttttttataattattacaat

SEQ ID NO: 28623 - DNA, 427 bp, Glycine max
  Clone ID: LIB3108-053-Q1-K1-F3
agcttcgaatcgaaactcagaagtagaaagaaacacatatcacaatcgctatggctaggtacgaccgagcaatcaccgtgttctcccctgacggccatctcttccaggtcgagtacgccctcgaagcagtccgcaagggcaacgccgccgtcggcgtccgcggcaccgacaatgttgtcctcggcgtcgagaagaaatccaccgccaaactccaagactccaggtcggtgaggaagatagtgaatctggacgaccacattgcgctggcctgcgcggggctgaaggccgacgcacgcgtgctcataaacagggcacgtgtggagtgccagagtcacaggctcaccgtggaggatcccgtcacggttgagtacataacgcggtacattgcggggctccagcagaagtacacgcagagcggcggcgtgag

SEQ ID NO: 28624 - DNA, 454 bp, Glycine max
  Clone ID: LIB3108-053-Q1-K1-F4
cccacgcgtccgaaactaagaagattttgagcacaatggcatccacacaatgcttcttgcaccaccatgccctcaccactccaaccagagcttcatcacagcgcttagttgtgagcaccaaaccaaaccacattgtttgcaaggcacaaaagcaggttgtccaagagggtgaggacactactaacattgtctctcgcaggttggccctcactgttctcattggtgctgctgctgttggctctaaggttgcacctgctgatgctgcctatggagaagctgccaatgtgtttggaaagccaaagacaaacactgacttccttccatacaatggggatggattcaaactctcaattccctcaaagtggaacccaagcaaagaggttgagtacccacgtcaggttcttagatatgaggacaattttgactcaaccagcaatgttgctgtcatggtcac

SEQ ID NO: 28625 - DNA, 439 bp, Glycine max
  Clone ID: LIB3108-053-Q1-K1-F5
caagtagttgagaactaagaaggagaagcaaatggcttcctcaatgatctcttgcccagcgtgttaccactgtcaaccgtgccggtgccggcatggttgctccattcactggcctcaagtccatggctggcttccccaccaggaagaccaacaatgacattacctccattgctagcaacggtggaagagtgcaatgcatgcaggtgtggccaccagttggcaagaagaagtttgagactctttcctacctgccagaccttgatgatgcacaattggcaaaggaagtagaataccttcttaggaagggatggattccttgcttggaattcgagttggagcacggtttcgtgtaccgtgagcacaacaggtcaccaggatactacgatggacgctactggaccatgtggaagctgcctatgtttggttgcactgatgcttc

SEQ ID NO: 28626 - DNA, 450 bp, Glycine max
  Clone ID: LIB3108-053-Q1-K1-F6
actggtgttacatggcttgacgccggaaaggtggagctagtggaaggttcatcataccgagggcatccacttccattctcaatcaccacactgatctggatcgaggttctcgtaattggctacatatagttccagaggaacgcagagctggacccagaaaagaggctgtacccaggtggcagttacttcgacccactgggcctgtcctcagatccagagtagtaagccacccttcaactgtcggagatcaagcacgcccgtctcgccatggtgggcttcttgggctatgcagtccaagctgccgtcactggcatggtcccgctcaacatctgttccacccactagagtgacccactgcacacaaccatcattgacaccttctcatcctcctcttaagaagaagcgaaagaagatgaattgtctttcttgtgcctggtcattctagatata

SEQ ID NO: 28627 - DNA, 393 bp, Glycine max
  unsure at all n locations
  Clone ID: LIB3108-053-Q1-K1-F7
agggtttggagctggtggtggagatggaataggaggaggaggatttggcggtggtggaggaggtggatttggtggaggtggtggctttggagctagtggtggttttggtggtggcggtggtgctggatttggtggcggagttggtggtggccactaggttgaatgttgatatgaatatggtatccacgagtcattatattcaaattgttttacttccatctgtttctgttaaaaagacagttaattaatggtataatattatttctgttaagttatagtggctgctacgtcttcttgttggaattaattatgcatgggaaacataactttgttacctgtaatgtctctctcactattaattgntgccaataatatagtagtatcgtctttttt

SEQ ID NO: 28628 - DNA, 452 bp, Glycine max
  Clone ID: LIB3108-053-Q1-K1-F8
gtcttatttatatataccttgtgaccgaccgcgtgtcacacaacattgccacgcggcaccgggcaagtctccagctgcaaccagtaccttcatgaacctgcttatctatgagcaccacaccataccacattgttcgcaacgcacaaaagccggttgtgcaaaagggtgaggacactactaacattgtctatggcaagtcggccctcactgatctcattggtgctgctgctcgtggctctaacgttgcacctgctgatgctgcctacagagaagctgacaatgtgtttggaaagccaaacacaaacaccgacttgcttccatacaatggggatggattcaaactctcaattccctcaaagtggaacccaagcaaagaggttgagtacccacgtcacgttcttagatatgatgacaactttgactcaaccagcaatgttgctgtcatggtcact

SEQ ID NO: 28629 - DNA, 339 bp, Glycine max
  Clone ID: LIB3108-053-Q1-K1-G1
tctctccactcgtccgaaaaaaaaaaaaaaaaaaaaaaaaattttaaaaaaaaaaaaaaaaaaagggaaaaaagaaaattaaaaataaaataaaaaaaaataaataatttaaaatataatattataaataaaataaaaaattattttatttctttattttttattattaataaataattatattttatatataattaatattaaataattgttgggtcttttttaaaatttccatttttgttaagaattatataaaattttttttttttttttttgcttatttttataattttttaatgccgattttttttttttttttttctttttaacttttttttt

SEQ ID NO: 28630 - DNA, 447 bp, Glycine max
  unsure at all n locations
  Clone ID: LIB3108-053-Q1-K1-G2
tcgcccacgcgtccggtgaagactcttacgggtaagactattaccctcgaggtggagagctgtgacaccattgacaatgtgaaggccaagattcatgacaaggaaggcatcccaccggaccagcagaggctgatttttgctggcaagcagctcgaggatggaaggaccctcgctgactacaacatccagaaggaatcaacccttcaccttgtcctccgtctccgtggggggttttaagctcgttgtgtaatgttggatgtgttcccaaaacatttgaagaactttgatgtttaatggggctgtaataatgtcccttgaaaataagttcggcttgtgttgaactcaattgtgtcccattaataatagtactctaatatcccccgnnaaaaaaaaaaagnaaagactaanatataaggacaatntttacttaaccaacaatgttgctgt

SEQ ID NO: 28631 - DNA, 425 bp, Glycine max
  Clone ID: LIB3108-053-Q1-K1-G4
gtttgtcaagtggaaatttgcctttttttcattagggcgtcctgaatatcttcaggattctgacattgtatccagtcgttttcagaggagagatgtttatggtgcttgggagcagtatcttggcttggagcatactgacaatgctcctaaaagatcatatgctgttaaccagaatcgccacactttcgagaagccagtaaagatttataattaggaaactggtattgatgagtactcgtcttgcgagggatgaatttggcatattctgctacatctatgggcatttgtaaaaacagggaaaaatagcgaaaggctactctgtataggccataattagtgagatcagcaattccaggtggtttctgcaagttagaatttatattagaattgtggtatgtaattctttctgtaacggatctcaacac

SEQ ID NO: 28632 - DNA, 421 bp, Glycine max
  Clone ID: LIB3108-053-Q1-K1-G5
cccacgcgtccggccagacccttcgccaacctctcgtgagatgtaacccttcctcagcatgagctctcaccatcaaagctgcttcctatgctgacgagctcgtcaaaaccgccaaaacagtggcctcaccggggcgtggtattttggcgatggatgagtcaaatgcaacctgcgggaagcgtttggcatctattgggttagagaacacagaagctaatcggcaggcataccgtaccctacttgtgacagtacctggtcttggtgaatacatctctggtgccattctctttgaggaaactctctaccaatccactgtcgatggaaggaagatcgtcgacgtacttgttgaccaaaacattgttcccggtatcaaggtcgacaagggtttggtgcccctagctggttcgaacgatgagtcatg

SEQ ID NO: 28633 - DNA, 125 bp, Glycine max
  Clone ID: LIB3108-053-Q1-K1-G6
ggaaatcgttcctattatcacttctcaaatctaccaccctatcgttcgagccgtgcactgcgtcacacttcatcaatggcgattcagtggcaaaaccctcatgatccaccgcccataagaaggcc

SEQ ID NO: 28634 - DNA, 245 bp, Glycine max
  Clone ID: LIB3108-053-Q1-K1-G7
caggagtatggtgcaagcagtgagtacagtgccgctacaagtgagtatggtttaaacccggcaggctcaagtagtgaagcacagagccgccaaaccacaagggaaatggaaatgagaaagatgaagaacaatcaaggtttcagtggaagttcttgatccttggccaactatttctgcctttatcttttgtataaagtctatatatccttgatttcttgccaatgtcacagttgattgctttactg

SEQ ID NO: 28635 - DNA, 438 bp, Glycine max
  Clone ID: LIB3108-053-Q1-K1-G8
gccagcatctgccatccctgatggctggatgggattggatattggtccagattctgttgaatcattcagtgaagcattggatactacccaaaccatcatatggaatggaccaatgggagtgtttgagtttgacaagtttgctgttggtacagaggctattgcaaagaagctggctgacctcagtggaaagggggtgaccacaattattggaggaggagattctgttgcagctgtggagaaagtaggagttgctagtgtcatgagccacatatctactggtggtggtgccagtttggagttattggaaggcaaagagcttccaggagtccttgctcttgatgaagccgtcccagtcgctgtgtaagacacttttcatcttggaaaattttcccatcctcaggtgtcagtgttgtcaatcttgtaaaagagcatatgttg

SEQ ID NO: 28636 - DNA, 456 bp, Glycine max
  Clone ID: LIB3108-053-Q1-K1-H1
actcactccttcagttcagttcagaccaaacttggctacatcgtttgatattttgaagtctttgtgattgagaatgtcgtacactctgtgctttgctcccatttgttccttgaaatccacaaacagacctgggacaattgccggtaattcagttacccaaaaggcttttgggatgaacgaagtgtgtcagaattctaaagttccaagctttcagtccttgaaggttaaggctacagaagataaaactacacaaagcaaaacaattaggagcattgtttgttctgattgtgatggaaatggtgcaaaatcatgtactcaatgcaaaggtactggagttaattctgtagatcacttcaatggacaatttaaagctggtggattgtgttggctatgcaggggaaaaaaggatattttgtgtggatcttgtaatggagctggctttcttggtggattcat

SEQ ID NO: 28637 - DNA, 402 bp, Glycine max
  Clone ID: LIB3108-053-Q1-K1-H2
cggcctcctggcgcctgaggcgccgctcgatttcggcaatgccgccacgggctgccgcgggaccaggggcctcgtcggggtctacgatttcgacagcaccttcatcggcgacgcctcgctcacaaagcgcccgatgggccgcgtgttgaacccgctgcgcgaaatgggcgtgcaggtgaaatcggaagacggtgaccgtctttccgttaccttgctcgggccgaagacgccgacgccgatcacctaccgcgtgccgatggcctccgcacaggtgaagtccgccgtgctgctcgccggcctcaacacgcccggcattacgacggtcatcgagcccatcatgacgcgcgatcatacggaaaagatgctgcatggcttcggcgccaaccttaccagtttgacgga

SEQ ID NO: 28638 - DNA, 360 bp, Glycine max
  Clone ID: LIB3108-053-Q1-K1-H4
ggcttaaacttactttaaattagctagatatatagcttttcttttcttttctttctgtggggtccggacttaattatgattttaattttggaataaatgaacaacatgtgaattatgaaggagacaatacttgttgttacattgtatttggacagcacgtgccacgtctagcgaaggaaaccatatattatcaaggatgggagagatagacgccacttaatttttttcatctattctcaatcgatgaaaagtgaccagtatatttctttctataaggaatcagcttggctactggatattatccactcaattgttatgtaaattgtaagaaagtgacgttaataaaggctatgttaacat

SEQ ID NO: 28639 - DNA, 385 bp, Glycine max
  Clone ID: LIB3108-053-Q1-K1-H5
acgcttcttagtaccagatcccggtggccttttccctctctttctctggaaaatgggcccgagggtctcgagaaagtgaaacgggattatgagctttcatgacatcgaggctgggcggcccttcggttcgaggcgcggcttgatgaacgggaagcaagacccgtctcaagcggaggctgccggaatattccagatcaacaccggcgtctccacctttcagagactcgtcaacaccctcggaacccccaaagacacccccgacctgcgcgaaaaactccacaggacgagacttcatattgggcaattggtgaaagatacatcagcttaacttaagcaagcccgtgacattgttcaccgtgctgtttttaatgcaagcaataagatt

SEQ ID NO: 28640 - DNA, 434 bp, Glycine max
  Clone ID: LIB3108-053-Q1-K1-H6
gatcaatatgggagtcgatttattcaacaaaagcttgaaacagctactacagaagaaaaaaacatggtttatcaggaaatcatgccacattcccttgctttgatgactgatgtctttggtaattatgtggttcaaaagttttttgagcatggacttgcatcccagagaagagaattagccaacaaacttcttggtcatgttctgacacttagccttcaaatgtatggttgccgcgtcatccagaaggccattgaagttgttgatctggatcagaagatagagatggttcaagagcttgatggtaatgtcatgcgctgtgtacgcgatcagaatggtaatcatgtcattcagaagtgtattgaatgtgtccctgaagatgctatccactttattgtctcaacattttttgatcaagttgtgaccctatcaacaca

SEQ ID NO: 28641 - DNA, 430 bp, Glycine max
  Clone ID: LIB3108-053-Q1-K1-H7
ctagtttatcgtgaggagaatatgaagttgtttgttttctttgttgctgcagtagttttggtagcatggccatgccatggcgcaggctaccaaaggttccctctccgaatgaaaactggctatggtgagcgttcttcggaggtaaaatgcgcaagttttaggcttgctgtggaagcacacaacatccgagcctttaaaaccattcctgaagagtgcgttgaaccaacaaaggactacattaatggcgaacaatttagatcagactctaaaacagttaaccaacaagctttcttttatgctagtgaacgcgaagtccatcacaacgacatatttatattcggcatagataacaccgtactctctaatatcccatactatgaaaaacatggatatggggtggaggaatttaatgaaaccttatatgatgaat

SEQ ID NO: 28642 - DNA, 436 bp, Glycine max
  Clone ID: LIB3108-053-Q1-K1-H8
cccacgcgtccgggatgatgcccaattggcaaaggaagtcgaataccttctaaggaaaggatggattccttgcttggaattcgagctggagcacggtttcgtgtaccgtgagcacaacaggtcacctggatactatgatggacgctactggaccatgtggaagctgcctatgtttggctgcactgatgcttctcaggtgttgaaggagcttcaagaggctaagactgcataccccaatggcttcatccgcatcattggatttgacaacgttcgccaagtgcagtgcatcagcttcatcgcctacaagcccccaggcttctaagtcattgaaaaatttgcaaagcatctgtagccaccccactttgtttggtgtacttaaactacattcccatttggttttgctttatgagatttcatcatcccggatttttgggtt

SEQ ID NO: 28643 - DNA, 257 bp, Glycine max
  Clone ID: LIB3108-054-Q1-K1-A1
cccacgcgtccgcaaggaactcactggcaagctcttccaggatatcagcaatctggatcatgcagcaaaaattaagagcagcccagaagcagagaagtactatgctgctactgtatcttctctgaacgatgtccttgccaaacttggttaatgtgattaatttcttgctttcttgtgtaagctttgtgcatcattttctcagacactttgttgactgatattttaagaaaatcaaatgatgagggaaaattttctat

SEQ ID NO: 28644 - DNA, 347 bp, Glycine max
  Clone ID: LIB3108-054-Q1-K1-A11
ttgagcccactcgtccgagaaatttcaaccacctctctctcccaaaatctcagagtgtgctgcttcagtgtctgcaggtatcaaagatggcaacattgactgcttcaagtaacttagtctctagaaattctcatgtccatcatggaccaacaactgcttcatatgagtctaaagcagtagcaatgggacttagatctctaaagcagacaaatactcatagtggacttagaatttttaacccggtggatgagctacttaacagaaccccaattaaaaccaatgcaatgcaagctatgaggaagggacctcaaggcaagaatgcctggcctaaaggtataatcacatgt

SEQ ID NO: 28645 - DNA, 131 bp, Glycine max
  Clone ID: LIB3108-054-Q1-K1-A12
cactcccagtgagaagggtggccaactctatgatgcaggccttggagaagcattgggaacctggtttaactaagttgtaaggcttaaatgtctttaggggtgattttttatgttgttgaaagcttgtaaaa

SEQ ID NO: 28646 - DNA, 305 bp, Glycine max
  Clone ID: LIB3108-054-Q1-K1-A2
gagttattgacctagatgtgttcctgcgattaacttgttacacggatctgtgttgtggaaggcttatatgtaaaatcgtagacaagaatcatataagttctatagctgctagctgtatcttttatgaacgatgtccttgccaaacttggttaatgtgattaatttcttgctttcttgtgtaagctttgtgcattattttctcagacactttgttgactgatattttaagaaaatcaaatgatgagggaaaattttttataaaaaaattaaataatatattaaaatgtttattttattataaataa

SEQ ID NO: 28647 - DNA, 335 bp, Glycine max
  Clone ID: LIB3108-054-Q1-K1-A3
aaaacacatacaaaaagaacataactgaaaaactcttacaaaatatcaaagagtatgggatcatgcaaaaaagattaagagcatcccagaaccagacaactactatgctgctactgcatcttatctgaactatgtccttgccaaacttgattaatgtgattaatttcttgctttcttgtgtaatgctataaccattattttctcaaacactttggtgactgatatcttaagactatcaaatgatgacggaaaatcttttatgacataaccgatagcccttcccaacattttcccaaccttattgtcaaatattacgctccctgtacttgttcatt

SEQ ID NO: 28648 - DNA, 386 bp, Glycine max
  Clone ID: LIB3108-054-Q1-K1-A6
ggtgccgccacgtgtcccatcgttttcggcgatagttgccttccttctggggtaacaacagtcaccgatcactcccctcccgcacccaaaaataaaaaaaaaactaaccaatttttctctccgtataaataacaccaaatcaaaaatcaaaaccatcgtgagggattctcttttcaaccaccgtcatcagcgatcggattcggattcggactccgtctcgggaaaattcgagaagatttttcgaatttttcaccactgctttgtgcgcagcgatcggtttcggattcgggctccgattttcgcctctcgcgaagagcttgggttcatttgcactaatggaggggaaggaggtttgcgcgtcggagtcggcggttgatggaagccgc

SEQ ID NO: 28649 - DNA, 383 bp, Glycine max
  Clone ID: LIB3108-054-Q1-K1-A7
ggcctccactctctctatatcctcttcatccacccttgttgatgccaaggctccaactccaagacaatgcgtcacccttcccactcttccccctccaccttttcactctcagactcgtccttggaagaccactgctttctgtcgtaggcttgctcgcaattttatggcaatggccaccacaagagaggcagccgcagcagaagttgccgccacaactgacctctctattgccgagacgccagagattgtgaagactattcaagaagcttgggacaaagttgaagataaatatgcagtgagttcactggccgttgctggtgtggttgcattggtgggctcagctgggatgatctcagcaatggataggcttcctttaaattcct

SEQ ID NO: 28650 - DNA, 389 bp, Glycine max
  Clone ID: LIB3108-054-Q1-K1-A8
ggttttagaagctcagctaagcacaatagagagtttaattcggctatagggatatcatataggtatgactaagtctcacgtgcttatgctgctgatcatcatggttgtctcaattgcagagaaaccatcagttatagaaggaaggacactttccttaatatctggtcaagggtactcaaagatttttgcaacgcttggagttgtatgcaagtgttgtgatggggttggaggcgcctgcactagtaaatggacagaatcttgcaataacctacaatgttttccttggaaatcacactagttaattattttctgtatctttccttgtcttccatcagctgtatattgagttttgaaattataatatatagtataattatgtagttggtgtt

SEQ ID NO: 28651 - DNA, 330 bp, Glycine max
  unsure at all n locations
  Clone ID: LIB3108-054-Q1-K1-A9
cttcttctccaaaatctcagagtgtgctgcttcggtgtctgcangtatcaaagatggcaacattgactgcttcaagttacttagtctctagaaattctcaagtccatcatgggccaacaactgcttcatatgagtctaaagcattagcaatgggacttagatctctaaagcagacaaatactcatagtggactgagaattgttaacccggtggatgagctacttaacagaaccccaattaaaaccaatgcaatgcaagctatgaggaagggacctcaaggcaagaatgcctggcctaaaggtataatcacaattttgcatgactttcata

SEQ ID NO: 28652 - DNA, 398 bp, Glycine max
  Clone ID: LIB3108-054-Q1-K1-B1
cccacgcgtccggagatagagagatagaggagaagatgaacggtggtgagtcttacggtgctattgagacacaatacataaggaggcatcacaaacatgaaccaagggaaaaccagtgcacctctgcacttgttaaacacataagagctcctgttcaccttgtgtggtcactggtgagaagatttgatcaacctcagaaatataaaccatttgttagcaggtgtatcatgcaaggggatcttggcatcggaagtgttcgagaagtgaatgttaaatctggccttcctgccacaacaagtactgagaggttggaacaactggatgatgaggaacacattctcggcatcaggattgttggaggtgaccataggctgaggaactattcttccataatcacc

SEQ ID NO: 28653 - DNA, 235 bp, Glycine max
  unsure at all n locations
  Clone ID: LIB3108-054-Q1-K1-B11
ggcgggaaagacaaaggcgtcancggccaggagcnagaagaagcaggaaggcccccaaacgggacgacgggcgcttcagaagcattgtttgattttatagcagcagctctggcaaagtttgttggttcagaacctgaaggctttcatcctccccctggcagacaaatgtaactgggttttacattctcattcccagtgaggcaaacatcgattgcatctgggactctaataaagt

SEQ ID NO: 28654 - DNA, 397 bp, Glycine max
  unsure at all n locations
  Clone ID: LIB3108-054-Q1-K1-B2
ggctcgcatacacaggctgaatgatggacgagactatctactatggtcaatcggactgtgctatggcaacacggcccatatcactgcatgagagacattaacgcagtangacaacgacatgcacctgtggacttggtaaacacatataagctggtggtcaccttgggtggtcactggtgagacgatttgatcaacctcagaaatataaaccatttgttagcaggtgtatcatgcacggggatcttggcatcggaagtgttcgagaagtgaatgttaaatctggccttcctgccacaacaagtactgagaggttggaacaactggatgatgaggaacacattctcggcatcaggattgttggaggtgaccataggctgaggaactattcttccataat

SEQ ID NO: 28655 - DNA, 397 bp, Glycine max
  Clone ID: LIB3108-054-Q1-K1-B3
cccacgcgtccggagatagagagatagaggagaagatgaacggtggtgaggcttacggtgctcttgagacacaatacataaggaggcatcacaaacatgaaccaagggaaaaccagtgcacctctgcacttgttaaacacataagagctcctgttcaccttgtgtggtcactggtgagaagatttgatcaacctcagaaatataaaccatttgttagcaggtgtatcatgcacggggatcttggcatcggaagtgttccagaagtgaatgttaaatctggccttcctgccacaacaagtactgagaggttggaacaactggatgatgaggaacacattctcggcatcaggattgttggatgtgaccataggctgaggaactattcttgcataatcac

SEQ ID NO: 28656 - DNA, 389 bp, Glycine max
  Clone ID: LIB3108-054-Q1-K1-B4
ctcttgtcaaagctgccgtcgccggtcgtcgccgacactgttgcttcactctgtgcctcttcgtgcgaagtactaggatcagatggctttgcgaggggtttggcaacttaacaagctgattgtcagttattgcaactggggcggaagtagcagaggtataagggcatttatggagtctcatttgccagcatttaaggagaagaatcctcaattagaggtggttactgaactcatccgtggtcagcatccacatctgaagggttattacaagaacaagaatcagcgagtgatatgtgtgaagaatatggatccagaagacatacttttgcatgcaaccaggctaagaaatgcattgggaaggaaggtagtgaaattgaggacaagacatg

SEQ ID NO: 28657 - DNA, 395 bp, Glycine max
  Clone ID: LIB3108-054-Q1-K1-B5
cccacgcgtccgactcaaactccacacatcaatggcttccattccacgcgcagtcttcacccattcctcttcatccattcctttctgcgcctacgcggtccccaatgccagcaggcgccgaaacggcaccaacaacagtcgttccactcacaaaatccctcctttgcgtaaggggaaccttcccaatgaacagaaattgcagctcgaccatcaaaaccaaaacgccccattacccttgaatgtggacttggtgtccctgtgtgaagagggtaaccttgatcaagtattggaactcatgggtcaaggtgctgttgctgattatcgcgtttatctcgcgctcttgaatttgtgtgagcatacaaggtcgcttgaatcgggcaaaagggtccatgaat

SEQ ID NO: 28658 - DNA, 213 bp, Glycine max
  Clone ID: LIB3108-054-Q1-K1-B8
gattgaccaatttgtgctacgttcatcatgcatcaaatgttatgggtacgcctatttgaggtgcacttgggactactatagcgatggatctgtgtgcactactatgactacattaattgactgtttgggatctcatttagatgatgcctttattattgatgtgatgatctatgcaatgtaaacataagtgcctttgcttgcctctaatataaa

SEQ ID NO: 28659 - DNA, 383 bp, Glycine max
  unsure at all n locations
  Clone ID: LIB3108-054-Q1-K1-B9
tgagntcaatcactctacctgttgcaaatttctactatttttcaatggcttctgcagatgttgaggtccgttgctttgttgttgggcttgcttgggtcaccggcaacgatgccctcgagaaagccttttcaatctacggcgacatcgttgaatcgaaggttatcaacgaccgtgagactggaaggtccagaggattcggatttgtgaccttcgcctcagagcagtcaatgaaagatgcgatcgcaggaatgaacggccaggaccttgacggccgtaacatcactgtcaacgaagctcagacccgcgccagccgtggtggtggtggaggcggtggtttcggaagtggtggtttatacaaccgcggtagcnttggatatggtggt

SEQ ID NO: 28660 - DNA, 299 bp, Glycine max
  unsure at all n locations
  Clone ID: LIB3108-054-Q1-K1-C10
caaaccaannaagaagccaccagcgaacaagccaccagagnacaagccaccagcgaacaaaccaccgngaaataagccaaaaccaccggnagacaagccgaaaccaccggnnnacaagccaccagagaagaagccaccagacaagaaaccaccggagggaaaggacccnccagnagaggacaacacccaaagccaaagcaagcaangaggncgaaaancgacgcaagaaagaagaggaaccgcatggaagagacgagcatagtgatttacaacttcgtagcnttgcatattcttgactc

SEQ ID NO: 28661 - DNA, 368 bp, Glycine max
  Clone ID: LIB3108-054-Q1-K1-C11
tgcaaaaatggcatcattcaccatgacagcttccatccttggcagcccagccgtcaccaaccggtcggcagtagcaacgcagaggagatcactcgtagtgaatgctgccaaagctgttgaagcagaaaaggtcagttatgacaatgacatggatggtagcaatggaaggaggaacttgatgttcgccgcggcggcggctgctgtttgctctgttgctgggatggcagtggcagatgagcctaaaccaggaaccccagaagccaagaaaaagtatgctccgatttgtgtcaccatgccaactgctaggatttgtcgcaattgagggactttggtttttattttacttctgatgattggaaatgtacaat

SEQ ID NO: 28662 - DNA, 394 bp, Glycine max
  Clone ID: LIB3108-054-Q1-K1-C2
gaattttctgaagaaaatggacatgtaggagaggacatttcaaaggtagagcttgcagtgaatcaggaggaactcaaacaaaacagcatacaggaagatagcattctatccaacgacaaggctgaaaaaaattgaatctcccaaatatgaggaagtgagtgaaaaactggaggaaaatgagagcaaagaaaaggaggggagcaaagcaaaggatgattcagtagaagttgagtataaaatgtgggagagctgcaagatagagaaaaaggagttctcgccggagagagaagcagagcctgaatcatttgaagaggaagttaactcaaagatagaagaaggtggtgagagctttgataagataaatggaaatgctgtaacagagaacattgatgag

SEQ ID NO: 28663 - DNA, 395 bp, Glycine max
  Clone ID: LIB3108-054-Q1-K1-C3
cccacgcgtccgacaagatcttcccaatgcaatgaatgctgctgaaatgagctgacaagctgggactccactctctcagacagcgccactggtacatccagagcacctgtgcaacctctggggagggtctctatgagggtttggactggctttccaacaacatagccaataaggcttgatgctttttgggtgtcttgtggatgcaggggtgaatattatctggttttgttttttggttctcttctgagacacattggctttatgttcatgttttctggtttaggacatcttgatggctaaaattatagcaagaatttgtttcatgggatgtctaatacttttgagtctttgtattgagctaggattcaacggttataactgcaattgataccaat

SEQ ID NO: 28664 - DNA, 391 bp, Glycine max
  Clone ID: LIB3108-054-Q1-K1-C4
cttctctactagctgcacttgactactatgttggcttgcatagtgacatggttatctctgcttccccaggaaacatgcacaatgcattggttggacaccggacatacttgaacttaaagactataaggccaaatatggcattgatgggtcagcttttcctgaataaaaccatagagtggtcagagtttcaggatgcagtggttgaaggtcaccaaaatagacaaggcgaaccaaggctgaggaagccaaaacaatcaatatatacatatccagctcctgattgcatgtgccaagcttagtgcctagtagtatacttaaataataattgttaacaatgtacccggggaatttataagtcggtggcttaatatttaaccttatatatatctag

SEQ ID NO: 28665 - DNA, 389 bp, Glycine max
  unsure at all n locations
  Clone ID: LIB3108-054-Q1-K1-C5
ttgacgcgtactttctcgctctgcatcatgtgttccaaaggcaggtatgggagagtctaatggtaaggcctacgagcgtggccatgctgctactgatttatgtaccgtactgaatggttagctagatgcagtggacattcagagcttgcacggcatagtatcgttgagttgcaatgtttctgcacaaactctttccgttgcacaacgtggtttctgttgctggagaggcctttgtgcatacctgcttgcggagcagcctatctatagggaaatcgtggatagttacaggtgtctctggtctacctgcgtttaattatgcgtctctggcttgngtgctagtcatttccagtattgatgtttagaaagagccagatgttctgggagatgat

SEQ ID NO: 28666 - DNA, 162 bp, Glycine max
  Clone ID: LIB3108-054-Q1-K1-C6
cccactcgtactcccattcgatacatcacccatcccatattccgggatggtacattcatcaatctacattctccaatcttacctactccatcatcccacataatatctttttcaaatcatcaatctaaattcaatttactttcataccttgaacatcatcaa

SEQ ID NO: 28667 - DNA, 348 bp, Glycine max
  Clone ID: LIB3108-054-Q1-K1-C8
cagggacggaggagaaggaggttaaacttcagaagggaatcgcggagtggtacgacgagtcttgtggcttatgggagaacatttggggcgaccacatgcaccttggcttttatgacccggattccactgtttcgctttcggatcatcgtcttgctcagatccgaatgatccaagagtctcttcgctttgcctctgtttctgaggagcgtagtatatggcccaagagtatagttgatgttgggtgtcgcataggttgtagtttcagatacctggctacttaatttggagcataccagcttatgctttactttgattactgttgatgctcatatagcttatgctcttgct

SEQ ID NO: 28668 - DNA, 383 bp, Glycine max
  Clone ID: LIB3108-054-Q1-K1-D1
gcttcaacgggccttaccttacctgaagatggcttcggtgtcctttgccgtgggattattaccttgctcttcttcttcttgctatacccgcgtctcttatggttcagttcgatttcccgtattgaacaacgccaactcactgaaactcagctcctcagctaacatcttcagtccaattcttcaccaaaagctttgcactggtccttcttcccttgctctaaggcctcgccctctcaccattgtatccgctaagggctacaaaatgaaaacccacaaggcatctgcaaagcggtttagggtgacggggcgaggcaagatagtgcgtaggagagctggcaagcagcatttgctcgttaagaagaataccaagcgcaaatcccgac

SEQ ID NO: 28669 - DNA, 351 bp, Glycine max
  unsure at all n locations
  Clone ID: LIB3108-054-Q1-K1-D11
cccacgcgnccgaaagcannggacaaaaaaggtagcgcnacacaaggccaaacaggagngacagccaccgcncagcagaggaagaagccaccanagaggcaaagaccagagagnaccnagangggggcgcaccacaacgccacacaaagccgcaacgaagggacgagncagcgcaanacgncgangccgncaccaaggcccagcacgcnacaggaacgagaccagaaggaacacaaggccaacnccgccagaacgaaccccaagagaagaacagggcgaacaagggaagncaagnaccggaagaacggaggaaacagagnaagaccagcagcgcaacagcgnggacaaaca

SEQ ID NO: 28670 - DNA, 215 bp, Glycine max
  unsure at all n locations
  Clone ID: LIB3108-054-Q1-K1-D12
gctaaagctggaagggagggactcaggcttgcagactggngaccctgctggcttcacccttgctgacaccttggcctgtggatctgttggccacatcattggggttggggttgttcttggtctcaagaacattggtgccctgtaaaaagcaactatataagtttagtgcttgatgcatctgtaatcaatgttattatgtacttcattttcacatc

SEQ ID NO: 28671 - DNA, 393 bp, Glycine max
  Clone ID: LIB3108-054-Q1-K1-D2
ctctctttaccttcttaacgcaccaagcgaagcgaaaagcgctttctaacttaagggatggcgaacgcagctgaagtttcagccttgaaccgcatcaaactgcatcttttgggtgaactctctccactggccactcccctaaactattttgatgaatcaaaccctagcccctctgaatcttccaattcccaatcttcttctgtttctcttaaccactacttcactgacctcttcgaattcgactccaaaccccaaataatcgacctccaaactcccaaaacactaacttcagctcagaagaaacctcaattgaatcggaaaccgtcagctgctaatctgttacaaagaagaccgagtggatccagttcgggagcccggatccgaacccggtga

SEQ ID NO: 28672 - DNA, 392 bp, Glycine max
  Clone ID: LIB3108-054-Q1-K1-D5
cccacgcgtccgcccacgcgtccgcccacgcgtccgcccacgcgtccgcgttctcagaaggttttggtcagtgaagtcttctccttcaacaacaacaaggggttgcagttaaaatggatgaagctgaatttcaacgccttctccaactcttccccgttgttcgttctcgcgattacactgcagaagcatcatcatccaaacaaattgcatctgggtcagcacagaatgaggtaaaggaatggcaagatgcatgggatgaaagggataaggattttgagaagcaaggaattaatcaacaagattcattttggagcaagctaaagtcggaggctgctaggaaggtgggtgcagaagaagcggagagattttgcaaggcgttccaacaaatccat

SEQ ID NO: 28673 - DNA, 282 bp, Glycine max
  Clone ID: LIB3108-054-Q1-K1-D6
accacacatacaacacacacatatataaacacaaaaaaaaaacacacaaaaagggttctattaaaataataataaaaaaaatatcgtcctttatcaacaacccaatcttacttcctcttactttctactctttatttcatctctttctccaactatttccaattcatcgtccttcttattacactttctatactttataatccattcctattccaactttattttccataattactttcctttatctctagtttcttattattcaaataatccctatctttt

SEQ ID NO: 28674 - DNA, 267 bp, Glycine max
  Clone ID: LIB3108-054-Q1-K1-D8
cagggacggaggagaaggagggtaaacttcataagggtatcgcggattgggactatgagtcttgtggcttatgggagaacattttgggcgaccacattcaccatggcttttattacctggattctacatgttttgttttctgatcatcgtcttgcttatgatccgtatattgttagcattttttaatcttttctttatcttttttgttcttatttatttgcctattataattctttatgttttttttattattatactttttttttt

SEQ ID NO: 28675 - DNA, 350 bp, Glycine max
  Clone ID: LIB3108-054-Q1-K1-D9
gaaaaacaagcagttgagaactaagaagaaggaaatggcttcctcaatgatctcctccccagctgttaccaccgtcaaccgtgccggtgccggcatggatgctccattcaccggcctcaaatccatggctggcttccccacgaggaagaccaacaatgacattacctccattgctagcaacggtggaagagtacaatgcatgcaggtgtggccaccaattggcaagaagaagttcgagactctttcctacttgccagacctcgatgatgcccaattggcaaaggaagtcgaataccttctaaggaaaggatggattccttgcttggaattcgagttggagcacggtttcg

SEQ ID NO: 28676 - DNA, 390 bp, Glycine max
  Clone ID: LIB3108-054-Q1-K1-E1
cccacgcgtccggcaggtttattgcacaacgttgtgttcgacgaggacgagattcctagcggcgtggatgcagggaaaatctccatgagcgaagaagaccttctcaatgcggctggtgagacttacagcgttactttggatgccaagggaacctacagtttctactgttcgccttaccaaggagctggtatggtgggaaaagtcaccgttaatgaattatatattgtctcctacgtctaagttctcatatgctaggtttcctagaagagcctaattcatctttcttgctagggcctatgggatgaatcaacaatataatgcctttgtgtaattcatttacctgctttgctttcttgtgttatatcggactggacatttattcttatcata

SEQ ID NO: 28677 - DNA, 326 bp, Glycine max
  Clone ID: LIB3108-054-Q1-K1-E10
cgttgaggacggtggagtggcggcagaacatgatgttccccgttcggagggtttggtttgtcgttgcggagcgcctcggcattcgcaaaactgggttactgaagctaagtaatgatgagagggcatgcgaatatgaggacattcaagtgatgtgggagatactaaacagaaacgaatcatagtttggtcgttcttctagcactaggaaaggcaacaacaagaaggggcattgctggaaattattgatgtgggcaaggtgtgctccatgcatgtgtccgacatgatcatgattgctgagtacgtgagaagaaaaaaatccaacctat

SEQ ID NO: 28678 - DNA, 392 bp, Glycine max
  Clone ID: LIB3108-054-Q1-K1-E2
gtgagggccttccatggcttccgcttgtgcttcctctgcaattacagctgttgccatctctacgccgagttccgggcagaagaatggatcaggaggttgttttcttagtggaaggaaattgagggtgaaaaaggagagagcagcaattggaggacgatcgatgggcactacagtgtgcgcagttgctgagcctgacagacctctatggttcccaggcagcacccctcctccatggcttgatggcactctacctggagacttcggctttgaccctcttggtcttggatctgacccggagagtctgagatggaatgttcaggcagagctagtgcactgcagatgggcaatgttgggtgctgctggcattttcattccagaattcctaacaaaga

SEQ ID NO: 28679 - DNA, 393 bp, Glycine max
  Clone ID: LIB3108-054-Q1-K1-E3
cccacgcgttcgcatgcatagacatggccaccgctacttatgcaccactgtctatatccttactcactggcctcaacgcaagcagcaggccaagagagtgccgccgtagttaaaaggctcagcgtccccaagccacagggatctgcggcatcaaagctctactcaaagacgctggagtctgtgctgtggccactgctgacagcgcagtactagctagcaacgccatggccattgaagtgttactgggcactgatgacggatatctgggcttctctcccaactctctctccgcggaccctgaggaaaagatcgtgttcaagaacaacgcacgattgcaccacaacattgcgttcgacgaggacgatattcctagcggcgtggatgcacggaaaa

SEQ ID NO: 28680 - DNA, 386 bp, Glycine max
  Clone ID: LIB3108-054-Q1-K1-E4
cgtagccgcaattgctcttccttcgcgaagaagaggttacagcatctgacaccagcgccagttaccgtgttccacgcgctttcttccttctcgaaacgccgtcgtttggctaccacacatatatttagcatcactgcttcgaaccttctttttctcaccgacgcagtttccggttttaaggaagcatggtaaaggtacaggtgagtgacatggaagaattctgtcaaatggagaacaacgatttcagtgattcgcagttagttcatcacttcaaaggtgtgcttgttgcatcgacaacggtagatcgagagaattacaatgagctcgttggttatttgcacccgaataagcattttactcctgatgtggttgctatacttgtgaca

SEQ ID NO: 28681 - DNA, 69 bp, Glycine max
  Clone ID: LIB3108-054-Q1-K1-E5
accactcttacaaccatttcttttctgacaaaaacacaattaacgttaagtcctatcttaatgaatcat

SEQ ID NO: 28682 - DNA, 336 bp, Glycine max
  Clone ID: LIB3108-054-Q1-K1-E6
cccacgcgtacgatcatgtctgtactgagagaaaaacccttcgcgttgtgtcctttttctttcccgcagaaacccaaaacctgcttggtaaaactaccattcctgttttggaaaccattggattaatggtatatttttctatttttatttaaattatattttttatattttttatcattttttttatctagtttaattttttatttattcataattattatttttattttttctttttttttatattattttttaatattttatttttttcttattattttttttattttatttttatattttttttttttattctttttttttttttttttcttt

SEQ ID NO: 28683 - DNA, 148 bp, Glycine max
  Clone ID: LIB3108-054-Q1-K1-E7
tcccacgcatacgaacatcacttaactgtcacaaaaaccctacgcattgtggcctttttcattcactcataaacatacatctgccattcttaaactactaatctactttatacaacatattttactaatacttttacttatatcttta

SEQ ID NO: 28684 - DNA, 344 bp, Glycine max
  Clone ID: LIB3108-054-Q1-K1-E9
gaaaatggcggtgcgtgtactctcgaagaagatcgcgaagcagagggtgaagaagttcaagaggcctcagagtgacaggaaaattgctgtcaagacaaactggcgcagaccaaagggtatcgatttccgtgttaggagaaagttcatgggatgcactttgatgccaaacattggttatggttcagacatgaagacccggcactatctccctaatggatttaagaaatttgttgttcacactgtgaaggacttggaactgctcatgatgcacaacaggacttactgtgctgagattgcccacattatatgcatatgaaagaggaaagatttagttgatagagcct

SEQ ID NO: 28685 - DNA, 369 bp, Glycine max
  Clone ID: LIB3108-054-Q1-K1-F1
gtatttgtgtagtaaattaaaggcacttggatgtaccaaacttcatgctttttgtaggagtgcgtaggttttaaaaattttctgatgtatctttcatgtgtttgttggttttgtaacagaatatttcctatattatacatatatttgagtcactagtaaaaaaaaaaaaaaaaaaaaaaaaaaaaaaaaaaaaaaaaaaaaaaaaaaaaaaaaaaaaaaaaaaaaaaaaaaaaaaaacaaaaaaaaaaaaaaaaaaaaaaacaaaaaaaaaaaaaaaaaataacaaaaaaacataacatctaacttaaataaggggcgctctttttaagggccccattttttggacacgtttgtttaaactataaattt

SEQ ID NO: 28686 - DNA, 107 bp, Glycine max
  unsure at all n locations
  Clone ID: LIB3108-054-Q1-K1-F10
agaanaggaaccaaaggcncaggggcagacaccaacaccggccacggcagcaacagcacacaccccgagagcccgaaagagcaagagcccccaccagacagggaaaa

SEQ ID NO: 28687 - DNA, 157 bp, Glycine max
  Clone ID: LIB3108-054-Q1-K1-F2
cccacgcgttagtaaattaaaggcacttggatgtaccaaacttcatgctggtcggaggagtgcgtaggttttaaaaattttctgatgtatctttcatgtgtttgttggttttgtaacagaatatttcctatattatacatatatttgagtcactagt

SEQ ID NO: 28688 - DNA, 392 bp, Glycine max
  Clone ID: LIB3108-054-Q1-K1-F3
gttctccactcgtccctgcttctgcttctgctcattcttctccttccacagggatggcttatgttccacatggaaatgcaaattgcaactctttattccaaaaatttgcaaattcccatgtgggtatttctgctttgcccttcctgcaaccgggactaaaatcttgtacagttttcaacagaggaacactcattcccctgtgcttaaatggaaagaggagctttgctttatcagaaaagggatttaattgcaagttttcaaagagagagagattctctatccctagaagtagtagttcttctaactctagtggaagtacggatgaaacctctaaggagacaaatgtaaagacaccatttggatatacaaggaaagatgtcctattaattgga

SEQ ID NO: 28689 - DNA, 394 bp, Glycine max
  Clone ID: LIB3108-054-Q1-K1-F4
gttctccactcgtccctgcttctgcttctgctcattcttctccttccacgagggagtgcttatgttccacatggaaatgcaaattgcaactctttattccaaaaatttgcaaattcccatgtgggtatttctgctttgcccttcctgcaaccgggactaaaatcttgtacagttttcaacagaggaacactcattcccctgtgcttaaatggaaagaggagctttgctttatcagaaaagggatttaattgcaagttttcaaagagagagagattctctatccctagaagtagtagttcttctaactctagtggaagtacggatgaaacctctaaggagacaaatgtaaagacaccatttggatatacaaggaaagatgtcctattaattggac

SEQ ID NO: 28690 - DNA, 388 bp, Glycine max
  Clone ID: LIB3108-054-Q1-K1-F5
cccacgcgtccgctcaaaaggccaaggtagctgatgtttctaaatttggaagagcggccaagatgaggagttcatcctggtgggtcaagtttttcctccagattaacttagaggagaatgaagctgctgttaagaagtttgaacaggcttcaaccaagagttcatatgttccaaaatgccagatattccacttgaagtcactccattgactcgtgggatggttcagcattggagctctgattgctgcttctccgttttcatttaaaacactttcttctctataaaggcaatttaattctttgaaatatactcgccatagatggtgtatcgcttttgttgatagatttttattctttgaattccagcccctggctgtaaaagacaaatc

SEQ ID NO: 28691 - DNA, 147 bp, Glycine max
  Clone ID: LIB3108-054-Q1-K1-F6
ctcatacttgcgactatatgatttaattactaaaatcatctatggcttgggaatattttatcatccatatttcattctatcacatcaacatcgatctacagatcaacttatatgcaaaagcagttcttatctatatttcttaacatt

SEQ ID NO: 28692 - DNA, 339 bp, Glycine max
  Clone ID: LIB3108-054-Q1-K1-F7
ctcatacgtgcgactgtatgatctcatttctataatcatccatggctagggaagaaaatggcatccatctctgctgctatcacaaccacatcgatctacagtgcaactcatatgcaaaagctgttctcatctaccgttcttgacatgccagcactgggttaggatataagagtgagttgctccatggacgaagtaccttattctgtgaaggaaagcatctatatcatgttggagatgagagcatctctgatggcatctgtcaatgctgcagccatgtcaggcccagccatggccttggtagatgagagactgagcactgaatgaaccggacttcacttt

SEQ ID NO: 28693 - DNA, 205 bp, Glycine max
  Clone ID: LIB3108-054-Q1-K1-F8
aattccctggtctacccactcttccttccatactatctaccaaatcttttatccactaacatcattactaccttcgtcatcttttaacatccaaaactacttctaatccaactaattttatccaaactcaaactcttttatcacacatccatctaatttaccattctcatcttcaatttacatatacttaaacttacaccttcac

SEQ ID NO: 28694 - DNA, 390 bp, Glycine max
  Clone ID: LIB3108-054-Q1-K1-G1
atttttcctctccctaatggcttctcaagttcttcttcagcaggcactgtttgcccccaagctaagtttcccttcttcttctcgtaacgtggcgttaatttctagggttccttccaccccaatttcatggcgttgcactcccctcattgctaagcctagtttcgtagtgagagctgacaccaacctcgatggcggtggtgaagccaccgaggatgttccttcggataatgctgaaaaagtttcggaaggcgaagcagaacaagtttcggattctgaagctccgaaatcgcctagaaaaccccgagtcaaactcggagacattatggggatattgaatcagagggcaattgaggcatccgagaagcaaagaccaactccagacattaggac

SEQ ID NO: 28695 - DNA, 80 bp, Glycine max
  Clone ID: LIB3108-054-Q1-K1-G11
ttatcgtcgtcgttcacgctattatcgttatgctcatattattatcatcacgttaaaaaaaaaaaaaaaacaacgcaacc

SEQ ID NO: 28696 - DNA, 385 bp, Glycine max
  Clone ID: LIB3108-054-Q1-K1-G3
atttttcctatacctaatggcttttcaagtccttattcagcacgcactggttgggcccaagctacatttgccttattcttctcataacgtggcgctaatttctaggtgctccttccaccccaatttcatggcgttgcactcctctcattgctaagcctagtttcgtagtgagagctgacaccaacctcaatggccgtggtgaaaccaccgaggatgttccttcggataatgctgaaaaagcttcggaaggcgaaacagaacaagtttcggatactgaagctccgaaatcgcctataaaaccccgagtcaaactcggagacattatggggatattgaatcataggtcaattgatgcatccgagaagcaaataccaactccagacat

SEQ ID NO: 28697 - DNA, 273 bp, Glycine max
  Clone ID: LIB3108-054-Q1-K1-G4
caatcaggcagttgacagctacgatggaggcgctgacggcttcctcaacgatcgatgtctctgccgcttgctctggcgcccgtgcttgttgctcactggatgcatgcttcactggcctttcagccatgaactgcttgaatactaacaaggcacgacgggtcatcgccgctgttgctcgtaactgtgcaagcttgcagagcgtaccagctctgccagcaaatgtcaaggctgatagagtgactacttcctagcctgcagcacgtagcatacgaa

SEQ ID NO: 28698 - DNA, 377 bp, Glycine max
  Clone ID: LIB3108-054-Q1-K1-G6
cccacgcgtccgcccacgcgtccggcccagccctaaccatttccaaggtccttttgtcaatttgctcattgttgacggatcccaaccctgatgatccactcgtaccagagattgcacacatgtacaagactgacagggccaagtatgaggctacggcccgcagctggacccagaagtatgccatgggatgaccatatagagctgtttttcaatgaagcagcaaaatcataatttatgtaaaagaacaaaagatattttgaatgaatttgaatgctttattttatattagtggaactccacagtggtaagaagagacctggtttgccaatttgtgaatattttctttgctatacactggtgatggaagaaaaaaaata

SEQ ID NO: 28699 - DNA, 279 bp, Glycine max
  Clone ID: LIB3108-054-Q1-K1-G7
gctattgtcactggcaagggccctattcagaacctttacgaccacgttggtgatcctgttgccaacaatgcttgggcttatgccactaactttgtccctggacaatgaggatgcctacatgcaatgcaatcttctgctcccttttgcagttcccttgtgtttaactccattttcactaatgtaactacacctgtgtagcagaaaaatctgtatgagaaccattatatttttatatattagaaatttgggtccccagaaaaaaaataaaaatacataatt

SEQ ID NO: 28700 - DNA, 392 bp, Glycine max
  Clone ID: LIB3108-054-Q1-K1-G8
ggatggtggtagtcatggggattctggaagtgatcgatattatggtgagcgttcaggaccatatgagcgggagcgacggggatcgggaggctttcgttgatataatatagtctttcaatgagatatgaaattgaagaggtcgctgttaatgtttcaactttccttttcatttgcacttgacaatgctctttggacttctgggattgttgtttggatggatcattgataccagtattttgatatgcaatactcaacacattatgcaaaaaaaaaaaaaaaaaaaaaaaaaaaaaaaataaaaaaaaaaaaaaaaaaaaaaaaaaaaaaaaaataaaaaaaaaattatataaaaaataaaataaaataaaaaaaaaaggggcggcctttttaaa

SEQ ID NO: 28701 - DNA, 392 bp, Glycine max
  Clone ID: LIB3108-054-Q1-K1-H1
cacgcactttgtgacgctcatcttagcaagttacgaggtccttgtatgatgcaatttgattcaccgctctacttccaattgaagaagctctcaaccatcgtctcacacaacactctcaaacttcaaaccaattgtgctcatcaatctacacttccaccaatggttccttcacttctatccttgagttcacagctcacaatctaaggtacttgttgccctcagtgccaaaacctgacttcatattcaccccactcgatgactgtaacgtgcaagcagtactgatttgtgcaaaaaagcttggaattcacatgagagcgcgcactggaggacatgactatgaatggctctattatgtttcccttattgagaagccattcatgatcctagacttg

SEQ ID NO: 28702 - DNA, 289 bp, Glycine max
  Clone ID: LIB3108-054-Q1-K1-H12
agagggcgcaggcgtatccggaaagaggggaaaaagaagcgcacaggcgccaagaactgaggggcatatttaatattcttctggcacaccctctctttgaaggttggatgccataggtagaaacagacttggccaaagaaagaaactggattctaatcagagaaatactgtggagacattggaaagaaagaaagaatgaatgcagcatctcaaaccttcatcttaaatctaactccacaggtggccacatgaaagcaaagaggacatgagtttattgggcctaaccctg

SEQ ID NO: 28703 - DNA, 283 bp, Glycine max
  Clone ID: LIB3108-054-Q1-K1-H2
acgtacgctcacacttacacaaaatcatctaaaataactacaaaatcattgaattatcagagtggataattgcacttcctacatctaactaagatacattttaaaggcttacactacacaccaaaactataatacataatatatattctcaaactaatcttaaacaaatggttacttcactaaaacacttaatgttacatatttcctaaatgacatctttttactgacattgactaatacaaaccatgtaccaaatattctaaaattatgataattttgaaca

SEQ ID NO: 28704 - DNA, 390 bp, Glycine max
  Clone ID: LIB3108-054-Q1-K1-H3
gaaaaacttatctaaagtttaaacgggcaacccgtctctagttccgctggtctacattcacaatggcacgagtatattgaggtaaaagcctcaaaagaatgtgctatatataaactctagtaaattgtaactgaccctaaggaatattgttcatacaacgagcaaaatgacaaaattcagggcactacaaatccacaacaccaggaaacaaacaaccagtccaaaaaatctcttcatgtgctttgtttcgatcggaggaaaatggccgatcagttatcgaagggagaggaattcgagaaaaaggctgagaagaagctcagcggttggggcttgtttggctccaagtatgaagatgccgccgatctcttcgataaagccgccaattgcttc

SEQ ID NO: 28705 - DNA, 359 bp, Glycine max
  Clone ID: LIB3108-054-Q1-K1-H4
gaagattttccacagctgcagtttgaggcagcttgggctttgacaaatatagctgctggaacatctgaaaacactaaggtgataattgatcatggtgctgtcccaatttttgtaaagctacttggttctcccagtgatgatgtccgtgaacaggctgtttgggcattaggaaatgttgctggagattcacctagatgccgtgatcttgttctcggtcatggagctttgcttcctctattggcacaattgaatgagcatgccaagctttctatgctaagaaatgctacctggacactatcgaatttctgcagggggaaaccacagcctgcttttgatcaggttaaacctgcacttcctgc

SEQ ID NO: 28706 - DNA, 387 bp, Glycine max
  Clone ID: LIB3108-054-Q1-K1-H5
cccacgcgtccgcaaaaagaatgtctacaccaacacctccaaaaaagagctggtgctgctgctcctgccaatgatgagcttgccaagtggtatggtcctgacagaaggatcttcttgcctgagggtctcttggaccgatccgaaatcccagagtacttgaccgtagaagtccctggagactatggttatgacccatttggtcttagcaagaagccagaagactttgccaaatatcaagcatttgaattgattcatgccatatgggcaatgcttggtgctgttggattcatcattcctgatgcctttaacacatatggagcaaactgtggtccataagctgcttggttcaagactggagctctacttctggatgggcgtacgctgaac

SEQ ID NO: 28707 - DNA, 388 bp, Glycine max
  Clone ID: LIB3108-054-Q1-K1-H6
atcaagccatgccgtggaatttctgtttcctatgcccccctcactcctggtggacttcgatgggatcgagaatgggtcgcggagaattcccaagggagggcatgcactcaaagagttgatccaaagcttgctttggctgaagttgaattgccaaatgatgcacttgtcgaagactgtgaacctacaagcgattcttacatggagtcactaccttcatattacagtgttgaaagcacctgggatgaaacctatgaatatttgtcagagtaaacatcatgaagtaacagatgctgtgacagtctgggaatggactgcgtctgcttgggatgaaagagctgaagcatcacaacggtactcagattttttaggaaagccccgtcaactatac

SEQ ID NO: 28708 - DNA, 333 bp, Glycine max
  Clone ID: LIB3108-054-Q1-K1-H7
cccacgcgtccgcccacgcgttcgttcattcttcatccatagacatgggggtcgtgacttttgcagccgtgagctatctcgtcattcactggcctcaaggcaggcgcatgcaatgtgagtaccgtatttaaagtctaagctacataagccacaacgttgcgcatcaaggctttgctgactgacgttgtaatcgatgttgtggccactggcgcgagtgcaactctggctagcatcgcccttgccattgaagtgatgctggatggtcatgactggtctctggctgacgtatcaaacaatgtgtccttgacatatgtggagaagatcgtgttccag

SEQ ID NO: 28709 - DNA, 396 bp, Glycine max
  Clone ID: LIB3108-054-Q1-K1-H8
tgatttgagagatgtatgccatgagagtcttctagaagatattgacacgcagaatgtacttgataggctccaaaatgcatctatatatcagctgatgaaactgaacatgagttgcatgcgatatcttgtgaagcttggtaaaatatatgaaattcgtgaagatttcaataccttcctgcgaaatgcagatagggatctgattgctgaggtcttccatgaagttcttgatgcttggaaaggattctgaagatcttgcaacttcaaagaaagataggaaggcttgttgttattcaacatacctaagaataggttgtttcaatttggtgtgcaagatttgctttgatgaacctaattctttcgctcagatgaatgtcttatgatcttatgtacatactt

SEQ ID NO: 28710 - DNA, 411 bp, Glycine max
  unsure at all n locations
  Clone ID: LIB3108-055-Q1-K1-A1
cttcaaaccaggatattctcttatgctgattcacaaaggcacagacttggaccaaactatctgcaacttcctgctaatgctcccaagtgtgctcaccacaacaatcatcatgaaggtttcatgaatttcattcacagggatgaggaggttaattacttcccttcaaggtatgatcctgttcgtcatgcagaaacgttccccatacctcctgctatctgcagtggaaggcgtgaaaagtgtggaattgagaaggagaacaactttaagcagcccggagagagataccgatcttgggcacctgacaggcaagatagatttaatcgccgatgggttgatgctttatctgacccacgggtcacccatganatccgcagtgtctggatatnctactggtctcangctgaccgttct

SEQ ID NO: 28711 - DNA, 390 bp, Glycine max
  Clone ID: LIB3108-055-Q1-K1-A10
gaacagcagaagaaaagtgctgctaatcgaatggatttgaaggagctcaaaatgggatacagcatagatgaacatgattattcagtgcgtttgaaagctgcacagaaatttttgaaagacggcgacaaggttaaggtcatagtaaaccttaagggtcgtgaaaatgaattcaggaatatggctattggacttattacacgttttcagaatgatgttggggagcttggaatagaggagacaaaaaacttccgtgacagaaacatcttcataattttggttccaaataaagttgctgtgcagaaaactcaagaaccaccaaagaaaagagacaaatcagctgcagatgaagtcaccattaatgcccaagcataaccgaaaactttcacgcta

SEQ ID NO: 28712 - DNA, 397 bp, Glycine max
  Clone ID: LIB3108-055-Q1-K1-A11
cagcaagtgcgttttggaagcagagaccgaaatacttcgagatggcccgtacaaagcaaactgctcgtaagtcaactggaggaaaagctcccaggaagcagcttgcaaccaaggctgcacgtaagtctgcaccaacaactggtggtgtgaagaagcctcatcgttatcgccctggaactgttgctcttcgtgagattaggaaataccagaagagcactgagctcctaatcaggaagcttcctttccagaggttggttcgtgaaattgcccaggatttcaagactgatctgcgtttccagagccatgctgtgcttgcattgcaagaggctgctgaggcataccttgttgggctctatgaggacactaacttgtgtgccattcacgccaagcgtgtgac

SEQ ID NO: 28713 - DNA, 310 bp, Glycine max
  Clone ID: LIB3108-055-Q1-K1-A12
gctccttattactggaaatgctgctttcttcttctcgcgctcatcttcactgactacttctctctctgcaatttccattgttgaagaaggagagaggttttgaggtgtggggtcggtgatggacggtggtggagtgaactacaaccctcgcaccgtggaacaggttttccgggacttcaagggccgtagagctggcatgatcaaggctctcaccactgatgttgaagaatttttccagcagtgcgatcctgaaaaggataatctttgtctgtacggattccctaatgagcaatgggaaggtaatttacct

SEQ ID NO: 28714 - DNA, 317 bp, Glycine max
  Clone ID: LIB3108-055-Q1-K1-A2
cccacgcgtccggaaaaggcattcaaagttgtgtctggctcttctgatagcgtgaagaaaagggaagtgaggactcgttctaccactcttcggtttgggaatgttattttccaaagggaggttgaaaaaaaagttgcttccttgagtgattctgagaggatggaaggtgcaatcttctgtgatagcaaaccaaccaccgctgcttgtggcattagggccatttgggttgctccctctaacagaagaaaaaggattgcaagcaaattgcttgatgccgtgaggaagagtttctgcaaggatcttgagcttgaacgttc

SEQ ID NO: 28715 - DNA, 348 bp, Glycine max
  Clone ID: LIB3108-055-Q1-K1-A3
cccactcgtacggtataggcttacactgatgcgtatggctccagtgttagcgcgaagtatagggaagtgaggtctcgtgctaccactcgtgctcacgagaacgttaatcatcaaagggtggtggatttcattgtcactgactaggatgattatgactggactgaaggggctgaccctggtgatagcgcaccaaccatcgctattcgtggcattatgtgcattggaatggctcaatagagcagaatagaaagagttgccagctttttgcttgatgccgagaggtacagatcttgcacagatctcgagcttgatcgatctaatctagcatgctttgatgctacatctgat

SEQ ID NO: 28716 - DNA, 396 bp, Glycine max
  unsure at all n locations
  Clone ID: LIB3108-055-Q1-K1-A4
cccacgcgtccgctcaccgattgctagaatggaatttcgatgctcagtcatctcttttaccattctcttctctcttgctcttgcaggagagagccatgtccatgcatcgctacctgaggaagattattgggaagctgtttggccaaacactcccattcccactgcactgcgagagcttctaaagcctctccctgcaggtgttgaaatcgatgaactccctaagcaaattgatgatacacagtacccaaaaacattcttctataaagaagaccttcatccaggcaaaacaatgaaagtacaattcaccaagcgtccctatgcacaaccttatggtgtatatacatggttaacggatattttaagacacctctaaagaaggatatagtnttgaagaga

SEQ ID NO: 28717 - DNA, 311 bp, Glycine max
  Clone ID: LIB3108-055-Q1-K1-A6
ctgttcctccatccttatcggagccgccctcactctccgactcattctcgccgttaaacccagccctagccatggatagtcttcaagccacttacaaagacgaagaagatgaagaagacgagccgcagcctcaaccaccaccaaccaccgccgattcacctgaagcccctaccgccaccaccagcacaccctccgacaccccaaccgaacccccgaacgacgcccgatcggagcccgagccctccgaagatctctccgaggactaggccgcctccgacggctccaagaaatcccccaaatccggccgcgaa

SEQ ID NO: 28718 - DNA, 332 bp, Glycine max
  Clone ID: LIB3108-055-Q1-K1-A7
tccctggtcgtctcctcgcttccgcccactcgttcgcccactcttcctcccactcttccggctgatttatgctgctttactgtgtttttcttcttcagagcaaatatggaagtggaagtgtcaagagttaccgtaagttaagttcttgtcttcatcttctcattttatggtacatctagcaatgtagaacattatgatatttctacaaaatggaagaaggaaatcttctaagacccttcccaatagctcgcagagcatatctagcattgctattccgttattatctttttagttaagtcacattattctcgcattatatgttctaatgtctt

SEQ ID NO: 28719 - DNA, 251 bp, Glycine max
  Clone ID: LIB3108-055-Q1-K1-A8
cccactcgttcgaagactcgctcgattactcatgcggctgatctatgctgcttaacggagcaataataaagcaaagcaaatatggaagaaaaaagaaacaagagataccgtaagcaaagaaaaaagacaacataaactgattaaatgaggggacctagctttgaagaacaccatgatatcttacacataatcgaaactggaaaccttctaagaggcggcacaaaagctcattctacagacctagcatttac

SEQ ID NO: 28720 - DNA, 385 bp, Glycine max
  Clone ID: LIB3108-055-Q1-K1-A9
gaaaagtgcagcactttttaggccaaaattaatagttgctggtgctagtgcttatgctcgcctttatgattatgcacgtgttcgcaaggtctgtgataagcagaaggcagttctgttggctgatatggcacatatcagtggattggttgctgccggtgttattccttctccttttgattatgcagatgttgtaacaaccacgacacataagtcacttcgtggaccacgtggggctatgattttcttcaggaagggtgtgaaagagataaacaaacaagggaaggaagtgttgtatgactatgaagacaaaataaaccaggctgtttttcctggacttcaaggtggtccacacaatcacactatttcaggcttagcagttgcactg

SEQ ID NO: 28721 - DNA, 394 bp, Glycine max
  Clone ID: LIB3108-055-Q1-K1-B10
aaaccacttaattagtccttctcacatccaaaatcttgtgccagcaaatcaaacatggcatccatgactatgcttcagaccatgattcctaagaatgcaccgaacctccctcctcgtgttggtgcttcttccaacaacactactaagatctcatttggtggctcaggtagggtactgtggaccgggattcagaggaacaggaataataggtcttcttcgattgtagttgctgcagttggagatgtttcatctgatggcactgcgtaccttgttgctggtgccattgctgtggctctagttggaacggccttccccatcttcttctctcgcaaagacacatgccctgaatgtgatggagcaaggtttgtgcggaaggctaatgtgacattgagag

SEQ ID NO: 28722 - DNA, 388 bp, Glycine max
  Clone ID: LIB3108-055-Q1-K1-B11
aaaccacttaattagtccttctcacatccataatctagtgccagcaaatcagacatggcatgcatgactatgctgcagaccatgattcctaagaatgcaccgaacctccctcctcgtgttggtgcttcttccaacaacactactaagatctcatttggtggctcacgtagggtactgtggaccgggattcagaggaacaggaataataggtcttcttcgattgtagttgctgcagttggagatgtttcatctgatggcactgcgtaccttgttgctggtgccattgctgtggctctagttggaacgggctttcccatcttcttctctcgcaaagacacatgccctgaatgtgatggagcaaggtttgtgcggaaggctaatgtgacat

SEQ ID NO: 28723 - DNA, 288 bp, Glycine max
  Clone ID: LIB3108-055-Q1-K1-B12
aaaccacttaattagtccttctcacatccttatatcttgtgccagcaaaatcagacatggcatgcatgactatgcttcagaccatgattcctaagaatgcaccgaacctccctcctcgtgttggtgcttcttccaacaacactgctaagatctcatttggtggctcatgtagggtactgtggaccggtattcataggaacaggaataataggtcttcttcgattgtagttgctgcagttggagatgtttcatctgatggcactgcgtactcttgtgctggtgccattt

SEQ ID NO: 28724 - DNA, 360 bp, Glycine max
  Clone ID: LIB3108-055-Q1-K1-B2
atttggtttgtttgaggtcttgtatgtggcttcagatatccaaaccttaaattcggtcctcgaatctttctgatcattggttgttttttattctttcaaatacattccaaaatctcttggaaattgcgagattcactgcttatcctagcagcagattttgggttctgacccaattattcattttccccaactgggtcttgtggattttttgttggggttttaaatttcgtgttgctgggtttgaaagttatttcctttcttccccgtctggattcaactcccaagtatttgctttaattggggtatttttttatttatcagaattgttaggttgctttgaggttttccaaggcttgaaag

SEQ ID NO: 28725 - DNA, 373 bp, Glycine max
  Clone ID: LIB3108-055-Q1-K1-B4
atccgatgtgaatctatttgtttagttttctatcggtatgtatataggtgaataatccaacatgcctttttgtgaagtaaaaaaaactaccctcgatccatgcctcaaaagggttgataataagtaaaaaaaatcaatgaattcatgataaaacccttctgcgtttttttattataaatttttttgtcaataaagggatcaaggggttgggggatcaaatggtaaagttcttttgttggtaaattggaggattagaaacatgactattgctttccaattagctgtttttgcattaattgctatttcatttattttattgattagtgtacctgttgtatttgcttctcctgaaggttggtcgaataacaaaatg

SEQ ID NO: 28726 - DNA, 423 bp, Glycine max
  unsure at all n locations
  Clone ID: LIB3108-055-Q1-K1-B5
cccactcgtccgcgctttccggcttcagggtctctgggtctgtcgactcctcaatttgaggcaatacattggatgtgtttcttttgtgcctgcacctgggtatgaagcttttggggatcccacaagttaccctggcaaatctactactagcaaaggaagcaacagtgatccaagtgaagcagaacgtgctaatttgcaaaggctttgctatcttacagggaaggccttggtccccaaaagttttttgaattctattaatcttacatccagtgatacggattttttttttttctgaatgatccagatttgtttaataaaaaatatatttaaacttattccctttcaacaagattgtcaagaaacaagaaaaaaattcgtgactagctctgctactatgtttactnngtttctattagcaattac

SEQ ID NO: 28727 - DNA, 286 bp, Glycine max
  Clone ID: LIB3108-055-Q1-K1-B6
accacgcgtgcgcgctatccggcatttggctatctggatctgtccactagggaacgtgagcctatacataggatcagtgtctaccgttcctgcatccgcatacgtagctgatggtgatcccacatgctacattgacatatcatctactcacacagcgtgcaacaatgatccaagtgttgctcaacgtgctaatcgtcaaaggcgatggatcgcatacagtgaaagccgttgtgccgaagagtatgatgaaatccatgatccttacattcgtagattctgatgcttg

SEQ ID NO: 28728 - DNA, 418 bp, Glycine max
  Clone ID: LIB3108-055-Q1-K1-B7
aaaagaaaagccttccatagcctccctaaaaatgaagagcactaccttgttcgctctctttctactttgtgccctcacttcatcatacctaccttcagccaccgctgatgtggtgctggacatggatggtaatcctcttggaaacggttggcaaaatgaatatttcatgttgccagttacaagaggaagcggtggtggaatagcactagctgcaactggaaatgaaagatgccctgtaactgtcgtgcaatctcacattgagcgcgataaggggtatgcggcaacttttagagctccattccacctcccttttatcgcagaaggccttcctttgacgatttcattcgataactttgaagtgttaccgcggtgtgtcctcactcctctttggtgggctattgtggatggtctagctgaa

SEQ ID NO: 28729 - DNA, 294 bp, Glycine max
  Clone ID: LIB3108-055-Q1-K1-B8
gatgaatttgagtgtgatcattaaagttgccatggttgatatcttcaaacaaaaaaaaaaaaaaaaaaaaaaaaaaaaaaaaaaaaaaaaaaaaaaaaaaaaaaaaaaaaaaaaaaaaaaaaaaaaaccaaaaaaaaaaaaaaaaagggggggccgttttaaaggatcaaagttaacttacgcttgattgcaacttaatagcttttcaatagggtaactaaattaaaattaattgccctccttttaaaaaggtctggactggaaaaaccttggcgttaccaacttaaacggctt

SEQ ID NO: 28730 - DNA, 151 bp, Glycine max
  Clone ID: LIB3108-055-Q1-K1-B9
gtcactgctgcgtctctcgtaaccatgcctaagcaaatctcacgagattaaggacttccttctcactgctagaaggaaggacgcatggtcggtgaagatcaagaggagcagagatgtggttaagtttaaggttatattgctttaatgtatt

SEQ ID NO: 28731 - DNA, 358 bp, Glycine max
  Clone ID: LIB3108-055-Q1-K1-C1
aacacgcgtccgacttggccttattcgaaataatgaccgggatcatccactagattgaggagaccctgcatgtgctagggcacaagaaataggagcacacaggagatcaccatggtgagcacataggtgaactcaaaggagacctccttggtgagcacaatggtgatctcaaaggatatcaactccatggggtgcacaaggagggacttgtcgataagatcaaggacaagatccatggtgatggccatgtcaagggtgagaaaccgaagaagaaggacaagaagaagaaggagcatggacatgaccatcatggtcatagcagcagctgtgacagtgatcagatcttatatgttaagca

SEQ ID NO: 28732 - DNA, 316 bp, Glycine max
  Clone ID: LIB3108-055-Q1-K1-C10
actagatccagcacataacaatggaaacgcaactttacgtgttttatatctagattctgctgttaaacgccgtcgatttcaaactctttttttacccttcgcttctctgtctttgtaaccgaaaggggggaaaatattattaacaccgatttcgcgaccaattcttcttctgcgcttaattgggacaacgcgaaattggatctcagattttggcacgaaatagaaattgcatttgagggttaaataacagagtatagtgtatggccttggtcttgatactgtgctaaaattgttggatagcagacaaatcatgcat

SEQ ID NO: 28733 - DNA, 272 bp, Glycine max
  Clone ID: LIB3108-055-Q1-K1-C11
accacgcgtacggaataaaaagattctcacgaaatataactaatattctttagaataatcaaaaagaatattaaattcaaataaattttagatagaaaaaagacttaaaaaggaggatatgaaatgcgagatctataaacatatctttccgtggcaccagtagtaagtactctatggttcggggctcaggcggatctcttgatagagatcaatcgcattgtttttttccagatgcattgatattcccttctgattcattctagatattgaca

SEQ ID NO: 28734 - DNA, 177 bp, Glycine max
  Clone ID: LIB3108-055-Q1-K1-C12
accacgcgtacggcataacaagattctcgctatatatacactaatattctctagaataatcaggcaagactgtcaaattcaaataacatttagattgaacaaagacttaaaaaggaggatatcaaaagcgtgaactatatacatatcattccttggcaccactaatcagtactctat

SEQ ID NO: 28735 - DNA, 348 bp, Glycine max
  Clone ID: LIB3108-055-Q1-K1-C2
caaccatctccgctgctatcacaaccccatcgatcacccgcgcatgtctagtgcaaaaacgttctcttgggttctcatctcccgttcttggtttgccagcaatgggtaaggtgggaagagtgagttgctccatggaggaaaagccttcttctgtgaaggaaagcagctcaagcatgttggggatgggggcatctttgatggcagcggccatcgccgcagccatgtcaggcccagccatggccttggtggatgagagacttatcactgaaggaaccgggctacccttcggcctcagcaacaaccttctcggttggatcctgttcggcgtcttcggactcatctgggctc

SEQ ID NO: 28736 - DNA, 339 bp, Glycine max
  Clone ID: LIB3108-055-Q1-K1-C3
gttgttttgtattgtgtgacagacaactcaaataaaccatggacgcgggtcagatgcagagacagtggatcgactacaccaaatccctcttccttgagggcttcctggatggtcagtttctgcaacttcagcagcttcaagatgagaacaaccctgactttgtggtcgaagttgtctctctcttctttgaagattctgaaaggcttctcaaagatctcacctttgccctgtcagtactattattatcatcataccactctacttcttttccttccacagttcatgcattcatttttcacgcatttagaattttgagttgtcccatcttcattcaatggt

SEQ ID NO: 28737 - DNA, 387 bp, Glycine max
  Clone ID: LIB3108-055-Q1-K1-C4
cttagctttgattctctgttctctgttttgttctgtttcgcgtgtaagttcccctgttcctcttttcctctttctaagattgtcttcatacaggaacttgaacaatgaagaatgcaaagggcaagggagcagcaagggcctcaaaagaatcactgaagcccgttgatgaccgaaaggttggaaagcggaaggcttccggtaagcctgggagaagtagtgcaccaaagaaggagaagaaggccaagaaagaccccaacaagcctaatagaccacccagtgctttctttgtgttccttgaggagttcaggaagacctttaaggctgagaatcctaatgtgaaggctgtatcagttgttggggaaagctggaggagaggaaatggaaatc

SEQ ID NO: 28738 - DNA, 389 bp, Glycine max
  Clone ID: LIB3108-055-Q1-K1-C5
agaaaaatggggtgtttccatctcactgtgactagtctgtgctttgtagtggttgtggttggagtgcttccactctccttagatgcacaactagatccctcgttttacagagacacgtgtcccaaggttcactccattgttcgcgaagtggtgaggaacgtttccaagaaagatccccgcatgcttgccagtctcattagacttcactttcatgactgttttgttcaaggatgtgactcatcagttttgttgaacaacactgccaccatagagagtgagcaacaagctctgccaaacaacaactctctaagaggtttggatgttgtgaacgacatcaagacagcagttgaacaggcttgcccccgcgtggtttctggtgctgatattct

SEQ ID NO: 28739 - DNA, 108 bp, Glycine max
  Clone ID: LIB3108-055-Q1-K1-C6
ataaaaatggagtgtctgcatcatattttgactagtctgtgctttgtattggcctgggttgctgtgcctccacttaacatagatgcacaactagatctctcacaatac

SEQ ID NO: 28740 - DNA, 283 bp, Glycine max
  Clone ID: LIB3108-055-Q1-K1-C7
gccgatcgttcaaacatttggtcaattttaggttctctaaggaatggaatatccggtgtgcgcgtgcctgtcgcaagtatatatatatattaatatattctcgtgtgagaaatacagcggtaaagcgctgggtaatatatataaacactatgtaatgcgctgtgacgtatatataggataggggtttaaaaaaaaaaaaaagggggggccctctatagggtaccagcgttcactcacgcgcgctcgacacgatatggctcctatagggtgacccaaatttaaa

SEQ ID NO: 28741 - DNA, 334 bp, Glycine max
  Clone ID: LIB3108-055-Q1-K1-C8
ccttacctttgtggtgtggcttttcatggccacatcgtccctagcccaatacgttctcgacacaaaccgcgaacgcgtcgacagcgatgatgagtactacatccggccagccataacggacaacggagggcgtttcacattgatcaacagaaacaggtcgtgtcctttgtacgttggtctcgaaaacaccgacacgccactaggctatcctgtgaaattcacccctttttcccgcaacatcaacgatgatgacgacgacgacataagggtgaatagggacctcagagtggcgttcgatgaagtttccacaacgtgtgtgcaatccacagaatgg

SEQ ID NO: 28742 - DNA, 397 bp, Glycine max
  Clone ID: LIB3108-055-Q1-K1-C9
cccacgcgtccggtttgcattgcagagagagagagaatggcgaccacacccggtttgtgtggcagtgtgttgttgagcacctcgttcctgaggaagcaggcaatggcatcagtgaacatgagaatgctgaaggctaatgctggtgtttttggcttaaagggagggcgtggagggcgtgtgagtgcgatggcaagttacaatgtgaagctgataaccccagaaggagaacaagaatttgaatgcccagatgatgttttcattcttgaaaaggctgaggaatttggcattgacctttcctactcatgcaaggctggtgcttgctctttctgtgccggcaaagttggttctggcaaagtcgaccaatctgatggtagttaccttgatgatacccaaaatc

SEQ ID NO: 28743 - DNA, 430 bp, Glycine max
  Clone ID: LIB3108-055-Q1-K1-D1
caacgtggttgtcaccatcactccgactgataagaagtctatcactgactatggttcacccgaagagttcctctctaaggtggattatttactaggaaaacaggccttcttcggcgaaacacaagccgagggtggttttgatccaaatgcggtggccacggctaacatcttagagacggcaacacctgtgattgatgggaagccgtactattttctgtctgtgttgacaaggactgctgatggagatgaaggtggcaagcaccacataattagagcaactgtaaaagatggaaaactgttcatttgcaaggctcaagctggagacaagaggtggttcaagggagcaagaagatttgtggagagtgcatcaaggttctttcagtgttgcttaaaaaatcttcaataatagctggttatatatatctgctat

SEQ ID NO: 28744 - DNA, 318 bp, Glycine max
  Clone ID: LIB3108-055-Q1-K1-D10
caaatgtggagctaactgcacctgcaacctttgcacttgcaagtgaggtgttggagagctaaagcttcaagcagagatggcccttagaaataatgataaaaactatatgtagtttcaaaacttcaaaattatgtagtatgtattatgttgcactctggtgttttgtgtctaaacaaacacccttagaataaagtggtcaatttttgcccttgagcaagtctaagttttttggacattgtatttttgttttttggttcttgtatgttttgtatattttattttttttttatcatttgtttatttttgtctatttttttt

SEQ ID NO: 28745 - DNA, 291 bp, Glycine max
  Clone ID: LIB3108-055-Q1-K1-D11
cccacgcgttcgtccacgcgtccgctcactccgaagcttggaagttaaaagacagagacagaggcaaccttgtttcagttggttggtatcataccatgggacaagtctttgacaagttagagggtaaggagtggaggcaaaggcaaataaggaagataacagatcgagtttttgacaaagtaaagaatcaaatagaaactgataacttgagttttgaagatctgtatattgctgttttacttgtgtacaatgatatcaacaagtatatacctgggtccccattttgaccct

SEQ ID NO: 28746 - DNA, 305 bp, Glycine max
  Clone ID: LIB3108-055-Q1-K1-D12
aaaatctcagcatgcgcgcatacagcaactacaaggaagcattgttgctggtaaagtctgatactttggaagaactgaatatttattgttgcccggaaggtggaatggattgcgattgtgaaatgagagatgatggctgtgactctcaaaagacttttccgctagatttcttcccagcactcaggacccttgatctcaatggcttgcgtaatctacagatgattacacaggatcagacccataatcatcttgaatttctgacaatcagaacgtgccctcaattagaatcattggctggaaacaca

SEQ ID NO: 28747 - DNA, 285 bp, Glycine max
  Clone ID: LIB3108-055-Q1-K1-D2
ctaggcccctagtaatatcaagcatagcaggagctgttttgtgatgttccttattttgtttgcaaaaccaagttggtaactataacttttattttcttttatcattatttttctttataccaaaatgtactggccaagttgttttaaacagtgagaactttgattagaaagtgggagcatggcgatgtttgagttggtgtgggcgagtcatgatatttcattgaatagattgaattctcatgttcaaaaaccactattaaattatgctgattcgaatttgatatt

SEQ ID NO: 28748 - DNA, 408 bp, Glycine max
  unsure at all n locations
  Clone ID: LIB3108-055-Q1-K1-D3
gctcattcattcaatttctttcttcgcttcacgcattacatcatatcatataaccctttttcgatccttcttcttcttcttcttcttttctctacaatgccacaaccactcaccttttccttctctccttgaatgctgttttcccttttctgcgccatgcccttcctcttcctcttccttctgcttctctgtacacttgaatcccatagcagtaatcatcttcaaggtcctgtaagactggatagccatgtgggtactatgttccccaaaccctcacctcttggttctccacaaccctttcttcctcttgcaccttcacctttggctccattcaccaataccactatcccaaagttatcaggactttgcaccttgaactntactactgcggaaagtttgataagtgtg

SEQ ID NO: 28749 - DNA, 375 bp, Glycine max
  Clone ID: LIB3108-055-Q1-K1-D4
cggacgcgtgggaaaaaccttcccttctcttctcacccccacactcccatctcacacacccctcgcatccaacaatgtctctcaccattccctccaacctctccaagcccgccgccctccgccccaaactaagcccaaagctaaggtccgccgccacaaccaccatcgtctgcagcaccaccaacaacaacaacaacaacaacgtgtcctccgacctgaaggcgttctccgccgcgctggccctctcctccatcctcctctccgcccctctccccgccggcgccgacatctcggggctcaccccatgcaaggagtcgaagcagttcgcgaagcgtgagaagcagtcgataaagaagctggagtcgtcgctgaagc

SEQ ID NO: 28750 - DNA, 313 bp, Glycine max
  Clone ID: LIB3108-055-Q1-K1-D5
aaaaaaaaaaaaaaaaaaattaaaaaaaaaaaaaaaaaaaaaaaaaaaaaaaaaaaaaaaaaaaaaaaaaaaaaaaaaaaaaaaaaaaaaaaaaataaaaaaaaaaaaaaaaaaaaaaaaatacaaaagaaaaaaagaaaaaaaaataaaaaagaaaaaagaaaacggggtcgcctgctatacggttaccagatgtagcgaaggcgaagtcgtacttataactgtttggtgtgggccaccgaagttagattgatatgcacgagtattaaaaaacatatccagggaaactgatagatatcggaaattattcatt

SEQ ID NO: 28751 - DNA, 173 bp, Glycine max
  Clone ID: LIB3108-055-Q1-K1-D7
cccactcgtccgtatgaaggcaattatctatcttggataaccaagtgattgaactcaagcgttaatatgctaaagttaaggttgaatcaatcagatagtatcttagtttgatctttggaagaaagaattattggtaagattttacttatctttcatttaaactttggattagt

SEQ ID NO: 28752 - DNA, 321 bp, Glycine max
  Clone ID: LIB3108-055-Q1-K1-E1
cccacgcgtccgttcttcttcttcttcttgaatctctctaagctaaggtacgagatatggggaattgccaagctgtggatggtgcagtgctcgtgatccaacacccttgtgggaagatagagaggttgtattggcctgtctctgcaagtgaggtcatgaggactaatactggccactatgtttctttgatcataccatcgcctgtgccacctcaggatcagattcaagagaagaaaactgtgcgtttcacacgcgttaagctgctccggcctaatgagactctcaaccttggccatgcttacatgctcatcaccactcatg

SEQ ID NO: 28753 - DNA, 56 bp, Glycine max
  Clone ID: LIB3108-055-Q1-K1-E10
cccacgcgtccgagcactgaaaggaaagggtccaaatatagaattagacaatgcaa

SEQ ID NO: 28754 - DNA, 340 bp, Glycine max
  Clone ID: LIB3108-055-Q1-K1-E11
atgagtctgagagcaccgtgctgtgaaaggtttgaacgctaaattgggctgaagagatcgagaagctctagagacgcatatggctgtagatacttaatcttcaaagagtagcattggaacatgtatgggtcgggaattattgtagctgacttgaaagttgaaactgatgatgggagaagcaacagaaagatattcagttgatacgggtgctcataaaggaattggattatagatagttagacagttagcttcaactggaatcaaagagtagctcacagcaagaaatgataagaatgggcttcatacactggaaacactcatagactcaggtctatcccac

SEQ ID NO: 28755 - DNA, 389 bp, Glycine max
  unsure at all n locations
  Clone ID: LIB3108-055-Q1-K1-E2
gttccagttgagaccgaggaggtggtggcaattgagacagaggaagagaagccagcagaagagaaatcagaggagaaaactgaagaagtgaaagaagaagcagaggagcctaaagaaactactgaaacagaatcagcagcagcagcaccaccagcaaccacagaggaagagaacaaaccagctgagtcagttgaaaccccagtagaggttcctgttgagaagactgaagcttagacctatggacagtgtgagtgagaaaaacaagtttaaaaatggtcctagttgtggngatcaggtctaccattttgcatgccatgttgaaaagcctcttnttttttttttttccttttatttctttagtttaccttaataatnataatatatgatgc

SEQ ID NO: 28756 - DNA, 283 bp, Glycine max
  Clone ID: LIB3108-055-Q1-K1-E3
tcgctttaggggggagctctttatgttggtgaaagcttgtaaaatggtacttctattgtcatgcacagattgattattcaatgtacaaatacctatttaagtttagatgcatttaatgtaaattcaggaagtaaaaaaaaaaaaaaaaaaaaaaaaaaaaaaaaaactgaagaaaacataaaaagatcaatcaattataacctcagaaaaggactcctagtatgagaagactgaagcttacacctattgacagtgtgagcgagaaaaacaagtttaagaattg

SEQ ID NO: 28757 - DNA, 322 bp, Glycine max
  Clone ID: LIB3108-055-Q1-K1-E4
cccacgcgtccggtgttcggattgcggcgacttgagcggttcgctgcccgcgacgttgtgagaagtccactgaaccttatcatttagaggaaggaagggagggaagaatagaatgggatctggaagtggaaaacacactggagagttcttcaggagaagggatgcatggaggaagcatccgatgctcaccaatcagctccgccacgccacccctggccttggcatcgccgtcgtcgccttcgattgattgctcttgcaggtgaaagccggggatcaccactaaacgtttggacggacgcactccattccatcatcacttaat

SEQ ID NO: 28758 - DNA, 392 bp, Glycine max
  Clone ID: LIB3108-055-Q1-K1-E7
agaggacaaggtggcaggtgcattctcatacatttcatttggagggggcagacatggatgccttggggagccatttgcatatctgcagataaaagcaatatggactcatctgcttaggaattttgagctggagttggtgtcaccttttccagagatcgattggaatgccatggttgtgggagtgaaggggaaagtgatggtccgatataagctgaaggagctttcagttaatcaataggaccacataattcagtgtctggcatgattttattttaagcagttattgttagtcttttctggttcagcttctgtcaaagttcgtcggttatttggcaatgaatatctagaatcttgattttgatttttttttcttcaaatctattaagtgattt

SEQ ID NO: 28759 - DNA, 355 bp, Glycine max
  Clone ID: LIB3108-055-Q1-K1-E8
cccactcgtccgcaattttctagggtttatacaattttcgatggcttcttcagatgttgagtaccgttgctttgtcggtgggctcgcttgggccactgactaccaagctctcgagagagccttctctcagtacggcgaaatcgttgaaacgaagattatcaacgatcgtgagactggaagatccaggggttttggatttgtgaccttcgcctcggagcagtccatgaaagacgccatcgaagggatgaacggccaaaaccttgacggccgtaacatcactgttaacgaagctcagtcccgtggtggcggtggcggcggaggcggtggaggtggtggatatggtggtggtcgccgt

SEQ ID NO: 28760 - DNA, 331 bp, Glycine max
  Clone ID: LIB3108-055-Q1-K1-F1
ttctcagccgcctcggctagggttcggaaacgtatagaagggttctgttttcttttcgcgatgagggccaagtggaagaagaagcgtatgaggaggctgaagaggaagcgccgaaagatgagacagagatccaagtagtgcgttaaacctagtttgtttccgttgcttttacaattgcttatgttgtcaaataggacacccagttgttagtggcactggtctctcctttttgatgttttgatacattttgttggattttatttcgtcttatgttcttagctgaaaacaatgctgttactgcgtttgcgaatcaacaggatatcttgtttgc

SEQ ID NO: 28761 - DNA, 195 bp, Glycine max
  Clone ID: LIB3108-055-Q1-K1-F10
acgcgttcgcccaaactctcttcttctattccaaagacctgattgaagtaatcgatggagtttcagtctgtttccttattcgaccttcggggctccttaaccattctcttccttgcacctcttcacgctcaagctaaaattaaagtcacttactgcgataagaaggcagactatcctgtgaaggtgtctggagtt

SEQ ID NO: 28762 - DNA, 341 bp, Glycine max
  Clone ID: LIB3108-055-Q1-K1-F11
gagaggggcagtagccgagattccgtgagttgcaaaaatgaagacgattctttccaccgagaccatgaacatcccggacggcgtgagcatcaaagttcatgccaaggtcatcgaagttgagggcccccgcggaaaattggtgcgagacttcaagcatttgaatctcgattttcagctcattactgacgaaaacggtaaaagaaagctgaaaatcgacgcgtggttgggttctcggaaaacatccgccgccattcgcaccgccttgagccacgtggagaatcttatcaccggcgtcaccaagggctaccgttacaaaatgaggttcgtttatgcccattttc

SEQ ID NO: 28763 - DNA, 347 bp, Glycine max
  Clone ID: LIB3108-055-Q1-K1-F12
gtggaaaactcgtgcgagacttccaccatctgaacttggacttccaacttattaccgacgatggcggtaaaaggaagctcaagattgattcttggtttggttctcgtaaaacctccgccgccatccgcaccgccctcagccacgttgagaatttgatcaccggcgtcaccaagggataccgatacaaaatgagattcgtgtacgcacattttccgatcaacgctagcattggcaacaacagcaagtccatcgagatcagaaatttcctcggcgagaaaaacgtgaggaaagtggacatgcttgaaggcgtgtcagatggtagatctgaaaaggtcaaagatgaattg

SEQ ID NO: 28764 - DNA, 116 bp, Glycine max
  unsure at all n locations
  Clone ID: LIB3108-055-Q1-K1-F2
tcttcttctagcttcttgtttcatgcaagttatatgcaactggttctgttatatgcatactatctatatcccagctgcactntaatttataatttccttaataaatctcatgggtc

SEQ ID NO: 28765 - DNA, 364 bp, Glycine max
  Clone ID: LIB3108-055-Q1-K1-F3
tcgcccacgcgttcggcccgtttcgccatatggcgtactgttgtgagcatccccaacggtccctctgctctggcagttaaggaagcagcctgtggtctggctcgctatgctgcaattgctcaggacaatgggttggtcccaattgtggagccagagatcttgcttgatggggagcatggtattgatagaacttttgaagtagcccaaaaggtctgggcagaggttttcttctaccttgctgagaacaatgtcctttttgagggtattctccttaagcctagcatggttacacctggagccgagtccaaggacaaggccagtcctcagacagttgcttgatacaccctcaagctccttcacagga

SEQ ID NO: 28766 - DNA, 303 bp, Glycine max
  Clone ID: LIB3108-055-Q1-K1-F4
caccaaaggagggagtgatcgactttcccttgaaacatttgatcctgccctaagcattttgctatatacataaatacctgtgtcagaatctgagagtggggtcgggttggttttgttttgttgaagtcggggctcatatagtcaaatttgtatagcaattcataattcataattatctcagttttgccccgtgaagcctgaggaactgggaaccactgctgcgggacctcatgaaaaccgtcgtacaggggagacactcaccacatatatcgtagattcatacttaatcccctttggatcaca

SEQ ID NO: 28767 - DNA, 338 bp, Glycine max
  Clone ID: LIB3108-055-Q1-K1-F5
gcatgattgatagcgttcctggaatgtataggctttggatatgaatgctgcagaggatgctattgtgaggctcacgagggagattgtgcccggcatgattgtcaccggcatggaggtggcagaaattgatggctccccaaggatgggtccgacgtttggggcgatgatgatatcagggcagaaggcggctcatttggcgttgaaggcgttggggaggaacaatgcaattgatggaacgtgtggagttggaagggaagaaccccagcttattttcgcttctgcagacactgaggaaattgttgatgcttaaacttactttcaaattagctagatatata

SEQ ID NO: 28768 - DNA, 183 bp, Glycine max
  Clone ID: LIB3108-055-Q1-K1-F6
gcatgattgatagcgctcctggcatgtaggcgctgcatatgaacgctgcagacgaggctatcgtgaggctcacgacggagatcgtgcccgggatggatgcgacctgcatgaaaggggcagaacttgatggctccccaaggatgggtccgacattcggagctattatgaaatcatggcataaag

SEQ ID NO: 28769 - DNA, 368 bp, Glycine max
  Clone ID: LIB3108-055-Q1-K1-F7
tctcagtcagcttctggagattgtcttttctgatccgaaaggctttggaatcggaccagatggcaggtatagatgtgaggatccaaaattcactgaaggcacagctcatgtctaatctttcagtattgtatgagtgttcttttcatatggcttatttagtgatcaaatgttacacaatgtctaatataaacaggatttgttctttaggttggtaatttggttttacgtgtcttatatttatcattgtttgtggaactagtggcaagaatgacaatctccagaattagattgtagcctctaccaacgctgtataataaaattttagttgttcctcaaaaaaaaaatcattttaaaaaaaaaaagggcgg

SEQ ID NO: 28770 - DNA, 259 bp, Glycine max
  Clone ID: LIB3108-055-Q1-K1-F8
gaagttttagaataaagtggtcatggctccgcctttgcaaattcaaatgttctaggatttgttacgggtgttttaagctgtggttgctttgtgtttggttggtctcttataaatatgtaatttgaatcgtcaatctctgcttataaatggaatactattggtgttatgtgaaaaaaaaaaaaatattaaaaaataataatatgaaaaaaaataaatataatacttaataaaatcaataataaaaaaaaaggggcggccg

SEQ ID NO: 28771 - DNA, 201 bp, Glycine max
  Clone ID: LIB3108-055-Q1-K1-F9
cccaactctcttcttctattccaaagacccttttgaaggaatcgatggagtttcagtctcgttccagatgctaccctcttccttgcctaaccaatcttttccttggaccctttcaagcttaagcttaaatttaaggcccttactgccattaggaggccggccattctggggaagggtccggaggtggaatatcgccagacc

SEQ ID NO: 28772 - DNA, 328 bp, Glycine max
  Clone ID: LIB3108-055-Q1-K1-G10
cccacgcgtccgcaggaactagaaaatccatacaatcttcaccaccaaaaagaaaataatggcaatggccagtgcaacaactctagccacaatcactgttgtggcggctagccccagtgttggcagcagaaggagtgggaagaggaatgtgaacttcatcagagggttgaattcttttggagggttgaaggctcagaacaatgtgacattactaggccttcctgtgtgcactgagcagtgctttgcaaaggtggtgagctcattgaaatatccatcatcatcatcacgtaaggggagaagtggaagtgctggcttttcaacatgcaat

SEQ ID NO: 28773 - DNA, 389 bp, Glycine max
  Clone ID: LIB3108-055-Q1-K1-G11
cccacgcgtccgattttgtgtagctggcagccagggattgttttgccatcttctaagatggcatcaaatacaggtactaattttcttttaagtcagtcatcgaagcagtttgatcatagtcccattgttgtggacctctcgtcaaccggaccaaaaagttcagtcacctgcacttctgggcttacacagcagcaacagccactacatcgccccggtaattctaaaacatgtcaagtggagggatgtgggaagggtgccagaggtgcttctggacgttgtatatctcatggtgggggtaggaggtgtcagaaacctggttgccacaaaggagccgagggtcgtacagtgtactgcaaggcacatggaggtggcaggcgatgtgaattcct

SEQ ID NO: 28774 - DNA, 407 bp, Glycine max
  Clone ID: LIB3108-055-Q1-K1-G12
atattcatttatttgtgagaaggcctgtgaggagatctccaatcattaatcgtggttactttgctcgttgggctgcatttcggaaacttctctatcagtttcttgatgttgagaaaaagacagatggagatgccccaattaagaagcagatattatcacttggagcaggctttgacacaacatattttcagttgcaggatgaggggaaaacaccatatatgtatgtggaagtggattttaaggaggtaactagtaaaaaggcagctcttattgagaattacagtcaattgaagaataaacttggtgaaattgcaaccatatcaagagagaaaggagaagtggtcagtgctcactataagctagtccctgcagatttgcgtgatatacaacaattaaataaatatttt

SEQ ID NO: 28775 - DNA, 208 bp, Glycine max
  Clone ID: LIB3108-055-Q1-K1-G2
tcggcgaaagactttaggtttggaattgggaattaggggtggtcgcgtcaccaaaattaaccaaggtggggttaaaccttcctttggggaaaaagggtccccttaaatgcaacggcctttgacccattggggaccctaaaaaacctgggggcggttaaaacggccccaaaacccgacaggatccgtttccaaaatgggtccccctttt

SEQ ID NO: 28776 - DNA, 324 bp, Glycine max
  Clone ID: LIB3108-055-Q1-K1-G3
gttccagtcgagaccgatgaggtggttgcaaaggagacagaggaagagaagccagcagaagagaaatcagaggagaaaactgaagaagtgaaagaagaagcagaggagcctaaagaaactactgaaacagaatcagcagcatcagcaccaccagcaaccacagaggaagagaacaaaccagctgagtcagttgaaaccccagttgaggttcctgttgagaagactgaagcttagacctatggacagtgtgagtgagaaaaacatgtttaaaaatggtactagttgtggggatcaggtctaccatcttgcatgccatgttgaaaa

SEQ ID NO: 28777 - DNA, 150 bp, Glycine max
  Clone ID: LIB3108-055-Q1-K1-G4
ttccactctttctactttatcaactgtcggcaagggccattatttcacatcatttaaggttccagatgtctatggggttttccaattcaaagttgagtacgaaaaacttggatatacaagctcatctttatcaaagcagattcctgttcg

SEQ ID NO: 28778 - DNA, 365 bp, Glycine max
  unsure at all n locations
  Clone ID: LIB3108-055-Q1-K1-G5
cccacgcgtccggatagatagagtgatacacatcacattttctcaaagtaatttattaattaataaataaatggcggcggcggcggcagtgacggtgctactcccacctaggattccgaccgccaccaacgttacccgctgctctgctttgccttctctgcctcctcgcggcaccaacactaaaaccactttgctcttatcttccctcaaccacttctcagtgtcccgaaaatcttctctgcttcagaccagagcttcttcagaggaatcatcctcagtagatgccaatgaggtgttcacagatttgaaggaaaagtgggatgctcttgaaaacaagtccacagtactttnttatggtggtgggg

SEQ ID NO: 28779 - DNA, 73 bp, Glycine max
  Clone ID: LIB3108-055-Q1-K1-G6
aaaaaaaaaaaaaaaaaaaaaaaaaaaaaaaaaaaaaaaaaaaaaaaaaaggaaaaaaaataaaaaagggcgg

SEQ ID NO: 28780 - DNA, 337 bp, Glycine max
  Clone ID: LIB3108-055-Q1-K1-G8
cggactcgtccgcccactcgtccgctcgctcgaagtaagagagaaagaaataaagaattggcgtgagtcgctcgcaagtttgtgatggcggcctcttcttcctctctctctgcctccgacgactcttcttctcaccgtcgcaggcgtcaccaccgccatcgccgataccgtgataaggactccctcaagattcgaaagaagagcaagtcccaatcccaatcccgcggagaacgactccgtatgcatcaccgccactcttccgattccgattcctattcttcatcttccctctctgattactccagaagtgaaagttcttctgatagtgagcatgaaa

SEQ ID NO: 28781 - DNA, 314 bp, Glycine max
  Clone ID: LIB3108-055-Q1-K1-H1
tttttgaaacagagaaacaaaaaaaaaaaaaaaactcttccaaagtagaggcagagaatctgaaagctagggtttgggatgccgaagaacaagggaaagggaggaaagaaccggaagcgcggtaagaacgaggcggacgacgagaagcgggagctggtattcaaggaggacggacaggaatacgcgcaggttctccgaatgctcggaaacggtcgctgcgaagcgatgtgcatcgacggcaccaagcgcctctgccacatccgcggcaagatgcacaagaaggtctggatcgccgtcggcgacatcatcctcgt

SEQ ID NO: 28782 - DNA, 357 bp, Glycine max
  Clone ID: LIB3108-055-Q1-K1-H10
gtcatttcaactgatctaatgtggcctctttgcctttacaggtctggctggtactggattttctaattcctcactacactttggttccatttcaaatgaagggtctggttctatttttggactgaaaagtgataagccttttggtcttggtttatctaacaatggaagttctcttttgggggcatctggggcctctgctatttgtaagaatgagggaagtggtttagcaatgcaggaggttatagttgaaaccggggaggaaaatgagaaagtggtttttaatgcacactcagtattgtttgagtttgctgatggaagttgcaaggaacgtcgaaagggagaactgaaagttaatgt

SEQ ID NO: 28783 - DNA, 397 bp, Glycine max
  Clone ID: LIB3108-055-Q1-K1-H11
gcgcgcgcggaggcgctgtttgtgccggcgattaaagcagatatagagaccatgcgccatgagattcaacgaggaaggaatgctattgagtttgagaagaagacacatgctagtaaccttgagcacagacggactatggataataatatgattattatggaccacgaggttgaaaagttacgtgctgagttggccaatgaagaaaaaagggctagggctgcgatggctgctgatacaaaaccaagtcctggatatcctgctaactatgacaatcctgagatgggatatggaggaaccacatgccctcctgattcttatagcacgcatcagatgcaagctgtggttgacacacattcttcacatgaagctggagcaccattacatcatccgaatgacc

SEQ ID NO: 28784 - DNA, 373 bp, Glycine max
  Clone ID: LIB3108-055-Q1-K1-H12
ccggcgccatatcgcgtatctttctctgttctatacctacgatggagttttggggtgccgaggttaaggttggtgagtctgttaaggtagatccagccgaattcgaggcatgcatacacctttctcaggctgctcttggtgaggcacagaaagacaaatcagatgaaccagttgatctctacttgaaagttggtcaacagaaatttgtcttgggaaccctttccagggagaaaattcctcaaatacctatggaattggttttggaaaaggagtttgagctttgccacaactcaaagaatgccagtgttcatttctgcggatacaaggcattttatgatgctggcgatgatagctatgaggatgaatttactga

SEQ ID NO: 28785 - DNA, 343 bp, Glycine max
  Clone ID: LIB3108-055-Q1-K1-H2
cccacgcgtccgcccacgcgtccgcgaattcgtcgccgagatttcctctaacatgttcctcaaactaactattctagctgctaatttctaccatgctcatattaatattaatatcatatcatgtcatctacatgcataatgcattgcacctaaacatgccacatacttaattatttatcattagatactaaataattgaaccactgttacaaaatagcattgtataagtccatgaaacgccgtatataatgcttttgttattattattagcgttgcttcttacgccattgagccattttccttttttcagcagcactagttccgtgtttgtgtctaatcaatg

SEQ ID NO: 28786 - DNA, 385 bp, Glycine max
  Clone ID: LIB3108-055-Q1-K1-H3
cccacgcgtccgattttgtgtagctggcagccagggattgttttgccatcttctaagatgtcatcaaatacaggtactaattttcttttaagtcagtcatcgaagcagtttgatcatagtcccattgttgtggacctctcgtcaaccggaccaaaaagttcagtcacctgcacttctgggcttacacagcagcaacagccactacatcgccccggtaattctaaaacatgtcaagtggagggatgtgggaagggtgccagaggtgcttctggacgttgtatatctcatggtgggggtaggaggtgtcagaaacctggttgccacataggagccgagggtcgtacagtgtactgcaaggcacatggaagtggcaggcgatgtgaaa

SEQ ID NO: 28787 - DNA, 318 bp, Glycine max
  Clone ID: LIB3108-055-Q1-K1-H4
aaaaaaaataaaaaaaaaaataaaaaaaaaaataaaaaaaaaaaaaatataacaaaaaaaaaaaaaaaaaaaaaaataaaaaaaaaataataaaaaaaataaaaaaaaaaaaaaaataataaaaaaaacccctaaataaataatgggggggccctttttagggccccatttttacctccctctcctttcctccttattcctttttttttgggccccctaaattcatttcattggcccccttttttccacctcttatctgggaaacccctttcttttccccttttattccctttttgaacaatccccttttccccattt

SEQ ID NO: 28788 - DNA, 402 bp, Glycine max
  Clone ID: LIB3108-055-Q1-K1-H5
gagaagggtgtcaatggcagagtgtttgggtgtttcagtttcaactcttggctcattctctcttagtaggcccacaatcttttatcgatctcccattaatatctctctctttgcctctcaatctcatttccctgctgctgcatttggttatttgacaccttccaacccacacctgtacgccgctgtctcctccgactccaaggccgctacttcgctagacctaactcaacccgatctcgataatagcggcggcggtgctaacggaaacgctaacggcggcggcggtggtggaggaggcggaggaggtgatgatagcaagggcgaggaaggatcggacggtgacaagaggaaaatggctctgttgatgtctcagaaattcactctagcttatgctgcactcgt

SEQ ID NO: 28789 - DNA, 340 bp, Glycine max
  Clone ID: LIB3108-055-Q1-K1-H6
cccacgcgtccgcccacgcgtccgcggacgcgtgggcaaattttttggtttggggatagatagagtgatacgcgtcacattttcataataataaaaaaatggcagcggcggcggcagtgacggtgctactcccacctaggattccgaccaccaccaacgttacccgctgctctgctttgccttctctccctcctcgcgtctccaacaccaaaaccactttgttctcaccttccctcaacaacttttcagtgtcccgaaaatcttctctgcttcagaccagagcttcttcagaggaatcatcctcagtagatgccaatgaggtgttcacagatttgaagga

SEQ ID NO: 28790 - DNA, 260 bp, Glycine max
  Clone ID: LIB3108-055-Q1-K1-H7
cccacgcgtccgcccacgcgtccgcccacgcgtccgcttccctcttcaatcttcacattttctctatggagaatcatggcaacaagcgagtctgggaccagtcctctgactccaacactcagcgggtcgactcgcccgagtctaagaatcgtcgagttgactcgtccgattcgggtattaactcgtccgagtctcaactcgaatcggtccttgactcgtcggaagtgcagcttccagacgacctttttaacatgcttgac

SEQ ID NO: 28791 - DNA, 354 bp, Glycine max
  Clone ID: LIB3108-055-Q1-K1-H8
ggtaaactgttagttgcgaggttagtgatgctgggatggcacttgcaaggtttaacaaatacatgtgaaagctgtagctgcaccagtcatttttgagtttgtttaactagtctttctttgcttaataaagcttcttaagcttttttttccctatgtgccatataatcttagactttatttttgcctgctgccattgtaatttatatgtattaatgggtcttttagtattggatgctggtgtagctaaacgttgccttgcgtcttgatcagttgtataatccgaatctacatggatgttctcaataaaagagcatttattttttatcattaataaaagagcactttgagatttct

SEQ ID NO: 28792 - DNA, 328 bp, Glycine max
  Clone ID: LIB3108-055-Q1-K1-H9
cccacgcgtccgaaaaaaaagtaaaatagcaaacaaagaaagatatagacataatctaagaaggggtcaaatacaagaactgagtggtcttttaagtcagacaatcgaagcaaattgatcattaatcccattgatgtggacactctcgtcaaccggaccaaaggaggtcagtcacctgcacttctgggcttacaccgcagtcaacagccactacatcttcccggttgttctaaaacatgtcaagtggtgggatgttgttaaggaagccagaagtggcttaaaaccgtggatatcccatggttggggtctgaggggtcattaaaccttt

SEQ ID NO: 28793 - DNA, 318 bp, Glycine max
  Clone ID: LIB3108-056-Q1-K1-A1
cccacgcgtccggcaattctctcccctgaacagtttcggatcctcaggcaaaagggcaccgagttccctggaacaggagagtatgacaagttctatgaagagggagtttacaactgtgctggttgtgggactccactctacaggtccataacaaaattcaattcttattcttaataaaattgagtctgcagtttggacgtgactacttaagtacccaacatcggtaaaaaaattatgcaatgtacttatattatgaatgaagttaaaaaaaaaatgatggctaaataacaatgttgataatttgtacctttattcctc

SEQ ID NO: 28794 - DNA, 449 bp, Glycine max
  unsure at all n locations
  Clone ID: LIB3108-056-Q1-K1-A10
cccacgcgtccgcccacgcgtccgaaaaaatactaaaaagaaaaggagaaactctttcctcttattattcagaaggaaagtgtgttttgttcggtggtcaattcccatccacacgcctcaccggaaacatgtcagcggtggttgctggttcctcctcttcattctctgccaccttcactaccagaaggagcccctccttaaaaaactctcaactctctcattccaagacactaacttctcctcaatgccagaagacatctttacaaggcctctcacttcatgaagccaaaaggggtgtttcagaatccttcctagttgagaacaagaatggttcctccattgctggaaggagacttgagatcaaagcaagaactgctggggcctcaaagacaattgaggtggaggttgacaagccacttggcctcaccttangccaaaagtctggtggt

SEQ ID NO: 28795 - DNA, 347 bp, Glycine max
  Clone ID: LIB3108-056-Q1-K1-A2
gaacaatgtggatttgggcactgcatgtggaaaatattacagagtgtgctgccttagcattattgatcctggtgattctgatatcatcaagacactgcctggcgaccagtaaagtagtattgaagttccttgcttgatattttctatttttagttgattccagacattgttgaaagaatatctgattaagttctagactttggtgtaaggtgcatggtttttgggtattctagctgagcatcaagtgtttttgaccttgcaaattttttcatgatgtttcattatgccaatttctatagagatgatataattatagtttgatcacacgcttgctgttaacagcaagc

SEQ ID NO: 28796 - DNA, 391 bp, Glycine max
  unsure at all n locations
  Clone ID: LIB3108-056-Q1-K1-A3
cttgcggctactgcagcaaggtcactagcgattgggaagtgtgatgtggcgcttgtggtgggagcgagactcaactggcttctacacttcggtgaaccaccgaaatggtctaaggacgtgaaattcatcttggtggatgtgagcgaagaggagattgagctgaggaagcctcacttagggttaattggtgatgccaaacacgtgattgaggttttgaacaaggagattaaggacgatccgttttgcttggggagcacgcatccttgggtggaggcgatttcgaacaaggcaaaggagaatgtggcgaggatggaggttcagctgaagaaggacgttgtgcccgttaatttcttgacgcctatgangattataagggatgccattgcgggtt

SEQ ID NO: 28797 - DNA, 445 bp, Glycine max
  Clone ID: LIB3108-056-Q1-K1-A6
cccacgcgtccgttaatttctggcaaagaagatgctgctaataactttgcaaggggacactacactgttggaagagaaattgtcgaactatgcctcgatcgtatcagaaaattagcagacaattgcactggtttgcaaggattcttggttttcaatgctattggcggtggtactggttctggtttgggatcattgctgttggaacggttatctgtcgattacgggaagaagtctaaacttggttttaccatctatccttctcctcaggtatctactgcagttgttgagccttacaacagtgtcctttccactcattctcttcttgagcacactgatgtggttgtgcttttggacaacgaagcaatatacgatatctgcagaagatcattagatatagaaaggccaacttacactaacttgaaccgtctgatatctcaaattatct

SEQ ID NO: 28798 - DNA, 375 bp, Glycine max
  Clone ID: LIB3108-056-Q1-K1-A9
cccacgcgtccgcccacgcgtccgcccacgcgtccgtggattagtgtttctcgtgggtattcttaattctctcatttcttgaagctctatttattctagatcaaaaacgaaatgacccctcccccagaattctttcggattgtcgggcacattaaaaaaggaatggataagttcctaaaaataaagaaaactataacacattataaggaggggtcaaatattaattaagataaaagatatagaatatctatctgtatatatatatatatagatataatttattaataattagaactttcttttttcttaaaaaaaaaaaaagtaaataaaaagatttgatagaatcgtaatttcaattcgattatatagatacat

SEQ ID NO: 28799 - DNA, 447 bp, Glycine max
  unsure at all n locations
  Clone ID: LIB3108-056-Q1-K1-B1
cccacgcgtccgcccacgcgtccgctgatttccgatgttgagaaccttgcggatgccgaaatccccgacaccgcacatcaaattagcaccgattcatggtttcaagtggggttcgtgctgacgacgggaatcaacagcgcctatgtgcttggatattctgggaccatcatggttcccctgggttgggcagggggtgtggttggtttgattctcgccactgcaatatcgctctacgcgaatgctcttattgctaggctccatgaatatggaggaacaaggcatattcgatacagagatcttgctggatttatctatggtagaaaagcttattccctcacatgggctctgcagtatgtcaatcttttcatgataaatgccggctacatcattttggctggttcggctttaaaggctgcttatgttctatttanggaagacgatgggatg

SEQ ID NO: 28800 - DNA, 457 bp, Glycine max
  Clone ID: LIB3108-056-Q1-K1-B10
gaaagagaatccgaggcgaagagaagagaaaaattaagatggaggggaaggagcaggatgtgtcgctgggagcgaacaagttcccggagagacagccgattgggacggcggcgcagagccaagacgacggcaaggactaccaggagccggcgccggcgccactggttgacccgacggagtttacgtcatggtccttttacagagcagggatagcagagtttgtggccacttttctgtttctatacatcactgtcttaaccgtcatgggagtcgccggggctaagtctaagtgcagtaccgttgggattcaaggaatcgcttgggccttcggtggcatgatcttcgccctcgtttactgcaccgctggcatctcagggggacacataaacccggcggtgacatttgggctgtttttggcgaggaagttgtcgttgcccaaggcgattttctacattgg

SEQ ID NO: 28801 - DNA, 424 bp, Glycine max
  Clone ID: LIB3108-056-Q1-K1-B11
cccacgcgtccggcgatggcgtcacatggtttccgtcgatgccctcggcacaccgagcaggcacagcagcactgcccccactgccctctacgtcgtcactgctcccactgccctctccgccgtcactgccaccactgccctctccacaaccctcactttcacgctgttaacttcatcaaaccccaaactcaaccatatttccctcctcttcctcacttcgctccctcacccctcaaaacgcatcccaattttgagtctcttcatcataacgaacaacccttttcttctgatgctcggatttcacttgagctggagcatatagtgctggatggtgaggaagaagaagatgagccggcttttgttctaactgacgaatggagggaattctttgcacaatctgaagctaggagaaaactagaaaaga

SEQ ID NO: 28802 - DNA, 165 bp, Glycine max
  Clone ID: LIB3108-056-Q1-K1-B3
cgccattccggtcgccacctcgtggcttcacaaggaaccccggtttttcctccattcttaaccaccaggacaccaacaccgtcgccggggaagggagggaacactccatgtccaccaccaaagtctcgtgcacaggctacatgccccattgacacgctaaaacta

SEQ ID NO: 28803 - DNA, 450 bp, Glycine max
  Clone ID: LIB3108-056-Q1-K1-B6
gccacgcgtgcgtccacgcgtgcgggcgctttttcccaaaaccaattgcatcactctcgtacgctaccgacgctgacctagaccaccgtacgcgacgttgaacaccgtcttcattcgatcgggcaaaaatgagtcgaggaagtggacgtggatacgatcgacacatcactatttactgccctgaaagacgtttcttttaagtggagtatgctttcaaggctgacaaggctgcaggaatcacctgaatgggagtacgatgaaaggattcaactgtgtgtcgttactaacaagaaaagttcggataagctgttggacaacacaagtgttacacacctgtgagcagatgacgaagtacactggataattggctactgacatgacaggtgatgctaggacactggtgcaacatgcaagaaatgacacagctgatggtcgatgtacatatagata

SEQ ID NO: 28804 - DNA, 424 bp, Glycine max
  Clone ID: LIB3108-056-Q1-K1-B7
ggaggtttcgctctctcagtttcttttccccaaattgtttttcatctaacaatttactttgcagaaccctaaccctagccccttcgcctaccttgtaaccttcctttcgatccttcatctcgcagacaatgggtgaaactaaggacgaagcatacgaggaagagcttctcgattacgaggaggaagacgacaaggcccccgactccgccggagctaaagtcaacggcgaagctaccaagaagggctatgttggaattcacagttcgggatttagggacttccttctgaagccagagcttcttcgggctattgtggactcgggatttgagcatccatctgaagtgcaacatgagtgcatacctcaagcaattctcgggatggatgtaatttgtcaagcaaatctgggatgggaagactgctgttt

SEQ ID NO: 28805 - DNA, 439 bp, Glycine max
  Clone ID: LIB3108-056-Q1-K1-B8
cccacgcgtccgctttttttttttttttttttttttttaatagcaaatatgagttccaatgtcattttaatgtggtgatataaaccacgacaaaatgcccaaataacctttcatatatggacacaagagttaacatacaaggggtcaaataaggctatgtggacaggtccagaactggaggtttggaagttgcaagccatgaaaggaagaaactacttggtcttgtcttcaatttttgtcgatgttgatgtaaaagtaacggggttcgttggatggtcctttacagttaagctaagcacttcaggccttgaatagtgtccaaccacatcaaaatcaaacttagctcttgcaatttctccaagatcaaggtctgctgagattagcgcctccccgtcataatttggtccaagcagaacagcccctaatggtgatataatga

SEQ ID NO: 28806 - DNA, 116 bp, Glycine max
  Clone ID: LIB3108-056-Q1-K1-B9
cgcagaataaaatttctcatcgacgatggtgtataccttacaacgcgcccttcgcgccagcatggtccggccgtcttcaaccggcccattgcccgaaattaaccgaggcgaaatcg

SEQ ID NO: 28807 - DNA, 426 bp, Glycine max
  unsure at all n locations
  Clone ID: LIB3108-056-Q1-K1-C1
ctgaagtgtctgcttcttccgattccggcacgccctcatcaccatggtgaacgttccgaaaacaaagaagacatactgcaagagtaaggagtgcaggaagcacaccctgcacaaggttacccaatacaagaagggtaaagatagcattgctgcccaaggaaaacgccgttacgatcgcaaacaatctggttatggcggacaaactaagcccgtcttccacaagaaggctaagaccaccaagaagattgttctgaggttgcaatgccagggttgcaagcatgtctcccaacacgctattaagaggtgcaagcactttgagattggtggtgacaagaagggcaagggaacatctctgttctagtttgcgaattangattcgcagctttttatgtttcagcaatgttggaatcttttagtttctctctg

SEQ ID NO: 28808 - DNA, 436 bp, Glycine max
  Clone ID: LIB3108-056-Q1-K1-C10
cccacgcgtccgaatcaactgtgataatggcgtctgggatgtgtgctagcgtagtcctgtttatggcactggttccagctggtggacatcttgtgaccactacggattgttataggaagactagaatattcattgagacttttcttccaaagatggggatcacgaccactgtaattgatccagcagatgttggagccttggaatctgcattggagcagcacaatgtgtctctattcttcactgagtctcctaccaatccattcctgagatgtgttgatattaagctggtttcagagctttgccacaagaaggggactttgctctgtattgatggtacatttgcaactccattgaaccagaaggcccttgcccttggcgctgatctgattctgcactccttaacaaaatacatgggtggacatcatgatgtccttgg

SEQ ID NO: 28809 - DNA, 404 bp, Glycine max
  Clone ID: LIB3108-056-Q1-K1-C11
gtttcagtgagtgatcggtgttcacttgatccttcataagtcgtcatcatcatcatcatcatcaccgttgattgaagaagatgccgatcagaaacatcgccatcggaaggcctgaagaggctactcaccccgacacgttgaaggcggggttggctgagttcatctccaccttgatcttcgtgttcgccggttcaggttccggcatcgcctacaacaagctcaccgacaacggcgccgccactcccgccggcctcatctccgcttccatcgcccatgctttcgccctcttcgtcgccgtctccgtcggcgccaacatctccggcggccacgtcaaccccgccgtcaccttcggcgccttcgtgggcggcaacatcaccttactccgcggcatcgtctacgtcatc

SEQ ID NO: 28810 - DNA, 457 bp, Glycine max
  Clone ID: LIB3108-056-Q1-K1-C12
cccacgcgtccgcccacgcgtccgggagactcaatgcaggttgatagcccaacaacggagaagaaatcagagcctgagccatcgtttgagattctgactaatcctgcaagggtggttcctgcacaggagaagtttattaaatttttgcaggacagcagatatgttccagttaagttggcaccatcaggatttgtgcttctcaaagacttgcgtcctactgagccagaagtgcttgctctcactgacacaccttcatctaccacttcggctgctggtgggtcagcaacaggattgcagagttcttcatcagccatggctgtggatgaggaacctcagcctcctcaaccatttgaatacacctcatgagtttggtcctgattcattaagttcaaatattcatcatggtgcttatgaaaattggttcttctgaggagagtagctacccgaatggatcaac

SEQ ID NO: 28811 - DNA, 187 bp, Glycine max
  Clone ID: LIB3108-056-Q1-K1-C2
ggtactataaaacacctgagcttatattagccgcaactgaatacaccaccgacattgatatctggtcagccggtcgagaactgagagaactattgcttgagcaaccgatattacatgtggagagagagatgtaacagcttgttgacattattaacgtgttaggaacctacactagggaagaaattaa

SEQ ID NO: 28812 - DNA, 174 bp, Glycine max
  Clone ID: LIB3108-056-Q1-K1-C3
cttctacttccctttgttctcaaaccttatcccttatcctcccaaaaccaaaccatgtctacctccgcagcttctttcgcactcccaaccctcactctccgaactcgacaacctttctgttctccccaatgcttttcctcgtccttttccttaacccttaactccaaacccatt

SEQ ID NO: 28813 - DNA, 432 bp, Glycine max
  Clone ID: LIB3108-056-Q1-K1-C5
gttgagaactaagaaggagaagcaaatggcttcctcaatgatctcttccccagctgttaccactgtcaaccgtgccggtgccggcatggttgctccattcactggcctcaagtccatggctggcttccccaccaggaagaccaacaatgacattacctccattgctagcaacggtggaagagtgcaatgcatgcaggtgtggccaccagttggcaagaagaagtttgagactctttcctacctgccagaccttgatgatgcacaattggcaaaggaagtagaataccttcttaggaagggatggattccttgcttggaattcgagttggagcacggtttcgtgtaccgtgagcacaacaggtcaccaggatactacgatggacgctactggaccatgtggaagctgcctatgtttggttgcactgatgcttc

SEQ ID NO: 28814 - DNA, 164 bp, Glycine max
  unsure at all n locations
  Clone ID: LIB3108-056-Q1-K1-C6
cttgagagaggtgagaagggaattggggatggaactgttagctatggaatggatgatgctgatgacatatacatgcaatcttggactgggactatcatcggtcccnctagtactgttcatgaagggcgtatctaccagttgaaattgttttgcagcagggatta

SEQ ID NO: 28815 - DNA, 379 bp, Glycine max
  Clone ID: LIB3108-056-Q1-K1-C8
cccacgcgtccgcaatacacctactggaacttgtgctgtttgtgtggttggcggtgaaaggtcccttgttgccaacttatcagctgcaaattgctataagtctgagcatttgacgagaccggaaaattgggcattagttgaaaaggccaagtatttctacatttctggctttttcctcactgtatctcctgattccatacaattagttgctgaacatgcagctgcaaataacaagttcttcatgatgaacctttctgccccatttatctgtgagttcttcaaggatgcactgaataaagttctgccatatatggactacgtttttggtaatgagactgaagcaagaacattttctaaagctcaaggctgggagactgat

SEQ ID NO: 28816 - DNA, 448 bp, Glycine max
  Clone ID: LIB3108-056-Q1-K1-C9
cccacgcgtccgctctcacgagtttgtataaggagagaagcggacatgaagaagcaattagcatcaaggcgtttgctgatgtgggttatggtacatttgagcatttcaggagtgttgtccaagtccaaccacaccacaactacaacttctctgctgtgcgatggctccgtagaggactgcctcaacgttcaccacttggactcacagcttcccaccatctccagcacccacttccgcagaatcctcgctggagaaaaatgctgcagaggtaacactcagactgcaggtacaggtgatcccaataatcccaacttctgttcgaccgcaaccggttatcgtaagtgtggggccgcaactgatcctggtcaacccaaccgatgtgctgatccaaatgccttccacaggggttgccatatgtaagctatgtatgtattatttctaatgcttt

SEQ ID NO: 28817 - DNA, 450 bp, Glycine max
  unsure at all n locations
  Clone ID: LIB3108-056-Q1-K1-D1
cgtttaacaaaattgcattctctatttctcttcccctctcatcattttaatcacgcgcacatcagcacaacacaacaattcactaagctaaaatcacttcatcatggcttcctcgtgtgcttcctctgccattgcagctgttgccatctccacaccaagttcccagaagaatggatcactcttgggaagcacaaaagcttcttttcttagtgggaggaaactgaaggtgaacaactttacagcaccagttggagcacgatccagcactacagtttgcgcagttgctgagcctgataggcctctgtggttcccaggcagcacccctcctccatggctagatggcagtttgccaggagattttggctttgatcctctaggtcttgcatctgatcctgagagcctgagatggaatgtccaagcagagcttgtgcactgcanatgggccatgtt

SEQ ID NO: 28818 - DNA, 423 bp, Glycine max
  Clone ID: LIB3108-056-Q1-K1-D11
ctctctctctctctacgctttctcgtttgagatccctcaagggatccactaactgaaggagcaatggggttgacatttaccaagctttttagccggcttttcgccaagaaggaaatgcgaattctaatggttggtcttgatgccgctggtaagaccaccatcctgtacaagctcaaacttggagagatcgttaccacaattcccaccattgggttcaacgtggagactgtggaatacaagaacattagtttcactgtctgggatgttggtggccaggacaagattcgtcccttgtggaggcactacttccaaaatacacagggtctcatttttgttgttgacagcaatgacagggacagagttgttgaggccagagatgagttgcacaggatgttgaatgaggatgaactgagagatgcagta

SEQ ID NO: 28819 - DNA, 455 bp, Glycine max
  Clone ID: LIB3108-056-Q1-K1-D12
gtaaaaatggcgcagcgtgtgaccaaaaacacattcgtgcaaggaaaacccttccttccagttccagcagctcccactaaaaatgttcggagagtggttcagtgcggtgtgtggtgcaggaagaaggagatacacccgcaattccacgaggaagcgaaggtgtactgcaacggggagctggtgctgacgacaggtgggacccagaaggagtacgtggtctacgtgtggtcggggaaccaccctttctacctcggaagccggtcggcgtctatggtcagcgacgaccaggtcgagaagttccgcaagaagttcggagagctaaaagagatcatggagattcctgttctcaagggagagattgttatcccctcaagacgcaagggcgtttccaaaggaggcaagaaaaaataatttattcgattcaaacatgattgtcttttttcttcttcttaatt

SEQ ID NO: 28820 - DNA, 414 bp, Glycine max
  Clone ID: LIB3108-056-Q1-K1-D3
aaagaaaaaaaaaacccttagccaacacaaccattatggccacctctgctattcagcaatcagcattcactggtcaaactgctctgaagcagctcaatgagttcgtccgcaagaccggtggcgccggcaaaggtcgcactaacatgcgccgcaccgtcaagagtgctcctcagagcatttggtatggccctgaccgtcccaagtacttgggtccattctcggagcagattccatcatacctgaccggagaattccctggtgactacggatgggacactgctggattatcagctgacccggaaaccttcgccaggaaccgggagctggaggtgattcacagcagatgggcaatgcttggtgcccttggctgcaccttcccagagatccttgagaagaatggtgtcaaattcggcg

SEQ ID NO: 28821 - DNA, 382 bp, Glycine max
  Clone ID: LIB3108-056-Q1-K1-D4
gcctcactacaagctgcagctaccttcatgcaacccaccaaggttggcatagcctctcgcaacctcaaatctacacaatgcatttctaaggcttttggcttggaacctgctgcagctaaactcacttgctcccttcagcctgatctcaaagaatttgctcaaaaatgtgtcgacgctaccaaaattgcaggattcgcccttgccacctctgctctcgttgtttctggagcaagtgcagaaagtgttccaaaaaggctaaccttcgacgaaatccagagcaagacatacttggaagtgaagggaactggaactgctaaccagtgcccaaccattgaaggtggagtggactcattcgccttcaagccagggaaatacaacgccc

SEQ ID NO: 28822 - DNA, 383 bp, Glycine max
  Clone ID: LIB3108-056-Q1-K1-D5
aaaaaagattctaaagaaatataactaatattctttagaataatcaaaaagaatattaaattcaaataaattttagatagaaaaaagacttaaaaaggaggatttgaaatgcgagatctaaaaacatatctttccgtggcaccagtagtaagtactctatggttcggggctttggcgggtctcttgatagagatcaatcgtttttttccagatgcattgatattcccttttttttcattctagttattgacacggaaaggggtgaagaagattatagatccaattaagtattaaatatatgtaattaatatgtaattaatctcctcttctttatttcgtcttttatttcttcttttttttacaattgtaatagaataagttag

SEQ ID NO: 28823 - DNA, 412 bp, Glycine max
  Clone ID: LIB3108-056-Q1-K1-D6
cccacgcgtccgcggacgcgtgggttcacctcctcagcagtcgtcagaaagactccataacccaaaaatgcctttcaagaggtacgttgagattggaagggttgctcagatcaactatggcaaagagtacgggcggctcgtgatcattgtcgatgtcattgaccagaatagggctcttgttgatgctcccgacatggtgaggtcccaagtgaacttcaagaggctctcgctcactgacatcaagattgatattaagaggattcccaagaagaaggatctcattcaagccatggaggctgctgatgttaagaacagatgggagaagagttcttggggcagaaaactgattgtgcagaagaggagggcatccctcaatgactttgataggttcaagataatgttggcaaagatc

SEQ ID NO: 28824 - DNA, 312 bp, Glycine max
  Clone ID: LIB3108-056-Q1-K1-D7
cagatatttcatgtatgtgctattgttgtatgtattttttgtctagaactctccatatgtaaactaaaaaataggcaaatggaaaaaaattcagacgattttgatatttataagttctttcattatgttcaaaaaaaaaaaaaaaaaaaaaaaaaaaaaccaaaaaaaaaaaaaaagggcagacaataaaaaaaaaaaaaaaattcatacccgtacatgcaaaaaaataattcttatatagtgataccaaaatttaattcattggtcggggaattaaaacaaaataactggggggaaccctttaaagaccca

SEQ ID NO: 28825 - DNA, 372 bp, Glycine max
  Clone ID: LIB3108-056-Q1-K1-D8
ctcatcttcctctttttctcaacaaaaggtgttcaattctagctagttctattacgtcgtccgcgaccatgaacatggcgatcgcgcttctgttcatggttttcgcagtttcatcagctttagacatgtcaataatatcacacgacaacgctcatgcggatagggccacgaggcgcaccgacgaggaggtgatgtcaatgttcgaggagtggctggtgaaacacgacaaggtgtacaacgcgctcggtgagaaggagaagaggtttcaaatcttcaagcacaatctgcgcattatcgatgaacgaaactctctgaaccgaacctacaagttgggactcaacgtgttcgctgatctcaccaatgcggagtaca

SEQ ID NO: 28826 - DNA, 426 bp, Glycine max
  Clone ID: LIB3108-056-Q1-K1-D9
gtgaaagtcattcctgcacatcgaatggcgtttcacggtgacgatgacaccatggtgatggtggttcccaaactctctccgcccaacacctacgaagccgtcgtcaatggtggcaccttcgaccgattgcacgacggccaccgcctcttcctcaccgcttcagcggagttggcaaggcgccggattgtaattggagtttgcgatggacctatgctggcaaaaaaacagtttgctgaactgatacagcccattgaggaaaggataaataatgtcaaaactttcataaagtctatcaagccggagttggaagtgcaagctgtgccaatcacagatccatttggcccttccattacagatgagaacttggaggctgtgattgtaagcaaagagacattaccgggaggattggctataaacagaagaaga

SEQ ID NO: 28827 - DNA, 249 bp, Glycine max
  Clone ID: LIB3108-056-Q1-K1-E1
cccacgcgtccgattggatccaaccaaactgcactttttagttataactaagaaaatgtgcataatcccgcgaattacttctgaaaattacttctgaattaatgaaattttttcaataatttaagaaaaaatatttaagaactatagcatttcgcgatttattggtaatccactttgattctctattaaccaataattttggactattaccatggttaaagtgaatagtttgaagtctagacgcagtgt

SEQ ID NO: 28828 - DNA, 208 bp, Glycine max
  Clone ID: LIB3108-056-Q1-K1-E10
acgtctacgcgttcgtgcactcgtcctgtttattttccacgaattccaaaatccaataggggtgggctcttggggggaagggggtatccaattctttccaaaaccctaaccttaatactcctaaatgaacgccagttcaagctcacgtggagttcgtttactacggcttacccgtcagacttctccttttcaccacggtttaaggtta

SEQ ID NO: 28829 - DNA, 424 bp, Glycine max
  Clone ID: LIB3108-056-Q1-K1-E11
acaagatcaaaggccgacaatttagcagctcaaagagccagagactttcatgttggatggttcattcatccccttgtttatggagagtatccaacaaccattcaaaatattgttgggaatagactccccaaattcactagtgaagaagttaaaatcgtgaagggttcaatagattttgttggaatcaaccaatatactacgtactacatgtatgatcctcatcaagcaaaacctaaagtcccaggctatcaaatggactggaatgcaggatttgcttatgcaaagaacggagtgcctattggtccaagggcttattcttattggctttacaacgtaccatggggcatgtacaaatcattgatgtacataaaggaacgttatggaaacccaactgtgttcttatcccgaaatggcatggatgatc

SEQ ID NO: 28830 - DNA, 404 bp, Glycine max
  Clone ID: LIB3108-056-Q1-K1-E12
cccacgcgtccgcccacgcgtccgcccacgcgtccggtaccctgaaactgaacacaagctttttgttgggaacctgtcatggtcagtaactaatgagatattgacacaagcctttcaagaatatggaacagtggttggagcaagggtcttgtatgatggagaaactggaagatcacgtggctatggtttcgtttgctattcaacacaagcagagatggaagctgctgttgcagccttgaatgatgtggaactagaaggacgggctatgcgtgtaagcttggctcaaggaaaacgtgcataaggttaatagaaatttgggaaggcttagatgttcaacaatggtgccatagaaatgagaagaggatgcacttgatgtaattttctgaggaattccttttcatttc

SEQ ID NO: 28831 - DNA, 395 bp, Glycine max
  Clone ID: LIB3108-056-Q1-K1-E2
gtccgaaaccactcataacacaaagcacaaagcaaagctcatccttgagttaaaaaatggcagcagcttcttccatggctctctcatccccatccttggctggcaaggccgtgaagctgggcccatcagccccagaagtgggaagggtgagcatgaggaagaccgtcaccaagcaggtctcctcaggaagcccatggtacggcccagaccgagtcaagtacttgggcccattctctggcgagcccccgtcctacctaaccggtgagttcccaggcgactacggctgggacactgctgggctttccgcagacccagaaaccttcgccaagaaccgtgaactcgaagtgatccactccaggtgggccatgctcggagccttgggctgcgtcttcccg

SEQ ID NO: 28832 - DNA, 446 bp, Glycine max
  Clone ID: LIB3108-056-Q1-K1-E3
ggcaaatccaaaccaattccctggagtcctcttagcatgttttggaatttgtaccttgttgtatgctggagctgctgtattgggatacacaatgtttggagaagctattctgtctcagttcactcttaacatgcctaaagaattggtagcaaccaagattgctgtctggactacggtggttaatccatttaccaagtatgcgttgactatatccccagtggcaatgagtctggaggagttgataccatcaaaccatgccaagtcttatctatattccatcttcatcagaacagggttggtactttctaccctggttattggtctctcagttcccttttttggtctggtgatgtcattgattggatcattactcacaatgcttgttactttgatactaccctgtgcttgtttcctaagaatcttgcggggcaaagtgacacgaacac

SEQ ID NO: 28833 - DNA, 455 bp, Glycine max
  Clone ID: LIB3108-056-Q1-K1-E4
caaagtttcttcctttctctgctctttgtcttctctgacacatttggggccttgttgagtgtgtttttgcaagagggtatggcgaacgacgttgaggttgctgagcgtggctccttctctgggaaggactaccaggaccctccaccagcaccactcattgatgctgaggagctcacaaagtggtccttttacagggctcttattgctgagttcattgccactttgctcttcctctacattactgtgctcacagttatagggtacaagcaccagacggatcatgctgatgcgtgtggtggggttggcattcttggcattgcatgggcctttggtggcatgatcttcatccttgtctactgcactgctgggatttcaggaggtcacattaacccagcaatgacatttgggcttgttttggctcgcaaggtgtctttgatccgagccatcatgtacat

SEQ ID NO: 28834 - DNA, 67 bp, Glycine max
  Clone ID: LIB3108-056-Q1-K1-E5
caaaaagtatgttaagctgaatttcaacatacgtatgctgaaatatttatatttccttgttgcgatg

SEQ ID NO: 28835 - DNA, 457 bp, Glycine max
  Clone ID: LIB3108-056-Q1-K1-E6
aaatttacactgtttgaaaaatgacccttgttattgaactgaggaacacgcaaactgctcccacggaagggtttttagcgcgcactgttgtttcttgtggcgatataggtaaactgtgaactcagttggttataacttgctaacaggcagaaagttgttgaagtccctcaattgtgcttccctgcatcctttcccaaagtctctgtctggtgcaatggtttatataactgagtgggacaagtttgtggagcaatccattgagctgttccgtgcagatcctgattctacacggtacgtcatgaagtacaggcactgtgatggaaagttggtactcaaggtcactgataaccaacagtgtctaaagtataagacagaccaagcacaagaagctaagaaaatggagaaactgaataatatgttctttgctttgatggctcgtggtcctgatgttgatcta

SEQ ID NO: 28836 - DNA, 381 bp, Glycine max
  Clone ID: LIB3108-056-Q1-K1-E7
aagaaaatcctcacccattttcttcgtagccaaacactctgaaattctcagttatgtcgtggcaagcgtatgtggatgatcacctactgtgtgaaatcgaaggtaaccacctcactcacgccgctatcatcggccaagacggaagcgtttgggctcagagcaccaacttccctcagttcaaacctgaggaaataactgccatcaataatgactttaatgagcctggatcacttgctccaactggattgtatatcggtggcaccaaatacatggtcatccagggtgagcctggtgctgtcattcgagggaagaagggtcctggtggtgttactgtgaagaagaccggtgcggccttgatcattggcatttatgatgaaccaa

SEQ ID NO: 28837 - DNA, 269 bp, Glycine max
  Clone ID: LIB3108-056-Q1-K1-E8
tttctttgttcaggctattgtcactggcatgggccctattcagaacctttacgaccacgttgctgatcctgttgccaacaatgcttgggcttatgccactaactttgtccctggacaatgaggatgcctacatgcaatgcaatcttctgctcccttttgcagttcccttgtgtttaactccattttcactaatgtaactacacctgtgtagcagaaaaatctgtatgagaaccattatatttttatatattagaaatttgggtccccag

SEQ ID NO: 28838 - DNA, 423 bp, Glycine max
  Clone ID: LIB3108-056-Q1-K1-E9
cccacgcgtccgcccacgcgtccggataaatcgccatgaatcccaaaatcctcttcgtgtttgctcttcttctgaatctcgtatccaattcgttccaaaaccctaaccctaaaacccctaaatcaacgccgtcgcaggctcacgtggagctcgtcaactacggcttacccgtcggtcttctccccgccaccacggtctcgggctacgccgtgaaccgtacctccggcgagtttaccgtcaagctcagcggcgcgtgcaagatcacgctcccgccggacaactacgtcgccacctattccgacaccatcaccgggaagatcgtgaagggaaaaatcgcggaactcgagggaattagggttcgcgcgttcttcaagtggtggtccatcaccggaatccgctcctccggcgacgacatcgtcttcg

SEQ ID NO: 28839 - DNA, 428 bp, Glycine max
  Clone ID: LIB3108-056-Q1-K1-F1
gtggccagcgtaagaagaatggcttctcaaagtttgagtttaccaccaacacatattccttacaataggataattgggaagcttgattccaagtttttgttgtggccttcttgtgctcatatcaaacccagaagaatttctacctcaattcgagcaatgggttcctccgcttcttcccactcccagtcacaatatgcagacagcgttgaatctgaagcaggagctgatactattgactataaatctttaaccgatgaagagtggaagaagcggctcacaaatgaacagttctatattactcgtcagaagggaactgaaagagctttcactggggagtactggaatactaaaaccccggggatttaccattgcatatgttgcgacacacctttattcgaatcatctactaagttcaatagtggaactgg

SEQ ID NO: 28840 - DNA, 433 bp, Glycine max
  Clone ID: LIB3108-056-Q1-K1-F10
gccagtcacatctgtacccccgtcattttattgattgggtgtgaaggcagtaaacctacatcaactatttaccattcatgtaactgaagcttagaaacattcacttgtaacatttgacaaggagataccaggatttatctgcaatgatgctctccttcatggcgtagagactaggactagttccccaatccaaattccacgcaatggtgacacttatgaatgcacttcggtaaaaggactatatccagttggtgaaggagcaggctatgctggagggatcattagcgcagcaatagatggaatgcatgctggttttgctgtggcaaaaaaattcagcttgtttcatggagatgttgagtctgttctgggcaaggctcaaaatgttggagttgtcaagtactaggaagatctaactttcttcagacactgtctt

SEQ ID NO: 28841 - DNA, 427 bp, Glycine max
  Clone ID: LIB3108-056-Q1-K1-F11
atttgtgcaaccaaggggactgaagcttggcttaaaaaactcgagtggacagggcttcaaaatttcttggagaaagacagaacccccctctactgtggaagtgacaaaacgaccaaagggttttttaagtcatacaaaaacctacaattctattggatccttggagcgggtcattttgtacctactgaccagccctgcgtagcactggatatggtgggtgcaattacacaatcaccagcggcttgaggataatatgcaccgaatgaaataaaatataaaattgtacaattaaataaacactaaaataaaatcacccagataatggctatgaggtttatattacgagttttgtcgggtatattcaatttttttttttaatttgggcatatctatgatgttaggtgtagcaatgatgataagtaatgac

SEQ ID NO: 28842 - DNA, 185 bp, Glycine max
  unsure at all n locations
  Clone ID: LIB3108-056-Q1-K1-F3
cggacgcgtgtacgaacacaggcggcttgtttnngttgttgaaacaagacacatatattcgggctggattaaaacttacgtgatgggcggggaccaactatactctgtaatccttatatctcatctatctgaagacccgtatagaagccgtaccgttatttcgatgctatggagattctaaaatg

SEQ ID NO: 28843 - DNA, 271 bp, Glycine max
  Clone ID: LIB3108-056-Q1-K1-F4
ctatgaatgctctgttataatttatcttactgactagtaaaaaaaaaaacaaaaaataatggcagggtaaaaaagaacaatgggcgggaacaaaaaatatgtgaaatactctgtggccgtccaaaaagaaacgaatcgaaaccatcgcgtacttgcaactaaaaaagatttaaaattgattaactaaaaataataataattggccgacatgggggggcgccttttcaggagaaaacactgtccacccccaacttaataacccatgcttttt

SEQ ID NO: 28844 - DNA, 427 bp, Glycine max
  Clone ID: LIB3108-056-Q1-K1-F5
cccacgcgtccggagttttaaagcctgggggcaagtttgtgtgccttaccttggctgaatctcatgtactaaatctacttttctcaaagtttcgacttgggtggaaaatgagtgttgatgccatacctttaaagtcttctggtaaacctagccttcaaacgtttatggttgttgtggagaaggagctgtctactttagtgcatcagattacatcattgctccataattcttcacttcatagtaattcaaaacaggtttctggactccacgaggctcttcaaaatgagaatcaaattcgtgaaaaatactccagtggctctgatatattatattctgtggaagatctgcaagaggagttgacaaagctttctcaaggtcgacgattgcagctaactttggggggacaagggtactcccacttttctta

SEQ ID NO: 28845 - DNA, 337 bp, Glycine max
  Clone ID: LIB3108-056-Q1-K1-F8
gctgcaccaagggaaacagctatggtgttattgtagagactgagaagagttacatcgagactgttgtcatggatgttccagcagctgagcatgatgggaagtgcaagtgtggcactaactgcacttgcacggactgcacctgtggccattaaggaatatgtatgaaaatgtaattgccatgtgtttggcaatacaaatatccaaataatgtaatcttcgtatgaataaatgtgtgtgctgttatcctacttcaggtctgtgtagtcatgcagtctgaatcatttcaagttcctgtcttagttaatataacagccatggttgtggcattctatggttt

SEQ ID NO: 28846 - DNA, 438 bp, Glycine max
  unsure at all n locations
  Clone ID: LIB3108-056-Q1-K1-F9
aagagaaagccgtcgctatcctagtctcttcttcccctctacccatttcagtttcaggatggaatctcaggtgaagcacgcccttgttgtcaaagttatgggtcgtactgggtctagggggcaggtgactcaggttagagtgaagtttttggatgatcaaaaccgacacatcatgaggaacgtgaagggacccgtgagagaaggagacattctcaccctacttgagtctgaaagagaagcaagaaggttgcgctagaggatctcttcatggtttggctcangacttaaacaaaacatcgttgtttttgttgtagttaaaggatgtcaaatgttaattgtcatggacctgaattatgcacctactatgtttgacattatgccattatgtttggggctgacttatgactaaatttatgctttgactatatgaggtgtttc

SEQ ID NO: 28847 - DNA, 412 bp, Glycine max
  Clone ID: LIB3108-056-Q1-K1-G1
cccacgcgtccgagactgatacagtctaagatgatgctcgcaaattttgggatttggaagtaaggcttgagcatgtgtatcatgtgggaacttaaacaacagaaaatccaaatagtataattgttgttgtttaagttcccacacggtgaaattttcccacatgatactaattaccgagccacaagttggttgagtttgtcaagtttcatccattttttggagaagcaggttgtttgaatctttgggtacggacccagacgagcacccgaactttttaagtcttagatgggtaaagaccatgttatttttatcaggagaaatcgaagtggttgatttgggaagagaattattctctctacctccaagaggctaacaattggctaatttaacatatcttcaattcatattcttc

SEQ ID NO: 28848 - DNA, 433 bp, Glycine max
  Clone ID: LIB3108-056-Q1-K1-G10
cccacgcgtccgcccgcacgtgccttgcttccgcggcaccactgccgcacgtgccactccatcggagcctcatcatgactccgccggaggcctcgaattccgacgcgtctcgacatccaaacgccgcctcatcaacctctccgtccgccacgctagtcgcgtcaccgcggcgtcgaatcccggcggttccgacggcgatggtgacactcgagctcggagctgccggcgcggcgtgctgatgacgccgttcttagtcgccggcgcgtcaatcctgctctcggcggcgacggcgacggcgagagcggatgagaaggcggcggaatcggctccggctccggcggcgccggaggagccgccgaagaagaaagaagaggaggaagtgataacgtcgaggatttacgacgcgacggtgataggagaacccgtggcgata

SEQ ID NO: 28849 - DNA, 411 bp, Glycine max
  Clone ID: LIB3108-056-Q1-K1-G11
cccacgcgtccgggtacagaaaatggtgaagattattggatagcaaagaattcatatagtgataaatggggagataatggctatatcagaataaaaagaaaactgagcacttgtaaatttggaatcgagggttactatcccattataagagtcaccgatcaacaagcccccaaatattcgtgacaatggcatcggctaactgagcccattgaggctttggaagtaattaataacgaggccaaagtttgatggagactatctttgagctattttatctttatataagtattgtaatttctgttccctaaatcatctggttgctgcacgtgttggccccagattgagtatctgtttagtctatctacagtatctatctaaataaaggtgcgatggctctatgggcatcattat

SEQ ID NO: 28850 - DNA, 440 bp, Glycine max
  Clone ID: LIB3108-056-Q1-K1-G12
ctctgattctgtggtatatagtgtataaaagcaccacgtcggaaactgccaaaaggcacatgtaacttgtctacttatccttgtgtgtgttttgctcatgtctcagactattttgcgaagatgcgttggcgttttctttttcaaaagccacatacatacttgatttgcgagggatagaatattacatggttgacaatctaggcaaagactggccaccgaggtctatttttgaagatatgccaattttatgatgcgattcgaacattatatttccatggctcaattgatgaactatgtccttgagcgaaaactctgcttgacaaattgtgtgcatagccttttcttggttgattccatactaaatttgtaaattaggattattttttgtcttagattaatcatgttgcatattgaaataatcaacgttgttaatgagcgat

SEQ ID NO: 28851 - DNA, 404 bp, Glycine max
  Clone ID: LIB3108-056-Q1-K1-G2
tgggagcagagggagcgaagagaaaaacaaatatggagactcctcctccccaacaaggcgtcgtgaagaagaaggagacaaggggcgcgaaacccaaaccaaaggacgaacacgggaagggtttgaaggaaggtaggaaaacacaacaacaacaacaacatcatcatcagcagcagcaacagcaacaagatcaaccttcggtggacgagaaatacacgcagtggaagtcccttgttcctgtcctctacgactggctcgccaaccacaacctcgtctggccctctctctcttgcaagtggggcccccagcttgaacaagccacttacaagaatcgccagagactctacctttctgagcagactgatggtagtgtgccgaatactctggtgattgcgaattgcgag

SEQ ID NO: 28852 - DNA, 430 bp, Glycine max
  unsure at all n locations
  Clone ID: LIB3108-056-Q1-K1-G4
cccacgcgtccgaatcaactgtgataatggcgtctgggatgtgtgctagcgtagtcctgtttatggcactggttccagctggtggacatcttgtgaccactacggattgttataggaagactagaatattcattgagacttttcttccaaagatggggatcacgaccactgtaattgatccagcagatgttggagccttggaatctgcattggagcagcacaatgtgtctctattcttcactgagtctcctaccaatccattcctgagatgtgttgatattaagctggtttcagagctttgccacaagaaggggactttgctctgtattgatggtacatttgcaactccattgaaccagaangcccttgcccttggcgctgatctgattctgcactccttaacaaaatacatgggtggacatcatgatgt

SEQ ID NO: 28853 - DNA, 106 bp, Glycine max
  unsure at all n locations
  Clone ID: LIB3108-056-Q1-K1-G5
acgcccacgcgtacggatttcttctcatccaananaaaaaaaaaaaaaaaaaaaaaaaaaaaaagaagggaaaaaaagaaaaagggggaaggggggtaagggttaa

SEQ ID NO: 28854 - DNA, 446 bp, Glycine max
  unsure at all n locations
  Clone ID: LIB3108-056-Q1-K1-G6
gtttgttgttgtaactcgttcttcttcttttgttgttctgtgtttgtgtttgttttttctctcacctgaaaatgtcttgctgcggtggtaactgtggttgcggaagctcctgcaagtgcggcaacggctgcggaggctgcaagatgtacccagacttgagctacactgagtcaaccaccaccgagaccttggtcatgggagtggcacctgttaaggctcaatttgagggtgctgaaatgggtgtgcccgctgagaacgatggctgcaaatgtggaccaaactgctcctgcaacccctgcacttgcaagtgaggtgttgggagagcaagcttcaagcagagatagcccttaattaggaataatgataaactattaatgtgtagctaanaacttatgtattatgtctgtgatggttntcgtgcactctggtgtttgtgtaaacaaaca

SEQ ID NO: 28855 - DNA, 454 bp, Glycine max
  Clone ID: LIB3108-056-Q1-K1-G7
gtgagcaaagaaagatagtgagtgaagtaactgaagagaagaaaaaatgccgtgcctcaacctcagcaccaacgtgtccctcgaaggcgtcgacacctcttccatcctcgccgaagccacctcctccgtcgccagcataatcggcaaacccgaagcctatgtgatgattgtactgaaaggatcagtacccatagcttttggtgggaatgagcagccagcagcttatggagaattggtttccattggtggtcttaaccctagtgtaaacaaggaacttagtgctgcaattgcttcaattctggaaaccaaattgtcagtgccgaagtcgcggttcttcttgaaattctatgacaccaagggttccaacttcggatggaatggatctacattctgaaatccgaattccatgttacattggttgtggtaccttgaatgttggatggagtgttcatta

SEQ ID NO: 28856 - DNA, 450 bp, Glycine max
  Clone ID: LIB3108-056-Q1-K1-G8
gtgacatgtaacaccaaactcactcaaacttacctttgtttttctcctttttctcagtttgattctcttgctcgtggacatggatgtttgccgaaatgtatcagtttcttcaagtgagtgtcagcaagagcttcccacccttgatgaccttttctctcatcagaacacggaagtggattttggcctggaatggttatcagtgtttgtggaagactgtttctctagtaggccaagctgcctcttggcacctggtggtgttcaaaccacaagcactagcacaagcaccaagccttcttcaggcactatattgcaaagaccccaacaattaagtcatcactgtcctttgcagaattttgctgtgccagggaaagcaaggagcaagagaaagagaaagaggctttcagcccctagaacaacaaaacacaccctaagcacatggtcgcaacattt

SEQ ID NO: 28857 - DNA, 362 bp, Glycine max
  Clone ID: LIB3108-056-Q1-K1-G9
caaatactgaaagaaaaaagcaatatggatagcactagtgatgctaggacatattatcaaagtgaaacgcatgatgatcacgtatttaagccaaaagaagataaagataatgcaaacgaagtgttctcaatggattacactccagccagaaggaagccaccgatccacaatttgaattgatcgatcgatggataaatttagtgccacaacttattttatatactaggaaatattttaccatgtattatccaatgtcttgcaattttatagcgttgtaattatctagaatacacggtaagaaaatatgcatgtgtacagtactctgcgagatctctattgaaatttcagaatagtgatacact

SEQ ID NO: 28858 - DNA, 395 bp, Glycine max
  Clone ID: LIB3108-056-Q1-K1-H1
acacccaggggcttgtgcataatccaacctatgacgatgtgtgtacagggaccacccaccactcagaggttgtaaggattcaatatgatccaaaaaattgcagctatgagactctgcttgacatgttctggtctagacatgatcctaccactctgaatagacaggggaatgatgtgggaacacagtacagatctggaatatactactacacgccggaacaagagaaggcggccaaggagtcgttggaacaacagcagaagcagttgaacaggaagattgtcactgagatccttcctgccaaaaagttctacagggcagaggagtaccatcaacagtaccttgagaagggtggccgatttggtttcaagcaatctgcttctaaaggctgcaatgat

SEQ ID NO: 28859 - DNA, 412 bp, Glycine max
  Clone ID: LIB3108-056-Q1-K1-H11
gtagagaagcactcttcgttcttcgactgtctacgatctgctttctctgaattgtgaaaatgtcgctcggagaaactgcttgttcatacgcagctctcatccttcatgaagatggaattagtgtaactgctgacaagatcagcaccttgttaaaaactgcaaaggttccagtagactcttattggccaaccttgtttgctaaacttgctgagaagaaaaatcttggcgatttgatagcaaatgcggcaggcggtggtgcaccagttgctgttgcagctgccccacttgctgctgctgctggtggtgctgctgccgcagctccagctgctgaggagaaaaagaaggaagaaccggaagaagagagtgatgatgatatgggattcggcttgtttgattagggacattctcaatg

SEQ ID NO: 28860 - DNA, 487 bp, Glycine max
  unsure at all n locations
  Clone ID: LIB3108-056-Q1-K1-H12
ctgccgtgccgtaccgaatctgactttccgcctcgacccacgcgtacgaaatccaacaacaacatggtgctatcgctcattgagttgagttcactggttatacaatgtcgaagagagaaggatttgctctgtgccgcttcttaattattattcttctttggggctttgtcgctggcgacgcgccgggaagggaggtgtggtgcgtggcgaagaacaacgcggaggacgcggcgctgcagtcggcggtggagtgggcctgcggcgccggcggagccgattgcggagcaatccacggaggaggaccctgcttcgacccttccaatatgcagaatacggcgtcgtacgctttcaacgattatttncgcaaacacgctatctccgaagagaattgcaacttcggcaacaacgccgccattacctgcttcaaacccagtcagttcacccacacccaccccgttttcttttttcttcttcattccctcgaatt

SEQ ID NO: 28861 - DNA, 440 bp, Glycine max
  unsure at all n locations
  Clone ID: LIB3108-056-Q1-K1-H2
cccacgcgtccggtctctctctgtccctctgcgtttttgacaccgtgtttgttgttgtgtgtgttttccgcggaaaatcaaaatgggtatcattgaaaagatcaaagaaattgaagccgagatggctcggacccagaaaaacaaagccacagagtatcatctcgggcagctcaaggcaaaaatagcaaaactgaggacacaattattggagcctccaaaaggttctagtggaggtggagaaggatttgaagttacaaaatttggtcatggacgtgttgcactgattggatttccaagtgtggggaagtctactcttttgacaatgttaacgggcacacattctgaagctgcatcttatgagtttacaactttgacctgtattcctgggattatacactataatgatactaaaattcagntacttgatcttgctggaatta

SEQ ID NO: 28862 - DNA, 322 bp, Glycine max
  Clone ID: LIB3108-056-Q1-K1-H3
cccacgcgtccggttgatgttgtcggtgatgtccttcaacggaggggtgtttgtggccatcgtcgtgggtctcgctgttggttacttcttcttcaggaacgagggcgaagattcccttgttgttgatacttcttgtgcctgtgcttaaatcctaattacttttaaatctcccaatttcctgtaataataatataataggagtagcagtgcttgttaattatttttctttttttaatttaacaaacttgtttcaaggaatttgggatgtgtaatttcgtgtactaaattttatttaattgtaattgtaataattcatgtcaga

SEQ ID NO: 28863 - DNA, 224 bp, Glycine max
  Clone ID: LIB3108-056-Q1-K1-H4
cggacgcgtgggcggacgcgtggggtttgcagtagttttggtagcaagactttgtattttgcgtggatttagcttactatatgcaggagcagctatctctgtaatcttatatccatctcctgttgcttgtatcgagccgatgggtgtcctgatgtatagagattgcaaatgatgggcgaagtatcttatctgtggtcacaattcttggatcctccaatacgttc

SEQ ID NO: 28864 - DNA, 456 bp, Glycine max
  Clone ID: LIB3108-056-Q1-K1-H7
atcttggaggtatagataaagattcaattttggatttggtgctagcatcccttcccgaagaaacacgaagcaacggcacagacacacaactgcagttaaagcagaagtttgatgccttaaaaggtagtgtaagacacttcagcttcttcccaccaggagggggaggtatgttggcacattctttggcacatctagcatcctggttgaaggttagggaagacgatcaatcaggtgatgggatcgaatctgtgatcaataaagttgaagtttatttggcagaaggaaaacttgctgaagcagcagattgtctagaagaaagtgtgagaagcacacaagctgcagaaattgttgcaggttgggtgagacaagcaagaaacagggctatttctgagcaagctgtgctgcttcttcaatcctatgccaattcccttagccttaacatgatctcaaatttga

SEQ ID NO: 28865 - DNA, 429 bp, Glycine max
  unsure at all n locations
  Clone ID: LIB3108-056-Q1-K1-H8
cccacgcgtgcggagagatcgaagagaacgttttttttttcttctttctttctgaaactttagtggatttggtcatggagaaaagcaagtcattccctgaatactcctgctcctacactgaatttggcttcagtgaaaggtccaactcatataattttaatggtccaaaccagaagggaaatgggttttctgcatcaagtgatccagaaatcaagagaaagaagaggatcaaggcctacaatgtattgacagtggagggaaaacttaaaacaaatgtcagaaacagcttcaagtggatcaagaacaagttcagcgacattcgctacggtgtgtgaactaggatcaaccataagacttgcttgccttggggctagcatgtgttgntcagtaatatcaactttaaaggtaaggcctttataaaggaaaata

SEQ ID NO: 28866 - DNA, 378 bp, Glycine max
  Clone ID: LIB3108-056-Q1-K1-H9
gcttaatgcctttgggagtcttgcggattggtaattctggatgcaggggtgaacattatctagcttttatttcttggtcctcttccaagacaactcgaatttgtgctcatgtaatgcggtttaggacatctcgaatttgtgctcatgtaatgcggtttaggacatctcggtgctaaattgtagtaggattttacttcttgggatgcgtaatactctgatctttctattgggtttggatgcaatgtccataactgtaatggagatactaattcaatgcgccaccgggttctgtctgatttatagttttattttggtcatgtatcattcatatattgagtatgaaatggacattttgtttattgttttgtaagatttccg

SEQ ID NO: 28867 - DNA, 175 bp, Glycine max
  Clone ID: LIB3108-057-Q1-K1-A1
gatttttattctgtaattcagggtcctcccttgatcaaaggatagcttatgtgttgatgttgctggctctggtactcacatacatcattcacttgggctaaatttccttcaccttctgaacttatagagcagaaaaggggtattggtgtttgaaaggggtgttgtgtttggtatg

SEQ ID NO: 28868 - DNA, 328 bp, Glycine max
  unsure at all n locations
  Clone ID: LIB3108-057-Q1-K1-A11
ttgagtccattgaatctacctgntgcaaatntctactatttttcaatggcttctgcagatgttgagttccgttgctttgttggtgggcttgcttgggtcaccggcaacgatgccctcgagaaagccttttcaatctacggcgacatcgttgaatcgaaggttatcaacgaccgtgagactggaaggtccagaggattcggatttgtgaccttcgcctcagagcagtcaatgaaagatgcgatcgcaggaatgaacggccaggaccttgacggccgtaacatcactgtcaacgaagctcagacccgcgccagccgtggtggtggtggag

SEQ ID NO: 28869 - DNA, 350 bp, Glycine max
  unsure at all n locations
  Clone ID: LIB3108-057-Q1-K1-A12
agagaacctaagacacacaacacaacacanacacacagagttagaggagaaatcatcatggcatcagcagcatctgggtttgtgttgtcacttaatgttgcagctgccaccacaaactcaagggtggtcatgttcaacacaaagaacaacgcttctaggcttgttgtaagggcttcagatgagcctgcagcggcggcacccgccaccgccacacccccagctgaagctgaagctaaaccaaagccaccacctattggccccaagagaggtgctaaggtgaagattcttaggaaggaatcttactggtactattgcactgggtcagtgattgctgttgatcaggaccccaa

SEQ ID NO: 28870 - DNA, 153 bp, Glycine max
  Clone ID: LIB3108-057-Q1-K1-A2
cccacgcgtccgtgaagatctcgattagcctaaaattgcaagaacggcttcaggctctggcgatcaacaaacgcatcgcatagatctaagatttgaggctaagagaatggcaacttctgaacttatgtatgaagataaaggacaatgtactgt

SEQ ID NO: 28871 - DNA, 245 bp, Glycine max
  Clone ID: LIB3108-057-Q1-K1-A3
cccacgcgtccgcccacgcgtccgcccgatctagttagggttccttacacgatggagcggttgaagtgtgcgcaactgggtgagaggctgaagaccggtgggccccaattgggccgaatgtgaacggaaaaagtaaaggaattccttaagcgccgacccccgaattcaagattgtggaccaagccacgcttgaaaccattgaagaacccaattggggcatgaatttcaaaatctttggcatgatc

SEQ ID NO: 28872 - DNA, 51 bp, Glycine max
  Clone ID: LIB3108-057-Q1-K1-A5
tccacgcgtccgaaaaaactgaaatttctttcttaaattactgtgacaact

SEQ ID NO: 28873 - DNA, 456 bp, Glycine max
  unsure at all n locations
  Clone ID: LIB3108-057-Q1-K1-B1
tgttgatcgagataactagaaacagtgtgatgaaaatgaaggtccttgttttcttcgttgctacaattttggtagcatggcaatgccatgcgtacgatatgttccctctccgaatgaacactggctatggtgcccgtactccggaggtgaaatgcgcaagttggaggcttgctgtggaagcacacaacatctttggctttgagaccattcctgaagagtgcgttgaagcaacaaaggaatacatccatggcgaacaatatagatcagactccaaaacagttaaccaacaagcttacttttatgccagagacctcgaagtccatcccaaggacacatttgtgttcagtatagatggcaccgtactctctaatattccatactacanaaaacatggatatggggtggagaaatttaactcgaccttgtatgatgaatgggttaacaaggggcatgcac

SEQ ID NO: 28874 - DNA, 359 bp, Glycine max
  unsure at all n locations
  Clone ID: LIB3108-057-Q1-K1-B10
gngaggcgagggtaaggtcgcgtcgtgttgcgtcgcgtcgtgcgctgttcctctgcttctcgtgtttgtgttcagaccgaaccctagctccgcatcgcaaccatgtcgaccaagcaaggtggaaaagctaagcctttgaagaaacccacgtctgataagacggattacgacgagattgatgtggctaacattcagaagaaaaaggaagaggagacggcgctgaaggagttgaaagccaaggcgcaacagaagggaagctttggaggttctgggctcaagaaaagtggaagaaataagggctctttatcatgattgtatgcattcaatattgagccctgtaattacagttgctaccatga

SEQ ID NO: 28875 - DNA, 334 bp, Glycine max
  Clone ID: LIB3108-057-Q1-K1-B2
gtaagaagtgacaacgtatagaaccgaccgcaaatttatccacgaagaggaggatgacgactacgacaacaattgctacgactacgactaatgacaggaattctaatacgactattgctaattgtgacttcatgtaaagtgattcatctataacttatcttctatgtacactgcttttcttatcaattttttccgttttcgtttgctccttttagtgtaacaaaatcggaatcgaaaacagtatctgtctctagctaaggtttttgctattgctatttcaactatgctctctctaattcgatcatcttagagaagtcttaagatttttacctac

SEQ ID NO: 28876 - DNA, 280 bp, Glycine max
  Clone ID: LIB3108-057-Q1-K1-B3
cttacgcgtcctagtctaacacccaaaccttatggaaggctctgtcaacgaacgtcttgattttgggaagatgggatatgggtgcaatcattaccggtgaagatgcaagattcgtgctccctgctgaatcgagatctactcatgccgtcactgtcataacgacgctgccagcttgttgaagaatccctttgatcgacactagctcgttcgccaagatgttaaacaagttgtgtgttcagattgtgacacttagcaacctgttgctcaagtttgcacaaac

SEQ ID NO: 28877 - DNA, 258 bp, Glycine max
  Clone ID: LIB3108-057-Q1-K1-B4
cccacgcgtccgattttcttgctgaaacctggttaagtgcgtatcaatataacgggctgatcatgcaaagatgggatatgggtgcactcattaccaggagaagatgcaagatacgtgctaactgctgacttggagatctactcatagccgtactgtcataacgacactgtcagctcgtagaataatcgctttggtcgacactagctcgttcgccaatatgttaaacatgtaagtctgttcagtttgtgacacttagca

SEQ ID NO: 28878 - DNA, 451 bp, Glycine max
  Clone ID: LIB3108-057-Q1-K1-B5
cccacgcgtccgctcttccccagctgttaccactgtcaaccgtgccggtgccggcatggttgctccattcactggcctcaagtccatggctggcttccccaccaggaagaccaacaatgacattacctccattgctagcaacggtggaagagtgcaatgcatgcaggtgtggccaccagttggcaagaagaagtttgagactctttcctacctgccagaccttgatgatgcacaattggcaaaggaagtagaataccttcttaggaagggatggattccttgcttggaattcgagttggagcacggtttcgtgtaccgtgagcacaacaggtcaccaggatactacgatggacgctactggaccatgtggaagctgcctatgtttggttgcactgatgcttctcaggtgttgaaggagcttcaagaggctaagactgcatacccctacggc

SEQ ID NO: 28879 - DNA, 172 bp, Glycine max
  Clone ID: LIB3108-057-Q1-K1-B6
tcccactcatcctctctatctcatctattttcactatcaaccgttccttatccggcatggattctttatacactgtcctcatttccattgctttcttctttattcatattaccaacatttacaattatcctcattattatcatctttatattattacatattcattcatttt

SEQ ID NO: 28880 - DNA, 321 bp, Glycine max
  Clone ID: LIB3108-057-Q1-K1-B9
aagacaggaggttttaccaggccgggcgattacggcaaccgcgaccacgaacaaggcgagcgcgctgccgctcaaggagcacgcggttgcatcaacagcagacacgccaagcaaatcacgcggcaacacacacgcagagagggccaccaggcgcaccgacacggaggagacggcaatgtacaaggagaggccgatgaaacacgacaaggcgtgcaacgcgcacggtgagaacgagaacaggatgcaaaactataggcgcaatcggcgcagagaacgtgaacgaagaggtgagaaccgaacggagcagatgggactcaacgt

SEQ ID NO: 28881 - DNA, 370 bp, Glycine max
  Clone ID: LIB3108-057-Q1-K1-C1
ctcactcgtgctgatacatacacctggctacagacacttgtgtggccattgctatagcgtgaatgacagtcataaatgccagcgcatgctaagtgagtggcgtagaataagtctaagagtaccaagctacaacgtaggacataaggcttactaacgctctgactcctactggtatacacttagacatgccattagagctactgacattgaaagtgctgaagcgaattctgctctgtgctatctatagcacaacttgtgaggcatcttatcgaataagatcgggatctcgaacaacataggcttttcccactacgctgtgttccaacagaacgggacttgtagcagaggacatccatggtgaatttatata

SEQ ID NO: 28882 - DNA, 355 bp, Glycine max
  unsure at all n locations
  Clone ID: LIB3108-057-Q1-K1-C10
gacnccnaggaccacacgaggaaaaagcagctgtgacgcnggaggaanccgagacgcagcgacgaggagcgcagggaagcgcaaggagaccgnncggaggcgcaggcaagcaagngccgcaggagaggaccacgaaacaccacaaagcatcaanacaggagcgcaaagaaggccgacaaggacgggnacgagacgccagaatccaatcatgtgctaccagactaagcactcaaaccgccggaggcaggacaccacgagtaacgtctcaatgcagctcatgatacgtggcagatgcaagcgagtcgtgcgccaacatctgcagactaccactggaactggtatgaatgcagaaaaa

SEQ ID NO: 28883 - DNA, 304 bp, Glycine max
  Clone ID: LIB3108-057-Q1-K1-C11
gctatggccactggtctcagaacccccaccttccggccaccgcctgggtcgcgcgccgcaaagtcgccgaaatcatcgcgcttcgccgtcgtgtccttcagacagagcaccacctgcgggagaaaaccctcctcgcttctctcctgcctgccgttccctaatgttccctctctacggttcgtcaggttcgttcccttcgctttcgacggcgacaccgatgccccgcaagttcaggagccggaggttcagggtctggacccttcagatggtgctgttggcgtaaacgacagtgcaagtgataatg

SEQ ID NO: 28884 - DNA, 68 bp, Glycine max
  Clone ID: LIB3108-057-Q1-K1-C12
cccacgcgtccggaggaaacagctactagcgtggcacttgagccggcagacacagatcgtacggactt

SEQ ID NO: 28885 - DNA, 409 bp, Glycine max
  Clone ID: LIB3108-057-Q1-K1-C2
cgcattctttcttcgacgagcttcgtgatccaaatactcgcttgccaaatggcctattgcttccaccactatttaatttcaaatcccatgaactgaaaggagtcccatctgagattttggtgaaattggttccagagcatgcaaggaagcaatgcccgtctctaggctcgtgaagtgttgtttccatatgagaatgctgcgctttccttttctatttaatatgatatttttgttggtatctttattgtattcggttgccctgtaaaagcatatttagagatacatgcttctcattaacacccagcccccgatggttatgtataataccctgttttctgtatcacagcagattgtaacttacaataatacgactaaatttctgcctttatctagatgtttcatctttatt

SEQ ID NO: 28886 - DNA, 403 bp, Glycine max
  Clone ID: LIB3108-057-Q1-K1-C3
ctagacaagactctcacacacaactctggagatagaaagactggctctcaacacatagatgagtgctgccatctgagcctatcgatctatcatatcctcctcaaaatccagacatgtcgaagcacatactctatccagctttcatgccagcaatgcctcttcttctcgctgtaccatgagtgctgattggatgccttgccatcctactcccacatacctcgatggttcaccacctgttgactgtggattcaaccctattggtcttggcgaagtaccagagaactcttgagaggctcaaagagtcagaactcatacactgcagattgtccatgcttgctgttccagtgattctggatccagatgcatatggcttaagcaactgggtaaaggcttacgaatgggc

SEQ ID NO: 28887 - DNA, 463 bp, Glycine max
  Clone ID: LIB3108-057-Q1-K1-C4
agagaagaaactttcgaacccaatgaggttgatataagtgcataagctcgatctcaatatctacgatggcgagagatgagtatcgtcatatcatgaccttcaaggggtgagaacatcgatcatagccaaacttgaataacatccatagcatggtactctaatgaatgatgatagtaaaggagcacctaatgacacatatgctgtgtttactggatggtatgctgatgtttcctgaccagtagaagcacacacatatgaaatagaaaagattctattccacgggaaatcagaatttcaagagcttgttgtatttgagtcttctagacaaggcaaggttgcaattcttgatgagcatatacagctgacagataacgatgaatttgcttaccaagagatgctcactcaccttgcactctgttccattccagatccaaagaaggtgctgcttattgtagggggagat

SEQ ID NO: 28888 - DNA, 53 bp, Glycine max
  Clone ID: LIB3108-057-Q1-K1-C5
ctctggttcttccattcaattttatgaattgagatggtccttttaagaatgcg

SEQ ID NO: 28889 - DNA, 455 bp, Glycine max
  Clone ID: LIB3108-057-Q1-K1-C6
ttttaatttcctagatctcccaaacaaattgtagcataagtcccatggccaaagagactagtgttgtttatctatatcccagcaaatcacaagtttggggtgagaattttgatcataaaaaacttgtaataacaacactagctgctaatggaaagaaggaggagagtaatggagcacctaatgacacatatcctgcgtttcccgggtggtatgctgatgtttcctggccaggagaagcacacacatataaaatagaaaagattctattccacgggaaatcagaattccaagagcttcttgtatttgagtcttctagacaaggcaaggttgcaattcttgatgggcatatccagctgacagaaaacgatgaatttgcttaccaagagatgctcactcaccttgcactctgttccattccagatccaaagaaggtgctgcttattggagggggagat

SEQ ID NO: 28890 - DNA, 97 bp, Glycine max
  Clone ID: LIB3108-057-Q1-K1-C7
ctacaatataatctcctacaacaatcattcaaattttagcatacgcaccattaccgggacacgagtcatttatattgatttccttacttataacact

SEQ ID NO: 28891 - DNA, 75 bp, Glycine max
  Clone ID: LIB3108-057-Q1-K1-C8
taaaaaaaaaatataatttattatttttaattaaaaattataattaaattatttaagttaggggttatttaaaaa

SEQ ID NO: 28892 - DNA, 459 bp, Glycine max
  Clone ID: LIB3108-057-Q1-K1-D1
aactacaagagagacacacgcagcaatatcttggtcttcagcttctcaacgcaaagctcttcacaaatcacttcctctggctgcttcacttgcaactcttctctggtcaacccctgcacatgctggtttcatgtcaagaatttctggaatagaggctattcctggaccttagctacctcagattgactttctcaagctactcagtgaacaaaaccagaagaagtatgctgagaatgatgagagacttaaatcatccgacttgatgaatgaactgcttgagaaatccaagtttaaccaagagaagaaccgtaaagaacttgagaaccaatactgcatacgtggggcataatggtgcgttggagatcgctcaactgcggtaatgtcttcacatgagagggcgaaattcatagcaatgttgaagcataaagctcgagaatagtcatatgatcatcatgatga

SEQ ID NO: 28893 - DNA, 408 bp, Glycine max
  Clone ID: LIB3108-057-Q1-K1-D10
tcgcgcatgacatcattgcaacctgatgctgtttgctggaaggttcggattggctccatcaccgcacattgaggggcactagcacggctagctcgcaccggctaagccagtacgcttaaggactggttaccaaaaagccaaccaaagctgccactaagcccgcttccaagcccaaagctgctactcctaagaaaaaggctgttgccaagcccaaggccaaagctgcggccacgactgccaagcccaagtctaagcccgctaaggtcgcggccaagaaggtcgctgctaagccagctaagaagaagacacccgtaaaggccgtgaagaagcccaagagtgtcgtgaagaaacctaagagcgtgaaaacgccagcgaagaagactaaggctaaggctaagaagtgatgat

SEQ ID NO: 28894 - DNA, 100 bp, Glycine max
  Clone ID: LIB3108-057-Q1-K1-D12
ccaaagcgtacgaggaggcacgaggatggtgcacccggaacagttcagcacggccaaggacctgctactgctggcacatatacaggacctgatcgtacct

SEQ ID NO: 28895 - DNA, 384 bp, Glycine max
  Clone ID: LIB3108-057-Q1-K1-D2
ctcgctcgtgctgccttcgtttgcgtttttatcacacaggaattaacatatatatagcgtgcatggcagtcacactctacaaccttagctcttcctctgggttgaagaaacttgatgagtaccttctaccacgcaattacatcacggggtaccaagctacaaaggatgatcttactgtttatgcaactttgccaactgctccatcagatgaatatggaaatgtttccaggtggtacaagcacattgatgctctgttgataatctctggtgttactggcgagggatctggtgtaattgttgagggatctctagttgcatagcctgttgcaactccccctgctgcaaacacaaaggctgctgaagctgaggatgacgatgatgatg

SEQ ID NO: 28896 - DNA, 456 bp, Glycine max
  Clone ID: LIB3108-057-Q1-K1-D3
tgtttccaaggctgaacttaaggagaagctagctaggatgtatgatgtgaaagaccctaatactgtatttgtcttcaaattccgaacacattttggaggtggcaaatccactggatttggtttgatttatgacacagtggaaaatgctaaaaagtatgagcccaaatacaggcttatcaggaacggccttgacactaaggtagaaaagtcaaggaagcaaatgaaggagagaaagaatagagctaagaagattcgcggagtaaagaagaccaaggcttccgatgctgccaaggctggaaaaaagaaataagttttgagacaccctgttactcctaaggttaaattggttttggtgctttgtaatagttatttttatcttatgctagatttatagaatgagatgtcttggcccaagtgttgatccttgttttaatttatgttcgatcgcttataact

SEQ ID NO: 28897 - DNA, 462 bp, Glycine max
  Clone ID: LIB3108-057-Q1-K1-D4
cccacgcgtccgctaatggctgcaataagggaaggagcagatgtgagaggttactttgcctggtctttgctcgacaactttgagtggctatatgggttttcagtgagatttggacttcaccacgtagatttttccacgctgaagagaactccaaaattatcagcaatttggtacgagcatttcattgaaaactataaactaactgatagcattgtgcccgaacatggcagagaaaagggaatctggaacaagccaactacccaactcagaaccttagtaagtccagagcctagaatgaataacttggattaatttgcaatgaaataccatatgctttctcttttgaatctttatatttgatccaccacttttcggacttgaacaagattgttaacgacaactaagtcctttcaatcgttcttagcattttttagtgtataaattatactaattatgattaaa

SEQ ID NO: 28898 - DNA, 166 bp, Glycine max
  Clone ID: LIB3108-057-Q1-K1-D5
ggctcaagcaatggcatcaatggctggcttgcgtggttcctctcaggctgcgggggaaggtagccttcatgtgagtggctccacacgcttgaatgtgtggagttcaagcacgcttgcctcagtcatacttgcaattttcacagttagatgcacatcaacggctctt

SEQ ID NO: 28899 - DNA, 452 bp, Glycine max
  Clone ID: LIB3108-057-Q1-K1-D6
atttttctcactgtcttgtctctccagataactgtatagagagagatggcagctgcaacatctggtgctgtgttaaatgggttgggatcttccttcttgagtggaggaaacaggagccaaacccttctggccactgctattggaggcaaagttggtgctgctgctgttactgttagtcctagaagactcattgtggtagctgctgctgcaccaaagaagtcatggctccctggtgtcagaggtggtggcaacctcgtcgacccagaatggcttgatggatcgtgagtccacccttattcctccttccctagcattactctccatgcctattcagcaatcagtttttcatcctctgaagattgcttctgaactaagtgttttagaatagaaacggttgagagatgttttggcattctcttcttctgtttgtggtctttagcttaagggtgagt

SEQ ID NO: 28900 - DNA, 481 bp, Glycine max
  Clone ID: LIB3108-057-Q1-K1-D8
gccacgcttacggttttcttgatataattcttgtctctgcccgtgtgtctcgggcatggccaccgtcaccactcaagccttcgtcgcatttttccggccatgtacctttaaatcgaggtttttgacctgctcttttctgattacttaaccttctatgtactattctgttctctttttctctcttttaagtttttattcaatgttgattgtttttatttcttttattttttttatttaattttttcttcttatttttttctcttttttaactttttctttttttcattttttttgtttatttatttatttattttgtcttatttcttttattcttttgacttttatttttgtttttatttcatttttttattttatcttatttttattatttcttttttttagtatttatatttacttatttatttctttcttttttttattatttattttttttattttattttattatttattttttttt

SEQ ID NO: 28901 - DNA, 464 bp, Glycine max
  Clone ID: LIB3108-057-Q1-K1-E1
aacttactatatttctcaacaaaaaaggggttacaaatctagctagattctattacgtcgtgcgcgaccaatgaacatggcgatcgcgcattatgttcatggttttcgcagtttcatcagctttagacatgtcaataatatcacacgacaacgctcatgcggatagggccacgaggcgcaccgacgaggaggtgatgtcaatgttcgaggagtggctggtgaaacacgacaaggtgtacaacgcgctcggtgagaaggagaagaggtttcaaatcttcaagcacaatctgcgcattatcgatgaacgaaactctctgaaccgaacctacaagttgggactcaacgtgttcgctgatctcaccaatgcggagtacagagccatgtacctgcgaaccttggacgagggtccgaagttgggcttggatacaccgccaagaaaccactacgtgccacgtgttggagat

SEQ ID NO: 28902 - DNA, 289 bp, Glycine max
  unsure at all n locations
  Clone ID: LIB3108-057-Q1-K1-E11
gcaaagccaaaaccagcacccaanggccccaagagaggggcnaaggagaagaaccccaggaaggaagccnaccggnacaaaggcacaggagcagnggacgctgnagatcaggaccccaacactcgctaccctgttgtggttcgattcaacaaagtcaactatgccaatgtatcaacaaacaactatgcttaggatgacatcgtggaagtggaatgagtccaatttataggtaattttgattctggtcatgctatcgcatgtactagcctaaagttttttcatgcgacaa

SEQ ID NO: 28903 - DNA, 190 bp, Glycine max
  Clone ID: LIB3108-057-Q1-K1-E12
caaaatcctattccgaggcaggatcagggcttcaccgatacagtgcatcatggcagatccaaagcgagtctgtctgcagtatcatggcgctgctcctcttgatttccacgctcatcgtttcagcttctccgcgcttacgacgacgccgatgatgatagcgatcttctatgattcggacgacgaggatttt

SEQ ID NO: 28904 - DNA, 393 bp, Glycine max
  Clone ID: LIB3108-057-Q1-K1-E2
gccaaacgtacgctcatgctagagttttaaaaatggcagcagcctccttcatggctctctcttacccatcctcggatggcaaggccgtgaagctgggcccataaaccctcgaagtcaggagggtcagcatgaggaagaccggcaccaagcatgcctactacggaagcccatggtacggtccagaccgcgatgagtacttgggcccattctctggcgagcccccgaactacactactggctagatcccaagtgactacggttgaaacactgctcggctttctgccgacccataaacctttgtcagaaaccgttagcttgaagtgatccactccaagtaagccattgctggggccttgggctgacgcttacccgaactattgtcccgcaaccggg

SEQ ID NO: 28905 - DNA, 455 bp, Glycine max
  Clone ID: LIB3108-057-Q1-K1-E3
cagagatcggagcgcggaacctctctctctctatctctctctgcggaaaccggaatatgtcagttctgtgatcagatccatccgacgtcgtttcagcgataatggctccgttcagcggcgatgagacggcaccgtttttcggcttccttggagccgcagctgccctcgtcttctcctgtatgggagctgcctatggcacagcgaatagtggcgttggcgtggcttcgatgggtgtgatgagaccagagctggcgatgaagtctatcgtgcctgtcgttatggctggagatttgggtatttatggccttattattgctggcattatcagtactggcattaatcccaaggccaaatcttattacctctttgatggttatgcacatctatcctctgggcttgcctgtgggctggctggcctctctgctggcatggctattgggattgttggtgatgct

SEQ ID NO: 28906 - DNA, 449 bp, Glycine max
  Clone ID: LIB3108-057-Q1-K1-E5
ctttggtggccacagcaacaataacaatggcagcctcactacaagctgcagctaccttcatgcaacccaccaaggtgggcatggccactcgcaacctcaaatctacacaatgcatttctaaggcttttggcttggaacccgctgcagctaaactcatttgctcccttaagcccgatctcaaagattttgctcaaaaatgtgtcgacgccaccaaaattgcaggattcgcccttgccacctcagctctcgttgtttctggagcgagtgcagaaggtgttccaaagaggctaaccttcgacgaaatccagagcaagacatacttggaagtgaagggaactggaactgctaatcagtgcccaaccattgaaggtggagtggactcatttgccttcaaggcagggaaatacaaggcccagaagttgtgcctggaaccaacttccttcacggtg

SEQ ID NO: 28907 - DNA, 119 bp, Glycine max
  Clone ID: LIB3108-057-Q1-K1-E6
gtcgattgagagagaaagagatatgggttaacgaatcggtatacgattcactggccgggactcaactaacaaacgtgggcatatagacttgtaacctcataactacacattgctctttc

SEQ ID NO: 28908 - DNA, 444 bp, Glycine max
  Clone ID: LIB3108-057-Q1-K1-E8
tccacgcgttcggtgttagatagccagctacgtcgatcttttctattccctcgccaacggaccgttgatcaatttcaatttcaatttctcggcagccattgccatgttctttcacggctcaagtgagaagaagagggaaagggaaagtggtaatgagcatggaggcaggcattggagtgatgggcaccaagttgggtatgatgagctatttcgaatccgacggagaggttgttcctgtcactgtcgtgggtttcaaagaaggcaacatcgtcacccagatcaaaactgaagccaccgatggatacgacgccgtccaggttggttaccgaagggtcagagatcgcaaattgaccaaacccgaaatcggtcatctccagaaggtcggcgccattcccatgcgccatcttcaggagttccgtcttcaagccgtcgatggcttcgacc

SEQ ID NO: 28909 - DNA, 410 bp, Glycine max
  Clone ID: LIB3108-057-Q1-K1-F1
cccacgcgtccgcaccactcaatgtctcactccctgttcattttcttctctctttctcaaaaccctcactttaaggtcctgcacgccgtttcagcgtctttcttttgcgtcacaaccactgcgcaggctcatggctcgcgccaccctcggcctcactctaccagccaacaccgaatcccttaaggtttctttcgcggcaaaggagcttgacgtggcggaatggaaaggggaccttctcgccgttggcgtatcggacaatgacgtcacgagaaacgtggaatcgagattcgagaacgcgattctgagcgcgttggactccaagctgggcggcttgttgggccatgtctcgtccgaagaggacttcatcggcaaacttgggcagtccacgggtctaagaatcgcttccggac

SEQ ID NO: 28910 - DNA, 348 bp, Glycine max
  unsure at all n locations
  Clone ID: LIB3108-057-Q1-K1-F12
caaaatnctcttccggttcaggattagggttttaccgntacagtgaaacatggcaaaaccaaagcgaatctctctgcgtatctttgcgctgctcctcttgatttccacctcttcgtttcagcttctccgcgcttccgatgacgccgatgatgatgcgatcttctatgattcgttcgacgaggattgtgaagaccgttggggtgtgtctcagaaagatgagtacagtggtgtctggaaacatgccaagagtgagggacatgatgattatgggcttcttgtcagtgagaaagcaaggaaatatgctatagataaagaacttgatgaggccgtgagtctcaaggatgaaac

SEQ ID NO: 28911 - DNA, 377 bp, Glycine max
  Clone ID: LIB3108-057-Q1-K1-F2
gccacgcgtacgctcatgctagcgtgagaaagattttttcggcacccttcatcgcgtggtcttacacatcctcgtatgtcgaggccgttaaattcttcccataaacccgacggagacgataggagaatatatgaggttgaccgaaaccatacatatatactatggaagcccatcgcacggtacataccgcgatgagtctacgggcccattatctggcgaggcccacaactacatcaatgacgagattccaattgactacgattgaagcactagtcagctagctaacgaccgcataaacctatctcagatgccagtcgcacgaatggaatcactcgaagtagtcgcatctttgcttatttgagctgattcttaatacg

SEQ ID NO: 28912 - DNA, 390 bp, Glycine max
  Clone ID: LIB3108-057-Q1-K1-F3
gcaaaacgcaagctcatgctaaaggtgtttaaatggcagcagcctcctgcatggctctgtctttcccatccttggctggcaaggccgtgaaactgggcccatcagcccacgaagacatgagggtcagcatgaggtagaccgtaaccaagcaggcctcctcctgaagcccatggaacagtccagaccgcgttaagtactatgggcccattctctggcgagccctcatactacctcactggcgagttcccaggtgactactactcgtacacagctgggctttccatcgacccagtaacctatcacagaaaccgtgagctccaatggatccactccaggtgggacatgctcggagccttgagctatgtcttacccgaactattgtcccgtaac

SEQ ID NO: 28913 - DNA, 361 bp, Glycine max
  Clone ID: LIB3108-057-Q1-K1-F4
gccacgcgtacggaagagcaggcctaatgtaggcgcttgacttatgaaaaattcacaatgtcttagcagctgctactggacactgtaagcaaacttgattactaaaggctaaagcatgataaaggggaggaggatgaaagggagaggaggccaataatactgttcatgtttagaaaggatcacactaagagaaggggtatacttaaaattacaagcttgagaacacttatgagaaaaagggctatgactattgatttcatgagaatgtgacatgctaaccctatgagaacattcaaggacagtgaacctcattgtcgtgaccattgtgctaggaactacttgcgcatgcacgtgaacccta

SEQ ID NO: 28914 - DNA, 436 bp, Glycine max
  Clone ID: LIB3108-057-Q1-K1-F5
gaatcaagcttaggacttactgggtgcccttgatagaggattcctgcaagcagatattagatgctgcaaggactaccaacgcgaaaacaatgggacccgtgccattaccaaccaagaagcgaatctactgtgttcttaaatccccgcacgtacataaggatgcccggttccatttcgagatcagaactcaccagcgtatcattgatattctatatcctacagctcaaacaatagattctctgatgcaacttgatcttcctgctggtgttgatgtggaggtcaagctgtagagatatttgcttttcaggttgctaactgtcttgaatttgagtgaggatcaactggctatcaatagccaaaatatattggcagatatcatgtgcttcactgtctaaacttgatttctaagaacaatgcttaaagtccttacgtttgc

SEQ ID NO: 28915 - DNA, 253 bp, Glycine max
  Clone ID: LIB3108-057-Q1-K1-F6
cacacgcgtagagccccaaatttttgacgctcgctatcgactctatcgagcgccgatctaacactacgtctggagcgcatgcgactacaatggcacttgccgatcgcttaacgtaggcgactgaataagccctagaagatcctgttaacatacatgacaatcctgatgaaagaaccatacaaataaaaggcaaaatgatagagatgatgagtatataacacaacacttacagaagcaatactaaacagattca

SEQ ID NO: 28916 - DNA, 72 bp, Glycine max
  Clone ID: LIB3108-057-Q1-K1-F7
catgtttcgagagtcttaaatctttggtagatgttggtggcaggactgaacctggaatggacatttttgcct

SEQ ID NO: 28917 - DNA, 395 bp, Glycine max
  Clone ID: LIB3108-057-Q1-K1-F8
gttggcgctaacattttgttggttggggccttctccggagcagccatgaaccctgctgtgacatttgggcctgctgtcgtgagctggacctggaccaaccactggatctactgggccggccctctcatcggaggtggaattgctgggcttatctacgaggttgtcttcatcagccacacccacgagcagcttcccagcactgactactagaggggaaaaatgaaataataaaaaaaaaaaatgtgtattattgaatttctccggaatcttcttctgtgtatggttttccttcctttgtgttttctttcctgttgaatcggtggccgttgatctttggttggatggttgatgatcctgaagttttcttttaagttaatttaattatcattttgtgc

SEQ ID NO: 28918 - DNA, 186 bp, Glycine max
  Clone ID: LIB3108-057-Q1-K1-G1
cccacgcgtccgcataattcttggaaagagtcttgttagtgtataaacttttctatttcaattttcagtatttcacttatatgtagaaaagctgttcggattttctacattaggaagttgtgaaatattcatgagcttttcgttcagtatttttaaaatatatatataataaattgtcttatgctg

SEQ ID NO: 28919 - DNA, 104 bp, Glycine max
  unsure at all n locations
  Clone ID: LIB3108-057-Q1-K1-G10
cccacgcgnccgcccacgcgnccgagagaggggaaggaaaaaaaaaaaaaaccaaaaggggaggaaggcancagcancgcccagcagagccaagacagcaccca

SEQ ID NO: 28920 - DNA, 85 bp, Glycine max
  Clone ID: LIB3108-057-Q1-K1-G11
cacacgcgtccgcccgctcgcacggcatagacgacgcaccgtacaagaagcccgatcttgccgagcccattgccgctgacccact

SEQ ID NO: 28921 - DNA, 323 bp, Glycine max
  Clone ID: LIB3108-057-Q1-K1-G12
atgagtacgttgtacttcctcttttgttgttctgtgtttgtgtttgttttttctctcacctgaaaatgtcttgctgcggtggtaactgtggttgcggaagctcctgcaagtgcggcaacggctgcggaggctgcaagatgtacccagacttgagctacactgagtcaaccaccaccgagaccttggtcatgggagtggcacctgttaaggctcaatttgagggtgctgaaatgggtgtgcccgctgagaacgatggctgcaaatgtggaccaaactggtcctgcaacccctgcacttgcaagtgaagtgttgtgagagcaagc

SEQ ID NO: 28922 - DNA, 215 bp, Glycine max
  Clone ID: LIB3108-057-Q1-K1-G3
acgaaataaagaaaaaatacatgtgtagtttaaaggaaagaaaatactaacaaaataagggtcactttgaaacactaatttagatgttgatatttaatgtagagcgttgacattatcaacatatgtataatttatgggcatatagcaaagaaattaaaaaaaataaataaataaaaaataaaaatcaagatgaaaaaaagtaaaaaagcgggggc

SEQ ID NO: 28923 - DNA, 393 bp, Glycine max
  Clone ID: LIB3108-057-Q1-K1-G4
ctcgaactgttgtttggtctcttctctcttatccatggcatcaacgtttctcaccctagcaactcccttcctacacaaaaccaatgccatcagtttctctaacaagagaccctcatttttgcagaggagctctctgaagattcatgcaattaccaaaaaatgggaacccacaaaggttgtgcctcaggctgatagagttcttattcgtttggaggagctttcagataaaacagttggtggagttttgctgcctaaatcagctgttaaatttgagcgctatcttgtgggagaaatcctaactgttggtgctgaggctggagaactaaaggctggaacaaaggtactattcactgacatgaatgcttatgaggtggatttggggactgatgcaaa

SEQ ID NO: 28924 - DNA, 398 bp, Glycine max
  Clone ID: LIB3108-057-Q1-K1-G5
agaaaatacatatccaatacatatggatttatacgctctaaaatcctcaagactatcgtggcaagcgtatgtggatgatcacctaatgtgtgaaatgagaagtatcctcataactcacgcggctttactacactaacaccgaatcgtttgaactaagagcgccatctatcatcaaatgacacatgacgtaataactgccatcaataatgacttgaatgatgctgaatcaattgatacacctgtattgtatatcagaggctactaatacatggatatccattgcgagacctggtgctatcatgagagggtagacagggcctggtggcgatactgggtagacgactggagctgacataatcagaggcatttatgataaacgaattactcactgacaatgc

SEQ ID NO: 28925 - DNA, 253 bp, Glycine max
  Clone ID: LIB3108-057-Q1-K1-G6
agaaaatcctcacccattttcttcgtagccaaacactctgaaattctcagttatgtcggggcaagcgtatgtggatgataagctactgtgtgaaatcgaaggtaaccacctcactcacgccgctattatcggccaagacggatgcgtttgggctcagagcaccaacttcaattgtaaggagaacctgttgaaatatctgccatcaatattgactttaatgagcctggatcacttgctccaactggattgtata

SEQ ID NO: 28926 - DNA, 452 bp, Glycine max
  Clone ID: LIB3108-057-Q1-K1-G7
aaacccactaagatggcttcctttgtatccttcctagtgctgcttcttgcagcccttagcctcatgcctcaagggcttgctacttactacaaaccaattaagaagccaccagtgtacaagcctccagtgtacaagccaccagtgtacaaaccaccggtttataagccaaaaccaccggtttacaagccgaaaccaccggtttacaagccaccatataagaagccaccatacaagaaaccaccttatggaaagtaccctccagtagaggacaacacccatgcctaaagcaagcaatgaggtctattatctacttaataaataagaggaactgctttgtgttttctagcattgtgatttacaacttcgtagcaatgcatattcttgactcttgcatgcacttcaatccttcgtagcattaatgatgtggccaaatcattatgagcatcatactt

SEQ ID NO: 28927 - DNA, 410 bp, Glycine max
  Clone ID: LIB3108-057-Q1-K1-G8
attcattttggcatcgaggtttaatctcatcggagagagaaaaaccataaccatgtctggaagaggaaagggaggcaagggtctcggaaagggaggagcgaaacgacaccgtaaggttctgagggataacattcatggcataacgaagcccgcaattcgccgtctcgcgagacgtggcggcgtgaagcgtatcagtggtctcatctacgaagaaacccgcggtgttctcaagatcttcctcgagaacgtcattcgcgacgctgtcacctacactgagcacgctcgccgcatgaccgtcactgccatggacgttgtttacgccctcaagaggcagggcaggaccctctacggtttctgctgttagagaattaccgatttctgcattgcgtcgtggattatggttccttata

SEQ ID NO: 28928 - DNA, 159 bp, Glycine max
  Clone ID: LIB3108-057-Q1-K1-G9
tacggcagcgccgcccgagcgttcggaggtcagcaagcaccatgactcgagtctcaattatcacccttatggtggccagtgaaggtataagatccatctctcgtagctagcagaaagctacagcatgcgatgaattagagtcacatctttgctagacat

SEQ ID NO: 28929 - DNA, 403 bp, Glycine max
  Clone ID: LIB3108-057-Q1-K1-H1
gccacgcgtccgcccacgcgtccggagaaacaaagttagaagtaaagaagatcatggcggctctagcaaccttggctgctgttcaaccagctacgatcaatggccttgctggaagttccctctctggaactaagctctctttcaagccctctcgccacagtgtcaaatccaagaacttcaggagtggtgccgtggtatcatagtatggtgacaagagtgtgtactttgatttggaggatctgggcatcacttcagggcagtgtgacttgtatggcttatatgcaccttcactctacaaccctctttagagcaagtcctttgagaacattgctgctcctttcacaaagaggggattggtactcaagattctgatattggtaggtgtttctactcttgtaaactt

SEQ ID NO: 28930 - DNA, 82 bp, Glycine max
  unsure at all n locations
  Clone ID: LIB3108-057-Q1-K1-H10
aggcctacgaggancnganggacgaacgcaagcgcgccgangacaagnaccggcggagctccggcgccggcaccggaaacaa

SEQ ID NO: 28931 - DNA, 101 bp, Glycine max
  Clone ID: LIB3108-057-Q1-K1-H11
ctgacgcgtgggcggacgcgtggggagatttcatcatcctgtatttttggtttctgttttcggacttcaatggaaattaatggatgagaactaatgaataa

SEQ ID NO: 28932 - DNA, 290 bp, Glycine max
  Clone ID: LIB3108-057-Q1-K1-H4
attattcttgattctgagtttaatgtgaagggaaggtgggagaaaccgggtcacagggcactatttgggtatgacttttggtaccaaccacgtcacaataccatgattagcacatcatggggagctcctagtgcttttacaaaaggttttaacttacagcatctatctgatggatcatacggtaggcatttgcatgtatatagctggcctgggggcgaactgagacatacattggaccttggggattcagggcttatacccttatagataaggtttttgcatgatcctgc

SEQ ID NO: 28933 - DNA, 386 bp, Glycine max
  Clone ID: LIB3108-057-Q1-K1-H7
ctgaccactacatccttagctataatccaacctgtctatattcccgaaatccaaaatatacaatgtttgttcagcgtctattccaatctataacactatttatccacctctctatcttatcttcaaatatatcattcatccattattaatattaatttttaatataatttgtatatacatttacattccaattaatgcctttcatctattgctttctccatacaaatgatcttagaccattcttactattattcttactatcctgtatttaactacatctattcacacatttaaccttttatggagcctttcttattaccttttttcctttcttcttctttaaattttaacccaattctgatattattttttatctattttttatt

SEQ ID NO: 28934 - DNA, 446 bp, Glycine max
  Clone ID: LIB3108-057-Q1-K1-H8
atggaagtcaagtaccggaagaatttgtggaaacagagtattaccaagatctcaacagcgtggacaaacaccaccatacggtattcagttcaatcctacttgcatgcattcttctcaaaatatttgatgtgtctcgcaaatacatatctgcattaatttatatactcgtttcattgaatttgattgcaaaatattgaaaccatgtgtccttgtaatgaagactttatattcaacaggttacctaggcttgtgtttagcatttacaaattagatttggctctttctccttatttattagcatgacaatgtcatgtgttaaataaacaagatagaaaagcataagtaatagacatttataatagataatttttatattagtaatatgatagcatctaaattcgtttacaaaaaatcataggcgttacatggatgaaaaattgtttctg

SEQ ID NO: 28935 - DNA, 157 bp, Glycine max
  unsure at all n locations
  Clone ID: LIB3108-057-Q1-K1-H9
accacgcgtacgggggccatncatcgngcatcaatggccaccacagcagctctatccggaaccattgtgagcacctccttcatgaggaggcaacctatgaccaccacaagcctaaatacattccctaacgttggtgaagctctttttggtctgaaaa

SEQ ID NO: 28936 - DNA, 160 bp, Glycine max
  Clone ID: LIB3108-058-Q1-K1-A10
gagaatggagcgagttacatctgagaattgggaaggggtgagagtggagagtgctgacatgatgatggctgatgttgtttcttccattgtgggatcatgtgtctttggatttttgctttttctgaatgaatgaaatgaactatggtggaggaagaagaag

SEQ ID NO: 28937 - DNA, 204 bp, Glycine max
  Clone ID: LIB3108-058-Q1-K1-A11
attttatctcttagtagccattctaagatactaattctctgaacgctacactcttactatgtaaacttacaatgcattaaaacaatgaatattcatctacatttaacgatttacactaatactaatcactagctaaaacagaaaacacttaatggaatacttttacatatttgttcatcatcctttattttttgtggttgttat

SEQ ID NO: 28938 - DNA, 146 bp, Glycine max
  Clone ID: LIB3108-058-Q1-K1-A12
tccacgcgtccgcttgattattatttcattaatgctcttacggagattgggcatttttgaagaacagatgttgttgaagcttaggctggaaagtgttctgcaactttactcaacggcctattctgttgccctctatgctcatgctt

SEQ ID NO: 28939 - DNA, 420 bp, Glycine max
  Clone ID: LIB3108-058-Q1-K1-B10
atggcttctctggcaagcttagctgttgttcaaccatctactgtcaagggccttgctggaactaagctctctttcaagccctctcgccagagcttcagacccaagaatttcaggagtggtgccgttgtagcaaagtacggtgacaagagtgtgtactttgatttggaggatctaggcaacactactggtcagtgggacttgtacggctccgatgcaccttcaccctacaaccctcttcagagcaagttcttcgagacattcgccgctccattcacaaagaggggattgttactaaagtttttgatcctgggaggtggttccaccctggcatacttgagtgccacagcgtcaggtgacattctaccaatcaagaagggcccacaacttccaccatagccaggtccccgtggcaagatctaa

SEQ ID NO: 28940 - DNA, 356 bp, Glycine max
  Clone ID: LIB3108-058-Q1-K1-B11
ccgagattgatcccatctgtgcccttcaggctctcatggaaggccttcgggttctgaccttggaggatgtcgcttctgaggctgatatctttgtcaccaccaccggtaacaaggacatcatcatggttgaccacatgaggaaaatgaagaacaatgccattgtttgcaacattggtcactttgacaatgagatcgacatgcttgggctggagaactaccccggcgtgaagcgcatcaccatcaagccccaaactgacagatgggtcttccctgagaccaacaccggtatcattgtcttggctgacggtcgattgatgaacttgggatgcgccacttgacaccccagttttgtgatg

SEQ ID NO: 28941 - DNA, 402 bp, Glycine max
  Clone ID: LIB3108-058-Q1-K1-B12
cccacgcgtccggcgagacgagtccgtttctaattaatgataggtgtcaagtggaagttcagtgatgtatgcagctgaggcatcctaacagaccggcagacttggctattttggatgaaattgattctggtttggatgttgatgcgctcagggatgttgccaatgcagttaataggattctcaccccagaaaagtccttgttgatgataactcattataggcggattcttgatcttttgaatcctacacatgtccatgttatggacaaagggaaaattgcaaggtcaggcgacatatcgatgggagaagctattgaggctgatggatatgaaacagtctctgctttaacataatacagctagtatcgatggcagtattgcatgggctggcattcagtaattg

SEQ ID NO: 28942 - DNA, 432 bp, Glycine max
  unsure at all n locations
  Clone ID: LIB3108-058-Q1-K1-B9
gtactggtcgcggtcgtcccaggcggacgcacgcgtgcgtccactcgtccgctagggtttacagagaagctaagaggcgcagccgtagcaaaagctcgtggaattgctagcaatggcgaggatcaaggtttacgagctgaggcagaagacgaaggctgatctgctgaatcaactgaaggacctgaaggcggagcttgccttgcttcgtgttgctaaggtcaccggtggtgcccctaacaagctttccaagataaaggtggtgaggttgaacattgcccaggttttgacggtgatttctcagaagcagaaggctgcgttgagggatgcctacaagaataagaagtacttgcctctcgatctncgncctaagaagaccagggctattcgcaggaggcttactaagcaccatgcatcattgagacagagagggag

SEQ ID NO: 28943 - DNA, 422 bp, Glycine max
  unsure at all n locations
  Clone ID: LIB3108-058-Q1-K1-C10
cccacgcgtccgcccacgcgttcgaacatgtccaactctgatggagccagtaacgccgtccctcccaacgacgccaacaacaacacaatcgttgagtaccagcagcgaaccaccaccaccaccaccgtcgtcgccgccgccctcgccgtcaagaaaccgccttccaaggaccgccacagcaaggtcgacggccgcgggcgccgcattcgcatgccgatcatctgcgccgcccgcgtcttccagctcacgcgcgagctcggccacaagtccgacggccagaccatcgagtggctcctccgccaggcggaaccctccatcatcgccgctaccggctccggcaccactccggcgagcttctncactgtctccgaccacaagcccctcctccctccccctacccccttcatcctcggcaaacgcat

SEQ ID NO: 28944 - DNA, 314 bp, Glycine max
  Clone ID: LIB3108-058-Q1-K1-C11
cccactcgttcttccactcgtccgctcctcctcactatatattgcttgggtcgctggagtccatcgcttagaaaccaaaaggctctctcacgcagtcgcagtgagtgaaaaggaaaaccctaattgcggtattctcagtgccttcgagagaaagaaaaaatggcagataatcttgttctccgtggcaccatgctcgcccacaccgacgttgtgacggcgattgccactcccatcgacaactccgacatgatcgtcaccggctcacgcgacatatccatcatcctctggcatcttaccaaggaggacaagactta

SEQ ID NO: 28945 - DNA, 415 bp, Glycine max
  Clone ID: LIB3108-058-Q1-K1-C12
atggctgcacaagctcttgtatcatcatcatctcttaccttctcagccgaggctacaagacaaagtcttggaccaagatcactccaatctccatttggcttctcaagaaaagcctcctttcttgttaaggcagctgctactccccctgtcaagcaaggatcagacagacctttgtggtttgcatcaaagcaaagtctttcctacttggatggcagccttccgggtgactatggatttgaccctctgggactttcggaccctgaaggaacaggagggttcattgagccgaaatggctagcatatggtgagataatcaatggtcgttatgcaatgttgggtgcagttggtgcaatagcacctgaaattctaggcaaggctggtctgatccctcaggagacagcactcccatggttca

SEQ ID NO: 28946 - DNA, 269 bp, Glycine max
  Clone ID: LIB3108-058-Q1-K1-C9
tcgcccactcgttcgctgacgcgtgggttttctttaaaccttctttgcaatggttgtttcgcggttctaacttccaagtcagataggttcctcactgcggcatgagtgagtgaactttggataatggcaagcatggcaagaggaagagcagatgtgaactccagaaaaaaattggtcacagctgtgttaggcttggtgattgttggtgggtttctctatttctattcttagaatagtgattcatcttccggtgtgtatggtgataaatc

SEQ ID NO: 28947 - DNA, 240 bp, Glycine max
  Clone ID: LIB3108-058-Q1-K1-D12
cgctgacgtgatcggttcgctttacgatacgctttcagaagaccactgagccttattatatacaggacgaagctaactgagccacgcaatcctttccaaacacaatatgacgtccatgcgctagactattgatccaaagataatacgcctggaattaaaggcttgcagaatatccttcacacaatctgcatggtaagaaagagaactcctatgcagagccaatgagctactatacaagca

SEQ ID NO: 28948 - DNA, 410 bp, Glycine max
  unsure at all n locations
  Clone ID: LIB3108-058-Q1-K1-D9
gtactattgatgccaaggagctgaatgttgctatgagggcccttggatgggagatgacagaagagcaaatcaatcaaatgatagcagatgtggacaaggatggaagtggagcaattgattatgaagaatttgagtacatgatgacagccaaaataggagaaagggacactaaagaggagctcatgaaagctttccatattattgatcatgataaaaatggaaagatatccgcattagacatcaagcgcattgcaaaagagctaggtcaaaatttcactgacagagagattcaggagatggttgatgaagcagaccaagataatgatcgagagttagtgcggaggagttcatcacgatgatgaacagaactcgctttcatcactagtnctatctatatgggggcagttgat

SEQ ID NO: 28949 - DNA, 417 bp, Glycine max
  Clone ID: LIB3108-058-Q1-K1-E10
aaaacacaagccaagtgaaagtgagaaaaaataaaaatcaaagagcatggggtcagggatcattcacaagattggggagacccttcatgtgggagggcacaagaaggaggaggagcataagggtgagcaccatgctggagaatacaaaggggagcaccatggtgaacacagtagtgagtacaaaggagagcatcatggtgaacacaaagctggagagtaccatggtgagcacaagccatagcacaaagaggggttcctagacaaagtcaaggacaagatccatggtgagggcggcgccgtcgagggcgagaagaagaagaaggagaagaagaagaaggagcatggccatgagcatggccatgacagcagcagcagcagtgacagtgattaaactgctgcatcacctatatatttaaa

SEQ ID NO: 28950 - DNA, 377 bp, Glycine max
  Clone ID: LIB3108-058-Q1-K1-E11
ctgcctctcacccgcagggtttagagaaaatttaacaattagggttgctgctcctttgccgacccatggctcccaaagctgatagttcaaagaaggctgatccaaaggcacaggccttgaaaactgccaaggcagttaagtccggtgctaactttaagaagaagaccaagaacatccgaacatctgttaccttccatcgaccaaggactttgaaaaaggataggaaccccaaatatccacgcattagtgctccacccaggaacaagcttgatcactatcagatattgaagttttctctcacgactgagtctgcaatgaagaagattgaagacaacatcactttggttttcattgttgacttgcgggccgacaagaag

SEQ ID NO: 28951 - DNA, 382 bp, Glycine max
  Clone ID: LIB3108-058-Q1-K1-F10
tccacgcgtccgcgcaaagagtttacatctgcctcctttttgcttcccagatcaaatctatctctgcttgaagttgaaaatggggctgtcgttcaccaagtcgttcaaccggctgtttgccaagaaagagatgcgcatactaatggtgggtctcgatgctgctggtaagaccaccattctgtacaagctcaagcttggagagattgttaccaccattcccaccattgggtttaatgtggaaactgtggaatacaagaacatcagcttcactgtctgggatgttggaggtcaggacaagatccgtcctttgtggagacattactttcaaaattcacatggactcatctttgtggttgatatccatgacagggaccgagttgtt

SEQ ID NO: 28952 - DNA, 298 bp, Glycine max
  Clone ID: LIB3108-058-Q1-K1-F11
gaaaatgagtgcatcgaggttcattaagtgcgtcaccgtcggcgacggcgctgtcttcaaaacctgcttgttgatttcctacaccagcaacacttttcccacggactacttgcccacggtttttgacaatttcagtgctaatgttgtggtggatggaagcaccgttaacctgtggttgtgtcatactgctgttcacgaagattatcataaccttagacccttatgttctaggttagctgatgtatttatactcgccttttctctcataagcaacgcttactattaaaatattgcatag

SEQ ID NO: 28953 - DNA, 427 bp, Glycine max
  Clone ID: LIB3108-058-Q1-K1-F12
tcgcggcgacgtgagcggttcgctgtccgcgacgttgtgagaagtccactggggcttatcatttagaggaggaagctaagagagccacggttttgtttccaaacaagaaatgatgtagatgtgcttgatgattgttacaaatgtaagaagtatggttagaaagttgtgaagaatagccttcacccaagcaaaatgaaaagaaagatgactccaatgaagtgccaagtagcaattatacagggattgagacagaaaaggatttttaggttgacacaataagccttagtgaggactcatctatacaataatgtatactagtggaactactggtgaaatgacattatgcaactttggttattcatagtaagtgttgcttttgtaaatagcttctttagtaaaagttaaatgatgacatacttgcaatgaa

SEQ ID NO: 28954 - DNA, 422 bp, Glycine max
  Clone ID: LIB3108-058-Q1-K1-G10
ctcctgactggaatgagctaactgcagatgaggttatacacaagtttgatgtggttgaagtacttgaggattttactgtagggcatggtatagatgttattcctctggtcaaagtggctggattcaggacagtgtttcaccaccacttacatccaaaagaaattaggatcattccgagggaagagatgtttcgattctctcatcaaataccttcatatgtactcactggtcaagaagctccagaggctccaaagggttgcagggtgctggatccagctgctactccatttgaacttcttcaggtaatagaagttgtgaagaatggagacggggcatacaatgaagatagtgatgttaaaaagacaagtgatgacatgaaaaaagataacaatgaccaaatgatcgatgctatgggaaaacat

SEQ ID NO: 28955 - DNA, 169 bp, Glycine max
  Clone ID: LIB3108-058-Q1-K1-H9
cccactcgtccggttatgacttgtagttgttctataccgctacatgacgggctatttgatacatgactacatacacattcatgcaaattaaattgtcctttattatgacacgctaaatgaaccacattacatcgtaggattacatcgaattaaacaagatgaatgaatt

SEQ ID NO: 28956 - DNA, 403 bp, Glycine max
  Clone ID: LIB3108-059-Q1-K1-A1
cacagagtgagatatagaatcactgaagagcttccttcaatggcgggttcttctctgtgtggtacttcactatggatctaccattaacgagctgaagaagcctgttgtggagaaagaagctccagggcatgccatatgagggcatgcacgtacggcctcggaggggaaccagaaaattatgttaacaaaataatctggaaccctaatgtatcagtgtcatcatcagtgtgtagtttaagctagctttgctatggttacgttctttgagatgagagtcttgatgaacagtaccattctgatgtattgctttccttgaaagttaatgcatgcttcttatcttctgtctaaaaaaaaaggactaaaaaaaaaaaataaaaatcaaacttaagactaatatgatgat

SEQ ID NO: 28957 - DNA, 51 bp, Glycine max
  Clone ID: LIB3108-059-Q1-K1-A10
cccacgcgtccgaaaaaaaacaataacaataaaaaaaaaaaatacaatcaa

SEQ ID NO: 28958 - DNA, 390 bp, Glycine max
  Clone ID: LIB3108-059-Q1-K1-A11
gcggagcaacttttcagcctgctcttgggaatgggcatgctcgtaacccgctttccaaattggatgaatgcattgaggaggaagaggaggaagctgagggagaatctccaaagggatttgttacttcttccactgaagaaaaaatcccatctgtttcagaactttccgtgtcactgaaaaataccatgttagatgggaaaaaccagaatcagcagaaatatggaggaaaggtggataatggccattgtgcaaatacatcatctggtcataagagtgccaatgagcagctttctccaagcataagctgtgtggatgtgacagaaatgaccgaggatgaatggtcaaactttctggagaagtttcaagagctgctgtatccggcatttgcta

SEQ ID NO: 28959 - DNA, 391 bp, Glycine max
  Clone ID: LIB3108-059-Q1-K1-A12
tgcagagagaaaatggattgagaattctctctcttttctctttctcttcccaactttccttgcttgggatcattctgcttctgtgctatggaagactcagattcagttgctacgctgatagattccacaacttctaagatacagcagctgcaaaaggcatttgctgaacttgaaagttaccgagctgttactctgaacttgaaatggaaagaactcgaggaacattttcatggtctggagaaatccttgaagaggcgctttcatgaattggaagaccaggaaaaagagtttgagaacaaaacaaggaaggctcaggagatactggagaagcggcaagcagctgtttatgccaaggagcaagccacgttgcagaagcttcatgagaaaaggg

SEQ ID NO: 28960 - DNA, 200 bp, Glycine max
  Clone ID: LIB3108-059-Q1-K1-A2
ctctttcctacctgccagaccttgatgatgcacaattggcaaaggaagtagaataccttcttaggaagggatggattccttgcttggaattcgagttggagcacggtttcgtgtaccgtgagcacaacaggtcaccaggatactacgatggacgctactggaccatgtggaagctgcctatgtttggttgcactgatgct

SEQ ID NO: 28961 - DNA, 259 bp, Glycine max
  Clone ID: LIB3108-059-Q1-K1-A3
ggacaggggaatggcaaccatgtcccttacatttgcatttgcacttccttcaatcccctctctcagccaatgccatggccgtgctctttacgtcaagcccctccactgcactcccattcaacaacgccacgttggtgcagaggcaggtattgtttgtgagccttgcaatggaacggggtggttagtttgtgacttttgtaatggccaaaagaccaacgtcaaagccgaaaacaataaacgtatctaccgtagatgtccc

SEQ ID NO: 28962 - DNA, 251 bp, Glycine max
  Clone ID: LIB3108-059-Q1-K1-A4
cttattcgtgaagccattggctgtcgtgaattggaggatgtcaacgttgaaagtgtcaaagaagttgatgcagtcagcacacgcgaacaccctactgtggtggtagctggttcacaagaatgtgtgattctacactaacaaggctctaagattatgatcatattcagcaaatccgtagcgctgtaagaataattgctgaattgagccaccgtttaagtcacatagtattgggctgtgcttgagccttaagg

SEQ ID NO: 28963 - DNA, 397 bp, Glycine max
  Clone ID: LIB3108-059-Q1-K1-A5
ccacgcgtccggcaagatggctaaggaaaaggctcagatcaacattgtggtggttggtcatgtggaccctgaggaggcaaccaccattaacgagctgaagaagcctgttgtggagaaagaagctccagggcatgccatatgagggcatgcacgtacggcctcggaggggaaccagaaaattatgttaacaaaataatctggaaccctaatgtatcaatgtcatgatcagtgcgaagacaaagatcgatttaccggagatggcccttctgacaagacagtggatatgaacagtgccaaaagggcaaagtgcttaaattgaaagctaatgcatgcttcttatcttctgactaaagaaatcatcatcaaattttattatttacatctatcattgccaaaa

SEQ ID NO: 28964 - DNA, 248 bp, Glycine max
  Clone ID: LIB3108-059-Q1-K1-A7
cccacgcgtccgggcttcttcaggtgtatggtggaaatctaggatggtgctttattgaagaggcctattacaagctcctactggaggccctacttagcaaacaacaaggttctgcagaatataaggtagaaaatatttagaaactatgaaatgaatgttgtgtaatatttccacttgaatgaatagggtgaacgattctctattggacagcatatatcaggcacaaattcggtttaaaatggcatttc

SEQ ID NO: 28965 - DNA, 390 bp, Glycine max
  Clone ID: LIB3108-059-Q1-K1-A9
cactttcgtggccacagcaccagtaacagtggcaggctcactacaagctgcaggtaccttgatgctacccaccaaggagcacatggacactctgaccctgaaatgtacacatttgcataatgtaacagctgtttgacttggaacccgctgcagctgaactcagtcgctcccttaagctcgatctcaaagatcacgctaaaaaatgcgtcgacaccatcaatgttgcatgattcgaccttgccacctaatatatccatggttatgaagctagtgcagactgcgttccaaagaagctaaccgttgactaaatccacagcaagacatacttgcaagtgaagggaactggaactgctaatcagagcccaaccattgaatgtagagtggactcat

SEQ ID NO: 28966 - DNA, 394 bp, Glycine max
  Clone ID: LIB3108-059-Q1-K1-B1
cccacgcgtccgcccacgcgtccggccgaagaaggttcatccaatccccgaagcccttcaccgcattgcaaccatgtcgaggagaaaggtcagagagccaaaggaagaaaacgtgactctgggcccagctgttagagatggtgaacatgtctttggcgtcgctcgcatctttgcctccttcaatgataccttcattcatgtcactgatttgtctgggagggaaacgcttgtccgcatcactggtggaatgaaagttaaagctgacagagatgaatcatctccttatgctggtatgcttgcaacttaagatggtgcttgcagatgccagggacttggcataactggtcttcatattaaggttcgtgccactggtggaaaccagaccaagacacct

SEQ ID NO: 28967 - DNA, 196 bp, Glycine max
  Clone ID: LIB3108-059-Q1-K1-B10
cccacgcgtccgcaaagtaacacatcttattttgcaaaaaaaaaaaaaaaaaaggaaaaaagatacaaaaaaaccggggagactaaaaatgccccgttgactgcctgcgtggttgcgaggctctctgccaccatcattgcttaacgtttattttgttgtctggccttgggttctcaacacctgggactggtattac

SEQ ID NO: 28968 - DNA, 347 bp, Glycine max
  Clone ID: LIB3108-059-Q1-K1-B4
cccacgcgtccgcttaataccaattttctagggtttatacaattttcgatggcttcttcagatgttgagtaccgttgctttgtcggtgggctcgcttgggccactgacgaccaagctctcgagagagccttctctcagtacggcgaaatcgttgaaacgaagattatcaacgatcgtgagactggaagatccaggggttttggatttgtgaccttcgcctcggagcagtccatgaaagacgccatcgaaaggatgaacggccaaaaccttgacggccgtaacatcactgttaaccaagctcagtcccgtggtggccgttgccgccgaagccgttgaagtggtggata

SEQ ID NO: 28969 - DNA, 292 bp, Glycine max
  Clone ID: LIB3108-059-Q1-K1-B5
cacacgcgtccgcaagcttgttctgctttatgtcacgccaacttatgctatctactcgttggatgccggagggtataacttttcctaccatgtcgttgatgctatggaaaagtacagcatgcacttggctaatgaactcatggaaagagctaaagatgaatgcacagacttgaacgctactaatatcaatatggaaagagtgactggtataagacatgccaagaatgtaatatgcaaggctagcaacaaactataggctgacaccttggtcatgggaactcatggctatgga

SEQ ID NO: 28970 - DNA, 280 bp, Glycine max
  unsure at all n locations
  Clone ID: LIB3108-059-Q1-K1-B6
cccacgcgtccgagaaactttcctattcacatctgaatcagtgaacgaggggcacccttgaacaagctctgggaccagatctccgatgctgtgctcgatgcatgcttggagcaggaccctgacagcaaggttgcctgtgaaacctgcaccaagaccaacatggtgatggttttcggagagatcacaaccaaggccaacgtggactatgagaagattgtgcgtgacacatgcaggaacattggttntgtctctgatgatgttggtcttgatgctgacaact

SEQ ID NO: 28971 - DNA, 407 bp, Glycine max
  Clone ID: LIB3108-059-Q1-K1-B7
cctgcaatagatttcaatgcagattatggcatgcggagatcatttagcgaaggagatataaagactcttggtaatggtaacatgaacatcgtccaatcaccccttgagaggcccttacttatcagcaactgcaccagtgaggaacgctttcaaaagctctcaagatacaggaataagaggacaaagaggaattttgggaggaaaatcaagtatgcttgcaggaaggctcttgctgacagtcagccaagaatccgtgggagatttgcaaggactgaagagtctgatgtcaagagggaatgaatgacttataactgaattagtatgaagaaagtacagttgagtagctatatctgatcaagctatatggaaaaactcagcagtaatatgtgaatagaacttatgtgggg

SEQ ID NO: 28972 - DNA, 386 bp, Glycine max
  Clone ID: LIB3108-059-Q1-K1-B9
agaagatggcgtcgagcggagctttgccgttttggagggcagcggggatgacatacatcacatactcaaacatatgcgcgaagctggtcaggaattgcctcaaggaaccctacaaggctgaagccatctctcgtgagaaggtccattttgctctctccaaatgggtcgacgccaagcctgaaaaacctactattcgttcagacaccccagagcagtgatccggaatagttggaagctataaatgcataaatctttgagatctggaagttcattgtcattttgaacctttctgtgatgtttaattcctttgcttctttttttttcattccatgaaatggaacatacactggattttgatttgcatgattaatcttggaataataaaa

SEQ ID NO: 28973 - DNA, 255 bp, Glycine max
  Clone ID: LIB3108-059-Q1-K1-C1
gagttaataaagaatggcaacaatagctactagtggtgtgagtctttcaagccctagcacagtacttgctatgaaatcagactcagcacaaaaggcccaggccatgagcttcccagctctgttcaggcccattcaaaagtggcccggtttggtgaaggcccggcccgtttgggccacgccggagaagatatcggagaaggtggaggagagcatcaagagcgcggaagaggcgtgctcgggagctggcggcgacgc

SEQ ID NO: 28974 - DNA, 357 bp, Glycine max
  Clone ID: LIB3108-059-Q1-K1-C10
gcagcggcaacagaggcgagatgtatgaagttcaatccacgagtgtcgagcaggcgccgcaagagccgaaaggctcacttcacggcgccgtcgagcgtgcggagggtgttgatgagcgcccctctgtcggcggagctccggtcgaagtacaacgtgcggtcgatcccagtccgcaaggaggacgaggtgcacgtggtgcgcggaacatacaagggtcgcgaggggaaggtgacgcaggtgtaccgtcgcaagtgggtcatccacatcgagcgcataacccgcgagaaggtgaatggctccaacgtcaacgttgggaatcacccctccaaaggggttggcacaaagctcaaattggac

SEQ ID NO: 28975 - DNA, 224 bp, Glycine max
  Clone ID: LIB3108-059-Q1-K1-C12
gttggattcaacattgttgatgtcttggcttggggctccattggccatgttgttgcttactacatcttggccaccactagcaatggctatgaccctgcattctttggctgatttaatttcatcatcatgttgttccaactgtgtttcttgcttactttttagtatgtaatgtaatcaatgtcatgatgtataggttctctctaaagatccaacaagttcagcat

SEQ ID NO: 28976 - DNA, 232 bp, Glycine max
  Clone ID: LIB3108-059-Q1-K1-C3
ctctctatgaaaagtattttcaaaataagttgataaaccattaaactggagaatatgagtgcacagaactatttacattgttccatattcttcatacagaagtcatattgagccccctaccatattgggctggttgtgttgtgttcttgtgatacttgcaattattttcccaatgcttgacagtagttgacattatctcagcaattgagctttcagataaatgtgcgtttcg

SEQ ID NO: 28977 - DNA, 122 bp, Glycine max
  Clone ID: LIB3108-059-Q1-K1-C4
ctgtgtaccagaagaatctgtatgagaaccattatattatatatattagaaatttctgtccctaaaaaatatcaactcttacgcttcaattcataatattgattgttttgtgttgttgttat

SEQ ID NO: 28978 - DNA, 412 bp, Glycine max
  unsure at all n locations
  Clone ID: LIB3108-059-Q1-K1-C5
atacattgcaaaaatggcatcattcaccatgacagcttccatccttggctgcccagccgtcaccaaccggtcggcagcggcgacgcagaggagatcagtggtagtgaatgcagccagcaaatctgttgaaggggaaaaggtcagttatgacaacaatggtagcaatgcaaggaggaacttgatgttcgccacggcggcggctgctgtttgctcttttgctgcagggatggcattggcagatgagcctaaaccaggaacctcagaagccaagaaaaagtatgccccggtttgtgtcaccaatcctacaggtaggatttgtcgcaattgaggaactttnttgnttcacttttggaatttggaaatgtacaatgaatttgttgtaaggctttgatgatttcatttcatcctcact

SEQ ID NO: 28979 - DNA, 405 bp, Glycine max
  Clone ID: LIB3108-059-Q1-K1-C6
gacccacgcgtccgcggacgcgtgggcggacgcgtgggttctagagagagcccatgagctactctacttgggaaccttgtatggattatacccaggtttgcacaacaaaactgtcgaagaatggtgtttagacgttcggtcattgtcggttggtgcagctctaactgcactggaagagtggatgtggacactcaccaaaatcgttaagcgggaggagacactgcctgagttattcctagcccatactggtactggtgctcataagtttgcccaaggactcaacatttcttttgcctctcatttgagaaaactagctggttcatttaagcagagtgaggaaaaagtaagctggtttattgcaagttgagaggatttaggctcttgggtgcaatcaaagtctactgc

SEQ ID NO: 28980 - DNA, 410 bp, Glycine max
  Clone ID: LIB3108-059-Q1-K1-D1
cttagctgtcacattttgtcaatcaattaacaagtgcgtcttttttaatcgcatccctcttgtggctttccttccatttttgcaggagcaatttggcgggttgatcatgagacacgtggttattttttctttcaatttcttgctgctttgtgtcttcatttctgctataacaagcacaaaaagtgaagtatctagcacaaatgaagaacaatcattttcttaccatatcaaagctttggaattcatatggaaacatttgggctatcaacatgtgtggctagaaatggaatttaactggagaattggtggtggaaccttgattggaatcttgggagcagcatttggaagtgtaaggggagttggtggtggtggcatctttgtgccaatgctaatcctcattattgggtttg

SEQ ID NO: 28981 - DNA, 257 bp, Glycine max
  Clone ID: LIB3108-059-Q1-K1-D10
aagcgttcggtttgcgggcttactgcatcatgaacgctctttccattcttgtcttgttccgtgtcgtttgggcattagtttatgcgaagaaaactggcgatgtgactgagttgcaaattggcgtgaagcatagaccagcatcatgtgaagttctggcacacaatggtgacagagtcaaagtacactatcggggaaaactcactgatggaactggcttcgattctagctctggagaaatcatacaattgaatttgagc

SEQ ID NO: 28982 - DNA, 202 bp, Glycine max
  Clone ID: LIB3108-059-Q1-K1-D11
cccacgcgtccgcccacgcgttcgaagacgcgtgggcggacgcgtgggccaaggcttgcttcgaagagaggtgtgctgtatcataccatgggtcacgttgttgataagccttaagcttaggattggctgcaaaagctcataaagctgactacacttcgaactattgacgaaggagacagttacaagctatctgataacttgt

SEQ ID NO: 28983 - DNA, 384 bp, Glycine max
  Clone ID: LIB3108-059-Q1-K1-D12
accacgcgtccgtctacgtccgttcaagcttgcgctttttagcttttatccattgaatagcaatagacccttttgttgcccttttgcttctgaggccttcaaacattcttggcttctttgcaaagttggaattttcactcttcaacttattgttttgatcccaaatcagaaaaaaataatattgggttttattttcatccataagctgaaaggctgaggcaagtatcattggaaatacccttttcatctcatgatctgaggttgataaacaacaaccttttgttcagagttcaaaatgatcatggcatgttccatgaacagtgttttctgtggttctgaattaaatgagaacatatttgggttcaaaaccaaagggggtttgtt

SEQ ID NO: 28984 - DNA, 322 bp, Glycine max
  Clone ID: LIB3108-059-Q1-K1-D2
gaagatccgaacttctgtcactttccacaggccgaagaccttgaagaaggacaggaaccccaagtaccctcgcattagcgccccgccgaggaacaagcttgatcattatcagatcctgaaataccccctcaccactgagtctgccatgaagaagattgaggacaacaacactttggttttcattgtcgacctgcgtgccgacaagaagaagatcaaggatgcggtgaagaaaatgtatgacattcaggcccaaaaaagtgaacaaccttcttcaggcctgatggaaccaaaaaggattttttaaggtggcaaccggattcca

SEQ ID NO: 28985 - DNA, 405 bp, Glycine max
  Clone ID: LIB3108-059-Q1-K1-D3
acccagaaaaacctgcacttctgattgacccagttgataggacagtagacagggacttgtcgatcattgagcaactggggttgaagcttgtgtatgccatgaacacacatgtgcatgcggatcatgtcactgggactggccttatcaagagcaaagttccttctgtaaaatctgttatttcaaaagcaagtggtgcaacggcagatctttatgtggagccaggtgataaggtccaaattggtgatctttttctagaagttcgtgcaactcctggtcataccaaaaggtggggtacctatggtactggagaagcacctgatcaaccttaacctaagatggcattcactggagataccctattaatacggggatgtggtaagacagattttcaaggtgggagttcaa

SEQ ID NO: 28986 - DNA, 386 bp, Glycine max
  Clone ID: LIB3108-059-Q1-K1-D4
ctctctgagccccaatctcttgagcagcagaatcttcaggccaagccaggtaagcaagcacaacacaaccccgaaatggcttctgcttctgttcccatggctttctcgctgagctctgttatcaacaacaacaagccttcatccgaagccttcttcaggccactacccctacggcaaccaaagaggaccctcttcaccacaaaggcagtgtcaaactccaaggctcaaatcaatgcatctttgaaagagaaagcactttcaagaactacaacaacttttgggaccacatttattgggggtcccgaagtggctcatgcttcttgatattaagtcttccctttccttaagaaccttctggtaaacatctttgctggtggggttggtct

SEQ ID NO: 28987 - DNA, 408 bp, Glycine max
  Clone ID: LIB3108-059-Q1-K1-D5
atttggatgaaccacaaatacaacatttgttgcagtccgctgaagccattagaaaagactatcctaatgaagattggttacatttaactgctcttattcatgatcttggaaagatccttatgcttccaagctttggtggccttcctcaatggtctgttgttggagatacatttcccctcggatgtgcttttgatgagtcaaatgttcaccacaagcatttcaaggacaatccggataacacaaatcctacttataacacgaaaaatggaatctacaaagaaggaattggactagacaatgttgtgatgtcatggggacatgatgagtatatgtatttgtttgcaaaggaaaacggcaccactttgcctccagtagcattgttcattatcaaataccattctttttacg

SEQ ID NO: 28988 - DNA, 274 bp, Glycine max
  Clone ID: LIB3108-059-Q1-K1-D6
cgatccctttggggagataagaaaatgtggcttgtgcagctctcaaccccatttctgaacggccatggccatggctccagccttctctggaaacccagttcggcggtgactcagacccactgggccccgccgagtttgctgcctcaaatcaatgcgatgaagacgatgcagggaaaagtggtgtgctccacgaacgacaagacggtggcagtggaggtggtgcggctggcccctcacccaaagtacaagaggcgcgtgaggaagaagaggaagt

SEQ ID NO: 28989 - DNA, 389 bp, Glycine max
  Clone ID: LIB3108-059-Q1-K1-D7
actttctctgcctcgagaaggagaaacttgaaacattttgaacctctccttccttccttctccatgtttcacccaatggagcaaagcgccaaacgctcccagtactctctgctccacttctcgtttcttcaactgcaccacctcaaaagatccatgctttctctactcttctccctacccacatcatttttcgctctctttcttctcctccttttatcttacaacgctttcaccgtcttctctgtccatgtccctaaatccccaaccaccaccaccctctccaactccaagttctcttcttccctcaattcacctctcttcaagaacccccacttgccccttcttcaaaactccactgaaagcttttcctttcaactattcagaggcct

SEQ ID NO: 28990 - DNA, 302 bp, Glycine max
  Clone ID: LIB3108-059-Q1-K1-D8
cggacgcgtggggaagctgaggtacttcagctgcagccaaggcttcctgaaactcataacagtagcagtgttgcttcatacaaaacctccaaatcctacatgtcccacaaaaagcctaggattgaagtcctaaatgatgatgatgatgatgagtattttactgtgcccgatctcggctaagtacgtggcttgccatatgggatggtgcatgcatgattggaaaagattaattatgggaaaataatcgttttttttaagctctattagtaaattgtcaaaaaagaatatatttttcccaaaaa

SEQ ID NO: 28991 - DNA, 414 bp, Glycine max
  Clone ID: LIB3108-059-Q1-K1-E1
cccacgcgtccgcacaaggcagaaagcaagctcatcctagagttttaaaaatggcagcagcctcctccatggctctctcttccccatccttggctggcaaggccgtgaagctgggcccatcagcccccgaagtcgggagggtcagcatgaggaagaccgtcaccaagcaggcctcctccggaagcccatggtacggcccagaccgcgtcaagtacttgggcccattctctggcgagcccccgtcctacctcactggcgagttcccaagtgactacgggtgggacactggtgggctttcggccgacccagaaaccttcggcagaaaccgggagctcgaagtgatccactccaagtgggccatgctcggggccttgggctgcgtcttccccgaactattgtcccgcaacggggtca

SEQ ID NO: 28992 - DNA, 309 bp, Glycine max
  Clone ID: LIB3108-059-Q1-K1-E11
gggggtgggaaagggttagatccggaaattagggtgaagtgaaggagaagctcttgagaagcctatgtcctttcatatttaatattaaaagagttgcattggagcctgttgggtcgggaattattggagctgacttgaaagttgaaactgaagatgggagaagcaaccgaaagatatgcacatgtgaccggtgcaaataaagggattggattagagatagttagacagttagcttcagctggaatcaaagtgttgctcacagcaagaaatgagaagaaagggcttcaaacactggaaacactcaaagac

SEQ ID NO: 28993 - DNA, 189 bp, Glycine max
  Clone ID: LIB3108-059-Q1-K1-E2
attccgtatttatgggcatattgtgttcaaggtgtatcatgcaatgctgtaaaaattggctcggacagtcgaaccgactgattggactaagaattggggacacgagcttacggtagaatcatgacagttttgcggtcgaattggtaagccggtccggttgaacacttgtactaatattgatattgttgg

SEQ ID NO: 28994 - DNA, 376 bp, Glycine max
  unsure at all n locations
  Clone ID: LIB3108-059-Q1-K1-E3
cccgctcctccggtaggagctccgggatcaagccaggattccatgtctcctggtccagctgtatctgaggacgagagtggagctgaaaccatcaggtgcttgaagaaggtcattggatgcttagccttgagctgggctacccttgttttgttcttctagagaagaggctgaggcttcattgctgctgntacatagtattattgtatcacttattggctttttggacctgtcggggggctaaaataaatttattaacaatggtttctttaatctcttaataccttattaatgaagaaggttggtgacactattattaatttaggacttcttggttccttggttcgtggtcgtgcatggtgggctttaccttgggaat

SEQ ID NO: 28995 - DNA, 248 bp, Glycine max
  unsure at all n locations
  Clone ID: LIB3108-059-Q1-K1-E4
ctccgaattagggttttccaattcgcagagcaactcaacacaacgaaccaaaccaacaatgtcgcagccgcagcctcagtcgcagccgcaacacgggcaagcggcgctggagcaggtgcagtgcttcggtcgcaagaagacggcggtggccgtgacctactgcaagcgcgggcgcggcctcatcaagatcaacggctgccccatcgagctcgtcgagccggagatcctncgctttaaggccttcgagc

SEQ ID NO: 28996 - DNA, 398 bp, Glycine max
  Clone ID: LIB3108-059-Q1-K1-E5
cccacgcgtccgcccacgcgtccgtttcgtttcatagggtttgcttttgtctacatggaagatgaacgtgatgctgagtatgcaatcagaaggcttgatagaacagaatttggtagaaagggtcgccggattcgtgttgagtggactaagcaagaacgtgacagtagaagatcaggtggtgattccagaaaatcttcatctaattcaagaccatccaaaactttgtttgttataaattttgatcctgttcatgccaggacaagggatctggagagacattttgattcctatgggaaaatattaaatataaggatcagaaggaattttgcttttattcagtttgaatcccaagaggacgctactagagctttggaggccaccaacctgagcaagtttat

SEQ ID NO: 28997 - DNA, 399 bp, Glycine max
  Clone ID: LIB3108-059-Q1-K1-E6
ctcgtgccttgctgaaggtgagcgaatatcatagagtacctttgagacaggaaggacttcttacaagagattccagagtggttgagaggaagaaagttggtctcaagaaagctcgtaaagcccctcaatattccaagcgttgaggttgggatgttacatttgtaggtttttcgggttaggaaaagtaaagagaaattgaaaaatatccgaaggcgtatgtattcagaatcctgctccctgttttcccatctcttgtttccttgatctgtatggaattgggaattttaggtatgtaatatttgtctctcccttttacccccaaccaaaatcacatgttttactatattgcacgtttcttttcaagacctaaattttgtggtcttttactcttcatttctt

SEQ ID NO: 28998 - DNA, 401 bp, Glycine max
  Clone ID: LIB3108-059-Q1-K1-E7
gcaaaacccttttttcttttcacctttcggtctctttctctacatagtttctttttcactcttccattcttcttttataagcaacaacaacctaattcctcgcatcctaagaaaatgggaaccagagtgtggtgttgtttcatgatgttcttcctctctctcaatgctcttgcaatagcattggaagatcacaacctcaaaacgacgtccagggatgacatcaagtgcaccccatgtggccaagttccctccgtagcctacaagctccggcggtggtggtgcttactattactctcctgcggcaccctctcaatatatctactcttgtacaccgccggcggcgtccaccggcggacgaggcggccgcgtatactactacccaccgtctagagggtactacc

SEQ ID NO: 28999 - DNA, 383 bp, Glycine max
  Clone ID: LIB3108-059-Q1-K1-E9
cgcgtccggtggaagaaagtgacctgactgagaaaccatctgaggtaacaaaaaagccacagaaaccatctcaattcacaaggcagaccaaggtaaaatctgtacctgcagctcttcgcaaccgggctaagagaagaattcaaccatggatgtggattctaattgcagttgtggttgttgttgccttgttttatgtgggcaatagcagctctttgagatcttcgcttgaaggctttggttactgaggacactcggaagcaatcacaaggcgtttgtcggggaagagttaccggtacatatttatattttacacaaatacatatagacgcaattctttcttgcccttgcaattttttcctgctagcctttggtcatagccatta

SEQ ID NO: 29000 - DNA, 362 bp, Glycine max
  unsure at all n locations
  Clone ID: LIB3108-059-Q1-K1-F1
ccctttctcccttgtcttctcttttctcaatttcgctctctattgtcatcaattcacacatccaccgttcagttaaaaaccacccaaatccgatggcggcgtcgcggcgtctccgggacctccaatcccaaccggcgaacaagatctgcgtggactgttcccagaagaacccgcaatgggcctccgtatcgtacggcgtcttcatgtgcctagagtgctcaggcaagcaccgcggcctgggcgtgcacatctncttcgtgcgatccgtgacgatggattcgtggtccgaaatccacatcaagaaaatgggagcccgaagcaacgacaaactcaacggctttctcacgccataccggattccc

SEQ ID NO: 29001 - DNA, 364 bp, Glycine max
  Clone ID: LIB3108-059-Q1-K1-F11
gcgggcatcattcaccatgacagctttcatccttggcggcccagccgtcaccaaccggttggcagtagcaacgcagaggagatcactcgtagtgaatgctgccaaagctgttgaagcggaaaaggtcagttatgacaatgacatggatggtagcaatggaaggaggaacttgatgttcgccgcggcggcggcggctgatgtttgctctgttgctgggatggcagtggcagatgagccaaaaccaggaaccccagcagccaagaaaaagtatgctccgatttgtgtcaccatgccaactgctacgacttgtcgcaattgagggactcggcttttattttacttatgatgatcggaaatgtgcatt

SEQ ID NO: 29002 - DNA, 387 bp, Glycine max
  Clone ID: LIB3108-059-Q1-K1-F2
cccacgcgtccggaaaaaatataactttcgttcttccgaattttcgatgaggaaaatacatggagacgacctgaactgaagagacaataagagggtggatatggagctggtggtgggagtggtgaaggtggtggccacggtggtggatactacccttgagattaattgataaattacccaagaaaataacctagctagctccttgtggctatagtaacaataataacaaatgtatgggtacgagtacgtggattggtaaaactatttatgtattggattttacttttttatttttatggcttacatatatgtcgaatggattcaagacttacatcgatgtaaacgtattaatatagtaatacatattttgcaatatttttagattcc

SEQ ID NO: 29003 - DNA, 189 bp, Glycine max
  Clone ID: LIB3108-059-Q1-K1-F3
tcattaccaagcatatctatgagattcaatccttgaagttcatactgaaagatgggttacaagatggcgttactgatcctaggactttctctaatgctcctattggtatcctgtgaggtggcatacacgaatacaaaagaggaagcaaatggagtggatgatgccaaatatcccggtggaagctatgga

SEQ ID NO: 29004 - DNA, 244 bp, Glycine max
  Clone ID: LIB3108-059-Q1-K1-F4
cgcccagtctgcaagaaatttatgcaagatcctatggaaatttatgttgatgatgaggccaagttgacccttcacgggcttgtgcagcactacatcaaattgaaagaggaagaaaaaaaccggaagttgaatgatcttcttgatgcactggactttaatcaagttgtgatccttgtgaaaagggttagcagagcaacttagctggacaaactacttgtggagtgcaacttttcatctatatgca

SEQ ID NO: 29005 - DNA, 283 bp, Glycine max
  Clone ID: LIB3108-059-Q1-K1-F5
ctaatccctatttttcttcctcagtagtttcatttacgcttctcttctctgcagcaactatgcctaaccctaaggtcttcttcgacatgaccattggcgggcaatctggtgggccgcatcgtgatggagctctacgccgacgtcactccccgaaccgccgagaacttccgggcgctttgaaccggcaagaaggccgtagggcggagcggcaagcccctccactacaagggctcgtccttccaccgcgtgatcccgagtttcatgtgtcaaggtggcgacttca

SEQ ID NO: 29006 - DNA, 314 bp, Glycine max
  Clone ID: LIB3108-059-Q1-K1-F6
cttttgtacagctaacatgaatgtttatatcaaagtttcccctgcaagctttactttatataaagcattggagataaatgcgatcagcttggccattagaataaattactttttcttactttgcttgatttcgttactacaacaacttgactgaaaatctccgtaaggagagttaacttaggatgtcaagaatagacggcaatgtgtatttattgtgtatgtatataagtccatggctgtaaggaaaatattggaaaatacctaatggcaataccaaaagtaatatttaaaaaaaaaaaaaagggccggccgtt

SEQ ID NO: 29007 - DNA, 259 bp, Glycine max
  Clone ID: LIB3108-059-Q1-K1-F7
aagccttccgtggcacctattaatcaagatttgacatttaaagagaattttttttgctgggcaagtatttgacggacatggagggaagagcgctgcacaattcgttcgtgatcatctgccacgggtgattgttgaggatgctgactttcctttggaattagagaaggttgtcacaaggtcatttttggagatcgatgcatagtttgcaagatcatgttctactgagtctttcctgtcttctggtacaactgcactgact

SEQ ID NO: 29008 - DNA, 186 bp, Glycine max
  Clone ID: LIB3108-059-Q1-K1-F8
cgtcgtcccaggtgtacgcacacgcgtgcgaaaatgttgcatgaggcaatagtgcaattggctgcgttgcaggtttttgatatttatttgagtggtggtgctgattacataccgccttcaaggttgaatgggttcgtctaccaaaaggggtcctaaaattgggatactgtttgaatggaaccgttt

SEQ ID NO: 29009 - DNA, 386 bp, Glycine max
  Clone ID: LIB3108-059-Q1-K1-F9
cccacgcgtccgctctttgcgcagttccctacctctcctttcaagatgcacatcttcgtcaagaccctcaccggaaagaccatcacccttgaggtggaaagctctgacaccatcgacaacgtcaaggccaagatccaggacaaggaaggaattcccccggatcagcaacgtctcatcttcgccggaaagcagctcgaggacggccgtaccctcgccgactacaacatccagaaggagtcaacccttcaccttgtccttcgtctccgtggtggcatgcacatcttcgtcaagactctcactggcaaaaccataaccctagaggtcgaaagctctgacaccattgacaacgtcaaggccaagatccaggacaaggagggaatcccccc

SEQ ID NO: 29010 - DNA, 285 bp, Glycine max
  Clone ID: LIB3108-059-Q1-K1-G1
gttctctctccccctccccgattcgttttgcccctttcgttgccctaatttcaaccatgcctcgccgtagctccggtggaagatctgcccgtcctgctcctcgtgcagcacctcgtcctgctccagttcaccatgctcctcctccagcccctgctcagagcggtggcggatctatgcttggtggcattggttcaaccatagctcaaggtatggcttttggcactggaagtgcagtggcacacagggctgtggatgctgtcatgggtcctcgtaccattcaacatg

SEQ ID NO: 29011 - DNA, 400 bp, Glycine max
  Clone ID: LIB3108-059-Q1-K1-G10
tcgacccacgcgtacgaagctttccaaaagtcttacttcaacaagtatggtggtggggctaattccctggctgatgggtacagcacaggtactggattgggtgctgagatcattggcacctttgatttggtgtacactgtcttctctgccactgaccctaataggaatgctagacattcccatgttccggatttggctacacttaccattggatttgctgtgttcatggttcacttggccaccatcccagtcactggcactggtatcaaccctgctaggagtcttggagctggtgttatctacaaccaagataagccatgggatgaccattggatcttttgggtaggaccatttattggggcattcattgcagccttctaacatcagttgattttgagag

SEQ ID NO: 29012 - DNA, 330 bp, Glycine max
  Clone ID: LIB3108-059-Q1-K1-G11
tccacgcgtccgattttgtgtagctggcagccagggattgttttgccatcttctaacatgggatcaaatacaagtactagcttgctctttagtgagtcatcgtagcagattgatcatagtcccattggtgcagacctatcagcaaccggaccagaaagttcaagcacctgcgcttgtggggttacacaacgacatcaagcactacaatctcccagaacatataaaacatgtcatgttgaaggatattggaatggtgccagaagttctgctgagactaagctatatcatggttgggataggaagctttaaaaacctgattgtcacaaaaga

SEQ ID NO: 29013 - DNA, 193 bp, Glycine max
  unsure at all n locations
  Clone ID: LIB3108-059-Q1-K1-G2
cccacgcgtccggtttcagtgagtgatcggtgttcacttgatccttcataagtcgtcatcatcatcatcatcatcaccgttgattgaagaagatgccgatcagaaacatcgccatcggaaggcctgaagaggctactcaccccgacacgttgaaggcggngttggctgagttcatctncaccttgatcttcgt

SEQ ID NO: 29014 - DNA, 232 bp, Glycine max
  Clone ID: LIB3108-059-Q1-K1-G3
gcataacttgcatagactattgattaagaaagctattgtcattgatttgctagctccaacaatgggttctagcagattatcattcattttagtacttgtgcttgtaaccttttaatccatgaccatggcttaaggggttccaaagcacgtaccctgccaaaatcaggcttattggcttccaaaggtgatatacctactggtggtcctcttccactggtggcaccactggcaa

SEQ ID NO: 29015 - DNA, 392 bp, Glycine max
  Clone ID: LIB3108-059-Q1-K1-G4
gcatcacgttagctgctacttatgcttacatatacatggtgcacacggatctagattggagtgagagtgaatagggtacatataggatgaatgaagtgcatagcttgagccagcgttctggatgaacacatgtggtaacatctttggtcctctggcacagggccacaaccctgagaagtgagcatgacttccactatgtgacatctactattctggatcattcttaggggcacttgttaagcacagctttcaagcttctgagaccagcaaaggaccgatcagaacccttgacatcgttaactaactgcgtcatgtaacaacattacatgacttcatcaatgaaaactgtccatcctgatttcattctattaagtttacttatgcacattctc

SEQ ID NO: 29016 - DNA, 296 bp, Glycine max
  Clone ID: LIB3108-059-Q1-K1-G5
cgtccgctctccgcagcagccacacttcttcgccgtttcagctgaagagccatccgcaggtaagcaatggttaagcataataatgttatccccaatgggcacttccggaaacactggcaaaactatgtgaagacttggtttaatcaaccagcccgaaagaccagaagacggttggctcggcagaagaaggctgtcaagattttccccaggcctactgctggatctctcaggcctattgttcatggccagactctgaaatacaacatgaaagtcagagccggtagaggattttcact

SEQ ID NO: 29017 - DNA, 308 bp, Glycine max
  unsure at all n locations
  Clone ID: LIB3108-059-Q1-K1-G7
gtgttggtgtgcccaccctcactctctaatctctaagactctctactcttctcttagtgctctaatctaattattattatcaacataagtcacaacaccaccattcttccattctctctctttcttctacactattcattcaatccatgccggtcaacgtgaggtgctgaaggtcaatcgtggtctttcgaaatggggaacgggagcagaagctactcggcgaaccggagcgactacaagcttctagaagaagtcggttacggcgccagcgccaccgtctaccgtgcaatctacctnccctacaacga

SEQ ID NO: 29018 - DNA, 387 bp, Glycine max
  Clone ID: LIB3108-059-Q1-K1-G8
cccaaatcaatttctctctctctctctctctcgctctctgatctgttttgtttcaggagccacccgctcctgcagttttcttttgcggttggagtggaaggccattctcgcaacgtttgagttcagcagatccagaatttttcagaaaacaggtttaggagaatgaagaatacggaacgaattgccaatttggctttagcaggtttaaccttagcgcctcttgttgtgaaagtagatccgaatttaaatgttattttgactgcttccctcactgtgtttgtgggctgttaccgctccgttaaaccaaccccaccaactgagacaatgtccaatgaacatgccatgcgttttccctttgttgggagtgcaatgttattgtcactcttc

SEQ ID NO: 29019 - DNA, 246 bp, Glycine max
  Clone ID: LIB3108-059-Q1-K1-H1
aacgagtggatatacgatagtataaataatggtgtttataaatgtgggtttgcaaagaagcaagaaccatacaatgaggctgcaagacaattgtacggggctttggacaaatgtgaggatatactaagcaagcaacgctatatatgtggcaatacactaactgaagcagacattcgtttgtttgtcactcttattagatttgatgaggtttatgctgttcacttcaagtgcaacaagaagctgcta

SEQ ID NO: 29020 - DNA, 340 bp, Glycine max
  Clone ID: LIB3108-059-Q1-K1-H2
acgttgtgagaagtccactgaaccttatcatttagaggaaggagaagtcgtacacgtttaaacggagttctaaatttccggcgagttttcctctctcgaatctgcgacaccgacgaatctcactcaccggaatttcggattcagaaaatggctttaggtggaacagctcccccaagaggaagtgcagcggctactgcaagcatgacgagaaagagaacacccggggggcggctctgaggagcagctggaactatgctccaattttacacagatgatgcccctggactcaagatcttcccaaatgttcgtctttgtatgagcattggcttcatagcatttg

SEQ ID NO: 29021 - DNA, 354 bp, Glycine max
  Clone ID: LIB3108-059-Q1-K1-H3
ggggatagatagagtgatacacatcacattttctcaaagtaatttattaattaataaataaatggcggcggcggcggcagtgacggtgctactcccacctaggattccgaccgccaccaacgttacccgctgctctgctttgccttctctgcctcctcgcggcaccaacactaaaaccactttgctcttatcttccctcaaccacttttcagtgccccaaaatcttctttggttaaaacagaaccttttcaaagggattattcttaagagattcccatgggggggtcacagattttgaaggaaagttggatgcccttggaaaccaggtcaccagacctttttaagggggttggg

SEQ ID NO: 29022 - DNA, 406 bp, Glycine max
  Clone ID: LIB3108-059-Q1-K1-H4
ggctattttcctaatcgaccgaacattgttagaaccaaaatacctacagaagatccttctaaggaagagtgggaaacttttctaaacaatcctgagcaaactcttttggagtctttcccatcacaaatccaagcaactacaatgatgttagtttttaacatactatcatatcattccccagatgaagagtatattgggcaatacttgaagccatcatgggctgaggatccaactataaaggcatcctttgaaaggttcaatgggagactcaaggaaattgaaagtattatagactcaaggaatgcagattgtaatatgaaaaatagacatggtgttggggtggtgccttatgagcagatgaagccattttcaggacctggaatcactggaaaaggaattccatata

SEQ ID NO: 29023 - DNA, 92 bp, Glycine max
  Clone ID: LIB3108-059-Q1-K1-H5
atggaatggtttctctagttgagtgggctttacctaccctattttttttccctactttttgttacctttacggtccttcacttgtttttggg

SEQ ID NO: 29024 - DNA, 223 bp, Glycine max
  Clone ID: LIB3108-059-Q1-K1-H7
cccacgcgtccggaagaagggatacgaggttctttatatggttgatgccattgatgaatatgctgttggtcagctcaaggaatttgagggcaagaagcttgtctctgccaccaaggaagggctcaagcttgacgagagtgaagatgagaagaagaagcaagaagagttgaaggagaagtttgacaacctctgcaaggtgatcaaggatgttttgggtgacaag

SEQ ID NO: 29025 - DNA, 177 bp, Glycine max
  Clone ID: LIB3108-059-Q1-K1-H9
tcggcgcgcccggcggatcatgcctgtgccgcctcctatcgcttatttaatcaccctccacgatgggattcaacacagatgggggggtttttattattaaaacattacactatgcttgttactatgtacacagtcgtacttattcatattaacttgaccattatggaccactacgtt

SEQ ID NO: 29026 - DNA, 352 bp, Glycine max
  Clone ID: LIB3108-060-Q1-K1-A1
cccgctctaacaagaactgcaagcagcgcggtcacgttagcgccggccgctgccgtattggaaagcaccgcaagcaccccggcggtcggggaaatgcctgctgcatgcaccaccacaggatcctgattccacaagtaccagccgaagttcttcataaaagtatggatgatgtactttcataagctccgcaacaaattctactcgcccatcgtcaacatcgacaagctatggtctctgataccccaagacgcgaaggacaaagccctaaaatcgaaggacactgaccctctaatcgacgatactcaacacggttacttcaaggttctaggaaaatgtgtgctgccccaaaacc

SEQ ID NO: 29027 - DNA, 378 bp, Glycine max
  Clone ID: LIB3108-060-Q1-K1-A10
cccacgcgtccggtttagtagtgcagctaaacgtcgactaacagggagggaataacgaaagagccttcaacgctgatttttgtagaatattggaccgacaaatagttaccagcttccaccctgtctctctgcgattgagaaagggactcacgttctctgttcatcacaccctatgtctctctctcttcgtctctctctctcatccatgtgcatttcttgtctcatattaggcttcgagttcagaggtcgcccccttcatagcttataagcaacttccgcaacgttttctccttgatttcttcagctctagttctctcttccaagctttcttcagctttgcaactagctgtgtctggctctggccatcatcaagtcttc

SEQ ID NO: 29028 - DNA, 408 bp, Glycine max
  Clone ID: LIB3108-060-Q1-K1-A11
cccacgcgtccgggcaacacttaaatgaatacgggtctctccgttgtggtgctgatgatccttgtgatcatccactacaaggtagtcaacgccaacaacaacaactgtgctacagaggattgccttattggtcatagtttggagtccgagctctcgtttggctcccatgtggcaagaatgctctatgatgtgagccaatttgtgcatggccaaacagggaatagcaacaatgctgctgttaataggccagaaagcaatggtcatagaagctgcttgcaatctgataactgcggtggccctaaccaaatttgtgttgattacacgaggacttgctaagaaatatattatcagcaggtatttcaatactgatttcaaggttgtcatatgatagatattgtcataatctga

SEQ ID NO: 29029 - DNA, 348 bp, Glycine max
  Clone ID: LIB3108-060-Q1-K1-A12
ttccacgcgtccgggcttcacttatatctactaaagtttatacgaggagggactgatgatccttgtgatcatacactacattgtaggtaacgccaacaacaacaactttgatacataggaataccatattagacatatgttgtagtcccagttctcgcacatctttaaagtggcatgaactctctatcatctgaattaattttcctctgaccaaacattgttttagcttcactgatactgtgaatcgcccttacaactttgattatcgttactactatccatgtcaacacaactttggatttaactataaatatgttgatttcacgaagactatctaagatatatttt

SEQ ID NO: 29030 - DNA, 213 bp, Glycine max
  Clone ID: LIB3108-060-Q1-K1-A2
cccacgcgtccgggaattacatggggtgcggttaactatgatattgctatggccgtattggtacattctgagcgttcacgtgcaggctcagctactcctactgcatgaaccgactcagactactcctacacgagcaacacccaaagctaagggtaaaagtagagaagaagaactatctgaagctgaccaggtcatcattgttcaagctcatta

SEQ ID NO: 29031 - DNA, 405 bp, Glycine max
  Clone ID: LIB3108-060-Q1-K1-A3
cttgcatagactattgattaagaaagctattgtcattgatttgctagctccaacaatgggttctagcagattatcattcattttagtacttgtgcttgtaaccttttcatccatgatcattgactcaagggttgcagaggcacgtaccctgccaaaatcagccttattgccttccaaagttgatatacctactgttgttcctcttccactggtggcaccactgccaaatttgcctgttactctccctccagtgcctgaactacctgcagtacctaaagtaccaattcctgaagtaatagttaataacgccaaaataatcccttgagtacctatgatctatccagtcactactacttattttgtcacttgctaaattaacttgttgttgccatcccagggtggttc

SEQ ID NO: 29032 - DNA, 396 bp, Glycine max
  Clone ID: LIB3108-060-Q1-K1-A4
attgcatagactattgattaagaaagctattgtcattgatttgctagctgcaacattgggttctagcagattatcattcattttagtacttgtgcttgtaaccttttcatccatgatcattgactcaagggttgcagaggcacgtaccctgccaaaatcagccttattgccttccaaagttgatatacctactgttgttcctcttccactggtggcaccactgccaaatttgcctgttactcttcctccagtgcctgaactacctgcagtacctaaagtaccaattcctgaagtaatagttaataacgccaaaataatcccttgagtacctatgatctatccagtcactactacttattttgtcacttgctaaattaacttgttgttgccatccca

SEQ ID NO: 29033 - DNA, 404 bp, Glycine max
  Clone ID: LIB3108-060-Q1-K1-A5
cccacgcgtccgcccacgcgttcgcttaatcgatcatcacttcacttcggtaatacatcatggcagacgagacccagaacaagtatgagagctctgaggttgaggtccaggatcgtggtgtttttgactttctcggtaagaaaaaggatgaagaagacaagcctcatcctcaggaggaggtcatcgccaccgagtttcaaaaagtcactgtctcagaccaaggagagaacaagcacagcctcttagaaaagcttcaccgatctgacagcagctctagctcttcaagtgaggaggaaggagaagatggagagaaaaggaagaagaagaagaaggaaaagaaagggctgaaagagaagatcgaggagaaaatagagggtgatcatcatcatcacaaggatgaggac

SEQ ID NO: 29034 - DNA, 307 bp, Glycine max
  Clone ID: LIB3108-060-Q1-K1-A6
ccaagccttcacaccaaaaactctaacagacaaaaacccagtaggtgtggtcatcgttcattgatgacttgctcgtgctcatatatgaaatgtgtgtactttatacgtatctatgcattgtctgtatttgaactcaatcagacgatcatgcactagcattcacatcattcgagaggatattcaacatcgtcgtgcatttactacatagtagtcctctaatcatgtctaacaattgatgtcgtgacttaaggtctttatggttacaacatacgataatgtacttactatcaaatagacacgtaattta

SEQ ID NO: 29035 - DNA, 391 bp, Glycine max
  Clone ID: LIB3108-060-Q1-K1-A7
ccattccgtcacgccaagaaccctaacagatcaaaacccataagctggggtctttggtgtttgaggacttgcttgtgtgcatttatgggatttgtgtactttatccccttttatggtttgactttatttgagctgaaacaaaggagaatgcaatggacttggatcatttgtgaggatatttaacatagtgtacattcactacattgcgttcctgtaattatgttcatcaattgatgtcgtgatagatggtctttatggttttaacatacgttattgctgttactatgaacccgacacgtagttcaagagccacctttggctgcaactgatgtcatccatgcgctaaaaacctctatttggatggcgcaatgctgctgtattagcatgcact

SEQ ID NO: 29036 - DNA, 395 bp, Glycine max
  Clone ID: LIB3108-060-Q1-K1-A8
gtgagtttggaacttgaaagaaactagaatggccactttagacgaacgcgcttctgcgaaaaggtggcttcctctcgaagctaaccctgacgtcatgaaccagttcctttggggtcttggccttccagtggatgaggcagagtgcggtgatgtgtttggcttagatgaagagcttctggaaatggttcccaagccagttctcgccgtgctttttctttatccaattaccgcgaagtctgaagaagaaaggttgcaacaggaaaacgtaaaaaaggattatagcagtaaagtatatttcatgaagcaaaccgtgggtaatgcttgtggtacaatagggctgcttcatgcacttgggaacataacctctgaagtcaagcttgttgagggttcattct

SEQ ID NO: 29037 - DNA, 308 bp, Glycine max
  Clone ID: LIB3108-060-Q1-K1-A9
tcggaggagattgatctgtctctgcctagccattgatttggaatcggccaagctgtatagatgagggtgctttagagtgatgcacttatagaaggcatcttatgaaacattgctgattacaagtgatagaacagtaaacacgtggagtccattgcactccagtatggccatgatatctattgatcaacactaggacaagcgatttagagtcacagctaagttgtcatacacgactttcactatgattgaaatcgagatgctttgtgaaacttaacacgtataatatgctgagaacatctgattgtatt

SEQ ID NO: 29038 - DNA, 159 bp, Glycine max
  Clone ID: LIB3108-060-Q1-K1-B1
ggcgcgcgtccgatgacaacttgtatttttccgttctacgattcagtaggatcgcatgatcttgagataacagagctagttgtacctaatcgtacttgacaaaggagatcaaaccttgttatcaagatgaaccacacttattcaattagtgcataatac

SEQ ID NO: 29039 - DNA, 401 bp, Glycine max
  Clone ID: LIB3108-060-Q1-K1-B10
cccacgcgtccgatcacaagaacaagcagcattagcaaccaagcaagagaatggcgacgacagcagccttgtgcggcactatgatgagcagctccttcctgaggagaaaagcagtggtcacaagcctgaaggcattccccaatgctaacgcagtgtttggtgtaaagggtggacgtggaggtggtgtgactgccatggctagcttcaaggtgaagctgataaccccagagggagagaaagaatttgaatgcccagatgatgtatacattcttgaccaggcagaggaggaagggcttgagcttccctactcatgcagggctggttcttgctctgtgtgtgctggcaaagttgtatctggcaaagttgacaattcagatgccaccttccttgaggatgaacaa

SEQ ID NO: 29040 - DNA, 400 bp, Glycine max
  Clone ID: LIB3108-060-Q1-K1-B11
cccacgcgtccgcccacgcgtccggccaatgcaatggaaccaacaattgtgctaactcaagaagacgaaagaggcctattgcaaagaaacgactataactgaaatccccctttcctgcaactctttctgcgatatcccttaatataccctcaacttctccttcttgagttagcaaatgcaatggaaccaacaattttggaaaagctctgtgcggttttgaatgtcgacaaacgaagtgtggatcgggacttggatgtctatcgtaacttgcttactaagttggtccaagctaaagagcttctaaaggaatatgctgacagggagaagaagaaaagagaacaaagggctgaaccacaaacgtctaatgaggccattacacaacaacagcacttttctagcc

SEQ ID NO: 29041 - DNA, 403 bp, Glycine max
  Clone ID: LIB3108-060-Q1-K1-B12
cccacgcgtccggaatgggtcaagcacgaaggctcagtcgccaccattggtatcactgaccatgcccaggaccatcttggagaggttgtgtatgtggagctgccagaaccaggtggcacagtttccaagaagtctggcttcggagccgttgaaagtgttaaagcaacaagtgatataaactctgcaatctcgggggagatcgttgaggttaacaaaaagctcacagaaacgcctggcctggtcaactcaagcccatacgaacatggatggatgatcaaagtgaagccaagcgatccatctgaattagattccttgatgggtccaaaggagtacacaaaattttgtgaggaagaacatgcaagtcattaaagtttgaattgaattggctcctgcagttatgtgt

SEQ ID NO: 29042 - DNA, 400 bp, Glycine max
  Clone ID: LIB3108-060-Q1-K1-B2
gagaaagaagcaagtggaagaagaaatgggtttgatgggttcatttttcaagaggttggcgaagcgtgtgattaagcaccaggaggttcttcagaacaaattgctggaagctattgagagaatggagaaagagagagcggaatgggaagaaggttggagggttcgagaaagggaaattcacgacagagaagcgattgtgaaagcgcgtgagcgagatcttgcttctaagagagactcttccattgtttccaacttagagaagataacaggtcaaaaaagcttcgttcttgtttcttctgggaagagtagtcacgagcaattatctacaatacatgaatattgacatcaacgatatgaaaggtatgcatttattttattctctgagcgattcagtaacgtt

SEQ ID NO: 29043 - DNA, 166 bp, Glycine max
  Clone ID: LIB3108-060-Q1-K1-B4
cccaccgtccgcggacgcgtgggcggacgcgtgggttcacttgtattggttggcttttggaacacaccatgttcttctaccttaggctatttattgtgatagtgccattggctaaaataatcatgataataagtgtatcaatgtaagccaaagttttggctcgttc

SEQ ID NO: 29044 - DNA, 398 bp, Glycine max
  Clone ID: LIB3108-060-Q1-K1-B5
atataatgtcacaagatggaatcgtgcaccatagctcctgttgaactcggttgattacactgcactaatagatgtatgggctcgtaagttgtatttctcatggaactgatggatcgcaagcctttgtttgactggcaaagatcattgtcatcagttgcgactacttatggagctgataggcacatcattaaaggctgatttgcggtagctgaatgaaaatgctaacagatacattaggcaactacctatttaccgctgtcaatctatccaggaaaagtgcacacatgtacatcctgaagctatatatcttgttcgatagatggtaacttttgatcctcagcagaggattactgttgaagatgcactggcccatctgtactcgacatctctgcatgaca

SEQ ID NO: 29045 - DNA, 398 bp, Glycine max
  Clone ID: LIB3108-060-Q1-K1-B6
ccaagtcatccaatcgcaaactctgacacacttaaacccaaaaccagcgggtaccgttcatggcacactggcatgagcatctctaacaaccgtgactatccgcacgctatcttatcctacacccgtatatgattacactacgcagctctcacgaacaacatctccttcattcaatagctcaatcactatcaccgtgccatcactacacaccagccgactgacctcgtctaacacgtgagaggcgccacataaagatcaccaagctcagtgtataaatcgatggactcacgctcgaagagaccaataacctcgacgacttgattgagtacaagctacgcgtctccgtagcgtgcatagcccctgtggcagtctgcatagatgccgtaagtacttaagct

SEQ ID NO: 29046 - DNA, 397 bp, Glycine max
  Clone ID: LIB3108-060-Q1-K1-B7
gcaagtgatcgaagcgaaaagagagaaattcatcgtcgcagtaatcatgggtaaggttcatggatcacttgcacgtgctggtaaggttagagggcaaaccccgaaggtggccaagcaggataagaagaagaagccacgtggccgcgcccacaagaggatgcagtacaatcgccgattcgtcaccgccgtggtgggattcggcaagaagaggggacccaactcgtctgagaagtgaggccgaggcttgaggaatatgttgctactctatttgatttatctttgttgttttttatttatttttaatttgtatgttttgattgtgttctgtgaacggtttttgttagctttatatcaaacttgaaattttgcatacaatatctaactatctaagttcatt

SEQ ID NO: 29047 - DNA, 259 bp, Glycine max
  Clone ID: LIB3108-060-Q1-K1-B9
cccacgcgtccgtcgacgcgttcgggggcaccggataacatcaccaaggtcggctaccaaatcgcgggactcacgctcgcggaggccaagaacctcgtcgacttcgtccaggacaagcttggcgtctccggggtagcgatcgtccacgtggacgtagccgcgtgcgtcgatggcgccatggcggacactagggccacacttgcagactattacagcgtgcgacatcgagatcgcggatgcgccttgctcagcgagtata

SEQ ID NO: 29048 - DNA, 401 bp, Glycine max
  Clone ID: LIB3108-060-Q1-K1-C1
cccacgcgtccgatggcaacttgtttcgctccgttctccgtttcaggtggatctgatgagctgtggttaacaaagcgagttggacctaagctcactgttcaaaggagatcaaaccttgtgatcaagaggaaccacacttcttcaattagtgcagaataccgtgataatagaggaggtggaggtggggattttgttgctggctttcttctgggtggtgcagtttttggaactctagcttatatctttgctccccagatcagaagatctctgctaaacgaagatgagtatgggtttcgcaaggccaaaagaccaatatattacgatgaagggttagagaggaccaggcagaccttgaatgagaagataggccaactaaactctgccattgataatgtatcttc

SEQ ID NO: 29049 - DNA, 407 bp, Glycine max
  Clone ID: LIB3108-060-Q1-K1-C11
agcaatttcccttatctctctccatcttaactccaagcacaaggatcagcttcccattacgtttctgaccaatggcttccctcactgtcccaaaccattgtattcccactttgcttcgcactcactctctcaactacccatcttcccaaaacctcccacttacttccgcgccatcaaattctcaattttttggcctcaagctatctcattcttccttttccacaattccctcttcttcttcttcactcaaaggctccattttcgccaaggtgactaaaggttcaaagccaccgaattttacgctaaaagatcataactggaagaatgttagcctcttcaacttcaaaggaaaaccagtagttgcgtatttctaccctgctgatgagacccctggctgtaccaaacag

SEQ ID NO: 29050 - DNA, 404 bp, Glycine max
  Clone ID: LIB3108-060-Q1-K1-C12
gaaggaaatggcttcctcaatgatctcctccccagctgttaccaccgtgaaccgtgccggtgccggcatggttgctccattcaccggcctcaaatccatggctggcttccccacgaggaagaccaacaatgacattacctccattgctagcaacggtggaagagtacaatgcatgcaggtgtggccaccaattggcaagaagaagttcgagactctttcctacttgccagacctcgatgatgcccaattggcaaaggaagtcgaataccttctaaggaaaggatggattccttgcttggaattcgagttggagcacggtttcgtgtaccgtgagcacaacaggtcacctggatactatgatggacgctactggaccatgtggaagctgcctatgtttggctgca

SEQ ID NO: 29051 - DNA, 223 bp, Glycine max
  Clone ID: LIB3108-060-Q1-K1-C2
cccacgcgtccgatcacgcgttcgctcttacacacccaagcactactacgactagtttatctctagatatgggatctggtgctgagcaactgtactggatattggagatcatgcctagctaatgctaagaccaagacttaggtactgaacccatactaccacgcactacaacgacattaccacgacgatctagatcatgacttgcaccaggacgtaccatacc

SEQ ID NO: 29052 - DNA, 405 bp, Glycine max
  Clone ID: LIB3108-060-Q1-K1-C3
gaaaaaataaaaatcaaagagcataatgtcagggatcattcacaagattggggagacccttcatgtgggagggcacaagaaggaggaggagcataagggtgagcaccatgctggagaatacaaaggggagcaccatggtgaacacagtagtgagtacaaaggagagcatcatggtgaacacaaagctggagagtaccatggtgagcacaagccagagcacaaagaggggttcctagacaaagtcaaggacaagatccatggtgagggcggcgccgacgagggcgagaagaagaagaaggagaagaagaagaaggagcatggccatgagcatggccatgacagcagcagcagcagtgacagtgattaaactgctgcatcacctatatatttaaaaggtttatggga

SEQ ID NO: 29053 - DNA, 402 bp, Glycine max
  Clone ID: LIB3108-060-Q1-K1-C4
cccacgcgtccgcggacgcgtttctttctttcgatcagggtttcccctcgtctccgggctcgtttcgttctcgaataatcgatctacgataatgactcgcggtagccagagggatcgtgatcgcgaaagggctcaggctagaactggtgctaaaggcaagcagaaagatgatggattgacccctgaacagcgcagggaaagagatgcaaaggcgctgcaggagaaggccgcaaagaaagcggcacagggtgcaggagggaataatgcagctggaagcaaaaaataggcaataattcaatgagtagtttgagtttgccgtttgttgattgtggacatggaatttgtggaaattttatgttgcattattcatggagtatgatgtgtttattaatgtaacttgcg

SEQ ID NO: 29054 - DNA, 396 bp, Glycine max
  Clone ID: LIB3108-060-Q1-K1-C5
atttaatgcctaaagacccattcttcttccataactcctctgcactgccgtcattctcaactttctcacacggttacaaggactaaagagtcgtgccaccatgtccgacgatgaaagggaggagaaagagttgcatctgtcttgtgccgaagttgtcactacatacacaactgctgctgacatcgttaacaaggccttgaacctaggcatatcacaatgtagaccaaatgctaagattgcggctatttgtgagaaaggagattcatacattagagagcacactggaaatgtgtacaagaatgtgaagaggacgattgagagaggcgttgctttcccaacatgtttatcaatcaacaacatggactgccatttctgtacactagccagtgatgaggc

SEQ ID NO: 29055 - DNA, 307 bp, Glycine max
  Clone ID: LIB3108-060-Q1-K1-C6
accacgcgtccgataaattgaagattgagagaagatactatacagaagagggatgggcgtgtcgaaggaacaggttgaattattcttgaaggccacactgatcccttatgaccttgaagtggttgatgtatctggtgggtgcggtgcaagagttgtggccgagttcgtatccgatcaggttgacggtaacagggtatttgagaggcatataatggatggtgctgccttacaggaggttgtgatacttgttcatgctgtctttattacgatagctgtgtacactggttatgtttaaacagacatgctt

SEQ ID NO: 29056 - DNA, 271 bp, Glycine max
  Clone ID: LIB3108-060-Q1-K1-C8
gacaaatatatgaatagtattgccactgctctagggacaaaggttaatgggcaactaatggttatgacacccgatgaacacctgtctatttctgaagatgatgaatgatgatcatcatgggttgcatactatgatcaaagagagggatctaagctatatgaacatcatgaagacagtgcatgacaatggcaattcctgcatatgtgaactactgcttacttaccgattaaccactcttacgtaagttggtcataatggtatcagtatatac

SEQ ID NO: 29057 - DNA, 389 bp, Glycine max
  Clone ID: LIB3108-060-Q1-K1-C9
accactcgttcgttcacactgtcattgatacgatcactcataggtgcgggtatccaatactgcaactgttgcaacgctctaggctctttgctatactaacgagcaggagctatactcactatgacagtggccttcaagcgccaagcaatcgcaccccttataggtgttgacactacagatgctatgtctgatattaagactgcaattattgctttcaataagactcatgaagtatggaactctaaagctcgcatgacacaaatcattggagctgaaactcctaggggataatctgcaatggcataataaactggcatcattaatgatgcaggcataggccttaatattcggctatgaacattacaaacggatatgcttgtaaatggtga

SEQ ID NO: 29058 - DNA, 300 bp, Glycine max
  Clone ID: LIB3108-060-Q1-K1-D10
cattgctactatctcatctactttatagctattatctatcatacgttctcgctttctatcatttaattgggtttaccattaaccttttctgctttaaaacccttctacttatccacctatccattgagacaatttttttgtttactcttttacacctcttattcctgtaaaaattctaaaattttcatatcatttttatcctaccatacttcatatgcttcttatttgttcacccttctattactttacttaaataactcttattctatcattatatactgcatagtctatcttcttctc

SEQ ID NO: 29059 - DNA, 408 bp, Glycine max
  Clone ID: LIB3108-060-Q1-K1-D11
ctgatgccagggtttgtccactatgaggggcatggctgctaaaccggcgagtacggatcggtgcgttggcctgaacaagggctacggctttacctataaggactatgttgctctcccattatatcgtagggggataaccagcaagagggtgcactttgtgagggaccttgttagagaggtagccattattgcaccctatcaatagtgtataactgaggtgctgaaggttgggaaggataagagggcactcaatgttgcagagagaaagctacgtacacacacacgcgcagagatgaatcgtgtgtaaatgtacagtagttctaatgaagatgacggctggtgacgctggagacactaagaaataagtcttatttactgacttacagattcactaaatggacctgtgta

SEQ ID NO: 29060 - DNA, 327 bp, Glycine max
  Clone ID: LIB3108-060-Q1-K1-D12
ctcagacgtgcgtttctgcattatctagaacccagctgataaaaccgggggccgtgccagggccgtcatcgttgcctaatgcaccggcctcacttccatggatgtctttcttacgtggaactctaacagtgacattacctgcattgctatcaactttgtaagagtgcaatgcatacaggtttggccactaattgtctagaaaaagtgcgtgactcttttctacttggcagacctcgattataccgcatttgcaaaggaagtcgtatacctactaacgaaaggatgcattcctagcttgcaattctagattgagcacgctttcatgta

SEQ ID NO: 29061 - DNA, 217 bp, Glycine max
  Clone ID: LIB3108-060-Q1-K1-D2
atctgatccaaagatagaagattaaatactggaagcagaagaagaactgcagtttcccgataacgagccacttatcgtgagaaaacccaaccggaaggttattgcaggatttggatgggggtgggttgtgcagaacaaggtgcattgcacattcaaggcccaactggtgcactaggccttttggacgtgctttgttaagtgcaagtgtgttccaact

SEQ ID NO: 29062 - DNA, 404 bp, Glycine max
  Clone ID: LIB3108-060-Q1-K1-D3
ctcctctcttgtctgtgcaatcaaaacaacaacattcattcatactgatcacttgcttgcctattgcacattcttcatcacttcattcaacatttctctctcccttagctagtttttaccaatggctgctgcggttagtgctgcagtctcttttccatccaccaagtctacctctctcccaagcaggacctccatcattaccccagagagagttgtattcaagaaggcttcattgcaatacagagatgtttgtagcagtggaagggtagtttccatcagagctcaagtcaccactgaggctccagccaaggttgaaaaagagtccaagaaacaggatgaaggtgtggttgtgaacaagttcaaacccaagaccccttacgttggtagatgcctgctcaacacaa

SEQ ID NO: 29063 - DNA, 394 bp, Glycine max
  Clone ID: LIB3108-060-Q1-K1-D4
gggtttttgagtgcggtgcggcgatcctagcactctcttgcagctttcgccgacagcttcattcaccatggctgagcaaaccgagaaggcttttttgaaacaaccaaaagtgtttctcagctcgaagaaaactgggaagggaaagagacccggaaagggtgggaaccgcttttggaaatccattgggcttggatttaagactcccagggaagccatcgaaggaacctacattgacaagaagtgccccttcactggcaatgtttccatccgtggccgtatcttggctggaacatgtcacagtgctaagatgaacaggactattattgttaggaggaattatctccattttatcaagaagtaccagaggtacgagaaaaggcactccaacattcct

SEQ ID NO: 29064 - DNA, 400 bp, Glycine max
  Clone ID: LIB3108-060-Q1-K1-D7
cccacgcgtccggacgtattctgttgttttaagtaattgacgatgtctggatattttcttgcttcagtaatttccacacgtttctttctgagacttttggattacgtatgttttcaacaatattgatatataatatataaatgttcatactctataaaattatccatattcgcatgtatccagtcttcggaagcatctttaacactaagaacagtgaaacatttcaatgacactctaaaacttcctttcacgcttgttggttaatttccgaaaagaccccacaaaaaggtttttttctgcctcaaaatcttgagatcttaactttgtttgccggttctaggatgtccaaagtagtttgttatcaatcccattaaagaaaacatcatatccatcataactt

SEQ ID NO: 29065 - DNA, 317 bp, Glycine max
  Clone ID: LIB3108-060-Q1-K1-D8
cccacgcgtccggacatatcctgagcagatatgtaactgactatgtctgcgtataaccgtgtttgagtaatagccacaccatggccacactaacgtcacctttgactctgcactctgctcgtctcgactctgcttcgctatcgtcctcttctgcttcttatccaactttttccctcctttgcctttggcggtttccttttgccctttagcttttaattttgaaaggcctaaccatttattctcaaaaaatggaatcgcgttggtaaaggcagtggaagatgagaccaagcttgaactcaccgctatggatgagtctt

SEQ ID NO: 29066 - DNA, 407 bp, Glycine max
  Clone ID: LIB3108-060-Q1-K1-D9
atggctacttcatcaaccacattattgctatcatcactcatacctgcgggcattccatcattcaactctggaaaccattcagtttttttgcttcaaaaccgttctttgaatcgacccaagaagagagtttacttcgttgttcaagcagccaagccccctattggtgtggaaattccaaaggtgcagcctcaatttaagccttcgtttcttgggttcactaagactgcataagtatggaactctagagcttgcatgattggaatcattggagtttatattgtagagcttataataaacaagggcatacttcaagtgattggggttgatgttggctaaagccttaatattcctctctgaacattatttttggctgtgctcgtaaatgttgacatatattaagtcaatgt

SEQ ID NO: 29067 - DNA, 397 bp, Glycine max
  Clone ID: LIB3108-060-Q1-K1-E1
gttgcgtctgaaagctggagtgttttctcgtgcgctgtgctcagctccttatggcgctctgactctcttcaacttcacatcgagttccttccacaactcccactgtgaattccgcttaactatcatccactaacgccaccacggcacaacaacctgcgttcttaagattatccaaacacttcgactcaatagggatgcaccatcgcagtcacagatgctgctcaaatgctggtgccgagagaccccagagacccagttccataggggcttgcactggagatggagcttctggatctgatcgtacattaactgaaagacttgtacatctgaaagatgctaggtggagatcactaaggccacatactatacgtggtacagcactaggtgcatttgcttt

SEQ ID NO: 29068 - DNA, 403 bp, Glycine max
  Clone ID: LIB3108-060-Q1-K1-E10
gttgctgttgctcgccgtcgctgaacactgagcactgattactcactgcttcatggccacttcgctgctatctttctccatttcgcccacaacctcagccttcagatgcaaagcctccgccatggctaccaccatcgcctgccctgctaccaaggtggctcccgtcgtcattgtcggcggcggaagagttggcagggccttgcaagacatggacaccggccaagacctactagttcgccgaggagagtccgtaccactcaatttcgagggccccatttttgtgtgcacgaggaacgatgatcatgaatctgagcttcaatctacaccttcttctagatggggtgattttgtgtatttttcataacagaatgctggagccgttgctttgagagcaaaggtttgg

SEQ ID NO: 29069 - DNA, 398 bp, Glycine max
  Clone ID: LIB3108-060-Q1-K1-E11
gtgcatgatggtcgcagacactgaacgctcagcactgattactgactcgtacatggaccattacctgctcacactctatcatttcgacgaccacctaagccttgagaagcacagccttcgccatggcataccaccaactaacacactgctaccaaggtggctaccgtcatcattgcagcatggctgacgagatcacatgatctggcacgacatgctgcaccgaccaagacctcctcattcgccgaggagagctcgtaccagtcaatatcaaaggcgccattttggtgggcaccatgaacgattatctagagactacgctttaatatacactgatttctagatggagagagttgatgatcatacagaacggaatgctagaaccactgctcgagagcaga

SEQ ID NO: 29070 - DNA, 228 bp, Glycine max
  Clone ID: LIB3108-060-Q1-K1-E12
cccacacgtccgtccacgcgttcgggtggctgtccagttggcagcaaggggagcttttagggaaggaataacaaatgctggaccgaggatgcttgagcctataatgtacgtagacgttgctactcctgacgaacatgtaggcgatgtaatcatggatctcaactcaagaagagtacagatcaacagttttggtgacaaacctgttggtcttaaagtggttgagttcct

SEQ ID NO: 29071 - DNA, 352 bp, Glycine max
  Clone ID: LIB3108-060-Q1-K1-E2
agtgcacctgcggcctttgctgctgcttaaggctggtcgaacaacactgaggggggatcctccggttcaggattatagatcggattagtgacactggtgcgtcttcataatactgtcatgccttgtacctctactgattctagatcgagaacgcactgacccctgcctcatgattctttacgattgtctgtcacattagaagaggaatgcatacgttgctaaaacttaacaactctatttcacctcatttagaggggtcaaatatgcattaacagccaagatgtagagtatctatcagcatatatacatatataggtctacctttatgatgaatatgaacgttctatgtttt

SEQ ID NO: 29072 - DNA, 401 bp, Glycine max
  Clone ID: LIB3108-060-Q1-K1-E3
ctttgacattcaacagttgcagagtgaaacgatgccgtgcctcaacctctccaccaacgttaacctagacggcgtcgacacctcttccattctctccgaagccacctcaactgtcgccagcatcatcggcaaacccgaggcctatgtgatgattgtattgaaaggatcagtgcctatatctcatggtgggagtgagcagccagcagcttacggtgaattggtgtccattggtggtcttagccctgacgtgaacgagaaactcagtgctggcattgcttcaattctcgaaaacaagttgtctgtgccgaagtcccgattctacttgaagttttatgacactaagggttccaattttggatggaatggatctacattctgaattccgagttatcttggtaacg

SEQ ID NO: 29073 - DNA, 399 bp, Glycine max
  Clone ID: LIB3108-060-Q1-K1-E5
cccacgcgtccgattaacctttctcattccccatctgctcaccttattcagccactgctaatttctagggttccgaaatggacgctggcggaaagatcaagaagggcgccggaagaagaaagggcggcggccctaagaagaagccggtttcaaggtccgtcaaggccggtctacaattacccgtcggaagaattggccgttatttgaagaaaggaaggtacgcccagcgtgtctgtaccggtgctcccgtttacttggacgcagttctcgagtaactagctgctgaggtgcttgagttggctgggaatgctgcacgtgacaacaagaagaacaggattattccgagacatgtgctattggctgtgaggaacgatgatgagttggggaaattgcttgctg

SEQ ID NO: 29074 - DNA, 195 bp, Glycine max
  Clone ID: LIB3108-060-Q1-K1-E6
gacagacgtacacagaatcgttctcatacaacacgtgcacagctgagccgcacactgataactactagggttgcgaaatggacgctggctgtaagatcaagaacggaggccagagaagaaagggctagcctcgctaagaagaagccgttctcaaggtccgtgaacgacggtctacaactacagctcggaagaatt

SEQ ID NO: 29075 - DNA, 396 bp, Glycine max
  Clone ID: LIB3108-060-Q1-K1-E7
cccacgcgtccgcggacgcgtggtcgaggaaggaaaacccaaatcgaagatggcagtgatggagaggttgaagatgttcgtcgttcaagagccagttgttgccgcttcctgtctcatcgctggcttcggtctttttcttccagcttttgtgaggcccatgttggattcatatcaggcaaccaagcaacctccccagcctgctttaagtgacgtggttgcaggaatgactggtaaaaagtaaaggtgatttacttgacagatgcaagggcaaatttgctaagtttcttgtttgaacttattttaagtctcaaatgtgagagaaataagagtactgaatattggatttaacttccctgtctgacgatctctatctgttccggaatcattcagtggttt

SEQ ID NO: 29076 - DNA, 407 bp, Glycine max
  Clone ID: LIB3108-060-Q1-K1-E8
cccacgcgtccgaagaatattgttgtgcctctactctcgaagaagatctgtaagaatagggtgaagaagttcaagaggcctcatagtgacaggaaaatttctgtcaagacagtactatcgctgactataagtgtattgattccagttttagtagaaagcacatgggattcactttgatcccctatattgcttttcttacactattttaaacgactttctttcatgattgtcgtgttaatagttttggtgatttacttgtcatattctttgtcatatttactatgcttattgtttgtacttatgtttatgtttctatactgttttttatattttttactgattattttatttatctttccttttcttactattttttttttttttttgatatatttcatttttttttt

SEQ ID NO: 29077 - DNA, 388 bp, Glycine max
  Clone ID: LIB3108-060-Q1-K1-E9
ttaactcgcacaagcaaccatttacagatataaaatcctaagggtatagggaacatattattaagctggtaactattttgaacaccatgtgaaggagttaaaagaccagtgttattaatgttgatggagaaacgtttaagctgaatacttcagtcatagcatacgacttacttttattattattctgtgtttctatttgttttatttttatgtgtttatacattttttgcttatttccttatctttttattctttattgtttttttatgttgaaattgatttactttacacttttgttaccaatattttttgttttatatgtatttatctttgtttctttatttttttttttattatttttatatttttttttttttctttttttttt

SEQ ID NO: 29078 - DNA, 386 bp, Glycine max
  Clone ID: LIB3108-060-Q1-K1-F1
gagccatagtcgaacttttaatcccattactgcaatttttagatgacgaaggcgcgcaaggggaactctgggaattgtcacggatttttttggatacactcattgaaaaaacaaaatcccagagagttaaagccatatttccagatgctggtgctgcatcccttctgaaatatcgatggaaagatgctctatttagatttgcaagcttaagtgaccggaagcctgtaaaaagtgacgatgagatcgtggttatgattgttcctgattatcagatgttagagtatgtatagagaattgcatccaatctcacaaatgttcctgaacctacgcttctgattatgtggaatccacacctgattagtgaggatgttggagttgggtttaat

SEQ ID NO: 29079 - DNA, 361 bp, Glycine max
  Clone ID: LIB3108-060-Q1-K1-F11
gccactcgttcgcgttcacgctatcactgggttactgctgacgcaggcggcgaatgtgtactcacatgacacagtacaacgatccgcaagccgtcaacaccttctaagatcaagacagtgatattgaacatcgagtcttatgatgactgctactatggtattatacgtcatagcacacagtgatgtgagagctcatatactttcacaagctgagcacataagcactttgatagggcatgacgcttatcaagttctagcagtatgatccatacattacaatggacgacaagctgaaaacagccttgctgtactagatcgttgaaactgacgtataaccagcttcaaagcgactatatctatg

SEQ ID NO: 29080 - DNA, 322 bp, Glycine max
  Clone ID: LIB3108-060-Q1-K1-F12
ggaagacggcgatacgacggaggaggcggttgtcgttccgggctcaggcggcgacgagcaatcgttttctcattcttcctcacggcaacgcgattcggaggaggaatctccgcacgaaacgttgcgtaacacaaaagcttcaatagagaacatcgtagccgagattctctctctgaagaaccaggcaaaacccaaaccactcctcactcttcgactccgagagctgctcactcaaacgatccttcacttcgtcactcttcgtcaggcaaatcgctcgatctttctggaggaggagcgcgcatgaacggaaactgatcgtgcg

SEQ ID NO: 29081 - DNA, 403 bp, Glycine max
  Clone ID: LIB3108-060-Q1-K1-F2
agtgtacctgttgtatttgcttctcctgaaggttggtcgaataacaaagatgttgtattttccggtacatcattatggattggattagtgtttctcgtgggtattcttaattctctcatttcttgaagctctatttattctagatcaaaaacgaaatgacccctcccccagaattctttcggattgtcgggcacattaaaaaaggaatggataagttcctaaaaataaagaaaactataacacattataaggaggggtcaaatattaattaagataaaagatatagaatatctatctgtatatatatatatatagatataatttattaataattagaactttcttttttcttaaaaaaaaaaaaaagtaaataaaaagatttgatagaatcgtaatttcaatt

SEQ ID NO: 29082 - DNA, 256 bp, Glycine max
  Clone ID: LIB3108-060-Q1-K1-F3
gtggttacaagtgtgcttgccatttccaccaacatatataatgcttttagtagcaagtcataaatacaagctggttctctcatttctccccttctattgttttttttatatgtatagaaaattttatttggggagagagggtatggctggggagattctagaggcatttggttgctgtggcgattgtgttacttttgtattttggatcccttgttgtttattgtagaattcatgtcttgtggcagcatttctatgt

SEQ ID NO: 29083 - DNA, 403 bp, Glycine max
  Clone ID: LIB3108-060-Q1-K1-F4
cccacgcgtccggatcgagataactagaaacagtgtgatgaaaatgaaggtccttgttttcttcgttgctacaattttggtagcatggcaatgccatgcgtacgatatgttccctctccgaatgaacactggctatggtgcccgtactccggaggtgaaatgcgcaagttggaggcttgctgtggaagcacacaacatctttggctttgagaccattcctgaagagtgcgttgaagcaacaaaggaatacatccatggcgaacaatatagatcagactccaaaacagttaaccaacaagcttacttttatgccagagacctcgaagtccatcccaaggacacatttgtgttcagtatagatggcaccgtactctctaatattccatactacaaaaaacatgga

SEQ ID NO: 29084 - DNA, 396 bp, Glycine max
  Clone ID: LIB3108-060-Q1-K1-F5
gaaagaagtagacggctttgtagttttctaacacttgcaaggtccagcagctgtttgacaacaattgccactgtcccctcctctcctcctctcctccgtgtttcttaggtcaaatccaaccaagctcccttgtctccacctctctttcctcgttccctccgaccgatttttaattacgattgcttcctactcctgttcctgcattttcaacttccatcactctctcacaggtctcagattcttcattcttcacacaacacagatttctctttgatgggttccatctcgcacgtgatcaccacaactcttcctcacctaccgtctacacgctccctcggattcccaatctcccactccaattcgcgtcttctctcactgccacccaccagagtcgcc

SEQ ID NO: 29085 - DNA, 347 bp, Glycine max
  Clone ID: LIB3108-060-Q1-K1-F7
ggctttctttattctctccttcctcttccttcttcttgtttcatgtgccgctgcttgtgatcgctgcttgtatcaatccaaggcttcctatttctccaaagcttctgctctttcatctggggcatgtgggtatggctctttggcactagacataagtggtggacaccttgcagctggtgtggattctctcttcaaaaatggagcaggttgtggtgcctgctttcagataagatgcaagaacccaactctatgtagcaaagaaggtaccaaagtggtattgactgatcttaatcacaacaatcaaactgattcagtgctaagcagcacagcctttgcggtcatggctc

SEQ ID NO: 29086 - DNA, 399 bp, Glycine max
  Clone ID: LIB3108-060-Q1-K1-F8
atactatttgataccttttgactagctggctaaaattctgaaagatgtgaatagtgttgtaaattttgaaggaaattagagcgattcggtaaattttcgtcttctgagtatagaagagaggcgttcccacgccgtcttacgtcgctttcgccgattccgagcctttgatcgaattcagcagtgaagatgtaagtgtagctgggactgatatcttgaagctacctttgatggataaaagccatggctgcagcttctctagtatattttcaattgctggcttttcaagtgccatttttggtggcttcttgattttggttcgtctcctttatgtcttatatcgtagcagcaggcccttgagcaaaagggcttcaaaacctgttagtacccttattattttag

SEQ ID NO: 29087 - DNA, 403 bp, Glycine max
  Clone ID: LIB3108-060-Q1-K1-F9
cccacgcgtccgcagccatgtcgatcttttctattccctcacgaacgtgccgttgttcaatttcaatttcaatttctcggcagccattgccatgttctttcacggctcaagtgagaagaacagggaaagggaaagtggtaatgagcatggaggcaggcattggagtgatgggcaccaagttgggtatgatgagctatttcgaatccgacggataggttgttcctgtcactgtcgtgggtttcaaagaaggcaacatcgtcacccagatcaaaactgaggccaccgatggatacgacgccgtccaggttggttaccgaagggtcagagatcgcaaattgaccaaacccgaaatccgtcatctccagaaggtcggcgccattcccatgcgccatcttcaggagtt

SEQ ID NO: 29088 - DNA, 402 bp, Glycine max
  Clone ID: LIB3108-060-Q1-K1-G1
cccacgcgtccgcaagatccaggacaaggaaggaattcccccggatcaggaacgtctcatcttcgccggaaagcagctcgaggacggccgtaccctcgccgactacaacatccagaaggagtcaacccttcaccttgtccttcgtctccgtggtggcatgcagatcttcgtcaagactctcactggcaaaaccataaccctagaggtcgaaagctctgacaccattgacaacgtcaaggccaagatccaggacaaggagggaatccccccagaccagcaacgtctcatcttcgccggaaagcaacttgaggacgggcgcaccctcgccgactacaacatccagaaggaatcaacccttcacctcgtcctccgtctccgtggtggcatgcagatcttcgttaa

SEQ ID NO: 29089 - DNA, 393 bp, Glycine max
  Clone ID: LIB3108-060-Q1-K1-G10
ggcccttcttctggtgctggctctagttctggtgctggtaattctggagcccgttatgctgcacccagaaatgattatcgtcctgggtatggtggtggtggtggacgtacaggtggatggggaaacaaaagtggtggatgggatcgtggcagggagcgggaagtcaatccctttgaagaagaggataacgctgaagaggcattcagtgagcaggagaatacaggaataaattttgatgcatatgaagacattccagtggagaccagtggtgacaatgtgcccccacctgtgaatacgtttgcagagattgatttgggtgaagcacttaatcagaatataagaaggtgcaaatatgtgaagccaacacctgtttagcggcatgccataccgata

SEQ ID NO: 29090 - DNA, 402 bp, Glycine max
  Clone ID: LIB3108-060-Q1-K1-G11
agcaaaacaaaagccataggttactactcttcgccttttcctttgcaagtgttaccaaacaattcttgcttagcccttacaagcaagcattaacaacaatgaagaaagtagtgttaaaggtgggcttacatgatgatagaatcaagcgaaaagttatgagaacagcatctggtctttcaggggttgaatcagtttctattgacatgaaagacgagaaaatgaccttattagggaacattgatccagtgaatgcagtgtgcaagctactaaagtgttgtcaaactgaaatagttacagttggtccagcataagaggataaggagaaagagaaggtggagccagtaaaagaacctgttcctatcaaactctatgatgcctatccgtattattatcaaatgacac

SEQ ID NO: 29091 - DNA, 384 bp, Glycine max
  Clone ID: LIB3108-060-Q1-K1-G12
acctgtacgtggaatctaaatggccactcttagcctcggcatggccaggacatgtctgagtgctgccgctgattatcgcagacgaagcaactggaaatggaacatacgcataattgagtgtgtcgcatgagacccggaaggcatgcttggtccactccaaactagcaacctagccagcatcgagtttaagagtcgcattgagagagacgcacatgcacatgaagccttacaacgtcatagatctagaagagaaagaacgccatcaatccattgcacaatcatagtcatttacctatacgttgcaagacctcattggatacttccttggcactgaaacttacgagattgagactgagattgctagaatgataccaagattgaatg

SEQ ID NO: 29092 - DNA, 405 bp, Glycine max
  unsure at all n locations
  Clone ID: LIB3108-060-Q1-K1-G2
cagtgactgacttttcgagaaagacaaacanagatgagtttccgtcattggatgatgaacgctcttcccattctcctcttcttcctcttcggttctgcattagtttctgcgaagaaaactggtgatgtgaccgagctgcaaattggcgtgaagcataaaccagtatcatgtgaaggtcaagcacaccaaggtgacagagtcaaagtgcactatctgggaaaactcactgatggaaccggtttgagatctagctctgagagagatatattccaatgagaatgagctctggactcggcacatgagctcaagggttgacaccagggattattgggaatgtgtcttggtgagaagcggaagctgaaaataccatcaaaacttggctatggagagcagggttccccaccc

SEQ ID NO: 29093 - DNA, 394 bp, Glycine max
  Clone ID: LIB3108-060-Q1-K1-G3
ctcattcttcatccatagacatggccaccgtcacttctgcagccgttggggttccctcattcactggcctcagggcaagcgcaggcaaagtgagtgccgcagttaaagtctcagctccccaagccacatggttgggcatcaaggcttcgctgaaagacgtcagagtcgctgttgcggccactgccgcgagtgcagtgctgtctagcaacgccatggccattgaagtgtcgctgtgtggtgatgactgctctctgtctatcgtacccaacaatttcttcgtggcctcttgtgagaagatcgtgttcaagaacaacgcaggtttcttccacaacgttgtgttcgacgaggacgagattcctagctgcattgatgcatggaaaatctccatgagcga

SEQ ID NO: 29094 - DNA, 404 bp, Glycine max
  Clone ID: LIB3108-060-Q1-K1-G4
aagtgtagttaatagacgtgccaagttcctctgcgttctctttgcctcgacactctgcattcaagttccataatggcagcaaccatagcaacaacaatggctatgatcaactcaaagtgcatcaacacaacagggtcatcacacaagttgcacaaccccaagctcccaccctcaaaacccaccctctcccttttctcccttcagaacctcccaaagggcctaacctcccacgtctcaacttccacagcaggcactgccatcgcaggcgcaatattctcctcactcgcaaactgcgacgcagccttagctgcatcgcaaattgctgaattagccgaaggtgataaccgcgggctggcattgatgatgcccgtgattccagccatagcgtgggtgcttgtcaacat

SEQ ID NO: 29095 - DNA, 398 bp, Glycine max
  Clone ID: LIB3108-060-Q1-K1-G5
ggaaattcctcatattattcagaattcactgcccgaggctaattcgatggcaaatcagatgacaaaggccaattgccagagcaatattcaattctctcagcagcccaagcttcagcagcagcaacaacctggcatggtttctgaaatgcctggccacatggcacttctccctactgctacaactaaccaactttctgctggtggcagtagtatagtgactggagcaggtggtgcagggcagtctgtaattacagatgatgttccatctcgctccacctcaccttctacaaataactgtaccaatgcacttccacaattgataaattcacgattcccgagaagcacaatggtaggggatgacatggcgcactctgctgccacaatcttgagttcaagtg

SEQ ID NO: 29096 - DNA, 127 bp, Glycine max
  Clone ID: LIB3108-060-Q1-K1-G6
gctatgactttatttgggccaatgggtataattttccgataaccggctggaatcttaactaatattcaggcaatgtccactaggtggttaatgctggatgtaagataaaatgaattttcggaacctt

SEQ ID NO: 29097 - DNA, 266 bp, Glycine max
  Clone ID: LIB3108-060-Q1-K1-G7
caacatggcacatgggatacatacgcttaatcccaattccaattgccagtgaaccccaagttcctaaatccacaagtgcactaggtgttggatgtattaagctgaatcatatagctcattctaagctggctttgaaaaaagattcaatgcttatgcaaaatggtacgtctctctactactacagcttaacaattttctgcctgcgtgcttaacatagttggtatgtcttagtggtgccagacactatataattgccgatgatttta

SEQ ID NO: 29098 - DNA, 403 bp, Glycine max
  Clone ID: LIB3108-060-Q1-K1-G8
cccacgcgtccgccttcacccaatcactgggttagtacggacacaaacgaagaagccatactcacatcacacaacacaaccatcctcaagccaacaacaccttctcagatcttacaatgatatttcaatcgtgttttatgatgactgcaactctgctattatttgttatagcacaatgtgttgtgggagttaattcactttcacaagctgataagataagcactttgccagggcagccaccagtcaaattccagcaatatgctggttacattacagtggacgacaagcagaagagagccttgttttactactttgttgaagctgaagtggaaccagcttcaaagccactagttctatggttaaatggagggcctggttgttcttctgttggagctggagcttt

SEQ ID NO: 29099 - DNA, 399 bp, Glycine max
  unsure at all n locations
  Clone ID: LIB3108-060-Q1-K1-H1
gtttgcagtcactgctctgtttcaccgagtttgggcgtttagatcagaaccaaatcgtgttctcttccattggcaaacatggcaactcaaatgagcaagaagagaaagtttgttgcggacggagtgttctttgccgaactgaacgaggttctgacacgtgaattggcggaggacggttactccggcgtcgaagttagggttacgccgatgcgcaccgagatcatcatcagagccaccagaacccaagccgttctaggtgagaagggaaggagaattagggaacttacctcagtggtgcagaagaggttcaaattccccgaaaacagcgtcgagctttatgctgagaaggtcaacaacagaggcctgtgtgccattgctcangccgagtcgcttcgctac

SEQ ID NO: 29100 - DNA, 180 bp, Glycine max
  Clone ID: LIB3108-060-Q1-K1-H10
accacctactgcatcaaaaaattcttaaggatggccacagcagaagaggtttcaactttgaaactgttgcgccaatatctcttgggggatatttcagacccttttctcaccaatctcattccagtaaaactcgaagaccgctcatcagaacttgatatgggttcaaacttctcagaacat

SEQ ID NO: 29101 - DNA, 402 bp, Glycine max
  Clone ID: LIB3108-060-Q1-K1-H11
ctaattctgcgtggtgagtgaaaatggcggtacccttgctctgcaagaggatcgtgaagaagcgcgtcaagaagtttatacgcccccagagtgatcgcaagatctccgtcaagccaagctggcgcagacccaagggtattgattctcgtgtcaggagaaagttcaaaggatgcactttgatgcccaacattggttatggctcagacaagaaaacccgccattatctaccaaatggtttcaagaaatttgtcgtgcacaatgtgaaagacctggaacttctcatgatgcataacaggacatactgtgctgagattgctcacaatgtatccacatggaagaggaaagacatagttgagagagctgctcagcttgatgatgtcttgacgaacatgacggccagac

SEQ ID NO: 29102 - DNA, 369 bp, Glycine max
  Clone ID: LIB3108-060-Q1-K1-H12
gtttggaaggaagtggctactttgacgtgcgggacaaggatgatcgctggattcgcattttgatcaaggctggtgatcttatcattttaccagcaggaatttatcatcgcttcaccctagacccaagtaactatgtgaagttaatgaggctgtttaagggcgagccagtgtggacagcatataatagaccacaggaagacaatcctgctagaaaggaatacattaagggcctaactgagaaatttggagtgccacttgcagctcattagggccctgaaatacactagtatatcttgtttcagatattaatcacagcttaaggtctgtgatgtaattgttggtataatatttgtgtagttttaccatgag

SEQ ID NO: 29103 - DNA, 113 bp, Glycine max
  Clone ID: LIB3108-060-Q1-K1-H2
gcgagcggacactgttctgtttcacctagactgagactacatatcaacggcgggttgctttatcttacattgtcacacatggtatctcctatgagcacgacgacttcgatgga

SEQ ID NO: 29104 - DNA, 396 bp, Glycine max
  Clone ID: LIB3108-060-Q1-K1-H3
cttctgccaatgctgggatcattgatgattaccttgagaggagcaaggctaacgaggaattgaatgacaagaagaggttagctactactggagcaaactttgcaagagcatacaccgtggaattcggtagttgcaagttccctgagaacttcactggttgccaagatcttgccaaacaaaagaaagtgccattccttagtgacgatttggagcttgaatgcgaaggaaaggacaaatacaagtgcggttctaatgttttctggaaatggtgaaaggaggcaaccttttatgaccaactgcgaattattcgctttgcgatgtacctaactgcttgaatatataccatatttttctgcattgctttcagttattatattgttggtgttggattttagt

SEQ ID NO: 29105 - DNA, 402 bp, Glycine max
  Clone ID: LIB3108-060-Q1-K1-H4
agcaattcgaattcccaatccaaaaccctaataccttcaaagaacctaggagtgaatcagtgatggcacctaaggcagagaagaagccagcggagaagaagccggtggaggagaagaagtcgacggtgggagacaaggctccggcggagaagaagccgaaggccggaaagaagcttccgaaggagggaggagccggcggagaaggggggaagaagaaaaagaggaacaagaagagcgtggagacatacaagatatacatattcaaggttctgaagcaggtacactctgacattggtatctcaagcaaggccatgggaatcatgaacagcttcatcaacgacatcttcgagaagcttgctcaggaatcttgcagacttgcccgctacaacaagaagcccatca

SEQ ID NO: 29106 - DNA, 387 bp, Glycine max
  Clone ID: LIB3108-060-Q1-K1-H5
ggcgttttgaataagcatttaaccgaaaacagggagactcgccatgttgggcttatctaacctttctactatcaaacccattgtggctaatgccactcttccccagaacaacgattctgatcaaaccaaaccttcaattccagttcccgccacaaaatctttacctcgcagaaacaggcttcggaatggagccccaaagccttctgtaatgcaaatggaacgcattgttggcgctggaagcttcagagacaccgaaccccctcctctccgggattctgacatgcggaagacggtgatggacttgttcttcgggcaagcaatggaaggggaggtgcaaaagaagatgagggagacaggagagtggctctccaccaatgctgagcctag

SEQ ID NO: 29107 - DNA, 168 bp, Glycine max
  Clone ID: LIB3108-060-Q1-K1-H6
ggccttctgaataagcatatagccgataacaggggatctcgccatggggggcagatttaacctgcttactaacggacgcattgcggctgatgccagtgcctcccagagcatcgaatgttatcaaacctaaccctcgatacgagatatcggcacttacagtttacctgg

SEQ ID NO: 29108 - DNA, 212 bp, Glycine max
  Clone ID: LIB3108-060-Q1-K1-H7
tgcatcttatctgcaacactccgtatccacttcgctggtaataagagaggagaagagagagagagagagagagagggcgtggagaatgttaagtctctcagttgcttctccttcttcttcaaccatttcctttctcccaaagccattcaatggcattcagctccgtcgctctgccacatgctccattccacccacgaatgcaacgctttcgt

SEQ ID NO: 29109 - DNA, 395 bp, Glycine max
  Clone ID: LIB3108-060-Q1-K1-H8
tgcatgctatctgcaatactccgtatccacttcgttgctattagaaggggtcaataaaggcacataaagaaagaggccttgcaaatggttaataccctaattggctactactacttttccaaccttttcctttctcccaaagctattaaatgacattcacttccgactctttcacatgcgctatattccacccacaaaacgcagctcttgagtcccaggggcgattatgtctaaggggactgaagaatagtatgaatttagacatatgaccaccgaacatattcacgaagatgttgaccaccttaggggcgatcttgtcatgcttcaccttcagaaatcggatcacaacgagtacaagtccagcgaatttggtcgcatgcacaagaagattgctt

SEQ ID NO: 29110 - DNA, 325 bp, Glycine max
  Clone ID: LIB3108-060-Q1-K1-H9
cccacgcgtccgatgagacaagaccacttcgtaagtgacactggagatgttgtttattatcagactgattctctgctcctccactcgcaacgagactgagtttcaaactttttgggttattatttattggattctagctactcaaattactttctttttaatgttatgttttttggagtttaacgttttctgaacaacttgcaaattacttgcatagagagacatggaatatttatttgaaattagtaaggtagtaataataaattttgaattgtcagtttaaaaaatatatgtaatcaacacatttataaaacttaactatttt

SEQ ID NO: 29111 - DNA, 327 bp, Glycine max
  unsure at all n locations
  Clone ID: LIB3108-001-Q1-K1-A10
tcgtacggctgcgagaagacgacagaaggtgtacctaccaaaaccaaattataatagaacgcggaggaagaagaagaagtaagggacgcttgaataaaccgaaccgttcttcgattcgggttcaagttcgaagaagaaaagcgatgagttcgggtagtagcagcagccacagcagtgagaaggagaaggagaagcagagagtgagtcgcacgtcgctgatactctggcacgcgcaccaaaacgacgccgcagctgtgcggaagctcctncaggaggatccctcgctcgtcaaggccaaaaactacaacaaccgaacgccgttcaact

SEQ ID NO: 29112 - DNA, 325 bp, Glycine max
  Clone ID: LIB3108-001-Q1-K1-B10
tccacgcgtacgtacggctgccagaagacgacagaaggggagccaagaaaagaaaatggtcagccattttcttcgtagggaaacactctgaaattctcagttatgtcttggcaagcgtatgtggattatcacctactgtgtgaaatcgaaggtaaccacctcactcacgccgctatcatcggccaagacagaagcgtttgggctcagagcaccaactttcctcaattcaaacctgaggaaataactgccatcaataatgactttaatgagcttggatcacttgcttccactggattgattatcgggggcaccaaatacatggtca

SEQ ID NO: 29113 - DNA, 280 bp, Glycine max
  Clone ID: LIB3108-001-Q1-K1-C10
tacggctgcgagaagacgacagaagggaagagagaggatttgcaacccgttttctcagtaagcttcgtggagcttatggtatgatggcaaagcttccgacggaattgttggaaaagggggttatctgctcgtctgctgggaaccatgctcaaggagttgcattggctgccaagaggttgaattgcagtgcggtgattgctatgcctgtcaccactccagaaataaagtggaaatccgtggaggctctgggtgctacagttgtgctcgtgggggattcata

SEQ ID NO: 29114 - DNA, 249 bp, Glycine max
  unsure at all n locations
  Clone ID: LIB3108-001-Q1-K1-C4
tcgtctcggaaaggagtcaagggccctngtctcgaagaaacatgatagtgtgtaattctgatnngtctttcagcgtttcagaatnntctatgtgnngcctcgtgcacgaatanncttgcctgagggtcnngaagtatatgcnngttgccatttacgcagnnntccgttttgaattcnnttttggatnntattttttgaccaattnaggtggnntagtttgaatnggaaagttnagggagctnnngttct

SEQ ID NO: 29115 - DNA, 405 bp, Glycine max
  Clone ID: LIB3108-001-Q1-K1-C6
ggtgttaagcaccctcataactcaactcttcaagtagaggcaatccagtgtatgctatacaaagtccatattacttacaagtatacaaagcccatatacttacaagtaggatggtgacacataaattgagatgacaccaattgtgtgtgatagtgattacatatgacttcaagatcatttgtggaagaacatcacaatttgctaaatgataaatttgtcactctcacaagaactgctattaatgatctcccattgctggaacaataaatatgattttcaggcatacctcaactcaggcgttacttccttccggtaacgtaatcaatcttggagttgaatcatattccattgcagttccacagttggagcatttgacaatgttggtgggaccaccatttgaaattg

SEQ ID NO: 29116 - DNA, 103 bp, Glycine max
  Clone ID: LIB3108-001-Q1-K1-D2
ttatactattgcggcagccttttaacatagtcgtgtgcacctacattacataatcaacatacatcataccctactacatttttaatagtttctataaactatt

SEQ ID NO: 29117 - DNA, 382 bp, Glycine max
  Clone ID: LIB3108-001-Q1-K1-E12
gaattttaaaaaaagtgtgttacctaatttgaaggatgtgaatcatgtatcttttgtcacaaaataaaaggcatgaaccttcgggcaggaacaaacataaattactaccattaagataatattatacacgtgacaaccacatccatttaaacaagaaaattatgactgaacaataattttaaccattgaactctgtaacttgcatatttatgtgtaagctcatgcagctttttcagtttctgcagcttctgctgctgcttcttcctcccgaagcttctttaaagacggaggtggtcttacaacaatgcttttcttccattttttatcaagctttctagacaacctcttattgataccctcctcaatttctctttcccgcttc

SEQ ID NO: 29118 - DNA, 403 bp, Glycine max
  unsure at all n locations
  Clone ID: LIB3108-001-Q1-K1-E3
gtctctccctctcctccagctggttcttangccaacgcctttctcccatcaccctcccctctcttcttccgggtaagtcaacagagaagcaatgtcctattgtaatgaggcttaaacgatggtaacggaaggagtgtaaaccaaacagccttcctatcttgcacaaaatgcatgttaaacttggagatacggtgcaagtcatatctggacgtgaaaggggtaaagttggggagattactaaaatcttcaagcataacagcactgttatagtgaaagatttaaatttgaagacaaagcatgtgaagagtagagaagagggggaaccagggcaaattattaagattgaaggtcctatccacagctcaaatgtgatgctctactccaaagatcagaaggtagcaag

SEQ ID NO: 29119 - DNA, 313 bp, Glycine max
  Clone ID: LIB3108-001-Q1-K1-F9
cccacgcgtccgtacacgcgtgctatttttacttacaggcctctactatactgggtcggcttctgctctagaacagacaatgctgaaacatcatttcttctcctctctcattatccaaaccatcccttcatgcaaatggcaaaggcttatctgaattctctgacctccgaagctcatcaagcttccttaccttttctagaaaatcatcatatgatttccattctctcattgacttccagacctatgcatttggaagccgtggaagatacaagaatgctatgaccgaatcaaaactagatgtttgcataaacgg

SEQ ID NO: 29120 - DNA, 269 bp, Glycine max
  Clone ID: LIB3108-001-Q1-K1-G11
tacggctgcaagaagacgacagatagcgtgttctagtgtgtgaatgcttgttgctataacgtcggcttcttctattgttggtctgtgattgtgtttgattttttctctcacctaaaaatgtcttgctgccatggtaactgtggttgcagaagctcctgcaagtgctgcaacagctgcagatgctgcaagatgtacccagacttgagctacactgagtcaaccaccaccgagaccttggtcatgggagtggcacctgttaaggctcaatt

SEQ ID NO: 29121 - DNA, 297 bp, Glycine max
  unsure at all n locations
  Clone ID: LIB3108-001-Q1-K1-G9
tacggcgcgagaagacgacagaagggctgtgaaaatggaaagacacttgangaagttgcggagagttacctcaaggagctcttggacagaaatctgctgcaagtggtagcaaaaaccagtgatggcaggatgaagacttgtcgcatgcatgatcttctaagggagattgtcaatttgaagtcaaaggatcagaactttgcaacaatagccaaagacccaagatataatactgccagacaaagttcgacgcttatcaatcataaacacattgaataatgtgcaacaaaatatgaccac

SEQ ID NO: 29122 - DNA, 424 bp, Glycine max
  unsure at all n locations
  Clone ID: LIB3108-001-Q1-K1-H6
tccgtccgtccttagataagtcatgaannctttgtcatcaacgtttgttcccatttcactttgtcggaaaggatagttcatggtctaatgggaaaaatgacatgaggagccaatccaaaaaggtggtctgagactgagagnttttcccttctaatcgctgcaacctgaacctctgttgttgttccaaatggaggatgttggcagaggagaaatctgtaattccacaaccctctccctctcctgctgatgagtccaaagctcttgtcatagttgagaagactagtgaagttgctgaagagaaaccgattgaggggtctgtgaaccgagatgctgtgcttgcaagagttgcaaccgagaagaagctgtcactaatcaaagcatgggaagaaagtgaaaagttcaaagcagataacaagtctcacaa

SEQ ID NO: 29123 - DNA, 378 bp, Glycine max
  Clone ID: LIB3108-003-Q1-K1-A2
ccagtttctccttgattgatggagttgtataatttgagaaatatggacctgacaggaaagaggtgattgtttaccctcgagaagtacagcctgagaaccccaacagctatagagcaaggaagagagagtacttcagggtgaggcgtgaacgcaaaaaagctagacaaggagcaatacttaaatcccaactcgtgctggcttccgctgatgatgcagcaatcactaatccaatgtgttgactcttattcaatcgcttaaatgtgtaaaataccccgctcccaattttttgcttttgtgtacctgtaaaacctttagcattgttttgagttttattgaagtagcaatgtaccattagtcattaaaaaaaaaaaaaataat

SEQ ID NO: 29124 - DNA, 380 bp, Glycine max
  Clone ID: LIB3108-003-Q1-K1-A7
cccacgcgtccgtacagaacaagacaacaacaacaccaatgcatgatgatgatgcgacgggcaaacaatgatgatgatgttgtaccagaacacacatgtgcacaacaacaacaacaatagcaacaaaaccaatttacaaaattgtctgattatttcacttaccaaaatgctacacctgtgctacctgctaatgttgccttgctgctactagatacttcaattgccccagcagcactatgacactctttgcaacgtagtaaccacactattaggccaaatcatgagttgctcaagtcgaagagagtcagatcacacttgaagaacatcaacatgccttctgtcaagacaattcagagtacatatggtgatttgatagattg

SEQ ID NO: 29125 - DNA, 437 bp, Glycine max
  Clone ID: LIB3108-003-Q1-K1-A9
acgcgtccgcccacgcgtccgctatgatgagcacaaccatgaaagatttcccccaggtgaccgaagcaagagggcatttgcctacttcgtccttacaggtggtaggtttgcttatgcctctttggtccgtctccttgtcctcaagtttgtgcttagcatgtctgccagtaaggatgttcttgctctggcttcacttgaggttgatctctccagcattgagcctggcactacagtgaccgttaagtggcgtggaaagccagtgttcatcaggcgccgaaccgaggatgatatcaagctggcaaacagtgttgatgttggatctcttcgcgatccccagctggatgctgatagagtcaaagacccagaatggctcattgtgattggggtttgcacccatttgggttgcattccattgccaaatgctggtgactttgggg

SEQ ID NO: 29126 - DNA, 243 bp, Glycine max
  Clone ID: LIB3108-003-Q1-K1-D12
aactggaaaggttaagcgtctatgtaattattcatgcacatgtagtgagataattaagagtgttcaaaaaaaaaaaaaaaaaaaaaaaaaaaaaaaaaaaaaaaaaaaaactaaaaaaaaataaaaaaaaaaaaaaaactaaaaaaaaacaaaaaaaaaaaagaatacaaaaaaagatattaaaaaactaaaaaaaaaaaaaaaaggaggggagccatcttaaagccacagcttttgaaaaag

SEQ ID NO: 29127 - DNA, 329 bp, Glycine max
  Clone ID: LIB3108-003-Q1-K1-E11
cccacgcgtccgcccacgcgtccgtgatatggtactttccaaacttaaaaatgtgaaacgggggtattaatccaacaaaaaatgggcctttgaaactaaagaaaaacatactaagattggcccaaactgaagaaatacaaaaaaatggcttgagatcaagcctaaccacgaaaaaagaaaaaagaaaaaatgaccaggggcttaaaatgtatttaggttgggaatgcttgagtctaataagtctagacttttagatgatatggtactttccaaacttaaaaatgttaaacgcctgtattaatccaacaaaaaatgggcctttgaaactg

SEQ ID NO: 29128 - DNA, 309 bp, Glycine max
  Clone ID: LIB3108-003-Q1-K1-F12
aacccaaaatattataaataaaactccccaaaaaaatattctcaaaatttacaatacttaaaccaacctttaataaacaaacatacaaataaaactaacatttaaaaacatttaaatttttaaccctattattaatgtctcaaaaactcctcacaatgaaaaactaaaatttaaactataacctacaaatttgcttaatacattatttcaaaacttggcctttctttaacaaaactttaacttaaccccaaacccgtaatttaaattttccatttttctctttaaatttgggtctaacaaaattccttt

SEQ ID NO: 29129 - DNA, 258 bp, Glycine max
  Clone ID: LIB3108-003-Q1-K1-F8
atttccaatatcacaattgttgagcaaacagtaaccgtacaacttaaaacatctgaaccacataaaaaatactttaactcaaaaaccattttataccctatcaaataaactatatgtcctttactcatcatacttatcaagcttatgaaccttgaattaactcttcttcgcaacattatatctccactcactctgaccattcttttcaatatctttagatttgaacgtacagttctatatcaatatatcctattgttc

SEQ ID NO: 29130 - DNA, 349 bp, Glycine max
  Clone ID: LIB3108-003-Q1-K1-F9
cccacgcgtccgtacattagttcttgttattcattattcattctcagcttcttgtcttctggggggcaaaaggggtcacttttcagatccgagattgagctcctttacccatcatcatcatggagctcctcgggtacctgaatcagggtcacccttctagaggaacaacacttgttattactctttcattggtgctttcgacacttgtgtccttctccactttcacacatgccttctcttcttctgcgtttccggaactgaatcctataaaacctaggcactcacgtcttctcaggagtgccgtgcaacatgaaactcctacatcacagctttctgaaatatggtcacc

SEQ ID NO: 29131 - DNA, 284 bp, Glycine max
  Clone ID: LIB3108-004-Q1-K1-B5
gaagtgttcggattgcggcgacgtgagcttttcgctgcccgcgacgttgtgagaagtcggctgaaccttatcatttagaggctggagaaactagggcttgatgtcgttgattagggtttatgattatgctcagtaattttagttgtgtttgagtttgagtatctttatggttttgtgtcaccgtggttcttgtttttgaccaatatatctggttgtttatagtcgatttaatgaaatgataatcagaaattggagtatcgaaaaaaaaaaatttaaaaagataa

SEQ ID NO: 29132 - DNA, 196 bp, Glycine max
  Clone ID: LIB3108-004-Q1-K1-C8
agtatcaaaacatgctcgcattcatttcccccgtaaattaaaataaggcaaattcattaattaacaaaagaagaataccattaccacaaatcttaagagcctaataatagttttgataaaatttgcaaaacaagaattccatattaaaaaaaaaggccgcccctttataggatccaaacttaccttccccttcatt

SEQ ID NO: 29133 - DNA, 314 bp, Glycine max
  Clone ID: LIB3108-004-Q1-K1-D9
gcgtatcactccaagacagatgaggaaaaggaatttgaaattgagagtggtgctcattgatatggaatatggagacattgcttttttggtggttggagatgcatgattgtggtgtgctttgttttcatttcatcatatgacagccttgtgggtttctttggtgtttcttgatgcatacttaatttactttattattgtgtatttatctcttccatttacaaaaaaaaaagtttgtgtaggtttccttctttgaagtaaaaagaaattaaatatgtactgaaaatggaataatagtgtgttttatttgtgtttta

SEQ ID NO: 29134 - DNA, 281 bp, Glycine max
  unsure at all n locations
  Clone ID: LIB3108-004-Q1-K1-F4
gggaataggaattctcaaaattaacgaagctgcgttggattctgatacgcagcagttcggttcgggttatatgacacgcagagggatagagatcggtactgtcggggtactagtgtatgttaaaagtgttaagggggttgatattaataatgtaatgtagggatggtcatgtgaaactgaccaacgtagacctgcattcttttctatgtaaagggatctattaataaagaataaattcctctgctcttgtgccgtgtgttctaaaaaaaaaaaagnnaann

SEQ ID NO: 29135 - DNA, 51 bp, Glycine max
  Clone ID: LIB3108-004-Q1-K1-G9
cccacgcgtccgattttatgcgaatagaccttttctttgtgattttatgca

SEQ ID NO: 29136 - DNA, 225 bp, Glycine max
  Clone ID: LIB3108-004-Q1-K1-H3
cccacgcgtccgctgtgattgtgtaatttaaaagcagaggataacattggcccatgacgcgacacatgcaccacctaataatcataattttacatctttacatacaaaatacaaagactttaaattttaaaaagaagaaaagagataaacagatcatcttaatgaaatgaaaccaaaacccacaaacattggcttgatttttgttgttgttgttgttcccaactt

SEQ ID NO: 29137 - DNA, 92 bp, Glycine max
  Clone ID: LIB3108-005-Q1-K1-B1
catctcttgaagaatggttttaaaaaaaatttaaaaattttttaacaaaaaaaaaaaaaaggggaaaattggaaaaaaaaaaatgtcaaaaa

SEQ ID NO: 29138 - DNA, 373 bp, Glycine max
  Clone ID: LIB3108-005-Q1-K1-B12
tacacacgttcgtacaaaggatgatatagcagatatgatagcagctgagatcagcgctaagacctggactgtacattagcctctgtattaacgtctctactcaagcctgaactggctcatgacatgactgaacggacgaatggacaaacttttggacaacctgctacatgcaacgcgagatgcaaatcaagcatcacaataagagttaccatcaaagctgattactatgctgataagctcattacgaccgctaaaacagtgactgtaccagtgaccattaatgaggccatggatgactgcaatgctacctgggctaaaagtgtgccttaaatcactctagataacactcaagcttaccgtaaggcataccgta

SEQ ID NO: 29139 - DNA, 463 bp, Glycine max
  Clone ID: LIB3108-005-Q1-K1-B4
cccacgcgtccgcccacgcgtccgaagcaatccaccccaccatggcagcaagagcaacagcagtctttaacactccctcctcctcctccttcttcacattcacactctttctctctctctctctcctcctccaactttctctctcctccccctctccctccatccacgaccttctccgctccaaaggcttgccccccggcctcctcccagaggaggtgaaatcctacagcttctccgaaaccggccacttggaagtcttccttgacgcgccgtgcctgaccaaatacgagaacagagtcctcttcgagcaagtcgtcaccgccaacctcacctatggaagcctcataggagtggagggtctccagcaagaggagctcttcgtgtggctacccgtcaaggacataatcgtaaatgacccctcctcggcgttgatactgtttgacattggcctcgcccacaaaca

SEQ ID NO: 29140 - DNA, 62 bp, Glycine max
  Clone ID: LIB3108-005-Q1-K1-B8
cccacgcgtccgcccacgcgtccgcccacgcgtccgcccacgcgtccgcggacgcgtggggg

SEQ ID NO: 29141 - DNA, 285 bp, Glycine max
  Clone ID: LIB3108-005-Q1-K1-E3
cccacacttccgaatcatactactttaacactcatcactgacatcatcaccgtatccaactgtgcaactgataaacatacatgtggcgagcagaaacacacaaaacacactaaatagctatatatatcctgccaacttacatcatctttctacccccaaaaacatatccaaatacatttcttcggatgccacaatttacttatcatttggcaggaacgattcaaatgctcttagtttgcgacccgctccaattcaatctcctaagaagaaccatttcttattcct

SEQ ID NO: 29142 - DNA, 351 bp, Glycine max
  Clone ID: LIB3108-005-Q1-K1-F10
taccactcttaccaaacactttgctcagacctaagcttttgcatcacttagactcctcaatgatctgttcatcatctaataccagttgcaaccgtgccactcccatcctaataacttcaatcactttcctcaatttcaaggctgtctttcacaccaaaaacaccaacatattacataaacctacatttctagcaacaatttaagatttcaattcattcactctttcccaccatttttcattaataatttaaaaactctttactacctatcataccattatgattcacaattttcaaatgatatactattcctacattattaatatattacatttccttgctactatattct

SEQ ID NO: 29143 - DNA, 394 bp, Glycine max
  Clone ID: LIB3108-005-Q1-K1-G1
aactagagtaagaaacatgtatgcaatttggatcaaaattcgaaaacaaagatggctcgtgaaatcttacaaagtagaaattgttgaaaaccctctactgtatcctatccagcaaaagaaagaaataccaccacaccaccataccaatatcctctccctctctgattcaacaatatggtaactaaataattaagaagatagactataaactaactcaactaagtgaaccctgtgtccctcttgcggcaaatgatctatgttgaagatgagcaagccggaatcagcgtcgtaatcgaaatccaccacctcattgtttcccagcatacaccttgttggtttagccgaggaataagccccaaacttaccacaccccttgacctgcacacgaaccaac

SEQ ID NO: 29144 - DNA, 339 bp, Glycine max
  Clone ID: LIB3108-006-Q1-K1-B6
cacgtttgatctcaataatcattgcgtggaggaggcgctgctccttcaagccgtagttgccacattcgcccttcagggaagtggacgcacatgctgacgagcagtgtccgtggcggaggctttgagattcagaaacttgagtttggagacgacggttcaggagagtagaggaaggttggtgactgacaatggctttttgtggcggtgatcggtgctaactggccgcagatgacgatggagggagctacaggaaagggactaagactaaaaagagtagagctatggtgtggaaggtgtgtaataaaaatgtatgtcttagattaatctaatggctattaa

SEQ ID NO: 29145 - DNA, 298 bp, Glycine max
  Clone ID: LIB3108-006-Q1-K1-B8
cccacgcgtccgcaatttctccgttttttttttctttttctttgaaggtttcgttttgcaggtcgcttcaatggagaaatcctcctcttcgctcaagaagaaacgttctaagaaattatcaaaggtcaaggcaagcagtacaattaagaagagtaggaaaagtaaatccaagaaggttcgccgccgccgggaggtctctctttcgagttctgactatgaggattcaaaaaaattggacacattggcttcctctagttctgaagatagctacagaagaaaaagggataggtctcgcaca

SEQ ID NO: 29146 - DNA, 178 bp, Glycine max
  Clone ID: LIB3108-006-Q1-K1-F5
taagtttttggttttcaatgtagttcttactttgtaaatctttttgtctaagttcagtgtatgtatgtaattcaacaactatttaattaaaaatgattttttttcatctgcattacccccgatttcgaggggaggaaaaaaaaaaaaaaaaaaagaaaatacaaaagaaaaactaaca

SEQ ID NO: 29147 - DNA, 57 bp, Glycine max
  Clone ID: LIB3108-006-Q1-K1-F6
ctttggttgtgttattaatgcctcatcctggggaacaccttggtaaaaggtgatata

SEQ ID NO: 29148 - DNA, 327 bp, Glycine max
  Clone ID: LIB3108-006-Q1-K1-G8
gagttttcatggaacgtgttcaattttcagaaggaccaagatgttagacttaggattggctacgaagtatttgatcaggttccttacctgcagattagggagaataattggacagtaaatgcagattacaaaggtagatggaacgtgagatatgacttgtgagaagtgcagagagctttttctgtagacgtgttctgcttgtcatttttttgtagaccgtgtctggttcttaacccaacccttgagcttcgcctttaaaaaaggaaccatgcttaaattaaggttaagtcatgcttgcaagttactttgcttgaggacctaagggga

SEQ ID NO: 29149 - DNA, 395 bp, Glycine max
  Clone ID: LIB3108-007-Q1-K1-E6
tataccccaacccttatacaaccaatccctatcacacacccaaaacatacaggggacatggcttgccttaaagagcgcattaggggctacactgctctacatggttgatatgagtgcacccatggcacatgcacctataacacgcgggcaggaaactagtgatcacgcccaattgcatcgattacctccacaaaggacaaacgccgacacatgatgctgcaacggaatgaagagcctcaatgccgccgccaagaccaccgacgaccgccagacggcgtgcaactgcctcaagtcggccgccagccaaatcttcggcttcaacgccaacaacgccgcctcgctccccggcaaatgcggagtcttcatcccctacaagatcagcacctgcaccaact

SEQ ID NO: 29150 - DNA, 369 bp, Glycine max
  Clone ID: LIB3108-007-Q1-K1-F7
cccacgcgtccgaactaatatattcaaagtttatcacacctacaaacaacacaggaaactgccataataaaaatgggaaatggaacttacaactatatttatcacattcaaccaatacataatctaccataaaaagtaaaaacggttctttggtctaactattctcacaattaaaaattctatatcactaactacctatttacaacatccaatcttacgtacacgtacatacgacctcatatctcttttatattgaaacctaaaatcaattactttatcacatttttacaacgtcatgactaagaaaaccctgaccttatccaacttaatcacacttcagcacatcctcatttcactagcattcataat

SEQ ID NO: 29151 - DNA, 169 bp, Glycine max
  Clone ID: LIB3108-007-Q1-K1-H8
cccacgcgtacgaacgaattgatttaaatttttttaacacaacatacaaacatgaaaacgctcattattaaaatggaacgtggaccaaaaccactatccatacaatacaaccaatcattattcaatcctataatgtatacgccttgcatacagctatatcatatacaca

SEQ ID NO: 29152 - DNA, 208 bp, Glycine max
  Clone ID: LIB3108-008-Q1-K1-B10
ggaaaagctgagctatagtttcttaaagtgatatttttagtgcgaatatgtcgtttacatggttctttaatgctgcgctgattttttttattttgttttttgggatgttcattattgtctaataatgtccattatttatgtaagcttatttttggattctaaatcttgaaaagtgaaactcaatgaacgttgattctgttatggaaaa

SEQ ID NO: 29153 - DNA, 347 bp, Glycine max
  Clone ID: LIB3108-008-Q1-K1-E6
ctctttttcttttactcgcttgtgtcggatatttgtgtaagtcaatttttgcttttagtgattctatgatcaggaaacggctccaaattaattatcatcttctttaccactgtcaaattaaaacttatgactgattatatttttgaatttaataggtatataatgttaatttaaatgtcacaaaaaaaaaaaataacaaaatctattaatttaactgaataactaaaaaaaaaaaaaaaaggctgactctctagacgatctaagcttacctacttttgcattccacttaataaacttttttatactgtcatctaaattcattatattaatcgactttttacaacttt

SEQ ID NO: 29154 - DNA, 363 bp, Glycine max
  Clone ID: LIB3108-008-Q1-K1-F1
aataattaataaaaagaaaaaagtgtaagatcaaatagaaatttataaaatctatgatcctggagtagttccctagacaaaatagaagtaagttcacaaacaagattcaagaataagattctctgatgaaaggagagaaatatgtctgaggatccgctgggtataaggagtgaaagaggggatcatttgtttcttgaacagttcttttaaaaaaattttctatcggatttttgagtcataggagattttatgatttatgacttggaggatttttaagaatagaaaggaataactacattgagttcatcgatttgccctagatatcaatagactcataaattattttttattcgaaaccaatta

SEQ ID NO: 29155 - DNA, 200 bp, Glycine max
  unsure at all n locations
  Clone ID: LIB3108-008-Q1-K1-F8
angagtgnaaaggtctaaggttttcagaattcacaaccacccatatctttttaatccatttccttttctgcttaggagggatttcttaaatttgcatttaatttataaagaatttttgttttaaaaaaaaaaaaaacaaaaatctattacatttataatcaaaatattatcaattttattaatttaaatggctccctttt

SEQ ID NO: 29156 - DNA, 274 bp, Glycine max
  Clone ID: LIB3108-009-Q1-K1-B1
ggggatgatgaggtggaggaagagcatgatcatgaacccgaagaatctttgaaacccggacctgagggtaagaaggatgctgaagtccctttgccaccaccaaaagagacagaaaggcagctctctaaaaaggaaaggaagaagaaggaacttgcagagcttgaggctcttctagctgattttggagtggcaccaaaacaaagtaaagatggtcaagatgagtctcaaggtgctcaggataagacaggtgttgagactgatggagatggagaaa

SEQ ID NO: 29157 - DNA, 238 bp, Glycine max
  Clone ID: LIB3108-009-Q1-K1-B4
ggacgccaaggggtgggtcaaaacttcaggtctattggtaagaatgttagtcctattgaggtcaagttcactggcaagcagccctatgatttgtgagcacacaactctatcttcatcatcatcatcccccgtgcttcctttatatgctatatattctcatgtgatatcatgtacctattgtcaattttattatgccacaaatattgcttaaactctgtaccttaattttacacttcaa

SEQ ID NO: 29158 - DNA, 336 bp, Glycine max
  Clone ID: LIB3108-009-Q1-K1-B9
tttatggagtaagtaaatctgctctcgtgggtatatatataagcattaaaaaagaaaaaattatacaaaaaaattcagattcacgtggaactaggtgaggttgatatcgacatgggtaggggtaacctatacattttcttcaaaaaggtttcactatgcagaattatttactgcctctttgccaatgtcttcctcaagcctttgataatcttagcaaaccaaaccaagttcataactgatagcaccaatggcacaacaataactaatatctgcccaaaggtgtgcatctgctcaacctcatcaaagtgcaagtagacatggtaaaacatgtatatg

SEQ ID NO: 29159 - DNA, 199 bp, Glycine max
  Clone ID: LIB3108-009-Q1-K1-C3
agatgtcaaattatagcttaaaggagagagaaaatgacatacattattttgttgaattaacagttgttttgtctttttagattaaatatttgaattagcaaacgtactggaatgttttagaagcggaaatgaatgtgttttttgttcagtttggatatgaaagttttggctttcaaattttacatatccgtttcaaaga

SEQ ID NO: 29160 - DNA, 231 bp, Glycine max
  Clone ID: LIB3108-009-Q1-K1-C4
aatataaatcacgagcaaaacaaccttttttaaatatataattataccttcaaaagataagaaaaatgacgtacattattttgttgaattaacaattcctttgtctttttagattaaatatttgaattagcaaacgtactggaatgttttacaagcggaaatgaatgtgttttttgttcactttggatatgaaagttttggctttcaaattttacatatccgtttccaaga

SEQ ID NO: 29161 - DNA, 247 bp, Glycine max
  Clone ID: LIB3108-009-Q1-K1-C6
agaaggtaaaaaggtacatatggatcaccgttttaagttttgaacacttacgagtatggggttgtctaactaatttcgtcttccaagggtgatatgcgaatagccaaatatcatagtgcgatgctggtactaaaaataatgtgtgatttgtaatcaggaaattttctacaatttgttaatgcatttcagggattttctcttatctctccttgattgaattggatcctctacagagtttggaattcat

SEQ ID NO: 29162 - DNA, 240 bp, Glycine max
  Clone ID: LIB3108-009-Q1-K1-D7
ggggaataaaaaacttttttatagttcaaggactaaattacagaatataaaactttgggactaaaatcaaaattcaacaaatctaaattacacaatatagagactaaaacatattaccctaattaatctattcaacgaaagttggtcttttataaatatgtaatttgaatcatcaatctctgcttataaatgaatacttttggtgttatatgaataaaaagtttgttgggttatttcatt

SEQ ID NO: 29163 - DNA, 262 bp, Glycine max
  Clone ID: LIB3108-009-Q1-K1-F3
gtttatttttggtcaaaacagattcttttgtcataatattcttttgtaactagatcttggattcctaggataaacactaggagcacgaagatcaggccagcttcgagtttcttgtatgattctttgcttgttgtcaatttaaagtgatatagcgagtctgtttttgtctttttttaaaggcaagcacaagctccattatggatccacactacaagtacgacaatatttgtcactgttattttacattcaatttatcgtcaaa

SEQ ID NO: 29164 - DNA, 313 bp, Glycine max
  Clone ID: LIB3108-009-Q1-K1-H2
attcttcaagaagatattgggggtgtaaaagggcattttggaccaattaatgcattggcgtttaaccctgatggaaaaagtttttcaagtggaggtgaagatggttatgtacggttgcaccactttgacccagattatttcaacatcaaaatatagtgccggatggtttgtggttagcattaggtgtggttcctagaagttaacttttaatttctttcacctaatgtttttgtaatgccgatttgatttcaaaatgctgttatattggtaatatggaagaatttaatgaatgaaattatgcatttttagttta

SEQ ID NO: 29165 - DNA, 320 bp, Glycine max
  Clone ID: LIB3108-009-Q1-K1-H9
taaaaaaaaaaaaaaaaaaattaaaaaaattaaaaaaaaaaaaaaaaaaaacgaaaattttggaaaaataaaaaaaaaaaaatcaaaatttattttaaaaatatatttaattatattatattttattttaaaaaaattttaatttatttatttaacttaatttttatataatggtcccttttttaaaatttttttattttaaattaattcttttttacaattttttttttttttttgttcattttttatttataagctcccctttttttaaatatttctactcttaaaaacttttattttcaaatggaaatccctttttt

SEQ ID NO: 29166 - DNA, 413 bp, Glycine max
  Clone ID: LIB3108-010-Q1-K1-B3
tctgtatcatttcatggggataatcatccatagttactgaagaaaatggcaaccatctccgctgctatcacaaccccatcgatcacccgcgcatgtctagtgcaaaaacgttctcttgggttctcatctcccgttcttggtttgccagcaatgggtaaggtgggaagagtgagttgctccatggaggaaaagccttcttctgtgaaggaaagcagctcaagcatgttggggatgggggcatctttgatggcagcggccagcgccgcagccatgtcaagcccagccatggccttggtggatgagagacttagcactgaaagaaccgggctacccttcggcctcagcaacaaccttctcggttggatcctgttcggcgtcttcggactcatctgggctctctattttgtctacac

SEQ ID NO: 29167 - DNA, 218 bp, Glycine max
  Clone ID: LIB3108-010-Q1-K1-E10
aaattaaaaaaaaatttaggaaaaaaaaaaaaaaaaaaaaaaaaggagaaaattaaatttgaaaaaagggaaaaaatattttattgtgttatttttaaaatttaaggtaatataaatagaaaataaaaaattttttaatatataaatttaatttatataaattaagaaatttttaaaaaataatttattgtaaaataattatttatattaaattaaat

SEQ ID NO: 29168 - DNA, 217 bp, Glycine max
  Clone ID: LIB3108-011-Q1-K1-B12
gcaaagactactttgcagcggtgtagctaggataatagctaagagtggctatctgcatctgtgtcaatcagcgaattgcacaagggtcttgttttttttaatgttccgcacgttcttaaattttgagccgcagggttcggtaatatgcgtgctggtgtactggattttgaagtgtactatgtattaatatgcaattactgttcattctgaaagctat

SEQ ID NO: 29169 - DNA, 98 bp, Glycine max
  Clone ID: LIB3108-011-Q1-K1-B7
gttatattatgtcttcccatataaaaaaaataaaaaaaataaaaataaaagaaaaaaatatggggaattattaaaaaaaaaaaaaaaaaaatataaaa

SEQ ID NO: 29170 - DNA, 278 bp, Glycine max
  Clone ID: LIB3108-011-Q1-K1-C4
cccacgcatccgtccacgcgtccgaccacgcgtacgtcaattcgatagacttgtgcacgtggcatggtcagtgaattattatgctcgtgtcaatgtagagcaattaatacatttgcatgctttatttgtcttccatacaaaaaagctcaatcacatgagtcttaagagcttcttgggcacgatcgaacatgaaaaccttgtgatgggataaaaaatggccggccgctatataggatccaagctaacgtacgcgtgctggcactgttatatttttttta

SEQ ID NO: 29171 - DNA, 289 bp, Glycine max
  Clone ID: LIB3108-011-Q1-K1-C9
cccacgcgtccgcccacgcgtccggtacacattacatttatttacattgttaccttcagacccttattattcgattgatgtcgttgtcatcactagtgctactgtgcttggctttttgtctcgttcgttttgggtttattactcttttgggggacttggttgagacttgataggtggatggtggtttttctgttagtggtcgattacctcaccaaattagacgtggattgaaatttgagattaaaattataccttcaaattctaaatatgttttgatttttctagtaaa

SEQ ID NO: 29172 - DNA, 232 bp, Glycine max
  Clone ID: LIB3108-011-Q1-K1-D2
tgggaggtggttccacccttgcatacttcagtgcaactgcctcaggtgacattctaccaatgcaagaagggaccacaactcccaccaaagctcggtcctcgtggcaagatctaatttgatttgtatcagaactccatctattgagttcctttttaattattttttttctggtttgcataatgtgtaagtatacttacagactactattcaaagatgcttctttcccgtctaa

SEQ ID NO: 29173 - DNA, 136 bp, Glycine max
  Clone ID: LIB3108-011-Q1-K1-E6
cgtggttaggcttgatctcaagccatttttttgtatttcttcagtttgggccaatcttagtttgtttttctttagtttcaaaggcccattttttgttggattaatacaggcgtttaacatttttaagtttggaaag

SEQ ID NO: 29174 - DNA, 359 bp, Glycine max
  Clone ID: LIB3108-011-Q1-K1-F12
ggaagggcattttgtgagggaatgtccggatgttggggaaaggaaatgagtgagaatgtgtgatgttatgatttcttctgttgaattgtgagtatgttacagtcatcagttggggttggttacatggattctgttatttttgcttctagccattggcattaatttgcttccaaaaaaaaaaaaacaaaaaaaaaaaaaaaaaaaaaaaaaaaaaaaaaaaataaataaatataaaataaaaaaaaaaaaataaagtaagaaaaaaaaaaaagaaataaaaaaaggggcggcctttttaaaggatccaggtttacttacccgtgcttgcaactgattacctcttttatagggtcccctaa

SEQ ID NO: 29175 - DNA, 105 bp, Glycine max
  Clone ID: LIB3108-011-Q1-K1-F7
atgtacattccaaggatacaatacaagtaaagatagtgaaaatgtatgtgactcaacaatgtgagttgtcctgacgattgtattatcagtttttgctttgagaca

SEQ ID NO: 29176 - DNA, 460 bp, Glycine max
  Clone ID: LIB3108-011-Q1-K1-G7
atctttgcttggccatggaatcaccgacatgtacatccactttatccatgtgaaattctggtcaatcgggatttatttggagcctgaattacttggccacttggagcagttcaaaggaatatctgcaaaggagctggaagagaacgatgagttcttcaatgctctcatttctgctccggtggagaagtttattagacttgtggtgatcaaagagatcaagggtgcacagtatggggttcagattgagactgctgtgagggataggttggcagctgaggacaaatatgaggaggaagaagaagaagctttggaaaaagttattgaatttttccagtccaagtacttcaagaaacattcagtgatcacataccatttcccaacaaattctgccactgctgacattgtggtgtctttggaggggaaagaagactccacgtatgtgatagagaatgccaatgtg

SEQ ID NO: 29177 - DNA, 188 bp, Glycine max
  Clone ID: LIB3108-011-Q1-K1-G8
gaactggaaaacccgggccgacccacgcgtacgaccattcttactccaacacttcttacctttttctaatatctataaactattgcacatatctgtctctttatatctctctctacctcaacataaaactaacttacagtaacattctctacaaattataaaaatctaactactactaaactttcaaa

SEQ ID NO: 29178 - DNA, 270 bp, Glycine max
  Clone ID: LIB3108-012-Q1-K1-A6
cccacgcgtacggaagcttggaaatgctgatgtaagacttattatagcttctcgtggtatgtggtatgctgtatgggctgaggtggctgccaatacatgccgaggtgtacctgcacagcttgctgcaaagctggtggttaaagaagctttaaggtcaatatgtcttaaggatgatacaacttgcctccttgtagtatattattccttcacatcatcccgtattgccaacaattccaagaaagaaacgttacgtgctaactttccttctct

SEQ ID NO: 29179 - DNA, 252 bp, Glycine max
  Clone ID: LIB3108-012-Q1-K1-C10
accactcgtccggcaatatgtgagggccgttctagctatatacgaaattctagattaataatggaatagggtaatcattggatttagttggaggggttcatatatttatggaatcgattactatactagtaataaatcgtacaaaaaataaatatatacataatatatatatattaagaacaaacacaaattatatgtgattagtcgcggaatttaaaataaaaaatgaaagctatacaaataataagatac

SEQ ID NO: 29180 - DNA, 165 bp, Glycine max
  Clone ID: LIB3108-012-Q1-K1-H11
cggacgcgtgggatttcctatgtaatatgtaatttagaatatgttacctactcaaatcaattgggtgacgtgtataagctttcataaattatgctagaaatgcacttacttttcaaagcatgctatgttagaattgaatctacttttcaatacccagatcatcaa

SEQ ID NO: 29181 - DNA, 430 bp, Glycine max
  Clone ID: LIB3108-013-Q1-K1-A10
tattgttcaagattcaggtactgcgtttcttaagcagacacagatggctcgtacgaagcagaccgctcgtaagtccacaggaggaaaggctcctaggaagcagcttgcaaccaaggctgcacgtaagtctgcaccaactactggtggtgtgaagaagccccaccgttatcgtcctggtaccgttgctcttcgtgaaattaggaaataccagaagagtaccgagcttttgatccggaagctccccttccagaggctggttcgtgaaattgctcaggacttcaagactgatctgcgtttccagagccacgccgtgcttgcattgcaagaagctgctgaggcataccttgttgggctctttgaggacactaacctgtgtgccattcacgccaagcgtgtaaccattatgcccaaggatattcagctggcaaga

SEQ ID NO: 29182 - DNA, 163 bp, Glycine max
  Clone ID: LIB3108-013-Q1-K1-A12
aatcgttaatcattcatatactgcttctcatatacacacacacacaaattctactaaccagtaccttttaaactgcataggaggaatcacataacaacaaacatcttgacacaacctcttctcataatggtgaaacaactacttataacatgaacaaccacca

SEQ ID NO: 29183 - DNA, 249 bp, Glycine max
  unsure at all n locations
  Clone ID: LIB3108-013-Q1-K1-A5
taaaagcagaatttttttcattgcgtggtcccctgacacatcaagggtgaggggcaagatgatttatgcaagctccaaagacagattcaagagggagctggatggaattcaagtagagttgcaagcaactgatcctactgagatgggtcttgatgtgttcaaaagccgtgccaactaanatgattattanaatagtaggctttctggtggagcagcacccctgaagcttagttactcatatggaaaata

SEQ ID NO: 29184 - DNA, 306 bp, Glycine max
  Clone ID: LIB3108-013-Q1-K1-D1
caggttcttaaatatttcttgattgtatattcgaaattaaaaaaaaaaactttgttggatgagacagaattttcttcgatgatttcaactcgtcaaggttagtctcatgtctttaaaaaaaaatccatccggaaggtgaaggtgtgtttttgtttcttaacgtactctctttggcactgtacagtttcttttatatctcctgtgccgccgcacaatatatattctcacattgtttttttcaaaaaaaaaaattcaaataaaaaataaaattaaatcatatactacataatatattaaccttatatt

SEQ ID NO: 29185 - DNA, 301 bp, Glycine max
  unsure at all n locations
  Clone ID: LIB3108-013-Q1-K1-D3
cgtgcataaggttaataaaaatttgggatttcttatttgttcaacaatggtgccatanagatgagaggtggatgctagtatacctaccatgatgcagttgatgtactttgctgaggatttccttttcatttcttgtggtgtataaattatttattcccactttcaaaagatctgctgaccagaatgttgtattttgtgtttaacatttttgctgatactaacattggcctatctattgcttccttcttggctcaccgaatcatacattgaatcacatactctattctatgtaacatttgct

SEQ ID NO: 29186 - DNA, 315 bp, Glycine max
  Clone ID: LIB3108-013-Q1-K1-E10
gttgctgcaaagttatccatatacaaacactagtcatttgctccatgtagcaaataagttgcttgttcagtcagtctaatggttttcaccgttgattattttgcattatgtttttctctctaacatagtgtttaattttataattgtaaattactctgtaattgttaatgtacgttaagagcagcatctggtattttctaatgctctggttttgtcattctcttttaatggttagcccacattactatgatcttggaggaaataaattatatgtccataatctttcaccatatttttttgaaaatattcttttta

SEQ ID NO: 29187 - DNA, 386 bp, Glycine max
  Clone ID: LIB3108-013-Q1-K1-E11
taggaagcacgacgacaacaacactcgtccttacaccgactgccaccgcgtccaaagatcgttgatgatcaagatctgggtttctttgccaattttcttggcgtcttcatctttgtactggtcatagcgtatcattttgtcatggctgacccaaagttcgaaggaaactaggaatgtagactgaggtgctttgcaaatggaaatgaatttgatgcaatcaagaactgtagtttgggaatgtgaacgttaagcttactaaaactttcataaacatcaaaagagcataacatttcaattttcgctatacttatgcgtgctcccttaagttatggtttgcagttaaagaactttcgttgatagactaatgaaaacactgaatttgcttt

SEQ ID NO: 29188 - DNA, 317 bp, Glycine max
  Clone ID: LIB3108-013-Q1-K1-G12
atcgcggtttacatattaagtttaaaccgtcatattaatcaaaccatattaatttgcctgtagattctgagtcactgctgctatggcgctactcgtacttctcgtgtcggggatgttgctgacgttgtaccttgttaaggtttcatctgatccaaagatagaagaagaaatactggaagcagaagaagaactgccgtttcccgataacgagccacttatcgtgagagactcgaacagaaggctaatgcaagacatggattgtggtggcttgtgcaagacgaggtgcagtgcacattcgaggcccaacttgtgcacta

SEQ ID NO: 29189 - DNA, 428 bp, Glycine max
  Clone ID: LIB3108-013-Q1-K1-H9
aagcaaaaccctagcggcgcctgctttctttgttcgtgttttgcatcaggatggagtctcaggtgaagcacgcacttgttgtcaaagttatgggtcgtactggatccagaggacaagtgacccaggttagagtgaagtttttggatgatcagaaccgtcacatcatgaggaatgtgaaaggacctgtgagagaaggagacattctcaccctactcgagtctgaaagggaagcaagaagattgcgctagatggtctcttttttttttggcttgcctccaaattcgaacaaaagcaatatttttcttgatatttatggtagttagtcggtgctaaaggggttatagcaccctatcttattggtttggatctattttcattcgaattattgcttgacattttgatgtttaaaacttcgagattgaagtatg

SEQ ID NO: 29190 - DNA, 78 bp, Glycine max
  Clone ID: LIB3108-014-Q1-K1-A10
tctatatagacgatgcaagcgtacgcacgcatgcatgcgacgtgatagcttatatatagtgctacctaaaatcaattg

SEQ ID NO: 29191 - DNA, 432 bp, Glycine max
  Clone ID: LIB3108-014-Q1-K1-D8
gtttaaataagagaaatgttcaattctaaaaaaaaaaaaaaaaaaaaaaaaaaaaaaaaaaaaaaaaaaaaaaaaaaaaaaaaaaaaaaaaaaaaaaaaaaaaaaaaaaaaaaaaaaaaaaaaaaaaaaaaaaaaaaaaaaaaaaaaaaaaaaaaaggggggggccgttttaggggatccaagtttacttccccgtgcttgcaacgtaatactttttttttggggcccccaaaataaaattcatgggccggcgtttaaaaccggggggccgggaaaaccccgggcgttcccaaatttaatcgctttgaaacaaatccccttttccccggttggcttaataccaaaagggcccgccccgattgcctttccaaacatttgcccaccttaattggcaaatgggaccccccttttaccggcccttaaaccccgggg

SEQ ID NO: 29192 - DNA, 434 bp, Glycine max
  Clone ID: LIB3108-014-Q1-K1-E6
taaacctactaattctcgtcttcatctccttcctcgccgctttgtgctgctgttgcaaaacttagggttgagcctttttttgaggttttcagcgcttctttctcacaatggttcttcagaatgatattgatttgctgaatcctccagctgagttggagaagagaaaacacaaactcaagcgtcttgttcagtcaccaaactctttcttcatggatgttaagtgccagggatgcttcaacataacaactgtgtttagccactctcaaactgttgtggtgtgcggaaactgccagactgttttgtgccaaccaacagggggacgggcgaggttaaccgaaggttgctcatttaggaagaagggagattgaatggtttgttaaccagacttttctttgtcaatgatttgagattttcggttgttaggtttttgagat

SEQ ID NO: 29193 - DNA, 119 bp, Glycine max
  unsure at all n locations
  Clone ID: LIB3108-014-Q1-K1-F1
aaggaggctttgcggtttcaggattcctcgcactgtcaccaacgacaagcttgccaagattgttcaggagcatggtgctgttgagaaagctgaggtaanggatgacatatattctggaa

SEQ ID NO: 29194 - DNA, 166 bp, Glycine max
  Clone ID: LIB3108-014-Q1-K1-H1
aaaaaaaaaatgaaggccgttctaaaactaaaaaaaaacaaaaaaaaaaaaaaaaaaaaaggaaaaaaaaaaaaaaaaaggggggaaaaaaaaaaaaaaaaaaaaaaaaaaaaaaaaaaaaaggggcggcataaataagggaaaaaggggacctaaatggacttat

SEQ ID NO: 29195 - DNA, 387 bp, Glycine max
  Clone ID: LIB3108-014-Q1-K1-H3
ggttcttttttttttttaaaaaagtcacgacggaataaaatttactagaataatattaaattaacaacacagataacataattccttcacactgatcactcgtttgataaaaggatctctaactagataaaataagaggcaaacaaagaaacccatagtagaatgggtgacccttattctcaaacacaaagtggttaattaacaacacgagtagaaagatgatagatctatcatcttctatcaaagcactcttaattaattttttaaaattaacaacgtttggtgcagaaacatctgcgacggaagccacgggcgtgggctccagtgaaacgtttggttcggcaaacagagccacaggtggggtcactcaaacatggccccttgaaa

SEQ ID NO: 29196 - DNA, 86 bp, Glycine max
  Clone ID: LIB3108-015-Q1-K1-H11
ctgaattttcgtcggcatttggtgcctccagctaaggtggttacttttttgacaaaaaagagaaaaaaaaaagaaaaaaagaaaaa

SEQ ID NO: 29197 - DNA, 273 bp, Glycine max
  Clone ID: LIB3108-016-Q1-K1-A2
ggagcttggtgctgaagcagtgtacgccggagccaacttccgtacccccgttgaaccctactaaagttttcaagtggaaaaaacctggagatccacacgagtttgagcattgagatttgggtgcgcggtttttggtgtgatatataaggttgatagttggaacattagtcttggtatgataaagaccttgccaataatttgagttctgatttacagagctaggacagttatgtcttaagactttgaaaggtgtttaatgatatttagctttaa

SEQ ID NO: 29198 - DNA, 398 bp, Glycine max
  Clone ID: LIB3108-016-Q1-K1-D1
cccacgcgttcgcccacgcgtccgcccacgcgtccggcccccaggcttctaagtcattgaaaaatttgcaaagcatctgtagccaccccactttgtttgttgtacttaaactacattcccatttgtttttgctttatgagatttcatcatcctgtatttttggtttctgttttcggacttcaatggaaattaatggatgagaactaatgaataaaaaaaaaacaaaaaagaattgacagacaaaaagaaaaaggaaaagaaaaaatacaattgaaacccaaaaaaacttacaaaaaaaaataaaggaatgaaaactacataaaaaaaaaaaggggcggccgttttaaaggatccaggtttacgtaccctggcttgcgacacaatactttttttttggg

SEQ ID NO: 29199 - DNA, 351 bp, Glycine max
  unsure at all n locations
  Clone ID: LIB3108-016-Q1-K1-E2
gaggtgcatgtntnaanattcttaggatggaatcctactggtacaaaggcactggttcagtggttgctgttgatcaggaccccaacactcgctaccctgttgtggttcgattcaacaaagtcaactatgccaatgtatcaacaaacaactatgctttggatgagatcgtggaagtggaatgagtccaatttatttgtaattttgattctggtcatgctatcgcagttactagcctaagtttttttcatgcgacaaaaaaaaaaaagaatctgtatcatattctctctgatatctatccccttgatttctattctctnaaannnnnnnnnntnnttnntttnttttataaat

SEQ ID NO: 29200 - DNA, 390 bp, Glycine max
  Clone ID: LIB3108-016-Q1-K1-E8
gtttctacgccaagtagacagtgttgctgtttttcacaatgcaagcaccagatttagtgatggggcacgatttggactgggcgcagaggttggaattagtacgagcaggattcatgctcgaggtccagtaggtgttgagggattgttaacaacaagatggatactaaaaggaagtggacaagtagtagatggtgataaagggattgtctatacccacaaagaccttgcagcttaatttgaatggtctaactgctttactttcttttgtagcctttttcatttgttttgacagttgagaacggtataaaattgtacaatttaataaaatagggtcatttgtatcaaataaaaaaaaaaaaagggtggtcggttttagaggatccaagctta

SEQ ID NO: 29201 - DNA, 334 bp, Glycine max
  unsure at all n locations
  Clone ID: LIB3108-016-Q1-K1-F6
caattgaaattttaaaaatgactgggataaacttaagaattcaattattgaaattgaataagtaaacaatttaattggattggtcgaatggtatcaaaaaaatggagtactaactcccatttcttatttattattgaattaaccgatcaacttgctttgttatcgaacatttctttttgatttcaaaaattttccggaaaaaatttgaatctatttttatatgcgaatcaatcctactacttctggtcctgaggtttctgcgcttgtttntttttttttttttttttttttctttttttttaatgggcggccgttttagaggatccaagcttac

SEQ ID NO: 29202 - DNA, 63 bp, Glycine max
  Clone ID: LIB3108-016-Q1-K1-H5
aaaaaaaaaaaaaaaaaaaaaaaaaaaaaaaaaaaaaaaaaaaaaaaaaaaaaaaaaaaaaaa

SEQ ID NO: 29203 - DNA, 260 bp, Glycine max
  Clone ID: LIB3108-016-Q1-K1-H7
tagaggtagctagctaggcagccacgagccttggcgcattttcttttttatgcgggcgagtataataataagtgcgggcgaatggcattactgaggtcaatagcaacaacagcaattgctactatacctgcagccttagcattctcaacatcttaatcatctgctttcgcttgatcttgccaatcacgcaaaaaccaaaatagattacgaacttgttaaaacacttgctaatcctccctctgctcggtacatggaccaca

SEQ ID NO: 29204 - DNA, 252 bp, Glycine max
  Clone ID: LIB3108-017-Q1-K1-A5
cttcgcacaattatatattttctatctggtttattgtcacatatttatatatatatatatagttgtgttcaaatttggttgcgcataatatatagtaattatctccaatgtgtcactgaatagtatatatatcataacgttggagaggatggatgatggtaagtaccgttctccttctccttctcttgggcagtacacaagaaagactgcatgtataataatagagtgaatttttatcttcattactaaaaa

SEQ ID NO: 29205 - DNA, 225 bp, Glycine max
  Clone ID: LIB3108-017-Q1-K1-D11
gaatttctcacttctagttctagtattgttgtcggtgttgttatatgatgtatggttgaataaatctgatttggtgtttgtactttgtagagttaaaagctaaaaaactgaaataatacaaacaaacctaataaaaaaaaaagggctgtccctctagaagatccaaccttacgtacgcttgcatgctacgtcatatctcttctatagtgctacctaaatttaatt

SEQ ID NO: 29206 - DNA, 469 bp, Glycine max
  Clone ID: LIB3108-017-Q1-K1-D12
tctcatgctcccggtcgacatggccgctggatttcgagcggccgcccgtgcaggtgctccccttcccccacatacactggctcttgggggtttatgttctcttttccccctctaattttggtaaaaatctcactagctttttgcaaagattgttccccaacataatctccaaaatagaaagccttgcgcaccactcaacagaaattaggtcaaccccattttcttacacatccatctctttatattttggcttattctgtgaagtgggtaattcttgaaaatattgatgagtatatatattcaaaatggttaaagagaaaattcacatcaagaaaattgataatgcttcagcaaggcacgtcactttattatagagaagaagagggcttttcaagatatctgaagaaccttcatttctatgtgatgctgatgatgctctcaacattttctttactactggaaaactctt

SEQ ID NO: 29207 - DNA, 417 bp, Glycine max
  Clone ID: LIB3108-017-Q1-K1-D9
tctcatgctcccggccgtcatggcacgcggattcgagcggccgcccgggcaggtgttcggcttcatgcaaacctcattgttcttggtatacatggcttgcatgtgctatggattctttctcatgctcgggactgtgggtttccgcgcagccctattttttgtccgtcacatataccggtcaatcaagtgcgagtaggatgctggtgggatggtcttctgttttacagaatcctttacagatctggtattcaagaagaccatgtaggatggtaggatgtcttgagaagaagcatgaattatcttacgcccgaaattttaaaaactttttgccattttcatttacagctcaacagtttatatcgattagtataattagagctttctcaattcataattttataccttcccacacaatta

SEQ ID NO: 29208 - DNA, 348 bp, Glycine max
  Clone ID: LIB3108-017-Q1-K1-E5
gttggttccacccttgcatacttcatttcaactgcctcaggtgacattctgccaatgaagaatggaccacaactcccaccaaagctcgatcctcgtggcaagatctaatttgatttgtatcagaactccatctattgagttcctttttaattatttcttttctggttagcataatgtgtacgtatacttacagactactattcaaagatgcttctttcccgtctaaaaaaaaatatattaatataactatattaattatttttcctttaaataattttataaaatttagggcggcctctttataggatccaatcttacttacgcgttcattctacttcataccttttt

SEQ ID NO: 29209 - DNA, 386 bp, Glycine max
  Clone ID: LIB3108-017-Q1-K1-E9
tccatgctcccgggcgccatggccgcatgattagcgtggtcgcggccgaggtactaaaaaaggtgtgcaagttaaaggggaatgggtaaccaagagaagagaactcctgctacatgcaagctctgttgcattttctctgtccccttttaactcgatcgcattggcagagaacgatgtccctgaagattttcgagtttattcagatgatgtcaacaagtttaagataatgatacctcgtgattggcaaataggcgcacgagaaggtgatggacttaggtcactcatagctttctatcctcaagaagcttctaacacaaatgttagcattggaatcacaagccttgatgctgatttcaccaaaatggaatcttttgggaaagtttatg

SEQ ID NO: 29210 - DNA, 360 bp, Glycine max
  Clone ID: LIB3108-017-Q1-K1-F10
cccactcgtccgcccacgcgtccgagcgctttaagatgatacagatatccaaggggtgcgggaaacctagcttgtttctgttgcttttacaattgcttatgttgtcgaatgggacacccagttgttagtggcactggtttctcctttctgatgtttgatacatcttgttgtattcaagttctttatgttcgtcttatgttattagctcataacaatgttcttactgcttttgctaatcaacatgatctcctatttgcacaatattttatgcttacttattattgttatttttcttatttcctttaattttttttattttcttttttattatctaatattttattttatttcttttctttt

SEQ ID NO: 29211 - DNA, 299 bp, Glycine max
  Clone ID: LIB3108-017-Q1-K1-F11
tcgcatgctcccggccgtcatggccgcgggattagcgtggtcgcggccgaggtatttaaccggtctagcacagattttgccgtgcgggccggttcagatgacggaagtggcgacgagcaacgttgtgcacgaagtcttagggcgacgagctgaagatgtacatcagctcgattattgactatataatcaatgtccttgccgatgaagatttcgattttggacttgacggtgaaggtgcttttgaagccctcggcgaattactcgtcgattctggttgcgttactgactttctcgaatgt

SEQ ID NO: 29212 - DNA, 392 bp, Glycine max
  Clone ID: LIB3108-017-Q1-K1-F4
tatagactatatataaaatatattattcttgctgttttcttcggctaattgctgcggagaatggctgctggagtgtataaccaaccaattgttgcttttcaatcccattctcacatcaacaattttaatcatcagcaaaagtttaataatttggtaagactggtgacaaaggactttatcggcagtaatttcctctcaagaagggattgtagagtaattcaatctttagcatctcaaacatctgtggttgacacagtttcatccccttcaaaaagcaaaactagtgatagagacactcacaagaaatcaaatgaagcttctttaatccttattcgacatggtgaatccttgtggaacgaaaagaacttgttcacaggctgtgttgatgtccc

SEQ ID NO: 29213 - DNA, 406 bp, Glycine max
  Clone ID: LIB3108-018-Q1-K1-B7
cccacgcgtccggggaatgttaagatgaataagatggtggctgcaatgatgctttttcttctcatttctacgcaaatgaagagcgttgagccggatgctgcggattgcttggatggttgcagtactgcctgtgttcaaagcgactcgaggcttcaagcacggtgtgaacgcaaatgcagcattagatgccgtccagattccacaatcaaggaggacatgagttgatttgagtatgtaaagtcacagcgcaagcaagcagtgtttcatcaccatagtcttatttaagccttgcttatacatataataacattttaaggtttggctgatggtgtagtaacatctaaataaacatggatggctttttaaaaaaaaaaaaaaagggcgggcggtctagaggatccaagct

SEQ ID NO: 29214 - DNA, 150 bp, Glycine max
  Clone ID: LIB3108-018-Q1-K1-D1
tgggccaagtcctattgcactcagctgcatcacctacaagctttcagcataataaatcatggcaaaagctgcaaggcatctctagccaccccacagcgtttgtagaacttaaactacattcccatatgtaagtgctctatgagatttcat

SEQ ID NO: 29215 - DNA, 379 bp, Glycine max
  Clone ID: LIB3108-018-Q1-K1-F4
acttgacaagtaaaattggtactagcttagcaaacgatttacaatttttgaaataaaatttcaaatttgaaatatcaatcaatcatttttcttataaaaatttgcaattaattagattttcaggaagcgtcataatgggaaactcaattgatcgaaacataaaaagatcaacccaagagagacatctttgcctgttctaatcagtgaaatagtcaaatgtgatcgaagcaaaagctccagcttttactagcagttttccacggtctgcttatctagggaaaacaaaaaacactacgactgaaatataactatccggaatataacttccgctcactctttatccgttttgcaaacttcctagagttcatcatgtacaccc

SEQ ID NO: 29216 - DNA, 211 bp, Glycine max
  Clone ID: LIB3108-018-Q1-K1-H4
gtcaacaaacaagaagctgcagcttttggcaatctgggctcatcttatattattatagagaatcctacattagaagatttctgtatttggatttcgtaaaaaaaaaaaagacatcgaccaaattgttgccatgtatgaacttgataatattagtggaatttattcctcttgttgagttgaattattctgctcctcaagctcttttatctaa

SEQ ID NO: 29217 - DNA, 244 bp, Glycine max
  Clone ID: LIB3108-019-Q1-K1-A4
ccagtagtaagtactctatggttcggggctttggcgggtctcttgatagagatcaatcgttggtttccagatgcattgatattcggcttttttttcattctagttattgacacggaaaggggtgaagaagattatagatccaattaagtattaaatatatgtaattaatatgtaattaatctcctcttctttatttcgtcttttatttcttctttattttacaattgtaatagaataagttagg

SEQ ID NO: 29218 - DNA, 382 bp, Glycine max
  Clone ID: LIB3108-019-Q1-K1-H5
gaaattgctaccgtgaagggactcctagagaactttggactcacaagtccactgcctacaggggcccttgcagtaacagcactggtgggtgtcttgacggctggttttatcttgcagtcagcctcaaagaactaatcacatattccgactgcttgtgttgggtgtaaatactcgatgctcagagatttaattttgggagattaattatatcatcctctatctgaaatatttgtttcgatgaaaagaattggcaatgaagcctgaaaaatcaaagtaactacgtgttaaatatagtatgacctgaggttaccctgttgacttaaacaaagatattgattgagttgttgtaaataagggcggtcgttctaaaggatccaagctt

SEQ ID NO: 29219 - DNA, 297 bp, Glycine max
  Clone ID: LIB3108-020-Q1-K1-D4
aaaaaaccggagaaaaaaaaaaaaaaaaaaggaaaaattaaaaaaagatggaaaaccaaaaaaaaaaaaataaaaaaagaataaaattaaaaggaagaaggaataaaaaaaaataaaaaattaataaaaaaaaaaaaaaaaaaaaaaaatatattaaaaattaaaaaaggggattataataaaattttttaatatataaataaataaaaaaaataaaataaaaaaaataaaataataataaaataatataaaaaaaaaaataataataaaaaaaataaaattaataaaatataataa

SEQ ID NO: 29220 - DNA, 208 bp, Glycine max
  Clone ID: LIB3108-022-Q1-K1-B10
gactttttcctgcctcatggcgaccttgctacaggactttggcacgagtgactagggttcgtacgacatgatcattgacaacgtaaacaatactgatatttatgtggatgcttaccttgaatcgtttacaaacaatgatcctacatagattgttcagactattgagaacaactcactgaagaagattaaggacttgtacaggtaccat

SEQ ID NO: 29221 - DNA, 289 bp, Glycine max
  Clone ID: LIB3108-022-Q1-K1-B4
aaaaaagaagataagaaaaaatactacttaaaagatacaattgaaaattggagattcatcaataaattattacagacgaataaaaagagaaatagaatgacataatttagaaataaattcatcatctgtgacatctactcatcctgtgattccaaatcaacagacttattaatcaactcatgaattgagtaaactaatctaatgataatgaaaatctttcgtattattttatatattattctagaatagaattctatttctattagaaagaaaaatgaatattaaaaca

SEQ ID NO: 29222 - DNA, 333 bp, Glycine max
  unsure at all n locations
  Clone ID: LIB3108-022-Q1-K1-G3
gtgtgttttcatattccatctaatcttcaacactttgcaaaatgacaacaacggttacagaccaaagtatcaacatgaagttaaggggaagcctaaatacgttaagccattataatgctgcaagaacgacatctatacgggttgcctggaaggctcattctttacaagatgttaactgccttaaattatacttggaaagttccttgtgtttntggatgaccccgatcaagcacacagtcctggcaatttgaactactatagttttatcaggattttttagatcaactttatggggtccaggaactgactttggcacagcattgatgatttcca

SEQ ID NO: 29223 - DNA, 381 bp, Glycine max
  Clone ID: LIB3108-023-Q1-K1-A11
tttttttttttttttttttttttttttggtttttttttaaattttttttttttttttattttattaaaatatttttcttttaaacaaaaaaaaaaaataaaaaaaccccatcttaaaaaaaattacaataaaaaaatttataagaaaaaaaataaaaaaaaatttttattaaaaattataaaaccatataaataaaaaaaaaaaccttaatttacaattaaaataacctctttaatataaagggcttatttataaactaaaaaaaattctgaataaaattatataataaatcttcaattttatattaaaaaaaaaccttaattttaaaaaataaaaccaaattaattttttctaaataataaaaaaaatatttatttatat

SEQ ID NO: 29224 - DNA, 308 bp, Glycine max
  Clone ID: LIB3108-023-Q1-K1-B4
gtctaattctacattaaaagaatggttacttatagccattcgattcgttttagttctatcaattctatatgaataaatggattgtttatttcaacaaaaacaaaaaaatgaaaattttcatttttttgttttgttatagatagtctgtatctgtttgctttaaggaaaaaagaaaaaaatgaaagaaagagaaaagcccaacctacatcataataaaagactcccaagttttcagtcggaaagagaagataaaaaactaagatgaaaaaaaaaaaagaatcgaccattcgagtattcaaaatttaatg

SEQ ID NO: 29225 - DNA, 195 bp, Glycine max
  Clone ID: LIB3108-023-Q1-K1-C10
tacaactactcgattgtaaattttcattaatcaacttgtcttctactccagggccgggtatatagagaagacggcatagaatctcaactatcactggcgcgagcctttcatgccccatggttcttcttcaacgcatcagcctcacattataacgcgcatgctataaagttcttacttacacccagcctaacagtg

SEQ ID NO: 29226 - DNA, 425 bp, Glycine max
  Clone ID: LIB3108-023-Q1-K1-F2
taaaaccaaaaccttgagaaaactgaacatggcagagagtggcggaggaccccgtcagagagaaccgcttctggtgtcgccgaaggaagaggttgcaaaagcttggtggagacttaatgtgaaagagtttcatttgccaaaccaaacaaatgataatcaaaaccattgacccttcactctccgtggctttcttcataagcccagatattctttcttccttcttttttctattgaaagtttaaacgtttattttctttttatgttgagttgtgcaaacccagttagcattcttcccctttttcctctttttctttctttgaatgtcttaagtttttgttttgtgtaatgggtgtggtttgtttacaatggtgtcgtgttgaattgtgatggatttaattttgtttcaattgctggtgtgttgcttt

SEQ ID NO: 29227 - DNA, 279 bp, Glycine max
  Clone ID: LIB3108-023-Q1-K1-H2
gtaattgagtttaaactatttgacatttgatcaaatttctcttaattgcgcgtacatttgatgaaacgttggagaagacactgataagtatcaaaaggattactaattatcaatatctcttatattggctgacctttgggaacaacttgatctttcagccacatgtaaataggaaccaacacataccatgtcgctgccaaggcacccaaaacgaagcgcagtgcaaagacaaaaggattaacgggcttttcaacatcttcttcctttggaccaagctgc

SEQ ID NO: 29228 - DNA, 385 bp, Glycine max
  Clone ID: LIB3108-024-Q1-K1
ggagaagcaaatggcttcctcaatgatctcttccccagctgttaccactgtcaaccgtgccggtgccggcatggttgctccattcactggcctcaagtccatggctggcttccccaccaggaagaccaacaatgacattacctccattgctagcaacggtggaagagtgcaatgcatgcaggtgtggccaccagttggcaagaagaagtttgagactctttcctacctgccagaccttgatgatgcacaattggcaaaggaagtagaataccttcttaggaagggatggattccttgcttggaattcgagttggagcacggtttcgtgtaccgtgagcacaacaagtcaccaagatactacgatggacgctactggaccatgtgg

SEQ ID NO: 29229 - DNA, 301 bp, Glycine max
  Clone ID: LIB3108-025-Q1-K1-B8
aggccacgcgtacgaatagctgcacatcatgtgaatacagaaaaaacatggtatgtcagtgatgctacagacaaagttcttggaagactagcatcgaccattgctattgacattcgagggaaaaacttggcaacctacacacccagtgtggacatggatgcatccgtcatcgcggtaaatgcatacaaggttgctgtatctggcaaaaagaggacccaaaagctttacaggacgcaactctggacaacctgttggtatgaccgtggagacatttgcccagctgcaaaaaagaattcctgaa

SEQ ID NO: 29230 - DNA, 243 bp, Glycine max
  Clone ID: LIB3108-025-Q1-K1-F6
tgttatctgcatactatccatatcccagctgcactttattttatactttccctattgatcttcacggtccaatgtgtttacgtgtaacccataatgttctatccgattcctccgctcactaattctatagcattgactccgtacatatacaaaccataaaggtcggcccttctataggatccctgcttaccttctcttgcctgccacgttatagctctgttattgtggcccctaaattcattt

SEQ ID NO: 29231 - DNA, 288 bp, Glycine max
  unsure at all n locations
  Clone ID: LIB3108-025-Q1-K1-H4
cccacgcgttcggggagtgaccaggaatttctaccctggcgaccaacttccattatggcacgaggaaatggagccccacaactccttgctagacattcttggtgccccagagccgatgagcatgtgatgtgaagaagttgccgcgtttcagaaatgtttcctgatagattatatcttgtcttctctcttttatgaactagctaacgatttgtgtagtcaattactttgtttggttggatatttttgatgggtgagttatatccctcttgttaaaaatattattnttta

SEQ ID NO: 29232 - DNA, 163 bp, Glycine max
  Clone ID: LIB3108-026-Q1-K1-A10
tcgttcacgcgttcgaattactacatattgcttgatcttagggagcgtcctctggttaatttgtagaacttgcttcaaggaaaattcaagataccaatggctcaactcaatcacagaaagcgactactcttctatggtcttttattcccttctctttctggtt

SEQ ID NO: 29233 - DNA, 109 bp, Glycine max
  unsure at all n locations
  Clone ID: LIB3108-026-Q1-K1-C3
gaatttctaattcagcttgtatttataacatctaactttttagtcnaaaaaaaaaaagccgttggcacaaacaaaaaaaatatatccaatgtaaacaaaaaaaataaca

SEQ ID NO: 29234 - DNA, 302 bp, Glycine max
  Clone ID: LIB3108-026-Q1-K1-D9
aagcaagctatggcccatgacgctgttcaagaggctctccaacacaaagcctctatggagaagctcaagcaacctggggggtcaagcatacaggggcacaacctcttggacgccacctttgccggcagtcccctaatgatacgtcctcaacagccgcctcaccggtccgaggtccggcactcaatcacgcggaatcacgctctgcggatctgaagttagagtcgggaagttaattggaaaccgaggacgcgctcacgaggttctcaaactggatcgacctcgtgaaggaacgggcaaagcca

SEQ ID NO: 29235 - DNA, 380 bp, Glycine max
  unsure at all n locations
  Clone ID: LIB3108-026-Q1-K1-F12
nccacgcgtccggcttccagaaggctctgtcggagtttcagggccgctgctccacgctggtgggcagcctgacccgtcttcaacccaaccgcgcgaggccaccatgggctcggatagcccagccctggggaggcaggcccatggccatgacggtggaggcaatcgaggagcgcttagagggaattcccgtttacgccctcagcaacgcttccgaggagtttctcttggtctcgggctcttcctccgggaaaaaccttggcctcttctgctttaacaaggacgacgccgaggctctcctcaaccaggttacgcttatcgacccccacgctcgccagggctccaaagttgtccccgttgctttgaacaaggtgtttcagctc

SEQ ID NO: 29236 - DNA, 317 bp, Glycine max
  unsure at all n locations
  Clone ID: LIB3108-027-Q1-K1-A8
cccactcatccgaaagatttttcaagaagattacacagcagaaacaccggaggaaaaaaagacgccattcaaaacngaaaggcaacctaacaaagatcagactgaccataagggacaaaatacagaaccacagacagacaaggaaccagccaggctcaaagcacaaagactaacctacatctgaaacccaacactactaataccgattcaaattaacagcacattacaccaaccaacaactagacaacacaaaagaacttgcaaatagtaatacacaaaaccacaaaatacatcaccaacaaccaatcaatcaatca

SEQ ID NO: 29237 - DNA, 310 bp, Glycine max
  Clone ID: LIB3108-027-Q1-K1-B5
atattgaccaccatgccttcagagcagaattttcccatcagagaaactgcgacatttgagtgaagactaggctttgttttggacctctcattctatttgtttgtcttccaatagccagaagatgcaaacaatgacccgaaactaaccactttccaccagagcagaataaactttttatagtaaataagcttttaaaaagagattactgatttttataataattggtaatcgacaatatacaaatctttacacagtacaaactaattaatctctctttaaaaacttatttactataaaaagtttattctgc

SEQ ID NO: 29238 - DNA, 280 bp, Glycine max
  Clone ID: LIB3108-027-Q1-K1-E5
aaagaaacatcaacagctttaacaacaaaataaaaagaccaaaaccagggagcaacaccagaatccataaaaatcacagagggccaccctatagaccggaaaagaacatgaccagcacgaataaaacaaaggaactacggtcgaacaacaacatacaggcgaacccacaccgacaggaaaaccaagagcaagtagaacgcgcaacatacatagaacacacaggtaaaggacacgcaacaataccaaccgcaagaaacccatacacaacaagcgcaaaacc

SEQ ID NO: 29239 - DNA, 141 bp, Glycine max
  Clone ID: LIB3108-027-Q1-K1-G6
cagggaaatacaactcttttaaacaacccttaccgaacacgacacgcagcgaccatatcggaaatatcagaggctgctatggacatgcccgacaatacaaggaacaggctataaaaccatcccatccaatagaactgactt

SEQ ID NO: 29240 - DNA, 313 bp, Glycine max
  Clone ID: LIB3108-027-Q1-K2-B5
tcgctacgggccaccatgcctcctggttagaagtttccatttgttgaaaatttgacatttgaatcaggacgattctttgttttttacgccttattctatttgtttggtttccaatagcctgaaaatgcaaacaatgacccgaaacttcccactttccaccagagcagaataaactttttatagtaaataagtttttaaaaagagattactggtttttataataattggtaatcgacaatataaaaatctttacacagtacaaacaaatttatctctttttaaaaacttatttactataaaaagtttattctgc

SEQ ID NO: 29241 - DNA, 72 bp, Glycine max
  Clone ID: LIB3108-027-Q1-K2-F1
aaaaaaaaaaaaaaaaaaaataaaaaaaaaatttaaaattaaaaaataaaaaaaaaaaaaaaaaggaaaagg

SEQ ID NO: 29242 - DNA, 226 bp, Glycine max
  Clone ID: LIB3108-028-Q1-K1-D5
aaaaaacataaaaaaaaaaaaaatattttaaaaacaacagacgataataaataggcaggcttaaatacacgtgcatgcgagcaaaataactattataaaaagtcaactaagtttaaattcattaaccgtcaattaacaaacttaaaggctgtaatacctatggctttaacacatcttaaccgtctttttcgacatcgtacttttattttgtggccccataacataa

SEQ ID NO: 29243 - DNA, 398 bp, Glycine max
  unsure at all n locations
  Clone ID: LIB3108-028-Q1-K1-D9
atcctcatcaagctcatggcggtcgagtcgctcgtcttcgcaccgtttttcgccacccatggtggtcttctcttcaagatctttggagggaaataagaatcgaagttcgctgatctcgtctatttacattttgtttattttcgagtattggaagacgatgtcgctctgtattagtaggtaacaaattttcaaatgcgtcgtctacgacgacgatgatggtgtcggggacgatagtgagtaggtgagctgctctcgcatacactcctcttgggttgttggaacagctgagtttgattggatgtgctgtctaatgtgtttttttttaccgagttgctttgctggagtcagtttacctaaatgagaagagtcttgttggtttaaaaaaaaaaaaatatntt

SEQ ID NO: 29244 - DNA, 373 bp, Glycine max
  Clone ID: LIB3108-028-Q1-K1-E10
acatctatacttctaacggctacgggatatctatctgaggcaagacacatatcacatcggacatttatgacagaagatcactggtccattaacattatctgcatgttacctatatatactttttaaatttaccataccttttatagttcgataatgttttgatgtctcaaatactttattaactgatacaattgattatcgataaacccatttttttattaaataaaggtctgtttctttataatattcaaacttactttctttttcatactacgttataacttttttatattgttacctaaattaaatttatttttcatcttattttaatgtcatttctttttattatttttttcttttttttttatttatt

SEQ ID NO: 29245 - DNA, 252 bp, Glycine max
  Clone ID: LIB3108-028-Q1-K1-E9
cggacgcgtgggaaacaacatcgacactgatcattgttgacacccatataagtaaaagttacgtgtattaccacctaggcgaagatcacaaatcagagccgacatttataggacaagatcactgctccattcacatcatctgcaggttacctatatagacttttcaaagggaccaagccgcttatagttcgttaatgttctgatgtgtcaaatactctattaactgatacaaaggataatcgtcaaacccat

SEQ ID NO: 29246 - DNA, 195 bp, Glycine max
  Clone ID: LIB3108-028-Q1-K1-H2
cccacgcgtccggatattttgaatgaatttgaatgctttattttatattagtggaactccacgagtggtaagaagagacctggtttgccaatttgtgaatattttctttgctatacactggtgatggaagaatgttgtgttgtgcaaaaaaaaaaaaaataaagaaaaataaacatgaaaaaaaaaaaaaacaat

SEQ ID NO: 29247 - DNA, 340 bp, Glycine max
  Clone ID: LIB3108-028-Q1-K1-H3
atgggcctcactaacttcaccacaggctaaggcaaggttaatttggttgactccaatgttcgtcctttggaggttttcatgtgcagtattgtccgcaagatggggtatggtgaaggctttcagtggctctctcagtacattaaatagagaacaagtgtttgctctttattatcctcatgctaatgtagtctccacattagcgtatctctgctcatgtaaattggatatactttaatggtggttttactttttctttgttatgaatgagacatactagtttctatattttttggtgtcagttgccagcttgtgttgcagttctatatatattggttattaa

SEQ ID NO: 29248 - DNA, 191 bp, Glycine max
  Clone ID: LIB3108-028-Q1-K1-H4
ctttatgtatttatattgcgtaccatataagaggctcaattatgttgtgtggagtggagctcttggaaaagtgatattttccctaccccatacgttttgggggcgctttaattattctattctagttttcatttgttacatgtacttaaatttgtgttaataaattaaaattccactcaatttacacttta

SEQ ID NO: 29249 - DNA, 252 bp, Glycine max
  Clone ID: LIB3108-028-Q1-K1-H5
cccattcgtccactgtatctatctatattgcgtatttattttacaggctcacctatatattatcgggtcgagctcttttaaaagtgataggttccctaccccataccttttgggggctctttaatcattctattctacttttcatttcttacatgtacttaaatttgtgttactaaattaacattccactcaatttacactctaaataacagaattcaaggtctgtcaatctagagtatccaaacttacgta

SEQ ID NO: 29250 - DNA, 137 bp, Glycine max
  Clone ID: LIB3108-029-Q1-K1-A2
cattaataaaccatgtttgtgtaatggaaaccaaaataataaatgcaatcatgcaggtttgaactttttaaaaaaaaaaaaaagggaaaaaaaaaaaaaaaaaaaaaaaaaaaaaaaaaataaaaaaaaaataaaaa

SEQ ID NO: 29251 - DNA, 63 bp, Glycine max
  Clone ID: LIB3108-029-Q1-K1-G5
cccacgcgtccgattgatgacaattcttttttggttaatttaatatgacaatttatatggaag

SEQ ID NO: 29252 - DNA, 325 bp, Glycine max
  Clone ID: LIB3108-029-Q1-K1-H5
cccacgcgtccggtcacccacagtgtatgcaatacgctgcttatctttattgatgaatgacatggcacaagaagctcttggggatgcaatgcaagcccaagtggtatctccagagtggcctactgctttgtatcttcatgcagcttgtcttttcagcctcggaatggaaaatgatgcacaagagactctcaaagatgggactaacatggaaggcagaaaaaacaaaaactgaaaattttgtatagatttttccttgtcttttgttgtcttaagcattatttaatttcatgccctttaaagtctttgttaggctttgcctccaaaa

SEQ ID NO: 29253 - DNA, 108 bp, Glycine max
  Clone ID: LIB3108-030-Q1-K1-B6
cattctcgttgttggtctgcgtagttttttgtttggggattattagtccttttttgtgttggaagagaaacaattcagactattaaaatatttttgttgttttaaaaa

SEQ ID NO: 29254 - DNA, 325 bp, Glycine max
  Clone ID: LIB3108-030-Q1-K1-C8
acgcccacgcgtacggtcagatggtagcttccttgatgatgagcaaatagatagtggctgggttgtcacctgtgttgctcaacctaggtcagacgttgtcattgagacacacaatgagggagagatcgaatgatcaatatatatatatatgatgtaatcttatccattgctgttctaattctatctatatcttggatctactatttagttatagtgatttggcatatttgtgacaaatagtgagtttattacttttgtcatatttgtgaaaacaagtgaaattgttgcaccttaattcattaaaaaaaaaaaacaataaataaaa

SEQ ID NO: 29255 - DNA, 172 bp, Glycine max
  Clone ID: LIB3108-030-Q1-K1-H6
acgcgcacgcgttcgaattgttgtccctgactggcgtgggcgtctgtgtatgaatgtgtgtgcgagaaaatggaaactgtgatgggactgatgcggaggattgctacgatacacacagaaacagctctgtcagcgcttctgagccttatgcctgacaactaataccatctcc

SEQ ID NO: 29256 - DNA, 145 bp, Glycine max
  unsure at all n locations
  Clone ID: LIB3108-031-Q1-K1-A1
tttttttttttatttgtttttttttaaaggggggtttttttttnttttttttttttnnnnaaaaaaaaaaaaattttttgtgttaaaaaaaaaaaaaaattttttttttttttaatttaaaaaatatattttttttaatgggncc

SEQ ID NO: 29257 - DNA, 256 bp, Glycine max
  unsure at all n locations
  Clone ID: LIB3108-031-Q1-K1-A9
cccacgcgtccgcccacgcgtccgggaacctacagtttctactgttcgcctcaccgaggagctggtatggtgggaaaagtcaccgttaattaattatatattgtctcctacgtctaagttctcatatgcttgttttcctagaagagcctaattcatctttcttgttagggcctatgggatgaatcaacaatataatgcctttgtgtnaaaaaaaaaaaaaaaaaataaaaataaaaataattaaataaaaatataa

SEQ ID NO: 29258 - DNA, 146 bp, Glycine max
  Clone ID: LIB3108-031-Q1-K1-B10
gtacttaccaaacttaataatgataattgcctgtgttaatccaacaaagaatgggtcgttgaaactaaagaaaaacagactaagattggcccaaactgaaaaaatacaaaaaaatggcttgagatcaagcctaaccacccaaaacg

SEQ ID NO: 29259 - DNA, 315 bp, Glycine max
  Clone ID: LIB3108-031-Q1-K1-B6
tatatctctataatttgcttctattctctgagaaagttcttcctgaatcttgaaggtgcttcaacacccttcttaaggaattgaagagcatggaaagtgaccagaaagtccaaatagcttcttggagtgaggtcatgtcaggtgctggggtggagtttcatcaaggggctcctaatttgggacaaggtggtggtggtggccttcagagacaacctagtatgaccaagaacaattgtctttgttcttcaaccacacattctggttcgtttcgttgccggcttcaccgctccccttgccttcagaggaccaaaagca

SEQ ID NO: 29260 - DNA, 207 bp, Glycine max
  Clone ID: LIB3108-031-Q1-K1-B8
cccacgcgtccgaagcccccaggcttttaagtgtgaaaaatttgcaagagcatttgtggccgccaccccactttgtttgtttgtacttaaactacattcccatttgtttttgctttttgagatttcatcatcctgtatttttggtttctgttttcggacttcaatggaaattaatggatgagaactaatgaataagctattgtgttg

SEQ ID NO: 29261 - DNA, 395 bp, Glycine max
  Clone ID: LIB3108-031-Q1-K1-C11
taaattctctgtctacttcaccaagcacttttggttgcagctttggttgatttccaagatggtgtttcctctcctatctatctttgctttactcaatcttgcagtggtggcaacccatgcagaaaccttgccccctgaagtttactggaagtcgaagcttcccaccactccaatgccgaaagccattacagatatccttcacccagatttggcagaagacaaaagcacctctgtggccgtaggaaaggggggcgtaaacgttaacgcagggaaaacaaagccaggaggcacatcagtgaacgtaagaaaaggaggagtgaacgtgaacacagggaaaggaaagcccaacaaaggcacatcagtgaacgtaggcaaaggtggagtgaacgtaaaca

SEQ ID NO: 29262 - DNA, 384 bp, Glycine max
  Clone ID: LIB3108-031-Q1-K1-D3
taaaaaacaaggacatccactgtctctgtttttccgtgttgacgcggtaagtgaatgttcgagaaggtgggtttaagcgcacatcagaaacagacatctctcaaaaccagtgggcgtttcattgaatcttcttcatcactgccaaaaacgacaaaccaaaattttaaaacataaatctccaaccccattttctcacacacactctctttttctcttccaattacaacacaatcagtctgagattcgccaccgaaaaacctctcaccatggtttctcgccatttggtttcgctcttcctctgtttcctctgtttcgagatctctgtttcatcaattcgattgcccggtttggaccaagacgccaaagccacgcatggatcggtgc

SEQ ID NO: 29263 - DNA, 307 bp, Glycine max
  Clone ID: LIB3108-031-Q1-K1-D5
ccggggcgagccacgcgtccgcaaaagaagagcgtatttttgcttcatgggaaaagatgaagaaacatgatgagaaaggtgaaatagagcggcatgttgaggaagcacaacaatctggtgtggctaatgggacacatactgcaagtaatggtggtccaactgcatcattacgtcaaggacccggtgctcaagaagcagctgctcctaacaatattttgttcatagagaatctgccttatgaaactactgctaggatgcttgaaatgctctttaaacaatacccatgttataacgaagtgcgcttgat

SEQ ID NO: 29264 - DNA, 62 bp, Glycine max
  unsure at all n locations
  Clone ID: LIB3108-031-Q1-K1-G3
tgccaataaaattccttaatttacatcttannanaataaaaaaaaaaaaaaaaaaagagaaa

SEQ ID NO: 29265 - DNA, 103 bp, Glycine max
  Clone ID: LIB3108-032-Q1-K1-A2
aatttttgcgattttgtttacctttcggttaatggaacatggttgatagataaaaatgactatggagccgcttatgccttctccaaaccctcctgagactatt

SEQ ID NO: 29266 - DNA, 281 bp, Glycine max
  Clone ID: LIB3108-032-Q1-K1-D9
cgcacgcgtgcgtcatcctggaactaacccttttatgcaactactagttagcaaggccatagggtgggttcccaattggatctgtggacactgcctatcagaccaacatcgctgctcaattacaccatgcatctcgagcaccattagaatgagaccgtatataaactaaatcatcatgtgctgtgagcagtgcaagttctaccttctctagctagatagatacagctagaatgtcaacctacctatgtgaactgatcacatctgcctacctacataaagag

SEQ ID NO: 29267 - DNA, 402 bp, Glycine max
  Clone ID: LIB3108-032-Q1-K1-F12
gcgtccgcccaagcgttcggctgagctgcaggtcaaggttctcactactgggctgttggccacgttattgatatatggattctgcggtcacgcactcgtgacaagaaagggacccttagacaaccatgatgatcaccttgctgaccctatgaacaacaatgcctgggcctataccacaaactaagtatacggaaagtgatggaaaatgagaaaacctgaaacaatgataaactatgactctagtagaaatctcatggagccattgagtgtaatatatattcgaagcataccttacttgccaagggacagaactactggctgtcgatctataggatccactgttacgtacgcatgcatactaccacctaccccttctatagtgaaacctaaagtcaacttact

SEQ ID NO: 29268 - DNA, 261 bp, Glycine max
  Clone ID: LIB3108-032-Q1-K1-G4
atcagactttactcaaaaaaaaaattaacagtttaaacgatcgataacagtgtacagatcaagggattcatggggttctaaaacagaatttaattacaaaacaatgattaaaataatacggggaggctcttctaaaggatccaagattactcacacttccatgggactctttaactattcttttggggaacttaacatcaattaactggccgatgttttaaaacgacttaactggaaaaacctgggactacacccagctta

SEQ ID NO: 29269 - DNA, 285 bp, Glycine max
  Clone ID: LIB3108-034-QI-K1-A3
tcgttgaaggtggccagactggacccatgtaatttgactcaggcttgcatactgcatacctattgtgtcgtgccacctaaattcaattgactgtccgacgtggtacatcgtcgctactgggaaatccctggcggaacccaacttagatcgattcgcagcgctatattaattattacatgctgtcggaatacgaagatgttacgactgatcgacttgtaaaacacattcacatactacctgtcgaatggaacgcgcccagtatcagcgcattaagcgcagagcatg

SEQ ID NO: 29270 - DNA, 370 bp, Glycine max
  Clone ID: LIB3108-034-QI-K1-B4
cgagattcctagcggcgtggatgcagggaaaatctccatgagcgaagaagaccttctcaatgcggctggtgagacttacagcgttactttggatgccaagggaacctacagtttctactgttcgcctcaccaaggagctggtatggtgggaaaagtcaccgttaattaattatatattgtctcctacgtctaagttctcatatgcttgttttcctagaagagcctaattcatctttcttgttagggcctatgggatgaatcaacaatataatgcctttgagtaattcatttacctcctttgctttcttgatttatatcggactgataagtttttcttttcatattatgtaaaaatcttttagtttttatt

SEQ ID NO: 29271 - DNA, 207 bp, Glycine max
  Clone ID: LIB3108-034-QI-K1-C2
tttaatcgtctcgcctctattctctacgcgtttattggatttgaggaattcaactgtcagggtgatgttgaacctaatactatattatactcttcctatcatgaagtatagtctgaactaaaaagggcggccgtgctagaggatgcaagcttacgtacgcttgcatacgacgtcatagctcatctatagtgtaacctaaattcaatt

SEQ ID NO: 29272 - DNA, 132 bp, Glycine max
  Clone ID: LIB3108-035-QI-K1-B3
ctttcgttttagaaggtccaatcggattacgggaaaatagcagaatgtgagtaagttatagtagaatctagaattaggccaggggggggaaaattttcaaaagacactgaaaaaacgttatctcgacccaaa

SEQ ID NO: 29273 - DNA, 374 bp, Glycine max
  unsure at all n locations
  Clone ID: LIB3108-035-QI-K1-D10
gnggcgcgcaaaaaccgggggaacagcaatcgggaaggccttttcaaagctggcaaagaacattcaagtgctgtcaagttcctttgtcgataagcaagaccaatacactgtggaaggagtgcagaatcttggagacaaagcagtgatgcgtcataggctaaatttcagaactgcagtattttactgccatgaagtccgcgaaacaacagctttcatggttccattggtggctggtgatggaaccaaaactcatgcacttgctattagccactcaaatacttctggaatgaatcatcaaatgcttcatcaacttatgggagttgatcctggacctaacccttgttgccatttacctggaagcaaggccattttat

SEQ ID NO: 29274 - DNA, 172 bp, Glycine max
  Clone ID: LIB3108-035-QI-K1-F7
cccacgcgtgcgtacgaacgctccagcggatgctatcgacaggcgtccgatggagattcgtgccgggcatcagggtgatgggcgatggattaggtggaacctgatggctccgcatggatggacccaacgcatggcgtgatgatcatatcaggccagcaggcgcctcatttgg

SEQ ID NO: 29275 - DNA, 402 bp, Glycine max
  Clone ID: LIB3108-036-QI-K1-A11
aaaaaacttgcccctgcccccaccagtgggttcctgaaagtgtggtaacccttgtagggatggtgaacgaggctagtgctaacatcccaaattgggacacatcgtaaatattttccacctcatcatgatgatatcccaagtgcacattttaaaaagaaaaaaaattgacaatgagtcttttttttttttttttttatcacgagtttagtcttattagatggatagatgaatgtaagcaataccattttatatgacaattaaatacaggataaatatttatatttaaaaaaaactacaaaaaatgactgaatattgaaaaaataaagattataaaaaataaacaatggggcggccggtctttaggacccaagtttacttacgcgtgcttgccacgttatacct

SEQ ID NO: 29276 - DNA, 167 bp, Glycine max
  Clone ID: LIB3108-036-QI-K1-A5
cactttgtttgttgtacttaaactacattcccatttgtttttgctttatgagatttcatcatcctgtatttttggtttctgttttcggacttcaatggaaattaatggatgagaactaatgaataaaaaaaaaaaaataaaaaaaaaaaaaaaaaaaaaattataat

SEQ ID NO: 29277 - DNA, 177 bp, Glycine max
  Clone ID: LIB3108-036-QI-K1-D12
aatattaatttttactttttcttcattttttctattttttaagattacaatacttaattcaatggccaccaatttacaacattattatttttaatatcttgtacttacaaaacttatttgattttcaattgataaaggttttcaaataccttttttattgaaaagaaggatttttta

SEQ ID NO: 29278 - DNA, 66 bp, Glycine max
  Clone ID: LIB3108-036-QI-K1-D2
accaggaacaaaaaaaaaaaaaaaaaaaaaaaaaaaaaaaaaaaaaaaaaaaaaaaaaaggggggg

SEQ ID NO: 29279 - DNA, 439 bp, Glycine max
  Clone ID: LIB3108-036-QI-K1-D4
cccacgcgtccgcccacgcgtccgcccacgcgtccgcaaagagtgtgtgttgtgtggtttggtttggtttttcacttttcttcatctttttgcgagaagacacacacacagagagagatggctacgacgaggattgaggcagagaagaagccgaagacgaagatcgtgtgcactctgggccccgcatcacggtcggtcccaatgatcgagaagcttctgcgagcaggcatgaacgtggcgcgcttcaacttctcccatgggtcccacgagtaccaccaggaaaccctcgacaacctccgcgccgccatggagaacaccggtattctctgcgccgtcatgctcgacaccaaggggcctgagattcgaactggttttctcaaggacggtaagcctatccaactgatacaaggtaatgaaataaccatttccactgactatg

SEQ ID NO: 29280 - DNA, 315 bp, Glycine max
  Clone ID: LIB3108-036-QI-K1-E1
caacccactaggctttggtaaggatgagaagtccttgaaggatttgaagctcaaggaagtgaagaatggaaggttggctatgttggcaatcttgggttactttgttcaagctcttgtcacaggtgttggcccataccaaaacctcctagatcatttggctgaccccgtgcacaacaacatcttgaccagtctcaagttccactgaatgtattatatgttattttacatattctttaaaaaaaaaacaaaaaaaaaaaaaaaaaaaaaaaaacaaaaaaaagaaaaaaaaaaaaaaaaaaaaaaaaaaaaaattaa

SEQ ID NO: 29281 - DNA, 137 bp, Glycine max
  Clone ID: LIB3108-036-QI-K1-E4
agatttagggaatcgagtactatactagtaataaattgtacaaaaaataaaaatataagtggtataaatataaaaagaacaaacacaaattttatgtgattagtcgcggtatttaaaataaaaaatgaaagtagaca

SEQ ID NO: 29282 - DNA, 137 bp, Glycine max
  Clone ID: LIB3108-036-QI-K1-E8
acatttatggaatcgattactatactagtaataaattgtacaaaaaataaaaatataaatagtataaatataaaaagaacaaacacaaattttatgtgattagtcgcggtatttaaaataaaaaatgaaagtataca

SEQ ID NO: 29283 - DNA, 319 bp, Glycine max
  Clone ID: LIB3108-036-QI-K1-F12
ttttatttttttaatttttatttttttttttctggagtgttttttttttttttggaagcgaaaattaaaaccataattccattgcttacatttccttaaaaaaacaaacttatatactttctttttacatgtcaccaatttttttgaaaaaaaaaacaaccccaaccccaatgttttttccaaaaaatccaaatgcaaatgtgtaaaaaactgtaaatccaaccgattcaacagtttgtaagcctaatacctttaacttcaaatttaaccatgcattgctactttcctttttgcttataaaaccattcaaaaccttcca

SEQ ID NO: 29284 - DNA, 405 bp, Glycine max
  Clone ID: LIB3108-036-QI-K1-G5
tctctcttgtatctctctcactgggtgggaatcaactttttgggtgtccacttaatattttccaaggtagacgcgtaaaaaattggatgtggatccgtaggttggttttggttcccaattagcatgtgatctaactcgtttgcaaacttgtccatagctttggcgggcaaccaaattggtaataatatgccttcttctccttttgcattcttatgtgccatcagatagaatactgcaggaaagggtccagccccacctttggccactccaccatataatgccctaccccacccaaaatcaatttgtttgaaaccaaaatgtctcaaatctgacacaataaaagatctcacggtggtaaacaagcatcttccattagtcaccattagatctgccacagaatgcatg

SEQ ID NO: 29285 - DNA, 409 bp, Glycine max
  Clone ID: LIB3108-036-QI-K1-H10
aaaccttacgcattccatttctctctattcgctctctttgagtcacaacaacatggccgaacgtggaggcggagaccgtgccggtttcggtcgcggctttggcggtcgtggacgcggcggcgacaggggacgagggcggcgcagggcaggagggcgccgcgacgaggaggagaagtgggtcccagtgacgaagctggggcgcctggtgaaggaggggaaaattcggagcctggagcagatctacctacactcgctcccaatcaaggagcaccaaatcatttttacaccctcgtggggcccaccctgaaggacgaggtgatgaagatcatgcccgtccagaagcagacccgcgccggtcagcgaacccgcttcaaggccttcgtggtggtcggcgacaacaacggccacg

SEQ ID NO: 29286 - DNA, 116 bp, Glycine max
  Clone ID: LIB3108-036-QI-K1-H6
aaaaaaaaaaaaaggagaaaaagaaaaaaaaaaaaagggcgatcgatctgaggatcgaggattacgtacacttgcatgcgacatataactcttcatagcgtgaactaagttcaatt

SEQ ID NO: 29287 - DNA, 437 bp, Glycine max
  unsure at all n locations
  Clone ID: LIB3108-037-QI-K1-B8
tagaaatgcagatttttccctggcaaatgtgacaaaggcaaatttaagcaatgctaacttggaaggtgcacttgcaacaggaaatacatcttttaagggatcaaatattacaggcgctgacttcacggatgtaccactaagagaagatcaacgtgaatacctctgcaaagttgctgatggagtgaacccaacaactggaaatgctacgcgtgatacattgttctgcaattagtattccattgctgaatactcactccaagaccttcaaatgtttgcatagaatggtttcatagctaacanaatactcccttcatgttgctggaatcttgtatttacatagcaccacaatttagattatttcaaatttccattccccatacacacacttgacaataacattgtgatgtaatgctcataaccagcctacctatgttata

SEQ ID NO: 29288 - DNA, 164 bp, Glycine max
  Clone ID: LIB3108-037-QI-K1-E4
aagacattgagatgatatggtgccagtagcctgttccaaagttttccttctcatctggtgattcctagcaacaccttgccaccattccaattatatctagatggaactgccccgagcatggctgttgtgtccagtacttgataaaatttgtttatttgcttaaa

SEQ ID NO: 29289 - DNA, 360 bp, Glycine max
  unsure at all n locations
  Clone ID: LIB3108-038-QI-K1-D1
ctctctgatagcanaaaaaaaaaaaaaaaataaaaaattaaaaaaaaaaaaaaaaaaaaaattgaaaagttaaaaaaaaaaaaaaaaaaaaaaaaaaaaaaaaaaaaaaaaaaaaaaaaaaaaaaaaaaaaaaaaaaaataaaaaaaaaaaaaaaaaaaaaatataaaaaaaaattaaaaataaaaaaaaaaaaaaaaaaaaaaaatgggggcttttttaaaaaatataaatttttttaacgatgaaattaaatggaaatttttttttttttgaaaataattaataaatatattgtctctctattaaaacctcggaattgaaaaaaaactgggaatttcaaaataaaatttttttttaaa

SEQ ID NO: 29290 - DNA, 314 bp, Glycine max
  Clone ID: LIB3108-038-QI-K1-D10
ttagtaaccgccgccagtgtgctggaattctccctttccatcgtcctccccttttttttctaccacttccatttaatattatacgtagagttaacattatatgtctcccttctcatgctgaccttgatagaaatgtcaaagtaaaaaataaactcgacacacattcaaattttgaactttattatcatattcatccaaacattgttgcaaactttcacaaattacaatcactcattgatcttttacataaaattcttgaaaaaccacttttcaatcaacttacgacaatatatcatcctgattatattttaaac

SEQ ID NO: 29291 - DNA, 454 bp, Glycine max
  unsure at all n locations
  Clone ID: LIB3108-038-QI-K1-E8
cccacgcgtccgtactgactaagagtgcatgcaagagcaatggctccaccaacgggtaggagcttaggtatgttccttccacctggcttgtcagaagaatcctgattttcagtctccaacaagtcactgatcgtgttttccagagacctcacattatccatggttactttagtgttgatcttagcagcacgtgcacagggtgacaaagcggtaccagaagccctttgtttctcatatgtccgtagtcctggatcaaacttcttgacagctccccacataccctgtcgaactccaagcttagcaatttcccagggtatgcccatatcttcgtgatgaaacaacaacacttcacatgaagtcagctggtcatcttttcttgatttaactgcacgaatacaccagcttgaataaaantaaatcaactcgttaggctttgtgcggtatatgtatgata

SEQ ID NO: 29292 - DNA, 327 bp, Glycine max
  Clone ID: LIB3108-038-QI-K1-G6
tttagttatctactcttttctgcatgtttgttctctcaacgactcctccgcgaaagaatagtattcaatattttggttgggttgaatcccggggttgaagcgttgcagacatcacggctattctaagagtgtctcgctccctcattcatgtccgatctgtacgacggaggacgggtagttgcgtaactgccgttaacccttcgccgcacggtgggcgtggtgctttgccttctgaaggtggtagcccttcagacttgctcttcctcgctggtggtggtttcttctagtttcttcactcttttcattacttttagcctgcatagtttt

SEQ ID NO: 29293 - DNA, 219 bp, Glycine max
  Clone ID: LIB3108-040-QI-K1-C1
aacggacatcgagagggccacaactgattgtcgactaacacacgtgctgacggctagggcactagcgatgatactggttggatgccttgctctgtgtgtgaacactggactacatgcttgttgagctacgagacgtgcagcagcttcaagaaagcgagctgagggtctacttaatgaagacagttacgatacccgacttgcggaacctgcgactgctca

SEQ ID NO: 29294 - DNA, 335 bp, Glycine max
  Clone ID: LIB3108-040-QI-K1-D2
tgatcttgcaagcgaggggattgaacttatcggcattaacaaccgtaacctggaaacatttgagctggatatcaggatcacaaagaagcttcttgaaggagagcgaggcaaaataatccgtgagagaggcataactatggttggagaatctggtctgttcacccatgatgatattgcctatgttaaggaagctggtgttaaagctatattgcgtggagagtatattgtaaaacaaaatgatcctgggaagggcatcagcagtctctgtggcatagacatctctttggcgtgaagtgagctatctgtcttgagatatataggcattggacatgaca

SEQ ID NO: 29295 - DNA, 381 bp, Glycine max
  Clone ID: LIB3108-040-QI-K1-G9
ccgcttactaaagggaacaaacgctggagccgcaccgccacgcctgccgctctagcaacgtagttcatcccccgggctgcgagaaactccgccggggaagattcacgccaagaccatgcgttgcatgtccggcattctccacttcatctccaactccaattcccgtcgctctcgccgcttcctcacattcggaaagagccgcattaataagaaccccgccgacgccggaaattcgaagccagccgccgatgaacggaggctgtcgtccgacgtgccgaggagtccgactttgccggcggagattcggctatcgagtgttaaggcgccttcggtggagagacgccgcgaggcgccggcgctagtggctaggctgatggggct

SEQ ID NO: 29296 - DNA, 273 bp, Glycine max
  Clone ID: LIB3108-040-QI-K1-H2
cccacgcgtgcgctttttgagatgtggcttctgagcctcagaacaaccactcactgcggcagagcatgcctagtttagatctctgttccatgtcagcatatccattcttattattatttcctgttcctttcaatgcttccccccttcttctagggttctcttccacctgattcatttcactctcggccaaggtggaagcacttcactggctcatgtaggatttcgacttgagaccatttctttcctttctttctttctcattacagtaaaact

SEQ ID NO: 29297 - DNA, 317 bp, Glycine max
  Clone ID: LIB3108-041-Q1-K1-A5
cattttctcactcttgtgggttagaattgatccattcaccacaagggtcactggtcctgatgttgaggagtgtggcattaactgctagaagaccaaaagacaagtgtagtgtattgtgttttgggttgtaattataattgttgatttgtagccgatatgtttaagttatgtgcagatgtttatagaagatgcataagaaaacaaactagaaccgaactttgaggtattgttttatttgtaatactaacgtgccttccagttttctggagtagctatgtattataagctattcggaggttcacattttgtatgtataa

SEQ ID NO: 29298 - DNA, 375 bp, Glycine max
  Clone ID: LIB3108-041-Q1-K1-C8
ccttacgagttagggctgtgggtgcgggatgtcactagaataaggtcattttgtgaaggactatgcatagtattacaccaggacctcggcagaatacgttggtggtagttagaccaaataaccaaacatcgcgtaaattcatctttccactctaacaccatttgataggtaagctgtagaatgctggaacttatgggccgtagtttacatgagcacgtgctattgtcacaattaaatcaacttatgagacacgagctactattgcgagccatagcgcgctcatcaatgccgtatcgaaatgatcggagcgcaagatcttctgatgcatatgtcatgaaagacgccaatattatgccggcaacatccatcaaacct

SEQ ID NO: 29299 - DNA, 395 bp, Glycine max
  Clone ID: LIB3108-041-Q1-K1-H10
tatcatcttacatatttctactgaagcctagtggttgtggaaataaagagttaccatgtggatcacactcatcataccaaacgattttattctatgtttccatatacctaatagctctaggaaatggaggataccaacctaacattgctacatttggggctgatcaatttgatgaaggagatcccagggaacaacattcaaaaattgtatttttcagctatttttatttggctttgaacattgggtcactcttctccaacaccatattgaattattttgaggatgatggactatggactttggggttctgggcttcagctggctctgctgctctggcattgattttgtttctttgtggcacacgaaggtatagatactttaagcctaatggaaac

SEQ ID NO: 29300 - DNA, 392 bp, Glycine max
  Clone ID: LIB3108-042-Q1-K1-C7
cgacccatgcggacccacgcgcgcgcggcacaaagcaaagctcatccttgagtgaagaaatggcagcagcttcggccatggctctctcatccgcatccttggctggcaaggccgtgaagctgggcccatcagccccagaagtgggaagggtgagcatgaggaagaccgtcaccaagcaggtctcctcaggaagcccatggtacggcccagaccgagtcaagtacttgggcccattctctggcgagcccccgacctacctaaccggtgagttcccaggcgactacggctgggacactgctgggctttccgcagacccagaaaccttcgccaagaaccgtgaactcgaagtgatccactcgaggtgggccatgctcggagccttgggctgcgtc

SEQ ID NO: 29301 - DNA, 53 bp, Glycine max
  Clone ID: LIB3108-042-Q1-K1-D1
ggctaattaaattgcttatgttttggtaaaaaaaaatgacaactaaagataac

SEQ ID NO: 29302 - DNA, 415 bp, Glycine max
  Clone ID: LIB3108-042-Q1-K1-D2
ggcatcatcaagtgagtaacaatttctattctatctcgtcatgaaaccctaatccactcgcttctcgatctcggttgagccattcttccacgctcgtcttcgctctccatctgttcaaagatccgtccgtcacgagcgttggttatacgatggatgggaacaaggacgacgcgttgaaatgtttgagtatcggcaaagaggcgttggaaagcggcgatcggtcacgtgcgttgaagttcgtaacgaatgcacgtcgcctcgaccccaccctccccgtcgacgatctattgtccacgatagacgcggatgcatgggatcagcctgccgccgcggaggcggctgagtccacaaagtctcccgatcagccttctatccgccggagggctgctagagcggccgctctagaggatccaag

SEQ ID NO: 29303 - DNA, 352 bp, Glycine max
  Clone ID: LIB3108-042-Q1-K1-F5
caagtctgagatcaacttcgagctatatgggatatcacagtctgaagtcatttaacactgttttgctagcataatcttctaaagctggcatcatcctatctacttggcttgttcggcatgaatgattcgcagtcagctgctacactgatacattctactacttataagatacaacatctgtgcatggcattcgctaaactccaatgttatagctctgctactataaacttggaacggacagaactataggcacatacgaatcgcaatgacaaatcctagaataggcgctgttatgaatcggaagaccaagataaagagatagaattcaaaacgaggcaagctccttagatac

SEQ ID NO: 29304 - DNA, 325 bp, Glycine max
  Clone ID: LIB3108-042-Q1-K1-F7
tatagactaaggctagtgattgtgcttttgtcaattcatgaggaccttgcgggtcatggacattcgattgctgcaacggcgctgaccagacctactgcccgaatggaaatctttatcgtgttgttgctgagaccagtaatagctacttcgagagtgcaggcatggactgttcatgagctcactatgatgggtagtgctagagtggcactaactgaacttgtacggtctggactagcgtacattacggtatatgtatgggactacgatacccatgtggttgtcggttctaatgtccggagaatgggacacacacttgaataagtgt

SEQ ID NO: 29305 - DNA, 206 bp, Glycine max
  Clone ID: LIB3108-043-Q1-K1-A3
gtacttaaactacagttccatttgtttttgctttttgagatttcatcatcctgtatttttggtttctgttttcggacttcaatggaaattaatggatgagaactaatgaataagctattgtgttgtgttgctttgcttcaaaaaaaaaaaacgattgaaaagcataaatataccataaacattgtaaatattcaagcaattaatgg

SEQ ID NO: 29306 - DNA, 227 bp, Glycine max
  Clone ID: LIB3108-043-Q1-K1-B9
acgcgtccgcccacgcgttcggtcagaactactctgattagctaactagacttagctagcaaatggggcagcgtgctcgctcctcttgagccgcttaaacggttcaaaaatcacgccaatgagaggcaccgcttaggcacaaaccctgatgaagctgcttgcaagtccttcattcaaaaagctcacagaaacatagcacgttgggtgtatctgagcacccttaacac

SEQ ID NO: 29307 - DNA, 386 bp, Glycine max
  Clone ID: LIB3108-043-Q1-K1-C7
cttcctgtctgtaggatcgaaggactggaggagaatcctcccgttcccatcgcgattatcggctagagcataaggactcaaaattagataaaaggcagataggtggagagatcactgatcaaagtgaagatgacagtactactagtagtagactgcaccctcaaccccatagatcgagataactgtagtatgataactgaaaagcaatgtgtcatattatctttcttcctagtagtttgccaatatttatttttacttgaatgatgaaagaagcaattagttttccctctcatttgcataatgtcttcagttgtaacctacctcaatttgggattcttttgtatactctgattcattactataaaattcaaaattatttgtgtttc

SEQ ID NO: 29308 - DNA, 131 bp, Glycine max
  Clone ID: LIB3108-043-Q1-K1-D6
aatgtttacaaatcgtctctgctgcagcggttaaggatgccatcacatctggaatgtctatacttgcaccatgacatgacgtcaactaacataagttgctttaaattatccacaataactgatcttacatt

SEQ ID NO: 29309 - DNA, 383 bp, Glycine max
  unsure at all n locations
  Clone ID: LIB3108-043-Q1-K1-F11
ntccgccacgcgtccgaagccaagctgagactgttgtttgaggtagctccgttggggttcttgattgaaaaagccggaggttacagcagtgatggtcatcagtctgtgctagacaaagtcatcactaacattgatgagagaactcaagttgcttatggatccaagaatgagatcatccggtttgaagaaaccctgtatggtaaatccaggctcaaggatggtgtagcttgtggagcagctgcttaatctgtaaacctgcaattcatggtctattttatctgcttttagaaaaaaagatatatgctatatcttcagacaagtaccttgcaattagtcacatatttctgntaatcactataataaccaaagtaaattatgttggt

SEQ ID NO: 29310 - DNA, 411 bp, Glycine max
  Clone ID: LIB3108-043-Q1-K1-G5
taactaagcatatatagcgtgtaatacagtttgaaaaaaagtgttgtgtagagagaaatggctaggtggtgcatcttggtggttcttgcccttgtcgtggttgcaagtgccagaaacatgcccaatgacgcatgtttggaggaccagaagaacttcctcgggtatgggttctctggagttggcaacaatgggcttccctttggaggagtgggttctggttttgatggtaatatgggtggaccttctgggctcggtggatttgtatgattctgtgagcctagcgatctcggaagtcttggcaacggtgaatggcccaaccttactttgccttgagagttgagaccacacaccttcttgtttcttaattttggtcgctattatcatatcctatatagtgtttcttttactgtt

SEQ ID NO: 29311 - DNA, 384 bp, Glycine max
  Clone ID: LIB3108-043-Q1-K1-H4
tagagaatgatgatgaagtctgctatgtgtgcagtggtggttgtagcacttcttcttctggcggaggtggggcccatggctgaggctgtgacatgcaccccaacagagttgagtccgtgtcttccagcaatcacttccggtgctaaaccttccaatgcttgttgcacgaagctgaagcagcaaaaaccatgcttatgtggctacctcaaaaacgctagcttgaagcagtatgttaactctcctaatgcccgaaaaaccgttgcttcttgtgggattccctttccaacttgttaattaattaagccttcttataattaaagtgtgggatatatatatatatatatatatatatatatatatataaacaggtgtaattatacacac

SEQ ID NO: 29312 - DNA, 302 bp, Glycine max
  Clone ID: LIB3108-044-Q1-K1-C10
cggacgcgtgggtgacttttttgaaataaatcaaacatatggagtttttgtaacgataattggtatctttattacactagctaaaacttatttattcttattcctttctatcgcaacaagatggactttgcctaggctaagaatagatcaattattaaatcttgggtggaaatttcttttacccatttctctcggcaatctattattaacaacttcgtctcaactgttttcactgtaaaaaaaagtggaccttatatattcataacttgtgtcaaacaaaagaaaaataataatattaaaaa

SEQ ID NO: 29313 - DNA, 292 bp, Glycine max
  Clone ID: LIB3108-044-Q1-K1-C11
gtggaggatacggcggtggtagagaccgtggttacggtggtgatggtggttctcgctactctcgcggtggggaaggcggtggatccgatggaaactggagaaattaggcatatgaccctgtaaattagggtttatgattaagttcaattattttaaggtgttgtctgtgtgtggtttaagtttcggtatctgtgttggtttcgtttcgtgttcctgtggttttcgtttttgacctacaattctagttgtgtttatagtcgatcgaatgaaatgatagtaagaaattatcgca

SEQ ID NO: 29314 - DNA, 119 bp, Glycine max
  Clone ID: LIB3108-044-Q1-K1-G9
ttttttttgttttttttttttatttttttatttaatatttttttttaatttattttatttaatattttaattaaaaaatatttcttataatataattactttaaaaaaaataagtatat

SEQ ID NO: 29315 - DNA, 215 bp, Glycine max
  Clone ID: LIB3108-044-Q1-K1-H9
gggggtttgataatttgcatattgacctgtagacaaggcctgagttaggaatcgtgttgtttgaaactggtagagttattatgacattttgtttttacagcagttattatgacattgcaatattgtaatcgtgtatatgtatattttatgtatgctagctcgtgggatttgtaataaattttgtttaagttaaaaaaaataaaataaataatatt

SEQ ID NO: 29316 - DNA, 387 bp, Glycine max
  unsure at all n locations
  Clone ID: LIB3108-045-Q1-K1-A1
ttcctcgggntcgactccacgccgnntccgcccacgctnngtccgcccacgcccgtctcgttttcaatatgcccgtcaggtcagggaagcctaaatatatnagggagataggagatgnaagggttnnngaatcggcttagacctcggnngtatctgtatctccagcacatttgactgtgggtggacattttatcacgttgcgaccttgataataatcgatcccacggtttatagaaaacagtgtgggagagtagcagtgtaacctaagtgtacctatagttactgtaaaaatcagggctttgaaaaacgtcccttttaaaagggagaatgtctcaaagggacgaccaatatgatagggaaagaaaatgtaattttcacggtcaaaaa

SEQ ID NO: 29317 - DNA, 433 bp, Glycine max
  unsure at all n locations
  Clone ID: LIB3108-045-Q1-K1-A4
atcctttctccgttgatgagacacagctgtgttgagtgaatcgcgatggagaacaagaagtgaaaatggagatgagcattaatcggagcagcatcagccccaatatccgcgaaacccaaggacccattattccagccgttggcatcgccggcaccgccaggctcatgtggttgaaccataactttatggtccacgtggacagccatgttaccgttgattccgtgttcctcgacgtcattgatcaggaaaacaccttcgagcttgaagtcttcaccgcagcgacgtangggagtgagcaacgaggtgtataaatatgtaagcactcactaggaactaggagttactaatgcaaattgatttgttctgcaatggaattcgatttttttaacacacattctaaagggctgacggtctagaggatccaagcttacgt

SEQ ID NO: 29318 - DNA, 337 bp, Glycine max
  unsure at all n locations
  Clone ID: LIB3108-045-Q1-K1-A5
atttgttctaaattgcaactagtttggcatggcttccaattaatatttaaaaaagaaaaggaaaagaaaatagcatcccattgtgttgagacttttttccccccatatttaattattactcttcctctggtggggttaggtgaaatttgtatatgttaatgcagtgtagtgcggtacgtaacagttggaccgcaccgtgtttaaacaaactacataggagattattagttgtatgttagtcagcctcatgcttttccaagtacgcgatggttactttggaagaacacattttgtttttttaaaatanaatcgtggcctaatagggtaatgtacctaa

SEQ ID NO: 29319 - DNA, 386 bp, Glycine max
  Clone ID: LIB3108-045-Q1-K1-A7
atgcaacataacataatggtaagatgcgtacagtcgccatctcagaggactgggctcctgagcaagatcccgagagttggagacctggcttcgaacgctaaccatctaaaggccgtaccgaagcttacgctggagggaggcgctggcgcagaacggaacacgaagaagagagccaggaagagcgtggagacatacatcatctacagctttatggttctgatgcaggatcaccctgacatgggtatctgacgcagggccatgggaatcatgaacagcttcatcaacgacatgttcgagaagctggcccaggaatcttctagacttgcccgctacaacatgaaacccaccatcacttggagggaaattcataccgcggtcaggcttgt

SEQ ID NO: 29320 - DNA, 141 bp, Glycine max
  Clone ID: LIB3108-045-Q1-K1-C2
gtactttccaaacttaaaaatgttaaacgcctgtattaatccaacaaaaaatgggcctttgaaactaaagaaaaacaaactaagattggcccaaactgaagaaatacaaaaaaatggcttgagatcaagcctaaccacgaa

SEQ ID NO: 29321 - DNA, 408 bp, Glycine max
  Clone ID: LIB3108-045-Q1-K1-G3
caaaattgcgaagaaccctaattgattgattgattgattgattcccatggcgtcccgaagaggtggagtctcactcccagaaagaccaagcaacaactcaggctccgtcctggcgaagatctcgcgctcctccatcgtcacccgcggcaaggaagccgccgtcgacgccgcattcgtcgccaagaagctcctccgcagcaccggcaaggccgcgtggatcgccggcaccaccttcctcgtcctcgtcgtccctctgatcgtcgagatggaccgcgagcagcagctcaacgacctcgagctccagcaggccagcctcctcggcacccccgcccccaaatgaaaatttgaggttttctctcagatcagatttcttgcttttagggtttaccgttgcaataatttttttta

SEQ ID NO: 29322 - DNA, 72 bp, Glycine max
  Clone ID: LIB3108-046-Q1-K1-A10
aaaaaaaaaaaaaaaaaaaaaaaaaaaaaattatattaaaaaaaaaaaaaaaaaaaaaaaagggaaggaaaa

SEQ ID NO: 29323 - DNA, 51 bp, Glycine max
  Clone ID: LIB3108-046-Q1-K1-B1
tcgcggacgcgtccgcccacgcgtccgcccacgcgttcgcggacgcgtggg

SEQ ID NO: 29324 - DNA, 361 bp, Glycine max
  Clone ID: LIB3108-046-Q1-K1-E7
cccacgcgtccgctgggttggatcagtaaggttataaaataaagttaattcatttaatttaatgattttttttatatattacttagtatttaattagtttgctttaaaatgaattaaaaaaaaaaagaatctacctcctccaagaaaactcttttataatcatttcttatctttattatttattttcttaatattattataatcattagatattaaaaaaaatgaaaacaataaaaaataattttgtaagaattattctcgtagtaagagtatcttttctcgtaaaaaaaatatttggttcaaggccagaattttacctaatataatgccttcttaatatttggataagtttcaaaaatat

SEQ ID NO: 29325 - DNA, 153 bp, Glycine max
  Clone ID: LIB3108-046-Q1-K1-F3
cccacgcgtccgaaaaaaaaaaaaaaaaaaaatttaaaaaaaaaaaaaaaaaaaaaaaaaaaaaagggggacaaaaaatataaaagagggcaaacttaagtacacgagcatgcaaaatgaaaaatcttctatagggaaacctaaaatcaaatt

SEQ ID NO: 29326 - DNA, 110 bp, Glycine max
  Clone ID: LIB3108-046-Q1-K1-F6
cccacgcgtccgacagatttgtatcccgaacttacatagtgagagaaagaggtctcaactgggggcacatatagcggcagagcaagaaacatcctccgacggcaccatta

SEQ ID NO: 29327 - DNA, 365 bp, Glycine max
  Clone ID: LIB3108-046-Q1-K1-G11
acgcggacgcgttggtgctgtcaacataactgatacttcagtggtgactgaagatggccagcaggttgcctattactatcttgttattgccactggacacacagaaccaatccccaaaaccaggagtgaaagacttgaccaatacaaaggagaaaatgcaaagatcaaatctgcaagttcagttttgattgttgggggaggtccaactggtgttgagcttgcagcatagattgctgttgattttcctgataagaaggtcaccatagtgcataaaggaactaggttgcttgaatacattgggacaaaagcttcaagcaagactttaaagtggctcaaatcaaataaaattgatgtgaaactagaac

SEQ ID NO: 29328 - DNA, 76 bp, Glycine max
  Clone ID: LIB3108-046-Q1-K1-G2
aaaaaaaaaaaaaaaaaaaaaaaaaaaaaaaattaaaaaaaaaaaaaaaaaaaaaaaaaaaaaggggaaaaaaaaa

SEQ ID NO: 29329 - DNA, 147 bp, Glycine max
  Clone ID: LIB3108-046-Q1-K1-G8
cccacgcgtccgcccacgcgtccgaaaaaaataaaaaaaaaaaaaaaaaaaaaaaaaaaaaggggggcgcccgatctagaggatgcaagcttacgtacacgtgcatgcgacgaaataactcttctatagtgtgacctaaattcaatt

SEQ ID NO: 29330 - DNA, 279 bp, Glycine max
  Clone ID: LIB3108-046-Q1-K1-H12
accacgcgtccgcccacgcgtccgctggtttattatatcgtcactacttaactaaacatcagcttccttcctcccaaaaaaaaaaaaaaaaacaaaaaaaaaaaaaaaaacaaaaaaaaaaaaaacaaacaaacaacaaaaaaaaacataaaaaaaaaaaaacaaaaaaaaaaaaaaaaaaacaaaaaaattacaaaaaaaatgactataaaaacaactacgctacccaacataaaatcccttcataacaaactcctatttccaactatcccaataacc

SEQ ID NO: 29331 - DNA, 308 bp, Glycine max
  Clone ID: LIB3108-046-Q1-K1-H8
taaaatacattcctaaaataaaatagcagcagcaattatacgaattacttttttttgtttcctgtggttggatgaaacttaagagcagtggattatcatcattatcacatatgatgaagcaatatttcttcctttgtcgtccatcccgtaaccatgtctcagactgttgtcctcaaagttggtatgtcatgtgaaggatgtgttggagcagtgaagagagttctaggaaaattggatggtgtggaatcatatgacattgatttgaaggaacaaaaggtggtagtgaaaggaaatgtccagccagacac

SEQ ID NO: 29332 - DNA, 248 bp, Glycine max
  Clone ID: LIB3108-047-Q1-K1-B2
tgctgctgcattgaagggttcagatcatcgtttttcaacaaatgtcagtgccagactggatggtcaacaaaagaagctcaaccttccaatcctttcaaccaccactattggatccttccctcagactgtagaactgaggagggtacgccgtgagttcaaggctaacaagatctccgaggaagagtatgttaagtcaattaaggaggaaattcgcaaagttgttgaacttcaagaagagcttgatattg

SEQ ID NO: 29333 - DNA, 68 bp, Glycine max
  Clone ID: LIB3108-047-Q1-K1-B4
cccacgcgtccgaaaaaaaaaaaaaaaaaatttatttaaaaaaaaaaaaaaaaaaaaaaaaaaggagg

SEQ ID NO: 29334 - DNA, 449 bp, Glycine max
  unsure at all n locations
  Clone ID: LIB3108-047-Q1-K1-C4
taacagcacatttcaaaatgaagcattgcattttataacattttctaagttgtttcgctttggtgctgttgctagtcgcaacaacctatgccactgttgtccctaccaccacccaaaagccaccaagaagctttgcaaaccaattcctcatcccccagaacgcggcacgtgcggtgctgaggctgcggccattggtgtgggactccaaattagcacactacgcgcaatggtatgccaaccagaggcgcaacgattgtgccctagagcactccaacggaccttacggtgagaacattttctggggcagtggcacggngtggaagccagcacaagctgttagtgcattggtttgaagacgcccaatggtacaattattgcacaaatcttgtgccaatggacaaatgtgtggacattacactcagattgtgtggagcaccaccagaaaaatt

SEQ ID NO: 29335 - DNA, 396 bp, Glycine max
  unsure at all n locations
  Clone ID: LIB3108-047-Q1-K1-H3
cccacgcgtccgcccacgcgtccgccgtgattaatgggcgtcggcaccgtgtaaggaagtcgtgtgtagttcgaagagagagaagggaggggggattaaaaactgcaataatttaaagtaaatgcctaaatagattttaatctcttggttaaaatagtatcttcgggtgcagtggtttacaatttacatagttgtcgggtcacataaggccaatttagtatatgtctgagtgctggtgagtcacctacgcacttgaattaaagatgttgtaaaagtcattacggtagcatttggtttgttggaatggttttactggacatgataatgaaatgaaaattgcattttaaaaaaaaaaaaanaaaaaaaaaaaaaaaaaaaaaaaaaaaaaaaaaataa

SEQ ID NO: 29336 - DNA, 436 bp, Glycine max
  Clone ID: LIB3108-047-Q1-K1-H5
aagtagttgagaactaagaaggagaagcaaatggcttcctcaatgatctcttccccagctggtccactgtcaaccgtgccggtgccggcatggttgctccattcactggcctcaagtccatggctggcttccccaccaggaagaccaacaatgacattacctccattgctagcaacggtggaagagtgcaatgcatgcaggtgtggccaccagttggcaagaagaagtttgagactctttcctacctgccagaccttgatgatgcacaattggcaaaggaagtagaataccttcttaggaagggatggattccttgcttggaattcgagttggagcacggtttcgtgtaccgtgagcacaacaagtcaccaagatactacgatggacgctactggaccatgtggaagctgcctatgtttggttgcactgatgcttc

SEQ ID NO: 29337 - DNA, 323 bp, Glycine max
  Clone ID: LIB3108-048-Q1-K1-A1
ctaagttattctgctgataatgatcctctagcatcttcaatgtcttctggccatttgttctagacagcatattcagaaagagggaacaattccatatccaacttctgtaattagtgttgtcgagaacatctgatccacttcagcttctacatctgttctcttggcaaatcgaccttttatacgaggtctagtctctgcataggccttccttgaggcatacctgattgtcttctcaaattttctcatcttctttttctccctgtaccttaggactctggcctccctgtccattggagaaaaatgggaaggcacctgaattggag

SEQ ID NO: 29338 - DNA, 101 bp, Glycine max
  Clone ID: LIB3108-048-Q1-K1-A4
atttattaatttttatgataattatttttaaagtcatagaagaagaaaaaaaaaaaaaaaaagaaaaaagaaaaaaaaaaaaaaaaaaaaaaaaaaaacat

SEQ ID NO: 29339 - DNA, 292 bp, Glycine max
  Clone ID: LIB3108-048-Q1-K1-B10
gtacttaaactacgttccgagttgtttttgctttttgagatttcatcatcctgtatttttggtttctgttttcggacttcaatggaaattaatggatgagaactaatgaataagctattgtgttgtgttgctttgtttcaaaaaaaaaaaaaaaaaaaaaaaaaaaaaaaaaaaaaaaaaacaaaaataaaaaaataaaaaattgatcaaaaaataagaaaaaaaaaaaaaataaataaaaaaaaaaggggcggcccttttaaaggatccaagtttacttacccgtgcttgc

SEQ ID NO: 29340 - DNA, 238 bp, Glycine max
  Clone ID: LIB3108-048-Q1-K1-D6
agatgccatggatgtaaggtgaggtaataatcccatttgtgcataaaaaaaaaaaaaaaaaaaaaaaaaaaaaaaaaaaaaaaaaaaaaaaaaaaaaaaaaaaaaaaaaaaaaaaaaaaaaaaaaaaaaaagaaaaaaaaaaagaaaaaaaaaaaaaataaaaaaaaaagaaacgaaccaaaataataaaaggggaaaatcaaaaaaaataataaccataaaaaaaaaggaggtaaat

SEQ ID NO: 29341 - DNA, 452 bp, Glycine max
  Clone ID: LIB3108-048-Q1-K1-E7
tattacccaaccacttcacacaaaccaaacactcagctgttcctgcaagtagatcaggtgctccaagaaggaggagagtgcacttagcaacaacaagagcagagaccatgactactgtcatagaaaaactgggcattaagattgagaggaaccctcctgagtccaagctcactcaactgggtgttaggcaatggcccaaatggggttgccctccaagtaagttcccatggacatatgaagccaaagagacttgctatcttctggaaggaaaagtgaaggtctttcctagtgggtcgaatgagtcagttgaaattgctgctggtgacttggttgtgtttcccaaagggatgagttgcacttgggatgtgtctgttggtgttgacaagcactataattttgaataaatcctacaaggggtgcctaatgaatgaagaagaaacagaacttccatg

SEQ ID NO: 29342 - DNA, 244 bp, Glycine max
  Clone ID: LIB3108-048-Q1-K1-F6
ttttcctaaatcaacaagtaaagatggcaagggaagacttttcctgttgcatttgacgtacctgctacttcaattgcaagtgagccaatggacattatgactgctctacaacttgtgctgagaaaatctctcgcctatagcggtcatgcaccatgtctttatgaacgtgccaaagtgatcgataagcatgcttcacactttctggttttaacagaacaatgtgaccaaccctattatgtgaaac

SEQ ID NO: 29343 - DNA, 366 bp, Glycine max
  Clone ID: LIB3108-048-Q1-K1-F8
cggacgcgtggggaaaatcaaaaggttgcgaggaacctcggcttatattacaaagacggggagaagtcaagagcgcaccttgcatgattccttctcagtactccaaaagagttatgagaggattaaggttcgggaattgacttccctagatatagtaaacgttaagcacattttaagatcttgctaccctttaccatttccaagactacatatatagccagctaggattaaccttttgggtaactagggtttaacattaatgtaaaactcttgtctttttcaatttctgattttgtgtgatttagaagtagtagcactggcactagttggtgggaagtttgcatttaaaaaaaaaaaaaaagaata

SEQ ID NO: 29344 - DNA, 283 bp, Glycine max
  Clone ID: LIB3108-048-Q1-K1-G10
ctctctcatatactctctctttgtctttttctacgctttctcgttcgagagccctcgggggatccactaactgaaggagaaatggggttgacattcaccaagcttttcagccggctttttgccaagaaggaaatgcgaattctgatggtgggtatcgatgcagctggtaagaccaccatcctgtacaagctcaaacttggagacgatcgtaccacaattaccaccattgggttcaatgtggagactgtggtatactagaacattagtttcactggctgggatg

SEQ ID NO: 29345 - DNA, 405 bp, Glycine max
  Clone ID: LIB3108-048-Q1-K1-G2
ggtattttttctgggacagaagagaaccctgagttcatcaagaatgttgaagcaaaaatagataaagatgcaaagataatagtagcttgcacatcagggggtacattgagaccatcacaaaatttgcccgaaggtcaacaatcaaggtcacttatagcagcgtacctgttggtccttaacggttataccaatgtctttcatctagaaggtggattgtacaaatggttcaaagaggaactgccaactgtttcagaggagtgaagctagtgccaaaagtgttcttgtagtcatgtggtgatgcctaattttaattgtaattagtgacaatgctgacaaatttcaagaaatgaactgatgaactaaactgtgactgttgaacaggtgaggaaaactattgttcaaaaa

SEQ ID NO: 29346 - DNA, 426 bp, Glycine max
  unsure at all n locations
  Clone ID: LIB3108-049-Q1-K1-B9
gccactacctcctacgccaaccaaagatgacttctcttcaccacgaaggcagtgtcaaactccaagcctcaaatcaatgcatctttgaaggagaaggcagttgccggactcacagcagcttctgtgacagcatctatggtggttccggaggtggctcatgctgctggatatgagttctccccttccctaaagaactttctactcagcatctttgctggtggggttgttctagcagccatatttggagccgttattggggtttccaactttgatccggttaagagaacttaaatcatgcatgctccaatgcttttcattttctctctctctttttcactcttcttctagcttcttgtttcatgcaagttatatgcaactggttctgtatatgcatactatctatatcccagctgcactttattntat

SEQ ID NO: 29347 - DNA, 204 bp, Glycine max
  Clone ID: LIB3108-049-Q1-K1-C5
gatttatgtgtagattatatgatcacaataattgttggattagtgtacttcttaaggactaaagttcaatttaaacctcggatgtctcttgtttgttaatatagttttgtctgaagcaaccaatgagaaaggtatagcaatgttgaagtcgggatgcaatgtttaaagagaatttgatactctcttttaacactttcaattaaa

SEQ ID NO: 29348 - DNA, 422 bp, Glycine max
  unsure at all n locations
  Clone ID: LIB3108-049-Q1-K1-D6
ggcaattggttatcggatttttgtttncattttatttgttttcttcatggggagaaaaatatcgctgcgtaaatgtttcaagtgtaataatagggacacaacagatacaagttgataggaaggaacgttgttcagccatttactttgtataattccttttgatcgagttttgcttgttaactctttagttttgtgaatttatctttgattaatgaagagcaaatgtaatattattattagcattnaaaaaaaaaaaaaaaaaaaaaaannnnnnnnnaaaaaaaaaaaaaaaaaaaaaaaaaaaaaaaaaaaaaaaaaaaaaaaaaaaaaaaaaaaaaanggggggggccgttttaaaggatccaaatttacgtacccgtgcatgcgaacgaatagtttttttttaggggcacctaaattaa

SEQ ID NO: 29349 - DNA, 320 bp, Glycine max
  Clone ID: LIB3108-049-Q1-K1-D8
cccacgcgttcgcccacgcgtccgctttaatcttactaccgcgacaccataaatatcggagggacttgctaggcagtccctgattaatgcacatggcattatagagaaatcatttttgcccggaaagtactccattgagatgtcttcatccgtctacaagaattgggttttcactgaccaagcattaccagctgatctcgttaagagaggattggcaattgaagatccctctgcaccccatggcctttccctcgtgatagaggactacccttatgctgtttgatgactttgaatatgggatgctattaagacatgggttc

SEQ ID NO: 29350 - DNA, 265 bp, Glycine max
  Clone ID: LIB3108-049-Q1-K1-G7
cagaatcaaagggaaaatcactggaagtgtttgttggggagaatgaagatgatggtgctgaggctatagagatggcagggtctgctaggacggttccagtttaaccaaagtctctgatcaacaaagtacttagttcataattctagtgatgctattattgtgtgacaattttacttcgggttttctacagctagatgctcaataatgatgtagatatatgtttctcggtgctgtctgtaactttaaatcaattacaaagtgcgtg

SEQ ID NO: 29351 - DNA, 108 bp, Glycine max
  Clone ID: LIB3108-049-Q1-K1-G9
aaaaattctattaatgcttgttaaaataaataattataacaaaaaaaaaaaaaaaaaaaaagagtattttaaaaaaatataaatcccccccccaaaacacaaaaaata

SEQ ID NO: 29352 - DNA, 68 bp, Glycine max
  Clone ID: LIB3108-050-Q1-K1-E2
ctgaactgatgtatactcaaaaagaaaccttttgatgagtgtttatgaatttcccaaaatcactattt

SEQ ID NO: 29353 - DNA, 298 bp, Glycine max
  Clone ID: LIB3108-050-Q1-K1-E8
cccacgcgtccgaagtagttgtgaacttatattgagaagcaaatggcttcctcaatgatggcttccccagctgttaccactggcaaccgtgccggtgccggcttggttgctccattcactggccttaagtccatggctggcttccccaccagaaagaccaacattgacattacctccattgctagcaacggtggaagaatgcaatgcattgcatgtgtggccaccagttggctagtagaagtttgagactcttttctacctgccagaccttgatgatgcacaattggcaaaggaagta

SEQ ID NO: 29354 - DNA, 234 bp, Glycine max
  Clone ID: LIB3108-050-Q1-K1-F1
gcttgaactatttaacttacttttgaacttagccgactgtatttctcatatgaacaatggtactttagatttaagcattgtcgagttttgtttgtggttttgtccgcgaatgctgtacttctgttatttggggcttgcgtcggagggttttttatccataggattatgcatcggcgttggttcgaactatatgggaattttgcttgaaagataagatagtagtattttcaataa

SEQ ID NO: 29355 - DNA, 71 bp, Glycine max
  unsure at all n locations
  Clone ID: LIB3108-050-Q1-K1-H5
ttcgccacgcgttcgtccacgcgtttcgccacgcgttcggataattcanaaaaaaaaaaaaaaaagggagg

SEQ ID NO: 29356 - DNA, 98 bp, Glycine max
  Clone ID: LIB3108-051-Q1-K1-A10
aagcaacttaattagctcttaagctagtagtagtactctaatttgataactgttaggatgacattggtcaatgctatgatgtgacgagatgtgggcat

SEQ ID NO: 29357 - DNA, 191 bp, Glycine max
  Clone ID: LIB3108-051-Q1-K1-A3
attcccggtcgcccacgcgtacgcgttgatgtcataataaggttaatgtaccattttgtggatcactgatcccacgactattttggtttgttagtattaatactataaattatcatctaaaatgaaatatccgacggagtaatttcattgtattgaagaaacattgtttattgaaacttaaatattttctc

SEQ ID NO: 29358 - DNA, 407 bp, Glycine max
  unsure at all n locations
  Clone ID: LIB3108-051-Q1-K1-D2
ctcactgtcnttccttctctaggggtgtttagctcccttcatttcttcgctcaacatggttcggaaaatgatattgatttgcggaatcctccggttgagcttgagaagaggaaacacaagctcaagcgtcttgttcagtcaccaaactctttcttcatggatgttaagtgccaaggttgcttcaacataaccactgtctttagccactctcagactgttgttgtatgcggaaactgccagactgtcttgtgtcaaccaaccggtggccgggcaaggctaaccgagggatgctcctttaggaagaagggagactgagtggattgccatctttttttgtttgtgattggagcagttcagtaatgccttctttttgttttggttatgatgatatgttaattttgttaaat

SEQ ID NO: 29359 - DNA, 206 bp, Glycine max
  unsure at all n locations
  Clone ID: LIB3108-051-Q1-K1-E1
ctctncacaccaacaacaccaacctcactctccttcacatcatcctccatcttcttctctggacaccaattccacacacacagtaattctttcaaatccaacagctttcccgttttaccctccaaaaaaacccctctccatttcctgcaagggctcccctcctcttcccgtcctcaacttctccggcgagagggtcggcgagtcct

SEQ ID NO: 29360 - DNA, 110 bp, Glycine max
  Clone ID: LIB3108-052-Q1-K1-A2
atcagagaatattgaatctttttgcgtgaacgtaggagaattgaaccttagatggtttaatgtgtctttgctcagaacatgcaaactttgactatataaatcttttgtct

SEQ ID NO: 29361 - DNA, 230 bp, Glycine max
  Clone ID: LIB3108-052-Q1-K1-B7
cccacgcgtccgctctgaacgatgtcctttccaaacttggttaatgtgattaatttcttgctttcttgtgtaagctttgtgcatcattttctcagacactttgttgactgatattttaagaaaatcaaatgatgagggaaaattttctataaataagatcaatatatctagacgacttctctccaaaaaaaaaaaaaaaaaaaaaataaaaaaaaaaaaaaaaataaaat

SEQ ID NO: 29362 - DNA, 290 bp, Glycine max
  Clone ID: LIB3108-052-Q1-K1-C3
gtgaaaactctgacagggaagacggtaaccctcgaggtcgatagcagcgacaccatcgacaatgtcaaggccaagattcaagacaaggaaggcattcctccggatcagcagcgtttgattttcgccggaaagcagcttgaagatggaaggaccctggccgattacaacatccagaaggaatcaacccttcatctcgtcctcaggcttcgtggtggcatcattgagccttccctcatggctttggctcgcaaatacaatcaggacatgatgatttgtcgcaagtgctacgc

SEQ ID NO: 29363 - DNA, 112 bp, Glycine max
  Clone ID: LIB3108-052-Q1-K1-E7
caacaaacaaagtggggtggctacagatgctttatgagatttcatcatcctgtatttttggtttctgttttcggacttcaatggaaattaatggatgagaactaatgaataa

SEQ ID NO: 29364 - DNA, 265 bp, Glycine max
  Clone ID: LIB3108-052-Q1-K1-F12
ttttaaaggggacaggcttcttggactttttatactccgtcactaatgctttgaattagacatctttatctgtgactgttatttcagctatgaaagtattcctcagcacgattagtaatcacatttccattttgtttcctgtatctaatattgtatatcgtgagtttagatcttggcaaatgtacaaccttttgttttgtgttttcatgttactctctatataccatacacatttttaaagttcatatttgaccgtgacattcca

SEQ ID NO: 29365 - DNA, 274 bp, Glycine max
  Clone ID: LIB3108-052-Q1-K1-F3
cacatcttctagcaaacttcctcactctatttacggttttgccagagggatatccaacaggcaaaggtgcatgtccacgcgcctagacgaaatccatcagaaccatgtactcgactctcagcagaaccgccaactaagtctctcataactacacccacaccatgaaccaacaaaaactcttataacaggcctgagtactacacaattttgacaaaatgtataaatttattattactcaacaacgatatccatctaaactaaccaccattcatat

SEQ ID NO: 29366 - DNA, 392 bp, Glycine max
  Clone ID: LIB3108-052-Q1-K1-F8
caagaaatgattttttttataaaaaaaactctaaaaatatagacacaaaaactaatcaaaacacacattcaataaggaaataataaacaataagttgattttttatctcaaaaaagctaaatcagaaaaagaatttatacagataacaagtctgtattattccgggtctccctccactgtagcaaacaccaccatccattcaggttaggcctaagtacaatcatttgacggatcaaacatgtttaggcctaacttctattccttcaagaatgaaaccgtgcttccacatatcactagtttccctgacattcatatagatttcatcttcttccaagcctgagttgaagaactctcccatctcaatctctaaccacttatcttttctcacatta

SEQ ID NO: 29367 - DNA, 158 bp, Glycine max
  Clone ID: LIB3108-052-Q1-K1-G4
tatatataaaattctatcctttcgttcgttatcattcttttttccttttaagataggaaaaatgctaaagaatcgcgaaagaaatcaaaaacttatgtataaatatttataaataaaaagattactaatcaaataaataaaagtaaaggggcaatatc

SEQ ID NO: 29368 - DNA, 278 bp, Glycine max
  Clone ID: LIB3108-052-Q1-K1-G6
ggcaattgaagtgttagagaagcaaatcattaagagagatggcgtcccctacttgtggcgtctactagagagggcatacaaactagctaacaaagaagaagaagaaagaattgcgaacgagaaggccacggctttggagagtcgttacttcaattaagggaataatcatataatcaaatcatgtgtgtacattttaccattgcaaaacccaatctttcattgggtaaaataatcattttaacgttgatgccctcatcaaaaaagcttctttcttgcaa

SEQ ID NO: 29369 - DNA, 148 bp, Glycine max
  Clone ID: LIB3108-052-Q1-K1-H12
ttgttactttttgggttggttttttttaatttatttttgtactatgtcgttggtccctataacatgggacccggtcgccatggatgattcatataatttataataatgtacacataaattcctcacagtcattcaccccacgcgtccg

SEQ ID NO: 29370 - DNA, 404 bp, Glycine max
  Clone ID: LIB3108-053-Q1-K1-C5
atggtttatacctatgcacccatatacttttaatggcggagtaagcaattgggggggatgtctgatagtgaataaagtggtactgtactctttggaataatacaagttttgttttatgcagaactcacctcaaaggagatagttcaaacgaatttgtagtttgatattgactgttcaaaaaaaaaattattaaagtattactcataacaactactaatacttcttattacttcattaattaaattaattatattaaaatattttattaaatggggcggcctcttttaatgatccaaacttacttacccttgcttccaacgttttagctttttttttttgtcacctaaattaaattcactggcctcttttttacaacgtttttttctttaatataccttttcttt

SEQ ID NO: 29371 - DNA, 64 bp, Glycine max
  Clone ID: LIB3108-053-Q1-K1-D6
ctcctttccctgttgacttgttatcagttttctcccaaaattttaacgcaacgattggacgttg

SEQ ID NO: 29372 - DNA, 418 bp, Glycine max
  Clone ID: LIB3108-053-Q1-K1-E7
tttgaacacaaattgaatgggctgggttattactaataattattgcaaacacaacaacagggtacaacacaaaaatgccacaataaatagaaaagcaatcatacacgaccatattaatctatgaacaaataaattaaagagatcactaaaaatggactgtacttttcacatttacttggcatttacatttcaaatctctctttcctgtttggatttgtccgtcacttgaacacaataagatcaggacgtgcaagatggccatcaaacaaatagaatcaacctgatctgaatcataaacattgtagcatagagatgacacattcagacttttattcaaagaacttagacaggaagatagatgtttcacttggctcaaaatagagcttgcctttattcctcgatgaaaactagaacatga

SEQ ID NO: 29373 - DNA, 407 bp, Glycine max
  Clone ID: LIB3108-053-Q1-K1-F1
gtgcttttgtgcctgatgtcatagcaataatgaaatttttgtctataatattttcatgtgggttttttaaatgttgtttatgtgtgtacgaaatggaaagggggacactatgaagtttgtgacatacagaacagcctctagatctttttgttaagatgaagtgttctatgctgtttattcatttgttttttccataacagaatcattctattcaccaagcaatagattttctctctcttcaaaaaaaaaaaaaaaaaaaaaaaaaaaaaaaaaaaaaaaaaaaaaaaaaaaaaaaaaaaaaaaaaaaaaaaaaaaaaaaaaaaaaaaaaaaaaaaaaaaaaaaggggggggccgttttaaaggatccaagtttacttacgcgtgcttgcaacgtaatagcttttttt

SEQ ID NO: 29374 - DNA, 346 bp, Glycine max
  Clone ID: LIB3108-054-Q1-K1-A4
tttttatttttttgttttgtttattatattttttttatttatttttatttttttattttttttatattattttttttttaattttttataaatcattatttatataaagaataaaaaatttttaataaaaaataaaaggtacaaaaaaaatatttcaacgcttttaaatatatgcaaaaaaaaaaaaaaaattggatgcgccttaactaataaataaacaaaatctttcaataacctaaaaaaaaattcttttaaaatacactacataattaaattactgatctttccttaaaatccatcaaatttataaaaaattttgaaattataatatataatataattaata

SEQ ID NO: 29375 - DNA, 160 bp, Glycine max
  Clone ID: LIB3108-054-Q1-K1-A5
cccacgcgtccgaaaaaaaaaaaaaaaaacaaaaaaaaaaaaaaaaaaagggaaaaaaaaaaaaaaaaaaaaaaaaagggcggacgttctagcggatccatgcttacgttctcgtgcatgctacgtcatagctcttgtatagtgtcacctaacttcaatt

SEQ ID NO: 29376 - DNA, 246 bp, Glycine max
  Clone ID: LIB3108-054-Q1-K1-B6
gattggccaatttgtgcttcgttcattatgcatcaaagtttaagtgtactcctatgtggggtgcaattctgtttactatagcgatggatttgtgtgcactactatggctatattaattgactgttagtgtttttatttagggtgtgcctgtatgattgatgtgatgagctagtcatgtaaactttgtgcctttgtttgcgttaatataaaatgtagtacatcactgtacctttttatttcccaaat

SEQ ID NO: 29377 - DNA, 172 bp, Glycine max
  Clone ID: LIB3108-054-Q1-K1-C1
attgtgtacaagtacaactacacatcgtgaaagtgattcaaaagtttgctgtttttctttagtttggaaaaaaaaaactgtgctctatgtattttagatcttgagaaatttcagataaactcgtttgtaaaccattttataataatagagaaatgtttgcttattatcatca

SEQ ID NO: 29378 - DNA, 150 bp, Glycine max
  Clone ID: LIB3108-054-Q1-K1-C7
cccacgcgtccgcacatgctattgcctacgcattccttaacacggtctgggactctatcgttcaagaggatacaagcttacttatacgtgaataccactacatacctcttctatagtgtgacctaaattcacttcactgtcactatattg

SEQ ID NO: 29379 - DNA, 318 bp, Glycine max
  Clone ID: LIB3108-054-Q1-K1-D4
actaaaaccagctgcatttgcggcacttgttccgaacagtgctaataaagcactggaggagttgatagatgaaataatgggagaccatgagatgttgactggagaacagctatgaagagattggaaaagagatctgatctgattgaaaccaacaattttttgcagtatcagggcatcaaactatgcattataaaatataaatcccaatctactgaggattttaagtatatgaaatactgtcttttgtgacgcaagttagcaactgattgttcctaactgtttaattagtacttaattggatattcttttgttaaaaat

SEQ ID NO: 29380 - DNA, 350 bp, Glycine max
  Clone ID: LIB3108-054-Q1-K1-E8
tattggaatcactaaagaatgctggactccctgcaaatgaagacgatgctgttgctatgatgcgatttctgaaagcagacacagaagaatctatttcatatggacatttccgcaatttcatgcttctgcttccctctgatcgtcttcaagaagatcccaggagtatctggtttgaagctgctacagtagttgctgttccatcagctgttgaaattcctgctggatgtgtgctgtgatctgcattttcatgtggtcttttttgtgccttgtcatgtgcatttctgtattcagttgtttcttttttgtcttattttcattcattattttttttttttcttttttttattttt

SEQ ID NO: 29381 - DNA, 189 bp, Glycine max
  Clone ID: LIB3108-054-Q1-K1-G10
gccagaggccgcgtaagacacaattcagcgcggaaaacggttccatactcagatttcggggtcgtcaaactcgtgaaagagcgcatgtagtaggaccccccggagactgtgagcgtaaaaagtatcacgcgcgagagagaaagggcgccacacacaaagagcgacgaacagtgaacccaggctgagagc

SEQ ID NO: 29382 - DNA, 277 bp, Glycine max
  Clone ID: LIB3108-055-Q1-K1-B1
ggggttggaggtggtgtaggtgctattggtggtgttggtggtgtcattggtggtttcaagcatgttgaagccaacaagccttgaaaaatcaattgagttaattacgtacgtacgttcaataattccagatttgtgatgataattactaagattagtgtttcattttcacagttatggtttgctattgttaatttgttttctttctaatgtcgttttgtaccccacaaatttaaataagttcaagtatgtactagatgcatgcttcattttgcgttaa

SEQ ID NO: 29383 - DNA, 253 bp, Glycine max
  Clone ID: LIB3108-056-Q1-K1-A4
cccacgcctccgaaaattaaccccctgaaaccctgtgggtaaaaaagggggttaacaaaggccctactataagacgggggaggatacaactaatttgtatttacataacattagtcaggcatgactagaaactaaatatgatggggatataaattgcaggtggtatggtatatcttgggaatctgctttacatggttgttaactgtacatactatgataaatgatggcagttaatgttgatcctgccttatgt

SEQ ID NO: 29384 - DNA, 418 bp, Glycine max
  unsure at all n locations
  Clone ID: LIB3108-056-Q1-K1-B2
gcccaagccaggtaagcacaaccaaagcaccaccccaaatggcttcagcttctgttcccatggggttgtcactgagctctgttaccaacaacaacaagccttcatccgaagccttcttcaggccactacccctacgccaaccaaagaggaccctcttcaccacgaaggcagtgtcaaactccaagcctcaaatcaatgcatctttgaaggagaaggcagttgccggactcacagcagcttctgtgacagcatctatggtggttccggaggtggctcatgctgctggatatgagttctccccttccctaaagaactttctactcagcatctttactggtggggttgttctagcagccatatttggagccgntattggggtttccaactttgatccggttaaaaaactaaatcatgcatg

SEQ ID NO: 29385 - DNA, 74 bp, Glycine max
  Clone ID: LIB3108-056-Q1-K1-B4
tctagaaggtcccagcttacctacgccgtcctgcgacgtcataactcttttataggggcacctaaaatcaattt

SEQ ID NO: 29386 - DNA, 52 bp, Glycine max
  Clone ID: LIB3108-056-Q1-K1-B5
aaaaaaaaaaaaaaaaagaaaaaaaaaaaatttgattaaaaaaaaaaaaaaa

SEQ ID NO: 29387 - DNA, 229 bp, Glycine max
  unsure at all n locations
  Clone ID: LIB3108-056-Q1-K1-F2
tgcgacgcgtgggccgacccgtggggttgcagtaatttttggtagcaagacttttgtattttgcttttatttagcttactatatgcagtagcagctatctctgtaatcttatatccatctcctgttgattgtattgagccgttgggttttttgatgtagtgagattgaaaatgatgtgctagtaatattattgctgttagaaatctaanaatataaaacaagaactaat

SEQ ID NO: 29388 - DNA, 69 bp, Glycine max
  Clone ID: LIB3108-056-Q1-K1-F6
cccacgcgtccgaaaaaaaaaaaaaaaattttttttttaaaaaaaaaaaaaaaaaaaaaaagggggggg

SEQ ID NO: 29389 - DNA, 201 bp, Glycine max
  Clone ID: LIB3108-057-Q1-K1-A4
atcaagcattcgtactgtcctatcttggtgcagcatgtgttctggttcctttatagacggtattaaggctgattcggaaccaattcacggccagccaatcacttgtatttaagtacctttggtactcatgtatctatatataaatatttatctctgctgatacactgactaaccataaataaatagactaacaagacaatg

SEQ ID NO: 29390 - DNA, 419 bp, Glycine max
  Clone ID: LIB3108-057-Q1-K1-B7
cggacgcgtgggcggacgcgtggggtgctggacaaacttaaggctgagcgtgaaagaggaatcaccattgatattgctttgtggaagtttgaaacaacaaagtattattgcacagttattgatgcgcctggacatagggatttcattaagaatatgattactgggacatcccaagctgactgtgctgttcttatcattgattcgaccactggtggttttgaagctggtatttccaaggatggacagactcgtgaacatgctctgctttcattcacccttggtgtgaaacagatgatttgctgctgtaacaaaatggatgctactacacccaagtattccaaggccaggtatgatgaaattgtgaaggaagtctcttcctacttgaagaaagtaggatacaacccttgacagattccttt

SEQ ID NO: 29391 - DNA, 189 bp, Glycine max
  Clone ID: LIB3108-057-Q1-K1-G2
gcgtcatcaagaaaaaaaacatgtgtagtgtagggaaggtttttactcttagtataaagtcactttgtaacactatttcgactttgatttttaatgtagagcgtcgacggtagcaaaaaaaaaaaaaaaaatgaaaaaaaaaaaaaaaataaaaaaaaaaaaatatataataaatagaaggaggaataa

SEQ ID NO: 29392 - DNA, 194 bp, Glycine max
  Clone ID: LIB3108-057-Q1-K1-H2
aacaatcatttcaagcagcgtagtctgatttatggtgacagctaaaaaacttcatcacgtaccttgtacactaatgcagcatgaaattatcatagctacatcgtttctatcatgagacctattcattaaatctactcattagcagcgtcaattccccaagtgaaagaacttaccgtgcattttataagttcttg

SEQ ID NO: 29393 - DNA, 194 bp, Glycine max
  Clone ID: LIB3108-057-Q1-K1-H3
aacaatcagttcaagcagagaagtcttatttatgtggtcagctaaaaaacttctacagcgttcttcggcacgaatgcaacatgaaattatcatagcaacatcgattctatcatggacctctccatcaattcttgctcattagcagtgtcaatcccccaagtgaaagaacttgtcgggcattttctaagttcttg

SEQ ID NO: 29394 - DNA, 302 bp, Glycine max
  Clone ID: LIB3108-057-Q1-K1-H6
tctaattctacattacaagaatttttacttatagccattctattcgatgtaggtctatcaattctatatatatatatggatagtttatttcaactaaaacttataaatgaagattttcattattatgtatggatatagatagtctgtatctggttgctttaaggataaaagacattaatgaaagatagagtaaagcccaacctacatcataataaaagacatcccaagttattagtcggaaaactattctgtatataatggcctgttcttctagaagatccaagcttacttactcgttcatg

SEQ ID NO: 29395 - DNA, 211 bp, Glycine max
  Clone ID: LIB3108-058-Q1-K1-D11
gttcttctagagaagaggctgatgcttcattgctgctgttacatagtattattgtatcatttattgtcttttttggaccctgtcggggggctaaaattaaatttattaccattgttttcttcaatctcttattactttataattgatgatgtttgttgacactaaaaaaaaaaaaataaataaagaaaataaattaaaaaaatataataat

SEQ ID NO: 29396 - DNA, 317 bp, Glycine max
  Clone ID: LIB3108-059-Q1-K1-B3
attgacttttcacttacaagtccccttggtggtggtcgccctggaagagtgaagagaagaaaccaaagggctgctgctaagaaggccgcaggtggagatggagatgaggaagacgaggattaaacttttaatcatgtctttttctagtgctattagaccttatgccaccttttactttgcgtacctagtttattgcttttttattggtatacattttcatccttccgttccttgtttgagataatattgagtgacattatgttttgtgaactagatatttaaatatttaaatttcattaataatttgattgtcgtta

SEQ ID NO: 29397 - DNA, 113 bp, Glycine max
  Clone ID: LIB3108-059-Q1-K1-C9
gaaaagttaatgacgccttaaaccatagaataatggcgtcacctttccctgttgccttcaaacgaatctttgttatccccattgcattagttagttgcgaattaatgatgaaa

SEQ ID NO: 29398 - DNA, 157 bp, Glycine max
  Clone ID: LIB3108-059-Q1-K1-G6
gttgaaaataaagtacataataacattgattactgatgtaacaagcactaaatttgattatagttgctcatttacagggcaccaatgttcttgagaccaaggacaaccccaaccccaatgatgtggccaaaacatccacaagccaaggtgtcatcaa

SEQ ID NO: 29399 - DNA, 129 bp, Glycine max
  Clone ID: LIB3108-059-Q1-K1-G9
acgcgtccggccgaacatccgaacgtgcgtggtcagtgcctgtttgtgcgtcaccactgacgtggctggagtgcggctcgtaatatcgttggatcaaacagtgattaattgtttgatcattctgacctt

SEQ ID NO: 29400 - DNA, 435 bp, Glycine max
  Clone ID: LIB3108-059-Q1-K1-H11
accggtccggcagtcccggtcggcccgcgcgacccacgcgtgcggccacgcgtccggtacattctaaggaaactcctcagatcgacctcgaaaccagggggcggagactcttctcttggtcaaacctcaaatccctacacacaggactctctccttctcgtccccgactcgccggccctctcctcacccgccacgtgaccgctcattcaggtgcttcttccgtcaaaaggagggttgaagatgtcgggccaattgctaccggccacgagcgtgaggagattcaggctgatcttgagggaagggatattcttgaaataaaccatcccgtcggaccttttggcacaaaggaagcacctgctcgcgttaaatcttactttgacagaaggatagttggatgcccaggagatgaacgcgaagatgagcatgatgttgtct

SEQ ID NO: 29401 - DNA, 248 bp, Glycine max
  Clone ID: LIB3108-060-Q1-K1-C10
aaaaaataaaaaaaaaaaaagaatctatataaatataaaaataggatatgtaaggtacaaatagtaaatcgaggtacccattttatgataaactttccttccatttttgttcctctagtaggcctagtatttccggcaattgcaatggcttctttatttctttatgttcaaaaaaacaagattttttagatacagaaaacaaagtaaaattctggggttttttattccccaattataatactaaattc

SEQ ID NO: 29402 - DNA, 368 bp, Glycine max
  Clone ID: LIB3108-060-Q1-K1-C7
aagtatttgatgcggtacggttagcgactggactcagctagccatacaattcagcatattcctgagacacattacgtttgaaactctatgtactgatactctgcttagacagagttcttccggaagcagacacagcctgaggcgaatcacacgcgctcgcaactccatcatccaagcccgcctcctcagcaaccttctcaaattgcctttgcaggttagcaatcataggttcatttaacagcactgcgctttcatcggtcaaattcccaccattctcactagccacattttacatgtcactcgaatcctgagccgccgtcgcatcacgcttcttattttacaacttcttctccttgctatcgccacct

SEQ ID NO: 29403 - DNA, 179 bp, Glycine max
  Clone ID: LIB3108-060-Q1-K1-D1
cccacgcgtccgcaacattggaaacatcattattccacaatcgattttgccttgaaaaaaaaaaatcaaatatttgtttcaatagctacctgtataattccatgtaacattttgtaacgaatcgggttgctacgttggtatctctgtgttgtaattaaacttcgaattcaaactcacac

SEQ ID NO: 29404 - DNA, 361 bp, Glycine max
  Clone ID: LIB3108-060-Q1-K1-D5
ttttatttgaaataaattaacaataaaaatattacagtagcataaagaggaaatatagctctcctcatatttcagaccatctccatctctaatatataaatatcaataaactataaaattatccaaatacgcaggtatccagtcttcgcaagcatctttaacacgaagaacagtgaaacatttcaatgacactctaaaacttcctttcacgcttgttggttaattcccgaaaagaccccacaaaaaggtttttttctgcctcaaaatcttgagatctcaactttgtttgccgggtctaggaggtccaaagtagtttgttatcaatcccattaaagaaaacatcatagccatcataacttgg

SEQ ID NO: 29405 - DNA, 336 bp, Glycine max
  Clone ID: LIB3108-060-Q1-K1-D6
ttcggttccctttgctttatgatgaactggggttggaatatattaaccatctaattattagagaagcatacagagggcttatacctgatatgatatgtcagaccatgtgcatcactaatatgtaagtgtcaatcaactataaacattatccacatgcgcatgtatccagtgctgcgtaagcgtctttaacaggaacaacagtgaaacattgcaatgacactctaagacttccttgcacgattgatgttaaattccagggcagaccgaccaaaaaggcttacagatgcctaaagatctagacaattgaactatgtgtgcctcgtctatgaggtataa

SEQ ID NO: 29406 - DNA, 397 bp, Glycine max
  Clone ID: LIB3108-060-Q1-K1-F6
gccaggcgtccgcccacgcgttcgtccacgcgtccggcagggtgggatggatcttggactgaatggggagcacaatctgatacacttgctgacacttcatgaattcaatacagataaatttgcatgccatcagatagaatttgcaagtgaaggggctgtatacatttgtcaaacatctagaagacactaattttgctatgctatactgaacgttcgttgttctggcttaggtgtgatagagattattgagaatcgcaaatatatttcatgttaaaggttactaatattaaagtctatcatgtggcttataaaaatattgatagtgttcgctaaatagaattcccaatcttatactacaaaaaagggcttctgttatagaggatcacaagcatacgta

SEQ ID NO: 29407 - DNA, 731 bp, Glycine max
  unsure at all n locations
  Clone ID: LIB3138-035-A7-F4A
cagtgctgaatacctggcgaagatcaagtcatttgtttataccaatcttcgtcaagcacaaccggtcccctctgtgcagcttcaagacgtgccgcggtatccagtcggcatgagcgaacatattgacgatatggacgacagactggatgatgaagatgctgacgaggagacctccaaagatcaacggctcacggaacgggtggaagatcggatgattgaggatgatatggatatgtctggcttggaagacgcgagaggagtggactcgggagcagatgctgatcacggaagcccgtccatagtgggtgagggtggcagcgggtgtaaggttttgtcaagcgatcatgatacagaccagataactgagccggtcccatcgattgacccaggcaacgatcctgaacctgacagaacgacaatgatgctgcaggaagcgattcgtgacgagagcaacgaagtttcccagcccacgaacgttgaacaaacagtagtccagagggacgcccctgcggaacatgtcgagatcatcgcacagccgtcaatcgttctggaatcagcgccaatgcagcccgagccgcctatcgtncaatgtatgaacagagtagacagtcacacgcttgggcttagtgacgctgcagaagctgtggaagctatggagaacaatcacaaaggcgggaacgagaatatcgggtcttcatagaggtacaaatatacactttgaagcatttttg

SEQ ID NO: 29408 - DNA, 643 bp, Glycine max
  Clone ID: LIB3138-035-A7-R4A
tcgtggcctgcgacagtgcctgtccatcgatgtcgatgtacaatactcgtgcatggaagcggagcagctcaaggattgcgaggacaatatcattaatatagcagaagccagatgcctcgtttttcttcgcatgatgcagtccgcccgcccaattgatcgccatatcacatttggcacgattgagtcttgccgctccttccatactgccaccggcactaatcgcgcagaactcaaagacgccgtcgaacggaggacaatcttccccaacattgtgcttggcgcactctttagccagaagatgttcattgtcgggagtgacacgctgcaaaaagtccacgtattcgtccgtatggaactgtgtcatctcgtattttgacgctggtttggcccggtaaatctccatcttgttgtacagtccatagttcataacaagcgaatgcgccatccgaattcgatggggtttcatcagatgtcccgactggtaggcatagttcccgacgtcgctgtcatagaaataagccactctcttcttctgagacgaaggcgagttcgtgcctattcctggcgggtccagcggaggtgcggcgtatgccattgttgagtttgaagccagattgggagatccagcgagtatgcagtatcc

SEQ ID NO: 29409 - DNA, 670 bp, Glycine max
  Clone ID: LIB3138-060-C7-R3B
gaacactgatcgaatcactgtgacagtatagggaagtataccatttcccatgcacgaaggcgtgagctcttatgtcacatattagcctccgtgataggggatcgaatatgaaaaaggggggtcaccttcaagcatctgatacagaatcattggaaaggggaacacataaagcttgttataatatatccggtgttagagaacttcacgagccatagtacgaccgcttacaggtgaacccgctattttgggtacatccagagcacttggaaccttagtgagcttactaacggcagcctctccaacttttaaatgttcatgactggagtggagtaaaagaacattccttggctttaggtctcgatgaatgataacatgatggttcatatgagacagataatccatctcgtgtagcaatatgcaagccaaaatggatggctgatgaaggactaagagcacctttgtccttgaggtactcatgaagatcaccttctgtacatactcatgaattaacatcagaggctttctgtcggaacagctacaagaaactgaacaacattactggtgcgaagcttcacaagttgattaacgctctgcctgaaggactgaatgagcaaactatcatctgacagagatggatgaataccttagacagccacaggtgttccacgcc

SEQ ID NO: 29410 - DNA, 631 bp, Glycine max
  Clone ID: LIB3138-126-A8-R3B
taggtagtggattcaaagaaataatctggtgagcttgaaatgaattcgacacagatttcctatttgtaactgaagtagggcctgaaacattatgcttaataagagcaagtggtagatttgattttccatgggctccatcatatcttgtaccctcagacaatccagaaaaggggagaatcttgcgtctattagagtgagggattggcctcatagaagcaacaataaatttctgtctatgactggcaatagcttcaactccccggccactagcattaatagactttgaactagagcatggttcagatctttttcgactgggtggtggaggcttcagccaacttggaataccagagaaaacatgatccttaggacagttttctttctcctgcctagtacaaaagaaaagaaggcgctcggcatcatctttactaaaagatgcaactggcaatgcctgaatactagcaattcccaacataacaaggctgcggtatgccaaattgggtgcaagctgtctcagaacctgtgcacaaatatcaaaaaccattaatcaaaagataaggtttcattattcaaaaaggaaaaaggaactaacaagggtcatgttattacagcatgaaattgctaaaagatc

SEQ ID NO: 29411 - DNA, 364 bp, Glycine max
  Clone ID: LIB3138-001-Q1-N1-A10
gccattctcatcctcttctttctctctctaccattgccatggatccctacaagcaccggccatccagcgccttcaattctcccttctggactacaaattctggtgctcctatttggaacaacaactcctctttaaccgttggagctagaggtccaattctgctggaggattatcatcttgtggagaagcttgcaaattttgatagggaacgtatcccagaacgtgttgtccatgccaggggcgctagtgcaaagggtttctttgaggtcacccatgacatttctcacctgacatgtgcagatttccttcgagcccctggagttcagacgcctgtaattgttcgtttctcaactgtcattcatga

SEQ ID NO: 29412 - DNA, 287 bp, Glycine max
  Clone ID: LIB3138-001-Q1-N1-A11
ccgccgtatattttagaccgaaccgcactctttatctcttggtgcgccgcaaactatccttctccggcggcgccaccgtacaaccctcgatttaagcaaaggagcaacagatggaggtgcttggttgcaaatggcggccaccgcaagcaacaacgacgtcgccgccggcgtcgacggccccgtgatgagcctaatcaacaagcgcctgcgcgccctccagaagaagctgaacctgatactcgccatggaagaggccgtcacccagggcaagcctatgaacaaggagc

SEQ ID NO: 29413 - DNA, 318 bp, Glycine max
  Clone ID: LIB3138-001-Q1-N1-A12
gaagacgcaataatgttgtgtgtgttgaaacttgtctcaaatgaatgtttgtctgtcaagactcaagaataacttcacacgtcgccaccaatcatgaaatagcgttcattttgtaatatagaagcaagaaagatagagagactgacaacacctctctctctctcccctcgttgatcccaaatctattaggggtttttattcgatgctattcggcctgaagctttcgtttcgcggatttttttaattattttttttcctgcctatcaggaaagttgaaaaaaagatggaccatgacaagactggatgcgaagcttcccc

SEQ ID NO: 29414 - DNA, 376 bp, Glycine max
  unsure at all n locations
  Clone ID: LIB3138-001-Q1-N1-A4
gccaaatgctgttctttcaatgtggagatattttgttggagatgtcgtctttgaagtttctaagatgacttctccctacattaaatgtacagtctctttcttcatagcatttggaaatttggctgatgataccatcaattttgaggcttttccccacaagctggtgcagtttggagagattcaggaaaaagttgtattgaaattttcacaagaggaatttcttacagcttggtcaactcangtgcgtcctgcaacaactctgttggctgatgggtgtccatatttgtatgcaatggtgcatgatagttcagtgtctacaataccaggtgattttgtcattggtgtcaagtngacaaccatanacaatatgtgtgca

SEQ ID NO: 29415 - DNA, 357 bp, Glycine max
  Clone ID: LIB3138-001-Q1-N1-A5
aaaaccttcactatctctctctcttcaagcaagcgaccatggcggatggaagcaacgggggagttctaatgctggaagccccaccgtcttacggtaggcctaccggttctaacgcggaaataatcgacgcattgccttacattgatgacgactacgcagaccccagagtcaaacttgaggttgaccgtctcgtggaggatgagatgcgtcgcagcaccaagaagcccaccgatttcctcaaagatttccctcctcttcccaactccaatttccagcagaactacccaatgattgcgagagagtacgaacgtgtgagagccggaagacctcccgttgctcttgatagatcgcgctacg

SEQ ID NO: 29416 - DNA, 306 bp, Glycine max
  Clone ID: LIB3138-001-Q1-N1-A6
ggttgtcgcaatggggaaggttgtgttgttgtttctttgcatggtgttggtggtggtgtctttggcttgtgctgattcaattgagaagcttgaggttcagaagcacttgaagaacttgaatagacctcctgttaggtccatcaagagtcctgatggagatgttattgactgtatccatgtctctcaccagccagcttttgatcaccctgacctcaaaaatcacaagattcagatgaaaccaaatttccatccagaaggtcacccttttggagaaagcaaagtctcttcaaattccaagccgattac

SEQ ID NO: 29417 - DNA, 368 bp, Glycine max
  Clone ID: LIB3138-001-Q1-N1-B10
taagactacccgataagaagcaactctcaatttctgattggcgaattcgcagacatttctttaatcgagtgcttccggtggtatcattcaagaggagagtagaggaagataaagagatgacgataaaacctgttgttcgtgtttcggaggggaagctggtggtgaaggagcgaacgattctgaccggaatgccggagaacgtggttgaaacatcgacagtggaaggaatgtttatcggagtagatttggagaaggaagacagcagacacgtggtttcgctgggaaagttgaaagatgtccggttcatggcgtgcttccggttcaagttgtggtggatggcccagaaaatgggagatcgagggagagac

SEQ ID NO: 29418 - DNA, 283 bp, Glycine max
  Clone ID: LIB3138-001-Q1-N1-B11
gtccagaggaagctcgccaattgagaaagaaagctctctcgcggattgaatggctgcaaaaagctgatgtgcctaccatagcacagattgaagagttccattcgatgcagaggatgatgaatgctcctgattcaaatgataatattgatttactgttgagcattgatttgttgggtttacaaggagcaggtgaagctttttcaaacaaaattgtttttgatgataagcttgcgttggctaacacacaagaattctttgaaggaaatattccagtggattcttg

SEQ ID NO: 29419 - DNA, 415 bp, Glycine max
  unsure at all n locations
  Clone ID: LIB3138-001-Q1-N1-B5
gatccttttcttgttggaattcaaaaatatgccactcccatgaggcgcctagatgaagaaattctgtctaaggttgcacaagatatggttgaggaatggttcgattgtgttgatgaggaggattcctttgaggaagtttctttaagtgcagcacttaatggtgttgagggtttggactatatggaaagaatttctcttgccacatctgagggatttcctcatgtgctttcacgcaaaaatggtgaaaaaggcaaaaggagatttgtctctggggatggtgaagagatgacactgattccgggaaccagtgttgaagaggcttacaacaagcttataattgaacttgagaaaagtgttcctacattggttggcattgaatgttccaaggatgagaaacttnctcgtcgcaaaattt

SEQ ID NO: 29420 - DNA, 332 bp, Glycine max
  Clone ID: LIB3138-001-Q1-N1-B6
ctggtggaactgtcgcacccccaacagcacaggcagctatagtgcagtttggcagtgtgcagattgctgaacctaatactatagttaagccagtatggcaagatacccctccaggaccgagcttggatagttcttcggccagagaagagggtgaagtgcctgaatcagaattagacctagataccaggcgtaggcttctcatattgcaacatgggcaagatacaggggagcacacgtcaagtgaacccccacttcccgtcagacaccccacacaagttgatgctcccagagtcccatcacgtaggggatggttttctgtagaagaggagatg

SEQ ID NO: 29421 - DNA, 361 bp, Glycine max
  Clone ID: LIB3138-001-Q1-N1-C10
ctgaaaatgtcttgctgcggtggtaactgtggttgcggaagcggctgcaagtgcggcaacggctgcggaggctgcaagatgtacccagacttgagctacactgagtcaaccaccaccgagaccttggtcatgggagtggcacctgttaaggctcaatttgagggtgctgaaatgggtgtgcccgctgagaacgatggctgcaaatgtggaccaaactgctcctgcaacccctgcacttgcaagtgaggtgttgggagagcaagcttcaagcagagatagcccttaattaggaataatgataaactattaatgtgtagctaaaaacttatgtattatgtctgtgatggctttcgtgcactct

SEQ ID NO: 29422 - DNA, 271 bp, Glycine max
  Clone ID: LIB3138-001-Q1-N1-C11
ctcgagccgcgaaaaatacaccatcgtcgccagcttcgaccgattgcccagcacacagcaatcatggccaccgaattgactgtccagagcgagcgcgctttccagaagcagccgcacgttttccagaacaacaagaagcagggcggcaagaccaagagggctggaaagggcggcaggagatgggtgaaggacgtcggtctgggcttcaagactcccaggaccgccattgagggcaactacattgacaagaagtgccccttcactggtctcg

SEQ ID NO: 29423 - DNA, 351 bp, Glycine max
  Clone ID: LIB3138-001-Q1-N1-C12
gcctttgttgatgacctgattctttttgcagagacatctggggagaatattttaaatattttttgcaggacttctaggcaaaaaattagcctagaaaaatctcggtttttcttttaaaaaattgtggcggtttgttcaaaggaatcaacttagtcaagaaatgggaatccaagggactcaggatttggggaagtatttgggagtccctatatttcacaaaagggcctctaggagcgctttccaatttattttggattaggttgatcagcgtcttaacacatggaaagcaaaaactttatcctttgcagcgtctcatctcgtgttcgaagacaactccagcgtccccttggt

SEQ ID NO: 29424 - DNA, 364 bp, Glycine max
  Clone ID: LIB3138-001-Q1-N1-C4
tcggtaaacatttcttcggcctcaaggacatcccttcatcctcgtacgactacagctacttcctctaccaatgggccttcgccatcgccgccgccggcatcaccagcggaagcatcgccgaacgcacacagttcgtggcctatctcatctactcctccttcctcaccggcttcgtctatccggtggtctcccactggttctggtccccagacggctgggcctctgcctttaagatcaccgaccggctattttccaccggcgtaatagacttcgccggttccggcgtagtccacatggtcggcggaatagccggcctatggggagcgctgatcgaaggcccaagaatgggacgtttcgatcatgc

SEQ ID NO: 29425 - DNA, 332 bp, Glycine max
  Clone ID: LIB3138-001-Q1-N1-C5
atggagagcaatttgaagaaatgactttaaatctttgtgtactgacccccaatcgaattgtttgggattcggaagtgaaggaaatcattttatctactaatagcggacaaattggagtattaccaaatcatgcgcctattgccacagccgtagatataggtattttgagaatacgtcttcttaaagaccaatggttaacgatggctctgatgggcggttttgctagaataaacaataatgagatcactgttttagtaaatgatgcggaaaagggtagtgacattgatccacaagaagcacagcaaactcttgaaatagcagaagctaatttg

SEQ ID NO: 29426 - DNA, 393 bp, Glycine max
  Clone ID: LIB3138-001-Q1-N1-C6
tgggtttacaaggagcaggtaaagcttttccaaacaaaattgtgtttgatgataagcttgtgttggctaacacacaagaattctttgatggaaattttccagtggattcttggttaccaatttttgtgaattgtctttatcctgtaagtcaattaccttcagaagctgtcgttgtaaatgttacatgtggtagtggacgtggtggtttacccaccactgcttggattagttctgcagttaacaatcgctcctcagatatcaacaaaaagattcgcacagcacttgggaaaggtaagaaaattgtttttcttactagagttgatccttttccagtagctttactggctgttctttttgggcgtaaagaatgaaaatctgagttctaacgccact

SEQ ID NO: 29427 - DNA, 337 bp, Glycine max
  Clone ID: LIB3138-001-Q1-N1-D10
cttctgctctagaaaattcagtggtgatacatggcttcggctactctctctgtagccaaaccagcccttcaggcaaatgggaaaggcttctctgaattctctggcctccgcagctcatcaggcttccttcccttttctagaaaatcttcagaggatttccattctgtcattgccttccagacctatgcagttggaagcagtggaggatacaagaagggtgtgacagaagcaaaactgaaggttgccataaacggatttggaaggattggaaggaacttcttgaggtgctggcacggtcgcaaagactcccctcttgatgtcattgccatcaacgaca

SEQ ID NO: 29428 - DNA, 394 bp, Glycine max
  unsure at all n locations
  Clone ID: LIB3138-001-Q1-N1-D11
gcagcagtcaaaaggagtgattgggcctcattggtacaagtgtttttaacaaacagcaacagtacagagcattttgatgcatgtaagtggacaaaatcagaaccacattcctgggaattgatcttcccaatagaggtatgtggtcctaataatggttttgaaatgtggagttctgagtgggcaaatcaaacttcgtggcatttgagtttccttattgacaatcccaaacagtctacagtttttgatattctcttgggaatctctcaagattttgaaattgctggtaatactcttatgccagctttttctgttccacaggctactgccagatcttctgaaaatgcgaaatcctctgcatgatctggaaaattgngtttctttcgcttggtcgttg

SEQ ID NO: 29429 - DNA, 336 bp, Glycine max
  Clone ID: LIB3138-001-Q1-N1-D12
gaaaaacaagtagttgagaactaagaagaaggaaatggcgggctcaatgatctcctccccagctgttaccaccgtcaaccgtgccggtgccggcatggttgctccattcaccggcctcaaatccatggctggcttccccacgaggaagaccaacaatgacattacctccattgctagcaacggtggaagagtacaatgcatgcaggtgtggccaccaattggcaagaagaagttcgagactctttcctacttgccagacctcgatgatgcccaattggcaaaagaagtcgaataccttctaaggaaaggatggattccttgcttggaattcgagtt

SEQ ID NO: 29430 - DNA, 390 bp, Glycine max
  unsure at all n locations
  Clone ID: LIB3138-001-Q1-N1-D4
gcttgcacaaaagcaatgactatgtcatttaatccaaacccgtgttctgatgcatggagtttggaatttctgaagcgtactggatttcattgcgatatcatttgtgtcactggatggactgccaccccaatgcaggatgttcaggttacaattgattggtttatttcctctcaggaatgtgttcccaggacctattgtgttttaaatccacaaaatccttttgtgttaaataggtggatgggaaaattgactttcccccagggcacttcccgaagtgttaagagaatgcctctttctatagggggaggagctggtgcaaagaatgctattctcatgaatatgccaaatgctngtctttcaaatgtgaggatatttgtggagatctcgtct

SEQ ID NO: 29431 - DNA, 368 bp, Glycine max
  Clone ID: LIB3138-001-Q1-N1-D5
taaaactggcatgcctagtaactcatgtgtggtatttgaaacggctgcctagttatatcgcaaatcttttagataaatctctaaaggaattagaaagtctagtatactgcgatgtgtgatttgataaaaatttttattgtacagattccgaatgagaaactgtcattccatttaatttaattgggatgccctgaatctgacatgtctcttggaatgagtaacatgaaactcagaattatggatgtattgaatactccctaataaaaagggaattggtctatggtcaattcagtaacaaaaaatatgaaattataaatataaatttctaactgtacgtacctcgtgaaaaaaaaaaaatattttttctt

SEQ ID NO: 29432 - DNA, 379 bp, Glycine max
  unsure at all n locations
  Clone ID: LIB3138-001-Q1-N1-D6
ggctatgcagttttgaggaactggattaagtggaaacggtggggggtacagaggcagctccagcaacaaaggcaagcggtgagtgatgctgaacctcacgtggatgatgagattgaagatgttccagatggacaattatgtgtgatatgtctgatgaggagaaggcgttctgtcttcattccctgtgggcatcttgtgtgttgccaagggtgtgccatatcacttgaacgtgaagttgcacccaaatgtgctgtttgtcgtcaggagattcgagattcagtgcggacttatgaatcttgaacagacacaganctgattttctgttcactctgcgcaggaaacttttatgactgctattgagaagagtgtttgtttttac

SEQ ID NO: 29433 - DNA, 276 bp, Glycine max
  Clone ID: LIB3138-001-Q1-N1-E10
ttgagaaggaaagctctctctcgtattgaatggctgcaaaaagctgatgtgcctaccatagcacagattgaagagttccattcgatgcagaggatgatgaatgctcctgattcaaatgataatattgatttactgttgagcattgatttgttgggtttacaaggagcaggtaaagcttttccaaacaaaattgtttttgatgataagcttgtgttggctaacacacaagaattctttgatggaaattttccagtggattcttggttaccaattttt

SEQ ID NO: 29434 - DNA, 327 bp, Glycine max
  Clone ID: LIB3138-001-Q1-N1-E12
ttggtggcgtctcatgcccatatatctgcggcaagcattgggatcacggggttcttttggtggggtatggttctggtgcttatgctccaattcgttttaaggaaaagccttactggatcataaagaattcatggggggagagctggggagaagagggatattacaagatctgcagaggtcgcaatgtatgtggggtggactcgatggtctcaactgtcgctgctatacatgtttctaacaattaaatataaggatggatgcctaaacgtggtaagggcaccagtatagtatgtatggtaataatttgcacgatgtaattgttatgaa

SEQ ID NO: 29435 - DNA, 245 bp, Glycine max
  Clone ID: LIB3138-001-Q1-N1-E4
aagattttgaaattgctggtaatactcttatgccagctttttgtggtccacaggctactgccagatcttctgaaaatgcggaatcctctgcatgatctggaatttgtgttttctttcgcttgttcgtttgtttaattcaataaaggaaattaggcatgaccctcttgttgagtatgctctgcctatttgaaaatttccacacctcttttaattgtcgtaatgatgtgtgaagtgtgtgttatttt

SEQ ID NO: 29436 - DNA, 299 bp, Glycine max
  unsure at all n locations
  Clone ID: LIB3138-001-Q1-N1-E5
gtttgcagaagaaagtgatttttgtcacagtgatcactgacctgagcacatgccaccctacttggtttcatccttgggtgaatagatgttactgcccttcacaagaagtggccacgaaagcctcacaagatggccttgaggaatctcaaatccgagttttcggcttgcccattaggccttcttttgccagggcagttcttgtcaaggaacaattgagagaagaacttgngttggatcccaacttgcaagcagttttgctgatggggggtggtgaaggaatgggtcctgtgaagaaaact

SEQ ID NO: 29437 - DNA, 317 bp, Glycine max
  Clone ID: LIB3138-001-Q1-N1-F10
atccttttgtgttaaataggtggatgggaaaattgactgggccccagggcacttcccgaagtgttaagagaatgcctctttctatagggggaggagctggtgcaaagaatgctattctcatgaatatgccaaatgctgttctttcaatgtggagatattttgttggagatctcgtctttgaagtttctaagatgacttctacctacattaaatgtacagtctctttcttcataacatttggaaatttggctggtgataccatcaattttgaagcttttccccacaaacttgtgcaatttggaaagaatcaagaaaaa

SEQ ID NO: 29438 - DNA, 246 bp, Glycine max
  Clone ID: LIB3138-001-Q1-N1-F11
ctagggttatcatttctccatttccattttctctctcacttgcaagaatcgtaagctatgggaaagtcttacccaactgtgagtgctgattaccagaaggccgttgagaaggcgaagaagaagctcagaggcttcatcgctgagaagagatgcgctcctctaatgctccgtttggcatggcactctgctggaacctttgacaagggcacgaagaccggtggacccttcggaaccatcaagcaccct

SEQ ID NO: 29439 - DNA, 320 bp, Glycine max
  Clone ID: LIB3138-001-Q1-N1-F12
cagaaatcagggatgaggatgtaatctgaaattctttatgcataccattttcgttgggcttcagttttcatagagagagaaagagaggaagaggaaatgggagtgctgtccaatatgatcgatcgggaacaactgaagcccggtgatcacatttactcttggaggcaagcgtacatctatgcacaccacggaatatatgtcggtgatggaatggtgatccactttaccagaagagcaggtcaagaaattggaacaagaactgtgttggacaatctccttttcaagtcatcttcctctcattctttcgacacttcgggccc

SEQ ID NO: 29440 - DNA, 271 bp, Glycine max
  Clone ID: LIB3138-001-Q1-N1-F4
ggccaggcaagccccactcaaccaccacacctctcctcgttcgcgctacccctttctgctcttcttctacctttcaagttttaaaagtataaagatggcagagacattcctatttacctcagagtcggtgaacgagggacaccctgacaagctctgcgaccaaatctccgatgctgtcctcgacgcttgcctcgagcaggacccagacagcaaagttgcctgcgaaacatgcaccaaaaccaacttggtcatggtcttcggagaaatcacg

SEQ ID NO: 29441 - DNA, 298 bp, Glycine max
  Clone ID: LIB3138-001-Q1-N1-F5
ctctattgataagcatgtggttgttttggaggaggttttggaggtgatgacatggatgatcccatttggggaagagggtgtttctaaattgagttcaagagcttctttgaattcattggtttggtttctagaagggaaagaccttgcatcaaggcaaagtgctgctttgttgcttaaagaagtgtgtgtgcaagaattggccaaggttggaaatgttgttgaggctttggttaagatgcttagggagcctattgggagtagtacttccacaaaaggctgtttggcaacaatgtttaac

SEQ ID NO: 29442 - DNA, 265 bp, Glycine max
  Clone ID: LIB3138-001-Q1-N1-F6
gtgatgataacttaattagtgttcatgaatatgtcaagccttactttagtggttctaaattgaaaagctttctagctagtcataacatcaccattactgatggtattgacaaaactagtgcaactttgcaatttagaaagttagcagattgtgattttctcaagagaaactttaagcagatgtctaatgttttgtgggtggctcctgaggacaaggcgagtttatggtcacaacttcattatgtttcgtgtaataatctggaaat

SEQ ID NO: 29443 - DNA, 301 bp, Glycine max
  Clone ID: LIB3138-001-Q1-N1-G11
tggctgatgataccatcaattttgaggcttttccccacaagctggtgcagtttggagagattcaggaaaaagttgtattgaaattttcacaagaggaatttcttacagcttggtcaactcaggtgcgtcctgcaacaactctgttggctgatgggtgtccatatttgtatgcaatggtgcatgatagttcagtgtctacaataccaagtgattttgtcattggtgtcaagttgacaaccataaacaatatgtgtgcctatgggctcaatcctggtattttaaggtcttctcttttgggccc

SEQ ID NO: 29444 - DNA, 220 bp, Glycine max
  Clone ID: LIB3138-001-Q1-N1-G12
gctggtgcagtttggagagattcaggaaaaagttgcatggaaattttcacaagagagaacttgttacagcttggtcaactgacgtgcgtcctgcaacaactctgatggctgatgggtgtccatatttgtatgcagaggtgcatgatagctcagcgtctacaataccaggtgattttgtcattggtgtcaagatgacaaccataaacaatatgtgtgcata

SEQ ID NO: 29445 - DNA, 245 bp, Glycine max
  Clone ID: LIB3138-001-Q1-N1-G4
cattcaacgatttgcgctgtgaatcgatcattcattaacgatcgttcaaggaaatattcgttgcgatcggtgattctgttgttgttattgaaaccacaatgcggggctatggcgatgaaggagatggttacgatgattattatgaggatgaagatgagtatgaagaggaggctgaggaagagtatgaagaagaggaagaggcgcctaggaagccttcaaaagaagaaatggagtaccttgagttg

SEQ ID NO: 29446 - DNA, 195 bp, Glycine max
  Clone ID: LIB3138-001-Q1-N1-G5
caacgaatgggaccataatgtacctgctgatcatcctataacggccgacttccatgtgtatatcgaactcaacaccatgaacctagccgctccatggtgctactactataacgcgcacatctttaatacttttatgttagaaacagcataccaaagcatatcaacttgcaagctcacactattgattgctcttat

SEQ ID NO: 29447 - DNA, 258 bp, Glycine max
  Clone ID: LIB3138-001-Q1-N1-G6
agaagaactactttgctgctgctgttgctgaggagggatcccagctgttattgcttcatgctattgaagaattttcttgcaagtctacttccaatgctgtaaaggaggttgccctggttctaaagacattctacgatgctgatgtgttggaggaagagcacatattgcagtggtctcaaaagggactgaagggcaataacacgaactctaagatttggaagaatgctcaacctttcattgattggcttcagagtgcag

SEQ ID NO: 29448 - DNA, 282 bp, Glycine max
  Clone ID: LIB3138-001-Q1-N1-H10
gaaagctctctctcgtattgaatggctgcaaaaagctgatgtgcctaccatagcacagattgaagagttccattcgatgcacaggatgatgaatgctcctgattcaaatgataatattgatttactgttgagcattgatttgttgggtttacaaggagcaagtaaagcttttccaaacaaaattgcttttgatgataagcttgtgttggctaacacacaagaattctttgatcgaaattttgccatggattcttgggtaacaatttttgggaaatggcttta

SEQ ID NO: 29449 - DNA, 249 bp, Glycine max
  Clone ID: LIB3138-001-Q1-N1-H11
ctcttttctctgtttctccctttctctctgtctctctcgcgctgttcttctcatccagcaccgagtcacagactcaccgatcttacgattccctttcgacttggtttatgagctcgaaggaaagacccactcttggtggcacgcggattaaaacccgcaaacggaatattggtgggccgcttgaccctgcatcattctcggatgcaaaggtccaacattaattggataatgccggtgatctggaactta

SEQ ID NO: 29450 - DNA, 290 bp, Glycine max
  Clone ID: LIB3138-001-Q1-N1-H12
caaatatgatataattggtgctggttcacattcttcagaagattttcctgaaaaggaagatcaagaaaaacccaaaaagattgatgccagattgagacaaagaatagatcctcaatacaatgaggttcaagctcagatggaaacaaatttgtttaaattgtctcttgatgatgttgaaactcctaaaggttccatgttggatctgaaaatttctcaatctaaaattgcactttccaagaacacagttggaggaaccattctgcgtaatgatctattggcaaattttttga

SEQ ID NO: 29451 - DNA, 252 bp, Glycine max
  Clone ID: LIB3138-001-Q1-N1-H4
catggttgatgccattgatgaatatgctgttggccagctcaaggaagttgagggcaagaagcttgtctctgccaccaaggagggtctcaaacttgacgagagtgaagatgagaagaagaagcaagaggagttgaaggagaagtttgacaacctatgcaaggtgatcaaagatgttttgggtgacaaggttgagaaggttgtagtctctgaccgtgttgctgattcaccatgctgtctggtgactggagaata

SEQ ID NO: 29452 - DNA, 237 bp, Glycine max
  Clone ID: LIB3138-001-Q1-N1-H5
gtttcccgccatatattcaataagctttaaccatgtctgcctgggttggaaagtacgcagatgagcttatcaagaatgccaagtacatagccacacctgggaagggcatcttggcagcagatgagagcactggcaccattgggaagcgcctatcgagcattaacgttgagaacattgaagccaaccgccaaactcttcgcgagcttctcttcaccgctccaaatgccctccaatacc

SEQ ID NO: 29453 - DNA, 299 bp, Glycine max
  Clone ID: LIB3138-001-Q1-N1-H6
tcttcatagcatttggaaatttggctgatgataccatcaatttggaggcttttccccacaagctggtgcagtttggagagattcacgaaaaagttgtattgaaattttcacaagaggaatttcttacagcttggtcaactcaggtgcgtcctgcaacaactctgttggctgatgggtgtccatatttgtatgcaatggtgcatgatagttcagtgtctacaataccaggtgattttgtcattggtgtcaagttgacaaccataaacaatatgtgtgcatatgggctcaatactggtatt

SEQ ID NO: 29454 - DNA, 310 bp, Glycine max
  Clone ID: LIB3138-001-Q1-N1-H9
ctatgagcaatctgagaaccctatgtagacctcagacggtgttgtctttcattacttgcagacaccaatttcgttctagggtttcgtttcgaaaccctaattgcaagccccgtttgccatctccgtttctttattctacaatcggttcctgggtttcgaatccctggtttcgcgtgaaccagaggagaaccgtggccaaggcaacaaactgggctgaacaaaaatccccatatgaaactcttgaattggaaagagatgctgatgaggagcagataaagaatgcttacagacgcttggccaaattctatca

SEQ ID NO: 29455 - DNA, 524 bp, Glycine max
  Clone ID: LIB3138-021-Q1-N1-A10
gaagaacaagtagttgagaactaagaaggagaagcaaatggcttcctcaatgatctcttccccagctgttaccactgtcaaccgtgccggtgccggcatggttgctccattcactggcctcaagtccatggctggcttccccaccaggaagaccaacaatgacattacctccattgctagcaacggtggaagagtgcaatgcatgcaggtgtggccaccagttggcaagaagaagtttgagactctttcctacctgccagaccttgatgatgcacaattggcaaaggaagtagaataccttcttaggaagggatggattccttgcttggaattcgagttggagcacggtttcgtgtaccgtgagcacaacaggtcaccaggatactacgatggacgctactggaccatgtggaagctgcctatgtttggttgcactgatgcttctcaggtgttgaaggagcttcaagaggctaagactgcataccccaacggcttcatccgtatcatcggattcgacaacgttc

SEQ ID NO: 29456 - DNA, 471 bp, Glycine max
  Clone ID: LIB3138-021-Q1-N1-A11
cttcacacaagctgtcgaaatctgcaaaaacaaaccgcaaacatgggtaaggagaagtctcacatcaacgtcgtggtcatcggccacgtcgactccggcaagtctaccactaccggtcacttgatctacaagtgcggtggtattgacaagcgtaccatcgagaagttcgagaaggaagccgccgaactcggcaagggttccttcaagtacgcatgggtccttgacaagctgaagtccgagcgtgagcgtggtatcaccattgatatcgccctctggaagttcgagacccccaagtacaacgttactgtcatcgacgctcccggtcaccgtgatttcatcaagaacatgatcactggtacctgccacgctgactgcgccattctcatcattgccgccggtactggtgagttcgaggccggtatctgcaaggacggtcagacccgtgagcacgctcttatcgcctacattctc

SEQ ID NO: 29457 - DNA, 535 bp, Glycine max
  Clone ID: LIB3138-021-Q1-N1-A12
atcctgcttgcacaaaagcaatgactatgtcatttaatccaaacccgtgttctgatgcatggagtttggaatttctgaagcgtactggatttcattgcgatatcatttgtgtcactggatggactgccaccccaatgcaggatgttcaggttacaattgattggtttatttcctctcaagaatgtgttcccaggacctattgtgttttaaatccacaaaatccttttgtgttaaataggtggatgggaaaattgactttgccccacggcacttcccgaagtgttaagagaatgcctctatctataaggggaggagctggtgcaaagaatgctattctcatgaatatgccaaatgctgttctttcaatgtggagatattttgttggagatctcgtctttgaagtttctaagatgacttcttcctacattaaatgtacagtctctttcttcatagcattcggaaatttggctgatgataccatcaattgtgaggctattgcccacatgctggtgcagtttggagagattcatgaaaa

SEQ ID NO: 29458 - DNA, 293 bp, Glycine max
  Clone ID: LIB3138-021-Q1-N1-A8
attagatatagctatgaaaaattactgcgccaggctaaagcttcaagtatgttttttccattccttcaaaaatttggtttctttggtgtgtatggcgatgataacttaattagtgttcatgaatatgtcaagccttactttagtggttctaaattgaaaagctttctagctagtcataacatcaccattactgatggtattgacaaaactagtgcaactttgcaatttagaaagttagcagattgtgattttctcaagagaaactttaagcagatgtctaatgttttgtgggt

SEQ ID NO: 29459 - DNA, 113 bp, Glycine max
  unsure at all n locations
  Clone ID: LIB3138-021-Q1-N1-B1
attcaacatttctccccttaagcttggttcaccaaatggctgctgcgggtagtgctgcantctcttttttcatccaccaaatctacctctctttcaagcaggacctccctcat

SEQ ID NO: 29460 - DNA, 329 bp, Glycine max
  Clone ID: LIB3138-021-Q1-N1-B10
attgttgctgatatcatacgcagctgttgtgattcgcaccgtgaacaaacagagagccatggccgtcagaaagaacaagcgcatattcaaagggaaaaagggtcggcaagaagaacgcagctgatcccttggccaagaaggattgggatgacattaatgcccctgctatttatcaagtgaagaatgaaggcaaaaccctggattctcgtacgcatggtaccaagattgcttgtgaaggactgacacatagagtgatagaggtctccttggctgatcttgatagtgatgatgatcatgcatgcaatacgattatgttgagagctgaagat

SEQ ID NO: 29461 - DNA, 526 bp, Glycine max
  Clone ID: LIB3138-021-Q1-N1-B11
gccagttctgatatttacaccatctgctctcaagactgtgaattgtggaatcctgcttgcacaaaagcaatgactatgtcatttaatccaaacccgtgttctgatgcatggagtttggaatttctgaagcgtactggatttcattgcgatatcatttgtgtcactggatggactgccaccccaatgcaggatgttcaggttacaattgattggtttatttcctctcaggaatgtgttcccaggacctattgtgttttaaatccacaaaatccttttgtgttaaataggtggatgggaaaattgactttcccccagggcacttcccgaagtgttaagagaatgcctctttctatagggggaggagctggtgcaaagaatgctattctcatgaatatgccaaatgctgttctttcaatgtggagatattttgttggagatctcgtctttgaagtttctaagatgacttctccctacattaaatgtacagtctctttcttcatagcatttggaaaattggctgatgata

SEQ ID NO: 29462 - DNA, 147 bp, Glycine max
  Clone ID: LIB3138-021-Q1-N1-B7
aaaaggatgaagaagacaagcctcatcctcaggaggaggtcatcgccaccgagtttcaaaaagtcactgtctcagaccaaggagagaacaagcacagcctcttagaaaagcttcaccgatctgacagcagctctagctcttcaagtg

SEQ ID NO: 29463 - DNA, 108 bp, Glycine max
  Clone ID: LIB3138-021-Q1-N1-B9
cccttctggatttccgctcacagttatttgcaatagcatttttaatgagatgctcattagatatagctatgaaaaattactgcgccaggctaaagctccaagtatgtt

SEQ ID NO: 29464 - DNA, 522 bp, Glycine max
  Clone ID: LIB3138-021-Q1-N1-C10
tccaaactcttttttcatttgcagcatcaaaatgagtggtagcaacgatggtagcggcagctggagctctaggtttttgaaggtggctagtgcagctgccgctacagccgccgttgccggcggtttatatgccattctttcatcctcaacctctgctagctctgagatggaagtgccgtttggcagcgcacggcgtgagagcaaagaacgtgacgatggtggctccgggtctcatcctcgcgagggtgccaccacggtcagtcgttggaagaaacctgagattggttgggtgaagctgaacgtggatggttcacgcgacccatacaaaagttcctccgctggttgtggtggtgttctgagggacgcatcagcaaagtggctccgtggctttgctaaaaaaactgaaccctacttatgcagtgcaccagacagagttagaagccattctcacgggcttgaaggtggcttcagagatgaatgtaagaaaactaatgtgagtcagaagtgactctgtgtgagcat

SEQ ID NO: 29465 - DNA, 538 bp, Glycine max
  Clone ID: LIB3138-021-Q1-N1-C12
cagcaacaataacaatggcagcctcactacaagctgcagctaccttcatgcaacccaccaaggtgggcatggccactcgcaacctcaaatctacacaatgcatttctaaggcttttggcttggaacccgctgcagctaaactcatttgctcccttaagcccgatctcaaagattttgctcaaaaatgtgtcgacgccaccaaaattgcaggattcgcccttgccacctcagctctcgttgtttctggagcgagtgcagaaggtgttccaaagaagctaaccttcgacgaaatccagagcaagacatacttggaagtgaagggaactggaactgctaatcagtgcccaaccattgaaggtggagtggactcatttgccttcaaggcaaggaaatacaaggcccagaagttgtgcctggaaccaacttccttcacggtgaaggcagagggtgtggccaagaatgccccgctcgaatttcagaacaccaagctcatgactcgtctgacctacaccctggacgagatcgagggtcccttcga

SEQ ID NO: 29466 - DNA, 418 bp, Glycine max
  Clone ID: LIB3138-021-Q1-N1-C7
cactttgtctctgttctgtgtgtgcgagaaatggcgatggcaatggcgcttcgcaggctttcatcttcaattgacaagcctctgcgccctctcttcaatgccggttccctctactacaagtcgtctttgcctgatgaagctgtttacgacaaggagcgacccggagttacatggccgaagcagttgaatgctccacttgaggtcgtggatcctgagattgctgatattattgagcttgagaaagctaggcaatggaaggggctagaattgataccgtcagagaatttcacctctgtgtctgtgatgcaagcggttggatcggttatgaccaacaaatacagtgaggggtaccctggtgcaagatattatggtggaaatgagtatatagacatggctgaaacactgtgccaaaagcgtg

SEQ ID NO: 29467 - DNA, 468 bp, Glycine max
  Clone ID: LIB3138-021-Q1-N1-C8
attgaccttctcggtggaggaatcttagtggacaaaactggagattggatcacacttatacaaaattctccaattagtaacttgttgagagttgctgcttggaagaaaggctgtttaatggtcaagattgtgatgtctgggaatgcagcagtcaaaaggagtgattgggcctcattggtacaagtgtttttaacaaacagcaacagtacagagcattttgatgcatgtaagtggacaaaatcagaaccacattcctgggaattgatcttcccaatagaggtatgtggtcctaataatggttttgaaatgtggagttctgagtgggcaaatcaaacttcatggcatttgagtttccttattgacaatcccaaacagtctacagtttttgatattctcttgggaatctctcaagattttgaaattgctggtaatactcttatgccagctttttctgttccacaggctact

SEQ ID NO: 29468 - DNA, 411 bp, Glycine max
  Clone ID: LIB3138-021-Q1-N1-C9
atcggcaccgctacgcctgtagactctgcttatggcgctggcggagcttttgtcgtcagcttccctggcgcatcttcggcaccagaatgccccggaccgaattacattgtacaagattacgctgtcgactgggcgattgtgcagacgcagaattggagcacgctttacatcctgagcagggagcgacagccagcacctgcaagcattgatgcctggattgatcgcgctgtggcctttggatccgacgcgacgtcgatttcgaagttcaaccaaacaggctgcgaatagacgtaagcggacaagaaaaagatggctatgtagagactcgatctgtgggaagcagcctgtttttccatcgagaaagtacctaatagaagagtgatcaaataatacgagcattgtctacgcgtc

SEQ ID NO: 29469 - DNA, 537 bp, Glycine max
  Clone ID: LIB3138-021-Q1-N1-D10
catcattggccatcggattccttctgtttatattcttcttattttttagagaaagacttgcatatatatttacctcaaataaagaggtggcctttgctgttggggatttgtcacctttgttgtcggtctctatattactgaacagtgttcaacctgtactctcaggagtggctataggagcagggtggcaaagcattgtagcatatgtgaatatggggtgttattatgccataggtattcctgtaggtattgtacttggtaacgttctggatttgcaagtcaagggaatctggattggaatgttgtttggaacgttgattcaaactatagtgctaattgtaatcacctacaaaactaattgggacgagcaggttaccattgctcagaagcgtattaacaggtggtcgaaagtggacagtcctgatcatgaaaatgaaatagaaagaaaaaacgttagctaattagtttcagtgtcatcatctatgtactgtgttgtgatacagcaaaaaagtagatagcaattgtacgtcatttttt

SEQ ID NO: 29470 - DNA, 462 bp, Glycine max
  Clone ID: LIB3138-021-Q1-N1-D11
taaggacaacgcttttatgattgcttttgcctgcatccaaattcttctaagccaaataccaaacttccataagctctcttggctctctatcgtagcagctgttatgtcttttgcttattcttccattgggcttggcctttccatagccaaaatcataggtgggggacacgtgcgaacaaccttaacaggggtggaagtttcgggaacggaaaaggtttggaaaatgtttcaagctatcggtgacattgcctttgcttatgctttttctaatgtcctaattgagatccaggacacactgaaatcaagcccacctgagaacaaagtcatgaagagagcaagtttgattggcattatgactacaacattgttttatgtactatgtgggtgcttaggctatgctgcatttggaaatgatgcaccatctaatttcctcacaggattcggcttctatgagcccttttg

SEQ ID NO: 29471 - DNA, 357 bp, Glycine max
  Clone ID: LIB3138-021-Q1-N1-D12
gttacatgtggtagtggacgtggtggtttacccaccactgcttggattagttctgcagttaacaatcgctcctcagatatcaacaaaaggattcgcacagcacttgggaaaggtaagaaaattgtttttcttactagagttgatccttttccagtagctttactggctgttctttttggcgttaagaatgaaattctgagttctaacgccactaatcctatgctgacgcgacttcttgagaactgtaagagtctcaaatatctggttgatgagtgtccttttgcatttgtgaactagtatgtagtattttattcacttaaataaagcgcattactatgtgcaatgagtgtgtttaaa

SEQ ID NO: 29472 - DNA, 480 bp, Glycine max
  unsure at all n locations
  Clone ID: LIB3138-021-Q1-N1-D7
tgccaccccaatgcaggatgttcaggttacaattgattggtttatttcctctcaggaatgtgttcccaggacctattgtgttttaaatccacaaaatccttttgtgttaaataggtggatgggaaaattgactttcccccagggcacttcccgaagtgttaagagaatgcctctttctatagggggaggagctggtgcaaagaatgctattctcatgaatatgccaaatgctgttctttcaatgtggagatattttgttggagatctcgtctttgaagtttctaagatgacttctccctacattaaatgtacagtctctttcttcatagcatttggaaatttggctgatgataccatcaattttgaggcttttccccacaagctggtgcagtttggagagattcaggaaaaagttgtattgaaattttcacaagaggaatttcttacagcttggtcaactcangtgcgtnctgcaacaac

SEQ ID NO: 29473 - DNA, 531 bp, Glycine max
  Clone ID: LIB3138-021-Q1-N1-D8
gttctaaattgaaaagctttctagctagtcataacatcaccattactgatggtattgacaaaactagtgcaactttgcaatttagaaagttagcagattgtgattttctcaagagaaactttaagcagatgtctaatgttttgtgggtggctcctgaggacaaggcgagtttatggtcacaacttcattatgtttcgtgtaataatctggaaatgcaagaagcttatcttgtcaatctcgtaaatgtgttacgagaattgtatttgcacagtccagaggaagctcgccaattgagaaggaaagctctctctcgtattgaatggctgcaaaaagctgatgtgcctaccatagcacagattgaagagttccattcgatgcagaggatgatgaatgctcctgattcaaatgataatattgatttactgttgagcattgatttgttgggtttacaaggagcaagtaaagcttttccaaacaaaattgtttttgatgataaagctgtgttggctaacacacaagaattctttgatg

SEQ ID NO: 29474 - DNA, 550 bp, Glycine max
  Clone ID: LIB3138-021-Q1-N1-D9
tttaacaatggtatggagagttggtagccatttgtgattctgaaaaacccatcaagatggatcaagacagttctattgggaaagttttcaagttcacacatgttctggctgcctccttcgccggtttagttgccgccgccgccgcctcaagctaccggcgggcaccgtccacggtggtgggagagcagaagaaggttattcccgagctacgtaggacggaatctgggcgtctcggggagatggaaaagttctcccactatgttgcaaggcaaatggggtttgaagatgctgatgaggttccagagctatgcatattggcccaagagtatttgaagaaatccaaagggtgcgatgaaagcatctttgaatatatttccagtggcaatgtggagaacactgattctctatatgcgaaattagttgaggagttagagagatgcatcctcagttatttagcatttcactggaaccaagctacatctgtcattagtcaggttttgggtgtggagtctcagcagaaaaaaaagctgaagggaattctattggcagc

SEQ ID NO: 29475 - DNA, 465 bp, Glycine max
  Clone ID: LIB3138-021-Q1-N1-E11
tatgttacatgttccaattacctcggtggcaatcagtgaacaacgccaaatcttaaacttgttcttttgtttctcttttgtactactagttctgaacatggagctgttgtctctgagactcaccccttcaccttctgcttcgacttcatcgcttcctgcagcacttgctcactgctccaagctatgtgagtttcaaccgcggaagaagaagaaggtgtgtttcgacgcgcctaggcttgcggtgcggtgtgtgaaagcctcggcgcagcgaaccggtgatactatcgacgatggagagactcggactgggttcaccacacctgccatggaagtcaccacattcaatcgaaccactttcaccgatgctgctgactttcccgtttgggaaaagattggtgctgtcgtcagactcagttatggcctcgggatttatggtgccatggcagttgcggggagttttatatg

SEQ ID NO: 29476 - DNA, 479 bp, Glycine max
  Clone ID: LIB3138-021-Q1-N1-E12
cagaggcggaaggcccattcgggtggttacatttccgaataccattgtgcagattgaaccagacatgaattcaaggtttcagcttttgagtaccactaccaatggtgattttgttcaagggaaagatctcgcaatggttaaagttaatgtagcatgtgctgctgttggcttgacatcaagttacactccaactccattgttggaatctggtttgcaaaaagacagagggttaattgtggagtattttggaaggatgtcttacgttgctcataacgttaatcagccccaagagaaagatttgttggaaggaaatttttcctttgatattaaatctcgctctagattggaaaaagtttcctctacaaaagcacaatttgttagtggaaaaaccttcaaatatgatataattggtgctggttcacattcttcagaagattttcctgaaaaggaagatcaagaaaaacccaaaaagattgatg

SEQ ID NO: 29477 - DNA, 475 bp, Glycine max
  Clone ID: LIB3138-021-Q1-N1-E5
ggtgatgataacttaattagtgttcatgaatatgtcaagccttactttagtggttctaaattgaaaagctttctagctagtcataacatcaccattactgatggtattgacaaaactagtgcaactttgcaatttagaaagttagcagattgtgattttctcaagagaaactttaagcagatgtctaatgttttgtgggtggctcctgaggacaaggcgagtttatggtcacaacttcattatgtttcgtgtaataatctggaaatgcaagaagcttatcttgtcaatctcgtaaatgtgttacgagaattgtatttgcacagtccagaggaagctcgccaattgagaaggaaagctctctctcgtattgaatggctgcaaaaagctgatgtgcctaccatagcacagattgaagagttccattcgatgcagaggatgatgaatgctcctgattcaaatgataatattgatttac

SEQ ID NO: 29478 - DNA, 574 bp, Glycine max
  Clone ID: LIB3138-021-Q1-N1-E8
aaaccttcaaatatgatataattggtgctggttcacattcttcagaagattttcctgaaaaggaagatcaagaaaaacccaaaaagattgatgccagattgagacaaagaatagatcctcaatacaatgaggttcaggctcagatggaaacaaatttgtttaaattgtctcttgatgatgttgaaactcctaaaggttccatgttggatctgaaaatttctcaatctaaaattgcacttcccaagaacacagttggaggaaccattctgcgtagtgatctattggcaaattttttgacagagggcaattttagagcaagtgttgatttgcagcgcactcatcgtattagaggaatgattaaaatggtggccacagttggtattcctgagaatacaggtatatcattggcctgtgctatgaatagttcttttagggggcgcgccagttctgatatttacaccatctgctctcaagactgtgaattgtggaatcctgcttgcacaaaagcaatgactatgtcatttaatccaaacccgtgttctgatgcattgagtttggaatttttggagcgtac

SEQ ID NO: 29479 - DNA, 516 bp, Glycine max
  unsure at all n locations
  Clone ID: LIB3138-021-Q1-N1-E9
cgaaacctcatccatggcttctcttctccgttgcaacggagtcttcctctcccccttacctccccaacccagacgcgaccccatccttcccaaattctttcttccccaatccccaaatcctaaaccggcacgccttctgacggggccccccgaagggaaagaaaacttcttcggcggcggcaacaacaacaacaacaatttcttcggacaccagaatccgggaaatcttccgaacccgggactaccaacaggaattcgggttcaagggggacatcgagtcttttgacaatccaaaaggggctctcgaaagaaaccatccgtctgatctcgtccctgnaagaggagccncagtggatgctcgaattccgcctcaaggccttcgagaaaatcctgtccatgaaggaacccacctggtctgataacacttacccccccatcgacttccagaacatctgctactactccgctcccaagataaaccctcacttcaatccctcgacgacgccgaccccgagc

SEQ ID NO: 29480 - DNA, 482 bp, Glycine max
  Clone ID: LIB3138-021-Q1-N1-F10
attgatttactgttgagcattgatttgttgggtttacaaggagcaggtaaagcttttccaaacaaaattgtttttgatgataagcttgtgttggctaacacacaagaattctttgatggaaattttccagtggattcttggttaccaatttttgtgaattgtctttatcctgtaagtcaattaccttcagaagctgtcgttgtaaatgttacatgtggtagtggacgtggtggtttacccaccactgcttggattagttctgcagttaacaatcgctcctcagatatcaacaaaaggattcgcacagcacttgggaaaggtaagaaaattgtttttcttactagagttgatccttttccagtagctttactggctgttctttttggcgttaagaatgaaattctgagttctaacgccactaatcctatgctgacgcgacttcttgagaactgtaagagtctcaaatatctggttgatgagtg

SEQ ID NO: 29481 - DNA, 396 bp, Glycine max
  Clone ID: LIB3138-021-Q1-N1-F11
cgagttgcagttggtaatactcacaatctggatttctccggaagcaaaccctagcagaaaaaaaaaacgaaatcaatgggaatctgcaggaggaagtgggaggaatagaatcaatcagaaatcgaatcacagtagtgatgatggcaaaccttccggtggaagtagtgaccgaaatcctgtcccgtctaccggtgaagtcggtgatccggctgcggtctacctgcaagtggtggcggtccatcatcgacagcaggcacttcgtcctcttccacctcaacaaatcccactccagcctcattctccgccaccgctcccacctctactccttggacctcaaatctccggaacagaatcccgtggaactgagccaccccctgatgtgctacagcaacagca

SEQ ID NO: 29482 - DNA, 471 bp, Glycine max
  Clone ID: LIB3138-021-Q1-N1-F12
ctcgagccgattcggctcgagattgatttactgttgagcattgatttgttgggtttacaaggagcaggtaaagcttttccaaacaaaattgtttttgatgataagcttgtgttggctaacacacaagaattctttgatggaaattttccagtggattcttggttaccaatttttgtgaattgtctttatcctgtaagtcaattaccttcagaagctgtcgttgtaaatgttacatgtggtagtggacgtggtggtttacccaccactgcttggattagttctgcagttaacaatcgctcctcaaatatcaacaaaaggattcgcacagcacttgtgaaaggtaagaaaattgttgttcttactagagttgatccttttccagtaactttactggcttgtctttctggcgttaagaatgaaattctgagctgtaacaccactaatcctatgctgacgcgactttttgagaac

SEQ ID NO: 29483 - DNA, 525 bp, Glycine max
  Clone ID: LIB3138-021-Q1-N1-F4
gaagcaatggctcaaaccatgttgctcatgtctagtgtctctagcagttattccgtggatttgaagaaagaccttttcctccaattgcagagtcaaagtttaaggcctaagttctctcagctctcattcaacccacttccatcatcaacttcttccttttcttcaccccgtacattcacaactctggccctcttcaaatctaagaccaaagccgctcctgctaagactaaggttacaaagccaaagcaaaaggttgaagatggtatctttggcacttctggaggatttggttttactaagcagaacgagctctttgtgggtcgtgttgctatgcttggttttgcagcatcactgttgggtgaaggaataactgggaaaggaattctagcacaattgaatctggaaactggaattcccctttatgaagcggagcctcttcttctggttttcatcctcttcaccctgctaagagccattggaggtttaagtgaccgtggaaaattttgtgatgacgaacctactact

SEQ ID NO: 29484 - DNA, 513 bp, Glycine max
  Clone ID: LIB3138-021-Q1-N1-F7
caaaaagaaagaatcccaggcgaggagaaagatggaggggaaggagcaggatgtgtcgttgggagcgaacaagttccccgagagacagccgattgggacggcggcgcagagccaagacgacggcaaggactaccaggagccggcgccggcgccgctggttgacccgacggagtttacgtcatggtcgttttacagagcagggatagcagagtttgtggccacttttctgtttctctacatcaccgtcttaaccgttatgggagtcgccggggctaagtctaagtgtagtaccgttgggattcaaggaatcgcttgggccttcggtggcatgatcttcgccctcgtttactgcaccgctggcatctcagggggacacataaacccggcggtgacatttgggctgtttttggcgaggaagttgtcgttgcccaaggcgattttctacatcgtgatgcaatgcttgggtgctatttgtggcgctggcgtggtgaagggtttcgaggggaaaacaaa

SEQ ID NO: 29485 - DNA, 623 bp, Glycine max
  unsure at all n locations
  Clone ID: LIB3138-021-Q1-N1-F8
tttacgcttctcttctctgcagcaactatgcctaaccctaaggtcttcttcgacatgaccatcggcggtcaatctgctggccgcatcgtgatggagctctacgccgacgtcactccccgcaccgccgagaacttccgcgcgctttgcaccggcgagaagggcgtagggcggagcggcaagcccctccactacaagggctcgtccttccaccgcgtgatcccgagtttcatgtgtcagggtggcgacttcaccgccggaaacggaaccggcggcgagtcgatttatggcgccaagttcgccgacgagaacttcgtgaagaagcacaccggtcccggcatcctctccatggcgaacgccggtcccggaaccaacggatctcagttcttcatttgcacggagaagacagagtggctcgacggaaagcatgtcgtgttcggacaggtcatcgaaggattgaacgttgtcaaggacatcgagaaggtcggatccagctccggcaggacctccaaagcccgtgtcatcgccaactgcggtcaactctcttagaacacgttgacccgcggctttaatctctgaatctgngtatttctttcgggtcgttttgcccttttttctctcttttc

SEQ ID NO: 29486 - DNA, 619 bp, Glycine max
  unsure at all n locations
  Clone ID: LIB3138-021-Q1-N1-F9
gtaatactaatgtgagtgatgagttaggtggttccggaaatagtaacaataaaaagaaaggagagaagaaggttaaaaagcctagatatgcttttcaaactaggagccaggttgatattcttgatgatggttatcgatggaggaagtatggccaaaaagctgttaaaaacaacaaatttccaaggagctactacaggtgcacgcatcaagggtgcaatgtgaagaagcaagtgcaacggctaaccaaagacgaaggggtagtggtgaccacttatgagggagtgcacacacacccaattgaaaagacaacagataactttgagcacattttgagtcagatgaaaatatacactcccttttaaaccttcttctccacaaacagtgtacctcaattgggaactacttgtagtacttttgttcccccctttgatacaaaaataaaactgtgtcaatagaagtaattaagatctagtttattgcataaactctttttagacaatcttctttctttctttcccatttgtttttttaaaaaaaaattggattattattagcgtatgtaaattcaactgtaaagtcagtacttgtgagatatatacaggtgatatnctttacttat

SEQ ID NO: 29487 - DNA, 456 bp, Glycine max
  Clone ID: LIB3138-021-Q1-N1-G11
tggaggggttcatagatttagggaatcgattactatactagtaataaattgtacaaaaaataaaaatataaataatataaatataaaaagaacaaacacaaattttatgtgattagtcgcggtatttaaaataaaaaatgaaagtagacaaataaaaaaggaaaggagatgtttgaataaaaataattccccttcaagttcttattttttgagaggacaggacaatatgaatgttttattatgctctatcaacacattaaaaagattatatgatatatctgctgtggaagtaggtcaacatttctattggcaaatagggagtttccaagtacatgcccaagtacttattacttcttgggttgtaattgctctcttattggtttcagccattctaattattcgaaatctgcaaaccattcccgctttcggtcagaatttctttgaatatgttctttg

SEQ ID NO: 29488 - DNA, 408 bp, Glycine max
  Clone ID: LIB3138-021-Q1-N1-G12
ggaaaaagttgtattgaaattttcacaagaggaatttcttacagcttggtcaactcaggtgcgtcctgcaacaactctgttggctgatgggtgtccatatttgtatgcaatggtgcatgatagttcagtgtctacaataccaggtgattttgtcattggtgtcaagttgacaaccataaacaatatgtgtgcatatgggctcaatcctggtatttcaggttctcgtcttttgggcaccattcctcagtccatttcacagcaaactgtttggaatcaaatggcaacagtgagaacaccattgaattttgattctagcaagcagagcttttgtcagttttctattgaccttctcggtggaggaatcttagtggacaaaactggagattggatcacacttatacaaaattc

SEQ ID NO: 29489 - DNA, 497 bp, Glycine max
  Clone ID: LIB3138-021-Q1-N1-G4
ttccccggcgcggcctcgtcgtcggcaactactgtcatgacgtcctccaccgcgacggcgagaccgtcgccgagaccctcggcggcgccgcctccttcatctccgttatcctcgatgccctctcccttcccttccacaccgtctccaaggtgggccccaacttcgcctacaccgccgacacatcgaatcaccccccgttaataatcccaacctcccaaaccacgctcttccacgctcacttcggttcgggccacccggaccgcctcctgaaccgcgtccgatcctgcgattcaatccaacccaccgacctcccggaccaacaaccccggttcgggttcggactcgcggtcggggtcggcggtgagattctcccggagacagtggaaaaaatgctctcgatctgcgaccacgtgttcgtggacattcaggctctgattcgcaggttcgacaacatcaacggtcgcgtgagccacgtggcgctaagagagagcgggttc

SEQ ID NO: 29490 - DNA, 266 bp, Glycine max
  Clone ID: LIB3138-021-Q1-N1-G5
tagcattctaccaagagactctatggcttttgcatttgatctttgctgagtaaatccttctgcccaaatggaacaaggttctccaccctacattgaaaaataacattccaagtaaggtaaggtatttgtattctgagtgcaatgcaccaattcaatcagatattaaataggaacagtcatgatacaaggggactatgaccatgaccccatgcagtatgctctcaaaatgtaaatagattaacttcatagaaataaattaatagtgt

SEQ ID NO: 29491 - DNA, 480 bp, Glycine max
  Clone ID: LIB3138-021-Q1-N1-G6
gtttatgcgttgtatgatgtccatgaaccaaccatagaagatgtcctgcttcctgggaagaacatggtggcagctggttactgtatgtatggaagctcttgcacgcttgtgttaagcactggagcaggtgttaatggtttcacccttgacccatctcttggtgagttcatcctaactcaccctaacattaagatcccaaagaaaggtaaaatttattcagtgaatgaaggaaatgccaaaaactgggatcgtcctactgctacttacgttgaaaaatgcaagtttcctgaagatggttcatcaccaaagtctctaagatatattggaaggtaatgcaaacaactatgtgaaatagtggccagaccattgagttacgtttaaaaacaggagcaaaaagttacatttaaaaacaggtgcaaagagttacatttaaaaaaaaaaatagtaaataaataaaaagaagtcacctgaagactcttc

SEQ ID NO: 29492 - DNA, 508 bp, Glycine max
  unsure at all n locations
  Clone ID: LIB3138-021-Q1-N1-G7
acaaacttagttgtcaagttggaatcaacccatactccatggaatggactggtttggccaatagattactgagtaagggcaatgatattctgtgttgcgattatgctagttttgatggtttgattaccaagcaagttatgagcaagatggcagaaatgataaacagtctttgtggtggtgatgaaaaattgatgcgtgaaaggacgcacctgctgttggcttgttgttcaaggatggcaatttgtaagaaagatgtttggagagttgaatgtggaatcccttctggatttccgctcacagttatttgcaatagcatttttaatgagatgctcattagatatagctatgaaaaattactgcgccaggctaaagctccaagtatgtttttacaatccttcaaaaattttgtttctttgtgtgtgtatggtgatgataacttaattagtgttcatgaatatgtcaagccttactttagtggttctaaatngaaaagctttctagctagtca

SEQ ID NO: 29493 - DNA, 490 bp, Glycine max
  Clone ID: LIB3138-021-Q1-N1-G8
ttgattaccaagcaagttatgagcaagatggcagaaatgataaacagtctttgtggtggtgatgaaaaattgatgcgtgaaaggacgcacctgctgttggcttgttgttcaaggatggcaatttgtaagaaagatgtttggagagttgaatgtggaatcccttctggatttccgctcacagttatttgcaatagcatttttaatgagatgctcattagatatagctatgaaaaattactgcgccaggctaaagctccaagtatgtttttacaatccttcaaaaattttgtttctttgtgtgtgtatggtgatgataacttaattagtgttcatgaatatgtcaagccttactttagtggttctaaattgaaaagctttctagctagtcataacatcaccattactgatggtattgacaaaactagtgcaactttgcaatttagaaagttagcagattgtgattttctcaagagaaactttaaagcagatg

SEQ ID NO: 29494 - DNA, 474 bp, Glycine max
  Clone ID: LIB3138-021-Q1-N1-G9
ttcgacgctacataaagtctttcctctgcctcattattttactcttgtctccccagcattcataattaatatcatgccctccttctgcatccaaaccttcattttgtagtgggtgggggtttctcatttctctgccgttccatggatcgggaaggaggatccggcggcggatcttgctactactccgttctcgggattcgtagggacgcctccttctctgatattcgcactgtctaccgtaaactcgctatgaggtggcacccggacaagtgggctcagaatcctgcaaccgatggcgaagccaagcggcggtttcagcaaatccaagaagcctactcagcagttctctacgatcagtctaaaaagtcaatgtacgatgcggcgctatacgatcctttggaagaagaagaccaaacttttgtgacttcatgcaagagatgatcttaatgatgaacaatgtgaaagacgaggggg

SEQ ID NO: 29495 - DNA, 365 bp, Glycine max
  unsure at all n locations
  Clone ID: LIB3138-021-Q1-N1-H10
ttgcaattgaagttgaagtcttgcccttctctcttcaactccaaacacaagacatcatcatccatggctgcctccgtctccactgtcggagctgtcaacagagctcttttgaacctgaatgggtctggacctggggtttcagctcccagttcatccttctttgggagcagcttgaagaaggttattggctcaagggtccccaacacaaagatttcctctggaagcttcaagattgttgctgtagaagagaagaaagagattgaagagacccagcagaccgacaaggacagatggaagggtcttgcctatgatatctcagacgaccaacaggacatcacaagaggaaaggggtnggttgactccct

SEQ ID NO: 29496 - DNA, 264 bp, Glycine max
  unsure at all n locations
  Clone ID: LIB3138-021-Q1-N1-H11
tgcaaagaatgctattctcatgaatatgccaaatgctgttctttcaatgtggagatattttgttggagatctcgtctttgaagtttctaagatgacttctccctacattaaatgtacagtctctttcttcatagcatttggaaatttggctgatgataccatcaattttgaggcttttccccacaagctggtgcagtttggagagattcangaaaaagttgtattgaaattttcacaagaagaatttcttacagcttggtcaac

SEQ ID NO: 29497 - DNA, 350 bp, Glycine max
  Clone ID: LIB3138-021-Q1-N1-H12
gttctgaacatcgctactcagacaagcataattgcccatttgattatcgcactgctgcaagggatgccatagctaaagcaaatccaactgtcaaggctgagaaacttgttaagatctagatttgttgtctttaagtttcatgctctaggtgctgttatgctcattgttgtcctcatgagatgatccgagtttcctgcattttaatggtattattatattttatatgtgatggaggacttggagttataggacatcgctgcagttcgaagtactatttcatgtgatttgcaaaaatatacttcccattctttaatttcaagtatttaaatctctgctggtttggtggaaaa

SEQ ID NO: 29498 - DNA, 471 bp, Glycine max
  Clone ID: LIB3138-021-Q1-N1-H4
ctcgagccgctcgagccgattcggctcgagctcggtggaggaatcttagtggacaaaactggagattggatcacacttatacaaaattctccaattagtaacttattgagagttgctgcttggaagaaaggctgtttaatggtcaagattgtgatgtctgggaatgcagcagtcaaaaggagtgattgggcctcattggtacaagtgtttttaacaaacagcaacagtacagagcattttgatgcatgtaagtggacaaaatcagaaccacattcctgggaattgatcttcccaatagaggtatgtggtcctaataatggttttgaaatgtggagttctgagtgggcaaatcaaacttcatggcatttgagtttccttattgacaatcccaaacagtctacagtttttgatattctcttgggaatctctcaagattttgaaattgctggtaatactcttatgccagctttt

SEQ ID NO: 29499 - DNA, 436 bp, Glycine max
  unsure at all n locations
  Clone ID: LIB3138-021-Q1-N1-H5
ctagtatgtaatattttattcactaaaataaagcacattactatgtgcaatgagtgtgtttaaatatnaaaaaaaaaaaaaaaaaaaaaaaaaaaaaaaaaaaaaaaaaaaaaaaaaaaaaaaaaaaaaaaaaaaaaaaaaaaaaaaaaaaaaaaaaaaaaaaaaaaaaaaaaaaaaaaaaaaaaaaaaaaaaaaaaaaaaaantttnnggggggggcccgcaaaaaaggaatttggaaacccggaaaaaaaattcggaccgggccctgggggggtaaaaatttttctttaaaaaaagtgataaaaaactggggggaaaaaagggaaaaaatggttcctgggaaaaaaattatttccgtaaaaaattcaaaaaaaaaaaaagccggaaaaaaaaaagggaaaacccggggggccttaaggggggaccaaaccaaaa

SEQ ID NO: 29500 - DNA, 526 bp, Glycine max
  unsure at all n locations
  Clone ID: LIB3138-021-Q1-N1-H6
gttgggtttacatggagcacgtaaagcttttccaaacaaaattgtttttgatgataagcttgtgttggctaacacacaagaattctttgatggaaattttccagtggattcttggttaccaatttttgtgaattgtctttatcctgtaagtcaattaccttcagaagctgtcgttgtaaatgttacatgtggtagtggacgtggtggtttacccaccactgcttggattagttctgcagttaacaatcgctcctcagatatcaacaaaaggattcgcacagcacttgggaaaggtaagaaaattcgattctttaactagaggtgatcctaatctctgctcgttactgggtgatctttttggcgttaagaatgaaattctgagttctgacgccactaatcctatgctgacgcgacttcttgagaactgtaagagtctcaaatatctggttgatgagtgtncttttgcatttgtgaactaatatgtagtattttattcacttaaataaagcgcattactatgtgcaat

SEQ ID NO: 29501 - DNA, 545 bp, Glycine max
  Clone ID: LIB3138-021-Q1-N1-H7
aaaatggtggccacagttggtattcctgagaatacaggtatatcattggcctgtgctatgaatagttcttttagggggcgcgccagttctgatatttacaccatctgctctcaagactgtgaattgtggaatcctgcttgcacaaaagcaatgactatgtcatttaatccaaacccgtgttctgatgcatggagtttggaatttctgaagcgtactggatttcattgcgatatcatttgtgtcactggatggactgccaccccaatgcaggatgttcaggttacaattgattggtttatttcctctcaggaatgtgttcccaggacctattgtgttttaaatccacaaaatccttttgtgttaaataggtggatgggaaaattgactttcccccagggcacttcccgaagtgttaagagaatgcctctttctatagggggaggagctggtgcaaagaatgctattctcatgaatatgccaaatgctgttctttcaatgaggagatattgtgttggagatctcgtctttgaagtttctaagatgac

SEQ ID NO: 29502 - DNA, 505 bp, Glycine max
  Clone ID: LIB3138-021-Q1-N1-H8
agccttccctacaactccaaacacaaagacatcatcatccatggctgcctccgtctccactgtcggagctgtcaacagagctcttttgaacctgaatggttctggagctggagcttcagctcccagttcagccttctttgggaccagcttgaagaaggttattgcctcaagggtccccaacagcaaggtttccggtggaagcttcaagattgttgctgtagaagagaagaaagagattgaagagacccagcagaccgacaaggacagatggaagggtcttgcctatgatatctcagacgaccaacaagacatcacaagaggaaagggtttggttgactcccttttccaagctccacaggatgctggaactcactatgcagtcatgagctcctacgagtacctcagcactggacttcgccagtacttggacaacaaaatggatggattctacattgctccagcttttatggacaagcttgtgttcacatctccaagaacttcatga

SEQ ID NO: 29503 - DNA, 488 bp, Glycine max
  Clone ID: LIB3138-021-Q1-N1-H9
cttaaataaagcgcattactatgtgcaatgagtgtgtttaaatgtaaaaaaaaaaaaaaaaaaaaaaaaaaaaaaaaaaaaaaaaaaaaaaaaaaaaaaaaaaaaaaaaaaaaaaaaaaaaaaaaaaaaaaaaaaaaaaaaaaaaaaaaaaaaaaaaaaaaaaaaaaaaaaaaaaaaaaaaaaaaaaaaaaaaaaaaaaaaaaaaaaaaaaaggggggggcccccgaaataagaatcttcaaacccggaaaaaaatttgaaaagggtatctggggggaaaaaaattttttttaatgagggggaaaaaaaaagtgggaaaaaaaaggggaaaaatgttttcttggaaaaaaattaattgccgtaaaaattccaaaaaaatttaaagccggaaaaaaaaaagtgaaaactgggggggtcaaaagggggaggcacaccaaaataaaggggggggattcaacgcccctttttaaatggaaaaaactgggggg

SEQ ID NO: 29504 - DNA, 442 bp, Glycine max
  Clone ID: LIB3138-022-Q1-N1-A10
gttggaatcaacccatactccatggaatggactggtttggccaatagattactgagtaagggcaatgatattctgtgttgcgattatgctagttttgatggtttgattaccaagcaagttatgagcaagatggcagaaatgataaacagtctttgtggtggtgatgaaaaattgatgcgtgaaaggacgcacctgctgttggcttgttgttcaaggatggcaatttgtaagaaagatgtttggagagttgaatgtggaatcccttctggatttccgctcacagttatttgcaatagcatttttaatgagatgctcattagatatagctatgaaaaattactgcgccaggctaaagctccaagtatgtttttacaatccttcaaaaattttgtttctttgtgtgtgtatggggatgataacttaattagtgttcatgaatatg

SEQ ID NO: 29505 - DNA, 440 bp, Glycine max
  Clone ID: LIB3138-022-Q1-N1-A11
gaacagttcctcaagtatccaccacctaaagtgatgcaggtggataagtctgcatggatgactgatgaagaatttgctagagaaacgattgctggtgttaatccaaatgtcattaagattcttgaggagttcccaccacgtagcaagctagattctcaagcctacggtgatcatacctctataataacaaaacaacacttggagcctaacttgggtgggctcaccgttgagcaggctatccagagcaagaagttgttcatcttagatcaccatgactatctcattccatatttgaggaaaataaatgcaactaccacaaagacttacgctacaagaaccatatttttcttgaaaagtgatggaaccttgacgccattggccattgagttaagtaagccgcatcctcagggtgaaggatatggtcctgttagcgaagtcta

SEQ ID NO: 29506 - DNA, 414 bp, Glycine max
  Clone ID: LIB3138-022-Q1-N1-A12
atgatattgtgccatgcatcaagaggaacaatgactgacagttaagaatcgagcttggatgtcgactaccggtgaggcattggtcgaggaaagagacgaatacgggtaggggataggtaagctgtgctgctgaagacttgacatcctttcacactctgactgccaagcctgtatcttacttggataatgtcacagagaaagatgaccaatgaaaaaagaacatgtttctgcccaataataatgcatgggtccaagaacacagagatgagactattattactttcaactgtgccttgaaaaggaatcttgcatatatgacacctgactatgctgatacacattgtgaggagaacaaaacacatagtgctcttaccaaaatgactgagactggatcttcagctattaatctcattt

SEQ ID NO: 29507 - DNA, 457 bp, Glycine max
  Clone ID: LIB3138-022-Q1-N1-A7
gccggctagtgtggcctttcaggtggtgaatgggttccattggtacgagaatggagtttacactagtgacatttgcggtagcacttcccaggatgtgaaccatgccgtccttgctgtggggtatggagttgaaaatggcgtcccatattggctcataaaaaattcatggggagaaagttggggtgagaatggctacttcaaaatggaattggggaagaacatgtgtggtgttgcaacttgtgcgtcttatccagttgtggcataaattgcataagaatatggtccctggtgactaccaccttgtcatgcttcagagtttaaagataagtgtcattgtataatgaaaattgctcctagttgggttggtatgatgtattaaataacgtagaagttgctgtaaatcacgtaagaatatcatggcctgaatagtgtgtatcacagacatacataacgatca

SEQ ID NO: 29508 - DNA, 533 bp, Glycine max
  Clone ID: LIB3138-022-Q1-N1-A8
attttctcaagagaaactttaagcagatgtctaatgttttgtgggtggctcctgaggacaaggcgagtttatggtcacaacttcattatgtttcgtgtaataatctggaaatgcaagaagcttatcttgtcaatctcgtaaatgtgttacgagaattgtatttgcacagtccagaggaagctcgccaattgagaaggaaagctctctctcgtattgaatggctgcaaaaagctgatgtgcctaccatagcacagattgaagagttccattcgatgcagaggatgatgaatgctcctgattcaaatgataatattgatttactgttgagcattgatttgttgggtttacaaggagcaggtaaagcttttccaaacaaaattgtttttgatgataagcttgtgttggctaacacacaagaattctttgatggaaattttccagtggactcttggttaccaatttttgtgaattgtctttatcctgtaagtcaattaccttcagaagctgtcgttgtaaatgttacatgtggtaat

SEQ ID NO: 29509 - DNA, 491 bp, Glycine max
  Clone ID: LIB3138-022-Q1-N1-B10
gaaattttcacaagaggaatttcttacagcttggtcaactcaagtgcgtcctgcaacaactctgttggctgatgggtgtccatatttgtatgcaatggtgcatgatagttcagtgtctacaataccaggtgattttgtcattggtgtcaagttgacaaccataaacaatatgtgtgcatatgggctcaatcctggtatttcaggttctcgtcttttgggcaccattcctcagtccatttcacagcaaactgtttggaatcaaatggcaacagtgagaacaccattgaattttgattctagcaagcagagcttttgtcagttttctattgaccttctcggtggaggaatcttagtggacaaaactggagattggatcacacttatacaaaattctccaattagtaacttgttgagagttgctgcttggaagaaaggcttgttaatggtcaagattgtgatgtctgggaatgcagcaatcaaaaggagtgatt

SEQ ID NO: 29510 - DNA, 577 bp, Glycine max
  Clone ID: LIB3138-022-Q1-N1-B11
cttgaaaatcctactgtttttaccaaggaagatgtgctgccctttgatatagaagggacatggaaagctatggaagagtgttacaagttgggaatagcaaagtccattggcatatgcaattatggtatcaaaaaactcactaaactcttggaaatagccaccattcctcctgcagtcaatcaggtggaaatgaacccatcttggcagcaagggaaactcagggagttctgcaagcagaaaggaattcatgttagtgcttggtcagctcttggtgcttataagatattttggggctctggagctgtcatggagaatccaatcctccaagacatagcaaaggcaaaagggaagaccatagctcaggttgcacttagatgggtgtaccaacaagggtcaagtgccatggctaaaagcaccaacagcgagaggatgaagcagaacctggacatatttgattctgtgctgagtgaagaggatttagagaggatcagtcaggttccacaacgcaggcaatacacaggggacatatggctatctgaaaatgggtcttgcaagaacctggaagaacttgggatgg

SEQ ID NO: 29511 - DNA, 676 bp, Glycine max
  Clone ID: LIB3138-022-Q1-N1-B12
gagaaatccctaaaaactaaaaagggttttcagttttgttttgtagcagagaagaacgtaatcataatccaaattccaattccaaaacgagccaccaacaacaacccaactggtgtcgctctgtcagttcactttcctcgtgtttggttcgtactatgaagaggactatgccatggagtgatgacgatgagtcatcgtcttcacattcagattctgaatgtgatagtgaaactggagggggaaattccaaaggtaaatctagaaagcagacaactaagaaaagtggtctaattgactttgaagctctgaagcgacacggttatagaggtggaccttcagtcctaaaagtacccgcacccaaagaggatgactcgaagaaaaattggtcgtggtccactggaaaagaaaagcatgtagacaaggaaattgaagaatcatatgaagagcgaaagaaaacaagagaggctatttccctaggagaggagctgccagctgctctgacttggaatgacaagaagaatctttctttctctcagaaggaaaagaggaagagagagctgggtcaagctagcagaggcaaaaattatgttgaagaatagaagaggtgttgagagagaatggaatctattctggttttgatgctaaaagtgatatgccagcctagatagaatgtcct

SEQ ID NO: 29512 - DNA, 511 bp, Glycine max
  Clone ID: LIB3138-022-Q1-N1-B2
attcaaccaatactccatggaatggactggctcgcccaatagatcactgattaagggcaatgatattctgagttgcgattatgctcgtttagatggtttgattaccaaacaagttatgagcaagatggcagaaatgataaacagtctttgtggcggtgatgaaaaattgatgcgtgaaaggacacacctgctgttggcttgttgttcaaggatggcaatttgtgagaaagatgtttggagagttgaatgtggaatcccttatggatctccgcatcacagatatttgcaatagcatttataatgagatgctcattaaatatagctatgaaaaattactgcgccaggctaaagctgcaagtatgtatttacaatccttcaaaaattttgactatttgtgcgtgtatggagatgataacttaattagtggtcatgaatatgtcaagccttactatagcggttctaaatagaaaagctttctatctagtcataacatcaccattactgatggtat

SEQ ID NO: 29513 - DNA, 465 bp, Glycine max
  Clone ID: LIB3138-022-Q1-N1-B3
ctcgagcctaattggatcgagattgaccttctcggtggatgaatcttaatggacaaaactggagattggatcacactcatacagaattctacaattagtgacttgtggtgagttgctgcttggaagaatggctgcttaatggtcaagattgtgaggtctgggaatgcaacattcaaaatggagtgattgggcctgattggtacaagcgttcttaacatacaccaacagtacatagcattttgatgcatgttagtggtcaaaatcagaaccacattcctggtaattgatcttgccaatacacgtatgtggtcctaattatggctttgagatgtggagttctgagtgggcaaatcaaacttcatggcgtttgagtttgctgattgtctatacacaacagactaccgtttctgatatgctgttgagaatctctcaaaattctgaaattgctggtaatactcttatgcc

SEQ ID NO: 29514 - DNA, 399 bp, Glycine max
  unsure at all n locations
  Clone ID: LIB3138-022-Q1-N1-B7
attgaagttaaaagccttagccttccctacaactccaaacacaaagacatcatcatccatggctgcctccgtctccactgtcggagctgtcaacagagctcttttgaacctgaatggttctggagctggagcttcagctcccagttcagccttctttgggaccagcttgaagaaggttattgcctcaagggtccccaacagcaaggtttgcggtggaagcttcaagattgttgctgtagaagagaagaaagagattgaagagacccagcagaccgacaaggacagatggaagggtcttgcctatgatatctcanacgaccaacaagacatcacangaggaaagggtttagttgactcccttttccaagctccacatgatgcttgaactcactatgcagt

SEQ ID NO: 29515 - DNA, 574 bp, Glycine max
  Clone ID: LIB3138-022-Q1-N1-B8
cggctcgaggtagattctattctcctcaagcaaaacctatagctcccccacactcctccagtacttgaataaaagctaaataaatattaaagcctttccttcatcaaggtactgtttgatctttgaatttcagtcctcaaagattggaacaacaggaacatgtgtactctcacaactgttcctgtgctcccttctaagcttaacaagccttcgctttctccgcaccacaattctctttttccctactgtggaagacgggtcgggaagaagaacaaagcaatggttcctgttgcaaggttgttcggtccagccatatttgaagcctcaaaactgaaggttttgttcttaggagtggacgaaaataaacacccatgaaatcttccaaggacttatacgctaacccatagtgatataaccgctaagctcaccttggcaatctctcaaaccataaataattctcagctgcaggagtggtacaacagatctcaaaggtacgaagtggtgcacagtagataaagtgagggatgatgctctgacgtcactgcacatagtgagtcatttctctgattataca

SEQ ID NO: 29516 - DNA, 498 bp, Glycine max
  Clone ID: LIB3138-022-Q1-N1-B9
gtctctttcttcatagcatttggaaatttggctgatgataccatcaattttgaggcttttccccacaagctggtgcagtttggagagattcaggaaaaagttgtattgaaattttcacaagaggaatttcttacagcttggtcaactcaggtgcgtcctgcaacaactctgttggctgatgggtgtccatatttgtatgcaatggtgcatgatagttcagtgtctacaataccaggtgattttgtcattggtgtcaagttgacaaccataaacaatatgtgtgcatatgggctcaatcctggtatttcaggttctcgtcttttgggcaccattcctcagtccatttcacaagaaactgtttggaatcaaatggcaacagtgagaacaccattgaattttgattctagcaagcagagcttttgtcagttttctattgaccttctcggtggaggaatcttagtggacaaaactggagattggatcacacttatacaaaat

SEQ ID NO: 29517 - DNA, 405 bp, Glycine max
  Clone ID: LIB3138-022-Q1-N1-C10
cgctactcatatatcaccaaaaagattcgcacaacactcgggagaggtctgacacacgagaatcttactagagaagatcctcatccaatagcttgactgcatgttctgtgaggcgtctagaatcaaattctgagttccaacgccactcatcctatgctgacgctacttgttgagaactgcaggagtctcaaacatccgcttgttgagtgtccttttgcattaacgaactagcctgagatattatattcactgaaataacacgcattactatgtgcaatgagagtgtttaaatttctagagttgatccttttccagtaactttactggctgttctttttggcgttaagaatgaaattctgagttctaacgccactaatcctatgctgacgcgacttcttgagaact

SEQ ID NO: 29518 - DNA, 562 bp, Glycine max
  unsure at all n locations
  Clone ID: LIB3138-022-Q1-N1-C11
cggctcgagaagacatcacaagaggaaagggtttggttgactcccttttccaagctccacaggatgctggaactcactatgcagtcatgagctcctacgagtacctcagcactggacttcgccagtacttggacaacaaaatggatggattctacattgctccagcttttatggacaagcttgttgttcacatctccaagaacttcatgaccctgcccaacatcaaggttcctctcattcttggtatctggggaggcaagggacaaggaaaatctttccaatgtgagcttgtctttgccaagatgggaatcaaccccatcatgatgagtgctggagagttggaaagtggaaatgcagagataccgtgaagctgcagacatgatcaagaagggaaagatgtgcgctctcttcatcaacgatcttgatgcangagctggtcgtcttggtggaaccacacaatacactgtgaacaaccagatggtgaatgccactctcatgaacattgctgataaccccaccaatgtgcagcttccaggtatgtacaacaaggaagagaaccccc

SEQ ID NO: 29519 - DNA, 507 bp, Glycine max
  unsure at all n locations
  Clone ID: LIB3138-022-Q1-N1-C12
gcctatgatatctcatacgaccaacaggacatcacaagaggaaagggtttggttgactcccttttccaagctccacaggatgctggaactcactatgctgtcatgagctcctacgagtaccttagcactggacttcgccagtacttggacaacaacatggatggattttacattgctccagcttttatggacaaacttgttgttcacattaccaagaacttcatgaccctgcccaacatcaaggttcctctcattcttggtatctggggaggcaagggacaaggaaaatctttccaatgtgagcttgtctttgccaagatgggaatcaaccccatcatgatgagtgctggagagttggaaagtggaaatgcaggagagccagcaaaactgatcaggcagagataccgtgaagccgcagacttgatcaagaaaggaaagatgtgtgctctcttcatcaacgatcttgatgcangagctggtcgtcttggtggaaccacccaatacact

SEQ ID NO: 29520 - DNA, 295 bp, Glycine max
  Clone ID: LIB3138-022-Q1-N1-C7
gtgatgataacttaattagtgttcatgaatatgtcaagccttactttagtggttctaaattgaaaagctttctagctagtcataacatcaccattactgatggtattgacaaaactagtgcaaactttgcaatttaaaaagttagcaaatggtggattttctaaagaagaaactttaagcagatgtctaatgttttgtgggtggctcctgaagacaaggcgagtttatgggcacaacttcattatgtttcgtgtataatctggaaatgcaagaagctatcttgcaatctcgtaaa

SEQ ID NO: 29521 - DNA, 359 bp, Glycine max
  Clone ID: LIB3138-022-Q1-N1-C8
ctcgagccgcatgattccatcgtatcccatgcctgcaccccctgttgattctccagaatacaggatagcgcactgctgacctagggcgaggtgatggaaatagcggtaaatcgtcactgccgaggcgggcaagctccctcagccatggggcgtggtccttagcaggcagggaagctggaaacggtcccacgatgtaggcgtacttgaggtagtgggcgcccttgtccctgcgtatcctgacttctagaaacattgtttcgatttcgacgcacgcgcactgctgtgcgactgcgttgtgtgcatcaacatgcagtacgagaagacgctgaagcttgcgctcatcccgaccatcgtcttct

SEQ ID NO: 29522 - DNA, 554 bp, Glycine max
  Clone ID: LIB3138-022-Q1-N1-C9
gaaagatgtttggagagttgaatgtggaatcccttctggatttccgctcacagttatttgcaatagcatttttaatgagatgctcattagatatagctatgaaaaattactgcgccaggctaaagctccaagtatgtttttacaatccttcaaaaattttgtttctttgtgtgtgtatggtgatgataacttaattagtgttcatgaatatgtcaagccttactttagtggttctaaattgaaaagctttctagctagtcataacatcaccattactgatggtattgacaaaactagtgcaactttgcaatttagaaagttagcagattgtgattttctcaagagaaactttaagcagatgtctaatgttttgtgggtggctcctgaggacaaggcgagtttatggtcacaacttcattatgtttcgtgtaataatctggaaatgcaagaagcttatcttgtcaatctcgtaaatgtgttacgagaattgtatttgcacagtccagaggaagctcgccaattgagaaagaaaagctctctctcgtatttgaaat

SEQ ID NO: 29523 - DNA, 602 bp, Glycine max
  Clone ID: LIB3138-022-Q1-N1-D10
cccccacgaagcaccaattatggctctgaatctttgtatctcacctaagtttaaatgggttccttccttagatagtgcttcctattctttgagaccttcacttgggtcttgttttggtaacataaacattgctagtgtgagtctaagtactactagaagtttgagtttgaggaggagtgggagtgttagtgtaagatctagtttagaaactgcggggcccacagtcacagtgggacaggtcactgaggttaacaaggacaccttctggccgatcgttaaggctgccggggataaaaccgttgtccttgacatgtacacacaatggtgtggcccttgcaaagtgatggctccaaagtttcaagaattatctgaaaagtatctggatgttgtctttctaaagcttgattgcaaccaagacaacaggcccttggcaatagagctgggaattaaagtggttcccactttcaaaattctgaaggacaacaaggttgtaaaagaagttactggagctaaatacgatgatttggttgatgccatagacaaagttcgatctagctaaaaatatataaaaagtttctctctctctgtaaaaatattatgct

SEQ ID NO: 29524 - DNA, 668 bp, Glycine max
  unsure at all n locations
  Clone ID: LIB3138-022-Q1-N1-D11
atatgtgtgcatatgggctcaatcctggtatttcaggttctcgtcttttgggcaccattcctcagtccatttcacagcaaactgtttggaatcaaatggcaacagtgagaacaccattgaattttgattctagcaagcagagcttttgtcagttttctattgaccttctcggtggaggaatcttagtggacaaaactggagattggatcacacttatacaaaattctccaattagtaacttgttgagagttgctgcttggaagaaaggctgtttaatggtcaagattgtgatgtctgggaatgcagcagtcaaaaggagtgattgggcctcattggtacaagtgtttttaacaaacagcaacagtacagagcattttgatgcatgtaagtggacaaaatcagaaccacattcctgggaattgatcttcccaatagaggtatgtggtcctaataatggttttgaaatgtggagttctgagtgggcaaatcaaacttcatggcatttgagtttccttattgacaatcccaaacagtctacagtttttgatattctcttgggaatctctcaagattntgaaattgctggtaatactcttatgccagctttttctgttccacangctactgncagatcttctgaaaaatgcgaatctctgcatgatctggaa

SEQ ID NO: 29525 - DNA, 409 bp, Glycine max
  Clone ID: LIB3138-022-Q1-N1-D12
gtcataacatcaccattactgatggtattgacaaaactagtgcaactttgcaatttagaaagttagcagattgtgattttctcaagagaaactttaagcagatgtctaatgttttgtgggtggctcctgaggacaaggcgagtttatggtcacaacttcattatgtttcgtgtaataatctggaaatgcaagaagcttatcttgtcaatctcgtaaatgtgttacgagaattgtatttgcacagtccaaaggaagctcgccaattgagaaggaaagctctctctcgtattgaatggctgcaaaaagctgatgtgcctaccatagcacagattgaagagttccattcaatgcagaggatgatgaatgctcctgattcaaatgataatattgatttactggtgagcattga

SEQ ID NO: 29526 - DNA, 552 bp, Glycine max
  unsure at all n locations
  Clone ID: LIB3138-022-Q1-N1-D2
ctactggtggttttgaagctggaatttcaaaggatggacagactcgtgaacatgctctgctttcattcacccttggtgtgaaacagatgatttgttgctgtaacaagatggatgctactacaccaaagtactccaaggccaggtatgatgaaattgtgaaggaagtttcttcctatttgaagaaagtaggatacaaccctgacaagattccttttgttcctatatctggttttgagggagacaacatgattgagaggtccacaaaccttgactggtacaagggtcctactctgctagatgcacttgaccagatctctgagcccaagaggccttctgacaagcccctcatgctaccccttcaggatgtgtacaagattggaggaattggaactgtgcctgtgggacgggttgagactggtgtcttgaaacctggaatggtggtgacttttgcaccaactggactgacaaccgaagttaagtctgtggaaatgcaccatgaagctctcacagaggctcttcccggtgataatgtnggattcaatgttaagaatg

SEQ ID NO: 29527 - DNA, 196 bp, Glycine max
  Clone ID: LIB3138-022-Q1-N1-D3
gtatgttataaaagtgggagcttccagtatcaggtattttctcgagttgtataattttcttttgtcttgttttgatgtcgtagaggttgttgattgagggaaaattcaaaccataaagctaaggattttgtttttcagttggctaatcatgtgccaagagaatggcctatccacccgggggtccaaatgcttttgt

SEQ ID NO: 29528 - DNA, 243 bp, Glycine max
  Clone ID: LIB3138-022-Q1-N1-D7
tttatattttatctttattccactgaatagaacatgagcatataaatggataccctttatattatctatctttatattatctataaagggtaaagatatccgatgtgaatctatttgtttagttttctatcggtatgtatataggtgaataatccaacatgcctttttgtgaagtaaaaaaactaccctcgatccatgcctcaaaagggttgattatctgtaaaaaaaatcgatggattcatg

SEQ ID NO: 29529 - DNA, 620 bp, Glycine max
  unsure at all n locations
  Clone ID: LIB3138-022-Q1-N1-D8
ggtatttcaggttctcgtcttttgggcaccattcctcagtccatttcacagcaaactgtttggaatcaaatggcaacagtgagaacaccattgaattttgattctagcaagcagagcttttgtcagttttctattgaccttctcggtggaggaatcttagtggacaaaactggagattggatcacacttatacaaaattctccaattagtaacttattgagagttgctgcttggaagaaaggctgtttaatggtcaagattgtgatgtctgggaatgcagcagtcaaaaggagtgattgggcctcattggtacaagtgtttttaacaaacagcaacagtacagagcattttgatgcatgtaagtggacaaaatcagaaccacattcctgggaattgatcttcccaatagaggtatgtggtcctaataatggttttgaaatgtggagttctgagtgggcaaatcaaacttcatggcatttgagtttccttattgacaatcccaaacagtctacagtttttgatattctcttgggaatctctcaagattntgaaattgctggtaatactcttatgccagctttttctgttccacaagctactgccagatcttctgaaaatgc

SEQ ID NO: 29530 - DNA, 597 bp, Glycine max
  Clone ID: LIB3138-022-Q1-N1-E1
ctcgagccgtgaaaaattactgcgccaggctaaagctccaagtatgtttttacaatccttcaaaaattttgtttctttgtgtgtgtatggtgatgataacttaattagtgttcatgaatatgtcaagccttactttagtggttctaaattgaaaagctttctagctagtcataacatcaccattactgatggtattgacaaaactagtgcaactttgcaatttagaaagttagcagattgtgattttctcaagagaaactttaagcagatgtctaatgttttgtgggtggctcctgaggacaaggcgagtttatggtcacaacttcattatgtttcgtgtaataatctggaaatgcaagaagcttatcttgtcaatctcgtaaatgtgttacgagaattgtatttgcacagtccagaggaagctcgccaattgagaaggaaagctctctctcgtattgaatggctgcaaaaagctgatgtgcctaccatagcacagattgaagagttccattcgatgcagaggatgatgaatgctcctgattcaaatgataatattgatttacttgtgagcattgatttgttgggtttacaaggagc

SEQ ID NO: 29531 - DNA, 670 bp, Glycine max
  unsure at all n locations
  Clone ID: LIB3138-022-Q1-N1-E10
gaaccattctgcgtagtgatctattggcaaattttttgacagagggcaattttagagcaagtgttgatttgcagcgcactcatcgtattagaggaatgattaaaatggtggccacagttggtattcctgagaatacaggtatatcattggcctgtgctatgaatagttcttttagggggcgcgccagttctgatatttacaccatctgctctcaagactgtgaattgtggaatcctgcttgcacaaaagcaatgactatgtcatttaatccaaacccgtgttctgatgcatggagtttggaatttctgaagcgtactggatttcattgcgatatcatttgtgtcactggatggactgccaccccaatgcaggatgttcaggttacaattgattggtttatttcctctcaggaatgtgttcccaggacctattgtgttttaaatccacaaaatccttttgtgttaaataggtggatgggaaaattgactttcccncagggcacttcccgaagtgttaagagaatgcctctttctatagggggaggagctggtgcaaagaatgctattctcatgaatatgccaaatgctngtctttcaatgtggagatattttgttggagatctcgtctttgaagttctaagatgacttctccctacattaaatgtacagtc

SEQ ID NO: 29532 - DNA, 542 bp, Glycine max
  Clone ID: LIB3138-022-Q1-N1-E11
cttcagctatggaaactctcaaagaagtatggccctatattttcccttcaactaggtttaaggcccgccatagtgatttcctcatccaaagtggccaaagaggcacttaaaacccatgacgttgagtttagtggaagaccaaaattacttggccaacagaaactgtcctacaatggaaaagacatatcattttcaccaaatggtagttattggagagaaatgagaaaactttgtgttgtccatgtccttagctctagacgtgtctcgagcttttcctcaataataaattgtgaggttaagcagatgataaagaaaatatctaggcatgcctcatctttaaaggttacaaatttgaatgaagtgttgatatctctaacttgcgctattatatgtagaattgcttttgggagaaggtacgaagatgaaggaactgaaaggagtaggttccaggagctactcaatgagtgtgaggccatgttgagtatcttctttgtttcagattatgttccattcttgggttggattgataaactgaatggact

SEQ ID NO: 29533 - DNA, 502 bp, Glycine max
  Clone ID: LIB3138-022-Q1-N1-E2
aaaaaaaaaaaaaaaaaaaaaaaaaaaaaaaaaaaaaaaaaaggggaaaaaaaaaaaaaaaaaaaaaaaaaaaaaaaaaaaaaaaaaaaaaaaaaaaaaaaaaaaaaaaaaaaaaaaaaaaaaaaaaaaaaaaaaaaaaaaaaaaaaaaaggggggggccccccctttggggcctcttcccccgggattttattccgggccgggtccctgggggtgtccaagtttcccttttaggggggcttttaaagcttgggcaaaaaatgggaaaaagcttttccctgggaaaaattgataccgcctcaaatccccccaaaaattccgaccgggaaaattaattggtaaacccggggggcccaattggggggcctaccccactttattggggtgggcctaatggcccgtttccaagggggaaaacctgtgggcccatttgtttatataaatcgcccaccccccgggaaagggcggtttccttttgggcccccagggtggtttttttttt

SEQ ID NO: 29534 - DNA, 473 bp, Glycine max
  Clone ID: LIB3138-022-Q1-N1-E3
ggaacaagatagaagtgaagcgaacaatataacattcttgtgactgtgacaaagagatttgacttgcacgaggaatacagcttgctttctagctaacatgggctggctgggtacgagtacgactcaacttgagtgtctttcgtgaaaggcacgacactgaagcttcaaatttcaacattctcctgctcgtgtgatcgattgggaatattgcggtgctggcaatgctaactttgtgtttctgactcattgcacttaattaatttctagctagccactctgtcatgactttgttttccttttccaccgattttccagcggctgggagcttaatattcgcgggaatggaatggaacatctctagcgtgttgacttttcacgcggaggctggcgtcaagtcaaattactgctaacaaaacgtatattacagtgttaataaacaccaatgttaggggaactctgccatgaaaaataga

SEQ ID NO: 29535 - DNA, 643 bp, Glycine max
  unsure at all n locations
  Clone ID: LIB3138-022-Q1-N1-F10
ctggtatttcaggttctcgtcttttgggcaccattcctcagtccatttcacagcaaactgtttggaatcaaatggcaacagtgagaacaccattgaattttgattctagcaagcagagcttttgtcagttttctattgaccttctcggtggaggaatcttagtggacaaaactggagattggatcacacttatacaaaattctccaattagtaacttgttgagagttgctgcttggaagaaaggctgtttaatggtcaagattgtgatgtctgggaatgcagcagtcaaaaggagtgattgggcctcattggtacaagtgtttttaacaaacagcaacagtacagagcattttgatgcatgtaagtggacaaaatcagaaccacattcctgggaattgatcttcccaatagaggtatgtggtcctaataatggttttgaaatgtggagttctgagtgggcaaatcaaacttcatggcatttgagtttccttattgacaatcccaaacagtctacagtttttgatattctcttgggaatctctcaagattntgaaattgctggtaatactcttatgccagctttntcttgttcacaggctactgccagatcttctgaaaatgcggaatcctctgcatgatctgg

SEQ ID NO: 29536 - DNA, 529 bp, Glycine max
  Clone ID: LIB3138-022-Q1-N1-F11
ctaatatttaatgttctcgtctttcgggcaccattcctcagggggtttcacacaagactgtttggaatcaaatggcatcagttagaacaccattgaattttgattctagcaagcagagcttttgtcaattctctattgaccttctccgtggatgaatcttagtggacaaaactgcacaccggatcacacttatacaaaattctccaattagtaacttgttgagagttgctgcttggaacaaaggctgtttaatggtcaagattgtcatgtctgtgaatgcatccatcaaaatgagtgattgggcctcattggtactagtatttctatcaaacatcaacagctcagagcattgtgatgcatgtaagtggacaaaatcagaaccacattcctgtgaattgatcttaccaatagaggtatgtggacctaataatggttaaagaaacgtggacctctgagtggacaaatcaaacttcatagaatttaattttccttattgacattcccaaacagtctacagtattcgtttttc

SEQ ID NO: 29537 - DNA, 471 bp, Glycine max
  Clone ID: LIB3138-022-Q1-N1-F12
atactccatggaatggactggtttggccaatacattactgtgtctgggcaatgatatcatgtgttgcgattatgctagttctgatggctcagattaccaagcaaggtactgagcacagatgagcagaaatgattaacagtctctgtggtggtgattaaaaattgatgcgttaaaggacgcacctgctgttggctcgccgttcactgatggcaattcgtatgaaagatgtttggtgagctcaatgtggaattcctcacagatttccgctcacaattatctgcattagcattttcaatgatatgctgattatatatatctatgaaaaatgactgcgccatgctaaagctccaagtatgtttttacaacccttcaaaaattgtggtgctctcgttatgcatggtgataataactgaattctggtgcatgaatatgtcaagccttactatagtgggtataaattgaaaagctttc

SEQ ID NO: 29538 - DNA, 568 bp, Glycine max
  Clone ID: LIB3138-022-Q1-N1-F2
gtattttggaaggatgtcttacgttgctcataacgttaatcagccccaagagaaagatttgttggagggaaatttttcctttgatattaaatctcgctctagattggaaaaagtttcctctacaaaagcacaatttgttagtggaaaaaccttcaaatatgatataattggtgctggttcacattcttcagaagattttcctgaaaaggaagatcaagaaaaacccaaaaagattgatgccagattgagacaaagaatagatcctcaatacaatgaggttcaggctcagatggaaacaaatttgtttaaattgtctcttgatgatgttgaaactcctaaaggttccatgttggatctgaaaatttctcaatctaaaattgcacttcccaagaacacagttggaggaaccattctgcgtagtgatctattggcaaattttttgacagagggcaattttagagcaagtgttgatttgcagcgcactcatcgtattagaggaatgattaaaatggtggccacagttggtattcctgaaaatacaggtatatcattggcctgtgctatgaat

SEQ ID NO: 29539 - DNA, 338 bp, Glycine max
  Clone ID: LIB3138-022-Q1-N1-F7
ggatcgtctgagctctggggccttcaggtaggcctggcatgcggggtatccgtatgaacatcgtccatgatcaatgacctcgtcttgtttccctaagtgaaagaggtggccaccactatggagttggagctctacgggccatgcttagaggacatgtgtatcttgcatgaagaggcctagccaccttcataccatatgatatttataaaagcctctatatatgaaacgatgagctgaggctacgcatgccatgataatttctgttgataatagtgtggaaatcctcttgtaacaaaatgttcaagatctaaccttgatatttatatagccggcttcac

SEQ ID NO: 29540 - DNA, 581 bp, Glycine max
  Clone ID: LIB3138-022-Q1-N1-F8
atcaccactggctacggcgcggctgtcatcaccgcaggacgcggcggagtcgagaagggatcgcaggttgccattttcggcgccggctgtgttggtctttccgtcatccagggagctgtcaagcagggcgcttccaagatcatcgtggtcgatgtcaacgactcgaagaaggagtgggccaagaagttcggtgccactgacttcgtgaacccagccaaggatctgaaggagggcgagaacatccagagcagactgatcgacatgaccgacggaggatgcgactacactttcgactgcacaggcaacgtccacgtcatgcgatctgctctcgaggcctgccacaagggctggggagagagcatcatcatcggtgttgctgctgctggccaggagatttccaccagacctttccaactcgtcaccggtcgtgtatggaagggttgtgctttcggcggtgtcaagggccgcagccagatgggcagcctcgtgcaagactacatggacaacaagctcaaggtcgacgagttcatcacgcatcgacagccgttgagcggcatcaacgatgctttccacgacatgca

SEQ ID NO: 29541 - DNA, 481 bp, Glycine max
  Clone ID: LIB3138-022-Q1-N1-F9
attctgcgtagtgatctattggcaaattttttgacagagggcaattttagagcaagtgttgatttgcatcgcactcatcgtattagaggaatgattaaaatggtggccacagttggtattcctgagaatacaggtatatcattggcctgtgctatgaatagttcttttagggggcgcgccagttctgatatttacaccatctgctctcaagactgtgaattgtggaatcctgcttgcacaaaagcaatgactatgtcatttaatccaaacccgtgttctgatgcatggagtttggaatttctgaagcgtactggatttcattgcgatatcatttgtgtcactggatggactgccaccccaatgcaagatgttcaggttacaattgattggtttatttcctctcatgaatgtagttccaggacctattgtgttttaaatccacaaaatccttttgtgttaaataagtggatgggaaaattga

SEQ ID NO: 29542 - DNA, 618 bp, Glycine max
  unsure at all n locations
  Clone ID: LIB3138-022-Q1-N1-G10
atttaatccaaacccgtgttctgatgcatggagtttggaatttctgaagcgtactggatttcattgcgatatcatttgtgtcactggatggactgccaccccaatgcaggatgttcaggttacaattgattggtttatttcctctcaggaatgtgttcccaggacctattgtgttttaaatccacaaaatccttttgtgttaaataggtggatgggaaaattgactttcccccagggcacttcccgaagtgttaagagaatgcctctttctatagggggaggagctggtgcaaagaatgctattctcatgaatatgccaaatgctgttctttcaatgtggagatattttgttggagatctcgtctttgaagtttctaagatgacttctccctacattaaatgtacagtctctttcttcatagcatttggaaatntggctgatgataccatcaattttgaggcttttccccacaagctggtgcagtttggagagattcangaaaaagttgtattgaaattttcacaagaggaatttcttacagctgggtcaactcangtgcgtnctgcaacaactctgttggctgatgggtgtncatatttgtatgcaatggtgcatga

SEQ ID NO: 29543 - DNA, 51 bp, Glycine max
  Clone ID: LIB3138-022-Q1-N1-G11
ttttcatattggactgtcttcctctataattttgagttaaagtgtccactt

SEQ ID NO: 29544 - DNA, 650 bp, Glycine max
  unsure at all n locations
  Clone ID: LIB3138-022-Q1-N1-G12
gatttgcaaacgtgtgcactgcagtggtcaaacatgaccctacctggttgcaagaaacaagtggtggtgtttatattgtaaccggtgcacactcattagtaaagggacttggccaaagaatgtgcttcacttgcgcctactctatactcacatacccaattgcagtatcaggaagtcagaatggggtggtgcaccagaggcttcaagaaaatcatctttcctcacaaatctgagcacaacattttcattcacacagcaaagtcctcctcagaagcaggctccgacagtacttgactctggtgtgtatccagatggtccaccagtgccagttcgatctggcaaaatgcttaaatatgtggacacaagcgagtttgtgaggggcccgcatgatgctcctggtcattggttggtaactgctgctaagcttgttactgagggtggtaagattggattacaggtcaagtttgctttgttagactactagttattcattcattctaagttacttctctctcatgtatatgtagaaagaagagaaacattagtggactgcatttgtaaattnnttttgtttgaaaatacagatcacatgtacataggcacatgctttctgatgaatttgtacagtcagtacagtatacagtaatgag

SEQ ID NO: 29545 - DNA, 482 bp, Glycine max
  Clone ID: LIB3138-022-Q1-N1-G7
ctgaggacaaggcgagtttatggtcacaacttcattatgtttcgtgtaataatctggaaatgcaagaagcttatcttgtcaatctcgtaaatgtgttacgagaattgtatttgcacagtccagaggaagctcgccaattgagaaggaaagctctctctcgtattgaatggctgcaaaaagctgatgtgcctaccatagcacagattgaagagttccattcgatgcagaggatgatgaatgctcctgattcaaatgataatattgatttactgttgagcattgatttgttgggtttacaaggagcaagtaaagcttttccaaacaaaattgtttttgatgataagcttgtgttggctaacacacaagaattctttgatggaaattctccagtggattcttggttaccaatttttgtgaattgtctttatcctgtaagtcaattaccttcagaagctgtcgatgtaaatgttacatgtggtagt

SEQ ID NO: 29546 - DNA, 530 bp, Glycine max
  Clone ID: LIB3138-022-Q1-N1-G8
ggcggtggctcggatctggccgttttgggaaaagagaagagcctcaaacacatgtcgtatcgctacgccattcgaaacacgtcgtcgtttcggccttactttaagctcaggtcgcgcagagaggttgttaattggttggattcaattgtttcagattcgtcttctggggatgcggctatggtgggaaaacatggttatgaacctgaaattggagccttgaaggataatcaattgcagaggatgcgcaattgtacaaaagaattctcatggatagggttgccatgggcgtgtaagaaaagaagaaagcactatcaggcatataagagaaatggttttcagatatccgtgcatgattttatatttgttctggcagaagaggacaagcgtctagttgcctacttggaagacctttatgaggattccaaaggcaataagatggttgtggtgcgctggtttcacaaaattgatgaggttggtattgctttgcctcacagttttagtgacagagaggttttcttttctctttatct

SEQ ID NO: 29547 - DNA, 558 bp, Glycine max
  Clone ID: LIB3138-022-Q1-N1-H10
aacttagttgtcaagttggaatcaacccatactccatggaatggactggtttggccaatagattactgagtaagggcaatgatattctgtgttgcgattatgctagttttgatggtttgattaccaagcaagttatgagcaagatggcagaaatgataaacagtctttgtggtggtgatgaaaaattgatgcgtgaaaggacgcacctgctgttggcttgttgttcaaggatggcaatttgtaagaaagatgtttggagagttgaatgtggaatcccttctggatttccgctcacagttatttgcaatagcatttttaatgagatgctcattagatatagctatgaaaaattactgcgccaggctaaagctccaagtatgtttttacaatccttcaaaaattttgtttctttgtgtgtgtatggcgatgataacttaattagtgttcatgaatatgtcaagccttactttagtggttctaaattgaaaagctttctagctagtcataacatcaccattactgatggtattgacaaaactagtgcaactttgcaattta

SEQ ID NO: 29548 - DNA, 120 bp, Glycine max
  Clone ID: LIB3138-022-Q1-N1-H11
gtttgtttaattcaataaaggaaattaggcatgaccctcttgttgagtatgctctgcctatttgaaaatttccacacctcttttaattgtcgtaatgatgtgtgaagtgtgtgttatttt

SEQ ID NO: 29549 - DNA, 485 bp, Glycine max
  Clone ID: LIB3138-022-Q1-N1-H12
cttgcgacaaaatgacacaggaatatttggagccatcctaagcaggcagcatgagtcaaagatttcattctctctccaactgataagaaacgtagttccatgtgggctcttaggatccactcacttaactctaaactcgtcgtgtgtgttccttctttccacttcaaacttgtgacccagaaaaaagaccctttccattctcctacttttcttcctactccactggctgcacctcgctgccgcgtctctgcctagcgtgaaattggcctcatttcccatctgggtcctgtgaattgcgattggaaccgcgttttccccgcttctgggcttggctcagaagtagtcagaatgatgtctgtcacaggcaaaagcattgattttgctggcaaaaactaggtctcttgtggctgctcttccaatgctccttcgattgataggtacactgtgaggaactatgccaagctgaatagtaataattctaaagg

SEQ ID NO: 29550 - DNA, 519 bp, Glycine max
  unsure at all n locations
  Clone ID: LIB3138-022-Q1-N1-H7
cttttgggcaccattcctcagtccatttcacagcaaactgtttggaatcaaatggcaacagtgagaacaccattgaattttgattctagcaagcagagcttttgtcagttttctattgaccttctcggtggaggaatcttagtggacaaaactggagattggatcacacttatacaaaattctccaattagtaacttattgagagttgctgcttggaagaaaggctgtttaatggtcaagattgtgatgtctgggaatgcagcagtcaaaaggagtgattgggcctcattggtacaagtgtttttaacaaacagcaacagtacagagcattttgatgcatgtaagtggacaaaatcagaaccacattcctgggaattgatcttcccaatagaggtatgtggtcctaataatggttttgaaatgtggagttctgagtgggcaaatcaaacttcatggcatttgagtttccttattgacaatcccanacagtctacagtttttgatattctcttgggaatc

SEQ ID NO: 29551 - DNA, 585 bp, Glycine max
  unsure at all n locations
  Clone ID: LIB3138-022-Q1-N1-H8
gtttggaatcaaatggcaacagtgagaacaccattgaattttgattctagcaagcagagcttttgtcagttttctattgaccttctcggtggaggaatcttagtggacaaaactggagattggatcacacttatacaaaattctccaattagtaacttattgagagttgctgcttggaagaaaggctgtttaatggtcaagattgtgatgtctgggaatgcagcagtcaaaaggagtgattgggcctcattggtacaagtgtttttaacaaacagcaacagtacagagcattttgatgcatgtaagtggacaaaatcagaaccacattcctgggaattgatcttcccaatagaggtatgtggtcctaataatggttttgaaatgtggagttctgagtgggcaaatcaaacttcatggcatttgagtttccttattgacaatcccaaacagtctacagtttttgatattctcttgggaatctctcaagattntgaaattgctggtaatactcttatgccagctttttctgttccacaggctactgccagatcttctgaaaatgcggaatcctctgcatgatctgga

SEQ ID NO: 29552 - DNA, 621 bp, Glycine max
  Clone ID: LIB3138-022-Q1-N1-H9
gaaacatgccgcatgatcaaagcactccaccaatatgattgcttgcgagccaataaatcaacatttgcttggggtctagaagcccgtgtaccatttttggacaaggcatttatcaatactgcaatgagtattgaccctgagtcgaaaatgataaaaagagatgaaggacgaattgagaagtggattctgaggagagcctttgatgatgaagagcatccttatctgccaaagcacattttatacaggcagaaagagcaattcagtgatggagttggctatagctggattgatggccttaaggcccatgctgcaaaacatgtgactgacaaaatgatgcttaatgctggtaacatctaccctcacaacaccccaacaaccaaggaagcatattactacagaatgatctttgagaggttcttccctcagaactcagctaggctcaccgttcctggaggagcaagtgttgcatgtagcacagccaaagctgttgagtgggatgctgcttggtctaacaaccttgatccttctggtagagcagcacttggagtgcacatttcagcctatgaaaaccagaacaacaacaagggtgtagaaattgagaagatatacctatgggatgct

SEQ ID NO: 29553 - DNA, 491 bp, Glycine max
  Clone ID: LIB3138-024-Q1-N1-A10
gacctattgtgttttaaatccacaaaatccttttgtgttaaataggtggatgggaaaattgactttcccccagggcacttcccgaagtgttaagagaatgcctctttctatagggggaggagctggtgcaaagaatgctattctcatgaatatgccaaatgctgttctttcaatgtggagatattttgttggagatctcgtctttgaagtttctaagatgacttctccctacattaaatgtacagtctctttcttcatagcatttggaaatttggctgatgataccatcaattttgaggcttttccccacaagctggtgcagtttggagagattcaggaaaaagttgtattgaaattttcacaagaggaatttcttacagcttggtcaactcaggtgcgtcctgcaacaactcttgtggctgatgggtgtccatatttgtatgcaatggtgcatgatagttcagtgtctacaataccaggtgattttgtca

SEQ ID NO: 29554 - DNA, 534 bp, Glycine max
  Clone ID: LIB3138-024-Q1-N1-A11
ctccattcgcgaatggcatcctccgaatcattgtatgttacatcggtcgacgggaacagtgcattaccttcatcgcacacaagcccgcgggcttataaggcattgatctatatgcggaggatctggtgccacccaagtctgtctgatgaacttaacctacagctgcatttgaatgtgcgtgatgagagttcagacatcctcgtatttgaggtttctgagatcacacttcaatgcataaaatgggctgactccttctgcatagcatttggaaatttggctgatgataccatcaattttgaggcttttccccacaagctggtgcagtttggagagattcaggaaaaagttgtattgaaattttcacagggggaatttcttacagcttggtcaactcacgtgcgtacatgaacaactctgtcggctgatgggtctacatatttgtatgcaatggtgcatgatacttcagtgtctacaataccacgtgattttgtcattgaagtgaagttgacaaccataaacaatatgtgtgcatat

SEQ ID NO: 29555 - DNA, 540 bp, Glycine max
  Clone ID: LIB3138-024-Q1-N1-A12
tgataagttcaccaagaggacccgtatttgcttccgagatgctctgtaccgtcttgctagaaacactgaagaacaacatgtaatgctggaccagaatgaagatcttaacatacagaaggcaataccacatacagatcacaatgaaacaatgaggtctcaggacaagaaaccaatggaatcagcaaccaacaatattgacagaataattgcaaatctcatgttcaagagcatggagttcaacatacatcattctccaattacatcatcgacaaactccattcaacaagttattgaaagtaataatggtctacatggaaacagctcaaaagccatgaatatggaagaaaagttttgctattcccatccccaaaaattactagtagatgccgaaattccaaggtttagactaagtaatcaaccaagggacacaggttcaaacatcacatgtgaaggtcccataaagacatctttcatgatagggtttgattaggttgtctggttgtgagttttctagtaggcattagctaaaccataatcagg

SEQ ID NO: 29556 - DNA, 435 bp, Glycine max
  Clone ID: LIB3138-024-Q1-N1-A4
gagccaccaaatacttgtgttgtgtcgattctctgccatccatggtccatcactcacaaactagtactacttgctttcaataaaaacaaaaacacactctttggtgaccacaacaacaataacaatggctgcctcactacaagctgcagctaccttcatgcaacccaccaaggatggcatagcctctcgcaacctcaaatctacacaatgcatttctaaggcttttggcttggaacctgctgcagctaaactcacttgctcccttcaggctgatctcaaagaatttgctcaaaaatgtgtcgacgctaccaaaattgcaggattcgcccttgccacctctgctctagttgtttctggagcaagtgcagaaggtgttccaaaaaggctaaccttcgacgaaatccagagcaagacatacttggaagtgaagggaac

SEQ ID NO: 29557 - DNA, 173 bp, Glycine max
  Clone ID: LIB3138-024-Q1-N1-A7
tgcaattgaagttgaagtcttgcccttctctcttcaactccaaacacaagacatcatcatccatggctgcctccgtctccactgtcggagctgtcaacagagctcttttgaacctgaatgggtctggacctggggtttcagctcccagttcatccttctttgggagcagcttg

SEQ ID NO: 29558 - DNA, 251 bp, Glycine max
  Clone ID: LIB3138-024-Q1-N1-A8
cccagggcacttcccgaagtgttaagagaatgcctctttctatagggggaggagctggtgcaaagaatgctattctcatgaatatgccaaatgctgttctttcaatgtggagatattttgttggagatctcgtctttgaagtttctaagatgacttctccctacattaaatgtacagtctctttcttcatagcatttggaaatttggctgatgataccatcaattttgaggcttttccccacaagctggtg

SEQ ID NO: 29559 - DNA, 339 bp, Glycine max
  Clone ID: LIB3138-024-Q1-N1-A9
cttttgggcaccattccctcaggccatttaacaagaaacgtgtgggataaatggggcagtgagaacaccattgtattttgattctagcaagcagagcttttgtcagatttctattgaccttctcggtggaggaatcttagtggacaaaactggagattggatcacacttattcaaaaatcttcaattagtaacttattgagagatgctgcttggaagaaaggctgtttaatggtcaagaatgtgatgtctgggaatgcaccagtcaaaaggagtgattgtgcctcattggtacaagtgtttttaacaaacagcaacagtacagagcactttgatgcatg

SEQ ID NO: 29560 - DNA, 620 bp, Glycine max
  Clone ID: LIB3138-024-Q1-N1-B10
gaggaagctcgccaattgagaaggaaagctctctctcgtattgaatggctgcaaaaagctgatgtgcctaccatagcacagattgaagagttccattcgatgcagaggatgatgaatgctcctgattcaaatgataatattgatttactgttgagcattgatttgttgggtttacaaggagcaggtaaagcttttccaaacaaaattgtttttgatgataagcttgtgttggctaacacacaagaattctttgatggaaattttccagtggattcttggttaccaatttttgtgaattgtctttatcctgtaagtcaattaccttcagaagctgtcgttgtaaatgttacatgtggtagtggacgtggtggtttacccaccactgcttggattagttctgcagttaacaatcgctcctcagatatcaacaaaaagattcgcacagcacttgggaaaggtaagaaaattgtttttcttactagagttgatccttttccagtagctttactggctgttctttttggcgttaagaatgaaattctgagttctaacgccactaatcctatgctgacgcgacttcttgagaacttgtagagtctcaaatatctggttgatgagtg

SEQ ID NO: 29561 - DNA, 525 bp, Glycine max
  Clone ID: LIB3138-024-Q1-N1-B11
aagttaagctactttaggttgacaaagttcaagacaaacttgttagatgggaatcttccttcattgtcagaaatatcacttctgataccccacaggatggtgtactccaaggaaatgatgatcagaagagttatggctcacggttcaataatgcacaattctgattggaatgttaatttgatgaagcaaatatctatcagtggactatgtaacaacttaggtggagcaagaattatgcaggggtccatatcaagaatggtattgaaggaaataatatatgaaaagctgatgcaggatactatgtgatagttcatttatcaagttttggaaatatttgctgacttggtctggtgcaatgagaagaacaatacacgtgccgaaggagatcaacgaccctgaagatatctgaggatgaatgttctgtcgaagttgctgagatttggttccagtgaatacatgactgctgaactttgatttgcagtgctatacaatttagtttgtcacattagcatccagccatctttt

SEQ ID NO: 29562 - DNA, 507 bp, Glycine max
  Clone ID: LIB3138-024-Q1-N1-B12
cttcattatgtttcgtgtaataatctggaaatgcaagaagcttatcttgtcaatctcgtaaatgtgttacgagaattgtatttgcacagtccagaggaagctcgccaattgagaaggaaagctctctctcgtattgaatggctgcaaaaagctgatgtgcctaccatagcacagattgaagagttccattcgatgcagaggatgatgaatgctcctgattcaaatgataatattgatttactgttgagcattgatttgttgggtttacaaggagcaggtaaagcttttccaaacaaaattgtttttgatgataagcttgtgttggctaacacacaagaattctttgatggaaattttccagtggattcttggttaccaatttttgtgaattgtctttatcctgtaagtcaattaccttcagaagctgtcgttgtaaatgttacatgtggtagtggacgttgtggtttacccaccactgcttggattagttctgcagttaacaatcgc

SEQ ID NO: 29563 - DNA, 439 bp, Glycine max
  Clone ID: LIB3138-024-Q1-N1-B7
agcattttgatgcatgtaagtggacaaaatcagaaccacattcctgggaattgatcttcccaatagaggtatgtggtcctaataatggttttgaaatgtggagttctgagtgggcaaatcaaacttcatggcatttgagtttccttattgacaatcccaaacagtctacagtttttgatattctcttgggaatctctcaagattttgaaattgctggtaatactcttatgccagctttttctgttccacaggctactgccagatcttctgaaaatgcggaatcctctgcatgatctggaatttgtgttttctttcgcttgttcgtttgtttaattcaataaaggaaattaagcatgaccctcttgttgagtatgctctgcctatttgaaaatttccacacctcttttaattgtcgtaatgatgtgtgaagtgtgtgtta

SEQ ID NO: 29564 - DNA, 371 bp, Glycine max
  Clone ID: LIB3138-024-Q1-N1-B8
ggtaatcgtatcgttacgagagacgatgatatggacaaagctggtgcatctgctcaaggcagaggtgagagcaaacgagatttatttagagagcaactatgatcagaggtgtaatgatatatctgaggctactgaggacatggcgagagcatagtaacatctgaagtaccaagcctataagaaacgggaagactggcaagctgatgtggataatactaatgatgaggatcacaattcgtatttgcaccatgcaaagaaggactatcaatagaaagtgcaagctgattctcgtgatgaatggctgcaaaaagctaacgtgcataccattacgcatattgaatagtgacattaaaatcataacatgatgaatg

SEQ ID NO: 29565 - DNA, 530 bp, Glycine max
  Clone ID: LIB3138-024-Q1-N1-B9
tgaaaaggtggttaataagaccataaaaatatacaacattgatcgtgctgcatgtggacgtatagctggtgtcattgcaaagaagtacggtgacactggttttgctggacagttgaatataacatttacaggaagtgctgggcagtcatttgcatgctttctgacacctggaatgaacattcgccttgttggagaggctaatgattatgttgggaagggcattgctggaggtgagttggttatcactccagttgacaagaccggttttgaacctgaggatgcagctattgtagggaacacttgcttgtatggtgcaactggtggacaggtcttcgttagagggagagcaggggaaagatttgctgtgagaaactcgcttgctgaagctgtggttgaaggtgcaggagatcattgttgtgagtacatgactggaggctgtgtggttgtcttgggaaaagtgggtagaaatgtagctgctggaatgactggaagatggcttactttcttgatgaggacaatactttcatacc

SEQ ID NO: 29566 - DNA, 510 bp, Glycine max
  Clone ID: LIB3138-024-Q1-N1-C10
tccaaacatgactctccgcaaccaccaagagctcttggttgctgttgcaattctatattttcttgccacctcactcccttcagtttcagctcatggcccatatgcatgggatggggaggccacatataaattcactacttaccaccctggccaaaactacaaaggtttatccaatgtcaaaaactacttccaccatctcggctacatccccaatgcaccacacttcgacgacaacttcgatgacaccctcgtatctgccatcaaaacctaccaaaagaattacaacctcaacgtcaccggcaagttcgacatcaacactcttaaacaaatcatgacaccccggtgtggcgtccccgacataataatcaacacaaacaaaaccacatcgtttggcatgatctcggactataccttcttcaaagacatgccgcggtggcaagctggaaccacacaactcacctacgctttctccccggagccaagacttgatgacactttcaaaagcgcgat

SEQ ID NO: 29567 - DNA, 620 bp, Glycine max
  unsure at all n locations
  Clone ID: LIB3138-024-Q1-N1-C11
tcacattcttcagaagattttcctgaaaaggaagatcaagaaaaacccaaaaagattgatgccagattgagacaaagaatagatcctcaatacaatgaggttcaggctcagatggaaacaaatttgtttaaattgtctcttgatgatgttgaaactcctaaaggttccatgttggatctgaaaatttctcaatctaaaattgcacttcccaagaacacagttggaggaaccattctgcgtagtgatctattggcaaattttttgacagagggcaattttagagcaagtgttgatttgcagcgcactcatcgtattagaggaatgattaaaatggtggccacagttggtattcctgagaatacaggtatatcattggcctgtgctatgaatagttcttttagggggcgcgccagttctgatatttacaccatctgctctcaagactgtgaattgtggaatcctgcttgcacaaaagctatgactatgtcatttaatccaaacccgtgttctgatgcnatgaagtttgaatntctgaagcgtacttgatttcatngcgatatcanttgtgtcactggatggactgccaccccaatgcaagatgttcaggttacaaatggatg

SEQ ID NO: 29568 - DNA, 326 bp, Glycine max
  Clone ID: LIB3138-024-Q1-N1-C12
catgaatatgccaaatgctgtactctcaatgtgcagaaatcttgtcggggatctcgcgtatgagggttctaagatgactattccctccattaaatgtacgctctctttctgcataggattggtaaatctggctgaggatgccatcaatttgcaggcttgcccccatagctggagcagttaggacagatccatgcaaaagatgaatagtgcttctgacacgaggaatatcttacagctagtgcaactcatgtgcgtgctgcaacaactctgatcgctgatggctgtccatatctgtatgcaatggtgcgtgatacttgagtgtctac

SEQ ID NO: 29569 - DNA, 362 bp, Glycine max
  Clone ID: LIB3138-024-Q1-N1-C4
acacttaacttacttcacatgacagtctaatctaccaatttttgcacgatacaaatttcgggcaaacactacaacatgcatttttaacttatagaaacctgaatatccgaggattcgcacatgcatgttgacattgagaatactgcacaggacataaggtctcagggtgtgcttaacactcctgatccctcgactccatggcatgtggatgcatattctgtaagcaaaaccatatcccactataaacataagcttttctctctcacagatcaaccttgcaccagactcttactttcatatctgagtgtcatttatcctatttttgcttatcacaaaaactacacttgttctaactttaataa

SEQ ID NO: 29570 - DNA, 303 bp, Glycine max
  unsure at all n locations
  Clone ID: LIB3138-024-Q1-N1-C5
tcacattctcttataaaaaaggacctaaatgaccttgttggggcggcataaaacccaaaagggccatttactcccattgttgatggttccaacatctcatctaaaattggagtgattgagtcacttttaaaaaaagttgacatccttcttcttggtggaggaatgatcttcacattttacaaggcacatggtctttcagtgggttcatccctagtacaagaagataagctggatcttgctacatcactacttgcanaagccaagaaaaagggcgtgtctatattgttaccaaattatgtggtc

SEQ ID NO: 29571 - DNA, 461 bp, Glycine max
  Clone ID: LIB3138-024-Q1-N1-C6
gaattttgattctagcaagcatagcttttgtcagttttctattgagcttctcggtggaggaatcttactggacaaaactggagattggatcacacttatacaaaattctccaattagtaacttgttgagagttgctgcttggaagaaaggctgtttaatggtcaagattgtgatgtctgggaatgcagcattcaaaaggagtgattgggcctcattggtacaagtgtttttaacaaacagcaacagtacagagcattttgatgcatgtaagtggacaaaatcagaaccacattcctgggaattgattttcccaatagaggtatgtggtcctaataatggatttgaaatgtggagttctgagtgggcaaatcaaacttcatggcatttgagtttccttattgacaatcccaaacagtctacaggttttgatattcttcttgggaatctcttaagattttgaa

SEQ ID NO: 29572 - DNA, 300 bp, Glycine max
  Clone ID: LIB3138-024-Q1-N1-C7
tagagactgagaagagttacatcgagactgttgtcatggatgtgccagcagctgagcatgatgggaagtgcaagtgtggcactaactgcacttgcacggactgcacctgtggccattaaggaatatgtatgaaaatgtaattgccatgtgtttggcaatacaaatatccaaataatgtaatcttcgtatgaataaatgtgtgtgctgttatcctacttcaggtctgtgtagtcatgcagtctgaatcatttcaagttcctgtcttaattaatataacagccatggttgtggcattctatg

SEQ ID NO: 29573 - DNA, 445 bp, Glycine max
  unsure at all n locations
  Clone ID: LIB3138-024-Q1-N1-C8
gtcaagttggaatcaacccatactccatggaatggactggtttggccaatagattactgagtaagggcaatgatattctgtgttgcgattatgctagttttgatggtttgattaccaagcaagttatgagcaagatggcagaaatgataaacagtctttgtggtggtgatgaaaaattgatgcgtgaaaagacgcacctgctgttggcttgttgttcaaggatgggcaattgtaagaaagatgtttngagagttgaatgtggaatcccttctggatttccgctcacagttatttgcaatagcatttttaatgagatgctcattagatatagctatgaaaaattactgcgccaggctaaagctccaagtatgtttttacaatccttcaaaaattttgtttctttgtgtgtgtatggngatgataacttaattagtgttcatgaata

SEQ ID NO: 29574 - DNA, 423 bp, Glycine max
  unsure at all n locations
  Clone ID: LIB3138-024-Q1-N1-D10
aagaaagatgtttggagagttgaatgtggaatcccttctggatttccgctcacagttatttgcaatagcatttttaatgagatgctcattagatatagctatgaaaaattactgcgccaggctaaagctccaagtatgtttttacaatccttcaaaaattttgtttctttgtgtgtgtatggtgatgataacttaattagtgttcatgaatatgtcaagccttactttagtggttctaaattgaaaagctttctagctagtcataacatcaccattactgatggtattgacaaaactagtgcaactttgcaatttagaaagttagcagattgtgattttctcaagagaaactntaagcagatgtctaatgttntgtgggtggctcctgaggacaaggcgagtttatggtcacaacttcattat

SEQ ID NO: 29575 - DNA, 310 bp, Glycine max
  Clone ID: LIB3138-024-Q1-N1-D11
gcttggaagaaaggctgtttaatggtcaagattgtgatgtctgggaatgcagcagtcaaaaggagtgattgggcctcattggtacaagtgtttttaacaaacagcaacagtccagagcattttgatgcatgtaagtggacaaaatcagaaccacattcctgggaatggatcttcccaataaaggtatgtggtcctaataatggtttagaaatgtggagttctgagtgcgcatatcacactacatggcatgagagtcttcatattgacaatcccacacagtatacagtttgagatattctctggaaaatct

SEQ ID NO: 29576 - DNA, 106 bp, Glycine max
  Clone ID: LIB3138-024-Q1-N1-D12
atatatgtatgcaatggcgcatgatggaacactgtctacagtgccaggcgataccgtcattgacgccaatttggcaaccataaacgatatgtgtgcatatgggctc

SEQ ID NO: 29577 - DNA, 474 bp, Glycine max
  Clone ID: LIB3138-024-Q1-N1-D2
accaattcttccttcctttcatctcgggaaatccaaagagttgcgacacggttgcgcatatccagcatgcaggcatcgcgggcaaggctgttcaaggagtacaaagaggtgcagcgggaaaaggctgttgatcttgatattcaactagtttgtgatgattcaaacatttttaaatggaccgctcttatcaagggaccctctgagactccttatgagggtggtgtgttccagcttgcgttttctgttccggagcagtatcctctacagccacctcaagtccggtttttgactaaaatatttcacccaaatgtgcattttaagactggggagatttgcctagatatcttgaaaaatgcttggagccccgcttggacacttcaatctgtctgtagggctataattgcgttgatggcccatccagaacctgacagcccactgaattgtgattcaagcaatcttctgcgttcaggggat

SEQ ID NO: 29578 - DNA, 566 bp, Glycine max
  Clone ID: LIB3138-024-Q1-N1-D4
cttggttcgaacagaatttccccacacagtatatttcatggcagggactcaggcagagaaaccttcttggaattctattggaatttttaaagtatcaaatattactggaaagagacgtgagccagtgcctaaacttggaactgatgacactgaaatggatggtgaggatagtgacagtgatgatgatagtgaggaagaagacgaaggtggtgctcagggtcccagtttgcagttgcgtaaggttgctcaccaaggatgtgtcaaccgtatacgctccatgccacaaaatcctcatatatgtgcagcttgggccgataccggtcatgtacaggtctgggacctaaactctcacctcaatgttctagctgagactgaaacagaatgtgtccaaggagttgctgcagtttttaatcaggacccattgtataaatttaaacacaaagatgaaggttatgctatagactggagtcctcttgttccttgaaagcttgcatctggggattgcaataaatgtatttatctgtgggagcctacatctgctggaacgtggaatgttgataatgctc

SEQ ID NO: 29579 - DNA, 407 bp, Glycine max
  Clone ID: LIB3138-024-Q1-N1-D7
ccccaaactcactataaactctcccaaagtacactcctccacacacacactcacaagtcacaccgccgtatagttcagaccgaaccgcactctttatctctttctccgccgcaaactatccttctccggcggcgccaccgtacaaccctcgatttaagcaaaggagcaacagaaggaggtgcttggatgcaaatggcggccaccgcaagcaacaacgacgtcgtcgtcggcgtcgacggccccgtgatgagcctaatcaacaagcgcctccgcgcccttcgcaagaagctgaaccgcattctcgccatggaagaggccgtcacccagggcaagcctctgaacaaggagcaagaagaggttctccgctccaaaccctacgtccttgctctcatcgacgagctcgagaa

SEQ ID NO: 29580 - DNA, 494 bp, Glycine max
  Clone ID: LIB3138-024-Q1-N1-D8
ggctgcctcactacaagctgcagctaccttcatgcaacccaccaaggttggcatagcctctcgcaacctcaaatctacacaatgcatttctaaggcttttggcttggaacctgctgcagctaaactcacttgctcccttcagcctgatctcaaagaatttgctcaaaaatgtgtcgacgctaccaaaattgcaggattcgcccttgccacctctgctctcgttgtttctggagcaagtgcagaaggtgttccaaaaaggctaaccttcgacgaaatccagagcaagacatacttggaagtgaagggaactggaactgctaaccagtgcccaaccattgaaggtggagtggactcattcgccttcaagccagggaaatacaacgcccagaagttgtgcctggaaccaacttccttcacggtgaaggcagagggcgtggccaagaacgccccacccgaattccagaacaccaagctcatgactcgtctcacctaca

SEQ ID NO: 29581 - DNA, 429 bp, Glycine max
  Clone ID: LIB3138-024-Q1-N1-D9
cggctcgagtgaaattttcacaagaggaatttcttacagcttggtcaactcaggtgcgtcctgcaacaactctgttggctgatgggtgtccatatttgtatgcaatggtgcatgatagttcagtgtctacaataccaggtgattttgtcattggtgtcaagttgacaaccataaacaatatgtgtgcatatgggctcaatcctggtatttcaggttctcgtcttttgggcaccattcctcagtccatttcacagcaaactgtttggaatcaaatggcaacagtgagaacaccattgaattttgattctagcaagcagagcttttgtcagttttctattgaccttctcggtggaggaatcttagtggacaaaactggagattggatcacacttatacaaaattctccaattagtaacttattgagagttg

SEQ ID NO: 29582 - DNA, 528 bp, Glycine max
  Clone ID: LIB3138-024-Q1-N1-E11
ttgcgctacaagtgaagagttggaaacaaaagatggcaggtttgggaatatggatgggtttcgttagcctgtgtcttctgtctgtatcagtatcaggtctgctccaacgcctagagcaccctgtcaaagctgatggctcacttagccttatggtcattggagactggcgaaggaaaggaacatacaaccaatctcaagttgccactcagatgggaagggttgctgcaaagttaaatatcgactttgtgatatccactggagacaatttctacgatgatggattgactggtatagatgaccctgcatttgaaatttccttctcaaaaatctacactgacaagagcctccaaaagcaatggtatagtgtgttgggcaaccatgactacaggggtgatgctgaagctcaatcgaatccaatccttcagaaaattgatcctagatggatctgccaaagatcatttattgctgatactgaaattgctgagttcttcttcatagattcaacaccgtttgtggacaagtattttc

SEQ ID NO: 29583 - DNA, 507 bp, Glycine max
  Clone ID: LIB3138-024-Q1-N1-E2
gttctattgagcaactaagtgatgcacggcttatatactccgtcgctccatctatgggccacaaccaggagtctcatccagaatcacattttagagttcccgcgattgtcaatgctctagaagaaatgcagctcacttccaagttccgtggcccagaggtaattgaacttcaacattttgagcctgcttcagttgatgatattgcaagtgtgcatgcaagagcctatgtttctgggcttgaaaaggttatggatcaagctgtggagaaaggccttattttccttgatggttcaggaccaacatatgccactgccactaccttccaggagtcaatagttgcagccggtgctggattagccttagttgactcagtggtgatctcttaacctggcatgtccatctcttggtaataatctgtgtgtgtgttttggggaggggtaagtgagtggatatggatatgtacatatctacttcttctggtgacttcatacttgaaaggactatttg

SEQ ID NO: 29584 - DNA, 428 bp, Glycine max
  Clone ID: LIB3138-024-Q1-N1-E3
cacaaacacacactgaactaaaaaacatcaaaagagacatggctgagcaaaccttcatcatgatcaagcctgatggcgtccaaagaggccttattggcgagatcattagcagatttgagaagaaaggtttctacttgaaaggtttgaaacttgttactgtggaccgtccttttgctgagaagcactatgctgatttgtctgccaagcctttctttagtggtttggtggattacattatctctggccctgttgttgccatgatctgggagggcaagaatgttgttacaactggccgaaagattatcggagccacaaaccagctcaatctgagcctggaactatccgtggtgactttgccattgacattggaaggaatgttatccatggaagtgatgcagttgaaagtgctaacaaggaaattgcattgt

SEQ ID NO: 29585 - DNA, 531 bp, Glycine max
  Clone ID: LIB3138-024-Q1-N1-E7
tttaaatccacaaaatccttttgtgttaaataggtggatgggaaaattgactttcccccagggcacttcccgaagtgttaagagaatgcctctttctatagggggaggagctggtgcaaagaatgctattctcatgaatatgccaaatgctgttctttcaatgtggagatattttgttggagatctcgtctttgaagtttctaagatgacttctccctacattaaatgtacagtctctttcttcatagcatttggaaatttggctgatgataccatcaattttgaggcttttacccacaagctggtgcagtttggagagattcaggaaaaagttgtattgaaattttcacaagaggaatttcttacagcttggtcaactcatgtgcgtgctgcaacaactctgttggctgatgggtgtccatatttgtatgcaatggtgcatgatagttcaatgtctacaataccaggtgattttgtcattggtgtcaagttgacaaccataaacaatatgtgtgcatatgggctcaatcc

SEQ ID NO: 29586 - DNA, 421 bp, Glycine max
  Clone ID: LIB3138-024-Q1-N1-E8
gacaaaatcagaaccacattcctgggaattgatcttcccaatagaggtatgtggtcctaataatggttttgaaatgtggagttctgagtgggcaaatcaaacttcatggcatttgagtttccttattgacaatcccaaacagtctacagtttttgatattctcttgggaatctctcaagattttgaaattgctggtaatactcttatgccagctttttctgttccacaggctactgccagatcttctgaaaatgcggaatcctctgcatgatctggaatttgtgttttctttcgcttgttcgtttgtttaattcaataaaggaaattaggcatgaccctcttgttgagtatgctctgcctatttgaaaatttccacacctcttttaattgtcgtaatgatgtgtgaagtgtgtgttatttt

SEQ ID NO: 29587 - DNA, 516 bp, Glycine max
  unsure at all n locations
  Clone ID: LIB3138-024-Q1-N1-F1
cgggtagctgagatcggagaaccctctctttcttctccttcttcagttgaaaataaaaaatggcagatggtgaggatattcaaccactcgtctgcgataatgggacaggaatggtgaaagctggatttgctggggatgatgctccgagggctgtgtttcccagcattgttggtcgtccccgtcacacgggagtgatggttggcatgggccaaaaagatgcatatgttggggatgaagctcagtccaagagaggtatattaactctcaaatatcccattgagcatggtattgtgagtaactgggatgacatggagaagatctggcatcacaccttctacaatgaactccgtgtcgctcctgaggagcacccagttctgctaaccgaagcacctctcaacccaaaagctaatcgtgagaaaatgacccaaattatgtttgagaccttcaatacccctgcaatgtatgttgccatccaggctgntctatccttgtatgccagtggccgcacaactggta

SEQ ID NO: 29588 - DNA, 332 bp, Glycine max
  Clone ID: LIB3138-024-Q1-N1-F10
gttttaaatccacaaaatccttttgtgttaaataggtggatgggaaaattgactttcccccagggcacttcccgaagtgttaagagaatgcctctttctatagggggaggagctggtgcaaagaatgctattctcatgaatatgccaaatgctgttctttcaatgtggagatattttgttggagatctcgtctttgaagtttctaagatgacttctccctacattaaatgtacagtctctttcttcatagcatttggaaatttggctgatgataccatcaattttgaggcttttccccacaagctggtgcaatttggagagaatcaagaaaa

SEQ ID NO: 29589 - DNA, 556 bp, Glycine max
  unsure at all n locations
  Clone ID: LIB3138-024-Q1-N1-F11
ctctcactcagattcagcaattttctattttcttctctcatggcttcagattccaaaaaggatttccctgctgatgacaaagctggaacagcagagaataaagcatccaaagatgaaacgtcatctaaagattctccagcagcacaaagagctactacagctacttctggacctgcaactggttttccaggcaacccttttgatttctctgcaatgtctggcctgctcaatgatccaagtatcaaggaattggctgaacagatagcaaaagatccatcattcaaccagatggctgagcagcttcagaaaacttttcaaggagctccacaggatgctatgcctagctttgataatcaacaatatttttcaaccatgcaacaggttatgcagaatcctaattttatgaccatggctgagcgcctgggtaatgcattgatgcaggatccatctatgtctgccatgcttgaaagtttttctaatccatcaaataaagaccagcttgaagaaagaatgacacgcatcaaggaggatccatctctgaaacatnatttggagg

SEQ ID NO: 29590 - DNA, 570 bp, Glycine max
  Clone ID: LIB3138-024-Q1-N1-F12
ctcattgaggctcacacataatggaagaagcctggttcataatcctagtctctctctgtgtctgcgttctcataagagtcatattattattcttccttcacaaaaaaccctagccaccccaccaggccctcctcacatcccaatcatcacacgctttctatggctcaaaaaatccttcatagaactcgagccattcctccgaaccctcgccgccaaacacggtcctatcttcactctccgcataggatcacgccccgtcatattcatcgccaacagagccctggcccaccaagccctaatccaaaacggttccattttctccgatcgccccaaggccctccccgccgccaaaatcgtcagcagcaaccaacacaacatcaactccgtcccctacggcgccacctggcgcgccctacgccgcaaccttagctacgagatgctgcacccctcacgcgtcatgtccttctccggtacccgcaagtgggttctacacaccctcctcacgcgccgtaaatcagattcacaatccaacgattcaataaaagtcattaaccacttccaatactccat

SEQ ID NO: 29591 - DNA, 518 bp, Glycine max
  Clone ID: LIB3138-024-Q1-N1-F2
cttctcctcagcgtgactgagatggctggaggtgttattcagcagatattgaggaggaaactacaccctcggtttactaactctcccttgttgtcacccatcgtagccaagaaagatgatgctggctcttctggcagtcagtccttaagagcacttgcattaattggagctggtttatcaggccttttcagtttttcaacaatggcagcagctgatgaagctgagcatggcctggcatgtccaagctatccgtggcctcacaaaggaattcttagttcatatgatcatgcttcgattcgtcgtggtcatcaagtttatacagaagtctgtgcttcctgccattctatgtctttgatatcgtatcgtgatttggttggtgttgcttatacagaagaagaggtaaaggctatggcagctgagattgaggtggttgatggccctaacgatgagggtgagatgtttacacgccctggtaaactcagcgatcgttttcctcagccatatgcaaatgaagcagc

SEQ ID NO: 29592 - DNA, 405 bp, Glycine max
  Clone ID: LIB3138-024-Q1-N1-F3
accatcaccattactgatggtattgacaaaactagtgcaactttgcaatttagaaagttagcagattgtgattttctcaagagaaactttaagcagatgtctaatgttttgtgggtggctcctgaggacaaggcgagtttatggtcacaacttcattatgtttcgtgtaataatctggaaatgcaagaagcttatcttgtcaatctcgtaaatgtgttacgagaattgtatttgcacagtccagaggaagctcgccaattgagaaggaaagctctctctcgtattgaatggctgcaaaaagctgatgtgcctaccatagcacagattgaagagttccattcgatgcagaggatgatgaatgctcctgattcaaatgataatattgatttactgttgagcattgat

SEQ ID NO: 29593 - DNA, 557 bp, Glycine max
  Clone ID: LIB3138-024-Q1-N1-F5
gagcgcactggtatggatttttaccttgaacgtttgccttcacattttatttattcctggtggtgactcaaagccgcatccgcgtttcagagagaaaatcactgaggattacaatcgcggatttataagcattgactgtggagcaagtaacgattacttggacgaggaaacaagtacattttataagacagacacagatttcatagaaacgggagaaaacttgttggcgtcttcccaatttattgacataaatatccctggttttggaagacaactacgcacattgagaagcttccctgagggaaataggaactgttatactctgaagcccgagtataagcaaggtgaacagcaaagttatctgattcgggctatgttcggatatggaaactacgatggaaaaaatcatccccctacgttcgatctctatcttggggtctactactggataaatgttaacccggcaaaatattcctatctttggaccgagattattcatgctcccacaacagacaccatacaagtgtgtctggttaatattgacactggtacacctt

SEQ ID NO: 29594 - DNA, 220 bp, Glycine max
  Clone ID: LIB3138-024-Q1-N1-F7
cttattataggaataattgacttcagtgtgacaacatgtgcgcgagcttgctatgtattgggtaccggccggtgacatcaaaactctgcctttgttaatctaaagggtgtgtcattagatttgtgtctgcacagaccagaggaagctcgccaattgagagggcgggcgccctctagtgtgctctggcacccgaaagttaatgtggcacccatacctgaaa

SEQ ID NO: 29595 - DNA, 432 bp, Glycine max
  unsure at all n locations
  Clone ID: LIB3138-024-Q1-N1-F8
cggctcgaggtgctctgctctcatctcattcatattcatttcaatggcaactcaaggtcaagtcattacctgcaaagctgcggtggcctgggaacccaacaagcccttaaccgtccaagacgttcaggttgctccgcctcaggccggcgaggtccgtgtccaaatcctcttcaccgctctctgccacaccgatgcttacacttggggcggcaaggatcccgaaggtctcttcccctgtattctcggccacgaagctgcaaggattgtggagagtgttggagaaggtgttactaatgttcagcctggggatcatgtcattccctgttaccaggctgagtgtggggagtgcaagacttgcaaatcggngaagacaaacctctgtggcaaggttcgttccgccactggagttggggtcatgctcaatgatggaaa

SEQ ID NO: 29596 - DNA, 592 bp, Glycine max
  unsure at all n locations
  Clone ID: LIB3138-024-Q1-N1-F9
gggcaaagttggcacacctgaaagacccctttcggaccttggactgctaagctacagaggatattggaccagggttctcttagacattctgaagaagcacaagggaaacatttctatcaaggaactgagtgatatgactgccattaaagctgaagacatattaaccactcttcagagcctagaattgattcaatacaggaaaggccagcatgttatttgtgcagatcccaaagtgttggatcgccatcttaaagctgctggcaggggtggcctcgaagttgatgttagcaaattgatctggactccttataaagaacaaagttgataatcaaatattcatcaaagaaatactatcatgatgtaacttgttcttttgtgtataaagtatataggctaggtatcttagacaaatcctttgatgtattagtattaactaataagattcaatacattttagatgagaataggaacacaactgattgttttatgtgctgaaccgtagccttaggtatatgtttaagatggtgtcttcngttctaatgatgaatgccaagaggaaacattttgtttatctggggctatgtatgttaat

SEQ ID NO: 29597 - DNA, 553 bp, Glycine max
  Clone ID: LIB3138-024-Q1-N1-G10
attgaattttgattctagcaagcagagcttttgtcagttttctattgaccttctcggtggaggaatcttagtggacaaaactggagattggatcacacttatacaaaattctccaattagtaacttgttgagagttgctgcttggaagaaaggctgtttaatggtcaagattgtgatgtctgggaatgcagcagtcaaaaggagtgattgggcctcattggtacaagtgtttttaacaaacagcaacagtacagagcattttgatgcatgtaagtggacaaaatcagaaccacattcctgggaattgatcttcccaatagaggtatgtggtcctaataatggttttgaaatgtggagttctgagtgggcaaatcaaacttcatggcatttgagtttccttattgacaatcccaaacagtctacagtttttgatattctcttgggaatctctcaagattttgaaattgctggtaatactcttatgccagctttttctgttccacaggctactgccagatcttctgaaaatgcggaatcctctgcatgatctgga

SEQ ID NO: 29598 - DNA, 601 bp, Glycine max
  unsure at all n locations
  Clone ID: LIB3138-024-Q1-N1-G11
ggcgacgacagcagccttgtgcggcactatgatgagcagctccttcctgaggagaaaagcagtggtcacaagcctgaaggcattccccaatgctaacgcagtgtttggtgtaaagggtggacgtggaggtggtgtgactgccatggctagcttcaaggtgaagctgataaccccagagggagagaaagaatttgaatgcccagatgatgtatacattcttgaccaggcagaggaggaagggcttgagcttccctactcatgcagggctggttcttgctctgtgtgtgctggcaaagttgtatctggcaaagttgacaattcagatgccaccttccttgaggatgaacaattagaagcaggatttactctcacctgtgttgcttaccccacctcagacgttgtcattgaaacccacaaggaggaagacctctctgctgcttaactttcttcctttctcaccaacatattatgcattcatgagcattcattacttccacctgtagtagcaactgaactttcattgtgtattgtaactctataataantcttccttactggttttgcacacaatggttcaataacaactctcattttccttgat

SEQ ID NO: 29599 - DNA, 642 bp, Glycine max
  Clone ID: LIB3138-024-Q1-N1-G2
gcgtttttcattgtgcattattcaatggccaccacagcagctctatccggaaccatggtgagcacctccttcatgaggaagcaacctatgacgaccaagagcctaaagacattccccaacgctctttttggtctgaaaggtggacgaggtggtcgtgtaacttgcatggcctcgtacaaggtgaagctcataaccccagaaggagaagtggagtttgaatgcccagatgatgttttcattgttgacaaggctgaggaagaaggcattgaacttccctactcgtgcagggctggttcttgcgtttcatgtgttgggaaaattgtgaaaggtgacgtggaccagtcagatggtagcttccttgatgatgaacaaatagaaagtggatgggttctcacctgtgttgctctacctaggtcagacgttgtcattgagacacacaaggatggagagatcgaatgatcgatatatatcataatgtaatcttggacattgctcttctaatgccatctatctatgtcgtgttttgattttgttagagtgatttggcattggctagttagctagctgaaatcatcgcgagtttattaattacttttggcatgtttgtggaaacaagtgaaaatggtgcactttaattaatta

SEQ ID NO: 29600 - DNA, 530 bp, Glycine max
  Clone ID: LIB3138-024-Q1-N1-G7
gtggaatcctgcttgcacaaaagcaatgactatgtcatttaatccaaacccgagttctgatgcatggagtttggaatttctgaagcgtactggatttcattgcgatatcatttgtgtcactggatggactgccaccccaatgcaggatgttcaggttacaattgattggtttatttcctctcaggaatgtgttcccaggacctattgagttttaaatccacaaaatccttttgtgttaaataggtggatgggaaaattgactttcccccagggcacttcccgaagtgttaagagaatgcctctttctatagggggaggagctggtgcaaagaatgctattctcatgaatatgccaaatgctgttctttcaatgtggagatattttgctggagatctcgtctttgaagtttctaagatgacttctgcctacattaaatgtacagtctctgtcttcatagcatttggaaatttggctgatgataccatcaattttgaggcttttccccacaagctggtgcagtttggagaga

SEQ ID NO: 29601 - DNA, 523 bp, Glycine max
  Clone ID: LIB3138-024-Q1-N1-G8
gtcaagccttactttagtggttctaaattgaaaagctttctagctagtcataacatcaccattactgatggtattgacaaaactagtgcaactttgcaatttagaaagttagcagattgtgattttctcaagagaaactttaagcagatgtctaatgttttgtgggtggctcctgaggacaaggcgagtttatggtcacaacttcattatgtttcgtgtaataatctggaaatgcaagaagcttatcttgtcaatctcgtaaatgtgttacgagaattgtatttgcacagtccagaggaagctcgtcaattgagaaggaaagctctctctcgtattgaatggctgcaaaaagctgatgtgcctaccatagcacagattgaagagttccattcgatgcagaggatgatgaatgctcctgattcaaatgataatattgatttactgttgagcattgatttgttgggtttacaaggagcaagtaaagcttttccaaacaaaattgtttttgatgataaagcttgtg

SEQ ID NO: 29602 - DNA, 514 bp, Glycine max
  Clone ID: LIB3138-024-Q1-N1-G9
gtttggaatttctgaagcgtactggatttcattgcgatatcatttgtgtcactggatggactgccaccccaatgcaggatgttcaggttacaattgattggtttatttcctctcaggaatgtgttcccaggacctattgtgttttaaatccacaaaatccttttgtgttaaataggtggatgggaaaattgactttcccccagggcacttcccgaagtgttaagagaatgcctctttctatagggggaggagctggtgcaaagaatgctattctcatgaatatgccaaatgctgttctttcaatgtggagatattttgatggagatctcgtctttgaagtttctaagatgacttctccctacattaaatgtacagtctctttcttcatagcatttggaaatttggctgatgataccatcaattttgaggcttttccccacaagctggtgcaatttggagagattcaagaaaaagttgtattgaaattttcacaagaagaatttcttacagcttg

SEQ ID NO: 29603 - DNA, 469 bp, Glycine max
  Clone ID: LIB3138-024-Q1-N1-H1
aattttcaaggagggtgatctggttgatgtctctggcaccaccattggcaagggtttccaaggtggaatcaagcgtcataacttcaaaaggggtccaatgacccatggttccaagagtcacagacaactaggatcaattggtgctggaaccacacctggtcgtgtgtacaagggaaaaaagatgcctgtccggatgggaggaaccaagaggaagataagaaagcttaagattgtaaaaattgataaagatcttaatgtggtcatgatcaaaggtgctgtccctggtaagccaggcaatcttctaaggataactccagccaagattgtcggcaagaacattccaaagaattagcatatcttttctcttaacttgtctgtgtatttgttgtgccttccttttagccttttagttgcaagtttatgtcttctaaaaagaatacaagccatatgttggatataaaatacaaaa

SEQ ID NO: 29604 - DNA, 177 bp, Glycine max
  Clone ID: LIB3138-024-Q1-N1-H10
ggtttcaacaactgttgcagccccttatataccatctgtattgattattatgttcataattttatttgtatttatatttacactacaaatagtcttcgaagatagattatgttcaaaatacatggttataacattgtcttcaccttgataagtttcttcattttgttcattgatctt

SEQ ID NO: 29605 - DNA, 493 bp, Glycine max
  Clone ID: LIB3138-024-Q1-N1-H11
ctggacatgcacgaagcttatcttgtctatctcgtatatgtgtggcgagaattgcattagcacagtccacaggaagctcgccaatcgagaaggaaagctctctctcgtattgaatggctgcataaagctgatgtgcctaccatagcacagatggaacagttccattcgatgcgcacgatgatgaatgctcctgagtcaaatgataatattgatttactgctgagcattgatttgttgggtttacaaggagcaagtaaagctttttcaaacaaaatcgattttgatgataagcttgtgttggctaacacacaagaattctctgatggaaattttccagtggattcttggctaccaatcattgtgaattgtctctatcctgtaagtcaattaccttcagaagctgtcagttgaaaagatacatgtggtagaggacgatgtggtttacccaccactgctaggattagttctacagttaacaatcaatcctcaaata

SEQ ID NO: 29606 - DNA, 468 bp, Glycine max
  unsure at all n locations
  Clone ID: LIB3138-024-Q1-N1-H12
gtgcccagctgcttcagcagccagaagtcattgcaatcactgttgaagaagtttcttcaactgcaaagcctctggttagacagcttcaggagcttcccaagagaattaagaatatcattgcatcattacctgatcaagaagtggatgaggaggaagcctccctctttgacatgctctggttactacttgcaagtgttgtatttgtgccaatatttcaaaagattcctggaagtaactaggttgccatgttttcttaatattggatgaaagaataacaaagttgtttgtctaaatgttatactttagtttgaatttgattaggcacncaactctatatattgcttagtgcttacatgaaaattttggtttatagattatatctgctgctttttttagctcacatttattttcctatgtcaccttttgttagttgattatgatgataaatgcatttattagcttgatatg

SEQ ID NO: 29607 - DNA, 375 bp, Glycine max
  Clone ID: LIB3138-024-Q1-N1-H2
gttcttttgtgtgggactggggaggttaccttattaagtgttcatgaatatgtcacgcctaccttggctggtgctaaattgaaaagcttcctagctagtcataacatccccattactgatggtattgacagaactagtgcaactttgcaatctataaagttagcagagcgcgatgatctcaagagaaactctaagcacatgtctaatgttttgaggctcgctcctgaggacaacgcgcgtttatggtcacaacttaattatgttatctgtaataacctgcagatgcaagaagcttatcttgcctatctcaccaatgcgttacgagaattgtattcgcacactccagaggaagctctgcaattgacaaagaaagct

SEQ ID NO: 29608 - DNA, 519 bp, Glycine max
  Clone ID: LIB3138-024-Q1-N1-H3
gtttcttggtgtgtgtatggggatgataacttaattagggttcatgaatatgtcaagccttactttagtggttctaaattgaaaagctttctagctagtcataacatcaccattactgatggtattgacaaaactagtgcaactttgcaatttagaaagttagcagattgtgattttctcaagagaaactttaagcagatgtctaatgttttgtgggtggctcctgaggacaaggcgagtttatggtcacaacttcattatgtttcgtgtaataatctggaaatgcaagaagcttatcttgtcaatctcgtaaatgtgttacgagaattgtatttgcacagtccagaggaagctcgccaattgagaaggaaagctctctctcgtattgaatggctgcaaaaagctgatgtgcctaccatagcacagattggagagttccattcgatgcacaggatgatgaatgctcctgattcaaatgataatattgatttactgctgagcattgatttggtgggttac

SEQ ID NO: 29609 - DNA, 360 bp, Glycine max
  unsure at all n locations
  Clone ID: LIB3138-024-Q1-N1-H7
gttttaatctcaacagatagggaccttgaggaattcaatgtcaacaaaagtactatgccatggcttgctgtcccatatgaggacaggacaaggcatgaccttcgaagaatcttcgatgtaaagggcattcctgcattggttctcattggaccagatggcaaagtaattagtgtgaatggaaagttaatggtctcctcatatggtgcagaagctttcccattcaccgaatcgcggataagagaccttgaagcagctctgagaaaggaaagagaggctttgcctccgcaggttgaggatgtgaagcatgaacatgtactgaaatnggatatggccaatgcatatgtatgtgattactgtaaa

SEQ ID NO: 29610 - DNA, 625 bp, Glycine max
  Clone ID: LIB3138-024-Q1-N1-H8
cttaacctctctcactctcttctaacttccgattcatggcagcgtcttctcctctccctttacccgaactccatttcctttctccgcaaatcacccccaaacgccgtatttccctctccaaactcccctccatttcccgccacgtcacctccaacgtttctctccgcaccgcgcgaatccgcgcaagcagagaagaatccgcgttggccgaccgagtcaacgacgtcgaatggaccggaaatggcgccgccgccgctgcttccaacgccaatggtgcctccgttagtggatacgtcaacggcgccactaacggaagcttggtcaagtacggttacgaagacggaaacgacgttgctgctgcggaggtggtggaagttgaagcctctaacaagctgagcgaggatgggaggaagaagaggttggaggagattgggaaagaagacgcgtggttcaaacaaaccgggaacgaacaagttgagggtcgtcgttttgattgagtttaagtaggttctactacttggaacttggaatgaagtatgaacgtgtggtttttcgcaggtggcagttgcacctgggggtcgttggaacaggttcaagacttactccacaatacaaagaacctttg

SEQ ID NO: 29611 - DNA, 438 bp, Glycine max
  Clone ID: LIB3138-024-Q1-N1-H9
gtttagtggtaaaagtgcgattcgttccatggacccctaaatagttaagggatcccccgtttgattcatattccgatcaaaaactttatttcttacttaaagggaatcctttataccctcaatgaatgatttgcggtataatatacattatcgtaatttgtatacaagaagaatcaattctaaattgacaacttgagttctaaaattatgaaacataagtttttggaattggatctataatccgaatttttttgagtatgacgaaaggatctatggagagatatatagaaagtttctttctaatcgtaactaaatcttccatttttttgtatagtagagattgaagcaaaataactattaaacgattcttttagtttactagagacatctacatttttttagctcgacagaaattttatgcttttcctaaagattcta

SEQ ID NO: 29612 - DNA, 310 bp, Glycine max
  Clone ID: LIB3138-044-Q1-N1-A2
gctttctattgaccttctcgatggaggtatctctgtggacaaaactggagattggatcacacttatacaaaattctccaattagtaacttgttgagagttgctgcttggaagaaaggctgtttaatggtcaagattgtgatgtctgggaatgcaacagtcaaaaggagtgattgggcctcattggtacaagtgtttttaacaaacagcaacagtacagagcattttgatgcatggtagtggacaaaatcagaaccacattcctgggaattgatctttccaatagaaggatgtggtcctaataatgggttt

SEQ ID NO: 29613 - DNA, 322 bp, Glycine max
  Clone ID: LIB3138-044-Q1-N1-A3
ttcaattccgatgcgattccgagcttgttagatccacgacaacgtttcgtttcccagattcttttgtaaaaaaaaataatcttcctttgcccaacaggtaagttggaaaaaaatggaccatgacaagactgggtgccaagctcctcctgaaggtcctatattgtgcatcaacaactgtggattttttggaagtgcagctaccatgaatatgtgttctaaatgccacaaagacatgttgctgaaacaggagcaggccaagcttgcagcatcatccattgggaatattatgaatgggtcttcaagcagcactgaaaaggaacct

SEQ ID NO: 29614 - DNA, 323 bp, Glycine max
  Clone ID: LIB3138-044-Q1-N1-A4
gcatagcaatggttgctcctgtgaaaagcctgaacagaagaacaatgtttatgtgtaactagcgtcacagtattttctcaaagataagagctgtagagccataagcgaattctacggaatttatattttgtgatgtaaaagtgagctgcaatgggggaaagaaaagaagacagactattatttatgtgtgtgtatcaatgttgtggtttattattaggagccagggttgcttcctgttttgccttgtcttgcgctatgagctagagcgttgcttgtcacattgtattgcttgtattatgaaacaaatcctattttatgaaccc

SEQ ID NO: 29615 - DNA, 273 bp, Glycine max
  Clone ID: LIB3138-044-Q1-N1-A5
ggttgaaagaattgagcaccaatccccaacttgcaccacggctgggggttatggttcgggatggtctaaatttgcgttctaataactggattccaagacgtgaagaggtgaaagccaaaaccatcactgaaattcattcagaggcagaaaaaaatcttggattgcgtccaggtgccactgcaagtatgagaaataaccgtgttgtttcaagcgctctaggaaataccagaccacgaagattcccaattgctcgacctggtacaagtggtttga

SEQ ID NO: 29616 - DNA, 293 bp, Glycine max
  Clone ID: LIB3138-044-Q1-N1-A6
cttccccaaaatttcacccctttcattcaattcttccctcttctctgctactgatccatccctcgttttctccgaacaatggctgctggtgtcactgtcaagtccgaggttctagaatcttctcctcctgaaggagtttgttccaacacggtggaaaaccacctggtccagaccaatttgtctgatgggtcacccaacaagtctgtgccagcatctggacttgatgcagtgattcctagtgcaaatcaacttaccatcttctataatgggaagtgttgtgtctatgatggaat

SEQ ID NO: 29617 - DNA, 381 bp, Glycine max
  Clone ID: LIB3138-044-Q1-N1-A7
gcacaacacaaagaaaagtaaacactgcaatagcaagagttttcaaatggcagagggaaaaggtagagtttgtgtcacgggaggcactgggttccttggttcatggatcatcaagagactccttgaagatggatatgctgttaataccactattagatctgacccaggacgcaagagagatgttagcttcctcacaaacctacctggtgcatcagaaaagctaaaaattttcaatgctgatctcagcgacccagagagttttggtccagcagttgagggttgtgttggaattttccacactgccaccccaattgattttgcagtgaacgagccagaggaagtggtgaccaaaagagccattgatggggcactaggaatcat

SEQ ID NO: 29618 - DNA, 378 bp, Glycine max
  Clone ID: LIB3138-044-Q1-N1-A8
agcacaccacacaaaaaaagcaaaacagagagaacaactgttgctcacacacgccatgggtaaatgaatggtttttgagcaacagcagttaaaagagaaaagggattcagcgaagatgacatcggttggtgtggcaccaacttcgggtttgagagaagccagtgggcatggagcagcagctgcggatagattgccagaggagatgaacgatatgaaaattagggatgatagagaaatggaagccacagttgttgatggcaacggaacggagacaggacatatcattgtgactaccattgggggtagaaatggtcagcccaagcagactataagctacatggcagagcgtgttgtaaggcatggatcatttggagttgt

SEQ ID NO: 29619 - DNA, 319 bp, Glycine max
  Clone ID: LIB3138-044-Q1-N1-B1
atcctcctctgtctctctctctccaccattgccatggatccttacaagctccggccatccagcgccttcaattctcccttctggactacaaattctggtgctcctgtttggaacaacaactcctctttaaccgttggagctagaggtccaattctgcttgaggattatcatcttgtggagaagcttgcaaactttgacagggaacgtatcccataacgtgttgtccatgccaggggagctagtgcaaaaggtttctttgaggtcacacatgacatttctcacctgacatgtgcagatttccttcgagcccctggagttc

SEQ ID NO: 29620 - DNA, 390 bp, Glycine max
  Clone ID: LIB3138-044-Q1-N1-B3
cttgccagatgggtccatcctcagatgtgagcactatgcactcccaaccagggactgtctctttgctgaccctctccatgatggcaaaacaatgctcaagatatggaacctcaacaagtacactggagttcttggggtgtttaactgccagggaggaggttggttccgtgagattaggtccaacaaatgtgctgctgagttttctcatagggtatcaaccaagaccaatatcaaagacattgaatgggatagtggaaagaatccaatttccattgaaggggtgcaacttttcgcttcgtatttcagccaagccaagaaactcatcctctcagcaccatctgatgacagtgaagagatttccttggagccattcaatttcgagcttataac

SEQ ID NO: 29621 - DNA, 269 bp, Glycine max
  Clone ID: LIB3138-044-Q1-N1-B4
aaaagattcgcacagcacttgggaaaggtaagaaaattgtttttcttactagagttgatccttttccagtagctttactggctgttctttttggcgttaagaatgaaattctgagttctaacgccactaatcctatgctgacgcgacttcttgagaactgtaagagtctcaaatatctggttgatgagtgtccttttgcatttgtgaactagtatgtagtattttattcacttaaataaagcgcattactatgtgcaatgagtgtgttt

SEQ ID NO: 29622 - DNA, 346 bp, Glycine max
  Clone ID: LIB3138-044-Q1-N1-B5
ggcggggaacgcggtgaaccggaaaaaggcgatgaacgcggcgatggctgcgctgaagagcgcgggggtggagggggtgatgatggacgtgtggtggggtttggcggatacagagaagcctggggagtataattgtggagggtacgaggatcttatggtgatggcgaataagcattgcctcactgtgcaggctgttatgtcatttcacccatgtggcggtaacgtcagagactcttgcactattgctatgactaaattgtttgtggaggagattgataatgaccacgatatttcatatactgatcaatggggaagaagtaactatcaatatatatcacttggatgt

SEQ ID NO: 29623 - DNA, 365 bp, Glycine max
  Clone ID: LIB3138-044-Q1-N1-B6
ctggcaagcaaaagaaatctaagcctgctagtgaaggcacttcaaaagccaaagttgcttcaaaatcagattccactagtcactcatctggtaaccgtcatcaggcagctgttgagatgcaacggcagaagcttaaaaagatgatggacgagcttaatgaggagggagatggtcgtgcacccattgtcaagcttggggatgcctcaatggcatctccattcactgctaagcatgcatctgttgctcccaccactgatataattcgtcaaggtaggagtaccctagtgacaaccctccagatgtttaaaattctgggtctcaattgtcttgctactgcatatgtgttgagtgttatgtatctagat

SEQ ID NO: 29624 - DNA, 375 bp, Glycine max
  Clone ID: LIB3138-044-Q1-N1-B7
ggcggttgcttcgtaagtacagggaatcaaagaaaattgacaagcacatgtaccatgatatgtacatgaaggtgaaaggtaatgttttcaagaacaagagagtcttgatggagagcattcacaagtccaaggctgagaaggcaagagagaagactttgtctgatcagtttgaggctaagcgtgcaaagaacaaggctagcagggaaaggaaacttgctcggagggaggagcgcttagcccaaggtcctattgacaagacatctactgcacccagtgccccagctgccacagcaccccagtctacccaagcgccaaagaaattcaagaagtgagtagcatatcctggaattcaaaggacgtggagtctttaatagc

SEQ ID NO: 29625 - DNA, 336 bp, Glycine max
  Clone ID: LIB3138-044-Q1-N1-C1
ctcgagccgaatcggctcgagggggtttacccaccactgcttggattaggtctgcagttaacaatcgctcctcagatatcaacgaaaagattcgcacagcacttgggaaaggtaagaaaattgtttttcttactagagttgatccttttccaggagctttactggctgttctttttggcgttaagaatgaaattctgagttctaacgccactaatcctatgctgacgcgacttcttgagaactgtaagagtctcaaatatctggttgatgagtgtacttttgcatttgtgaactagtatgtcgtattttattcacttaaataaagcgcattactat

SEQ ID NO: 29626 - DNA, 357 bp, Glycine max
  Clone ID: LIB3138-044-Q1-N1-C3
ctcgagccgaatcggctcgagtgcaattgaagttgaagtcttgcccttctctcttcaactccaaacacaagacatcatcatccatggctgcctccgtctccactgtcggagctgtcaacagagctcttttgaacctgaatgggtctggacctggggtttcagctcccagttcatccttctttgggagcagcttgaagaaggttattggctcaagggtccccaacacaaagatttcctctggaagcttcaagattgttgctgtagaagagaagaaagagattgaagagacccagcagaccgacaaggacagatggaagggtcttgcctatgatatctcagacgaccaacaggacatca

SEQ ID NO: 29627 - DNA, 268 bp, Glycine max
  Clone ID: LIB3138-044-Q1-N1-C6
atcacactttaccgccctttaatcaaaacaggggaggcccttgttaacgacgcgggtatccatttctataagtgcaaccgtcagactctccaacccgggttaaaggaattgtggcaaattgcgcccccctaaatggcgaatttttgggcccccataatgcctgacccggtaaggtaaatggcaattcaatggtcggaacctaaatgccgttcttacttagcgcctggtaaaaaggctttacttaattaaagggcccacccccccggaa

SEQ ID NO: 29628 - DNA, 376 bp, Glycine max
  Clone ID: LIB3138-044-Q1-N1-C7
attaaatgtacagcctctttcttcatagcatttggaaatttggctgatgataccatcaattttgaggcttttccccacaagctggtgcagtttggagagattcaggaaaaagttgtattgaaattttcacaagaggaatttcttacagcttggtcaactcaggtgcgtcctgcaacaactctgttggctgatgggtgtccatatttgtatgcaatggtgcatgatagttcagtgtctacaataccaggtgattttgtcattggtgtcaagttgacaaccatcaacaatatgtgtgcatatgggctcaatcctggtatttcaggttctcgacttttgggcaccattcctcagtccatttcacagcaaactgtttgga

SEQ ID NO: 29629 - DNA, 325 bp, Glycine max
  Clone ID: LIB3138-044-Q1-N1-C8
caaacttcatggcatttgagtttccttattgacaatcccaaacagtctacagtttttgatattctcttgggaatctctcaagattttgaaattgctggtaatactcttatgccagctttttctgttccacaggctactgccagatcttctgaaaatgcggaatcctctgcatgatctggaatttgtgttttctttcgcttgttcgtttgtttaattcaataaaggaaattaggcatgaccctctttttgagtatgctctgcctatttgaaaatttccacacctcttttaattgtcgtaatgatgtgtgaagtgtgtgttattttt

SEQ ID NO: 29630 - DNA, 298 bp, Glycine max
  Clone ID: LIB3138-044-Q1-N1-D1
tctgctctcaagactgtgaattgtggaatcctgcttgcacaaaagcaatgactatgtcatttaatccaaacccgtgttctgatgcatggagtttggaatttctgaagcgtactggatttcattgcgatatcatttgtgtcactggatggactgccaccccaatgcaggatgttcaggttacaattgattggtttatttcctctcaggaatgtgttcccaggacctattgtgttttaaatccacaaaatccttttgtgttaaataggtggatgggaaaattgactttcccccagggcac

SEQ ID NO: 29631 - DNA, 315 bp, Glycine max
  Clone ID: LIB3138-044-Q1-N1-D2
agtgaattcaacacagatttaatcactgagcggcctgatcagtggctgcttctatgtgcatgaggcctcaccactattgtgctggatccagtgcttccacaagggggcgtgctgtacggcacatttgtagcggttgctgaacacaatgaacttgctaccaatatcaaggagaaaatgtatcacactcatgatctagaagcacatatgacccttttaaattcaccaactgagtgtcaagatgagtcattctcatacctaatgcataattggtggggaaattggcatgactcatcatctcttgctcaaagagtatat

SEQ ID NO: 29632 - DNA, 382 bp, Glycine max
  Clone ID: LIB3138-044-Q1-N1-D4
cttaattagtgttcatgaatatgtcaagccttactttagtggttctaaattgaaaagctttctagctagtcataacatcaccattactgatggtattgacaaaactagtgcaactttgcaatttagaaagttagcagattgtgattttctcaagagaaactttaagcagatgtctaatgttttgtgggtggctcctgaggacaaggcgagtttatggtcacaacttcattatgtttcgtgtaataatctggaaatgcaagaagcttatcttgtcaatctcgtaaatgtgttacgagaattgtatttgcacagtccagaggaagctcgccaattgagaaggaaagctctctctcgtattgaatggctgcaaaaagctgatgtg

SEQ ID NO: 29633 - DNA, 258 bp, Glycine max
  Clone ID: LIB3138-044-Q1-N1-D5
gcagtttggagagattcaggaaaaagttgtattgaaatttttacaagaggaatttcttacagcttggtcaactcatgggcgtcctgcaacaactttgttgggttatgggtgtacatatttgtatgcaatggggcatgatacctcagtgtctacaataccaggtgatcttgtcattggtgtcaagttgacaaccatttacaatatgtgtgcatatgggctcaatcctggtatttaacgttctcattttttgggcaccat

SEQ ID NO: 29634 - DNA, 311 bp, Glycine max
  Clone ID: LIB3138-044-Q1-N1-D8
ctcgtaaatgtgttaccagaattgtatttgcacagtccagaggaagctcgccaactgagaaggcaagctctctctcgtattgaatggctgccaaaagctgatgtgcctaccataacacacattgaatagttccattccatgcacaggatgatgaatgctcctgatccacatgataatattgatttactgttgagcattgattagttgggtttacaaggagcatgtaaagcttttccaaacaaaattgtttttgatgatcagcttgtgttggctaacacacaagaattctttgatggaaattttccagtgga

SEQ ID NO: 29635 - DNA, 93 bp, Glycine max
  Clone ID: LIB3138-044-Q1-N1-E1
ataatttcaattacttgtgaaaaaaaaaaaaaaaaaaaaaaaaaaaaaaaagatggggataaaatcaagaaaaaagaaaagaaaagggctggg

SEQ ID NO: 29636 - DNA, 294 bp, Glycine max
  Clone ID: LIB3138-044-Q1-N1-E2
gattactgagtaagggcaatgatattctgtgttgcgattatgctagttttgatggtttgattaccaagcaagttatgagcaagatggcagaaatgataaacagtctttgtggtggtgatgaaaaattgatgcgtgaaaggacgcacctgctgttggcttgttgttcaaggatggcaatttgtaagaaagatgtttggagagttgaatgtggaatcccttctggatttccgctcacagttatttgcaatagcatttttaatgagatgctcattagatatagctatgaaaaattac

SEQ ID NO: 29637 - DNA, 262 bp, Glycine max
  Clone ID: LIB3138-044-Q1-N1-E4
cgccactaatcctatgctgacgccacttcttggagaactgaaggagtttaaaatttctggtggatgagggccctttggctttggggacctatattgaatattttattcaactaaataaagcgcattactatgtgcaatgagtgtgtttaaatattaaaaaaaaaaaaaaaaaaaaaaaaaaaaaaaaaaaaaaataaaaaaaaaaaaagaaaaataaaattacaaatttaaattaacaaagaaaatattaatatggggggtc

SEQ ID NO: 29638 - DNA, 381 bp, Glycine max
  Clone ID: LIB3138-044-Q1-N1-E5
ggcaaggccaaggaagtcattgccgcggttcagaagtccgccgtcaatgccaggaggaacatcatcaaggttcctatgactaagtactccacttttccccatagagctgacggagattatggagcggcaaaggtgatgcttagacctgcatctccgggtactggagttattgctggtgggtcagtgagaattgttcttgaaatggctggagttgagaatgctttgggaaaacaactagggagtaataatgcactcaacaatgccagagcaaccgttgttgctgtgcaaaaaatgaagcagtttcgtgaggttgctgaggagcgtgggattccaatggaagaattgtggaagtaatgaaatttgtgaaggcaatgtgatttt

SEQ ID NO: 29639 - DNA, 367 bp, Glycine max
  Clone ID: LIB3138-044-Q1-N1-E6
aagaaaaacccaaaaagattgatgccagattgagacaaagaatagatcctcaatacaatgaggttcaggctcagatggaaacaaatttgtttaaattgtctcttgatgatgttgaaactcctaaaggttccatgttggatctgaaaatttctcaatctaaaattgcacttcccaagaacacagttggaggaaccattctgcgtagtgatctattggcaaattttttgacagagggcaattttagagcaagtgttgatttgcagcgcactcatcgtattagaggaatgattaaaatggtggccacagttggtattcctgagaatacaggtatatcattggcctgtgctatgaatagttcttttagggg

SEQ ID NO: 29640 - DNA, 382 bp, Glycine max
  Clone ID: LIB3138-044-Q1-N1-E7
ctgaaaaggaagatcaagaaaaacccaaaaagattgatgccagattgagacaaagaatagatcctcaatacaatgaggttcaggctcagatggaaacaaatttgtttaaattgtctcttgatgatgttgaaactcctaaaggttccatgttggatctgaaaatttctcaatctaaaattgcacttcccaagaacacagttggaggaaccattctgcgtagtgatctattggcaaattttttgacagaaggcaattttagagcaagtgttgatttgcagcgcactcatcgtattagaggaatgattaaaatggtggccacagttggtattcctgagaatacaggtatatcattggcctgtgctatgaatagttcttttagggg

SEQ ID NO: 29641 - DNA, 372 bp, Glycine max
  Clone ID: LIB3138-044-Q1-N1-E8
gcggagagagactttgaagttgtgtcgtgtggcgtttctggctgcaatcacagtctcttccacttttcaatttcattctttaatcagtcaatcggcatcctcatgtccgacgcttattggagatacgccgccgagtcccggcaggccccctcttccatcgccggcaagcgctctcgttccgactacgatgtttctggcgttcatgacttgcccagttactttccccatgacgatgatagaggagggctccgagtaattagagatactgaatcccttgatgcatcttatgagcgttacctccgtagtgcgcaagtttcatcatatggttcgggacagtctactagaaccattggtgggcgaattcccaatcgt

SEQ ID NO: 29642 - DNA, 358 bp, Glycine max
  Clone ID: LIB3138-044-Q1-N1-F1
ccggcgaccgtggtctctgcggcggtttcaacaacgcaatcataaagaaagctgaggctagaatcagggaattgaaggagcttggcttggaattcactgtcataagtgttggcaagaagggtaactcttatttcatcagaaggccttatattccggttgacaggtttctagaaggtggcacacttccaactgctaaggaagctcaggccattgctgatgatgttttctcactctttgtgagtgaagaggttgacaaggtggagcttctatacaccaagttcgtgtcgttggtgaaatcggatcccgtgattcataccttgcttcctctttcgccaaagggagagatttgtgatgtgaa

SEQ ID NO: 29643 - DNA, 168 bp, Glycine max
  Clone ID: LIB3138-044-Q1-N1-F2
catggaacgcaagtctaagaaatgactttaaaacctcgtgtactgaccaagattcggattgattgggattctggaatgaacgagaccattaaatctcctaattacgtgcagacaggaatggtacctattaattcacctattggcccaatcgtccatatgacaattttg

SEQ ID NO: 29644 - DNA, 267 bp, Glycine max
  Clone ID: LIB3138-044-Q1-N1-F3
agagagagaaagaaattaagaaaaaatggcagcctgcactgtctactcaacacaatctctgagcacaaattgctccatctcaaccccatcaaagacacagctgagtttcttccaccaaaagcaggtagttttctggaggaacagcaacaggggcaacagcagcagcagaagaagctatgtgataacatgtgcagcaggtgactcacagacagtggtgattggtcttgctgcagactcaaggtgtgggaagagcaccttcatgaggag

SEQ ID NO: 29645 - DNA, 377 bp, Glycine max
  Clone ID: LIB3138-044-Q1-N1-F4
gtgtttttaacaaacagcaacagtacagagcattttgatgcatgtaagtggacaaaatcagaaccacattcctgggaattgatcttcccaatagaggtatgtggtcctaataatggttttgaaatgtggagttctgagtgggcaaatcaaacttcatggcatttgagtttccttattgacaatcccaaacagtctacagtttttgatattctcttgggaatctctcaagattttgaaattgctggtaatactcttatgccagctttttctgttccacaggctactgccagatcttctgaaaatgcggaatcctctgcatgatctggaatttgtgttttctttcgcttggttcgttgtttaattcaataaaagaaatt

SEQ ID NO: 29646 - DNA, 342 bp, Glycine max
  Clone ID: LIB3138-044-Q1-N1-F5
gttggtattcctgagaatacaggtatatcattggcctgtgctatgaatagttcttttagggggcgcgccagttctgatatttacaccatctgctctcaagactgtgaattgtggaatcctgcttgcacaaaagcaatgactatgtcatttaatccaaacccgtgttctgatgcatggagtttggaatttctgaagcgtactggatttcattgcgatatcatttgtgtcactggatggactgccaccccaatgcaggatgttcaggttacaattgattggtttatttcctctcaggaatgtgttcccaggacctattgtgttttaaattcacaaaatcctttt

SEQ ID NO: 29647 - DNA, 354 bp, Glycine max
  Clone ID: LIB3138-044-Q1-N1-F6
caactctgttggctgatgggtgtccatatttgtatgcaatggtgcatgatagttcagtgtctacaataccaggtgattttgtcattggtgtcaagttgacaaccataaacaatatgtgtgcatatgggctcaatcctggtatttcaggttctcgtcttttgggcaccattcctcagtccatttcacagcaaactgtttggaatcaaatggcaacagtgagaacaccattgaattttgattctagcaagcagagcttttgtcagttttctattgaccttctcggtggaggaatcttagtggacaaaactggagattggatcacacttatacaaaattcttcaattagtaacttat

SEQ ID NO: 29648 - DNA, 364 bp, Glycine max
  Clone ID: LIB3138-044-Q1-N1-F7
aacacattgaatcatgtctgtaccgtacgatatgctgagcaacagccagaatggccatattccggctagcgagcggatacccgtcattgccaggccatttgtcagtgagagggcgaagaagaccctggatatcgtagaaaagttcgtcgaagaagaatgcattcccgccgacgccgtatacacacgccaaatcggccaaaccacaaaggagcgcttctcctcgcacccttccatcatcgaagacctgaagaagcgagctcaggagctgggtctctggaacatgttcttgcccaaggcacacttcaaggagggcgctggcttcagcaatctcgagtacggcctcatggctgagtacttgggcaag

SEQ ID NO: 29649 - DNA, 349 bp, Glycine max
  Clone ID: LIB3138-044-Q1-N1-F8
tgttgttgtaactcgttcttcttcttttgttgttctgtgtttgtgtttgttttttctctcacctgaaaatgtcttgctgcggtggtaactgtggttgcggaagctcctgcaagtgcggcaacggctgcggaggctgcaagatgtacccagacttgagctacactgagtcaaccaccaccgagaccttggtcatgggagtggcacctgttaaggctcaatttgagggtgctgaaatgggtgtgcccgctgagaacgatggctgcaaatgtggaccaaactgctcctgcaacccctgcacttgcaagtgaggtgttgggagagcaagcttcaagcagagatagcccttaat

SEQ ID NO: 29650 - DNA, 309 bp, Glycine max
  Clone ID: LIB3138-044-Q1-N1-G1
ccaaaacaacgccttttctcttctgcttcgactccattctttgcgttagggctttggctgaaagaaggcattcacagggtctttccttgctacatactaatctatgtatctacccaaaactgaacgacctaatggagtctagccgtgataaacagaagtctagttgttataatggtgaaccaattctacacgaaactgccctcagatccaggattgaaaacgtttgaccactctgtggaatcaagaaattcacatctgctgcttactctaaacgaactcgcaaaccatcctgatacacatatccattga

SEQ ID NO: 29651 - DNA, 380 bp, Glycine max
  Clone ID: LIB3138-044-Q1-N1-G3
ctcattggtacaagtgtttttaacaaacagcaacagtacagagcattttgatgcatgtaagtggacaaaatcagaaccacattcctgggaattgatcttcccaatagaggtatgtggtcctaataatggttttgaaatgtggagttctgagtgggcaaatcaaacttcatggcatttgagtttccttattgacaatcccaaacagtctacagtttttgatattctcttgggaatctctcaagattttgaaattgctggtaatactcttatgccagctttttctgttccacaggctactgccagatcttctgaaaatgcggaatcctctgcatgatctggaatttgtgttttctttcgcttgttcgtttggttaattcaat

SEQ ID NO: 29652 - DNA, 361 bp, Glycine max
  Clone ID: LIB3138-044-Q1-N1-G4
gttatggaaccatcaaggagtagaggtgttcagtttccatttgctgtgatggaccgggttatcataaagggaaataaaaggacaccacaacgctttgttgggcgcgaagctattgttacaacgcaatgcctgaatggatggtatgtggtgaagacattggacaatgcagaaagtgtaaagttgcagtatagatcccttgcaaaggttatggatgatccttcaaaacctgctgcctgcagcaagatgccaccaaattggctttagatctgattctgcagcacaccgtcatcaaatatttctacaccaagctgctgcctcgtgatttttagcgttcaatcgctgacataccaacaaagatttt

SEQ ID NO: 29653 - DNA, 377 bp, Glycine max
  Clone ID: LIB3138-044-Q1-N1-G5
gtggagattatcatgctgctgtgagagatgcaattaccaaaaagctctttgatgttcttttgtatagtagcaggaaagaagagagatgtgctggaactgtttggctagtatcacttataaagtactgcggcaatcatcctactattcagcaaatgcttccagaaattcaggaagctttttctcaccttcttggtgagcaaaatgaactcacacaagagttggcttctcagggcatgagtattgtgtatgacattggtgatgaatctatgaaaaagaatttggtgaatgcacttgtaaataccttgactgggtcacggaaacggaaaagagccatcaaacttgttgaagacactgaagtatttacggatggagctctt

SEQ ID NO: 29654 - DNA, 331 bp, Glycine max
  Clone ID: LIB3138-044-Q1-N1-G6
cacaataacaaacaacacactctaatagttcttctttcctcacttacgtcgacctcacaaagtgacaatggaccccatgagtctgatgcgcaccggagccctcctcgccagcggcgtctaatgactcgtgcgcgtgctgggcccctccgagccaaacggcagacgcgccagcaatctttcctgcggttgcatctgggccgagaaagctcaagacaaatactgacaggactggaccgtgttgtgacggccaaaagagatcgagaccgccgacaaaggacccgacttagtgcacaccgtatacaatctagtcacaaacatctacgagtggggg

SEQ ID NO: 29655 - DNA, 354 bp, Glycine max
  Clone ID: LIB3138-044-Q1-N1-G7
gatgggtgtccatatttgtatgcaatggtgcatgatagttcagtgtctacaataccaggtgattttgtcattggtgtcaagttgacaaccataaacaatatgtgtgcatatgggctcaatcctggtatttcaggttctcgtcttttgggcaccattcctcagtccatttcacagcaaactgtttggaatcaaatggcaacagtgagaacaccattgaattttgattctagcaagcagagcttttgtcagttttctattgaccttctcggtggaggaatcttagtggataaaactggagattggatcacacttatacaaaattctccaattagtaacttattgagagttgctgct

SEQ ID NO: 29656 - DNA, 386 bp, Glycine max
  Clone ID: LIB3138-044-Q1-N1-H1
gtgcgtgtagcatacgagcttcttctagctggtcatcgatatttggatgtaaggaccccggaagagttcgatgctggacacgctcctggcgcaattaacataccttatatgttcagagttggatcagggatgacaaagaacagcaactttattagagaggtgtcttcacagtttaggaaagatgatgaaattattgtcgggtgtgagcttggtaaaagatctatgatggccgcaagtgacttgctagctgctgggttcactggactcacagacatggctggtggttatgctgcatggacacaaaatggacttccaacagagctatgaagtgtttctgttggaactgtagctgtaaatagaataagttttgggagtgtccaatgcat

SEQ ID NO: 29657 - DNA, 361 bp, Glycine max
  Clone ID: LIB3138-044-Q1-N1-H4
tccgctccgagttgtatgttttgcagagctagaagaaatcaacgatgcctcgctatgatgataaatatggtaatacccgcctctatgttggacgcttgtcttcgaggactcgttcccgtgacctggagcgtgtcttcagcagatatggaaggtttctgaggttttctctaaacctggaggtctttgttgggaggttggccttggtggaatttgtggaaattcctgtcgagtattgactttggcgattctttctgtaatgttattgcgtgtttttttatggaaatggcaacactcccaaactggtgtttagttcgtctttgaggggtgatgtatcatacagttccagtagttaagtaatgat

SEQ ID NO: 29658 - DNA, 380 bp, Glycine max
  Clone ID: LIB3138-044-Q1-N1-H6
gatttgttgggtttacaaggagcaggtaaagcttttccaaacaaaattgtttttgatgataagcttgtgttggctaacacacaagaattctttgatggaaattttccagtggattcttggttaccaatttttgtgaattgtctttatcctgtaagtcaattaccttcagaagctgtcgttgtaaatgttacatgtggtagtggacgtggtggtttacccaccactgcttggattagttctgcagttaacaatcgctcctcagatatcaacaaaaggattcgcacagcacttgggaaaggtaagaaaattgtttttcttactagagttgatccttttccagtagctttactggctgttctttttggcgttaagaatgaaat

SEQ ID NO: 29659 - DNA, 115 bp, Glycine max
  Clone ID: LIB3138-044-Q1-N1-H7
gaactgtaagagtctcaaatatctggttgatgagtgtccttttgcatttgtgaactagtatgtagtattttattcacttaaataaagcgcattactatgtgcaatgagtgtgttt

SEQ ID NO: 29660 - DNA, 370 bp, Glycine max
  Clone ID: LIB3138-044-Q1-N1-H8
ctagaacaaacacttaagttgcttcacaaggcactagagatacttaatgaaggctctggtcagcaaaacacaatagcaggaattgaagcatagatgggggtcatgtactacgtgttggagaactacactgaatcttacaatgctttcaagaatgctgtgtcgaagcttcatgctaccggagagaagaaatctgccttctttggtactgttcttaatcaaatgggacttgcttgtgtgcagctccatgccttagatgaggctgcagaattatttgaagaagcgagggtcattttggaacaagagaatggaccctgtcaccctgaaacacttggagtatatggcaatcttgctggcacgtatgatgcaattg

SEQ ID NO: 29661 - DNA, 558 bp, Glycine max
  Clone ID: LIB3138-045-Q1-N1-A11
aatagatcggatgattcacctgctgtcgttagtctggcttgcggcagtctttcaggcattgcatcatcaacagagaaagagagtttggtgcaggaactgcaccaagtatctaaccagactgacccatagaaccagagaccaggttggagttgttattgtatctgtggcatatgacaatttagtaaggaaaatgacaaaaaacatttttctcgtctttctgtaactttattttttatctaaagatcttgctcaagttatcatcttcccaagttttgttctatgacatgtctccccaagctatgcaagggattccatcatgtggtggcattacttggatgaaactatatgattccctcagttaccaaatgtgagaggtgtcctctttgagctatgcttctcacttaggctaccttcacctgatgtttggatgggtaccagaatccttttcaagccttagtgtttctgaagaatctgttcttggtgctttaatagtattgctttcagcataatctaaattatggaaattatggcaaaaaattacaatataaaagaaaaatt

SEQ ID NO: 29662 - DNA, 461 bp, Glycine max
  Clone ID: LIB3138-045-Q1-N1-A12
ccgtcagttgcaggaaaaatggtttcgctgaaactgcataagcggctcgccgcgagcgtgctcaagtgtggcagaggaaaggtttggcttgaccccaatgaagtcaacgaaatctccatggccaattctcgccaaaacataaggaagctggttaaggatgggtttatcatcaggaagcccaccaagattcactctcgctcacgtgctcgtcgaatgaaggaagccaagaggaaaggacgtcactctggatacggtaagcgtaagggtacaagggaggcaaggcttcccactaaaattctatggatgaggagaatgcgtgtgctcagacgcttgcttcgcaagtacagggaatctaagacgattgacaagcacatgtatcatgacatgtacatgaacgttaaaggtaatgttttcaagaacaagagagttttaatggagagcattcataagtccaaagctga

SEQ ID NO: 29663 - DNA, 496 bp, Glycine max
  Clone ID: LIB3138-045-Q1-N1-A2
gtgttcccaggacctattgtgttttaaatccacaaaatccttttgtgttaaataggtggatgggaaaattgactttcccccagggcacttcccgaagtgttaagagaatgcctctttctatagggggaggagctggtgcaaagaatgctattctcatgaatatgccaaatgctgttctttcaatgtggagatattttgttggagatctcgtctttgaagtttctaagatgacttctccctacattaaatgtacagtctctttcttcatagcatttggaaatttggctgatgataccatcaattttgaggcttttccccacaagctggtgcagtttggagagattcaggaaaaagttgtattgaaattttcacaagaggaatttcttacagcttggtcaactcaggtgcgtcctgcaacaactctgttggctgatgggtgtccatatttgtatgcaatggtgcatgatagttcagtgtctacaataccaggtgattt

SEQ ID NO: 29664 - DNA, 501 bp, Glycine max
  Clone ID: LIB3138-045-Q1-N1-A7
ctcctcacccaccccaccccaaccaaaccatataacaaacgccgtagtttcctttcttttctctactgttttctccaaattaatacaacccattttccttcagatgaagcagctcatccgccgcctctcgcgcgtggctgactcctccaactacacgctcctccgttcggactcctcccaagcctgccaccaaccgtcgccacgcgccgagtccttccgtctctccgccccatccaagatccgccgctcctccgcggcggtggtttcggaggggcacgtaccgatctacgtcggcgacgagatggagcgcttcgtcgtgtgcgccgagctcctcaaccaccccgtcttcgtcaagctcctcaacgaatccgcgcaggaatacggctacgagcagaaaggagtgctccggctgccgtgccgcgtcttcgtcttcgagcgtgttctcgacgcgcttcgtctcggactcaacgcgcgtgacatcgccgagctcgtaaatttctc

SEQ ID NO: 29665 - DNA, 479 bp, Glycine max
  Clone ID: LIB3138-045-Q1-N1-A9
caagattgtttttgatgataagcttgtgttggctaacacacaagaattctttgatggaaattttccagtggattcttggttaccaatttttgtgaattgtctttatcctgtaagtcaattaccttcagaagctgtcgttgtaaatgttacatgtggtagtggacgtggtggtttacccaccactgcttggattagttctgcagttaacaatcgctcctcagatatcaacaaaaggattcgcacagcacttgggagaggtaagaaaattgtttttcttactagagttgatccttttccagtagctttactggctgttctttttggcgttaagaatgaaattctgagttctaacgccactaaccctatgctgacgcgacttcttgagaactgtaagagtctcaaatatctggttgatgagtgtccttttgcatttgtgaactagtatgtaatattttattcacttaaataaagcgcattac

SEQ ID NO: 29666 - DNA, 462 bp, Glycine max
  unsure at all n locations
  Clone ID: LIB3138-045-Q1-N1-B10
ggtgtttcatttgtgaaactaacaacaacacaaggccatcatcatggcagctgcttccccaatggcaagccaactcaagtccaccttcactaggactcttgtagctcccaagggcctctctgcctcttcaccacttcacctcgtgccttctagaaggcaatttagcttcactgttaaagccatccaatcagagaagccaacctatcaagtgattcagccaatcaacggtgacccattcattggaagcctggaaaccccaattacatccagccctttgatcgcatggtacttgtccaaccttgccgcatacagaaccggaatgagcccactactaagaaggatcgaggtgggcctggcccacggataccttctggtgggcccattcgtgaaagccgggcctcttaggaacaccgagatcgccgggcaagcgggctctctggccgncggtgggcttgtggtgat

SEQ ID NO: 29667 - DNA, 559 bp, Glycine max
  Clone ID: LIB3138-045-Q1-N1-B11
ggaggttgttgttaaagtgcaaaggcctggtctcaaagctctttttgacatcgatcttaaaaacctgaggattattgctgaatatcttcaaaaaattgatcccaaatcagatggtgcaaagagggactgggttgctatttatgatgagtgtgcctctgttttatatcaggagattgattacaccaaggaagctgctaatgcagaactatttgcaagtaactttaaaaacttggattatgtgaaagtccctacaatcatctgggattataccacgccacagattctgacaatggagtatgttcctgggattaaaataaataaaatacaagctttagatcaactgggtcttgaccgcaaaaggttagggcgatatgcagttgagtcttacttggagcagattttatcacatggattcttccatgctgaccctcatcctggaaatattgcagttgatgatgtcaatggtggaagattgatcttttatgattttggaatgatgggaagtatcagtcaaaatatccgaagaggtttacttgaagctttttatggaatttatgag

SEQ ID NO: 29668 - DNA, 486 bp, Glycine max
  unsure at all n locations
  Clone ID: LIB3138-045-Q1-N1-B12
gttagaccaaacggtggaatcaagaaattcagatctgctgcttactctaactgttctcgcaaaccatcctgatacacatccggattgatagttcgttgcatgcaaccatagttttattaggattttttcttctttgttttcaattaggtttttttgttgctctccttcaaactccatctttccaaatcctctctttgcgattgtgttttgatctgcttcctactgcgatagtttctctactgttacatggccatggcggtttccgcaattggttttgaaagtttcgagaaaaggttggaaatatcctttttccagccgggactttttgctgaccctgaangaaagggtctaaagctcttacaaaatcccagttgggtgagattctaacaccagctgcttgcaccattgtttcttcgctcaaaaacgataatgtcgactcctatgttctatctgagtgcagcctctttgtttatgcctacaagatca

SEQ ID NO: 29669 - DNA, 375 bp, Glycine max
  Clone ID: LIB3138-045-Q1-N1-B9
caagaacagaagctgctaacgaacagctgcggaaagaattggaggagaaaatcgaccaggtcaaaacttattacaataagcatcaacttgaaaagcaggcaaataaagagaagatttgttttggttgcctggaagttcacgatatagctgcctttgtgctcactccagctggtcactacgaggcaattactaggaactgctctaactactacttatctgatgaatctgtagccctgtttgcagaccgtcttcctaccagacctaactacattgttggacaaattgtgcatattgaacgccaaattgtgaagatgccgacgcctcggcctgagcacggtggggctgataaatttacccctgacaaggggactgact

SEQ ID NO: 29670 - DNA, 475 bp, Glycine max
  Clone ID: LIB3138-045-Q1-N1-C10
gtggattgtgttaaaggggttttgagaattcttgttgaagttgaaaaagctgagagtttttggttgaagttctgctcccatggctgctcaattgcaaaaatctgcagatgaaatgaggaagaaggttcacggtgattcttcaacgggtgaacttaataattccaattcgtgtgcatctgggatgtggtttgtttgttcaggttccttccaagggtgcaagttccccttctgattcaagatcatgtgtatcatctataggggatgcttctggcagtgttaaggaagttgatgtggatcatgagtacttgtccacagatcagggtgttccttatcctgctggtggctattatggttactactatccaggttatggtggtttctatggagagtcagacaaccaagcgtactatgttggtgccgatgccgtggatcttcagtaccctgtcatgcaagcagataatggatcttatgtcta

SEQ ID NO: 29671 - DNA, 425 bp, Glycine max
  Clone ID: LIB3138-045-Q1-N1-C11
ggttggtgaacaagaagagaagcttgctgaagggatcaaactttatgcattattagccactgccacttcaaaacggacagttctttctgatcttataactgtttatgcaaagggtgggaagactattgtttttactcagacaaaaaaggatgctgatgaagtatcaatggcattaacaagtagtatagcttccgaagcactgcatggtgatatatctcagcatcagagagagagaacattgaatggttttcggcaagggaagttcacagtgcttgttgccactgatgttgcaactcgtggacttgatattcccaatgttgatttggttatacattatgaacttcccaatgatgctgagacttttgtacatcgttctggccgtactgggcgtgcaagaaaagaaggtacagccattttgatgtaca

SEQ ID NO: 29672 - DNA, 528 bp, Glycine max
  Clone ID: LIB3138-045-Q1-N1-C12
gggagagaaaaaaaagggggggaaatttcaatggcgtcaagggtttctctgaaggcgaagggtaagagttcaaagggatcgaaggccgcggaagatcgatctgcgagcgagtgcctgaaggagtggacgacatgggcaatgcgaaaagcgaaggtcatcactcactatggtttcatccctttggtcatcatcatcggtatgaactctgaccccaagcccccactttcccagcttctcagccccgtctgatctacctcttcatttcttccaccatcaacgcgacctcgtttttttcttttcttttgccccctttctacatttgtaagtttctttatggatcaattttcacttgcacatctcatgtggcatggtgtgttcaaagtcgattagcttgtctgtgtgtttggatagttttgaaagacgcggtagtaaataatcccgtttttttataattacaatgttcgaatattcgtcccgagttttggtttggttatcttgatggattgtgatttttatgattttgatgga

SEQ ID NO: 29673 - DNA, 367 bp, Glycine max
  Clone ID: LIB3138-045-Q1-N1-C2
cgcttctagtacacagccaactgtatggaatcaaattgcgacagtgggaacaccattgaattttgatcttaacaagcaccgctttcagtcagctttactatggagctttttgggggaggaatattaaaggacagaactgtacatcggatcacactatatacaacactacttcaatgagaaccgtgataagagtagctgtttggaagaaaagctgtctaatggataagagagcgatgactgggaatgcaatacactaaaagagtgatcgtgcctaattgctacgagtgtgtttaactatcagcaacagtacagagcattttgatgcctgtcagcggacaaaatcataaccacattcctgggaaatgat

SEQ ID NO: 29674 - DNA, 471 bp, Glycine max
  unsure at all n locations
  Clone ID: LIB3138-045-Q1-N1-C5
gagatcttcggagggtcttagtactagcacaaggcacccaacagggaggagttccacagagaaacatgccgcatgatcaaagcacttcaccaatatgattgcttgcgagccaataaatcaacatttgcttggggtctagaagcccgtgtaccatttttggacaaggcgtttatcaatgctgcaatgagtattgaccctgagtggaagatgataaaaagagatgaaggacgaattgagaagtggattctgaggagagcctttgatgatgaatagcatccttatctgccaaagcacattttatacaggcagaaagaacaattcagtgatggagttggctatagttggattgatggccttaaggcccatgctgcaaaacatgtgactgaaaaaatgatgcttaatgctggtaacatttacccncacaacaccccaaaaaccaaggaagcatattactacagaatgatctttgag

SEQ ID NO: 29675 - DNA, 532 bp, Glycine max
  Clone ID: LIB3138-045-Q1-N1-C7
cgtaccccaaattttggcggttgaggagcagctccttcatttcctcttactctgttttttctgtttctgttggctaagaaacaaagaaagagcccagcgataaagcaaaagcgcatttccgctgttgtatgtgtgtgtttgcgatgccaggtggggcaaccgtctgctccggtcaccggtttctctgcgttgttctgcattcgactcgtccccgactcagctacccgactcggtcgcgacccgttccggttcaacttggatccgtgtttgtgtcgaatggtaatggcgatagtaagcggttcagctccaagttgagcctcattcccagagccgttgattcttccaccgcacaatcttccgtcgtttccgacgatggcttctccgtttctaagctttcatttggtgtgattggtctaggtgttggactctcactcttgtcctacggttttggggcatattttaatattctccctggatctgaatggtcagctataatgttaacttatggcttccctcttgcaattattggaat

SEQ ID NO: 29676 - DNA, 547 bp, Glycine max
  Clone ID: LIB3138-045-Q1-N1-C8
gcttaaccgtaccgggaagcgaccaccgcttctgcgtgcccaccgtatctcaggtgttctttaggcccaacaggcccattaaccgaatcgcgtttcccaaggccaccctcaagaacgacggcttcgtggtggacctgagcttctacgaccttctgggaataccggaatccggttcggtaacggagatcaagaacgcctacaagcaactcgcccgaaagtaccacccggacgtgtcgcctccgggtcgggtcgaggagtacacaaagaggtttattcaagtgcaggaggcctacgaaaccctgtctgatccttccagaagagctatgtacgacaaggacatggccaagggcattaacttcgccttcaacgcccgcagacgctataattaccacgatcaggtagttgaacaaaaaagtgaatggaaagctaggtggaaatctcaactgtcagagctgaagagaaaaagtaacggcaaggatgctggagggaatatgtcatgggcggcacgaatgcgccaacaagaggatgaattgtcaaatgaatcatg

SEQ ID NO: 29677 - DNA, 275 bp, Glycine max
  Clone ID: LIB3138-045-Q1-N1-C9
aaaaaaaaaacaacaataaaaaaataaaaaatacataataagagcggggaataaaaagagtagtgaaaagactaaaaggcacaaataactgagtccagttcacaagggagtgtctcgcttctgacggcttcaccgagtaccccctcgagttgtgcctcttgtcaatacagaggttcggttatgtatttgatactgttctcctgtactatcttatccgacaaaagtgctaattggatcactcttctacagatttgttcaaccagtaccttaagagg

SEQ ID NO: 29678 - DNA, 449 bp, Glycine max
  Clone ID: LIB3138-045-Q1-N1-D1
caacaatgagaacccccattgattttgattctagcaagcagagcttttgtcagttttctattgaccttctcggtggaggaatcttagtggacaaaactggagattggatcacacttatacaaaattctccaattagtaacttgttgagagttgctgcttggaagaaaggctgtttaatggtcaagattgtgatgtctgggaatgcagcagtcaaaaggagtgattgggcctcattggtacaagtgtttttaacaaacagcaacagtacagagcattttgatgcatgtaagtggacaaaatcagaaccacattcctgggaattgatctctccaatagagaggtagtgggccaaataagggttgagaaatgtggagttctgagtgggcaaatcaaacttcatggcatttgagtttccttattgacaatcccaaacagtctacagtttttga

SEQ ID NO: 29679 - DNA, 395 bp, Glycine max
  Clone ID: LIB3138-045-Q1-N1-D10
ttcatgctctacgatatatttgctaatttaaggacatgtcggtgtcaaaaaaaaaaaaaaaaaaaaaaaaaaaaaaaaaaaaaaaaaaaaaaaaaaaaaaaaaaaaaaaaaaaaaaaaaaaaaaaaaaaataagaacacaaaaagaataatgattcaaaacacgcaaagaaaaagaaaagacatctattgacacttatcgatggaggaaatcttaaatgacaaaaactggggattggatcacactgatacaaaatcctccaactagaaaatccacgagagaagctgctcggaagaaaggctgcttaatggagaaaactgtaatatacgggaatgcagaagccaaaaggtgtgatcgggcaatattggtacctgagaccataacaaacagcaacag

SEQ ID NO: 29680 - DNA, 520 bp, Glycine max
  unsure at all n locations
  Clone ID: LIB3138-045-Q1-N1-D11
gaaactttaagcagatgtctaatgttttgtgggtggctcctgaggacaaggcgagtttatggtcacaacttcattatgtttcgtgtaataatctggaaatgcaagaagcttatcttgtcaatctcgtaaatgtgttacgagaattgtatttgcacagtccagaggaagctcgccaattgagaaggaaagctctctctcgtattgaatggctgcaaaaagctgatgtgcctaccatagcacaaattgaagagttccattcgatgcaaaagatgatgaatgctcctgattcaaatgataatattgatttacttgtgagcattgatttgttgggtttacaaggagcaagtaaaagctttccaaacaaaatngtttttgatgataagcttgtgttggctaacacacaagaattctttgatggaaattttccagtggattcttggttaccaatttttgtgaaattgtctttatccttgtaagtcaattaccttcagaagctgtcgttgtaaatgttacatgtggt

SEQ ID NO: 29681 - DNA, 380 bp, Glycine max
  Clone ID: LIB3138-045-Q1-N1-D12
ctaactttggttgatgcgatatgaattattaatttaaagatataaaagctaatcactatatattttaaatctataataagatagtcgaattattggttatctgttcacaattatatatgcaagtatatttaaaattataaaagagattaacaggaaagtgttataaaaaacataggatgagctttgttaagtagtgataatgttccagcccctataaaaaagtaatggtaaagttgtcaaaacaatacgacaaacttaacctacgcccgggggaaagggacttggaataaattgccaaaagggtatgcctctttctttgaaagaaaaagccagttgtcgcggatggctttgccgaaagcaatgaaccgcgttgactctac

SEQ ID NO: 29682 - DNA, 476 bp, Glycine max
  unsure at all n locations
  Clone ID: LIB3138-045-Q1-N1-D7
ctaactttcacacgcagcgaggtagcgtcttcttcttccgtttctctgcatcggtgtgaacaatggctacatacgctgcgatgaagcccacaaagcccgggttggaggagtcccaagaacagatccacaagataaggatcaccctttcctccaagcacgtcaaaaacctcgagaaggtttgtgcggatttggttcgcggtgcaacggataagagactcagggtgaagggacctgttaggatgcccactaaggttcttcacatcactaccaggaaatcaccctgtggtgaaggtaccaacacatgggacagatttgaacttagggtgcacaagagagtgattgacctctacagttccccagatgtggttaagcagattacctctatcacgatcgaacctggtgtggaggttgaggtgaccattgcagatgcttgatcttgatccaaattttaactggtatggttcttagnttttttt

SEQ ID NO: 29683 - DNA, 263 bp, Glycine max
  Clone ID: LIB3138-045-Q1-N1-D8
ctaactttcacactcatcgaggcagcctcttcttcttccgttggtgtgcatcgatgtgagcaatctctacatactctgcgatgaaccccacaaaacccgggttggaggattcccaacaacacatccacaaaataaggctcacccttttctccaagcacgtcaaaaacctcgagaaagtttcagcttatttgattagcggtgcaacggataatatactcagggtgaacggacctgttacgatgcccactaaggttctccacatc

SEQ ID NO: 29684 - DNA, 585 bp, Glycine max
  unsure at all n locations
  Clone ID: LIB3138-045-Q1-N1-D9
gtcaagttgacaaccataaacaatatgtgtgcatatgggctcaatcctggtatttcaggttctcgtcttttgggcaccattcctcagtccatttcacagcaaactgtttggaatcaaatggcaacagtgagaacaccattgaattttgattctagcaagcagagcttttgtcagttttctattgaccttctcggtggaggaatcttagtggacaaaactggagattggatcacacttatacaaaattctccaattagtaacttattgagagttgctgcttggaagaaaggctgtttaatggtcaagattgtgatgtctgggaatgcagcagtcaaaaggagtgattgggcctcattggtacaagtgtttttaacaaacagcaacagtacagagcattttgatgcatgtaagtggacaaaatcagaaccacattcctgggaattgatcttcccaatagaggtatgtggtcctaataatggttttgaaatgtggagttctgagtgggcaaatcaaacttcatggcanttgagtttccttattgacaaatcccaacagtctacagtttttgatattctcttgggaatc

SEQ ID NO: 29685 - DNA, 524 bp, Glycine max
  Clone ID: LIB3138-045-Q1-N1-E10
ccacgtggtacacagcggttcctacaatacaccagatcatactggaccgccactcgaacagccccgaaccggtttacccgcgcctccggttcattcgaagctgcagcgcgtcgctcgcaccggctattctgggtaaacttgaggaggccttcggtgcgccagtgctggaggcttacgcgatgacggaagcgtcgcatttgatggcttcgaaccctttgccgcaagatgggccccacaaggccgggtcggttgggaaacccgtgggtcaagaaatggttatattggacgaaacgggtcgggttcaagatgctgaagttagtggagaggtttgcattaggggtcctaatgttacgaagggatataaaaataacgtggatgccaatacggcggcgtttttgtttggttggtttcacaccggtgatgttgggtacttggattctgatgggtatttgcatctcgtgggtcggatcaaggagctcatcaaccgaggaggagaaaagatatcaccaatagaagtggatgct

SEQ ID NO: 29686 - DNA, 583 bp, Glycine max
  unsure at all n locations
  Clone ID: LIB3138-045-Q1-N1-E11
tgtgaatcagcaccacattcacctgagctttttgtgaggattccaaagcatggcttcccttgcagcatccactgctgctgcttcccttggcatgtcagaaatgcttggaaaccccatcaacctcagtggtgccacaaggccagctccatctgcctctagccctgcctccttcaagactgtggctcttttctccaaaaagaaagctgcacctccaaaaaaagctgcagctgctgctcctgccaatgatgagcttgccaagtggtatggtcctgacagaaggatcttcttgcctgagggtctcttggaccgatctgagatcccagagtacttgaccggagaagtccccggagactatggttatgaccccattggtcttagcaagaaaccagaagattttccaaatatcaggcatctgaatngattcacgccagatgggcaatgcttggggctgctggattcatcattcccgaggccctcaacaaatatggagcaaactgcggtcctgaggctgnttggttcaagactggagctctgcttcttgatgggggtaccctgaactacttcgggaaacccatccccatca

SEQ ID NO: 29687 - DNA, 534 bp, Glycine max
  Clone ID: LIB3138-045-Q1-N1-E12
cggctcgagctcaaaatgtcctccatggcttcctccaccgctttcttcacacccctccatgatttcactcaagccagaacaaccccatcaccccctttgcctttcatcaaatcctcctttgcttcctccaagtcaaccttttttcaccctgccctttccctacaaacctcttccaactttcccaggctttttggaaagcctaagtttttctctgttcatgcaagggctgccacagaaaaaaccatttatgattttactgtcaaggatattgacagaaaggatgtttctcttagcaagtttaaggggaaggttctattgattgtcaatgttgcttcacgatgtggtttgacatcatcaaattactcggagctgtcacgcttgtatgaaaaatataagaatcaaggtttggagattttagctttcccctgcaatcaatttggtatgcaggaacctggatcaaatgaagatattaagcaatttgcttgcactcgatataaagcagaatttccaatttttgataaggttgatgtcaat

SEQ ID NO: 29688 - DNA, 383 bp, Glycine max
  Clone ID: LIB3138-045-Q1-N1-E4
gatatatatatatatattattttcgggtattagttgatgtgcctaagaatgatgaggctgtaccaacaaatttaaacatattatttatttacttgagtgggagaaaagtctccgatttgtgcccgataaataaaacaaaccaaaaaaaatgctctcaaaagcaaaatacaaaaaatgacatagacaaaaaaataatattctggaggtctctggcaaccaaatgtcaggaaacatgaaaaaaattggggcggcgcccccttgggaaccccatgcccccggaattaaaatctggcccggaccttgccggattccaagttttacttttatggagtgtattaaacgtttggcgcaaacatggctaaaattgttactgggggaaaatt

SEQ ID NO: 29689 - DNA, 571 bp, Glycine max
  Clone ID: LIB3138-045-Q1-N1-E6
gtttccgccctacgcatactcgatacttgttcatctctccctttctcaaattctgattcctttttgtaacataaacaccgtactagcccaactaacaaatcaaacaaaaccgttaccatgggaaaacgtaattctcaacgcaaaagtgctgcgatgttcgatagcgatgacgatagtagcgtgacttcgtcgtcaactgctctttctgatttgatgtcggtgtctggggctgaagatgttcaatttgttcaagattcctttctcgaccaagctctcgatgcattagatgagaaaaggggttccacgagggagaaagctttgtcatcgatcattgacgctttcaatagcaacatgcagcatgagtttgtggagaagaaatttgctaccttactacatcaatgtcttgcttcaataaaaaagggatctaaaaaggcatctgctaaggagatagctttggcatctcatgccattggttgtttggccttgactgttggatgcggtgacaatgcccgcgagatatttgaggaatccattcgtcctttggatgaatctctcacatctaggatagatg

SEQ ID NO: 29690 - DNA, 416 bp, Glycine max
  Clone ID: LIB3138-045-Q1-N1-E7
gacaatgccatatcgattgaatgaaagtacaggatacatcgactatgaccagatggagaaatctgctacactcttcaggccaaaattaattgttgctggagctagcgcttatgcacgtctctatgattatgaacgtgtacgcaaggtttgcgataaacagaaagctatactattggcagatatggcacacatcagtggattggttgcagctggtgtcatcccatcacctcttgattatgctgatgtagttactaccacaactcacaagtcactttgaggaccacgtggagctatgatattctacagaaaaggggtgtaagaaattaacaaacaaggaaaagaggtattgtatgactacgaagacaaaatcaaccaagctgttttccctggactgcaaggtggccctcacaaccaca

SEQ ID NO: 29691 - DNA, 551 bp, Glycine max
  Clone ID: LIB3138-045-Q1-N1-E8
atcaaatggaatggaatgacaccatgaatttggtcaaatcagcttgttggttcaagtacttgaaaaacatggaacatagggcacctgaagccaacactgtagatgttgcatacaataattttgaccagcttctggagtttccagcttggttgaatgcgaacgatagctgcttagagcagtgctcggtggattattttcaagagtcttccttgccttgtttggatattggagatattgaaagtatggatgacgattggttagcgtgacaactacaaggatagatagttttcgttaagtcaatcctgtgctgctcccatttttatatttatttcggtaattggggttatcgggcactatcattgtaatcattttagtacccccctccccttttcactgcttttatctatttttgaataataaataagggcttgcaaaatatcagtagaggcaagcaccatcaatgagtgatctacattttttgctcccattgctcctgttatcacaatgcatgttgagatattgaacaatatcaatgtgtaattctctttttt

SEQ ID NO: 29692 - DNA, 505 bp, Glycine max
  Clone ID: LIB3138-045-Q1-N1-E9
attggtttatttcctctcaggaatgtgttcccaggacctattgtgttttaaatccacaaaatccttttgtgttaaataggtggatgggaaaattgactttcccccagggcacttcccgaagtgttaagagaatgcctctttctatagggggaggagctggtgcaaagaatgctattctcatgaatatgccaaatgctgttctttcaatgtggagatattttgttggagatctcgtctttgaagtttctaagatgacttctccctacattaaatgtacagtctctttcttcatagcatttggaaatttggctgatgataccatcaattttgaggcttttccccacaagctggtgcagtttggagagattcaggaaaaagttgtattgaaattttcacaagaggaatttcttacagcttggtcaactcaggtgcgtcctgcaacaactctgttggctgatgggtgtccatatttgtatgcaatggtgcatgatagttcagtgtctac

SEQ ID NO: 29693 - DNA, 510 bp, Glycine max
  Clone ID: LIB3138-045-Q1-N1-F10
ctcacatctctgaatggcgtcactgcatatggatttgatttggtccgtggaaccaacactcttgatttgatcaagggtggatttcccagcggaaaatacctctttgctggagtggttgatggaaggaacatctgggccaatgaccttgctgcttctctcactaccttgcagggtcttgagggcattgtgggcaaagataagcttgttgtgtccacctcctcctcccttcttcacactgctgttgatctagttaacgagaccaagttggatgatgagatcaagtcatggctagcttttgctgcccaaaaaaattgttgaagttaacgcattggctaaagcattgtctggccacaaggatgaggccttcttctctggtaatgctgctgctctggcttcaaggaagtcttctccaagagtgaccaacgaggctgttcagaaggctgctgctgcattgaagggttcagatcatcgccgtgcaacaaatgtcagtgccagactggattctcaaca

SEQ ID NO: 29694 - DNA, 555 bp, Glycine max
  unsure at all n locations
  Clone ID: LIB3138-045-Q1-N1-F11
gcgaaggcgaacatgaaaatcgcgtttctgaaccaggagttcgaggtggcgccgagcaggacggtgagggaggagttcatgaacgcattcaaggaggagatggaggtggcagggaagctggagaaggtgcataaggcgctcgagggtgccgttaatgatttggagctcatggggaggctcttggatgagttcgatttgcttcagaggagggcgcagaatgtgaacttggatgaagttgatgccaagattagtaagttgatgcctgagcttggttttgctcctgaggattctgataggctggtcgcgtctttcagtggaagctggcagatgaggatgtgtctcggcaagattctacttcaggagcctgatttgttgctgttagatgagcctacaaatcaccttgatcttgacaccattgagtggcttgaagactatcttaaccagcangatgttccaatggttatcatantccatgatcgagcttttcttgatcagctgtgtacaaaaatngtggaaactgacatgggtgtgtccaggacgtatgaggggaattac

SEQ ID NO: 29695 - DNA, 395 bp, Glycine max
  Clone ID: LIB3138-045-Q1-N1-F12
gatggactgccaccccaatgcaggatgttcaggttacaattgattggtttatttcctctcaggaatgtgttcccaggacctattgtgttttaaatccacaaaatccttttgtgttaaataggtggatgggaaaattgactttccctcagcgcacttaccgaagtgttaagagaatgcctctttctatagggggaggagcttgtgcaaagaatgctattctcatgaatatgccaaatgctgttctttcaatgtggagatattttggtggagatctcgtctttgaagtttctaagatgacttctccctacattaaatgtacagtctgtttcttcatagcatttggaaatttggctgatgataccatcaattatgaggctcttgcccacaagctggtg

SEQ ID NO: 29696 - DNA, 220 bp, Glycine max
  Clone ID: LIB3138-045-Q1-N1-F7
gtcctacgctgggcatagtgcagagcattctctgctcccagcttcagtcattcgcaacaacacacgcaagctatttccgcgctctagcctgcgttgtacacgttgcatgtaccatctgacgtgctagcttattgatatatacatgtatatgtattacaggcatcccttgatttagctatatactcagagaggatctgcaaattgataagaagatctagaa

SEQ ID NO: 29697 - DNA, 522 bp, Glycine max
  unsure at all n locations
  Clone ID: LIB3138-045-Q1-N1-F8
gagaaagatgggtagtagtgaatatcagactctgcacattttcttctttcccttcttggctcatggccacatgataccaaccgtggacatggccaaattatttgccgaaaagggtgtgaaggccactataatcaccacacccctcaacgaacctttcatctacaacgccattggaaaatccaaaactaatggcaacaaaatccacattcaaaccatagagtttccttctgcagaagctggtttacttgatggctgtgaaaataccgagtcagtccctttcccaaaattggtgaaatccgtttttatggccacccaattccttcaagagccacttgagcagctactgcaaagcaacttncagattgccattgtgctgatatgttcttnccatgggcaactgattccgncgncaaaattggaattcctaggctcgtcttccatgggactaagttcttctccctgtgtggtaccacgtgtatgcccatctatgagcctcatgacaaatatgcttcttctgattct

SEQ ID NO: 29698 - DNA, 348 bp, Glycine max
  Clone ID: LIB3138-045-Q1-N1-F9
gaagatttggacatcaaagggagaagaaaaagaagctgccaagaaggagttcatagaggcccttaaattgttggaggaacagctgggagataagacttattttggaggagacaatattggttttgtggatatagcacttgttccattctacacttggttcaaagtctatgagacttttggcagcctcaacattgagaatgagtgccccaggtttgttgcttgggccaagaggtgcctacagaaagagagtgttgcaaagtctcttcctgatcagcacaaggtctatgagttcgttgtggagataagaaagaagttagtcatcgagtaggtttcatgttggatcttaat

SEQ ID NO: 29699 - DNA, 544 bp, Glycine max
  Clone ID: LIB3138-045-Q1-N1-G10
cgaaaacaaaagagttaagtgaattaaaaacccaagggaggttcatggccaaaggtaaagatatccgactgattgttattttggaatgtaccggatgtgataaaaagagtgttaataaggaatcaacgggtatttctagatatataactaaaaagaatcgacagaatacgcctagtcgattggaattgagaaaattttgtccccgttgttgcaaacatacaattcacgcagaaataaagaaatagatcaaattgatcgcttgtgtgttacccttcgaaccaaagaacttaacatgtaaaatgatctatttttcttatctatatagatagatctatctgtattctatcatttacagttgaatatatacaaatatcagtatgtaacaacatatattaaaaaaataacaacatatcttaaaaaagtcagaataaaaaaacaaatcctttatagtatttactagaataaatgtgattattggaatagggataatataaccatggtaaaatctaagcgactctttatgaaatccaagcgatcttttcgt

SEQ ID NO: 29700 - DNA, 404 bp, Glycine max
  Clone ID: LIB3138-045-Q1-N1-G11
tagctatgaaaaattactgcgccaggctaaagctccaagtatgtttttacaatccttcaaaaattttgtttctttgtgtgtgtatggtgatgataacttaattagtgttcatgaatatgtcaagccttactttagtggttctaaattgaaaagctttctagctagtcataacatcaccattactgatggtattgacaaaactagtgcaactttgcaatttagaaagttagcagattgtgattttctcaagagaaactttaagcagatgtctaatgttttgtgggtggctcctgaagacaaggcgagtttatggtcacaacttcattatgtttcgtgtaataatctggaaatgcaagaagcttatcttgtcaatctcgtaaatgtgttacgagaattgtatttgc

SEQ ID NO: 29701 - DNA, 498 bp, Glycine max
  Clone ID: LIB3138-045-Q1-N1-G12
ctactccttaatttctctcttcacttatcatcatacttatatgttatataacccaataattaaattaaatacatgttagcactttaacattcctttctctaacctcgttcccactctcatattttcccttctgctgatattcagctaaactaagtcaataagatgactcaaggaaagatagttgaagctgcagaagctcataaaacacttgaggatttcgatcctccaaagaagcgcaaaaggaacaagtatgcttttgcttgtgctgtgctggcctccatgacttccatcttgcttggctacgatattggtgtgatgagtggagcagccttgtacataaaaagggacctgaaagtgtcggatgtgcaaatcgagatcctgctcggaatcatcaacctctactctctgataggctcatgcctcgccggcagaacctccgactggataggtcggcgttacacgattgttttcgcccgcgccatcttctttgtcggagca

SEQ ID NO: 29702 - DNA, 604 bp, Glycine max
  unsure at all n locations
  Clone ID: LIB3138-045-Q1-N1-G6
ctgagataacaatactgtagatatagagagatagttccaagctccaattcccagaaaaaaattaaaactttgcttcttcactttttctcttaccccttctgatctcatgcaatttcccctcatggatccctttgatttgattcgcaaagggtttggctgaagctatctggaatatttctgttacagtttttaaggtctatctatgttttagtcatttttgtccatattcttgtcaataatgagcttatccaagaaaggttcccaaacagacgcaaaattgagctccttaaacaaagcaacctatttgaatccaaatgcagcagagtttgttccatttgccctcagatcatcgccatctggaagcaccagcttggtagatgcaacagcgaggtttgctgctgacggatctcttgggaaaagcagtttagatcgagcagaatcatccatttcaaataattccgatgatgaggctcaccagtactggcgttgtcagcttcctgatgatatcacccctgacttcaaggtcantggagaggatgaaatccaagtcttaacaactctctttagcagcttatctattaatgatgataatgaatccctcatg

SEQ ID NO: 29703 - DNA, 429 bp, Glycine max
  Clone ID: LIB3138-045-Q1-N1-G7
cacacatctactacatgtacttccttacagtcaaaaccaacatcaactatggcaagttatcaaaagcactacgatgatcacggtcgcaaggacgacgagtgtggcaacgctgagaagcaaaccggctaatacggcaaccctgttcatgctgctagtgtcacctatgtatccaccataactgctgctggtggttacagcgatgacattaataagcaacatgataccaccaatgcctactgcgtagacactggtagacagcattctaatggtggctacgatggtgacactaataaacatcatggtactactggtggctatcatgatgacaccaatcgacatcattgaactaccggtgtttatggtatagacactcgatggcaacaacatgggactactggtgggtatgccggtgacactgggcagcaacat

SEQ ID NO: 29704 - DNA, 302 bp, Glycine max
  Clone ID: LIB3138-045-Q1-N1-G8
tggtaatactcttatgccagctttttctgttccacaggctactgccagatcttctgaaaatgcggaatcctctgcatgatctggaatttgtgttttctttcgcttgttcgtttgtttaattcaataaaggaaattaggcatgaccctcttgttgagtatgctctgcctatttgaaaatttccacacctcttttaattgtcgtaatgatgtgtgaagtgtgtgttattttaaaaaaaaaaaaaaataaaaaaaaaaaaaattctaaaaaaaaatacaattgtaacacttatacacatcatcct

SEQ ID NO: 29705 - DNA, 442 bp, Glycine max
  Clone ID: LIB3138-045-Q1-N1-G9
gattgaagagttccattcgatgcagaggatgatgaatgctcctgattcaaatgataatattgatttactgttgagcattgatttgttgggtttacaaggagcaggtaaagcttttccaaacaaaattgtttttgatgataagcttgtgttggctaacacacaagaattctttgatggaaattttccagtggattcttggttaccaatttttgtgaattgtctttatcctgtaagtcaattaccttcagaagctgtcgttgtaaatgttacatgtggtagtggacgtggtggtttacccaccactgcttggattagttctgcagttaacaatcgctcctcagatatcaacaaaaagattcgcacagcacttgggaaaggtaagaaaattgtttttcttactagaggtgatccttttccagtagctttactggctgttcttttt

SEQ ID NO: 29706 - DNA, 177 bp, Glycine max
  Clone ID: LIB3138-045-Q1-N1-H10
agaaaaaagtgtttctttttcactcctctctgtaaaatccgggggccaaaacctaacaaaggggctgcctctgactgagtcgctattaacaccatcaatacattcctgaccagtacctggcgtcgctccatcttaacctattgtgcttggttttataaccttgtataatgaccacca

SEQ ID NO: 29707 - DNA, 400 bp, Glycine max
  Clone ID: LIB3138-045-Q1-N1-H11
gttgccattctcatcctcctctgtctctctctctccaccattgccatggatccttacaagctccggccatccagcgccttcaattctcccttctggactacaaattctggtgctcctgtttggaacaacaactcctctttaaccgttggagctagaggtccaattctgcttgaggattatcatcttgtggagaagcttgcaaactttgacagggaacgtatcccagaacgtgttgtccatgccaggggagctagtgcaaagggtttctttgaggtcacacatgacatttctcacctgacatgtgcagatttccttcgagcccctggagttcagacgcctgtaaattgttcgttctcaactgtcattcatgagcgtggtagccctgaaaccttgagggacc

SEQ ID NO: 29708 - DNA, 447 bp, Glycine max
  Clone ID: LIB3138-045-Q1-N1-H3
ggggtctggaacaacttctgtggctgatgggggtccatatttgtgtgcaatggtgcatgatagttcagtgtctacaataccaggtgattttgtcattggtgtcaagttgacaaccataaacaatatgtgtgcatatgggctcaatcctggtatttcaggttctcgtcttttgggcaccattcctcagtgcatttcacagcaaactgtttggaatcaaatggcaacagtgagaacaccattgaattttgattctagcaagcagagcttttgtcagttttctattgaccttctcggtggaagaatcttagtggacaaaactggagattggatcacacttatacaaaattctccaattagtaacttattgagagttgctgcttggaagaaaggcttgttaatggtcaagattgtgatgtctgggaatgcagcagtcaaaaggagtgattg

SEQ ID NO: 29709 - DNA, 449 bp, Glycine max
  Clone ID: LIB3138-045-Q1-N1-H7
cttgacatcaagttacactccaactccattgttggaatctggtttgcaaaaagacagagggttaattgtggagtattttggaaggatgtcttacgttgctcataacgttaatcagccccaagagaaagatttgttggagggaaatttttcctttgatattaaatctcgctctagattggaaaaagtttcctctacaaaagcacaatttgttagtggaaaaaccttcaaatatgatataattggtgctggttcacattcttcacaagattttcctgaaaaggaagatcaagaaaaacccaaaaagattgatgccagattgagacaaagaatagatcctcaatacaatgacgttcaagctcagatggaaacaaatttgtttaaattgcctcttgatgatgttgaaactcctaaaggttccatgttggatctgaaaatttcttaatctaaaa

SEQ ID NO: 29710 - DNA, 176 bp, Glycine max
  Clone ID: LIB3138-045-Q1-N1-H8
ctcgacttcaagttgaacttcaactcctgtgcaagcatctggtgtggaacctgacagagggccgattgtgaagtgttatgcaaggatatctcacaatgctcacctacctcatcatcctcaaccgaaacaattgttgatgggcagggcccattcctaaattaaagggccttctagat

SEQ ID NO: 29711 - DNA, 383 bp, Glycine max
  Clone ID: LIB3138-045-Q1-N1-H9
cgttaggagtgattctttttcactcctctctgcacgatccggtggccaaacccttgcagacctctatctctgagggagtctagatgaataacatcaacacgcacctgttgatccaccaacatagattattgcgatccagttctactagctatcggaaacatttatgaggaccacctttgagtgtcatggccttgccaaaactcctgctcctggtgttggtggcaatgcttttggttatcaatactaccatatgttgcatgaaagacctgagcttgtgcatacgttgtaccaagatatcagcaaacttgggcgtgctgagcagaatggcataatgggttttacaaccacaacgcttggtattaacaagaaaatactatcattgg

SEQ ID NO: 29712 - DNA, 355 bp, Glycine max
  unsure at all n locations
  Clone ID: LIB3138-019-Q1-N1-A1
ctaatgttttgtgggtggctcctgaggacaaggcgagtttatggtcacaacttcattatgtttcgtgtaataatctggaaatgcaagaagcttatcttgtcaatctcgtaaatgtgttacgagaattgtatttgcacagtccagaggaagctcgtcaattgagaaggaaagctctctctcgtattgaatggctgcaaaaagctgatgtgcctaccatagcacagattgaagagttccattcgatgcagaggatgatgaatgctcctgattcaaatgataatattgatttactgttgagcattgatttgtngggtttacaaggagcaggtaaaagcttttccaaacaaaattgttt

SEQ ID NO: 29713 - DNA, 392 bp, Glycine max
  Clone ID: LIB3138-019-Q1-N1-A11
ggaaagctctctctcgtattgaatggctgcaaaaagctgatgtgcctaccatagcacagattgaagagttccattcgatgcagaggatgatgaatgctcctgattcaaatgataatattgatttactgttgagcattgatttgttgggtttacaaggagcaggtaaagcttttccaaacaaaattgtttttgatgataagcttgtgttggctaacacacaagaattctttgatggaaattttccagtggattcttggttaccaatttttgtgaattgtctttatcctgtaagtcaattaccttcagaagctgtcgttgtaaatgttacatgtggtagtggacgtggtgggttacccaccactgcttggattagttctgcagttaacaatcgc

SEQ ID NO: 29714 - DNA, 420 bp, Glycine max
  unsure at all n locations
  Clone ID: LIB3138-019-Q1-N1-A12
tcttcttcgtctggagctgcgatcctctgcttcgatggccaccgtgcaactccaatccctaacccttgttcgctcctccgcactcccttccgccaccttctcccctccgatcgccctctccggccgccggaactccgccgcgctgccgcgctacgcctgcctccgactccgacccgccgccgagacctgttttccgactcgcgccgccttgagaaccgctcctcgcggcggaggcgtcaagtgcgaggcaggagacaccgccgttgaagtggctcctattactgatgcaaattggcaatcacttgtgcttgaatctgagtctccagtattggttgaattctgggctccatggtgtggtccctgccgtatgatacatccgataatngatgagcttgcaaaggaatatgttggtaggcttaa

SEQ ID NO: 29715 - DNA, 373 bp, Glycine max
  Clone ID: LIB3138-019-Q1-N1-A3
cttcgtcatcctcgacatgttcaactatcgcagaatcaccgtggacgtaaaaaacgaggttgcagtggtcgaagctggagcaacacttggagaagtttattacagaatctgggagaagagtaaagttcttggctttccagcaggggtgtgtcccactgttggcgtcggtggccatttcagcggcggagggtacggcaacatgttgagaaaatatggcttatccgttgataacgtcatcgacgcgcaaattgttgatgtgaaaggaaatcttctaaacagaaaaacaatgggggaagatctgttctgggctattaaaggaagtggtggagcgagttttggtgtcattttgtcgtttactattaaactcgttccg

SEQ ID NO: 29716 - DNA, 415 bp, Glycine max
  Clone ID: LIB3138-019-Q1-N1-A4
caactctgttggctgatgggtgtccatatttgtatgcaatggtgcatgatagttcagtgtctacaataccaggtgattttgtcattggtgtcaagttgacaaccataaacaatatgtgtgcatatgggctcaatcctggtatttcaggttctcgtcttttgggcaccattcctcagtccatttcacagcaaactgtttggaatcaaatggcaacagtgagaacaccattgaattttgattctagcaagcagagcttttgtcagttttctattgaccttctcggtggaggaatcttagtggacaaaactggagattggatcacacttatacaaaattctccaattagtaacttgttgagagttgctgcttggaagaaaggcttgttaatggtcaagattgtgatgtctgggaatgc

SEQ ID NO: 29717 - DNA, 385 bp, Glycine max
  Clone ID: LIB3138-019-Q1-N1-A6
aattgatgcgtgaaaggacccacttgctgttggcttgttgttcaaggatggcaatttgtaagaaagatgtttggagagttgaatgtggaatcccttctggatttccgctcacagttatttgcaatagcatttttaatgagatgctcattagatatagctatgaaaaattactgcgccaggctaaagctccaagtatgtttttacaatccttcaaaaattttgtttctttgtgtgtgtatggtgatgataacttaattagtgttcatgaatatgtcaagccttactttagtggttctaaattgaaaagctttctagctagtcataacatcaccattactgatggtattgacaaaactagtgcaactttgcaatttagaaagttagc

SEQ ID NO: 29718 - DNA, 408 bp, Glycine max
  Clone ID: LIB3138-019-Q1-N1-A7
tgggacctctctataatggggggcattgcgaacgttggagtggaacacaaatatgatagaagataagcagatgtgaactcacttatgctgttgttgggattgttgtgctacttgcttccaatgctgttcaaatacagtggtgcctcagctgctctcactgtagacccttcactacacttgtcaagagcttctagcattgtgatgttgattgcatatgttgtctacattgtctttcaactgtggacacacagggagttatttgaagaagaagatgacggtaaagatggcgaggatggttcagaagaacaagctgtgattggattatggagtggcattgcttggttggttggaatgactgtattcattgctgtgttgtctgaatatgtggtggatacaattgaggatgca

SEQ ID NO: 29719 - DNA, 324 bp, Glycine max
  Clone ID: LIB3138-019-Q1-N1-A8
ataacaatggcagcctcactacaagctgcagctaccttcatgcaacccaccaaggtgggcatggccactcgcaacctcaaatctacacaatgcatttctaaggcttttggcttggaacccgctgcagctaaactcatttgctcccttaagcccgatctcaaagattttgctcaaaaatgtgtcgacgccaccaaaattgcaggattcgcccttgccacctcagctctcgttgtttctggagcgagtgcagaaagtgttccaaagaagctaaccttcgacgaaatccagagcaagacatacttggaagtgaaaggaactggaact

SEQ ID NO: 29720 - DNA, 395 bp, Glycine max
  Clone ID: LIB3138-019-Q1-N1-A9
ttgaagttaaaagccttagccttccctacaactccaaacacaaagacatcatcatccatggctgcctccgtctccactgtcggagctgtcaacagagctcttttgaacctgaatggttctggagctggagcttcagctcccagttcagccttctttgggaccagcttgaagaaggttattgcctcaagggtccccaacagcaaggtttccggtggaagcttcaagattggtgctgtagaagagaagaaagagattgaagagacccaacagaccgacaaggacagatggaagggtcttgcctatgatatctcaaacgaccaacaagacatcacaagaagaaagggtttggttgactcccttttccaagcttcacaggatgctggaactcactatgc

SEQ ID NO: 29721 - DNA, 399 bp, Glycine max
  Clone ID: LIB3138-019-Q1-N1-B1
gtgtatggtgatgataacttaattagtgttcatgaatatgtcaagccttactttagtggttctaaattgaaaagctttctagctagtcataacatcaccattactgatggtattgacaaaactagtgcaactttgcaatttagaaagttagcagattgtgattttctcaagagaaactttaagcagatgtctaatgttttgtgggtggctcctgaggacaaggcgagtttatggtcacaacttcattatgtttcgtgtaataatctggaaatgcaagaagcttatcttgtcaacctcgtaaatgtgttacgagaattgtatttgcacagtccagaggaagctcgccaattgagaaggaaagctctctctcgtattgaatggctgcaaaaagctgatgtg

SEQ ID NO: 29722 - DNA, 403 bp, Glycine max
  Clone ID: LIB3138-019-Q1-N1-B10
tatgttgttgcatgtgcaatggaaggacaccttctacaagaattagtacaatggaaagatattggtgttgccaatctcccaggagttattagccttctagctggtttgttaatgtgggtgacctctcttcccggagtgcgaacgtggaactttgagttgtttttctacacccaccaattatatgtagtctttattgtctttttggccctgcatgttggtgactttgttttcactatggctgctgggggaatatttctctttgtgcttgatcgatttctgaggttctgccaatcacgaaggacagttaatgtgatctcatctagatgccttccatgtggcactgtggaattggttctgtctaaacctcaaagtttgagatacaatgcactaagtttcattttcg

SEQ ID NO: 29723 - DNA, 403 bp, Glycine max
  Clone ID: LIB3138-019-Q1-N1-B11
ctcggtggaggaatcttagtggacaaaactggagattggatcacacttatacaaaattctccaattagtaacttgttgagagttgctgcttggaagaaaggctgtttaatggtcaagattgtgatgtctgggaatgcagcagtcaaaaggagtgattgggcctcattggtacaagtgtttttaacaaacagcaacagtacagagcattttgatgcatgtaagtggacaaaatcagaaccacattcctgggaattgatcttcccaatagaggtatgtggtcctaataatggttttgaaatgtggagttctgagtgggcaaatcaaacttcatggcatttgagtttccttattgacaatcccaaacagtctacagtttttgatattctcttgggaatctctcaag

SEQ ID NO: 29724 - DNA, 414 bp, Glycine max
  Clone ID: LIB3138-019-Q1-N1-B12
ggccttggaaagaaagaagaagttagcagagaaagctgcagccaaagcagccatcagagcacaaaaggaagctgagaagaagcttaaggaccgtgagaagaaagcaaagaagaaatcaggcactgcagccgtggccaaccctgaggacgaaccgaaggatgaagttgtcgaggttacagagccagaaaagattaacgatgatgtccaagccccggctccagtgaaggaaaaggtccaaaaggagagtggcatcaggtccaggggccgagcaagaggcccggactcgattccaaaagctattattaagcggaagaagtctaacaattacctgatatgggctgcagctgccaccttgctagtcctcctgttggctgtgcttgggtacatctatcttttttgaaaaagttagatgtg

SEQ ID NO: 29725 - DNA, 399 bp, Glycine max
  Clone ID: LIB3138-019-Q1-N1-B3
cgccaacgaacacgatgcggtcactcctcaccattttcagcgcattgctggcatacaccactgccgtgtatgctactgccctcacctacagactagaggcacacgagcaagcatgcttctacgcgcacgttgagaacaaggggaccaagttggctttctactttgcagtccaatccggaggctcattcgatgtcgactatttggttgtcggcccaacagacaagaccatcctggatggaaccaaggagcgacagggcgactttgtattcacggcaaacgatgtgggagaataccgtttctgcttcaacaacgagatgagcacttttgcggagaagatggtcgatttcgaaatcgccgttgagaacgaaagccgccgtgccaagatcccgtccaagcagg

SEQ ID NO: 29726 - DNA, 420 bp, Glycine max
  unsure at all n locations
  Clone ID: LIB3138-019-Q1-N1-B4
cggctcgagtaccaattgaagatggaattggcaaagaagttgccactcggatttcaactactatggaaaccaacaacatgttttacacggattctaatggacgtgattttatcaaaaggatacgagactacagaacagactgggacctagaagtgaaccaacctgctgctggaaattattaccctattaatcttgggatatacacagaggataataaaacagaattctcagttttggtggatagagctattggaggatccagcttacaagatggacaaatagagctgatggttcacaggagattactacttgatgattcaagaggtgttgatgaagctctaaatgaaacagattgtgtcggtgatgattgcaggggtctaactgtccaaggtaaattntactacagaatagaccccttgg

SEQ ID NO: 29727 - DNA, 396 bp, Glycine max
  Clone ID: LIB3138-019-Q1-N1-B5
aaaagaatggctctactcaaacaatggccttacgaagtgttttcttctaccttctatctatctctttctttcttcatcagtgtcctgttactgtttaagctcgcaagaagaaccaaaccagaaaccaatttgaaactgcctccatctccccccaaaattccaatcatcggcaatattcatcagtttggaacactaccacatcgatctcttcgagatctctctctcaaatatggtgaaatgatgatgctgcagttggggcagatgcaaactccaaccctagtggtgtcatctgtagatgttgccatggaaataatcaaaacttacgacctagctttttctgaccgaccacacaacactgctgcaaaaatcttactctatggatgcgcggacgttggc

SEQ ID NO: 29728 - DNA, 421 bp, Glycine max
  Clone ID: LIB3138-019-Q1-N1-B6
gagggggagaggcaagacaacacaggtggatgccaagtctaaggataaagtcattcttaaaaaggttaaggttggaatccaaggggctgaggagtttggtgattatgaggagtggttcaattacaggctatctagggcagcacccgaaacatgtgctgacttccttggaacttttgtagctgatcaaactaattcacagtttacaaaaggtggaaaatggcttgtttggaagtttgagggagatcgtactcttgctgattacatgaaagatcgcaactttccttcaaacttggaatctgtgatgtttggacgtgtcttgcaaggagtagactcttcgaaacgaaatgcattgatcatcaaacaaataatgcgccagatcattacatctcttaggaaaattcacgatacaggcattgttcat

SEQ ID NO: 29729 - DNA, 229 bp, Glycine max
  Clone ID: LIB3138-019-Q1-N1-B7
tcgaggtcgagttcaagcagaactaccaccagtgcccggactgcgcgaagagttatacacacaacacatggagggcctgcgtgcaggtgcgccagaaggtcccgcataagaagactttcctgtacctcgagcagctgatcctgaagcacggcgcccacaaggacaccatcaacatcaaggaagtccacgacggtatcgacttcttctttgccgagcgcaaccacgccac

SEQ ID NO: 29730 - DNA, 265 bp, Glycine max
  Clone ID: LIB3138-019-Q1-N1-B8
caaaaactcccgttttctctctctgtttttccatggccatctgatcaaacttttcttgattctctctctcagtttttgctattctgagtgatgggtatgccctgccgctgttcccacacctcccacatcactgaaatcatcatcaccagcttcttccgccacaagtcttaaattacaacaatttccctcaattattcatcaaccaaccaccttaatagccttttccaatggttccttaaagatccaacttggtcggaagtaacat

SEQ ID NO: 29731 - DNA, 316 bp, Glycine max
  Clone ID: LIB3138-019-Q1-N1-B9
gcaaggctaacttgtcccttggtagatcataaaatcttcccttagtttgcaagatatgtacaatgtacagatagtgatcacatctgtttttggtactctactacaagatatgtacgtacaatcattacatgaggagttactatttaagagttgaaaaaagtaagggaagaagtgacagaagactccaatgatcttaaaaggctgtatgcttgggcacaggagagaattggcgagaaaagcttaggagatttggcaattgagaaacttcagcttgaggcagctcagcttgaagttgaagctgccaccaatgcactac

SEQ ID NO: 29732 - DNA, 405 bp, Glycine max
  Clone ID: LIB3138-019-Q1-N1-C1
tgatggatgagagacataattgggctatgtggtcagggagacctgggatcaaaggttgttcttcttgttgatgaatatgttgttcttgtttttggcgtttggttgtggaagaagaagaagaagaagacgactcaggcatggctatggccatgggatgggacatcttggccacttgaatgagttgcaactgttgggatgtctagctggtgtagagatgatactcaaagatgtgggttatcctgtaaagcttggaagtggagttgctgctgccagtgcatacttacagaacactattcctatgatcccttccaggatttgagtcacaaatcattcttgtctttacttcctttttctgctctttcagaaattctgtaaaatatatattaccctctgttacactccttt

SEQ ID NO: 29733 - DNA, 422 bp, Glycine max
  Clone ID: LIB3138-019-Q1-N1-C10
ggtttttagggtttacaccgagcagccacacctcccgcagcagccatggttctcaaaactgaactatgccgattcagtggtgccaagatctacccaggaaagggcatcagatttgttcgtggtgattctcaggttttcctgtttgcaaactcaaaatgtaagaggtatttccacaatcgcctgaagccttcaaagctcacctggactgcaatgtacagaaagcaacacaaaaaggacattgctcaagaagctgtgaggaagaggagacgtgctgccaaaaagccttactctaggtccattgttggtgcgaccttggaagtaatccagaaaaagagagctgagaagccagaagttcgagatgcagctagggaagctgctcttcgtgaaattaaggagaggatcaagaaaacaaaggatgagaa

SEQ ID NO: 29734 - DNA, 414 bp, Glycine max
  Clone ID: LIB3138-019-Q1-N1-C11
gaagaagatggctttaggtgttcctgctcttccgttgacatacgtggctcacgttctggcagttgttgccagcgtcttggtcgtggtctgggtcgtcaatttcaggggtggcttggcttgggattctgataacaagtccctcatcttcaacattcatccagttcttattgttattggcttactagttcatgggggtgaagctattataagttacaaagcttttcccctaaagaaggaagtgaagaaattgatacaccttgttttccatgccatcgcattaatacttggaatagttggaatttatactgccttcaagtttcacaatgaaagtgggattgccaatctctacagcttgcattcatggcttggaattggggttattgtcctttatggcattcagtggatatatggggt

SEQ ID NO: 29735 - DNA, 414 bp, Glycine max
  Clone ID: LIB3138-019-Q1-N1-C12
cattgctccagcttttatggacaagcttgttgttcacatctccaagaacttcatgaccctgcccaacatcaaggttcctctcattcttggtatctggggaggcaagggacaaggaaaatctttccaatgtgagcttgtctttgccaagatgggaatcaaccccatcatgatgagtgctggagagttggaaagtggaaatgcaggagagccagcaaaactgatcaggcagagataccgtgaagctgcagacatgatcaagaagcgaaagatgtgcgctctcttcatcaacgatcttgatgcaggagctggtcgtcttggtggaaccacacaatacactgtgaacaaccagatggtgaatgccactctcatgaacattgctgataaccccaccaatgtgcagcttccaggtatgta

SEQ ID NO: 29736 - DNA, 350 bp, Glycine max
  Clone ID: LIB3138-019-Q1-N1-C2
gtgattcctggtgctacttctattggaatgagagtgcaagcttacttgtatgatggctactgggaagacattggtacaatcgaggctttctataatgcaaatctgggaatcaccaaaaagcctgtgcctgacttcagtttctatgatcgttcatctccaatctacacccaaccacgatatttgcctccctctaagatgcttgatgctgatgtcactgatagtgttattggtgaaggatgtgtgattaagaactgcaaaattcaccattctgtggttgggctgcgatcttgcatatcagaaggtgcaattattgaagacacgttattaatgggggcagattattacgagac

SEQ ID NO: 29737 - DNA, 412 bp, Glycine max
  Clone ID: LIB3138-019-Q1-N1-C3
caccattactgatggtattgacaaaactagtgcaactttgcaatttagaaagttagcagattgtgattttctcaagagaaactttaagcagatgtctaatgttttgtgggtggctcctgaggacaaggcgagtttatggtcacaacttcattatgtttcgtgtaataatctggaaatgcaagaagcttatcttgtcaatctcgtaaatgtgttacgagaattgtatttgcacagtccagaggaagctcgccaattgagaaggaaagctctctctcgtattgaatggctgcaaaaagctgatgtgcctaccatagcacagattgaagagttccattcgatgcagaggatgatgaatgctcctgattcaaatgataatattgatttactgttgagcattgatttgttgggttac

SEQ ID NO: 29738 - DNA, 420 bp, Glycine max
  Clone ID: LIB3138-019-Q1-N1-C4
acaaaactggagattggatcacacttatacaaaattctccaattagtaacttattgagagttgctgcttggaagaaaggctgtttaatggtcaagattgtgatgtctgggaatgcagcagtcaaaaggagtgattgggcctcattggtacaagtgtttttaacaaacagcaacagtacagagcattttgatgcatgtaagtggacaaaatcagaaccacattcctgggaattgatcttcccaatagaggtatgtggtcctaataatggttttgaaatgtggagttctgagtgggcaaatcaaacttcatggcatttgagtttccttattgacaatcccaaacagtctacagtttttgatattctcttgggaatctctcaagattttgaaattgctggtaatactcttatgccagcttttt

SEQ ID NO: 29739 - DNA, 320 bp, Glycine max
  Clone ID: LIB3138-019-Q1-N1-C7
gtgatgataacttaattagtgttcatgaatatgtcaagccttactttagtggttctaaattgaaaagctttctagctagtcataacatcaccattactgatggtattgacaaaactagtgcaactttgcaatttagaaagttagcagattgtgattttctcaagagaaactttaagcagatgtctaatgttttgtgggtggctcctgaggacaaggcgagtttatggtcacaacttcattatgtttcgtgtaataatctggaaatgcaagaagcttatcttgtcaatctcgtaaatgtgttacgagaattgtatttgcac

SEQ ID NO: 29740 - DNA, 332 bp, Glycine max
  Clone ID: LIB3138-019-Q1-N1-C8
gttcttttcctccactatgttttttttttttgcaattatctttcttatttaaaagatgaagcaagcaaacagaatcccctcttttgatcttggtttcaatattcatcatcaaatcactggtcctccttttatagaaatcttagatctgcttttaacacaaggttttggtggagaagaagaagcaaagacgacggtgtataaatacaagagtagaagaagaagaagaagcaattagagggagagttagtgagcaaggtggatcgaaggcaagggaagaagtctctccctcctcatgaggagaaaaaagaagctttcaactttcctattattca

SEQ ID NO: 29741 - DNA, 398 bp, Glycine max
  Clone ID: LIB3138-019-Q1-N1-C9
aaagatattactactgccacagttgcccaaaggataatggctaatcatgaagcttatgtggtaatttctttaacgcaacttttttttttcttccgtttttgctttctcaatatttgagcaacctgcaaattttgttgatatggttaatcggttattctaatatctaaggccaatatcaaatttgtctaaggtgctgttaattttataatccttcacaatttacatagtttccctatcaagtcaaagatttattaaacatctatatctgaaagtgtactccacttgctggaatctgatgtgatcaaccaaagagttattccatactgctgaagcatttgaaaaggttatatgtatgctttacattcacccttttggaaatctttttcttttatcttttc

SEQ ID NO: 29742 - DNA, 395 bp, Glycine max
  unsure at all n locations
  Clone ID: LIB3138-019-Q1-N1-D1
attaatttgagtattttaaaaggaaagagagaagagattgttgaagttgaaggtgggatgctttcggctaagcttgctaaaactggcctcgtctatgctgtattgggcagttaggggaatacaaagatctttgaacacctccttctttattacctttttccaacacctactacctcttctctctctctctcactcgtcctaggtttgattttcccttccttccttctcccaatactcctccattattttattctcaaagtctcaacgcacactccagcttcattactacttgcctttntctttttcctttttctctgcccagctatatgcttgtgtaagaaggggaactactaagccattctaaagggagcttgagaaatgtgaatctgaatgac

SEQ ID NO: 29743 - DNA, 384 bp, Glycine max
  Clone ID: LIB3138-019-Q1-N1-D10
tcagtgtctacaataccaggtgattttgtcattggtgtcaagttgacaaccataaacaatatgtgtgcatatgggctcaatcctggtatttcaggttctcgtcttttgggcaccattcctcagtccatttcacagcaaactgtttggaatcaaatggcaacagtgagaacaccattgaattttgattctagcaagcagagcttttgtcagttttctattgaccttctcggtggaggaatcttagtggacaaaactggagattggatcacacttatacaaaattctccaattagtaacttgttgagagttgctgcttggaagaaaggctgtttaatggtcaagattgtgatgtctgggaatgcagcagtcaaaaggagtgattgg

SEQ ID NO: 29744 - DNA, 419 bp, Glycine max
  Clone ID: LIB3138-019-Q1-N1-D2
caaccagataaaccccaattcaaaacttgatggcggaagcagcctcaggcgcagatcatggcctctcgacgtttcgtcacagcgagtacacacgagacggtattgaatcgtcgctactcactgattccaatggacagcgtgagagttttgtacacggtaagggacttggcggtcagcgtctgacggagatgaagcttcttgcagtggaaccagaccttggagcggctccagagcgtgcacaggactacaaaggccggattcggacgtggccgggcgttctcttgctatttctcattgtagcaggagctgccgctctcattgtattcaatgccatgaattttaatgaccgagcagctattaatgctgaacgatatgagaatgcagcacaattgaaacgaaagattcaagatggattaaat

SEQ ID NO: 29745 - DNA, 403 bp, Glycine max
  Clone ID: LIB3138-019-Q1-N1-D4
cagcttttgaagacatgccttggtgttttgctctgttgaaagtagaacgcatggttttgagttttggtagctgagtagcgaatagttgtgggcaaatgctgctgtgactgtggttacaatgattttgtgagactttaagaagctcaattcactgcaattttaaaccatggaacttatacgtgtgcgcagttacaaaggaagggaaacataaagagaattgaagttatttgaatttttaagtgaaatagagagaatgggaaagcagaatagattaaatgaaagaaaatggaaaaaaaatgatacgacaatgggttagggaagaagacttggcaaaggacctcaaattacacacaaaacaacttcgtcgaactctgcggttttttgaagaagaaaagatcattac

SEQ ID NO: 29746 - DNA, 425 bp, Glycine max
  Clone ID: LIB3138-019-Q1-N1-D6
ttgaagttgaagtcttgcccttctctcttcaactccaaacacaagacatcatcatccatggctgcctccgtctccactgtcggagctgtcaacagagctcttttgaacctgaatgggtctggacctggggtttcagctcccagttcatccttctttgggagcagcttgaagaaggttattggctcaagggtccccaacacaaagatttcctctggaagcttcaagattgttgctgtagaagagaagaaagagattgaagagacccagcagaccgacaaggacagatggaagggtcttgcctatgatatctcagacgaccaacaggacatcacaagaggaaagggtttggttgactcccttttccaagctccacaggatgctggaactcactatgctgtcatgagctcctacgagtaccttagcac

SEQ ID NO: 29747 - DNA, 386 bp, Glycine max
  Clone ID: LIB3138-019-Q1-N1-D7
gcctaccatagcacagattgaagagttccattcgatgcagaggatgatgaatgctcctgattcaaatgataatattgatttactgttgagcattgatttgttgggtttacaaggagcaggtaaagcttttccaaacaaaattgtttttgatgataagcttgtgttggctaacacacaagaattctttgatggaaattttccagtggattcttggttaccaatttttgtgaattgtctttatcctgtaagtcaattaccttcagaagctgtcgttgtaaatgttacatgtggtagtggacgtggtggtttacccaccactgcttggattagttctgcagttaacaatcgctcctcagatatcaacaaaaggattcgcacagcacttg

SEQ ID NO: 29748 - DNA, 417 bp, Glycine max
  Clone ID: LIB3138-019-Q1-N1-D8
cagaaccacattcctgggaattgatcttcccaatagaggtatgtggtcctaataatggttttgaaatgtggagttctgagtgggcaaatcaaacttcatggcatttgagtttccttattgacaatcccaaacagtctacagtttttgatattctcttgggaatctctcaagattttgaaattgctggtaatactcttatgccagctttttctgttccacaggctactgccagatcttctgaaaatgcggaatcctctgcatgatctggaatttgtgttttctttcgcttgttcgtttgtttaattcaataaaggaaattaggcatgaccctcttgttgagtatgctctgcctatttgaaaatttccacacctcttttaattgtcgtaatgatgtgtgaagtgtgtgttatttaaaaa

SEQ ID NO: 29749 - DNA, 402 bp, Glycine max
  unsure at all n locations
  Clone ID: LIB3138-019-Q1-N1-D9
caaagcacaaagcaaagctcatccttgagttaaaaaatggcagcagcttcttccatggctctctcatccccatccttggctggcaaggccgtgaagctgggcccatcagccccagaagtgggaagggtgagcatgaggaagaccgtcaccaagcaggtctcctcaggaagcccatggtacggcccagaccgagtcaagtacttgggcccattctctggcgagcccccgtcctacctaaccggtgagttcccaggcgactacggctgggacactgctgggctttccgcagacccagaaaccttcgccaagaaccgtgaactcgaagtgatccactccaagtgggccatgctncgagccttgngctgcgtcttcccggaagtgctgtcccgcaacggggtgaag

SEQ ID NO: 29750 - DNA, 376 bp, Glycine max
  Clone ID: LIB3138-019-Q1-N1-E1
aagagattgacagcccccgcaagaatttggagtggaagctgacgatggaaaacggattcgctcgcatggacgacgaggttaatcgcaggagccagagcaaccagaccttcacctgcaggtgcgagctccagactccccactgcgacgccgtcggatccaccgccgtcgtcgccatcgtcacgccggacaaactcgtcgtttccaactgcggcgactcccgcgccgtcctctgccggaaaggcgtagccatccctctctcctccgatcacaagccggatcgacccgacgaactgctccgagtccaatccaagggagggcgcgtgatttactgggacggtcccagagtgcttggtgtgttagccatgtctcgagccat

SEQ ID NO: 29751 - DNA, 421 bp, Glycine max
  Clone ID: LIB3138-019-Q1-N1-E11
gtttgagatgtctggtgttcttctttgggtgagttgtggacccaaggagaaccctatctccattgttggtcttggcgggagaggtggcagaagccagaggaggtttggactgtgcaatgggatcagttttgcaagcttttcaccagcagtggcagacccttcaagatcctcagaggagagggtatatgaagtggtgttgaaacaagcagcactggtcaaggagcaggacaagggtacaaagagagcactgaatttggacaaaccaacaattgaaggtgatttaaccaatggggatctgttgagtgatgcttatgataagtgtggtgaagtctgtgctgaatatgccaagacattttatctaggcacacaattgatgacccaagagcgcagaaaagccatctgggccatatatgtgtcgtgc

SEQ ID NO: 29752 - DNA, 160 bp, Glycine max
  Clone ID: LIB3138-019-Q1-N1-E12
ctcgagccgctcggatatcctcaccaccagcaccgagtaagggatgcgataaggaaaaaaatggcatatagacatgataccaggctggcgcataccgtccgtgacgatcttgaatgaatgacaaaaatgaagccatcaagttcttcgcctataattcacc

SEQ ID NO: 29753 - DNA, 421 bp, Glycine max
  Clone ID: LIB3138-019-Q1-N1-E2
tgagagttgctgcttggaagaaaggctgtttaatggtcaagattgtgatgtctgggaatgcagcagtcaaaaggagtgattgggcctcattggtacaagtgtttttaacaaacagcaacagtacagagcattttgatgcatgtaattggacaaaatcagaaccacattcctgggaattgatcttcccaatagaggtatgtggtcctaataatggttttgaaatgtggagttctgagtgggcaaatcaaacttcatggcatttgagtttccttattgacaatcccaaacagtctacagtttttgatattctcttgggaatctctcaagattttgaaattgctggtaatactcttatgccagctttttctgttccacaggctactgccagatcttcttgaaatgcggaatcctctgcatgatc

SEQ ID NO: 29754 - DNA, 290 bp, Glycine max
  Clone ID: LIB3138-019-Q1-N1-E3
ggcaaatgaaaatacaggatgggctgctcctactcaggggctgcctccagtggatgcgagtgactggaaaggacctgggcaaggacgacaccatgtaaatgcaactgcatggtgaactgaggcccgtcatgggccaacacctgtaaatgccaatcctgcatatactgcagcggtggtgaatgcaagcatatggggaagtgagccaagtgataatggagacagggtccccaaccataccgatcacagtgcacatgcataaggacttaattacggtgtttaatgttgtaata

SEQ ID NO: 29755 - DNA, 412 bp, Glycine max
  unsure at all n locations
  Clone ID: LIB3138-019-Q1-N1-E4
cttcgccagtacttggacaacaacatggatggattttacattgctccagcttttatggacaaacttgttgttcacattaccaagaacttcatgaccctgcccaacatcaaggttcctctcattcttggtatctggggaggcaagggacaaggaaaatctttccaatgtgagcttgtctttgccaagatgggaatcaaccccatcatgatgagtgctggagagttggaaagtggaaatgcaggagagccagcaaaactgatcaggcagagataccgtgaagccgcagacttgatcaagaaaggaaagatgtgtgctctcttcatcaacgatcttgatgcangagctggtcgtcttggtggaaccacccaatacactgtcaacaaccagatggtgaatgccaccctcatgaaca

SEQ ID NO: 29756 - DNA, 418 bp, Glycine max
  Clone ID: LIB3138-019-Q1-N1-E5
gaaaaagttgtattgaaattttcacaagaggaatttcttacagcttggtcaactcaggtgcgtcctgcaacaactctgttggctgatgggtgtccatatttgtatgcaatggtgcatgatagttcagtgtctacaataccaggtgattttgtcattggtgtcaagttgacaaccataaacaatatgtgtgcatatgggctcaatcctggtatttcaggttctcgtcttttgggcaccattcctcagtccatttcacagcaaactgtttggaatcaaatggcaacagtgagaacaccattgaattttgattctagcaagcagagcttttgtcagttttctattgaccttctcggtggaggaatcttagtggacaaaactggagattggatcacacttatacaaaattctccattagtaa

SEQ ID NO: 29757 - DNA, 391 bp, Glycine max
  Clone ID: LIB3138-019-Q1-N1-E6
ggaaatgcaagaagcttatcttgtcaatctcgtaaatgtgttacgagaattgtatttgcacagtccagaggaagctcgccaattgagaaggaaagctctctctcgtattgaatggctgcaaaaagctgatgtgcctaccatagcacagattgaagagttccattcgatgcagaggatgatgaatgctcctgattcaaatgataatattgatttactgttgagcattgatttgttgggtttacaaggagcaggtaaagcttttccaaacaaaattgtttttgatgataagcttgtgttggctaacacacaagaattctttgatggaaattttccagtggattcttggttaccaatttttgtgaattgtctttatcctgtaagtcaattacct

SEQ ID NO: 29758 - DNA, 392 bp, Glycine max
  Clone ID: LIB3138-019-Q1-N1-E7
cactagtgcacaaaggagcgaggctgctggaattcataggggcaaaagctggggataagactctaaattggttgaaatcaaagaatgttgtggtgaaactagagcaatcagttgacttgaatgcattcaaagatggacagaagatatatcaaacttccaacggagagaccattgaagcagattgtcatttcttatgtatagggaaaccacttgcttcagcatggcttaaggaaactgtgttgaagaatgacttggatggtcaaggaaggatcaaggtagatgaaaaattaagagtcaagggcaaggacaacatttttgcaattggagatattacagatattccagaaatcaagcaaggtttttttggcacagcagcaggctgaagtggttgt

SEQ ID NO: 29759 - DNA, 139 bp, Glycine max
  Clone ID: LIB3138-019-Q1-N1-E8
ctggactgagccagcgagaaagggaaaatgctttggcacggagagggctgggatcgtgaagactcaagccatgtgacacgatgtgcaatgccgggatcgtgtactacgaggcgtcatgctcataacaagactgatacga

SEQ ID NO: 29760 - DNA, 417 bp, Glycine max
  unsure at all n locations
  Clone ID: LIB3138-019-Q1-N1-E9
cggctcgagcggctcgaggaaactttaagcagatgtctaatgttttgtgggtggctcctgaggacaaggcgagtttatggtcacaacttcattatgtttcgtgtaataatctggaaatgcaagaagcttatcttgtcaacctcgtaaatgtgttacgagaattgtatttgcacagtccagaggaagctcgccaattgagaaggaaagctctctctcgtattgaatggctgcaaaaagctgatgtgcctaccatagcacagattgaagagttccattcgatgcagaggatgatgaatgctcctgattcaaatgataatattgatttactgttgagcattgatttgttgggtttacaaggagcaggtaaagcttttccaaacaaanatgtttttgatgataagcttgtgttggctaaca

SEQ ID NO: 29761 - DNA, 412 bp, Glycine max
  Clone ID: LIB3138-019-Q1-N1-F10
cagaggtgaattataccttcgagcttctgagcttcagaaagagggcaaaaagattatatttactaatgttggcaacccacatgcattgggacagaaaccactgagcttccctcgtcaggttgttgctttgtgccaagctccattcctacttgatgatcctaatgttggactgctattccctgctgatgcaattgcaagagctaaacactatctttcattgacctcgggcggtttaggcgcttatagtgactcccgcggccttccaagagtgaggaaagaagtggctgagttcatactcaggcgtgatggttatccaactgatccagaactcatatatctcactgatggtgccagcaagggggtgatgcagatattaaatactatcatcagaggtcaagacgatgggattttg

SEQ ID NO: 29762 - DNA, 424 bp, Glycine max
  Clone ID: LIB3138-019-Q1-N1-F11
cttccctacaactccaaacacaaagacatcatcatccatggctgcctccgtctccactgtcggagctgtcaacagagctcttttgaacctgaatggttctggagctggagcttcagctcccagttcagccttctttgggaccagcttgaagaaggttattgcctcaagggtccccaacagcaaggtttccggtggaagcttcaagattgttgctgtagaagagaagaaagagattgaagagacccagcagaccgacaaggacagatggaagggtcttgcctatgatatctcagacgaccaacaagacatcacaagaggaaagggtttggttgactcccttttccaagctccacaggatgctggaactcactatgcagtcatgagctcctacgagtacctcagcacttgacttcgccagtacttg

SEQ ID NO: 29763 - DNA, 416 bp, Glycine max
  Clone ID: LIB3138-019-Q1-N1-F12
tttaaatccacaaaatccttttgtgttaaataggtggatgggaaaattgactttcccccagggcacttcccgaagtgttaagagaatgcctctttctatagggggaggagctggtgcaaagaatgctattctcatgaatatgccaaatgctgttctttcaatgtggagatattttgttggagatctcgtctttgaagtttctaagatgacttctccctacattaaatgtacagtctctttcttcatagcatttggaaatttggctgatgataccatcaattttgaggcttttccccacaagctggtgcagtttggagagattcaggaaaaagttgtattgaaattttcacaagaggaatttcttacagcttggtcaactcaagtgcgtcctgcaacaactcttgtggctgatgggt

SEQ ID NO: 29764 - DNA, 404 bp, Glycine max
  Clone ID: LIB3138-019-Q1-N1-F3
aaagtttgaaacgtgtcaaaattaaaaagcgagagagattaaagaatagagttgttggtgtaacaggcgagggcagagggaagggttagggaacaattggagtgcacgaaagcgatgccaaaaaaaccaaacaatcattaacaacagccctaacccccccgacgtctttcaaaactgattcggagcaattaatgtaaaatctatggacatcaacgaggaatcttcattctctctccgtttttgtttgcatcattaatagacccaaatggacccgaacccgacagcctcgctggactccgacccggacccgcttcgcgtgaagaggaagaccctcgaggccgtgctcttgcagtgtcagagagctctcgaatcgattaacgctacttctgctactgcttcttctt

SEQ ID NO: 29765 - DNA, 414 bp, Glycine max
  Clone ID: LIB3138-019-Q1-N1-F4
aaatggcaacagtgagaacaccattgaattttgattctagcaagcagagcttttgtcagttttctattgaccttctcggtggaggaatcttagtggacaaaactggagattggatcacacttatacaaaattctccaattagtaacttgttgagagttgctgcttggaagaaaggctgtttaatggtcaagattgtgatgtctgggaatgcagcagtcaaaaggagtgattgggcctcattggtacaagtgtttttaacaaacagcaacagtacagagcattttgatgcatgtaagtggacaaaatcagaaccacattcctgggaattgatcttcccaatagaagtatgtggtcctaataatggttttgaaatgtggagttctgagtgggcaaatcaaacttcatggcatttga

SEQ ID NO: 29766 - DNA, 412 bp, Glycine max
  Clone ID: LIB3138-019-Q1-N1-F5
gtgggaggaaagcaggtattgggatttggtgtggtttggtggtctgttgcgacagccctcactcctatagctgccaaacttggattgcctttcctactagttgctcgtgcattcatggggattggtgaaggtgttgctatgccagccatgaataatattttgtcaaaatgggttcctgtgtcagagcgaagtagatcactagcgctggtctacagtggcatgtatcttggatcagtcactggactggccttttctcccttcctaattcatcagtttggatggccatcagtattttactcctttggttctctagggacagtctggttttctgtgtggcttagcaaggcacatagttcacctcttgaagatcctgaactgcggcccgaggaaaagaagctcattactaccaact

SEQ ID NO: 29767 - DNA, 421 bp, Glycine max
  Clone ID: LIB3138-019-Q1-N1-F6
ctcgagccgaatcggctcgagcggctcgagcggctcgaggaaaatttctcaatctaaaattgcacttcccaagaacacagttggaggaaccattctgcgtagtgatctattggcaaattttttgacagagggcaattttagagcaagtgttgatttgcagcgcactcatcgtattagaggaatgattaaaatggtggccacagttggtattcctgagaatacaggtatatcattggcctgtgctatgaatagttcttttagggggcgcgccagttctgatatttacaccatctgctctcaagactgtgaattgtggaatcctgcttgcacaaaagcaatgactatgtcatttaatccaaacccgtgttctgatgcatggagtttggaatttctgaagcgtactggatttcattgcgatatc

SEQ ID NO: 29768 - DNA, 384 bp, Glycine max
  Clone ID: LIB3138-019-Q1-N1-F7
gtctcattcatcaccactacttgaactatataagtcgacacattcttcacattatgccttctccattccaccagaaatattcttcccaaagccacaaggtcttcggagacaatacagtaccagctatgcctgaagcacccaaggacgatgctgagagacgaggctccgacgcttctgtaacccgctcttcttatgatggccgtcgacgatcctccgccgcacaaagattcggtaatcttgaggcactcaagcgccctcaagatgaacaaagcgctgcccgtcgtgcatccctccacgactcgtacggcaaggtcggattcattgggtcaatgtggaacaacttcactcgtggtcctgctcccaagatgcaatcaccacccaaag

SEQ ID NO: 29769 - DNA, 390 bp, Glycine max
  Clone ID: LIB3138-019-Q1-N1-F8
gattctaaagaaatataactaatattctttagaataatcaaaaagaatattaaattcaaataaattttagatagaaaaaagacttaaaaaggaggatttgaaatgcgagatctaaaaacatatctttccgtggcaccagtagtaagtactctatggttcggggctttggcgggtctcttgatagagatcaatcgtttttttccagatgcattgatattcccttttttttcattctagttattgacacggaaaggggtgaagaagattatagatccaattaagtattaaatatatgtaattaatatgtaattaatctcctcttctttatttcgtcttttatttcttcttttttttacaattgtaatagaataagttaggaaagagaaaaga

SEQ ID NO: 29770 - DNA, 417 bp, Glycine max
  Clone ID: LIB3138-019-Q1-N1-F9
gaaattttcacaagaggaatttcttacagcttggtcaactcaggtgcgtcctgcaacaactctgttggctgatgggtgtccatatttgtatgcaatggtgcatgatagttcagtgtctacaataccaggtgattttgtcattggtgtcaagttgacaaccataaacaatatgtgtgcatatgggctcaatcctggtatttcaggttctcgtcttttgggcaccattcctcagtccatttcacagcaaactgtttggaatcaaatggcaacagtgagaacaccattgaattttgattctagcaagcagagcttttgtcagttttctattgaccttctcggtggaggaatcttagtggacaaaactggagattggatcacacttatacaaaattcttcaattagtaacttgttgagagt

SEQ ID NO: 29771 - DNA, 389 bp, Glycine max
  Clone ID: LIB3138-019-Q1-N1-G10
ggatgttcaggttacaattgattggtttatttcctctcaggaatgtgttcccaggacctattgtgttttaaatccacaaaatccttttgtgttaaataggtggatgggaaaattgactttcccccagggcacttcccgaagtgttaagagaatgcctctttctatagggggaggagctggtgcaaagaatgctattctcatgaatatgccaaatgctgttctttcaatgtggagatattttgttggagatctcgtctttgaagtttctaagatgacttctccctacattaaatgtacagtctctttcttcatagcatttggaaatttggctgatgataccatcaattttgaggcttttccccacaagctggtgcagtttggagagattc

SEQ ID NO: 29772 - DNA, 374 bp, Glycine max
  Clone ID: LIB3138-019-Q1-N1-G11
cgttgccattctcatcctcttctttctctctctaccattgccatggatccctacaagcaccggccatccagcgccttcaattctcccttctggactacaaattctggtgctcctatttggaacaacaactcctctttaaccgttggagctagaggtccaattctgctggaggattatcatcttgtggagaagcttgcaaattttgatagggaacgtatcccagaacgtgttccatgccaggggcgctagtgcaaagggtttctttgaggtcacccatgacatttctcacctgacatgtgcagatttccttcgagcccctggagttcagacgcctgtaattgttcgtttctcaactgtcattcatgagcgtggta

SEQ ID NO: 29773 - DNA, 399 bp, Glycine max
  unsure at all n locations
  Clone ID: LIB3138-019-Q1-N1-G12
ggctgtttaatggtcaagattgtgatgtctgggaatgcagcagtcaaaaggagtgattgggcctcattggtacaagtgtttttaacaaacagcaacagtacagagcattttgatgcatgtaagtggacaaaatcagaaccacattcctgggaattgatcttcccaatagaggtatgtggtcctaataatggttttgaaatgtggagttctgagtgggcaaatcaaacttcatggcatttgagtttccttattgacaatcccaaacagtctacagtttttgatattctcttgggaatctctcaagattttgaaattgctggtaatactcttatgccagctttttctgttccacaggctactgncagatcttcttgaaatgcggaatcctctgcatgatct

SEQ ID NO: 29774 - DNA, 353 bp, Glycine max
  Clone ID: LIB3138-019-Q1-N1-G2
gctggtgcaaagaatgctattctcatgaatatgccaaatgctgttctttcaatgtggagatattttgttggagatctcgtctttgaagtttctaagatgacttctccctacattaaatgtacagtctctttcttcatagcatttggaaatttggctgatgataccatcaattttgaggcttttccccacaagctggtgcagtttggagagattcaggaaaaagttgtattgaaattttcacaagaggaatttcttacagcttggtcaactcaggtgcgttctgcaacaactctgttggctgatgggtgtccatatttgtatgcaatggtgcatgatagttcagtgtctacaat

SEQ ID NO: 29775 - DNA, 179 bp, Glycine max
  Clone ID: LIB3138-019-Q1-N1-G4
gtccaactactttttacttccaagtatattcgtatcacaaaggccacacaactaactgttggtcagtacttgcatttccactccagtttcactacaagtgatgtacataacttctgtagtggactgaactatagatgacactctttggagaaaatgccaaatccactagtagattttcc

SEQ ID NO: 29776 - DNA, 403 bp, Glycine max
  Clone ID: LIB3138-019-Q1-N1-G5
ggcgagtttatggtcacaacttcattatgtttcgtgtaataatctggaaatgcaagaagcttatcttgtcaatctcgtaaatgtgttacgagaattgtatttgcacagtccagaggaagctcgccaattgagaaggaaagctctctctcgtattgaatggctgcaaaaagctgatgtgcctaccatagcacagattgaagagttccattcgatgcagaggatgatgaatgctcctgattcaaatgataatattgatttactgttgagcattgatttgttgggtttacaaggagcaggtaaagcttttccaaacaaaattgtttttgatgataagcttgtgttggctaacacacaagaattctttgatggaaattttccagtggattcttggttaccaattttt

SEQ ID NO: 29777 - DNA, 405 bp, Glycine max
  Clone ID: LIB3138-019-Q1-N1-G6
gtcagttttctattgaccttctcggtggaggaatcttagtggacaaaactggagattggatcacacttatacaaaattctccaattagtaacttgttgagagttgctgcttggaagaaaggctgtttaatggtcaagattgtgatgtctgggaatgcagcagtcaaaaggagtgattgggcctcattggtacaagtgtttttaacaaacagcaacagtacagagcattttgatgcatgtaagtggacaaaatcagaaccacattcctgggaattgatcttcccaatagaggtatgtggtcctaataatggttttgaaatgtggagttctgagtgggcaaatcaaacttcatggcatttgagtttccttattgacaatcccaaacagtctacagtttttgatattc

SEQ ID NO: 29778 - DNA, 169 bp, Glycine max
  Clone ID: LIB3138-019-Q1-N1-G7
aggaaagtgcacaagcaacggcttagcacactccagcgaggacctactgctcaagaggggcctgatggagggcgccgtgaccaccattcactggtacaccggcgaccagaggctcctcaacgcgagccaccagaacctgtggccccccagagcggcaactactaacatt

SEQ ID NO: 29779 - DNA, 365 bp, Glycine max
  Clone ID: LIB3138-019-Q1-N1-G9
atttaattccactacgtacacgcacattctcctcaaagacaacaatggcaccaacagccaagactctgacttacctggcccaggagaaaaccctagaatcgagcttcgttcgggacgaggaggagcgtcccaaggttgcctacaacgaattcagcgacgagatcccagtgatttctcttgccggaatcgacgaggtggatggacgcagaagagagatttgtgagaagatcgtggaggcttgcgagaattggggtatattccaggttgttgatcacggtgtggatcaacaactcgtggccgagatgacccgtctcgccaaagagttctttgctttgccaccggacgaagagcttcggtttgatatg

SEQ ID NO: 29780 - DNA, 420 bp, Glycine max
  unsure at all n locations
  Clone ID: LIB3138-019-Q1-N1-H1
gtgagccaagagaactttgataagggactcatatccccaccattcaccaacataagaaagatttcagcacacatagctgccaatgttgctgctaaggcttatgagcttggcttggccactcgccttcctcaacctaaagatttggtgaagtttgcagagagctgtatgtataccccatcctaccgaagctaccggtgaagcgataataaatagcctatttttctttttccttttcgttttatcattttattgtcaattatttaatttttttaccttctttatgttgctgntctgttcttggaagttatttgttgggttagtaggttaggacggtggtagttggactaaaaaggtagcttgaaaaattgtgtctgctataaaatgtatgtgacagtaatctaaatttagaaagggaagcat

SEQ ID NO: 29781 - DNA, 352 bp, Glycine max
  Clone ID: LIB3138-019-Q1-N1-H10
caacaaaccaatcattagtgcttgtggtgtcattcctcttcttgtgcagatccttagagatggaagccatcaagctaaagctgatgcagtaatggctctctctaatttatcaacacacactaacaatctcagcatcattctcgagacaaacccaatcccttacatagttgatcttctcaaaacctgtaaaaaatcctcaaaaacggctgaaaaatgctgtgctttgatagaatccttggtggattatgacgagggcagaactgccttgacatctgaggaaggcggggttcttgcagttgtggaagttctcgaaagcggcacactccaaagtagggagcatgcttgtggagca

SEQ ID NO: 29782 - DNA, 389 bp, Glycine max
  Clone ID: LIB3138-019-Q1-N1-H11
gcaacagtacagagcattttgatgcatgtaagtggacaaaatcagaaccacattcctgggaattgatcttcccaatagaggtatgtggtcctaataatggttttgaaatgtggagttctgagtgggcaaatcaaacttcatggcatttgagtttccttattgacaatcccaaacagtctacagtttttgatattctcttgggaatctctcaagattttgaaattgctggtaatactcttatgccagctttttctgttccacaggctactgccagatcttctgaaaatgcggaatcctctgcatgatctggaatttgtgttttctttcgcttgttcgtttgtttaattcaataaaagaaattaggcatgaccctcttgttgagtatgctc

SEQ ID NO: 29783 - DNA, 332 bp, Glycine max
  Clone ID: LIB3138-019-Q1-N1-H12
ggctcaagcaatggcatcaatgactagcttacgtggttcctctcaggctgtgttggaaggtagccttggctccacacgcttgaatgtggggagtggaagcagggtggcctcagtcacacgtgcagggttcacagttagagcacagcaacaacaagtgaatggtggtgaggtacaaagtagccgtagggcagtgctttcacttgttgctgctggtttgaccactggctcttttgttcaagctgtgcttgctgatgccaaacctatcaaagttggaccacctcccccaccttctggcggattacctggaacattgaactcagatgaaccaagag

SEQ ID NO: 29784 - DNA, 407 bp, Glycine max
  Clone ID: LIB3138-019-Q1-N1-H4
tggaaaaaggaagtaccaaaatggccgccgttacccagcccaaggacctcgttaagaagccgaaggatgccaagtccttcgccatcgacttcatgatgggaggtgtctccgccgctgtcgccaagaccgctgccgcccctattgagcgaatcaagctcttggttcagaaccaggacgagatgatcaagcagggtcgtctcgctaccccttacaagggtatctcggactgtttcgccaggacctacgccgatgagggtctcgtctcgctctggcgaggaaacaccgccaacgtcatcaggtacttccctacccaggcgttgaactttgccttcaaggactacttcaagtccatgttcaactttcaagaagtccgagtcttacgccaagtggttcgccggtaacatcgc

SEQ ID NO: 29785 - DNA, 331 bp, Glycine max
  Clone ID: LIB3138-019-Q1-N1-H5
cccttaaaggaagtaccaaaatggccgtcaattaaaactcacaagaattcctttcacttgtcatgaactacaatcattgaccatacatatggaacagacattagtaggttcaaaatcaatcaagcgtggaaccacaaaatatgtaaaattctaaaacagcacaactttaaattaaattgcattcatgaatcacatcagaattcataattggacattgaagtcgaccccgttaacaatctgagcagtactacttgcaaatttgctcaacgtactttttatagccattttttttattgcacttgctctagcaattttatgcttacaaaagaaa

SEQ ID NO: 29786 - DNA, 84 bp, Glycine max
  Clone ID: LIB3138-019-Q1-N1-H7
cgctgaaggcatagatacaagagaaaggacttttgcatttctcacaacagggattggttcctgctcgaccacctcatgtgcgtt

SEQ ID NO: 29787 - DNA, 356 bp, Glycine max
  Clone ID: LIB3138-019-Q1-N1-H8
caactttaaactaaaggctagtggaagaagtcgttgttccttcctttgctcagctccttatggcaccaacaatgttggacatggggaagtatatcgacttggtttgagcaaaagaaagcatgcacaaactgaagttggtaaaacaaataagttccgtgtttgttacaagtctgaggagtatgacatttcacaaacaaagatggatccactgcaatcaactgaagggactggagaagccattcttttggaaggaagagcatcaccttggtggcagcagtttcctaagcgctgggttattgtactgctgtgttttacagcatttcttctgtgtaacatggatcgtgtaaatatgagca

SEQ ID NO: 29788 - DNA, 418 bp, Glycine max
  Clone ID: LIB3138-019-Q1-N1-H9
ggaaatgcaagaagcttatcttgtcaatctcgtaaatgtgttacgagaattgtatttgcacagtccagaggaagctcgccaattgagaaggaaagctctctctcgtattgaatggctgcaaaaagctgatgtgcctaccatagcacagattgaagagttccattcgatgcagaggatgatgaatgctcctgattcaaatgataatattgatttactgttgagcattgatttgttgggtttacaaggagcaggtaaagcttttccaaacaaaattgtttttgatgataagcttgtgttggctaacacacaagaattctttgatggaaattttccagtggattcttggttaccaatttttgtgaattgtctttatcctgtaagtcaattaccttcagaagctgtcgttgtaaatgttaca

SEQ ID NO: 29789 - DNA, 352 bp, Glycine max
  unsure at all n locations
  Clone ID: LIB3138-020-Q1-N1-A1
aagaaactaagaagattttgagcacaatggcatccacacaatgcttcttgcaccaccatgccctcaccactccaaccagagcttcatcacagcgcttagttgtgagcaccaaaccaaaccacattgtttgcaaggcacaaaagcaggttgtccaagagggtgaggacactactaacattgtctctcgcaggttggccctcactgttctcattggtgctgctgctgttggctctaaggttgcacctgctgatgctgnctatggagaagctgccaatgtgtttggaaagccaaagacaaacactgacttccttccatacaatggggatggattcaaactctcaattccctcaaa

SEQ ID NO: 29790 - DNA, 390 bp, Glycine max
  Clone ID: LIB3138-020-Q1-N1-A10
aaataaacttatttgtggaggacagggttgtgccaaatggtgttgttgcatatacaagcaaggatgagattcatgttattgcaaaatatgttaatgactatggtggggatgtgaagacagagatcacaggggtgctgtatcatgaaatggtccacgtttggcagtggaatgggaatggtcaggctccaagtggattaattgaaggtattgcagactatgttaggctgaaggcaaactatgcacctagccactggaagaaagcaggggagggacagaaatgggaccagggttatgatgttactgctcgttttctggactattgtaatactctcaaaagtgggtttgtggcacaattgaacaagcagatgaggactggttatagtgatcaat

SEQ ID NO: 29791 - DNA, 391 bp, Glycine max
  Clone ID: LIB3138-020-Q1-N1-A11
gctagctccttcacctccttagtttcgaaagcatggcttccctggcggcttccaccgcggctatgtcagaaatccttggaaaccccgttaacctcagatgcgcaaccaggtctgctccatcaccaactacacctgccaccttcaagaccgtcgcacttttctccaagaagaagccagctccacttccaaagaaaaagcctgccgctgtatcccccgccaatgaggaactcgccaagtggtatggtcctgacagaaggatcttcttgcctgagggtctcttggaccgatctgagatccccgagtacttgaccggagaagtgcctggagattatggttatgatccgtttggtcttagcaagaagccagaggacttcgccaagtaccaggcgtt

SEQ ID NO: 29792 - DNA, 390 bp, Glycine max
  Clone ID: LIB3138-020-Q1-N1-A12
ctcccatcaacaacaggatcctttgcatccacaacaattggtgcagaataaccggaaaaggaaggggcctacatcttcaggaccggccaacagtactggtaccggaaatacacttggcccttctaattctcagccatcaactccatcaactcatactcctggtgatggagttgctatggcgggtaacttgcagaatgttgctggtatatccaaaggtttgatcatgtatggtactgatggagtgggcggtcttgcatcttcgacaaatcagctgttgcaggatgacatggaacattttggagatgttggctccttagaggataatgtggaatcatttctctcacaggatgatggtgatggaagggacttgtttggcacattgaaacggat

SEQ ID NO: 29793 - DNA, 147 bp, Glycine max
  Clone ID: LIB3138-020-Q1-N1-A3
cacagttggaggaaccattctgcgtagtgatctattggcaaattttttgacagagggcaattttagagcaagtgttgatttgcagcgcactcatcgtattagaggaatgattaaaatggtggccacagttggtattcctgagaatac

SEQ ID NO: 29794 - DNA, 392 bp, Glycine max
  Clone ID: LIB3138-020-Q1-N1-A5
gccgaccatttaaaagttggagattttggattgagtaagcttatcacggtccagagttctcatgatgtatacaaaatgactggtgaaactgggagctaccgctacatggctcctgaagttttcaaacatcggagatatgataagaaggttgatgtgtactcctttgcaatgattttgtacgagatgcttgaaggtgaaccaccttttgcaagtcgtgaaccttatgaaggagcaaaatacgctgctgagggacacaggcctcattttcgggcaaagggttatactcctgaattgcaagagttaacggagcagtgttgggctcatgacatgagtcagagaccatccttcatagagatcctaaaacggcttgaaaagatcaaggagaatttacc

SEQ ID NO: 29795 - DNA, 307 bp, Glycine max
  Clone ID: LIB3138-020-Q1-N1-A6
ggaattaccgatgatgaactaaacccaacttgtgtatcttccatattgggtatccacataaagagaggtgctgcaagactgtggcatacaatctgtacatctgctgatggtgatgtgtatgcatttggtgagaatcaagttgggcagttgggaactggtgctgatcaagctgagactctaccaagactactggattctccgagtttggataatttgcgtgcaaagaatatatcttgcggtgctcgccacactgctttagtaacaagaggtggaaaaagtttctgctggggatggaacaaatatggac

SEQ ID NO: 29796 - DNA, 343 bp, Glycine max
  Clone ID: LIB3138-020-Q1-N1-A8
ctgatttttgaggaaggacttgaaaatgtgattgcaagacacagtcgtttaggcaaagcaaccagacttgctgtagaggcatggggtttgaagaattgcacccaaaaggaagagtggtacagtgacactgtgactgctgttcttgttcctgcttacattgatagtactgaaatagttagaagggcatggaagagatacaatttgagcttaggtcttggactgaacaaagttgctgggaaggttttcagaattggacatcttggcaacttgaatgagttgcaactgttgggatgtctaactggtgtggagatgatactgaaagatgtgggctatcctgtaaagc

SEQ ID NO: 29797 - DNA, 385 bp, Glycine max
  Clone ID: LIB3138-020-Q1-N1-A9
gaaaaattatccaagaatcaaaactattgttaataaagttggaaccattacaaatgaatttcgtgtgccagagtttgaaattttagcaggagagcataatatgattacagaagtgaagcaatatggtgccacttttaggcttgattacagcttggtttattggaattcgagattggaacatgaacacaaaaggttagtctcaatgttccaagctggagagaccatttgtgacatgtttgctggtattggtccttttgccattcctgcagcacagaaaggatgcatagtctatgcaaatgatttaaatcctgatagcattcactatctgaggattaatgccaaaatcaataaggttggtgattgcatttatgcatacaacatggat

SEQ ID NO: 29798 - DNA, 365 bp, Glycine max
  Clone ID: LIB3138-020-Q1-N1-B1
gaaatttggctgatgataccatcaattttgaggcttttccccacaagctggtgcagtttggagagattcaagaaaaagttgtattgaaattttcacaagaggaatttcttacagcttggtcaactcatgtgcgtcctgcaacaactctgttggctgatgggtgtccatatttgtatgcaatggtgcatgatagttcagtgtctacaataccaggtgattttgtcattggtgtcaagttgacaaccataaacaatatgtgtgcatatgggctcaatcctggtatttcaagttctcgtcttttgggcaccattcctcagtccatttcacagcaaactgtttggaatcaaatggcaacagtgagaaca

SEQ ID NO: 29799 - DNA, 377 bp, Glycine max
  Clone ID: LIB3138-020-Q1-N1-B10
atcggagctcaacaatcggaaaagggaaatgtagaaagtggtgtctggggactgacacccttctgcactggatgtattgtgggagtcaggcgtgggagatgctacaacgggatctgcggatcatataacaagaggaatggtgtcaactgtgatgtcgaatatgaccagcgatagagtgaatggttggaggagaacaatgtctgaaacagtaaagcttggtgtataaattattaaagattcgcattcacaacgacaatctctattgcatgcacattacacactgcatggagtggatgatgacataagcctgaacaagaaaattctgaccaacatgttcagaaggatgcacaagagcatgtgggctattggaggcattg

SEQ ID NO: 29800 - DNA, 374 bp, Glycine max
  Clone ID: LIB3138-020-Q1-N1-B11
actaaatctgattcaagtactgcttctagctccaaagcgtgtcgggagaagttgaggagggataggcttaatgacaagtttgttgaattgggctccatcttggagcccggaaggcctcccaaaacagacaaggcttccattctgattgatgctgcccgaatggtgacacagctgcgggatgaagccctgaagttgaaagactcaaatacgagtcttcaagagaagattaaagagttaaaggctgagaagaatgaacttcgtgatgagaaacagaggcttaaggcagagaaagagaagttggaggtgcaagtaaaatcaatgaatgctcaacctgctttcttgccaccccctcctgcaatccctgctgcatttgc

SEQ ID NO: 29801 - DNA, 387 bp, Glycine max
  Clone ID: LIB3138-020-Q1-N1-B12
ggtagttgtgtctccggcaaaaccacctccgaagctcgatccagaggtcgatgatccgctttatctgatgacattgaccatccaatagcttttcttgaggcctttatcaggttagatgggatgccaccgtgttcggggtctttaatcttgatttccccctttacataaagcacgaagacctctccgaaatcgcacacggtggtcaatgtctcagcatattagtgttacagttgtggattttgcatttcactgaaacatgtatgcgagtggggaattctgatatctatggattcctcgagccacagtccattcagaggtctgggcaatcgcagtttgagtctgaaagttacataaagagttggatgcacttcacaatgcgatgtatat

SEQ ID NO: 29802 - DNA, 359 bp, Glycine max
  Clone ID: LIB3138-020-Q1-N1-B2
ctcgagccgaatcggctcgagctaaattgaaaagctttctagctagtcataacatcaccattacttatggtattgacaaaactagtgcaactttgcaatttagaaagttagcagattgtgattttctcaagagaaactttaagcagatgtctaatgttttgtgggtggctcctgaggacaaggcgagtttatggtcacaacttcattatgtttcgtgtaataatctggaaatgcaagaagcttatcttgtcaatctcgtaaatgtgttacgagaattgtatttgcacagtccagaggaagctcgccaattgagaaggaaagctctctctcgtattgaatggctgcaaaaagctgatgtg

SEQ ID NO: 29803 - DNA, 394 bp, Glycine max
  Clone ID: LIB3138-020-Q1-N1-B3
gtgaaaacaataccttggagattaattttgtcaaagccgccagtctgggctctgatagtgtcccatttttgccacaactggggaactttcattctacttacatggatgccaacatactataaccaagtcttgaagtttaatcttacagaatctgggctattttgtgttttaccatggttgataatggctatttctgcaaatgttggtggttggattgcagacactctagtgagcaagggtgtatcagttacaagggtccgcaagataatgcaaacaattggatttctcggaccagctttcttcttaactcaattgagccatgtcaattctccggtgatggctgttttgtgtatgacgtgcagccagggaactgatgctttctctcagtccggat

SEQ ID NO: 29804 - DNA, 376 bp, Glycine max
  unsure at all n locations
  Clone ID: LIB3138-020-Q1-N1-B4
gaaaaattgatgcgtgaaaggacgcacctgctgttggcttgttgttcaaggatggcaatttgtaagaaagatgtttggagagttgaatgtggaatcccttctggatttccgctcacagttatttgcaatagcatttttaatgagatgctcattagatatagctatgaaaaattactgcgccaggctaaagctccaagtatgtttttacaatccttcaaaaattttgtttctttgtgtgttattnttaaaaaaaaaaatnatataaaaaaaaaaaaaaataaaaattataaaataaattatttatataatataaaataaataataattaataaatttaaaataaaatattattataaaaaaaataaggggcgccccc

SEQ ID NO: 29805 - DNA, 387 bp, Glycine max
  Clone ID: LIB3138-020-Q1-N1-B5
ctgatttttgaggaaggactcgaaaatgtgatcgcaaggcacagtcgtttaggcaaagcaaccagacttgctgtagaggcatggggtttgaagaattgcacccaaaaggaagagtggtacagtgacactgtgactgctgttcttgttcctgcttacattgatagtactgaaatagttaggagggcatggaagagatacaatttgagcttaggtcttggactgaacaaagttgctgggaaggttttcagaattggacatcttggccacttgaatgagttgcaactgttgggatgtctagctggtgtagagatgatactcaaagatgtgggttatcctgtaaagcttggaagtggagttgctgctgccagtgcatacttacagaacact

SEQ ID NO: 29806 - DNA, 353 bp, Glycine max
  unsure at all n locations
  Clone ID: LIB3138-020-Q1-N1-B7
ctcgagccgtgcaaattctcagctgaaaatgttgccgttcaagtcattgactcggtcaatatcaccttgggtgctgagaatgaattaaaacatgcagttgcatttgttcggccggttagtgtggcctttcaggtggtgaatgggttccatttctacgagaatggagtttacactagtgacatttgcggtagcacttcccaggatgtgaaccatgccgtccttgctgtggggtatggagttgaaaatggcgttccatattggctcataaaaaattcatggggagaaagntggggtgagaatggctacttcaaaatggaattgggaagaacatgtgtggtgttgcaacttgtgcg

SEQ ID NO: 29807 - DNA, 388 bp, Glycine max
  Clone ID: LIB3138-020-Q1-N1-B8
cttctccctacattaaatgtacagtctctttcttcatagcatttggaaatttggctgatgataccatcaattttgaggcttttccccacaagctggtgcagtttggagagattcaggaaaaagttgtattgaaattttcacaagaggaatttcttacagcttggtcaactcaggtgcgtcctgcaacaactctgttggctgatgggtgtccatatttgtatgcaatggtgcatgatagttcagtgtctacaataccaggtgattttgtcattggtgtcaagttgacaaccataaacaatatgtgtgcatatgggctcaatcctggtatttcaggttctcgtcttttgggcaccattcctcagtccatttcacagcaaactgtttggaa

SEQ ID NO: 29808 - DNA, 364 bp, Glycine max
  Clone ID: LIB3138-020-Q1-N1-B9
ggcaattttagagcaagtgttgatttgcagcgcactcatcgtattagaggaatgattaaaatggtggccacagttggtattcctgagaatacaggtatatcattggcctgtgctatgaatagttcttttagggggcgcgccagttctgatatttacaccatctgctctcaagactgtgaattgtggaatcctgcttgcacaaaagcaatgactatgtcatttaatccaaacccgtgttctgatgcatggagtttggaatttctgaagcgtactggatttcattgcgatatcatttgtgtcactggatggactgccaccccaatgcaagatgttcaggttacaattgattggtttatttcctctc

SEQ ID NO: 29809 - DNA, 386 bp, Glycine max
  Clone ID: LIB3138-020-Q1-N1-C1
gtttttaacaaacagcaacagtacagagcattttgatgcatgtaagtggacaaaatcagaaccacattcctgggaattgatcttcccaatagaggtatgtggtcctaataatggttttgaaatgtggagttctgagtgggcaaatcaaacttcatggcatttgagtttccttattgacaatcccaaacagtctacagtttttgatattctcttgggaatctctcaagattttgaaattgctggtaatactcttatgccagctttttctgttccacaggctactgccagatcttctgaaaatgcggaatcctctgcatgatctggaatttgtgttttctttcgcttgttcgtttgtttaattcaataaaggaaattaggcatgaccc

SEQ ID NO: 29810 - DNA, 386 bp, Glycine max
  Clone ID: LIB3138-020-Q1-N1-C10
tggatggactgccaccccaatgcaggatgttcaggttacaattgattggtttatttcctctcaggaatgtgttcccaggacctattgtgttttaaatccacaaaatccttttgtgttaaataggtggatgggaaaattgactttcccccagggcacttcccgaagtgttaagagaatgcctctttctatagggggaggagctggtgcaaagaatgctattctcatgaatatgccaaatgctgttctttcaatgtggagatattttgttggagatctcgtctttgaagtttctaagatgacttctccctacattaaatgtacagtctctttcttcatagcatttggaaatttggctgatgataccatcaattttgaggcttttcccc

SEQ ID NO: 29811 - DNA, 68 bp, Glycine max
  unsure at all n locations
  Clone ID: LIB3138-020-Q1-N1-C11
cccaactcaatntttctctcaaccggcccaatttagcataagcccagcatggccaccgcaacagcagc

SEQ ID NO: 29812 - DNA, 385 bp, Glycine max
  Clone ID: LIB3138-020-Q1-N1-C12
gcctctttctatagggggaggagctggtgcaaagaatgctattctcatgaatatgccaaatgctgttctttcaatgtggagatattttgttggagatctcgtctttgaagtttctaagatgacttctccctacattaaatgtacagtctctttcttcatagcatttggaaatttggctgatgataccatcaattttgaggcttttccccacaagctggtgcagtttggagagattcaggaaaaagttgtattgaaattttcacaagaggaatttcttacagcttggtcaactcaggtgcgtcctgcaacaactctgttggctgatgggtgtccatatttgtatgcaatggtgcatgatagttcagtgtctacaataccaggtgat

SEQ ID NO: 29813 - DNA, 396 bp, Glycine max
  Clone ID: LIB3138-020-Q1-N1-C2
tggagattggatcacacttatacaaaattctccaattagtaacttattgagagttgctgcttggaagaaaggctgtttaatggtcaagattgtgatgtctgggaatgcagcagtcaaaaggagtgattgggcctcattggtacaagtgtttttaacaaacagcaacagtacagagcattttgatgcatgtaagtggacaaaatcagaaccacattcctgggaattgatcttcccaatagaggtatgtggtcctaataatggttttgaaatgtggagttctgagtgggcaaatcaaacttcatggcatttgagtttccttattgacaatcccaaacagtctacagtttttgatattctcttgggaatctctcaagattttgaaattgctggtaatac

SEQ ID NO: 29814 - DNA, 397 bp, Glycine max
  Clone ID: LIB3138-020-Q1-N1-C3
gtttgcaaaaagacagagggttaattgtggagtattttggaaggatgtcttacgttgctcataacgttaatcagccccaagagaaagatttgttggagggaaatttttcctttgatattaaatctcgctctagattggaaaaagtttcctctacaaaagcacaatttgttagtggaaaaaccttcaaatatgatataattggtgctggttcacattcttcagaagattttcctgaaaaggaagatcaagaaaaacccaaaaagattgatgccagattgagacaaagaatagatcctcaatacaatgaggttcaggctcagatggaaacaaatttgtttaaattgtctcttgatgatgttgaaactcctaaaggttccatgttggatctgaaaatttc

SEQ ID NO: 29815 - DNA, 390 bp, Glycine max
  Clone ID: LIB3138-020-Q1-N1-C4
gttcggccagttagtgtggcctttcaagtggtgaatgggttccatttctacgagaatggagttttcactagtgacacttgtggtagcacttcccaagatgtgaaccatgccgttcttgctgttggatatggagttgaaaatggtgtcccatattggctcataaaaaattcatggggagaaagctggggtgaaaatggctacttcaagatggaattggggaagaacatgtgtggtgttgcaacttgtgcatcttatccaattgtggcataaattgcataacaatatggtccctggtgactaccaccttgtcatgcttcagagtttagagcgtattgctgatgccagtattgatgaatgatgattaaagataagtgtaattgtatgatgaaa

SEQ ID NO: 29816 - DNA, 388 bp, Glycine max
  Clone ID: LIB3138-020-Q1-N1-C5
tgataacttaattagtgttcatgaatatgtcaagccttactttagtggttctaaattgaaaagctttctagctagtcataacatcaccattactgatggtattgacaaaactagtgcaactttgcaatttagaaagttagcagattgtgattttctcaagagaaactttaagcagatgtctaatgttttgtgggtggctcctgaggacaaggcgagtttatggtcacaacttcattatgtttcgtgtaataatctggaaatgcaagaagcttatcttgtcaatctcgtaaatgtgttacgagaattgtatttgcacagtccaaaaggaactcgccaattgaagaggaaagctctctctcgtattgaatggctgcaaaaagctgatgtg

SEQ ID NO: 29817 - DNA, 391 bp, Glycine max
  Clone ID: LIB3138-020-Q1-N1-C7
cgttggattattaggcttaaaaacgcttttgccttctccaaaattctcttacgccaacgaggctcacggtctttggattctcaaaggttacgcgccagtcatgaccatgaaactggcgcgaaccaacacagttcaaaaaactcaattctctggcatcgatgccaaggagtcgattctccgttactcactcgcgcaccaccaacttgaggcacacgtgcagctagactacaccgttgggttttacgatggtttcattcaggttcgtgcacgtgtcgataatatacgcctccacctcgcgaggttaggtttcagccaaaacgacgacgtggatgatttcgttgaggagaagcactttccgtcacgggttcgggtttgggtgggcccggagata

SEQ ID NO: 29818 - DNA, 243 bp, Glycine max
  Clone ID: LIB3138-020-Q1-N1-C9
aacactaccctgaacatagtaaagaagccagtgctaggatttgttagtgaagcaatggctcaaaccatgttgctcatgtctagtgtctctagcagttattccgtggatttgaagaaagaccttttcctccaattgcagagtcaaagtttaaggcctaagttctctcagctctcattcaacccacttccatcatcaacttcttccttttcttcaccccgtacattcacaactctggccctcttc

SEQ ID NO: 29819 - DNA, 384 bp, Glycine max
  Clone ID: LIB3138-020-Q1-N1-D10
ctcgagccgaacaaatttgtttaaattgtctcttgatgatgttgaaactcctaaaggttccatgttggatctgaaaatttctcaatctaaaattgcacttcccaagaacacagttggaggaaccattctgcgtagtgatctattggcaaattttttgacagagggcaattttagagcaagtgttgatttgcagcgcactcatcgtattagaggaatgattaaaatggtggccacagttggtattcctgagaatacaggtatatcattggcctgtgctatgaatagttcttttagggggcgcgccagttctgatatttacaccatctgctctcaagactgtgaattgtggaatcctgcttgcacaaaagcaatgactatgtcatt

SEQ ID NO: 29820 - DNA, 385 bp, Glycine max
  Clone ID: LIB3138-020-Q1-N1-D12
aacacacaagaattctttgatggaaattttccagtggattcttggttaccaatttttgtgaattgtctttatcctgtaagtcaattaccttcagaagctgtcgttgtaaatgttacatgtggtagtggacgtggtggtttacccaccactgcttggattagttctgcagttaacaatcgctcctcagatatcaacaaaaggattcgcacagcacttgggaaaggtaagaaaattgtttttcttactagagttgatccttttccagtagctttactggctgttctttttggcgttaagaatgaaattctgagttctaacgccactaatcctatgctgacgcgacttcttgagaactgtaagagtctcaaatatctggttgatgagt

SEQ ID NO: 29821 - DNA, 235 bp, Glycine max
  unsure at all n locations
  Clone ID: LIB3138-020-Q1-N1-D2
gaaagataatcttnctattgctgttcctagtgcgaatggagctccaccaacaatgacttatatagcttgaggggatgactctgtcttatgctcgacaatttctcatatagtgcattgcactgcacatgctcatgatcatagtatcgcatagcatctgctcatggatgaagcgtgcatatatatcatcattggtatgtatctatcgactgctattgcacagcgtggtctgatactt

SEQ ID NO: 29822 - DNA, 394 bp, Glycine max
  Clone ID: LIB3138-020-Q1-N1-D3
ctcgagccgctcgagcggctcgaggaaagtgcaggatcttctgttgttggatgttactcctctctcccttgggttggagaccgcgggaggagtcatgactgtgttgattcccagaaacacaaccattcccaccaagaaggagcaggtattttcgacctattccgacaaccagcctggtgtgttgattcaggtctatgaaggtgaacgtacgaggactcgtgataacaatttgcttggcaaatttgagttatctggaattcctcctgctccgagaggtgttcctcagatcaccgtttgctttgacattgacgccaactgtatattgaacgtgtctgcggaggacaaaaccactggacagaagaacaagattacaattaccaacgacaaaggaagg

SEQ ID NO: 29823 - DNA, 385 bp, Glycine max
  Clone ID: LIB3138-020-Q1-N1-D4
tcggactgggttcaccacacctgccatggaagtcaccacattcaatcgaaccactttcaccgatgctgctgactttcccgtttgggaaaagattggtgctgtcgtcagactcagttatggcctcgggatttatggtgccatggcagttgcggggagttttatatgttcaatcacgggaattgactctctggggggtttccatctatcgttagatgccattttggaagggcttggatatgcagctcctccaattatggcccttttgtttatactcgatgatgaagttgtgaagctatcgccccatgcccgtgctatcagagatgtagaggatgaagaactgtggagctttttctatgggatgtctccttggcagtttatactgatg

SEQ ID NO: 29824 - DNA, 197 bp, Glycine max
  Clone ID: LIB3138-020-Q1-N1-D5
aaatcatgtttatagagactgagagatagggagagggtgactgaatgttctactaaacggctgcctgcaccgtctactgaacacaatccctgatcacaagatgcttcatctgaaccccatcaaagacacagcttagtcacttccaacaaaaacaaggacatttcctgcagaacagcaaaggggcaacagcacaatgc

SEQ ID NO: 29825 - DNA, 380 bp, Glycine max
  Clone ID: LIB3138-020-Q1-N1-D6
cgaatagattatcctaagtctttgggaatagtgctgcaatggcttcaagtcaggaggaggtgacccttttgggagctactggaagcccatttgtgtgcagggttcatattgccctcaagttgaagggagttcaatacaaatatgtcgaagaaaatttgaggaacaagagtgaactgcttctcaaatccaacccagttcacaagaaggttccagtgtttattcacaatgagaagcccatagcagagtctcttgtgattgttgaatacattgatgagacatggaagaacaaccccatcttgccttctgatccttaccaaagagccttggctcgtttctggtccaaattcattgatgataaggtttttggtgctgcatggaaa

SEQ ID NO: 29826 - DNA, 390 bp, Glycine max
  Clone ID: LIB3138-020-Q1-N1-D7
gctcatttttgctggcaaacagcttgaagatggccgaaccttggctgattacaacatccaaaaagaatctaccctccacttggtgctccgtctgcgcggtggtatgcaaatctttgtgaagacccttactgggaagaccattactttggaggtagagagctcagacacaattgacaatgtgaaggcaaagatccaagacaaggagggtatcccaccagaccaacagaggctcatttttgctggcaaacagcttgaagatggccgaaccttggctgattacaacatccaaaaagaatctaccctccacttggtgctccgtctgcgcggtggtatgcaaatctttgtgaagacccttactgggaagaccattactttggaggtagagagctc

SEQ ID NO: 29827 - DNA, 391 bp, Glycine max
  Clone ID: LIB3138-020-Q1-N1-D8
gttctgatgcatggagtttggaatttctgaagcgtactggatttcattgcgatatcatttgtgtcactggatggactgccaccccaatgcaggatgttcaggttacaattgattggtttatttcctctcaggaatgtgttcccaggacctattgtgttttaaatccacaaaatccttttgtgttaaataggtggatgggaaaattgactttcccccagggcacttcccgaagtgttaagagaatgcctctttctatagggggaggagctggtgcaaagaatgctattctcatgaatatgccaaatgctgttctttcaatgtggagatattttgttggagatctcgtctttgaagtttctaagatgacttctccctacattaaatgtacagt

SEQ ID NO: 29828 - DNA, 391 bp, Glycine max
  Clone ID: LIB3138-020-Q1-N1-D9
ttccttgtcactgcccgtgtgtcgccgccatggccaccgtcaccacccaagcctccgccgcaattttccggccatgtacctcgaaatcgaggtttttgaccggctcttccggtaaacttaaccgggaagtgactatgcggccaatggggtgccctccttctgcctctttcaaggttgaagccaagaagggagagtggttacctggcttggcctccccaacttacctcaatggcactcttcctggtgacaatggatttgaccctctggggctagctgaggacccagagaacttgaggtggtacgttcaagccgagcttgtgaatggacgttgggccatgttgggtgttgcaagaatgttgcttcctgaggttttcaccaagtttggaatcat

SEQ ID NO: 29829 - DNA, 384 bp, Glycine max
  Clone ID: LIB3138-020-Q1-N1-E10
cccaatagaggtatgtggtcctaataatggttttgaaatgtggagttctgagtgggcaaatcaaacttcatggcatttgagtttccttattgacaatcccaaacagtctacagtttttgatattctcttgggaatctctcaagattttgaaattgctggtaatactcttatgccagctttttctgttccacaggctactgccagatcttctgaaaatgcggaatcctctgcatgatctggaatttgtgttttctttcgcttgttcgtttgtttaattcaataaaggaaattaggcatgaccctcttgttgagtatgctctgcctatttgaaaatttccacacctcttttaattgtcgtaatgatgtgtgaagtgtgtgttattt

SEQ ID NO: 29830 - DNA, 382 bp, Glycine max
  Clone ID: LIB3138-020-Q1-N1-E11
aaaaaaaccaaaataaaaaaaaaaactttgcaatttcgtaggagatgctcaggagcagcacgctaacacagagtgttacagtcacctgtgttcatcacagtcacagacaatggttccaatcaattcccgtaaattatagattctgtgacgctgctcggaactctctatcatccaactccgccatcttcaagtggaaaagaacggctaattataatcgtaaccgttctggaatgggaaccttcaccacgcgcgcgttggcgcatccgctccagaacgccgacgaactcatcgattccgtcgagacatttattttcgattgtgacggagttatatggaaaggtgacaaattaatagaaggggtgcctgaaacgcttgacatgct

SEQ ID NO: 29831 - DNA, 202 bp, Glycine max
  Clone ID: LIB3138-020-Q1-N1-E12
cacagtcacatacacatactactacttgtgttcattagcatcttgttgctgccacaagccatggttctacaaacacgcaataatgcacacgtcgtatctgttccgctaaaggctcaaggccacatcatgcccatgatggacattgcacgactattggcgcggactggcgagattgttaccatattcactacaccacaaaatg

SEQ ID NO: 29832 - DNA, 395 bp, Glycine max
  Clone ID: LIB3138-020-Q1-N1-E3
gtttcgtgtaataatctggaaatgcaagaagcttatcttgtcaatctcgtaaatgtgttacgagaattgtatttgcacagtccagaggaagctcgccaattgagaaggaaagctctctctcgtattgaatggctgcaaaaagctgatgtgcctaccatagcacagattgaagagttccattcgatgcagaggatgatgaatgctcctgattcaaatgataatattgatttactgttgagcattgatttgttgggtttacaaggagcaggtaaagcttttccaaacaaaattgtttttgatgataagcttgtgttggctaacacacaagaattctttgatggaaattttccagtggattcttggttaccaatttttgtgaattgtctttatcctgt

SEQ ID NO: 29833 - DNA, 388 bp, Glycine max
  Clone ID: LIB3138-020-Q1-N1-E4
atcaattttgaggcttttccccacaagctggtgcagtttggagagattcaagaaaaagttgtattgaaattttcacaagaggaatttcttacagcttggtcaactcaggtgcgtcctgcaacaactctgttggctgatgggtgtccatatttgtatgcaatggtgcatgatagttcattgtctacaataccaggtgattttgtcattggtgtcaagttgacaaccataaacaatatgtgtgcatatgggctcaatcctggtatttcaggttctcgtcttttgggcaccattcctcagtccatttcacagcaaactgtttggaatcaaatggcaacagtgagaacaccattgaattttgattctagcaagcagagcttttgtcagtttt

SEQ ID NO: 29834 - DNA, 381 bp, Glycine max
  Clone ID: LIB3138-020-Q1-N1-E5
ctcttatcatctttgttattacctctttccaaagtccaaattttctagttccaccaaaccaaaccaaaccaaaatggcagcagcctcagcctcatccatgatatcaacaccagccttatctccaaccatccaaaagcaccatcatttgaagccatccaacgtgtgcttccaaggtcttagacccctcgcaagggtcaccaaagcctcatcaaccaaagtgagcaccaccaccaaaagggttattccaaagggtggtgttagagctgaactcaactcagcccttgtgataagcctcagcactggcctctccctcttcttgggaaggtttgtgttcttcaacttccaaagggagaacgtggcaaagcaagtgcctgagcagaa

SEQ ID NO: 29835 - DNA, 387 bp, Glycine max
  Clone ID: LIB3138-020-Q1-N1-E6
aaaatgtgtggaggtgatcaagttgaagggaatacaaacagaattgtcggaacatacggttatatggcacctgaatatgctattgatggattattctctataaaatcagatgtatttagctttggcgtattgttgttagaaattataagtggaaagaaaaacagaacagttacatatgaagagcacagtgacaatcttattggacatgcatggagattgtggaaagagggcattccagaacaattgattgatgctagtcttgtggactcatgtaatatatctgaacttgtacgttgcattcaagttggtcttttatgtctgcaacaccatcctgaagataggccaaacatgacaactgtggttgtaatgttgagcagtgaaaatagt

SEQ ID NO: 29836 - DNA, 390 bp, Glycine max
  Clone ID: LIB3138-020-Q1-N1-E7
aaataagagagaataaggtgttgttttgttttgttgtgttgtgttgtgtggatgtgaaactgggaaaatggggagagcctttgtgtatgtgattcttggaggaggcgtggctgctggctatgctgctcttgaattcgtcaagaaaggagtctctcatggtgaactctgtattatttccgatgaaccagttgctccttatgaaaggcctgcattgagcaaaggatttttgcttccagaagctgctgcccggcttccatcctttcatacctgtgttggtgcaaatgaggagaggctaactccaaaatggtataaagagcatgggattgaattagttcttggaaccggagttaaatccactgatgtgaaacgtaagacactattaacaacaac

SEQ ID NO: 29837 - DNA, 378 bp, Glycine max
  Clone ID: LIB3138-020-Q1-N1-E8
caactctcgttcaatcaccagcgattaagcgtgtctctcctaataccaaaacgctaccgttttgctcttttatttctctatggattgcaagaagcgagttcgggatgactcggacgagtcagttctggaatcgcccgaggcgaagcgactcatggacgatttactcgagttcttcgacgacgccgacgacgcaccttcctctcaggaccttgactccgtcatgaagagcctgcaggaggagatttccggcgtggcctcagattccggcgagtctcatgcgcagatcgggtaccttctggaggcctccgacgacgagctaggtctttcacccgccggaaactcgtcggcgccggaggagaagaacgtggagaccgagtt

SEQ ID NO: 29838 - DNA, 387 bp, Glycine max
  Clone ID: LIB3138-020-Q1-N1-E9
cagatctgaaggtggttggaaacaaattgaaggatatattagagatcaataacacatccctgaaaacaaggaagattgttgtggaactctgtgatattgttgctactcggggagcccgcctttcagctgctggtatttttagcatcctcaagaaaataggaagagacacagtataggacgggaagaaacagaaatcagtcgtagcactggatggaggattgtttgaacactacgctaaattcagaagttccttggagagtacactaaaggagttgttgggtgatgaggcagatgagacagttggcattgaacattctaatgatggctctggaattggagcagccctcctggcagcttctaactcccagtatttgggagtgcaggagt

SEQ ID NO: 29839 - DNA, 384 bp, Glycine max
  Clone ID: LIB3138-020-Q1-N1-F10
caaaagttgaattatgtaagcttttctcccatgaccacaaacctgcaatccaaattttgtcgtgctagtgtaagaaatgggagatggcatgttcctagtttgacaataaaatctcaggcagctgttgaaggggatgtacttgagaaagaatcagtctctatcaatgaagaaagtgattacggggtcgtttgtatgcaccatgttggaattttatgtgaaaacctagaaagatcacttgaattttatcaaaacgttctaggcctcaagattaatgaagcaaggccacatgataagcttccatacaggggtgcttggttgtgggtaggctctgagatgattcatttgatggagcttccaaaccctgaccctttaactggacgagct

SEQ ID NO: 29840 - DNA, 361 bp, Glycine max
  Clone ID: LIB3138-020-Q1-N1-F11
gtgattttgtcattggtgtcaagttgacaaccataaacaatatgtgtgcatatgggctcaatcctggtatttcaggttctcgccttttgggcaccattcctcagtccatttcacagcaaactgtttggaatcaaatggcaacagtgagaacaccattgaattttgattctagcaagcagagcttttgtcagttttctattgaccttctcggtggaggaatcttagtggacaaaactggagattggatcacacttatacaaaattctccaattagtaacttgttgagagttgctgcttggaagaaaggctgtttaatggtcaagattgtgatgtctgggaatgcatcagtcaaaaagagtga

SEQ ID NO: 29841 - DNA, 383 bp, Glycine max
  Clone ID: LIB3138-020-Q1-N1-F12
gtggaatcctgcttgcacaaaagcaatgactatgtcatttaatccaaacccgtgttctgatgcatggagtttggaatttctgaagcgtactggatttcattgcgatatcatttgtgtcactggatggactgccaccccaatgcaggatgttcaggttacaattgattggtttatttcctctcaggaatgtgttcccaggacctattgtgttttaaatccacaaaatccttttgtgttaaataggtggatgggaaaattgactttcccccagggcacttcccgaagtgttaagagaatgcctctttctatagggggaggagctggtgcaaagaatgctattctcatgaatatgccaaatgctgttctttcaatgtggagatatt

SEQ ID NO: 29842 - DNA, 394 bp, Glycine max
  Clone ID: LIB3138-020-Q1-N1-F2
ccaatttttgtgaattgtctttatcctgtaagtcaattaccttcagaagctgtcgttgtaaatgttacatgtggtagtggacgtggtggtttacccaccactgcttggattagttctgcagttaacaatcgctcctcagatatcaacaaaaggattcgcacagcacttgggaaaggtaagaaaattgtttttcttactagagttgatccttttccagtagctttactggctgttctttttggcgttaagaatgaaattctgagttctaacgccactaatcctatgctgacgcgacttcttgagaactgtaagagtctcaaatatctggttgatgagtgtccttttgcatttgtgaactagtatgtagtattttattcacttaaataaagcgcat

SEQ ID NO: 29843 - DNA, 395 bp, Glycine max
  Clone ID: LIB3138-020-Q1-N1-F3
tgggaatgcagcagtcaaaaggagtgattgggcctcattggtacaagtgtttttaacaaacagcaacagtacagagcattttgatgcatgtaagtggacaaaatcagaaccacattcctgggaattgatcttcccaatagaggtatgtggtcctaataatggttttgaaatgtggagttctgagtgggcaaatcaaacttcatggcatttgagtttccttattgacaatcccaaacagtctacagtttttgatattctcttgggaatctctcaagattttgaaattgctggtaatactcttatgccagctttttctgttccacaggctactgccagatcttctgaaaatgcggaatcctctgcatgatctggaatttgtgttttctttcgcttgt

SEQ ID NO: 29844 - DNA, 181 bp, Glycine max
  Clone ID: LIB3138-020-Q1-N1-F4
gagcaaatgaagcttattattgagctactatgtcttgtctcaaactgtcattcaatattttcttcagggtgcttggaaatattgaaaactatcaaatcctcatccttatttttattttgtttttcacatttgtccccggaaatgttatctcctgatttatttaggcttttcttgtgatatc

SEQ ID NO: 29845 - DNA, 385 bp, Glycine max
  Clone ID: LIB3138-020-Q1-N1-F5
cttttgtcagttttctattgaccttctcggtggaggaatcttagtggacaaaactggagattggatcacacttatacaaaattctccaattagtaacttattgagagttgctgcttggaagaaaggctgtttaatggtcaagattgtgatgtctgggaatgcagcagtcaaaaggagtgattgggcctcattggtacaagtgtttttaacaaacagcaacagtacagagcattttgatgcatgtaagtggacaaaatcagaaccacattcctgggaattgatcttcccaatagaggtatgtggtcctaataatggttttgaaatgtggagttctgagtgggcaaatcaaacttcatggcatttgagtttccttattgacaatccc

SEQ ID NO: 29846 - DNA, 387 bp, Glycine max
  Clone ID: LIB3138-020-Q1-N1-F7
gtgttcatgaatatgtcaagccttactttagtggttctaaattgaaaagctttctagctagtcataacatcaccattactgatggtattgacaaaactagtgcaactttgcaatttagaaagttagcagattgtgattttctcaagagaaactttaagcagatgtctaatgttttgtgggtggctcctgaggacaaggcgagtttatggtcacaacttcattatgtttcgtgtaataatctggaaatgcaagaagcttatcttgtcaatctcgtaaatgtgttacgagaattgtatttgcacagtccagaggaagctcgccaattgagaaggaaagctctctctcgtattgaatggctgcaaaaagctgatgtgcctaccatagcac

SEQ ID NO: 29847 - DNA, 393 bp, Glycine max
  Clone ID: LIB3138-020-Q1-N1-F8
atctcgctctagattggaaaaagtttcctctacaaaagcacaatttgttagtggaaaaaccttcaaatatgatataattggtgctggttcacattcttcagaagattttcctgaaaaggaagatcaagaaaaacccaaaaagattgatgccagattgagacaaagaatagatcctcaatacaatgaggttcaggctcagatggaaacaaatttgtttaaattgtctcttgatgatgttgaaactcctaaaggttccatgttggatctgaaaatttctcaatctaaaattgcacttcccaagaacacagttggaggaaccattctgcgtagtgatctattggcaaattttttgacagagggcaattttagagcaagtgttgatttgcagcgcac

SEQ ID NO: 29848 - DNA, 393 bp, Glycine max
  Clone ID: LIB3138-020-Q1-N1-F9
tccttatccagtaacacccccaaacctcatttctctgccacatgaaccctcccaaacacagaaaccatagcaaaaagaaacccagattattgattattaataatggaagccatattcgtcaccaaacccgcttcccattctctcctcttaactaaactctctccgaatcccaaacacttgttccctccacaccaacaatcctttcacaacatccgccacaaacccacgcgcttccgccccgtcatcgctgttttccaaaaccaacatcaacaagatgcagctgcagcttccaaccacaccgaagatgagtcctacggcgaagtcaaaggcatcattggaagcagagccttggaagccgccaccggaatggagtacctcatcgagtggaacgac

SEQ ID NO: 29849 - DNA, 370 bp, Glycine max
  Clone ID: LIB3138-020-Q1-N1-G10
gctaaagctccaagtatgtttttacaatccttcaaaaattttgtttctttgtgtgtgtatggtgatgataacttaattagtgttcatgaatatgtcaagccttactttagtggttctaaattgaaaagctttctagctagtcataacatcaccattactgatggtattgacaaaactagtgcaactttgcaatttagaaagttagcagattgtgattttctcaagagaaactttaagcagatgtctaatgttttgtgggtggctcctgaagacaaggcgagtttatggtcacaacttcattatgtttcgtgtaataatctggaaatgcaagaagcttatcttgtcaacctcgtaaatgtgttacgagaat

SEQ ID NO: 29850 - DNA, 385 bp, Glycine max
  Clone ID: LIB3138-020-Q1-N1-G11
cacatccatctttgccttctgcatgttggttctctgtaaacagattctgcacaagaagaaccatatcgcatatttggttgggctgaatccctgggttgaagcgtcgcacacatcacggctattctaagagtgtctcgctctctcattcatgtcccaactgtaccactgaggacaagttgcagtaactgccaccaacccttaagcacacagcggtcctggtgctttgccttctgaaggtgcgtagcccttcagacttgctcttcttagctggtggtggctctgctgtcttctagcttcttcttaactcttttatctttttactacttataagctaccgctgttttcaaactaacaaaaacagacactgtcttacttcataagatca

SEQ ID NO: 29851 - DNA, 385 bp, Glycine max
  Clone ID: LIB3138-020-Q1-N1-G12
atctccccttccaattccctttcttcactgacgctcaaacatcgtacagagtatcttactctaacgtcgatctttctttgcctcaaaagaaccgtccgttgaaaccagtctctttccattcacaaatcgagaaaaatgtccattgttagacaacgaaacgccggcgtcgccgagaagaaccagcttctccgtgaagctgaggaaaaggaactctccgagggagaaagattcatcatccctaacttcaccgtcaagcagctcctcgacgctatcccagctcactgttacaagcgctctgctttgcgatcgtcgacttacatcgttcaggattgcatcctggtcggtgctctcgtctacgccgcttaccagattgacccattcttgg

SEQ ID NO: 29852 - DNA, 393 bp, Glycine max
  Clone ID: LIB3138-020-Q1-N1-G3
gattcactgcttatcctagcagcagattttgggttctgacccaattattcattttccccaactgggtcttgtggattttttgttggggttttaaatttcgtgttgctgggtttgaaagttatttcctttcttccccgtctggattcaactcccaagtatttgctttaattggggtatttttttatttatcagaattgttaggttgctttgaggttttccaaggcttgaaagctgaaaatgacgattagtagtcttgcacctaatgcagagaggaagaaatcaaggaagagcaaggcagttgttaatgagaatgcacccttgttgccaaaaagtcatgttcaagagagtgatgctgggtttgatgatttcaatggagcttcattttctggggct

SEQ ID NO: 29853 - DNA, 110 bp, Glycine max
  Clone ID: LIB3138-020-Q1-N1-G5
ctcattgacaatcccaaacagtctacagtttctgatattctcttgcgaatctctcaagactgtgaaattgccggtaatactcttatgccagctttttctgttccacaggc

SEQ ID NO: 29854 - DNA, 351 bp, Glycine max
  Clone ID: LIB3138-020-Q1-N1-G6
ctcgagccgcaactgttggttattatgtctgcaccatgatgaccggccctacaggggatattttcttatatggaagagcatacccggctttttctggtcttgatgaagatgtctcgaagaatgcaaaattgcagggtaacacaacacttgatgcagctttaaatgctcaatttttggtccagattggtgtgttcactgcagtaccaatgataatgggttttatactcgaattaggattgctgaaggctgttttcagtttcatcacaatgcaactacaattgtgttctgtcttcttcactttctcattgggaactagaactcattattttgggcgtaccattcttcatgggg

SEQ ID NO: 29855 - DNA, 147 bp, Glycine max
  Clone ID: LIB3138-020-Q1-N1-G7
cgaaaccttcttgcactgggcaaaaagccccaaccatcttttggccaacctggcgaggcctaacggccaatcattgcctttaaggtcgggccaattaccaacattatgggctttttccgccgccttggccaagaaggtgttcttaac

SEQ ID NO: 29856 - DNA, 394 bp, Glycine max
  Clone ID: LIB3138-020-Q1-N1-G8
attgcaacaatgccggaatcacccggcggcggagacgccggcgctccaccgcagacgacggagactgagaatcgcaaaaccgaccaaaccgccgcggatcctccggtcctctcaaagaacgcgcggaagaagctggcaaagcaacagaggtttgaggcgaagaaggcggagaagaaagccgcggcgaaggagcagaagcgaagagacgtagagagaaagcgcaaggagtgggaagagagcctcgccggggtctccgaagaggagaaagcgaagctgatagagtctcgaaggaacctccgcaaggagagaatggaaaagaggtcacaggagaaagaggacaaaagagagagactcaccgtagcgagagaaaaaggccagaacgtcgtcgtcgatc

SEQ ID NO: 29857 - DNA, 389 bp, Glycine max
  Clone ID: LIB3138-020-Q1-N1-G9
aaaagttgtattgaaattttcacaagaggaatttcttacagcttggtcaactcaggtgcgtcctgcaacaactctgttggctgatgggtgtccatatttgtatgcaatggtgcatgatagttcagtgtctacaataccaggtgattttgtcattggtgtcaagttgacaaccataaacaatatgtgtgcatatgggctcaatcctggtatttcaggttctcgtcttttgggcaccattcctcagtccatttcacagcaaactgtttggaatcaaatggcaacagtgagaacaccattgaattttgattctagcaagcagagcttttgtcagttttctattgaccttctcggtggaggaatcttagtggacaaaactggagattggatca

SEQ ID NO: 29858 - DNA, 393 bp, Glycine max
  Clone ID: LIB3138-020-Q1-N1-H1
gggtgaagggacaaacacttcgccaaccttctgctgcatcagttgtgagatgcaaccccaccaccccatcatgcctcaccatcagagctggttcctatgctgatgagctcgttaagaccgcgaaaacagtggcttcaccagggaggggtattttggccatggatgagtccaatgctacctgtgggaagcgtttggcttcaattgggctagagaacactgaagctaaccgccaggcataccgtaccctccttgtgacagttccaggacttggtcagtacatctctggtgccattctctttgaggaaactctctaccaatccacaactgatggcaggaagattgtcgacgtgctcctcgagcaaaacattgttcccggtattaaagtcgacaagg

SEQ ID NO: 29859 - DNA, 383 bp, Glycine max
  Clone ID: LIB3138-020-Q1-N1-H10
gagggcaatgattcagactcagtagcactgacagccaacttcatattcgttgctcgagactcaaaaactgggaaagctgctccagtgaatcgactttcgccagaaactgctcatgaaaaacttctttttgtacaagctgaagcaagaagtaatttgagaaaaaggaaaagagaaggggaaaagagggactttgagaatggggagaaaaataggcttcaggccctattggctgaaggaagaatattctgtgacatgccagctttagctgatcgagacagcattcttctaaaggataccagccttgagaatgctttaatatgccagccacagcaaaggaatatccatggtcgaatatttggaggtttcttgatgcatcgtgcatt

SEQ ID NO: 29860 - DNA, 352 bp, Glycine max
  Clone ID: LIB3138-020-Q1-N1-H11
gcttgccaacgcaaacgtatcgagccagcctcacaagctagggttcttcaccgcgctccacccttcttccctctcccttcgtcccctccaattggaatgtgtttgtgacttcatatgctggtagttgacattttgaaattgtaactgtggtgggagcaataatatattttgacatcatcatggagatacagacttgttgcaggccgattggactcttgctagagaaagtgctttgtatgaatattctgtcgtctgattacttcaaaggagctctatcgattggaaaccgtttaacaaagtattgatgagatctacaatcaaattgatcacgtggagccatggatgactggga

SEQ ID NO: 29861 - DNA, 105 bp, Glycine max
  Clone ID: LIB3138-020-Q1-N1-H2
cgcttgaagaaagacgcaaacctatttacattggctttcgtagcctgcctgatcaagatccagaccggatgacacaaagaatcgtagatgcctaggatatcactg

SEQ ID NO: 29862 - DNA, 388 bp, Glycine max
  Clone ID: LIB3138-020-Q1-N1-H3
atttgtatgcaatggtgcatgatagttcagtgtctacaataccaggtgattttgtcattggtgtcaagttgacaaccataaacaatatgtgtgcatatgggctcaatcctggtatttcaggttctcgtcttttgggcaccattcctcagtccatttcacagcaaactgtttggaatcaaatggcaacagtgagaacaccattgaattttgattctagcaagcagagcttttgtcagttttctattgaccttctcggtggaggaatcttagtggacaaaactggagattggatcacacttatacaaaattctccaattagtaacttgttgagagttgctgcttggaaaaaaggctgtttaatggtcaagattgtgatgtctgggaatgc

SEQ ID NO: 29863 - DNA, 386 bp, Glycine max
  Clone ID: LIB3138-020-Q1-N1-H4
caacctcgtaaatgtgttacgagaattgtatttgcacagtccagaggaagctcgccaattgagaaggaaagctctctctcgtattgaatggctgcaaaaagctgatgtgcctaccatagcacagattgaagagttccattcgatgcagaggatgatgaatgctcctgattcaaatgataatattgatttactgttgagcattgatttgttgggtttacaaggagcaggtaaagcttttccaaacaaaattgtttttgatgataagcttgtgttggctaacacacaagaattctttgatggaaattttccagtggattcttggttaccaatttttgtgaattgtctttatcctgtaagtcaattaccttcagaagctgtcgttgtaa

SEQ ID NO: 29864 - DNA, 391 bp, Glycine max
  Clone ID: LIB3138-020-Q1-N1-H7
gggttgtgaaagcagagaagtgagatacactaagttatcctcataaatacactctaattaggtggcaagataagtgtctaaccttagtaacattgccacatattgtgttcattttggaattgtgccactaaaattctattcaattcatctatggctgcctcttcttatgctatgcaatcaatcctggcaaaccctttgatccgcatttccagcgggtctagggtgaaccaatttggcgttcctgctttgcacatgagaaggaatgttggcctgagagttaggtccatggctaaggaagaacaaccaagtgagcctgcaaccccagttacaccgccaccatcagtagaacccaagccacagccagtctctgctccttcaccaaaggtgagca

SEQ ID NO: 29865 - DNA, 386 bp, Glycine max
  Clone ID: LIB3138-020-Q1-N1-H8
ctcgagccgaatcggctcgagcggctcgaggttttttcatcttctcaaagcttctaaatcaatctttacatctactacatcctaaatatcaacaatggtgtttattgaatcaatgcttaaagaagtcccaccagtgactaagctcctttgtggaagctctattttaattcattttctatgttatatcgatgtgataaatcaatacgatgtctttttcaatcttggcttaattttctccaaggggcagttctggagactatacacaaatctcttccattttggagacgaaggaatgtttgttttcttccaactaatgatgctttatcgttgttctaagagacttgaagaacatacctttagaaacaagaccgccgactacatatatt

SEQ ID NO: 29866 - DNA, 269 bp, Glycine max
  Clone ID: LIB3138-023-Q1-N1-A1
atttgggaaatggccctcagcctctacaaccttagagatcctgttaatgagttcaactatggacagcttccattggaggtttaagtatgaatgattttattgttgctgcaaagatcgatcagataaagacatcagatcttgtcccaaggaaaagggtttgggcgtaatgccttaatgaacttcataaaacattttgccgcttgattttcttcaatattgaattaccactaattcgtgttatttgattaaatctattattctttactttc

SEQ ID NO: 29867 - DNA, 408 bp, Glycine max
  Clone ID: LIB3138-023-Q1-N1-A12
agatccacacaatgttacgtatcatcatgtcatgtcatgcatgcttaaaaaaaacattatgccacaggttcattgatgaaggttctatttttctacatataggaaatttcaatccatgacaaattattcttgctagggagaaactttaatgtttctatgatacaagactaggcataaaattaataattgttcttgatgacaaatggataacttttggtatgtgtttgggtcttgaattctgcagtcagtacagggagatatgccagaagccagtgatatatatgaaacagttcgttctgaagtgaggcgtgctatttctgagattcagattgaccttgaaagtgtttgtttcatgaactcttatctttttcattgtcaactggctctatttgaattgatttagcccat

SEQ ID NO: 29868 - DNA, 382 bp, Glycine max
  Clone ID: LIB3138-023-Q1-N1-A2
gacctccgttcctgcatgcttcttccccgtttctcctaccttctccgccaccctccttctctccacgccatggcgcgtgccgtcacgtgcgccactcagccctctcatttccacgcctcgctcgggaattccagctaatgccagcctgtcactgggccgtgctaagaatagcttttctgccgcacctttcacgccctcgcgcggtgccagagcgaaaagatgacgcggcggcgcgtggctggagtccgcgccgggcagaaggagtacaggaaggcgaggagaagagcgccgcccaagagcaaaggcaaggagctgcaactctgtgtcgacatttgcatcgaagaagatttgcctgacgatcctgaaattttgagcattgcag

SEQ ID NO: 29869 - DNA, 322 bp, Glycine max
  unsure at all n locations
  Clone ID: LIB3138-023-Q1-N1-A3
caatttccaaacggcatctccttgagcaaggatgcttccctctttgtcttttctgaagggatgaatggaaggtgagtctaatattcgcataagttcataacccctttctattttctctatatgtggtgaaaaagatactaatttgattggttttaagttaatgttggcagataccaattaaacaattccagaagatttttctattttctctactgaactcatgctagtgttatccagaagtgaaatttagaaactatcttttccataattttgtaattttcaaaanaaaacaaaataaaagaacaatttgttttttgacatt

SEQ ID NO: 29870 - DNA, 408 bp, Glycine max
  Clone ID: LIB3138-023-Q1-N1-A4
ctctctctgcgcatatttgccgtttccccgccacacgcgctgacacttctttgccggagagtctcaccagaatccggtgccggaaacctctctccgtccgatgctccggcgattccacttccggctctgtgggttcggagttcgatccgaaggtgtttcggaagaaccttactcggagtaagaattataaccgcaaaggatttgggtacaaggaagagaccctccaactcatgaatcgcgagtacaccagtgatatcattaagactttgaaggaaaatgggtatgagtatacatggggtactgtcacggtgaagcttgctgaagcctatggattctgttggggagttgagaaggctgttcaaattgcttatgaggccagaaaacagtttcctactgagacaatttggc

SEQ ID NO: 29871 - DNA, 409 bp, Glycine max
  Clone ID: LIB3138-023-Q1-N1-A5
gagctcttttgaacctgaatgggtctggacctggggtttcagctcccagttcatccttctttgggagcagcttgaagaaggttattggctcaagggtccccaacacaaagatttcctctggaagcttcaagattgttgctgtagaagagaagaaagagattgaagagacccagcagaccgacaaggacagatggaagggtcttgcctatgatatctcagacgaccaacaggacaagaggaaagggtttggttgactcccttttccaagctccacaggatgctggaactcactatgctgtcatgagctcctacgagtaccttagcactggacttcgccagtacttggacaacaacatggatggattttacattgctccagcttttatggacaaacttgttgttcacatta

SEQ ID NO: 29872 - DNA, 376 bp, Glycine max
  Clone ID: LIB3138-023-Q1-N1-A6
gggaaatttttcctttgatattaaatctcgctctagattggaaaaagtttcctctacaaaagcacaatttgttagtggaaaaaccttcaaatatgatataattggtgctggttcacattcttcagaagattttcctgaaaaggaagatcaagaaaaacccaaaaagattgatgccagattgagacaaagaatagatcctcaatacaatgaggttcaagctcaaatggaaacaaatttgtttaaattgtctcttgatgatgttgaaactcctaaaggttccatgttggatctgaaaatttctcaatctaaaattgcacttcccaagaacacagttggaggaaccattctgcgtagtgatctattggcaaattttttg

SEQ ID NO: 29873 - DNA, 369 bp, Glycine max
  Clone ID: LIB3138-023-Q1-N1-A7
gaaccattctgcgtagtgatctattggcaaattttttgacagagggcaattttagagcaagtgttgatttgcagcgcactcatcgtattagaggaatgattaaaatggtggccacagttggtattcctgagaatacaggtatatcattggcctgtgctatgaatagttcttttagggggcgcgccagttctgatatttacaccatctgctctcaagactgtgaattgtggaatcctgcttgcacaaaagcaatgactatgtcatttaatccaaacccgtgttctgatgcatggagtttggaatttctgaagcgtactggatttcattgcgatatcatttgtgtcactggatggactgccaacccaatgc

SEQ ID NO: 29874 - DNA, 226 bp, Glycine max
  Clone ID: LIB3138-023-Q1-N1-A8
ctcgagccgctcacacctcagcagcacagcaaacagcacatacacacatacatagcatacagtcatgcagtccacgctccgatccgccagctctgccttcctccgcaaggcctcacctattgccgcagccaggcagcccgggttcgccgctgctctcgccggtcccgcaggatcgaggcgaggataccaccagaacgttgtcgaccactttgagaagcctcgcaac

SEQ ID NO: 29875 - DNA, 416 bp, Glycine max
  Clone ID: LIB3138-023-Q1-N1-A9
ctaaggaatatactcatggagttgtgattcgatttcgatcagctgaggcgtttgagatatttataaacagcaaagagtacaaaaatgcatggcattataagttccagcctattgtccacaaatctttttctcttcacttctctgttgatccagtgggaactgaaattatgtattgaggatggtttgtggttatcaagaatagatgcggcttggtttccactttttagaaacaagaatgaaagttatttcctgctttttattttcacttacctgttcttttgccataaattattatacagtataagtgtccacttgtttttgtgacattcggaaacttgattgcctcacgattttttttttgtttaatgtaacggatacatgtaaaattgtatgtgattgcctggacctgctatctg

SEQ ID NO: 29876 - DNA, 392 bp, Glycine max
  Clone ID: LIB3138-023-Q1-N1-B1
attaaatctaagctggagagaaacatttattctggcactgaggagtttgcagatgatgtcagactgaccttctcaaatgcaatgaaatataatcctcccggtaatgatgttcatatgatggcgaaggaactcagcaaaatatttgacagaaaatggaaagactttggtaggaaatggaagtttgaagatgagcatgataaaagcgaaactgaaacaattaaggaaactgggagaaaaagtcttgatgcaatgcttccccggcataaagattccttgcccaaaaaaaacacaattattcgaacacaaaggaatgcacaagattagatcattggcaacaaaagatgccagagtggagacacctaaattatcacagattccttgcaagttgattg

SEQ ID NO: 29877 - DNA, 83 bp, Glycine max
  Clone ID: LIB3138-023-Q1-N1-B10
ctcatcaagggttgtgaaagcagagaagtgagatacactaagttatcctcataaatacactctaataggtggcaagatagtgt

SEQ ID NO: 29878 - DNA, 411 bp, Glycine max
  Clone ID: LIB3138-023-Q1-N1-B2
gaaattgataaccactaatcaatttggtccttgatgcattagtaacgaaactgaccgctatgccaaatcctcaacaactaaattggttgatatttgtcaaatttgatggataatatcaattttaagaactaaattgatattctattttaacaaataccttacttattgcatctcacattaacattgtaatcaaacgattctttaattatcacacaattcactcaagtaaacctttttgtttgtttgcaggagctgtttttgctgtcaaaataagtgagttaattagtatgtgttataatagtttgacattgttattactattgattatatgatggtatgcaccactttgtgtctttcactcttctaataattaagaatgttagtttaattattcatttagatattttagtc

SEQ ID NO: 29879 - DNA, 417 bp, Glycine max
  Clone ID: LIB3138-023-Q1-N1-B3
ctttatcttttctctatagctccgtccaaacatgactctccgcaaccaccaagagctcttggttgctcttgcaattctatattttcttgccacctcactcccttcagtttcagctcatggcccatatgcatgggatggggaggccacatataaattcactacttaccaccctggccaaaactacaaaggtttatccaatgtcaaaaactacttccaccatctcggctacatccccaatgcaccacacttcgacgacaacttcgatgacaccctcgtatctgccatcaaaacctaccaaaagaattacaacctcaacgtcaccggcgagttcgacatcaacactcttaaacatatcatgacaccccggtgtggcgtccccgtcataataatcaacacaaacaaaaccacatcgtttgg

SEQ ID NO: 29880 - DNA, 402 bp, Glycine max
  Clone ID: LIB3138-023-Q1-N1-B4
attatgatggcaaatcactcgtgaatgctaaaattgcttctgaaaatgaactttgggtggagtcaattgattatggtagtggtttagatcatcaactgcaactgccggcacttcccgtgtctgttccttctgagcagcaaatcaattcagggatgcctgttggaggttataatgataataatatagtaatacgatatccaacccagtcattgattccaaactccagctcccggactcagttcgatagctcattatatgtgtctaatgaccaattaattagcaatgctcaccaaacccaaagcactagtaatgatcgtggcccaattgggttagctcttggtcctcctcaatcatcgacatcaaggttccatgctggtagctcttctattcagccatctacta

SEQ ID NO: 29881 - DNA, 414 bp, Glycine max
  Clone ID: LIB3138-023-Q1-N1-B5
tgataaatgaagcttccacttttgctagtgaaacagtggagcccaacaatgatctattacttccaccgtatcctagccaccctccatactctgtgtctatggacaaggaatatctctcacagatcccttctgtgaacaagtctggtcgcaatgggttaatcacgcttgacccaatgattgaggtgagcaatagtctcagtgaaaaagagcaaaatcatgttgaaaatggggctaaaaattcgagaaaaggattgggattttttataacttctgcagccaaaacaatgctcacggtagttggcgtggtatcaatattaagtttgtctggttttgtgcctaagttaggcactcgtttcaatgtgcaaggctggtgtcacagagtagaaaatgagagatcgacaactaaaaatgggg

SEQ ID NO: 29882 - DNA, 336 bp, Glycine max
  Clone ID: LIB3138-023-Q1-N1-B6
gacgccatgcgcacgggtttacgttcgtgcatgcgattggttcgaaccgaagtctacggtgtgttgtttgtgatcgttcgttcagtatgtttttttttttcgaaccgtttgtcgttgttgctgttgatgattttgttagtttgatttgtctggcggcggtggcaaaatgcggcaggtaggtgggtgcggaaatcggtcgaagctcgatgtggaatgaaaatgatgacgaaccaatcttcttcttccttccttctttcttttgcttgtctctctatcggctcttctcatttggtcgaaaaaaaatacatgtgcgtgtgtgttgttctgtgtgtgatg

SEQ ID NO: 29883 - DNA, 361 bp, Glycine max
  Clone ID: LIB3138-023-Q1-N1-B7
caatatttgcccttagcagtaacaaaattgccgtggtcaagtattctctgttgggttctattctttcaaaccttcttctggttcttgggacctctctattatgtggtggcattgcaaacgttggagtggaacaaaaatatgatagaagacaagcagatgtgaactcacttatgctgttgttgggattgttgtgctacttgcttccaatgctgttcaaatacagaggtgcctcagctgctctcactgtagacccttcactacacttgtcaagagcttctagcattgtgatgttgattgcatatgttgtctacattgtctttcaactgtggacacacagggagttatttgaagaagaagatga

SEQ ID NO: 29884 - DNA, 371 bp, Glycine max
  Clone ID: LIB3138-023-Q1-N1-B8
ggccagtaccatgttttggtgatagttgcggacggccaggtaacaagaagtattgacactgagcatgggagactaagtccacaggagcagagcactgtggatgccattgttgaggccagtaaatttcctctttcaatcatattggttggtgttggagatggtccttgggacatgatgaaggagtttgatgacaatatcccagcccgggtctttgataattttcagtttgtgaatttcacagaaattatgtcaaagaatattcctccttctcgaaaagaggcagcatttgcgcttgcagcactgatggaaattccttctcagtataaggcaacaatagagcttaatctcttgggtggtcgaaatgcaaatgc

SEQ ID NO: 29885 - DNA, 409 bp, Glycine max
  Clone ID: LIB3138-023-Q1-N1-B9
ggagtttggaatttctgaagcgtactggatttcattgcgatatcatttgtgtcactggatggactgccaccccaatgcaggatgttcaggttacaattgattggtttatttcctctcaggaatgtgttcccaggacctattgtgttttaaatccacaaaatccttttgtgttaaataggtggatgggaaaattgactttcccccagggcacttcccgaagtgttaagagaatgcctctttctatagggggaggagctggtgcaaagaatgctattctcatgaatatgccaaatgctgttctttcaatgtggagatattttgttggagatctcgtctttgaagtttctaagatgacttctccctacattaaatgtacagtctctttcttcatagcatttggaaatttggc

SEQ ID NO: 29886 - DNA, 406 bp, Glycine max
  Clone ID: LIB3138-023-Q1-N1-C1
aaaaaatacaaaaacaactttgcaatttcgtaggagatgctcaggagcagcacgctaacacagagtgttacagtcacctgtgttcgtcacagtcacagacaatggttccaatcaattcccgtaaattatagattctttgacgctgctcggaactctctatcatcacccaactccgcgatcttcaaatggaaaagaaaggccaattataaccgtcatagttctggaatggggaccttcaccactcgcgcgttggcgcagccgcttcagaacgccgacgaactcatcgactccgtcgagacatttatcttcgattgtgacggagttatatggaaaggtgataaattaatagacggagtgccttgaacgcttgacatgcttcggtcaaagggcaaaagattagtttttg

SEQ ID NO: 29887 - DNA, 407 bp, Glycine max
  Clone ID: LIB3138-023-Q1-N1-C10
atcagaaccacattcctgggaattgatcttcccaatagaggtatgtggtcctaataatggttttgaaatgtggagttctgagtgggcaaatcaaacttcatggcatttgagtttccttattgacaatcccaaacagtctacagtttttgatattctcttgggaatctctcaagattttgaaattgctggtaatactcttatgccagctttttctgttccacaggctactgccagatcttctgaaaatgcggaatcctctgcatgatctggaatttgtgttttctttcgcttgttcgtttggttaattcaataaaagaaattaggcatgaccctcttgttgagtatgctctgcctatttgaaaatttccacacctcttttaattgtcgtaatgatgtgtgaagtgtgt

SEQ ID NO: 29888 - DNA, 401 bp, Glycine max
  Clone ID: LIB3138-023-Q1-N1-C11
ccaccaataagctccataccttctaattctctactctctctcacttctctctatcacatttttcttacaagatggcagcatcatcagcatgccttgtagggaatggtttatctacacggggtaatagaataactcttaagaaggacttcaatggaagaagatatctctactcatcttggagattttcattattgaacaacaataaggcatcaaaagcattttccataaaggcatctttggagcaaaggcaagaagaagggagaagggggtttctgaaacttgtgcttggaaatctgggagttggtttgcctgcactattgggaagtggcaaagcttatgctgatgaacaaggggtttcatcctccagaatgtcttactccaggtttctggagtatttggac

SEQ ID NO: 29889 - DNA, 407 bp, Glycine max
  Clone ID: LIB3138-023-Q1-N1-C12
cacaacttcattatgtttcgtgtaataatctggaaatgcaagaagcttatcttgtcaacctcgtaaatgtgttacgagaattgtatttgcacagtccagaggaagctcgccaattgagaaggaaagctctctctcgtattgaatggctgcaaaaagctgatgtgcctaccatagcacagattgaagagttccattcgatgcagaggatgatgaatgctcctgattcaaatgataatattgatttactgttgagcattgatttgttgggtttacaaggagcaggtaaagcttttccaaacaaaattgtttttgatgataagcttgtgttggctaacacacaagaattctttgatggaaattttccagtggattcttggttaccaatttttgtgaattgtctttatcct

SEQ ID NO: 29890 - DNA, 405 bp, Glycine max
  Clone ID: LIB3138-023-Q1-N1-C2
attggtgtcaagttgacaaccataaacaatatgtgtgcatatgggctcaatcctggtatttcaggttctcgtcttttgggcaccattcctcagtccatttcacagcaaactgtttggaatcaaatggcaacagtgagaacaccattgaattttgattctagcaagcagagcttttgtcagttttctattgaccttctcggtggaggaatcttagtggacaaaactggagattggatcacacttatacaaaattctccaattagtaacttgttgagagttgctgcttggaagaaaggctgtttaatggtcaagattgtgatgtctgggaatgcagcagtcaaaaagagtgattgggcctcattggtacaagtgtttttaacaaacagcaacagtacagagcatttt

SEQ ID NO: 29891 - DNA, 320 bp, Glycine max
  Clone ID: LIB3138-023-Q1-N1-C3
attattattattacattgggttttggtgggaatcgctcgccatgaatggcgaggggagtgaagcaatgcaagtggagatggagattgagaaggagaggttggtgtacatgtggggttaccttcccggagctctgccgcagaggacgccactgttgacgccggttctcgttagggttccgccctctggttactcttggaaggatgtttgcggtggtggttgtggattcgccatggctatctctgagcctggaaagctcataacatggggttcaacagatgatttaggccaaagctatgttacatctggcaaacatggggaa

SEQ ID NO: 29892 - DNA, 394 bp, Glycine max
  Clone ID: LIB3138-023-Q1-N1-C7
caattctgatgctgcaagaatagatgctgaagcctttagtcttaaaaaaaagctcactgagataacaacttcacaggggcctgtaagcaatgttgattataaagcggctgaggaaacaatagcaatgctagaggcttttaaaattgcccttgctcagattagaatctgttctagactggaagccttattgctgaagaaaaaaaattcaagcaatggagagtctcccgaaattcatgctcaaaaggttgataagctgaaagtattaacggagtctcttgccaactctgctgcaaaagctgaaaagcgtattttagataacagactacaaaaagaggaagcattaaaggttcgagtgactaaagatggtgaggctagtaaaaaggagaaggaactg

SEQ ID NO: 29893 - DNA, 414 bp, Glycine max
  Clone ID: LIB3138-023-Q1-N1-C8
ttcctttgatattaaatctcgctctagattggaaaaagtttcctctacaaaagcacaatttgttagtggaaaaaccttcaaatatgatataattggtgctggttcacattcttcagaagattttcctgaaaaggaagatcaagaaaaacccaaaaagattgatgccagattgagacaaagaatagatcctcaatacaatgaggttcaggctcagatggaaacaaatttgtttaaattgtctcttgatgatgttgaaactcctaaaggttccatgttggatctgaaaatttctcaatctaaaattgcacttcccaagaacacagttggaggaaccattctgcgtagtgatctattggcaaattttttgacagagggcaattttagagcaagtgttgatttgcagcgcactcatcg

SEQ ID NO: 29894 - DNA, 413 bp, Glycine max
  Clone ID: LIB3138-023-Q1-N1-C9
ttagcattgttcctcaacacacacacaaaaaaaactcccttgtatattgttgcagctctagctagggtttcgcaagtgcgatcgaagaagaacaacgacgatggcgatggctgcagctctgcgtcgcgaaggaaggcgtttgacccaaccaatcaacgccctccactcttctctcaattcctccctcatctctcaagaccaagcccctcatggcgcgcgctccatttccactcaagttgtgaggaaccgaatgaagagtgtgaggaatatccagaagatcaccaaagccatgaagatggttgccgcgtccaagctgcgggccgttcagaccagaactgaaaattcccgcggcctctggcaaccgttcaccgctcttctcggtgacgatcccagtgttgacgttaagaaaaacg

SEQ ID NO: 29895 - DNA, 401 bp, Glycine max
  Clone ID: LIB3138-023-Q1-N1-D1
ttaagatcaccaaagtacttgtgagtgtatacccaacacaaactaagatcaacatggactactacacccgcgtttcagaagttgagagggaacctatcatggagtattccacaccacgaccaatgatgggcaactaccaccaccctaatgctcaccgtgtcctcaacgagaagattgtttatgaggaggatgtgattggaggatcccgccacaaccacatgcatcaccaccaccctgagactcatgagagagtcaaggtggtggagtatgaacaagttcctgagaggcgcgttgtctatgaagagaaaagtgcttatgacaacgatcgttactactctccaaggtattgaaattggacaaatggaagaacacctataacgtgttatcatgtggctttttat

SEQ ID NO: 29896 - DNA, 410 bp, Glycine max
  Clone ID: LIB3138-023-Q1-N1-D10
tggtgatgataacttaattagtgttcatgaatatgtcaagccttactttagtggttctaaattgaaaagctttctagctagtcataacatcaccattactgatggtattgacaaaactagtgcaactttgcaatttagaaagttagcagattgtgattttctcaagagaaactttaagcagatgtctaatgttttgtgggtggctcctgaggacaaggcgagtttatggtcacaacttcattatgtttcgtgtaataatctggaaatgcaagaagcttatcttgtcaatctcgtaaatgtgttacgagaattgtatttgcacagtccagaggaagctcgccaattgagaaggaaagctctctctcgtattgaatggctgcaaaaagctgatgtgcctaccatagcacaga

SEQ ID NO: 29897 - DNA, 408 bp, Glycine max
  Clone ID: LIB3138-023-Q1-N1-D11
gatagttcagtgtctacaataccaggtgattttgtcattggtgtcaagttgacaaccataaacaatatgtgtgcatatgggctcaatcctggtatttcaggttctcgtcttttgggcaccattcctcagtccatttcacagcaaactgtttggaatcaaatggcaacagtgagaacaccattgaattttgattctagcaagcagagcttttgtcagttttctattgaccttctcggtggaggaatcttagtggacaaaactggagattggatcacacttatacaaaattctccaattagtaacttgttgagagttgctgcttggaagaaaggctgtttaatggtcaagattgtgatgtctgggaatgcagcagtcaaaaggagtgattgggcctcattggtacaagtg

SEQ ID NO: 29898 - DNA, 263 bp, Glycine max
  Clone ID: LIB3138-023-Q1-N1-D12
ctgagcatgatgggaagtgcaagtgtggcactaactgcacttgcacggactgcacctgtggccattaaggaatatgtatgaaaatgtaattgccatgtgtttggcaatacaaatatccaaataatgtaatcttcgtatgaataaatgtgtgtgctgttatcctacttcaggtctgtgtagtcatgcagtctgaatcatttcaagttcctgtcttagttaatataacagccatggttgtggcattctatggtttattagactta

SEQ ID NO: 29899 - DNA, 386 bp, Glycine max
  Clone ID: LIB3138-023-Q1-N1-D2
cctgaggacaaggcgagtttatggtcacaacttcattatgtttcgtgtaataatctggaaatgcaagaagcttatcttgtcaatctcgtaaatgtgttacgagaattgtatttgcacagtccagaggaagctcgccaattgagaaggaaagctctctctcgtattgaatggctgcaaaaagctgatgtgcctaccatagcacagattgaagagttccattcaatgcagaggatgatgaatgctcctgattcaaatgataatattgatttactgttgagcattgatttgttgggtttacaaggagcaagtaaagcttttccaaacaaaattgtttttgatgataagcttgtgttggctaacacacaagaattctttgatggaaattt

SEQ ID NO: 29900 - DNA, 410 bp, Glycine max
  Clone ID: LIB3138-023-Q1-N1-D3
aacacaaagcacaaagcaaagctcatccttgagttaaaaaatggcagcagcttcttccatggctctctcatccccatccttggctggcaaggccgtgaagctgggcccatcagccccagaagtgggaagggtgagcatgaggaagaccgtcaccaagcaggtctcctcaggaagcccatggtacggcccagaccgagtcaagtacttgggcccattctctggcgagcccccgtcctacctaaccggtgagttcccaggcgactacggctgggacactgctgggctttccgcagacccagaaaccttcgccaagaaccgtgaactcgaagtgatccactccaggtgggccatgctcggagccttgggctgcgtcttcccggagttgctgtcccgcaacggggtgaagttcg

SEQ ID NO: 29901 - DNA, 414 bp, Glycine max
  Clone ID: LIB3138-023-Q1-N1-D7
cggctcgagggatgaacaagtcaagggttgtgaaaaactgcaagggtttaccactttccatcaaagtgattgggagctcactctgtaatcagccttttgagttgtgaccaaagacagtggaggaattgtcccaatgtctacttgattctaacttcagataattctgtcaaggagtgcttcagggacctagggttatttcctgaagaccaaagaattccttttacttctcttattgatatgtgggcagagttgtatggactagatgatgatggcatagaggcaatgtccatcatcaacaaattagactccatgaatctggctaatgtctcggtagaaaggtacaattacagcatatattttcttcacttaatcctaatatatacaacaaataacatgaatttatgctctataaaa

SEQ ID NO: 29902 - DNA, 416 bp, Glycine max
  Clone ID: LIB3138-023-Q1-N1-D8
cttgaatatacacacctcgtcaagcacaacttcaaccacaatgccagaactcgtaagaaagcaggtcggcgacgtaggcttcggcctcatgggcctgacatggcgccagagcccaccgcccaaggagcagagcttcgagactatgcgcaccgcgctgtcccacggagctaacaactggaacggcggcgagctgtatggacctcctgacgccaactccctgcagcttctcagtgcgtactttgaaaagtaccctgaggatgcggagaaggttgtgctttctatcaagggcggactactgccgggccagatgaagcctgatggcagtcagaagaacgtgcagcgcagtattgatgagtgtctgaagtggctcgatggcaagaagagcctcgacctcttcgaatgcgcacgcgttgatc

SEQ ID NO: 29903 - DNA, 416 bp, Glycine max
  Clone ID: LIB3138-023-Q1-N1-D9
caaaggttgctgtaggagataagattgcagtagtgctaagtgctaacacctgcagtgaacaatggcctctgcatcagcatctctgctcaagtcttcacttgttcttgacaagtctgagtgggtgaagggacaaacccttcgccaaccttctgcatcagttgtgagatgcaaccccaccaccccatcaggcctcaccatcagagctggttcctatgctgatgagctcgttaagaccgcgaaaacagtggcttcaccagggaggggtattttggccatggatgagtccaatgctacctgtgggaagcgtttggcttcaattgggctagagaacactgaagctaaccgccaggcataccgtaccctcctcgtgacagttccaggccttggtcagtacatctctggtgccattctctttg

SEQ ID NO: 29904 - DNA, 409 bp, Glycine max
  Clone ID: LIB3138-023-Q1-N1-E1
cacaacttcattatgtttcgtgtaataatctggaaatgcaagaagcttatcttgtcaatctcgtaaatgtgttacgagaattgtatttgcacagtccagaggaagctcgccaattgagaaggaaagctctctctcgtattgaatggctgcaaaaagctgatgtgcctaccatagcacagattgaagagttccattcgatgcagaggatgatgaatgctcctgattcaaatgataatattgatttactgttgagcattgatttgttgggtttacaaggagcaggtaaagcttttccaaacaaaattgtttttgatgataagcttgtgttggctaacacacaagaattctttgatggaaattttccagtggattcttggttaccaatttttgtgaattgtctttatcctgt

SEQ ID NO: 29905 - DNA, 343 bp, Glycine max
  Clone ID: LIB3138-023-Q1-N1-E10
agaaacagccacaaaaataaagtgtctgagtcattacattggcaaacagattatccacctccttccttatatcatcagatagcttctccaacacactcagctttgtctgcaattccttggctgcatcatgtctcacttcatcagaagcaacaagaaggttagaaacagcattgtttacctctttgatctcactgaagattggcctttgcttcatcaactgttcaccaactttggtcaagatcatgatgactaaaaaagggtttttttctctggcaaggagtggatggttcatgaggctgtaaaggaaatgaggagttttggattttgggtctgtggggatatg

SEQ ID NO: 29906 - DNA, 413 bp, Glycine max
  Clone ID: LIB3138-023-Q1-N1-E11
aatatgtgtgcatatgggctcaatcctggtatttcaggttctcgtcttttgggcaccattcctcagtccatttcacagcaaactgtttggaatcaaatggcaacagtgagaacaccattgaattttgattctagcaagcagagcttttgtcagttttctattgaccttctcggtggaggaatcttagtggacaaaactggagattggatcacacttatacaaaattctccaattagtaacttgttgagagttgctgcttggaagaaaggctgtttaatggtcaagattgtgatgtctgggaatgcagcagtcaaaaggagtgattgggcctcattggtacaagtgtttttaacaaacagcaacagtacagagcattttgatgcatgtaagtggacaaaatcagaaccacattc

SEQ ID NO: 29907 - DNA, 369 bp, Glycine max
  Clone ID: LIB3138-023-Q1-N1-E12
acaatattcaaaagcagtaaccacagaaaatggctagtgtcttttctgcatgttcaggttctgctgttctttttcacagcagaaactccttctcctcaaaagggtcttttcttcacctaaaaaggcctctctcaaccaactgcgtatcttctttggggactgaggtatcagtgtcaccacacagttgacactttctggcagtggctcaaggaagagggagttgtctatggcaagaccccagcgaagcctggtgtactgccacaaggcctacgactgtttgcactcaaggacatttctaggaatgaggatgtcttgcacgcccacaagatgctgtggattaaccctgatgctgtggcagcttcagaaatt

SEQ ID NO: 29908 - DNA, 350 bp, Glycine max
  Clone ID: LIB3138-023-Q1-N1-E2
ttaccaagcaagttatgagcaagatggcagaaatgataaacagtctttgtggtggtgatgaaaaattgatgcgtgaaaggacgcacctgctgttggcttgttgttcaaggatggcaatttgtaagaaagatgtttggagagttgaatgtggaatcccttctggatttccgctcacagttatttgcaatagcatttttaatgagatgctcattagatatagctatgaaaaattactgcgccaggctaaagctccaagtatgtttttacaatccttcaaaaattttgtttctttgtgtgtgtatggtgatgataacttaattagtgttcatgaatatgtcaagccttacttt

SEQ ID NO: 29909 - DNA, 400 bp, Glycine max
  Clone ID: LIB3138-023-Q1-N1-E3
caaagttctaatggaccagtttcatcatgtttcaactgcttttctggaacttgggaagaactaccaggaagcaattgaggacattaccaaaagaatgggtgctggaatggccaaatttatttgcaaggaggtagaaacaattgatgactatgatgaatattgtcactatgtggcgggacttgttgggctgggtttatcaaagcttttccatgcgtctggttcagaagatctggctccagatgacctttccaattcaatgggcttgtttctacagaaaacaaacattattcgagattatctggaagacatcaatgagatccccaagtcacgcatgttttggccacgacagatttggagtaaatatgttaacaaacttgaagatttgaaatatgaggagaac

SEQ ID NO: 29910 - DNA, 415 bp, Glycine max
  Clone ID: LIB3138-023-Q1-N1-E6
ggtgcagtttggagagattcaggaaaaagttgtattgaaattttcacaagaggaatttcttacagcttggtcaactcaggtgcgtcctgcaacaactctgttggctgatgggtgtccatatttgtatgcaatggtgcatgatagttcagtgtctacaataccaggtgattttgtcattggtgtcaagttgacaaccataaacaatatgtgtgcatatgggctcaatcctggtatttcaggttctcgtcttttgggcaccattcctcagtccatttcacagcaaactgtttggaatcaaatggcaacagtgagaacaccattgaattttgattctagcaagcagagcttttgtcagttttctattgaccttctcggtggaggaatcttagtggacaaaactggagattggatcaca

SEQ ID NO: 29911 - DNA, 414 bp, Glycine max
  Clone ID: LIB3138-023-Q1-N1-E8
aacttcattatgtttcgtgtaataatctggaaatgcaagaagcttatcttgtcaacctcgtaaatgtgttacgagaattgtatttgcacagtccagaggaagctcgccaattgagaaggaaagctctctctcgtattgaatggctgcaaaaagctgatgtgcctaccatagcacagattgaagagttccattcgatgcagaggatgatgaatgctcctgattcaaatgataatattgatttactgttgagcattgatttgttgggtttacaaggagcaggtaaagcttttccaaacaaaattgttttttgatgataagcttgtgttggctaacacacaagaattctttgatggaaattttccagtggattcttggttaccaatttttgtgaattgtctttatcctgtaagtcaa

SEQ ID NO: 29912 - DNA, 397 bp, Glycine max
  Clone ID: LIB3138-023-Q1-N1-F1
ccagtatgcttggacacacatgattctaattgttgtatttggccagtcctccttcaccgtggcaagcatttttgaagggattttctggtttcttctcccagcaacacttattgtcattaatgatattgctgcttatatctttggtttcttctttggaagaacccctttgatcaagttatctccaaagaaaacttgggagggttttataggggcatctgttaccaccatcatctctgcatttatgcttgctaacatcatgggttgctctcagtggctaacgtgtccaaggaaagatttgtcaactggttggcttcactgtgatcctggtccacttgttaagccagaatcttatcccttaccttgatgtatttctcactggttttcttggaaagagata

SEQ ID NO: 29913 - DNA, 411 bp, Glycine max
  Clone ID: LIB3138-023-Q1-N1-F10
cgggggtggaggcggaggtggttcgggtgatagggcagtgccggcgcgcgctgaagtttgctaggttcatgagcaggttcgggaagagttaccgaagcgaggaagagatgagggagaggtacgagatattctcgcaaaacctcaggttcatccgctcccacaacaagaaccgcttgccctacactctctctgttaatcattttgctgattggacttgggaggagttcaaaagacacagactaggcgctgcccaaaattgctctgccactcttaacggcaaccacaagctcactgatgctgttcttcctcccacgaaagactggagggaaagaaggaatagtgagtgatgttaaagatcaaggcagctgcggatcatgctggacattcagcacaactggggctttagaagca

SEQ ID NO: 29914 - DNA, 412 bp, Glycine max
  Clone ID: LIB3138-023-Q1-N1-F11
caattttgaggcttttccccacaagctggtgcagtttggagagattcaggaaaaagttgtattgaaattttcacaagaggaatttcttacagcttggtcaactcaggtgcgtcctgcaacaactctgttggctgatgggtgtccatatttgtatgcaatggtgcatgatagttcagtgtctacaataccaggtgattttgtcattggtgtcaagttgacaaccataaacaatatgtgtgcatatgggctcaatcctggtatttcaggttctcgtcttttgggcaccattcctcagtccatttcacagcaaactgtttggaatcaaatggcaacagtgagaacaccattgaattttgattctagcaagcagagcttttgtcagttttctattgaccttctcggtggaggaatc

SEQ ID NO: 29915 - DNA, 411 bp, Glycine max
  Clone ID: LIB3138-023-Q1-N1-F12
ttgcaattgaagttgaagtcttgcccttctctcttcaactccaaacacaagacatcatcatccatggctgcctccgtctccactgtcggagctgtcaacagagctcttttgaacctgaatgggtctggacctggggtttcagctcccagttcatccttctttgggagcagcttgaagaaggttattggctcaagggtccccaacacaaagatttcctctggaagcttcaagattgttgctgtagaagagaagaaagagattgaagagacccagcagaccgacaaggacagatggaagggtcttgcctatgatatctcagacgaccaacaggacatcacaagaggaaagggtttggttgactcccttttccaagctccacaggatgctggaactcactatgctgtcatgagc

SEQ ID NO: 29916 - DNA, 412 bp, Glycine max
  Clone ID: LIB3138-023-Q1-N1-F2
aaaaaaaaaaaaatactccgaaagaagagagagaaagagaaaagagaaaagggaaacaaaagaaaagagagagagaacaaaggaaaaaaaagaaaactgataactgagataacaatactgtagatatagagagatagttccaagctccaattcccagaaaaaaattaaaactttgcttcttcactttttctcttaccccttctgatctcatgcaatttcccctcatggatccctttgatttgattcgcaaagggtttggctgaagctatctggaatatttctgttacagtttttaaggtctatctatgttttagtcatttttgtccatattcttgtcaataatgagcttatccaagaaaggttcccaaacagacgcaaaattgagctccttaaacaaagcaacctatttgaa

SEQ ID NO: 29917 - DNA, 411 bp, Glycine max
  Clone ID: LIB3138-023-Q1-N1-F3
ggccaccgtcacttctgcagcagtttctattccctcattcactggcctcaaggcaagcgcaggcaaagtgagtgccgccgcagttaaagtctcagctccccaagccacaaggttctgcggcatcaaggcttccctcaaagacgttggagtcgctgttgtggccactgctgcgagcgcagttctagctagcaacgccatggccattgaagtgttactgggcactgatgacgggtctctggttttctctcccaactctttctccgtggcccctggggaaaagatcgtgttcaagaacaacgcaagtttcccccacaacgttgtgttcgacgaggacgagattcctagcggcgtggatgcagggaaaatctccatgagcgaagaagaccttctcaatgcggctggtgagactta

SEQ ID NO: 29918 - DNA, 412 bp, Glycine max
  Clone ID: LIB3138-023-Q1-N1-F5
ggaagctcgccaattgagaaggaaagctctctctcgtattgaatggctgcaaaaagctgatgtgcctaccatagcacagattgaagagttccattcgatgcagaggatgatgaatgctcctgattcaaatgataatattgatttactgttgagcattgatttgttgggtttacaaggagcaggtaaagcttttccaaacaaaattgtttttgatgataagcttgtgttggctaacacacaagaattctttgatggaaattttccagtggattcttggttaccaatttttgtgaattgtctttatcctgtaagtcaattaccttcagaagctgtcgttgtaaatgttacatgtggtagtggacgtggtggtttacccaccactgcttggattagttctgcagttaacaatcgc

SEQ ID NO: 29919 - DNA, 409 bp, Glycine max
  Clone ID: LIB3138-023-Q1-N1-F6
tgaaaagttccattcgatgcaaaggatgatgaatgctcctgattcaaatgataatattgatttactgttgagcattgatttgttgggtttacaaggagcaggtaaagcttttccaaacaaaattgtttttgatgataagcttgtgttggctaacacacaagaattctttgatggaaattttccagtggattcttggttaccaatttttgtgaattgtctttatcctgtaagtcaattaccttcagaagctgtcgttgtaaatgttacatgtggtagtggacgtggtggtttacccaccactgcttggattagttctgcagttaacaatcgctcctcagatatcaacaaaaagattcgcacagcacttgggaaaggtaagaaaattgtttttcttactagagttgatcct

SEQ ID NO: 29920 - DNA, 410 bp, Glycine max
  Clone ID: LIB3138-023-Q1-N1-F8
gcaaaaaaggcttttttcatgattttcccaaaggctgttctttcaaggtggaaatattttgttggagatctcgtctttgaagtttctaagatgacttctccctacattaaatgtacagtctctttcttcatagcatttggaaatttggctgatgataccatcaattttgaggcttttccccacaagctggtgcagtttggagagattcaggaaaaagttgtattgaaattttcacaagaggaatttcttacagcttggtcaactcaggtgcgtcctgcaacaactctgttggctgatgggtgtccatatttgtatgcaatggtgcatgatagttcagtgtctacaataccaggtgattttgtcattggtgtcaagttgacaaccataaacaatatgtgtgcatatgggct

SEQ ID NO: 29921 - DNA, 411 bp, Glycine max
  Clone ID: LIB3138-023-Q1-N1-G1
aagaaatatcaaagagtgaatggaaccatgcagagattgtatgtaacctgtcgtgggacgaatgcggaatccatgtattgaaagagcaaagtagcatggaggatattcgattcactgatccttttaggaaaagaaaaaattgttgttcggaggaggttgctgttggggaaaaaaagcaaagattagtaggcagtgaagttgttgagacaaaatttgtagagcagcaacaacatatgggttttttgtcacacgtgtggaactggacactatcacttgtaatgtctcgcagatccggcaatcaataattggatgaaagagagaattcaagttcagcagtggtatggtatcaacgctgacaaaagacaacagtgtaagtagccctactgattcttggtgtctagtcaagtttgg

SEQ ID NO: 29922 - DNA, 404 bp, Glycine max
  Clone ID: LIB3138-023-Q1-N1-G10
caatggactcgtaagagtagtaactaagaaaataaaggtttctaatttatttcgttcaattctccggcggcaccgcaaccgattccgccaccgcatatggcaaaaggtcgaaaactaacgaccagccggagcgagcgcttcttgggaacctatgcttacagccaaggctccgccgccgtgaacccgtcggagcttcgggaagaggatgtatggggcgccggagatgacgccggcgaacgcgagtgggatccacacttcgccgccatgagcaacggcggcggaagccggcgccggattccgcgtgacacggatgtgcaccggcgcgtgggtgggctgtctctggcttttgaagctccggcgagtggcgcgtcgccgaggatcgtgcaccagtttcgcgcgcgtga

SEQ ID NO: 29923 - DNA, 414 bp, Glycine max
  Clone ID: LIB3138-023-Q1-N1-G11
ctcgagccgaatcggctcgaggcttgtgttggctaacacacaagaattctttgatggaaattttccagtggattcttggttaccaatttttgtgaattgtctttatcctgtaagtcaattaccttcagaagctgtcgttgtaaatgttacatgtggtagtggacgtggtggtttacccaccactgcttggattagttctgcagttaacaatcgctcctcagatatcaacaaaaggattcgcacagcacttgggaaaggtaagaaaattgtttttcttactagagttgatccttttccagtagctttactggctgttctttttggcgttaagaatgaaattctgagttctaacgccactaatcctatgctgacgcgacttcttgagaactgtaagagtctcaaatatctggttga

SEQ ID NO: 29924 - DNA, 415 bp, Glycine max
  Clone ID: LIB3138-023-Q1-N1-G12
atcagaaccacattcctgggaattgatcttcccaatagaggtatgtggtcctaataatggttttgaaatgtggagttctgagtgggcaaatcaaacttcatggcatttgagtttccttattgacaatcccaaacagtctacagtttttgatattctcttgggaatctctcaagattttgaaattgctggtaatactcttatgccagctttttctgttccacaggctactgccagatcttctgaaaatgcggaatcctctgcatgatctggaatttgtgttttctttcgcttgttcgtttgtttaattcaataaaggaaattaggcatcaccctcttgttgagtatgctctgcctatttgaaaatttccacacctcttttaattgtcgtaatgatgtgtgaagtgtgtgttatttt

SEQ ID NO: 29925 - DNA, 334 bp, Glycine max
  Clone ID: LIB3138-023-Q1-N1-G3
gcaaactgtttggaatcaaatggcaacagtgagaacaccattgaattttgattctagcaagcagagcttttgtcagttttctattgaccttctcggtggaggaatcttagtggacaaaactggagattggatcacacttatacaaaattctccaattagtaacttattgagagttgctgcttggaagaaaggctgtttaatggtcaagattgtgatgtctgggaatgcagcagtcaaaaggagtgattgggcctcattggtacaagtgtttttaacaaacagcaacagtacagagcattttgatgcatgtaagtggacaaaatcaagaccacat

SEQ ID NO: 29926 - DNA, 406 bp, Glycine max
  Clone ID: LIB3138-023-Q1-N1-G4
ctcaagccggtttctttcttccttcaatgtaaaaccagggaagattctatttcatttccttgccaacttaaagagagagagagagagagatggcaattgggttcatggaggtgcagcttgtgaaagcaaagggtcttcaagaaacagatatctttgctcatatggacccgtatgtactgttacaatacaaaggtcaagagcgcaagagcagtgtaattcatgagggcggcagaaatcccatatggaatgagaaatttgtattcagagtggaataccctggatcaggtgatcaatacaagctcaaccttagaatcatggacaaggatgtattttctgcagatgactttgtcggccaggctacaatctatgtgaaggatttattggcggaaggagcagagaacggatc

SEQ ID NO: 29927 - DNA, 406 bp, Glycine max
  Clone ID: LIB3138-023-Q1-N1-G8
cagcaccagtccaaagcattttgatgcatgtaagtggacaaaatcagaaccacattcctgggaattgatcttcccaatagaggtatgtggtcctaataatggttttgaaatgtggagttctgagtgggcaaatcaaacttcatggcatttgagtttccttattgacaatcccaaacagtctacagtttttgatattctcttgggaatctctcaagattttgaaattgctggtaatactcttatgccagctttttctgttccacaggctactgccagatcttctgaaaatgcggaatcctctgcatgatctggaatttgtgttttctttcgcttgttcgtttgtttaattcaataaaggaaattaggcatgaccctcttgttgagtatgctctgcctatttgaaaat

SEQ ID NO: 29928 - DNA, 387 bp, Glycine max
  Clone ID: LIB3138-023-Q1-N1-H1
cgatctgctgtgtatcagtcaaaatacgctggaactggggctgcagttgagtatgctgttttgcatcttaaggtgtcggagattgtggtcattggacacagtgcttgtggtggtattaaggggcttctgtctttcccatatgatggaacctactctactgattttattgaggagtgggtcaaaattggcttgcctgcaaaggcaaaggtgaagacacagcatggggatgccccttttgctgagttgtgctcacactgtgagaaggaatctgtgaatgtttcccttggaaacctgctaacttacccatttgttagagatggcttggtgaacaaaacattgtcactgaaaggaggatactatgactttgttaaaggatcttttgagctc

SEQ ID NO: 29929 - DNA, 413 bp, Glycine max
  Clone ID: LIB3138-023-Q1-N1-H10
atacaagccaaaagaacaacatggacattgatctttctcctcagttgcccaagaaagtttacggtgccaatggtggctcctactacgcatggtccccctccgaccttcccatgctccaccaaggcaacattggtgccgctaagcttgctctcaacaaaaacgcctttgctcttcctcgttactctgactcttccaaagtcgcttatgttcttcaaggtagtggagtggctggaatagtgttgcctgaatcagaagagaaggttgttgcaataaagaagggtgatgccttggcactcccctttggtgttgtgacctggtggtataacaaggaagaaactgagttggttgttctgttccttggggacacttccaaggctcacaaggctggtgaattcactgacttttttctgact

SEQ ID NO: 29930 - DNA, 362 bp, Glycine max
  unsure at all n locations
  Clone ID: LIB3138-023-Q1-N1-H11
gcttatcttgtcaatctcgtaaatgtgttacgagaattgtatttgcacagtccagaggaagctcgccaattgagaaggaaagctctctctcgtattgaatggctgcaaaaagctgatgtgcctaccatagcacagattgaagagttccattcgatgcagaggatgatgaatgctcctgattcaaatgataatattgatttactgttgagcattgatttgttgggtttacaaggagcaggtaaagcttttccaaacaaaattgtttttgatgataagcttgtgtnggctaacacacaagaattctttgatggaaattttcagtggattcttggttaccaatttttgtgaatggtctttatcct

SEQ ID NO: 29931 - DNA, 329 bp, Glycine max
  Clone ID: LIB3138-023-Q1-N1-H12
cttccttttgtgctgatcaatcaaggtcttctcaggcaaatgatgtccgcaagcaaatcgttggcagcgctgttccagttcttaaaggcgaaaagttttccttgcggatactggtggaccattctattgttgaaagctttgctcaaggtggaaggacggttgtgacatctcgggtttatccaacaaaggcaatctatggagctgctaggttgttcttgttcaacaatgctaccgaggccactgtgacagcctcactaaaagtttggcaaatgaattctgcatttatacgcccattccaccctgatcagaagaagtaaaaatttgaattg

SEQ ID NO: 29932 - DNA, 145 bp, Glycine max
  Clone ID: LIB3138-023-Q1-N1-H2
tgcgtcagctgtgtatggaccctactgggggccggatctgaatcgacctatctggaaacaggattacacttatacgccactcttcaatgatgaactcatggatagtcgcattctggaagaaaggtggatatggccagattgagac

SEQ ID NO: 29933 - DNA, 397 bp, Glycine max
  Clone ID: LIB3138-023-Q1-N1-H3
ctcgagccggccaaatgctgttctttcaatgtggagatattttgttggagatctcgtctttgaagtttctaagatgacttctccctacattaaatgtacagtctctttcttcatagcatttggaaatttggctgatgataccatcaattttgaggcttttccccacaagctggtgcagtttggagagattcaggaaaaagttgtattgaaattttcacaagaggaatttcttacagcttggtcaactcaggtgcgtcctgcaacaactctgttggctgatgggtgtccatatttgtatgcaatggtgcatgatagttcagtgtctacaataccaggtgattttgtcattggtgtcaagttgacaaccataaacaatatgtgtgcatatgggctcaat

SEQ ID NO: 29934 - DNA, 415 bp, Glycine max
  Clone ID: LIB3138-023-Q1-N1-H4
gtttaatggtcaaaattgtgatgtctgggaatgcaccagtcaaaaggagtgattgggcctcattggtacaagtgtttttaacaaacagcaacagtacagagcattttgatgcatgtaagtggacaaaatcagaaccacattcctgggaattgatcttcccaatagaggtatgtggtcctaataatggttttgaaatgtggagttctgagtgggcaaatcaaacttcatggcatttgagtttccttattgacaatcccaaacagtctacagtttttgatattctcttgggaatctctcaagattttgaaattgctggtaatactcttatgccagctttttctgttccacaggctactgccagatcttctgaaaatgcggaatcctctgcatgatctggaatttgtgttttctttcg

SEQ ID NO: 29935 - DNA, 417 bp, Glycine max
  Clone ID: LIB3138-023-Q1-N1-H8
atggatactaccacaccttccgtaacaacatggtcggccggatcgactataaactatacaattgcaggaaccgccattcacggtggaggatcatgccagatttccatgtcgtacgaccatggtagcacctggaatgttatttacagtatcatcggtggatgtgttattgagtcattgactgagaatgttaaaattccctcggatgcgccaagtggagaagccttattctcatggagctggttcaacctcatcggaaacagagagatgtaccaaaactgcgctccagtcaccatcatcgatggaggcaacggtctaaattcggcggattatcccgctcctttcgttgcaaacgtcgatgttgcccctggatgcaaaaccatcgaaggtaccgaagttgtctttcccaacccaggtaaa

SEQ ID NO: 29936 - DNA, 400 bp, Glycine max
  Clone ID: LIB3138-035-Q1-N1-A10
gagcttttgtcagttttctattgaccttctcggtggaggaatcttagtggacaaaactggagattggatcacacttatacaaaattctccaattagtaacttgttgagagttgctgcttggaagaaaggctgtttaatggtcaagattgtgatgtctgggaatgcagcagtcaaaaggagtgattgggcctcattggtacaagtgtttttaacaaacagcaacagtacagagcattttgatgcatgtaagtggacaaaatcagaaccacattcctgggaattgatcttcccaataaaagtatgtggtcctaataatggttttgaaatgtggagttctgagtgggcaaatcaaacttcatggcatttgagtttccttattgacaatcccaaacagtctaca

SEQ ID NO: 29937 - DNA, 121 bp, Glycine max
  Clone ID: LIB3138-035-Q1-N1-A11
cccttcacaccattctcacaaaacaactttcaaactctgagaaagaatggctgccaacacattgatgagtactgctatctcaaccttcccatctctcctttcttcctcaaaatccagattt

SEQ ID NO: 29938 - DNA, 244 bp, Glycine max
  Clone ID: LIB3138-035-Q1-N1-A12
atggcatctgcgacgcgtctggtgcactgcgagctgcgctcggcgaggcccgcggttcggccgagggaaccggccggtccggttcaagttacgatccccaaacccaaacccaaagcggcggaggcggaaggcgcgaacatcgttttgcagccgcggttgtgcactctcagatcctacggttcggatcgagccggggtgcttatcaagactcgcaaggagggtgaccatgatgacgtgtcaccct

SEQ ID NO: 29939 - DNA, 332 bp, Glycine max
  Clone ID: LIB3138-035-Q1-N1-A9
aagggttgtgaaagcagagaagtgagatacactaagttatcctcataaatacactctaattaggtggcaagataagtgtctaaccttagtaacattgccacatattgtgttcattttggaattgtgccactaaaattctattcaattcatctatggctgcctcttcttatgctatgcaatcaatcctggcaaaccctttgatccgcatttccagcgggtctagggtgaaccaatttggcgttcctgctttgcacatgagaaggaatgttggcctgagagttaggtccatggctaaggaagaacaaccaagtgagcctgcaaccccagttaca

SEQ ID NO: 29940 - DNA, 278 bp, Glycine max
  Clone ID: LIB3138-035-Q1-N1-B10
gaatagtttagtgtctaaggtggagaatgaggaggaggaggggaatgtttctctcttggatttgccctgttttgcctttgaattcattctttaacccctttcaccaacttaattattccaggtggcaacagggtgcacattttttaaggatagatgtaagaatgatcatttattggagaaacacatggagaggaaatggggtaaggtgtttggtgatgctgctttataggcaatggaaatggattgtactttccaagaccaaagaaaaattttcttcc

SEQ ID NO: 29941 - DNA, 408 bp, Glycine max
  Clone ID: LIB3138-035-Q1-N1-B11
gaaattttcacaagaggaatttcttacagcttggtcaactcaggtgcgtcctgcaacaactctgttggctgatgggtgtccatatttgtatgcaatggtgcatgatagttcagtgtctacaataccaggtgattttgtcattggtgtcaagttgacaaccataaacaatatgtgtgcatatgggctcaatcctggtatttcaggttctcgtcttttgggcaccattcctcagtccatttcacagcaaactgtttggaatcaaatggcaacagtgagaacaccattgaattttgattctagcaagcagagcttttgtcagttttctattgaccttctcggtggaggaatcttattggacaaaactggagattggatcacacttatacaaaattctccaattagtaactt

SEQ ID NO: 29942 - DNA, 327 bp, Glycine max
  Clone ID: LIB3138-035-Q1-N1-B12
ggcgcatccttaggcacaaaagatatttttgtatccatcccatgccatccaaatttgaaggcgtgtttgttgtgtgtggcgtttaaggtttctcgatcttcgtcaataatcgtcgtctccatttcagtcggggttttagtcttctcttccatacactaatacagggaggcggactctgagctcaactcatggctgttgctgcaatcgcgctgaaatgcggacccttactcacagtcttcgcggcgttattgctcgattgaaacgggacatcgatcctgtcacactctcaatatatatatatatatatatatatatatatatatatat

SEQ ID NO: 29943 - DNA, 397 bp, Glycine max
  unsure at all n locations
  Clone ID: LIB3138-035-Q1-N1-C10
ataactgctcagctgagtagtgttgttggtattttggggtctgatgtatcataatgcttgacttgactgtctatcgtggctttcatgctgcgagaaataataaattcaggtaactgtttgtccttgtagttgtagttcttaaggatgaaagttttcacttgctgtatttctggcttcactttgtaataaatgttatgtttgtatattagtaaacgttaagggttaagaatttccccccnanannnccccccccccccgcgcggaaaacctctttttttgggaaaaataaaggctcctctttttataacaacgggaaaaaaataaaaaaaaaattataaaaaaaattncgggggcggccccccccttttgacctcgtcaccccggaaattaattccgg

SEQ ID NO: 29944 - DNA, 304 bp, Glycine max
  Clone ID: LIB3138-035-Q1-N1-C11
cgactgtaaaagaaaataaggacggaagctgcttaaacgtatttaccattatccaagaggcaccctgttcatctgtatcttccgccaacaagaattcaacatcaatatcagtgccactgagaaattcatgtgccctaagggagtttataccttcggtaaaagaggtaataactcgagatgaaaccaacgaatcttttgttactgatgagcttgaaaatcagaagttggagatagatgatggcaagcacacacaaaagactaatgacacttgtgaagtctctaagttggagaattctggtgcttc

SEQ ID NO: 29945 - DNA, 408 bp, Glycine max
  Clone ID: LIB3138-035-Q1-N1-C9
agcatttggaaatttggctgatgataccatcaattttgaggcttttccccacaagctggtgcagtttggagagattcaggaaaaagttgtattgaaattttcacaagaggaatttcttacagcttggtcaactcaggtgcgtcctgcaacaactctgttggctgatgggtgtccatatttgtatgcaatggtgcatgatagttcagtgtctacaataccaggtgattttgtcattggtgtcaagttgacaaccataaacaatatgtgtgcatatgggctcaatcctggtatttcaggttctcgtcttttgggcaccattcctcagtccatttcacagcaaactgtttggaatcaaatggcaacagtgagaacaccattgaattttgattctagcaagcagagcttttg

SEQ ID NO: 29946 - DNA, 239 bp, Glycine max
  Clone ID: LIB3138-035-Q1-N1-D10
ctaacgttcattccgctcttcgctttctttcacatccaatcaacgaaaaatgctggctgttttcgacaaatcggtggcaaagagcccagagggtcttcagagccctcactcaaattccgtctcagccctaaaagacggttttctcgcagagcacttctcttccgttcaccctggttccgtcaccgttaaccttggctcttccggtctcttggcctattctcttcacaaacagaaccccc

SEQ ID NO: 29947 - DNA, 345 bp, Glycine max
  Clone ID: LIB3138-035-Q1-N1-D11
cttttgaactcttcattgaattaaatgcaacagatgaacagtgtgactttcaagtaatatatgcaagtggtataaaagggcaagcagggttgacttctgaaaatctggcagaagaccttggtccattgtttgaatctatcattagatgcattcctggaccacgtattgacaaagatggtgcccttcaaatgttggttacaaatattgagtatgatgaacataaagggcgcatagcaattgggcgtgtgcaagctggagtttagaaaaaggctggatgttcgagtatgtacttcagatgattcatgtagatatggaagagttactgagctttatgtgtatgacaaa

SEQ ID NO: 29948 - DNA, 401 bp, Glycine max
  Clone ID: LIB3138-035-Q1-N1-D12
ctcgagccgaatcggctcgaggggcaatgatattctgtgttgcgattatgctagttttgatggtttgattaccaagcaagttatgagcaagatggcagaaatgataaacagtctttgtggtggtgatgaaaaattgatgcgtgaaaggacgcacctgctgttggcttgttgttcaaggatggcaatttgtaagaaagatgtttggagagttgaatgtggaatcccttctggatttccgctcacagttatttgcaatagcatttttaatgaaatgctcattaaatataactatgaaaaattactgggccaggcttaaacttcaaatatgtttttacaattcttcaaaaaatttggttctttgtgtgtggatggcgatgataacttaattagtgttcatgaat

SEQ ID NO: 29949 - DNA, 368 bp, Glycine max
  Clone ID: LIB3138-035-Q1-N1-E10
caggtttcggcgcaatcggcttctgcttcaaggaaggagagcttgttattctctatcaacaagtaaaatgtcaggtgaagagggtgtcattgcagttgagccagctgctgctgctgctgccatcccaggcgagccaatggatatcatgactgccttacaacttgtgctcagaaaatctctggcttatggtggtttgtcgcgtggccttcatgaaggtgcaaaagtgattgagaagcatgctgcacaactctgtgttcttgcagaagactgtgaccagcctgactatgttaaactggttaaagccctttgtgcaaagcacaatgttagcctgctgacagttccgagtgcaaagacccttggagaatggg

SEQ ID NO: 29950 - DNA, 256 bp, Glycine max
  Clone ID: LIB3138-035-Q1-N1-E11
gcaaaatcgaagaaacgcgacgatccacttgcacaaaatacgcgggggaggcagatcacatagatggaggcacagtctcagagcaacaattctaaccctaacccttacccttacccttacccttaccctaaccctaacccttacccttattgggattattcggtagcgtcatcgatgccgttgtggtcaacgatcgacggcccatttggcctgtcggacgaagagtcattgggctactctcgcacgatctacactt

SEQ ID NO: 29951 - DNA, 309 bp, Glycine max
  Clone ID: LIB3138-035-Q1-N1-E12
ctaaagccggatttctctctagcactacccgaattgtctccagcgcaacacgtaacgctctttctgacttgtgcatgcatatactctgtggcccggaaagatccttctatcttgtgaacgcagttgataattgagttggggacaggccatgatcttataaggcaaaacaaaaatcaagtgcgtgaaggctgatggccacttatggcaatacaccaccgaagggcatttaggcacgtggccacgaattgaaaaatctcgacgaatgtacttcagcaagcattcaaggagtggaaaaagatgaagaaattt

SEQ ID NO: 29952 - DNA, 403 bp, Glycine max
  Clone ID: LIB3138-035-Q1-N1-E9
caactaacacttaaatacagggttcaaagtcgtcacaatggcacgccgtccagcccgctgctaccgctactgcaagaacaagccctaccccaagagcagattcaaccgtggtgtacccgacgccaagatccgcattttcgatctcggtcgtaagcgcgccaacgtcgacgacttccctctttgcatccatcttgtctccaacgagtacgagcagctgtcctccgaggctctcgaggccgcccgtatttgcgccaacaagtacctcgtcaaggtcgccggaaaggaaggtttccatctccgcgtccgcgtccacccataccatgtcgtccgtatcaacaagatgttgtcgtgcgctggaactgataagcttcaaactggtatgcgtggtgcattcggcaagccc

SEQ ID NO: 29953 - DNA, 256 bp, Glycine max
  Clone ID: LIB3138-035-Q1-N1-F10
caaatggcaacagtgagaacaccattgaattttgattctagcaagcagagcttttgtcagttttctattgaccttctcggtggaggaatcttagtggacaaaactggagattggatcacacttatacaaaattctccaattagtaacttgttgagagttgctgcttggaagaaaggctgtttaatggtcaagattgtgatgtctgggaatgcagcagtcaaaaggagtgattgggcctcattggtacaagtgtttt

SEQ ID NO: 29954 - DNA, 405 bp, Glycine max
  Clone ID: LIB3138-035-Q1-N1-F11
gaagaaagatccccatactgttgcatctgctgctatggatgttttaaaactggttcgagatctgagaataacgccccgtgtgttagttggtcatagttttggggggaaagttgttttgagcatggtcgaccaagctgcaaagcctcttgctcggccagtgagagcttggattctggatgcaacccctggaaaagttcgagcaggtggagatggagaagatcatccagaagaactcatatcctttctaagtacactgccaaaggaggtcccttcaaagcggcatgttgtcagagctcttattcaacatggattttccaatgatgtggcgcagtgggttgtgactaacctgcgaccttctggctctgctggttcacaatcatcaagcttctcatgggtgtttgacct

SEQ ID NO: 29955 - DNA, 227 bp, Glycine max
  Clone ID: LIB3138-035-Q1-N1-F12
agattccacaacagtgggagggagatccaaaaagagagagtggaaaagatggcgcggttgatcacagtggtgtggtgcgcggtggcggtgctattatgcgccgcggccggtgcgtcgtgggtggaggaggcggcgaacccgatacgaatggtgtctggcgtggaggcggaagtggttcgggtgatcggggagtgccggcgtgcgttgaagtttgctatgttcgtgag

SEQ ID NO: 29956 - DNA, 403 bp, Glycine max
  Clone ID: LIB3138-035-Q1-N1-F9
agccaatcaaacactaaatcagttcacgatttcacagttaaagatgccaggggaaataatgttaatctcgccgattacaaaggaaaggtccttctcattgtcaatgttgcctcacaatgcggcttgactaattcaaactacacagagcttaaccaattgtatgagaaatacaaagggaaaggacttgaaattctggcattcccatgcaatcagtttggggctcaggagccaggaactaatgaagagattgtggagtttgcttgtactcgcttcaaagctgagtttcccattttcgacaaggtggatgtgaatggtgacaatgctgctccactgtacaagtttctgaaatcaagcaaaggtggactctttggggatagtatcaaatggaacttctccaaattcc

SEQ ID NO: 29957 - DNA, 391 bp, Glycine max
  unsure at all n locations
  Clone ID: LIB3138-035-Q1-N1-G10
atcaacccatactccatggaatggactggtttggccaataaattactgagtaagggcaatgatattctgtgttgcgattatgctagttttgatggtttgattaccaagcaagttatgagcaagatggcagaaatgataaacagtctttgtggtggtgatgaaaaattgatgcgtgaaaggacgcacctgctgttggcttgttgttcaaggatggcaatttgtaagaaagatgtttggagagttgaatgtggaatcccttctggatttccgctcacagttatttgcaatagcatttttaatgagatgctcattagatatagctatgaaaaattactgcgccaggctaaagctccaagtatgtttttacaatccttcaaaaattttgnttctt

SEQ ID NO: 29958 - DNA, 387 bp, Glycine max
  Clone ID: LIB3138-035-Q1-N1-G11
cttattgagagttgctgcttggaagaaaggctgtttaatggtcaagattgtgatgtctgggaatgcagcagtcaaaaggagtgattgggcctcattggtacaagtgtttttaacaaacagcaacagtacagagcattttgatgcatgtaagtggacaaaatcagaaccacattcctgggaattgatcttcccaatagaggtatgtggtcctaataatggttttgaaatgtggagttctgagtgggcaaatcaaacttcatggcatttgagtttccttattgacaatcccaaacagtctacagtttttgatattctcttgggaatctctcaagattttgaaattgctggtaatactcttatgccagctttttctgttacacaggctac

SEQ ID NO: 29959 - DNA, 376 bp, Glycine max
  Clone ID: LIB3138-035-Q1-N1-G12
agtgaacacacacctacgaacaaacccaaccccgaatggcacagaagcagcacctccttctggatctatcccaaatctcaatctccaaaccctagaacattcaactctcccccgttccctttcaaaaaccttccctttccactcttccgccgcgattcgatctccgggctgccttcctttccgcgatttcgatctgaaactcgaggttgcggaattcggaaattgacattgaagtgttcaattggcactgtcaatgccattggtgtggtttgtgaagaatttttctgtggttttttgataccggaaaaacacaatgtcttgggcaggccctgaagatatttacctttctacttcacttgccagctatcttgacaag

SEQ ID NO: 29960 - DNA, 399 bp, Glycine max
  Clone ID: LIB3138-035-Q1-N1-G9
cggctcgagcagaaagaccctctttttttttttactttccattctcctccttttcttcctccaatggctgcacctcgctgcctaacgtgaaattagtctcattttccatctgggtcttgtgaattgcgattggaaccgcgttttctcgcttctgggcttggcttagaagtagtcagaatgatgtctgtcacaggcaaaggcattgattttgctggcaaaaacttggtctctggctgctcttcaaatgcttcgtttgattggtacactgtgaggaactatgccaaggcgaatagtaataattctaatgggtgtggcagaagccatggacgtaaattggtttgttgtaagaggaggagcactcaatgtcgggtttcttctatgaagactgcacaacctact

SEQ ID NO: 29961 - DNA, 396 bp, Glycine max
  Clone ID: LIB3138-035-Q1-N1-H10
aaaaagttgtattgaaattttcacaagaggaatttcttacagcttggtcaactcaggtgcgtcctgcaacaactctgttggctgatgggtgtccatatttgtatgcaatggtgcatgatagttcagtgtctacaataccaggtgattttgtcattggtgtcaagttgacaaccataaacaatatgtgtgcatatgggctcaatcctggtatttcaggttctcgtcttttgggcaccattcctcagtccatttcacagcaaactgtttggaatcaaatggcaacagtgagaacaccattgaattttgattctagcaagcagagcttttgtcagttttctattgaccttctcggtggaagaatcttaatggacaaaactggagaatggatcacactta

SEQ ID NO: 29962 - DNA, 178 bp, Glycine max
  Clone ID: LIB3138-035-Q1-N1-H11
cctcaatacaatgaggttcatgctcagatggaaacaaatttgcttaaattgtctcttgatgatgttgaaactcctaaaggttccatgttggatctgaaaatttttcaatgtaaaattgcacttcccaagaacacagttggaggaaccattctgcgtagtgatctatggccaaattttt

SEQ ID NO: 29963 - DNA, 327 bp, Glycine max
  Clone ID: LIB3138-035-Q1-N1-H12
aatagatcctcaatacaatgaggttcaggctcagatggaaacaaatttgtttaaattgtctcttgatgatgttgaaactcctaaaggttccatgttggatctgaaaatttctcaatctaaaattgcacttcccaagaacacagttggaggaaccattctgcgtagtgatctattggcaaattttttgacagagggcaattttagagcaagtgttgatttgcagcgcactcatcgtattagaggaatgattaaaatggtggccacagttggtattcctgagaatacaagtatatcattggcctgtgctatgaatagttcttttaaggg

SEQ ID NO: 29964 - DNA, 399 bp, Glycine max
  Clone ID: LIB3138-035-Q1-N1-H9
atggcaacagtgagaacaccattgaattttgattctagcaagcagagcttttgtcagttttctattgaccttctcggtggaggaatcttagtggacaaaactggagattggatcacacttatacaaaattctccaattagtaacttgttgagagttgctgcttggaagaaaggctgtttaatggtcaagattgtgatgtctgggaatgcagcagtcaaaaggagtgattgggcctcattggtacaagtgtttttaacaaacagcaacagtacagagcattttgatgcatgtaagtggacaaaatcagaaccacattcctgggaattgatcttcccaatagaagtatgtggtcctaataatggttttgaaatgtggagttctgagtgggcaaatcaaact

SEQ ID NO: 29965 - DNA, 170 bp, Glycine max
  Clone ID: LIB3138-036-Q1-N1-A10
gtcacaacttcattatgtttcgcgtaataatctggaaatgcaagaagcttatcttggcaatctcgtaaatgtgttacgagaattgtatttgcacagtccagaggaagctcgccaattgagaaggaaagctctctctcgtattggatggctggaaaaagctgatgtgccta

SEQ ID NO: 29966 - DNA, 342 bp, Glycine max
  Clone ID: LIB3138-036-Q1-N1-A11
gttgttcattgatttgttgggtttacaaggagcaggtaaaggtttttcaaacaaaattggttttgatgataagcttgtgttggctaacacacaaaaattctttgatggaaattttccagtggattcttggttaccaatttttgtgaagtgtctttatcctgtaagtcaattaccttcaaaagctgtcgatgtaaatgttacatgtcgtattggacgtggtggtttacccaccactgcttggattaattctgcagttaacaatcgctcctcggatatcaacaaaaagattcgcacaccacttgtgataggtaagaaaatagtttttcttactatagttgatcc

SEQ ID NO: 29967 - DNA, 341 bp, Glycine max
  Clone ID: LIB3138-036-Q1-N1-A12
gtcacgacttcgttatgtttcgtgtaatactccggaaatgcaggaggcttatcttgtcaatgtcggaaatgtgttacgagaatcgcatttgcacagtccagaggaagctcgcccattgagaaggaaagctctctctcgtattgaatggctgcaaaacgctgatgtgcctaccatagcacagattgaagagttccattccatccaaaggatgaggaatgctcctgcttcagatgataatattgatttactgctgagcattgatttgttgggtttacaacgagcaggtaaagcttttccaaacaaaattgtttttgatgatcagcttgagttggctaacacac

SEQ ID NO: 29968 - DNA, 264 bp, Glycine max
  Clone ID: LIB3138-036-Q1-N1-A2
agatgatgcaattaaaaaagactctgagctccaagcttggtggaaggaaagctgtgaaacgggtcacggtgacttgaaagacaagccatggtggcctaagttgaacactcctcaagatttggttcacatttgctccattatcatatggatagcttcagctctccatgcagcagtgaattttggacaatacccttatggaggtttgatcctaaaccgtccaactttaaccagaagatttctccctgaaccaggaagcaaagaata

SEQ ID NO: 29969 - DNA, 251 bp, Glycine max
  Clone ID: LIB3138-036-Q1-N1-A6
agcagagtcagagacagagacgcagccatggggcggagacctgcgaggtgttataggcaaattaagaacaagccataccccaagtcacgtttctgccgtggtgttcctgatcccaagatcaggatttatgatgttggtatgaagaagaagggtgttgatgagtttcctttctgtgtccatctggttagttgggagaaggaaaatgtttcaagtgaggccctggaagctgctcgcattgcttgcaacaagta

SEQ ID NO: 29970 - DNA, 395 bp, Glycine max
  Clone ID: LIB3138-036-Q1-N1-A7
caagtagttgagaactaagaaggagaagcaaatggcttcctcaatgatctcttccccagctgttaccactgtcaaccgtgccggtgccggcatggttgctccattcactggcctcaagtccatggctggcttccccaccaggaagaccaacaatgacattacctccattgctagcaacggtggaagagtgcaatgcatgcaggtgtggccaccagttggcaagaagaagtttgagactctttcctacctgccagaccttgatgatgcacaattggcaaaagaagtagaataccttcttaggaagggatggattccttgcttggaattcgagttggagcacggtttcgtgtaccgtgagcacaacaagtcaccaggatactacgatggacgctact

SEQ ID NO: 29971 - DNA, 168 bp, Glycine max
  Clone ID: LIB3138-036-Q1-N1-A8
gcggaatcctctgcatgatctggaatttgtgttttctttcgcttgttcgtttgtttaattcaataaaggaaattaggcatgaccctcttgttgagtatgctctgcctatttgaaaatttccacacctcttttaattgtcgtaatgatgtgtgaagtgtgtgttatttt

SEQ ID NO: 29972 - DNA, 391 bp, Glycine max
  Clone ID: LIB3138-036-Q1-N1-A9
cgaccgtgttctgcgtctccaatccaatctctcacctctccgcattggcttccttgagggccccgcccttcttcttcaactctccggcgcttcgcatccacgcctgctgccgggaacggcggggctcggcggcagcgactcgtgcgggtgccagcactagcagcatcctctttgccatggcgctaaacaacaatctcctaggcgacaccactttagctgcacttctaatgggcgataagctcgaccgagactgacttgaagagatggcaagaaatgaagctttaatggaacttgaaacatatgatgacgatgacaatgatgataacgatgatgtcagcagccaaaaggatagtatggaaactcatgtgcaagaaaagcctgcccttacaca

SEQ ID NO: 29973 - DNA, 242 bp, Glycine max
  Clone ID: LIB3138-036-Q1-N1-B4
aattttctgtgcaaaggaaagaaatttcatgagcctctggatctggcactcttattcgttggtagagagttacaatcttcagatttaagcatgaacaaacatgcaaactcagctcttttggacctgctcagaactctttcgcagatcaacattctgggatttcctatgttttacataagaggctttgaaactctgttcagattgtgagctggaattggatggatgtgttcatgactgtcatg

SEQ ID NO: 29974 - DNA, 325 bp, Glycine max
  unsure at all n locations
  Clone ID: LIB3138-036-Q1-N1-B5
attggtgtcaagttggcaaccattaaccatatgtgtgcatatgggctcaatcctggttttaagttctcgtctttgggcccattctagtcatttacgcaactgttggataaatggcacagggacacatngatttgattctacagcaactttgtagtttctatgacctttcgggagaattagggacaaactggagatgatcacactatacaaaatttcaatagtactattgaagtgctgctgaagaaagtgttaaggcaagatggatgttggaatgcacagcaaaaggagtgatgggcctatgtacagtgtttaacaacagacagtc

SEQ ID NO: 29975 - DNA, 361 bp, Glycine max
  Clone ID: LIB3138-036-Q1-N1-B7
ttcgggtttaataccgatattttagcaacaaatccaataaatcttagtgtagtggtaggtgtattggttttttttggaaagggagtgtgtgcgagttgtttatttcaaagaatagattggatccaaccaaactgcactttttagttataactaagaaaatgtgcataatcccgcgaattacttctgaaaattacttctgaattaatgaaattttttcaataatttaagaaaaaatatttaagaactatagcatttcgcgatttattggtaatccactttgattctctattaaccaataattttggactattaccatggttaaagtgaatagtttgaagtctagacgcagtgtagtactctt

SEQ ID NO: 29976 - DNA, 96 bp, Glycine max
  Clone ID: LIB3138-036-Q1-N1-B8
ggggaatttggctgatgataccatcaattttgagggttttccccccaaacttgtgccggttggggaggttcaagaaaaaagttgcttggaattttc

SEQ ID NO: 29977 - DNA, 236 bp, Glycine max
  Clone ID: LIB3138-036-Q1-N1-B9
gactttcattcatctcttcgttttacacggagcaggtcacgctttttcaaacaaaatagggcttgatgataagctcgtgctggctaacacacaacaattctttgatggaaatcttccagtggattcttggttaccaattcttgagaagcgattttatctctgtcggacaattaccttcataagctgtcgatgcaaatgttacatgtggaattcgacatggtggcttacccaccact

SEQ ID NO: 29978 - DNA, 396 bp, Glycine max
  Clone ID: LIB3138-036-Q1-N1-C6
tttctcgttcgttccctctcaaccaaaaccaaccacttcatgttatcattgctatgacccttcaagcttttcatggctctgcatgttgtttccgttcccaccttcttcacttttcttcttccaccgcttcatctccaccattccttgcttcgaggaggttccaatcatgcccttcaacaagaaaatctctcaagttgaattgcagttcaagtgggcaatatggtgaccaaaattaccttctgggtgctccaagttctgttggagatggattctctttcagtggagggaagtattcagatggccctagtccaagtgatgaatggtttaagcaagggaaaaaggttaaagcctattcaatacctggcactggtgaaaaggcaaaagatccgatttttg

SEQ ID NO: 29979 - DNA, 213 bp, Glycine max
  Clone ID: LIB3138-036-Q1-N1-C8
aaaaatagcaagcctcaagctactgcaatgcatgtgggagctatagaaattatcattgatagtttcgcaagtgctgattgcaacatagttggtgcaatgcttttggttgatacttatcataccaatcctgaaaatgcagttcgtagtatttttgttgcgcctttcacaggcggaaagcccattcgggtggttacattttcgaataccattgtg

SEQ ID NO: 29980 - DNA, 327 bp, Glycine max
  Clone ID: LIB3138-036-Q1-N1-D12
cttcttttattattattattcataccctcctacttatgtttgggtcacagactttctacgatttgtttgagaaccctgcaatattgggtttgtgctcagctattggaatgtattttagtcctctgtgggtaacatttttctttggtgtcatcgttggatgggtgtgggaaccgaaataggcgagggtggggaaagaaaaataaacgactttcctttccaagtccttagataatgtctcaccctcctcggcttgtttaccattaaagaagggtttagtttatcccatcaagagaggggggtcggctccttgccttaatttcattaaaa

SEQ ID NO: 29981 - DNA, 234 bp, Glycine max
  Clone ID: LIB3138-036-Q1-N1-D4
aaaaagttgtattgaaattttcacaagaggaatttcttacagcttggtcaactcaggtgcgtcctgcaacaactctgttggctgatgggtgtccatatttgtatgcaatggtgcatgatagttcagtgtctacaataccaggtgattttgtcattggtgtcaagttgacaaccataaacaatatgtgtgcatatgggctcaatcctggtatttcaagttctcgtcttttgggca

SEQ ID NO: 29982 - DNA, 354 bp, Glycine max
  Clone ID: LIB3138-036-Q1-N1-D5
aaaattttcaaagcttgctatcatgtagcacaggaataggttaaataattgaagtctcaacactaatgtaggttattggggttgtttattttaagtttttctttttttcaagaacacacaactagatatttgattttcatgatcataaattttcttagcttgaaggatgggaataatttccgatagttgtttattaattttggattatttagcaatccaattttcatttcaattcaattcttggactatgtattttgagcttttcctagcatggagaaagtagtatatagcccgataaacatttcatttattacttgttgcaaatctaacttggcaccataaaatattttctac

SEQ ID NO: 29983 - DNA, 373 bp, Glycine max
  Clone ID: LIB3138-036-Q1-N1-E1
gtcaccactggtgccggtatcgcctcttacccccttgacaccatccgtcgtcgcatgatgatgacctctggtgaggccgtcaagtacaagtcctccatcgacgctggtcgccagatcatcgccaaggagggtgtccgctccctcttcaagggtgctggagccaacatcctccgtggtgttgccggtgccggtgtcctgtccatctacgaccaggcccagctcctcatgttcggcaaggccttcaagtaaacgtatcaccaccaaatacgttgacaacaccatcgcggcggaagttgcggcatggaagtctgcaggcctgtgatgaatgcagacataaaagaaaaagagacgtggagtggcgatgttccgagcg

SEQ ID NO: 29984 - DNA, 144 bp, Glycine max
  Clone ID: LIB3138-036-Q1-N1-E12
gcgctgctgtactattctacctatggagtttaatcttgtggtccgtcaaaagtttttaaatctcgcgaggttcattatcaacaaaaaggacaaacttagttgtctagttgggatcaacccatactctctggaatggactgggtt

SEQ ID NO: 29985 - DNA, 327 bp, Glycine max
  Clone ID: LIB3138-036-Q1-N1-E2
aaaaagttgtattgaaattttcacaagaggaatttcttacagcttggtcaactcaggtgcgtcctgcaacaactctgttggctgatgggtgtccatatttgtatgcaatggtgcatgatagttcagtgtctacaataccaggtgattttgtcattggtgtcaagttgacaaccataaacaatatgtgtgcatatgggctcaatcctggtatttcaggttctcgtcttttgggcaccattcctcagtccatttcacagcaaactgtttggaatcaaatggcaacagtgagaacaccattgaattttgattctagcaagcaaagctttt

SEQ ID NO: 29986 - DNA, 331 bp, Glycine max
  unsure at all n locations
  Clone ID: LIB3138-036-Q1-N1-E3
cgtgtctctttgctcttttcccctatctctcaactaccaaaagttagcactaacaacaacctattcctttctctccgtgtttagttctacacaaagcaccaacactggctagcaagaagggcatggcaacatgtgggagcctgcatcacatcttcgacacccttttgccagaaaagccaaccctgcttgaatccctctcatgaaccaaataaacccctaaacccacagaccaaaccactcctcactgaatatttgagaactcattcaagggagnctattctcatatcactccacgtttactcatatatcatcactgaatacaacacacaca

SEQ ID NO: 29987 - DNA, 395 bp, Glycine max
  unsure at all n locations
  Clone ID: LIB3138-036-Q1-N1-E4
ggctcaatttccaatcgggtcctgggaaatgcgattggaaccgcgttttctcgcttctgggccttgctttaaaagtagtcagaatgatgtctgtcacaggcaaaggcattgattttgctggcaaaaactggtctctggctgctcttcaatgcttcgtttgattgtacactgtgaggaactatgccaggcgaantagtataattctaatgggtgtggcagaggccatggacgtaaattggtttgttgtaagaggaggagcactcaatgtcgggtttcttctatgaagactgcacagcctactgtgaatggggggactcatgcaattgaaggccttaccacaggattggacttgaagggttattcagaagcccccatttccccagctaggttttttg

SEQ ID NO: 29988 - DNA, 371 bp, Glycine max
  Clone ID: LIB3138-036-Q1-N1-E5
tgctctcaagactgtgaattgtggaatcctgcttgcacaaaagcaatgactatgtcatttaatccaaacccgtgttctgatgcatggagtttggaatttctgaagcgtactggatttcattgcgatatcatttgtgtcactggatggactgccaccccaatgcaagatgttcaggttacaattgattggtttatttcctctcaggaatgtgttcccaggacctattgtgttttaaatccacaaaatccttttgtgttaaataggtggatgggaaaattgacttcccccagggcacttcccgaagtgttaagagaatgcctctttctatagggggaggagctggtgcaaagaatgctattctcatgaatatg

SEQ ID NO: 29989 - DNA, 397 bp, Glycine max
  Clone ID: LIB3138-036-Q1-N1-E6
tggtggtccgacaaaagtttgtaaattttgtgaggctcattatgaagaactgggacaaacttagttgtcaagttggaatcaacccatactccatggaatggactggtttgggcaatagattactgagtaagggcaatgatattctgtgctgcgattatgctagttttgatggtttgattaccaagcaagttatgagcatgatggcagagatgataaacagtctttgtggtggtgatgaaaaattgatgcgtgaaaggacgcacctgctgttggcttgttgttcaaggatggcaatctgtaagaaagatgtttggagagttgaatgtggtatcccttgtggatttccgctcacagtgatttgcaatagcatttttaatgagatgctcattagatatag

SEQ ID NO: 29990 - DNA, 300 bp, Glycine max
  Clone ID: LIB3138-036-Q1-N1-E8
ttctcttctgacttgttggttgacaatggagaattaccacccatccacgctactggccatggattgtaaggcatttccacatgaagaactgggtttagggatgaacacacagatcataccccccgatatcaatttgcccctttctggcgagcgcagccctccttcacagtcatggaattctgatccctgtgatattctggatgttggtcttggcactcaaggctatgagactgagacttttctcaaccttcccaaagctggaaggaagtgcaccaagcgcattgatagcatttggggtgc

SEQ ID NO: 29991 - DNA, 384 bp, Glycine max
  Clone ID: LIB3138-036-Q1-N1-F1
agcgaagttgccagagacggttaaagctttctcatggctactacctttaccctcgcaacgctgtcactaccgtcgtcttctcgtgtttccattggcggagctccgattcgccaccaccgttctccgaaccggatcgggttgttgccgcctctcaaatgctcctctttggagccggaaaaccgcccgccttctcccttcgactggactcacaagttgatcgccggtgtcgccggcgtcggattcctcgaaacctcgtacctcacttaccttaaactcaccggcgcagacgccttttgccccgtcggcggcggcacctgctctaaaatactcgacagtgattacgccctccgtttcggtattcctcttcctctgaatgggatggct

SEQ ID NO: 29992 - DNA, 360 bp, Glycine max
  Clone ID: LIB3138-036-Q1-N1-F10
gcgctgcttcactattctacctatggagtttaatcttgtggtccgtcaaaagtttttaaattttgcgaggttcattatgaacaaaagggacaaacttagttgtcaagttggaatcaacccatactccatggaatggactggtttggccaatagattactgagtaagggcaatgatattctgtgctgcgattattctagttttgatggtttgattaccaagcaagttattagcacgatggcagaaatgataaacagtctttgtggtggtgatgaaaaattgatgcttgaaacgacgcacctgctgtttgcttgttgttcaaggatggcaatttgtaagaaagatgttttgagagttgaatg

SEQ ID NO: 29993 - DNA, 404 bp, Glycine max
  Clone ID: LIB3138-036-Q1-N1-F3
tgctggtatttcaggttctcgtcttttgggcaccattcctcagtccatttcacagcaaactgtttggaatcaaatggctacagtgagaacaccattgaattttgattttagcaagcatagcttttgtcagggatctattgaccttctcggtggaagaatcttactggacaaaactggagattggatcacacttatacaaaattctccaattagtaactcattgagagttgctgcttggaagaaaggctgtttaatggtcaagattgtgatgtctgggaatgcagcaatcaaaacgagcgattgggcctcatcggttcaagtgtttttaacacacagcaacaggccagagcattttgatgcatgttagtggacataatcagaaccacattactgggaattgatct

SEQ ID NO: 29994 - DNA, 396 bp, Glycine max
  Clone ID: LIB3138-036-Q1-N1-F5
gtagttttcaacatttacaataagaaggttttgaatgcttttccttacccatggctcacctccactttgtcccttgctgctggctccctcatgatgttagtctcatgggccaccagggttgctgaggtcccaaaagtcaacttggacttctggaaggccttgtttcctgttgcggtggcacacacaattgggcatgttgctgcaactgtgagcatgtccaaggttgctgtttcattcactcacatcatcaagagtggagagccagctttcagtgtccttgtgtcaaggttcttgctcggagaagcattcccaatgccggtttatctgtcactgctgccaattattggtggttgtgcactagctgcagtgactgagctcaatttcaacatgattggc

SEQ ID NO: 29995 - DNA, 293 bp, Glycine max
  Clone ID: LIB3138-036-Q1-N1-F6
gttctgcttgacttccacactcacagagcagccctggtctgtgcggaaaccaaacatggccagagtgcatgctctccgacagaaccggctatataaatattccttaccatcctgtgattctggcactagacgaccagactgtggctcttcttgagactctgatgaaggtgctgctgtcactaccatttatgtacgtctacacgatgggcaccatgatgcaagctatgatactaggcaccatgactatagaggggtgaatgtctacgctacttgtcaaagagggttagcatgtg

SEQ ID NO: 29996 - DNA, 314 bp, Glycine max
  Clone ID: LIB3138-036-Q1-N1-F7
agcaagtgttgatttgcagcgcactcatcgtattagaggaatgattaaaatggtggccacaggtggtattcctgagaatacaggtatatcattggcctgggctatgaatagttcttttagggggcgcgccagttctgatatttacaccatctgctctcaagactgtgaattgtggaatcctgcttgcacaaaagcaatgactatgtcatttaatccaaacccgtgttctgatgcatggagtttggaatttctgaagcgtactggatttcattgcgatatcatttgtgtcactggatggactgccaccccaatgc

SEQ ID NO: 29997 - DNA, 210 bp, Glycine max
  unsure at all n locations
  Clone ID: LIB3138-036-Q1-N1-F8
cttcaacccaaacacaaaaagaaggaaagagatgaagatgcatgaaaatcgaaaaattccccaaactttacaccgtacaaaaccctatcccaattttactctttctcaaattcaatttcttgaaatccctcccctataatcatcgattatgcttcgngcaatctctcttcgatcccaatggactacatggaagacgacgcaaggtaccct

SEQ ID NO: 29998 - DNA, 396 bp, Glycine max
  unsure at all n locations
  Clone ID: LIB3138-036-Q1-N1-G1
cagccttccgggtgactatggatttgaccctctgggactttcagaccctgaaggaacaggagggttcattgagccgaaatggctagcatatggtgagataatcaatggtcgttatgcaatgttgggtgcagttggtgcaatagcacctgaaattctaagcaaggctggtctgatccctcaagagacagcactcccatggttcagaacgggtgtgttcccacctgcaggaacctacaactactgggcagactcctacacactgttcgtgtttgagatggcactgatgggatttgcagagcacagaagattccaagactgggccaaaccaggctctatgggcaaacaatacttcctaggactagagaanggtcttggaggttctggtgagccagctta

SEQ ID NO: 29999 - DNA, 275 bp, Glycine max
  Clone ID: LIB3138-036-Q1-N1-G2
tggaaacaaatttggttaaattgtctcttgatgatgttgaaactcctaaaggttccatgttggatctgaaaatttctcaatctaaaattgcacttcccaagaacacagttggaggaaccattctgcgtagtgatctattggcaaattttttgacagagggcaattttagagcaagtgttgatttgcagcgcactcatcgtattagaggaatgattaaaatggttggccacagttggtattcctgagaatacaggtatatcatttggcctgtgcta

SEQ ID NO: 30000 - DNA, 397 bp, Glycine max
  Clone ID: LIB3138-036-Q1-N1-G3
ctctttcttcatagcatttggaaatttggcttgtgataccatcaattttggggcttttgcccacaagctggtgcagtttggagagattcaggaaaaagttgtattgaaattttcacaagaggaatttcttacagctaggtcaactcatgtgcgttctgcaacaactctgttggctgatgggtgtccatatttgtatgcaatggtgcatgatagttcaaagtctacaataacaggtgattttgtgattggcgtcaagatgacaaccataaacaatatgtgtgcatatgggctcaatcctggtatttcatgttctcagcttttgggcaccattcctcagttcatttcacagcacactgtttggaatcaaatggctacagtgtgaacaccattgaatttt

SEQ ID NO: 30001 - DNA, 107 bp, Glycine max
  Clone ID: LIB3138-036-Q1-N1-G4
cgctcctcgctccttcaggataaagagggaaaagtgatcgggcaggattcattcccctccaaaacctctcctcttcactccggtggtaaatcaactagggggaactc

SEQ ID NO: 30002 - DNA, 174 bp, Glycine max
  Clone ID: LIB3138-036-Q1-N1-G6
gcttgtcatctatgactggcaccgcataccatatgccgtggtacatgccaaagggacttgagcatatgtttacattacagttacaccacattggttttatcacccatgtgcaaatcaacattgtatccgatggggatagacccgctgaaaaattctagcctcatgtgttattca

SEQ ID NO: 30003 - DNA, 222 bp, Glycine max
  Clone ID: LIB3138-036-Q1-N1-G8
atctaagtgagatacacagtagttaggtagcaagcataagtgtctaaccttaaaaacatatctgctacatatcgtgtgcattttggaattgtgccactaaaattctattcatctatggctgcctcatcttatgctatgcaatcaatcctttgcaaccctatgatccgcatttccagcgggtctagggagaaccattttggtgttcctgcttatcacatgaga

SEQ ID NO: 30004 - DNA, 405 bp, Glycine max
  Clone ID: LIB3138-036-Q1-N1-H1
atctgaaccaagttccaagattgctccacttaagctggagtctccaatcgggcagtttctctctcagattttgataagtcacccgcatcttgtgcctgccgcagtagagcagcaacttgagcaattccaaactgattgtgatggcgataaacaaaagaaagagccttctgcttcaggcaccgacttagttttatacaggagaattgctgaggttaaggctaaagagaggagaacagctctagaagagatattgtatgcattggtggtgcaaaagttcatggatgccaatatttctctgataccctccttaactccaaaccactctggtcaggttgattcatggccaagtgaagatggaaaactggaggagcttcactcaccggaagcctatgagatgatccaaaa

SEQ ID NO: 30005 - DNA, 250 bp, Glycine max
  Clone ID: LIB3138-036-Q1-N1-H11
aggaactatagagtgttgcacacacaaacaactcttcgacacaggctctgaggttatgaaagttgacatatacatggccctgtagcacgatatgttaataaatacactaattcttttaatatggaaggtggagacgagcactatatttttctaaataagtcgattggcagacacactaatggtgtagaattggataactatctataatgaaccaaaagtaagatgccatgatgctgtgtctcatgtgatg

SEQ ID NO: 30006 - DNA, 230 bp, Glycine max
  Clone ID: LIB3138-036-Q1-N1-H2
ggagttgtaaattaagagcatggctgcacaagctcttgtatcatcatcttctcttaccttctcagcggaggctgcaagacaaagtcttggaccaagatcactccaatctccatttggcttctccagaaaagcctcctttcttggtaaggcagctgctaccccccctgtcaagcaaggatcagacagacctttgtggtttgcatcaaagcaaagtctttcttacttggatg

SEQ ID NO: 30007 - DNA, 268 bp, Glycine max
  Clone ID: LIB3138-036-Q1-N1-H4
aaaaaaaaaaaattaaaatataaaataaaataaaaataaaataaaaaaataaaaaaaaaaatatataaaaaaaaaaaaaaaaaaaaaaaattttaaaaaaaaaaaaaaaaaaaaaaagggggcggcccccaattttttaatttttttacccgaaatttattttcgaaccggttcttttaggcttaccaatttttcttttttgaagtcgttttaaaacttggcgtaataattggaatagtttttttctttttaaaattttttattcttt

SEQ ID NO: 30008 - DNA, 360 bp, Glycine max
  Clone ID: LIB3138-036-Q1-N1-H5
atgctcctgattcaaatgataatattgatttactgttgagcattgatttgttgggtttacaaggagcaagtaaagcttttccaaacaaaattgtttttgatgataagcttgtgttggctaacacacaagaattctttgatggaaattttccagtggattcttggttaccaatttttgtgaattgtctttatcctgtaagtcaattaccttcagaagctgtcgttgtaaatgttacatgtggtagtgggcgcttgtggttacccaccactgcttggattagttctgcagataacaatcgctcctcacatatcaacaaaaggattcgcacagcacttgggaaaagtaagaaaattggttttc

SEQ ID NO: 30009 - DNA, 241 bp, Glycine max
  Clone ID: LIB3138-036-Q1-N1-H6
caaacatgtcgaacacatgcggcaactgtgactgcgctgacaagactaactgcaccaagggaaacagctatggtgttatagtagagactgagaagagctacatcgagactgttgacatggatgttccagcagctgagcatgatgggaagtgcaagtgtggcactaactgcacttgcacggactgcacttgtggccattaaggaatatgtatgaaaatgtaattgccatgtgtttggcaata

SEQ ID NO: 30010 - DNA, 368 bp, Glycine max
  Clone ID: LIB3138-036-Q1-N1-H7
ggtcaagattgtgatgtctgggaatgcagcagtcaaaaggagtgattgggcctcattggtacaagtgtttttaacaaacagcaacagtacagagcattttgatgcatgtaagtggacaaaatcagaaccacattcctgggaattgatcttcccaatagaggtatgtggtcctaataatggttttgaaatgtggagttctgagtgggcaaatcaaacttcatggcatttgagtttccttattgacaatcccaaacagtctacagtttttgatattctcttgggaatctctcaagaatttgaaaatgctggtaatactcttatgccagctttttctgtttcacaagctactggcagatcttcttaaaatg

SEQ ID NO: 30011 - DNA, 171 bp, Glycine max
  Clone ID: LIB3138-036-Q1-N1-H8
cgatcttcgttcggggacttgttctaataccaccaccaccactcgccgatggccactatcgggggcttacacgacttccaaggctctcaaaacagcgtcgaaaccgaagccctcgctcgattcgccgtagacgaacacaacaggaagcagaattcgcttctggagtttgct

SEQ ID NO: 30012 - DNA, 148 bp, Glycine max
  Clone ID: LIB3138-037-Q1-N1-A1
gccttatcctttcctacaactccaaacacaaagacatcatcatccatggctgcctccgtctccactgtcggagctgtcaacaaagctcttttgaacccgaatgggtctggagctggagcttcaactcccagttcatccttcttttgga

SEQ ID NO: 30013 - DNA, 295 bp, Glycine max
  Clone ID: LIB3138-037-Q1-N1-A11
tatccttccgattgccaaggctatctacaaaagacacaatctagtagatagaataattctcactagccccaggccagaagtttttgtggatagccttggcgatcgggcggattgctgcgccggctatcgggagctggtctgcgctacttgttctcacagtgatctgtccactgagcttgttgttcaatccagcgcgaacagtctccttatatcctcgtgcgacagatacttctggcctggggctagtgggaattattctatctgctagattgtgtcctttgtttgtggccctggc

SEQ ID NO: 30014 - DNA, 338 bp, Glycine max
  Clone ID: LIB3138-037-Q1-N1-A12
agcggacatgactggtcaggggatgacacttatacaaagtgctacagttcctaactgattcagaggtgctgctcggacaaaaggctgtctaatggtcaagatggatgtgtctgggcatgcaccgaaccacatgagtgagagttgctcattgcaacagaggtatgtaacactcatcatcggtacaaaacgttgtgatgcatgtgagcggacaaaacctgatccacattgctgggaattgatgtcaccaacaaacggatgtcagcctaagaattgctcttaaaagtggagctctaagtgggcaaagctaactatactgcatttgcatcttcttattgacc

SEQ ID NO: 30015 - DNA, 317 bp, Glycine max
  Clone ID: LIB3138-037-Q1-N1-A3
ttggatcatagtccacggtcatgtctatgattgcacccgcttcctcaaagaccatcccggtggcacagacagcatcctcatcaacgccggcaccgactgcaccgaggagttcgaagccatccactccgacaaagccaagcaaatgcttgaagactaccgaatcggcgagctcaccaccacctgctacaactctgattcttcatcgtcaaacccctccgtgcatggcaactccgacaccatccctttgacccccatcaaagaaagtgattacacccattgcgaagcgtggctcttaacccacgcgagaaaatcccatg

SEQ ID NO: 30016 - DNA, 239 bp, Glycine max
  Clone ID: LIB3138-037-Q1-N1-A6
gggaagggggtctcacttgactcgattgcaagtgatccacgacacactgttcgcttcacaaaagcttcgaatccaattcctcagtaacatctgcaagaagtcttcttcttcaccatgccaccaaagcctttagactatgggtcaataaatgaaaacgcgaagaagagtcaatatgctgtcagaggtgaattataccttcgagcttctgagcttcagaaagagggcgaaaagagtatatt

SEQ ID NO: 30017 - DNA, 395 bp, Glycine max
  Clone ID: LIB3138-037-Q1-N1-A9
cagaaccacattcctgggaattgatcttcccaatagaggtatgtggtcctaataatggttttgaaatgtggagttctgagtgggcaaatcaaacttcatggcatttgagtttccttattgacaatcccaaacagtctacagtttttgatattctcttgggaatctctcaagattttgaaattgctggtaatactcttatgccagctttttctgttccacaggctactgccagatctttttgaaaatgcggaatcctctgcatgatctggaatttgtgttttctttcgcttgttcgtttgtttaattcaataaaggaaattaggcatgacccttttgttgagtatgctctgcctatttgaaaatttccacacctcttttaattgtcgtaatgatgt

SEQ ID NO: 30018 - DNA, 295 bp, Glycine max
  Clone ID: LIB3138-037-Q1-N1-B1
cgcaagtcctgattgcaacatagttggtgcaatgcttttggttgatacttatcataccaatcctgaaaatgcagttcgtagtatttttgttgcgcctttcagaggcggaaggcccattcgggtggttacatttccgaataccattgtgcagattgaaccagacatgaattcaaggtttcagcttttgagtaccactaccaatggtgatattgttcaagggaaagatctcgcaatgggtaaaggtaatgtaacatgtgctgctgttggcttgacatcaagttacacttcaacttca

SEQ ID NO: 30019 - DNA, 396 bp, Glycine max
  Clone ID: LIB3138-037-Q1-N1-B10
atgacttctccctacattaaatgtacagtctctttcttcatagcatttggaaatttggctgatgataccatcaattttgaggcttttccccacaagctggtgcagtttggagagattcaggaaaaagttgtattgaaattttcacaagaggaatttcttacagcttggtcaactcaggtgcgtcctgcaacaactctgttggctgatgggtgtccatatttgtatgcaatggtgcatgatagttcagtgtctacaataccaggtgattttgtcattggtgtcaagttgacaaccataaacaatatgtgtgcatatgggctcaatcctggtatttcaagttctcgtcttttgggcaccattcctcagtccatttcacaacaaactgtttggaatcaa

SEQ ID NO: 30020 - DNA, 258 bp, Glycine max
  Clone ID: LIB3138-037-Q1-N1-B11
caagaacttcatgaccctgcccaacatcaaggttcctctcattcttggtatctggggaggcaagggacaaggaaaatctttccaatgtgagcttgtctttgccaagatgggaatcaaccccatcatgatgagtgctggaaagttggaaagtggaaatgcaggagagccagcaaaactgatcaggcagagataccgtgaagccgcagacttgatcaaagaaggaaagatgtgtgctctcttcataaacgatcttgatgc

SEQ ID NO: 30021 - DNA, 329 bp, Glycine max
  Clone ID: LIB3138-037-Q1-N1-B12
gcaatgggacttagatctctaaagcagacaaatactcatagtggacttagaatttttaacccggtggatgagctacttaacagaaccccaattaaaaccaatgcaatgcaagctatgaggaagggacctcaaggcaagaatgcctggcctaaaggtataatcacatgtggcatgactttcataattataggaacggaggtggctccatggtgcaaaactggtgggttaggagatgttcttggaggtctaccaccagcattggcaggtttcgggcatcgagtaatgactattgtgccacgctatgaccagtacaaagatgcatgggatac

SEQ ID NO: 30022 - DNA, 202 bp, Glycine max
  Clone ID: LIB3138-037-Q1-N1-B2
gaggaatcttagtggacaaaactggagattggatcacccttatacacaattctccaattagtaacttgttgagagttgctgcttggaaaaaaagctgtttaatggtcaagattgtgatgtctgggaatgcaccagtcaaaaggagtgattgggcctcattggtacaagtgttttttacaaacagcaaccgttcagagcattt

SEQ ID NO: 30023 - DNA, 297 bp, Glycine max
  unsure at all n locations
  Clone ID: LIB3138-037-Q1-N1-B5
gtatgcacaaaacccagtgaaggatcgcgaacctggtttatgggttgaagtttggttcagcattcgtgggggaagataagagaactcacaccatatccgttctcgctcctctacgaattttcatatccattcatatttttctcatcatggacttggccgcgaagcttcaccgtttagacctcaccggcgtggtcattttggacgcacgaaagcccttcgtactccgncacctttcgtcacgcattctcaccaaaacaaacaccaatttaatctacacgaaccggttctcgggcccat

SEQ ID NO: 30024 - DNA, 273 bp, Glycine max
  Clone ID: LIB3138-037-Q1-N1-B7
atccaaacccgtgttctgatgcatggagtttgtaatttctgaagcgtactggatttcattgcgatatcatttgtgtcactggatggactgccaccccaatgcaagatgttcaggttacaattgattggtttatttcctctcaggaatgtgttcccaggacctattgtgttttaaatccacaaaatccttttgtgttaaatagggggatgggaaaattgactttcccccaaggcacttcccgaagtggtaagagaatgcctttttctatagggg

SEQ ID NO: 30025 - DNA, 239 bp, Glycine max
  Clone ID: LIB3138-037-Q1-N1-B8
ctcaagaagagaccaactgagttccgagttgacaaggtccttcaaccctttgatgaaaacaaattcaactttaccaaagttgggcaagaagaggtcctcttccaatttgaagctagcgaggatggacaagtccagttctttccaaatgctccagttgatgttgacaattctcccagctttgttgccatcaatgtcagtcctattgagtatgggcatgttttgctgattccgcgcatttt

SEQ ID NO: 30026 - DNA, 393 bp, Glycine max
  Clone ID: LIB3138-037-Q1-N1-C1
ggttgatgggtgggatgatcctcgtttgatgacactagctggtttgcggcgttgaggcatgactccaactgcaatcaatgctttcgtacgaggaattggaataactagaagtgatggcactttgatttctgtggaacgccttgaatatcatgttagggaagaattgaacaaaacagcttctcgtgcaatggttgtcctacatccactcaaggttgttattactaatcttgaagccaactcagtaattgaggttgatgcaaagaaatggcctgatgctcaagctgatgatgcttctgctttctacaagatttcattttccaatgttgtatatattgaacattcggacttccggatgcaagattcaaaagattattatggccttgctcctgggaa

SEQ ID NO: 30027 - DNA, 397 bp, Glycine max
  Clone ID: LIB3138-037-Q1-N1-C10
agaaattaatatatatcaaccaaaatggggttgtacaagatttcattatgtctattgtgtgtgttggggttagtcattgtgggtgatcatgttgcgtatgctcaagactcaccaacagactatgttaatgcacacaacgctgcaagatcacaggttggtgttccaaatatagtttgggataacgcagtcgctgcttttgcacagaactatgctaaccaacgcaaaggtgactgcaaactcgtccactctggtggtgatggaaaatacggggagaatcttgcaggaagcaccggtaacctaagtgggaaagatgcagtgcaattgtgggtgaatgagaaatccaagtataactacaactccaactcgtgtgttggtggggagtgcctgcactacactc

SEQ ID NO: 30028 - DNA, 395 bp, Glycine max
  Clone ID: LIB3138-037-Q1-N1-C11
gggacttgttgacatggcttcttctacactcgctctgactctcagcctctccaccaccaccaccacctccaccacctcctactcctatcaacaccggtttccatgtcctagaataaagttattctcttccaagcaccgctccttctccgtctcagcttctgcttccacctcaaattcgcttcaggctctcatattcgactgcgatggcgtgatcctcgagtctgagcacctgcatcgccaggcctacaacgatgcctttgttcacttcaacgttcgctgcccttcttcttcttctccgggcccactcaattgggacgttcaattctacgacgaactccagaacctcattggtggaagcaaacccaaaatgcgatggtactttaaggaacatgggt

SEQ ID NO: 30029 - DNA, 179 bp, Glycine max
  Clone ID: LIB3138-037-Q1-N1-C12
cggctcgagatattgtaagaattatggcatcagaggagacaacaatttggaaggtaatgataaaaactccagcctccatagtgttgataatttacaccttcatatcaatgtggtttgtaggtggtctcactgccttccatttgtatttgataaagtccaatcagactacatatgaaaac

SEQ ID NO: 30030 - DNA, 277 bp, Glycine max
  Clone ID: LIB3138-037-Q1-N1-C3
gcaactttgcaatttaaaaagttagcaaattgtgatttctctaaagaaaaccttaaaccaaatgtctaatgttttggggggggctcctggggacagggcgagtttttggtcacacctcctttatgttgcgtgtaataatctgaaaacgcaaaaagcttatcttgcaaatctcgaaaatgtgtaacgagatttgtttttgcacatcccagagaaagctccccatttgaaagggaaagctctctctcgtattgaatggctgcaaaaagctgatgtgcct

SEQ ID NO: 30031 - DNA, 287 bp, Glycine max
  Clone ID: LIB3138-037-Q1-N1-C4
cgttgataccgatcaaaacaataaaggcttagtgagtcgtgctaaccctaatgattttcagtatcgtagccccaggctcgcaacactggataggaactctgatagcacagaatctgagccaagggaaattggcaacagggttttcaatgtgtccagcatacttgtgaccgaaggtgatcttttgcagcctgaaaggatccataatgggattgtgtttaatgttgtcaagaaagaagacttgtcacccttaagtggtagcagtcatgattttgaaaattacaacattg

SEQ ID NO: 30032 - DNA, 398 bp, Glycine max
  Clone ID: LIB3138-037-Q1-N1-C6
ttgcccatcacaaatccgtgggacattagtatcattaaaagaactcttcattgtccttgggattctgcttggttattttgtgggaagctttctgattgagacagttggaggatggcggttcatgtacggatttagtgctccagttgctgtattaatggggcttggaatgtggactctccccaattctccacggtggttgcttctcagagcagtgcaaggaaaaagttcttttcaagatttgaaggaacaggcaattgcttccctgagcaaattaaggggccgaccacctggtgacaaagaatctgagaagcaaatagaagagacccttgtctcattgaaatctgtctatgcagaccaagaatccgaggggaatttcttagaggtgtttcagggtccca

SEQ ID NO: 30033 - DNA, 388 bp, Glycine max
  Clone ID: LIB3138-037-Q1-N1-C7
gtgttctgatgcatggagtttggaatttctgaagcgtactggatttcattgcgatatcatttgtgtcactggatggactgccaccccaatgcaggatgttcaggttacaattgattggtttatttcctctcaggaatgtgttcccaggacctattgtgttttaaatccacaaaatccttttgtgttaaataggtggatgggaaaattgactttcccccagggcacttcccgaagtgttaagagaatgcctctttctatagggggaggagctggtgcaaagaatgctattctcatgaatatgccaaatgctgttctttcaatgtggagatattttgttggagatctcgtctttgaagtttctaagatgacttctccctacattaaatgt

SEQ ID NO: 30034 - DNA, 288 bp, Glycine max
  Clone ID: LIB3138-037-Q1-N1-C8
cttcataagatttttctgaaaaggaagatcatgaaaaacccatgatgattgatgccagattgagacatagaatagatcctcaatacaacgaggttcaggctcagatggaaacaaatttagttaaattgtctcttggtgatgatgaaactcactaaaggtgccatgttggatctgagaatttctcaatctaaaattgcaacttccaagaacacaattggaggaaccattctgcgtagtgatctattggcaaattttttgacagagggcatttttagagcaagtgttgat

SEQ ID NO: 30035 - DNA, 276 bp, Glycine max
  Clone ID: LIB3138-037-Q1-N1-C9
gttgaaatgtggaatcccttctggatttccgctcacagttatttgcaatagccatttttaatgagatgctcattaaatatagctatgaaaaatactgccccaggctaaagctccaagtttgtttttccattcctccaaaaatttggttccttggggggggtatggggaggataactaaattagggtccatgaatatgtcaagccttactttagtggttctaaattgaaaagctttctacctagtcataacatcaccattcctgatggtattgacaa

SEQ ID NO: 30036 - DNA, 382 bp, Glycine max
  Clone ID: LIB3138-037-Q1-N1-D1
gtgaagaacggttagcagcacatggcttcttctacactcgctcccactctcagcctctccaccaaatcccactgctatctccccaacaccaaacaccggttttcatgtcccagaataaagttattctactccaagcaccgctccttctccgtctcagcttctgcttctgcttccacttcaaattcgcttcaggctctcatattcgactgcgacggcgtgatcctcgagtctgagcacctgcattggcaagcctacaacgatgcctttggtcacttcaacgttcgctggccctcttcttcttcttcgggcccactcaactgggacgttcaattctacgacgaactccagaacctcattggtggaggcaaacccaaaatgcgat

SEQ ID NO: 30037 - DNA, 397 bp, Glycine max
  Clone ID: LIB3138-037-Q1-N1-D10
gtggttcttccatagattgaaagccggacgcccaattcctatccccagctcaggactacagataacccaacttggtcatgttaaggatttggcgacagcttttatccaagttcttggtaatgagaaggccagcaaggaagtattcaacatctcgggagagaagtatgtcacgtttgacggattagcaagagcatgtgctaaggctggtgggttcccagagccagagatcattcactacaaccctaaagattttgactttgggaaaaagaaatcatttccattccgtgaccagcatttctttgcatcaattgagaaagcaaagagagtgcttgggtgggaacctgaatttgggcttgtagagggtcttgcagactcgtacaacctggactttggtaga

SEQ ID NO: 30038 - DNA, 300 bp, Glycine max
  Clone ID: LIB3138-037-Q1-N1-D11
ctcgtcatcgtttcgttcaactttcaacgccagttcacactctctgcttcgcgtgtaccaacaagtgcaagttcgaatcaatggccagcgctcagctcacagcaatagcgtcatcgatctctacggcgtcgtttgaagggcttcgaccttccgctgttcagtttgcttccacgggcagaattagaattggcaatctctcccaaaggtccttccggggcttggttgtcaaagccgccaccgttgttgcccccaaatacactgcgataaagcctctgggagatagagtgcttataaaaatta

SEQ ID NO: 30039 - DNA, 397 bp, Glycine max
  Clone ID: LIB3138-037-Q1-N1-D12
gaaatttggctgatgataccatcaattttgaggcttttccccacaagctggtgcagtttggagagattcaggaaaaagttgtattgaaattttcacaagaggaatttcttacagcttggtcaactcaggtgcgtcctgcaacaactctgttggctgatgggtgtccatatttgtatgcaatggtgcatgatagttcagtgtctacaataccaggtgattttgtcattggtgtcaagttgacaaccataaacaatatgtgtgcatatgggctcaatcctggtatttcaggttctcgtcttttgggcaccattcctcagtccatttcacagcaaactgtttggaatcaaatggcaacagtgagaacaccattgaattttgattctagcaagcatagctt

SEQ ID NO: 30040 - DNA, 207 bp, Glycine max
  Clone ID: LIB3138-037-Q1-N1-D4
aagatttcccacattcagcttgggaccttttttgctgggacagtgagaaaactttaccaaataatttttctgcagaattgctctcttgcaaattggatactgttactggccaatattatcctgagtgggctccaattaattgtcgagttcatcgacaaccaattcacatcactgaaggaaattatgtcagaaagcaagatgtcagca

SEQ ID NO: 30041 - DNA, 393 bp, Glycine max
  Clone ID: LIB3138-037-Q1-N1-D5
cggcgcgcgctgaagtttgctaggttcatgagcaggttcgggaagagttaccgaagcgaggaagagatgagggagaggtactagatattctcgcaaaacctgaggttcatccgctcccacaacaagaaccgcttgccctacactctctctgttaatcattttgctgattggacttgggaggagttcaaaagacacagactaggcgctgtccaaaattgctctgccactcttaacggcgaccacaagctcactgatgctgttcttcctcccacgaaagactggaggaaagaaagaatagtgagtgatgttaaagatcaaggcagctgcggatcatgctggacattcatcacaactggggctttagaagcagtctatgcacaagcatttgggaag

SEQ ID NO: 30042 - DNA, 278 bp, Glycine max
  Clone ID: LIB3138-037-Q1-N1-D6
gaaaaaaggctgcttataccattttgggggcagtgagcgccccccgattagagccaacctccgcgataatgggccatgttgtgaattgggttaatcggcactactaagccatggctggtgactattaggccctggatgttctaccacctgaggtggatgggtaaccaattgttccagcactacgggacttttttgatgatgcacttaattatccggccagggaacttaactcaaaaacactagtggatggcctgggaaacgtttgggatcaatttcca

SEQ ID NO: 30043 - DNA, 386 bp, Glycine max
  Clone ID: LIB3138-037-Q1-N1-D7
cagtcgcactctgcaatcctatcttgtttgcatgtcaaaatctcattcatcatcatcttcttcttaaaagttaaaaggttaagagagagagagaaagatgagtagcgtgttggagcatggtgttgtgggatgttgcaaatcagggccaggctatgctaccccactggaagccatgtctggtccaagagagtctcttatttatgtaactgctgtctacacagggacaggaatagagaagccggactatttggccacagtggacatagatccaaactctccaacttattccaaagtcatccataagcttcgtgttccttatttaggtgacgaattgcatcacactggttggaattcatgcagctcttgccatggagacccctcggcag

SEQ ID NO: 30044 - DNA, 304 bp, Glycine max
  Clone ID: LIB3138-037-Q1-N1-D8
caacctgtaatgctggaccagaatgaagatcttaacatacagaaggcaataccacatacagatcacaatgaaacaatgaggtctcaggacaagaaaccaatggaatcagaaaccaacaatattgacagaataattgcaaatctcatgttcaagagcatggagttcaacatacatcattctccaattacatcatcaacaaactccgttcaacaagttattggaagtaataatggtccacgtggaaacaactcaaaagccatgaatatggaaaacaaatcttgctaactccacccacaaaaattac

SEQ ID NO: 30045 - DNA, 388 bp, Glycine max
  Clone ID: LIB3138-037-Q1-N1-D9
cgtgtcttcttctctaaaataaaaaaccctaacttctgaacctttcaccgcatcgccaccgattccctatctccactaatcaaagaaaagaaaatgagtagacgctcgagcagaactgtctacgttgggaatctacccggtgatatccgtgaaagagaagttgaagatttgtttctgaagtacggacacataacacacatcgacctaaaggttcccccaagaccacctggttatgcatttgtagagtttgaagatgctcaagatgctgaggatgcaattcgtggtcgtgatggctatgattttgatggccaccggttacgggtggagcctgcccatggtgggcgtggtcattcatcctcaaaagatcggcacaatagtcacagcaatg

SEQ ID NO: 30046 - DNA, 211 bp, Glycine max
  Clone ID: LIB3138-037-Q1-N1-E10
tgagtaggttcatgttggattttaatagccatagtgacgtattgatcattcttggcctttcaactaaatagtatttgtgtagtaaattaaaggcacttggatgtaccaaacttcatgctttttgtaggagtgcgtaggttttaaaaattttctgatgtatctttcatgtgtttgttggttttgtaacagaatatttcctatattatacatt

SEQ ID NO: 30047 - DNA, 395 bp, Glycine max
  Clone ID: LIB3138-037-Q1-N1-E11
aaatatatggctgaaactgcagtgtcccttctattcgaccatttggtgaagttactgagtgaggaaacaacaatcttaaaaaatgtgcacaaggaggttgagggcatcaaggatcagctaagcctaataaactcttacataagggatgcagaaaagaagcagcagaaagatgctgtcaaagaatggttgaattcattgaggaatgtggcgtttcgcatggaggatgtggttgatcactatttgctcaaagtggcagagcgtggtcaaagagatggggcttttggtgtagttactgaagtcaaggagaagttcaaaactgtaacacatcgtcatgatattgcatctgagattaaacatgtaagagaaactctagatagtctctgcagtctcagaaa

SEQ ID NO: 30048 - DNA, 392 bp, Glycine max
  Clone ID: LIB3138-037-Q1-N1-E12
gtcgattgttggagcagaaaatcctgttttgatgtctgcagctgagcagatttttagtgctggtgggaagaggatgagaccagctctggtgttcttggtgtcaagggcgactgcagagttacttggcttgaaagaacttactgtaaagcatcgacgtttagcaaagataattgaaatgattcatactgcaagcttgatacatgatgatgtactagatgagagtgaccttcgacgagggaagaaaactgttcatcaaatgtttggaacaagagttgcagtgctggctggagacttcatgtttgcacagtcatcatggtgtctagccaaccttgaaaatattgaagtcattaaacttatcagccagagggtgaagagatgcataattccatttt

SEQ ID NO: 30049 - DNA, 342 bp, Glycine max
  Clone ID: LIB3138-037-Q1-N1-E7
gcgggtgaagctggatcatcattccttcgaggaatcgatgtgaaccgtttaccttctgtggtcgattgcgaagaggaagcaggtgtgtcatctccaaacagcacggtttctagtgtcagtggaaaacgtagcgagagggaagaagccaatggtgaagaaaacgacacagacagagcttgttccagaggcatcatcagcgacgaagaagatgccgaaacctctagaaagaaacttagactctccaaagaccaatcaattatcctcgaagagagcttcaaagaacacaacactcttaaccccaaacaaaagttggcgctggcgaaacaacttggtcttcgagcg

SEQ ID NO: 30050 - DNA, 328 bp, Glycine max
  Clone ID: LIB3138-037-Q1-N1-E8
tgaaggcatagggagagagagagttctcgaggaagaagaaaaagaggtgaaatatagagagtgaagaagaagaaatagagggttttggtgtttggtgtttgaatcgtgaaaatgttcagaaaccagtatgacacggacgtgacgacatggagcccggcggggaggctgttccaggtggagtacgcgatggatgcggtgaagcaaggctcggctgcgatagggctccgatccaagacccacgttgtcctcgcatgcgtcaacaaagctaactccgaactttcatcgcaccagaagaagatcttcaaagtcgacaaccacatcggcgtcg

SEQ ID NO: 30051 - DNA, 189 bp, Glycine max
  Clone ID: LIB3138-037-Q1-N1-E9
ccgctcacagttatttgcagtaagctctctaatgagatgcttgtctgatataagcttgagagcctaccgtgccacgcttaggctacaagcatgcttttccaatgctgaagaaagctcgtgtctttgagggtggttggggattactgctgaactttggttcattaatatttcaaggcgcacgttaagggt

SEQ ID NO: 30052 - DNA, 239 bp, Glycine max
  Clone ID: LIB3138-037-Q1-N1-F1
tgtttctctagcctttgatttaataacgaaagaaaaggtgaaggcaattattggacctcaaaaatcagaacaagcaaggcatgttataaaccttgggcgcgagcttggcattcccattatttccttctccgctacaaatgcatatcttttcccagcccacactcccattttcataccaatgggacaaaatgattcttctcaggtgaaaaccatatcagccattgtggaaacatattgat

SEQ ID NO: 30053 - DNA, 376 bp, Glycine max
  Clone ID: LIB3138-037-Q1-N1-F10
aagaagttgatcagttccttgtctctccttgaattataaaaccattcacagtcttgaacccaatttcactctttgcacctcaaacaccttataagcctcaatttcacaaccaaaaatgcaaagttcaatctcacaatctgagatttgcatcactgattaccttctaccccaagaagttccatctcaatttcaatttccagatatgagcaacaataacataccaatgaaccataccaaccttcaaatgcctcaaatcacatctttctccaagcctccaaggtcctcatcaaatctaagcaaccgcaaaccgtccttgagaaacatcacaatcccttccataacctcaggtcttacaacaactatgtcacaaacaaca

SEQ ID NO: 30054 - DNA, 253 bp, Glycine max
  Clone ID: LIB3138-037-Q1-N1-F11
ctcccaccgaccaaaacgcgcaacacgttgtaattaaaacgacaccgaaactaatgggcgtcttcagcgaaaacccgaatccggacccggttgtgatccgccaggtttgggcttcaaatctcgaatccgaattccaactcatccgcgaactcatcgaccactatccttttatctcgatggacacagaattccccggtgttggtttccgaccacacctggaccccacaaaaacctacaaccaccgcaacaacaa

SEQ ID NO: 30055 - DNA, 396 bp, Glycine max
  Clone ID: LIB3138-037-Q1-N1-F12
acctgctgttggcttgttgttcaaggatggcaatttgtaagaaagatgtttggagagttgaatgtggaatcccttctggatttccgctcacagttatttgcaatagcatttttaatgagatgctcattagatatagctatgaaaaattactgcgccaggctaaagctccaagtatgtttttacaatccttcaaaaattttgtttctttgtgtgtgtatggtgatgataacttaattagtgttcatgaatatgtcaagccttactttaatggttctaaattgaaaagctttctagctagtcataacatcaccattactgatggtattgacaaaactagtgcaactttgcaatttagaaagttagcagattgtgattttctcaagagaaactttaagc

SEQ ID NO: 30056 - DNA, 313 bp, Glycine max
  Clone ID: LIB3138-037-Q1-N1-F4
caccattgaattttgattctagcaagcagagcttttgtcagttttctattgaccttctcggtggaggaatcttagtggacaaaactggagattggatcacacttatacaaaattctccaattagtaacttattgagagttgctgcttggaagaaaggctgtttaatggtcaagattgtgatgtctgggaatgcagcagtcaaaaggagtgattgggcctcattggtacaagtgtttttaacaaacagcaacagtacagagcattttgatgcatgttagtggacaaaatcagaaccacattcctgggaattgat

SEQ ID NO: 30057 - DNA, 131 bp, Glycine max
  Clone ID: LIB3138-037-Q1-N1-F7
cgagaattgtttgatgggttgatcaaaaatcgctctccaaaccagattcgtaacactgaaagtgtgaacaattaacaaagcaagagaaaattatctccgatggcgaaatattttcatagtaaccttcgaaa

SEQ ID NO: 30058 - DNA, 369 bp, Glycine max
  Clone ID: LIB3138-037-Q1-N1-F8
gtttaattcttgtgttgagttcagcctttgatggacttctcaagtagtgaaaatttaaacggtgcctcttgtgtattgtgttttacaggttagaattgctagaatctttaacacctacgggcctagaatgtgcttagatgatggtcgtgttgttagtaacttcgctgctcaagcactaatgaaggagcctctgaccgtttatggagatgggaagcagacaagaagtttccaatatgtctctgatttgcgggagggtctaatacgccttatggaaggagaacacgtgggtcctttgcatcttttgaaatccgtaaaatttctatgctcgaacttgcaaagttgttcaagaaacaatctaccctgatgcta

SEQ ID NO: 30059 - DNA, 215 bp, Glycine max
  Clone ID: LIB3138-037-Q1-N1-F9
ttttcgttctgttttggcttcttcgctgcaactctctaccttccctctttttccgaatctgaatagaaatggcttcggagactgagacgttcgcttttcaggccgagatcaaccagctcctcagtctaataatcaacaccttctacagcaacaaggagatctttcttcgtgagctcatcagcaatgcctctgacgctttggacaagaatcgattt

SEQ ID NO: 30060 - DNA, 199 bp, Glycine max
  Clone ID: LIB3138-037-Q1-N1-G1
gggggtgataacctaattaggggtcctggatttttccaggccttccttaaggggtcctaaatggaaaagctttttacctggtcttaccatacccattcctgttggttttgccaaaactagggcacctttgcaatttaaaaagtttgcgaattgggattttttcaaaagaaactttaagcaaatgcctaatgttttgggg

SEQ ID NO: 30061 - DNA, 271 bp, Glycine max
  Clone ID: LIB3138-037-Q1-N1-G10
caataccaggtgattttgtcattggtgtcaagttgacaaccataaacaatatgtgtgcatatgggctcaatcctggtatttcaggttctcgtcttttgggcaccattcctcagtccatttcacagcaaactgtttggaatcaaatggcaacagtgagaacaccattgaattttgattctagcaagcagagcttttgtcaagtttctattgaccttctcggtggaagaatcttagtggacaaaactggagattggatcacacttatacaaaa

SEQ ID NO: 30062 - DNA, 394 bp, Glycine max
  Clone ID: LIB3138-037-Q1-N1-G7
tcgagataactagaaacagtgtgatgaaaatgaaggtccttgttttcttcgttgctacaattttggtagcatggcaatgccatgcgtacgatatgttccctctccgaatgaacactggctatggtgcccgtactccggaggtgaaatgcgcaagttggaggcttgctgtggaagcacacaacatctttggctttgagaccattcctgaagagtgcgttgaagcaacaaaggaatacatccatggcgaacaatatagatcagactcaaaacagttaaccaacaagcttacttttatgccagagacctcgaagtccatcccaaggacacatttgtgttcagtatagatggcaccgtactctctaatattccatactacaaaaaacatggatatggg

SEQ ID NO: 30063 - DNA, 259 bp, Glycine max
  Clone ID: LIB3138-037-Q1-N1-G8
ctttgggacagagccgcacagggttgggtttttgtgcacctgtgttcctgttggacatttctcattttcagactgtattattgtaagagctgcacgccgtaactcataagctctagttatgattctaaatcattcaagacaatttgtatttcagctttatggtacgaaacgtgtctatcgtgtacccgaagttagttttcggtttgagtttggattacgtactaaatctttatgtactattaatttctaagaaaaattg

SEQ ID NO: 30064 - DNA, 397 bp, Glycine max
  Clone ID: LIB3138-037-Q1-N1-G9
gaaaaacttagaaccttgtttgtgttcctgggagaatgtttgaagttgattgtggctgataatgaagtgggaagtttaaaacaagccttggaaggtaaatatgtggagccagggcctggtggtgacccaataagaaatccaaaagtcttgccaacaggaaagaatattcatgccctggaccctcaatctattcctacaactgcagcgatgcagagtgccaaaatagtggtagataggttgattgagaggcagaaagctgagaatgggggaaaatatcctgagacaattgcacttgtattgtggggaactgataatattaaaacatatggtgaatccctggctcaagtcttgtggatgattggtgtggaaccagtggctgatacctttggcagggtaa

SEQ ID NO: 30065 - DNA, 343 bp, Glycine max
  Clone ID: LIB3138-037-Q1-N1-H10
cattactagaataccaggcgtgcattaaaaggatacatggtgatgaatctgggcagaaacactgcactggacaatattttgattattggtcttgtattgacaaatgtgttgcaccgaagctattcaccaaactgaagtaaatcgggaaggatttgatggctatcattgcattctgttctgttttcattcccaaataacttcgtctaaacattcgatgttataatatccaaactatatgccctatatggttattcttgtgtttaccgtgaagttttgagcctgtggagaccttagagtatgattaataagaacattatgccaaatttttacttccgagatttgg

SEQ ID NO: 30066 - DNA, 324 bp, Glycine max
  Clone ID: LIB3138-037-Q1-N1-H12
gtgaaaaagatggctggggttgagagaagactatgtagtgattcagatatccatgctcttcacaaagaattggatgaaggttcatgtcctatctgcatggaccatccacataatgctggtctactcctttgcagctctcatgagaagggctgctgatcttacatttgtgatacaagttatagacattcaaattgcctggaccgttttaaaaaaatgatggacaattttgaggagaaccaagatttacccagttctttatttaacacaaacaaatctggtaatagttttgatattaaccttactgcgcaatctgacatgcatgat

SEQ ID NO: 30067 - DNA, 142 bp, Glycine max
  Clone ID: LIB3138-037-Q1-N1-H2
gctagttttgatgggttggttacccaaccagttattagccagatgggcggaattgttaaccagctttttggggggggttaaaaattggtgccgggaaaggccccccttcttgttgccttgtgttcaaaggttgccatttttt

SEQ ID NO: 30068 - DNA, 278 bp, Glycine max
  Clone ID: LIB3138-037-Q1-N1-H6
gtgaacaagatggatggcgtgcagagcctaaagttttaaaaagggcggcggcctcctcaatggcttttttttcccaatccttggctggcaaggccgtgaagctggcccattatgcccccgaagtcgggagggtcatcatgagggaagaccgtcaccaagcaggccttcttcggaagcccatggtacggcccagaccgcgtcaagtacttgggcccattctctggcgagcccccgtcctacctcactggcgagttcccaggtgactacagctggacact

SEQ ID NO: 30069 - DNA, 373 bp, Glycine max
  Clone ID: LIB3138-037-Q1-N1-H9
gccgaagggtgtcactcccaaatacagcttggcacctcttgtgccccggctttctgagctcattggtatccaggttgtcaaggctgaagacagtattggtccagaagtagaaaagttggtggcttctcttccagatggaggtgttcttcttctagaaaatgtgaggttttacaaggaggaagaaaagaatgatcccgagcatgcaaaaaagcttgcctctctggcagatctgtttgtgaatgatgcatttggtactgctcacaaggcacatgcatcaacagaaggtgttactaaatacctgaagccatctgttgctggttttcttttgcaaaaagaacttgattaccttgttggggcggtatcaagccccaaa

SEQ ID NO: 30070 - DNA, 319 bp, Glycine max
  Clone ID: LIB3138-038-Q1-N1-A1
ccaatgtttcccagtgccggcgttcccaagaagcggcaacgcaccaccgccgccaactgttcctcctccacagttggcaccatctcctccctctccgacgtaaccctaatcgaaatctcccaaaaccctcgaccttcctctcccatgaccgacgaccgcccctctcccgcggcggaagacgctctccattataacgacgcttccaccgccgacgtcgtcctccgcctcttcatcgacgctccctctccgctcgattccgtttccaactccgaccaccacgtctacctccactccgacgtcctccgccgctccaaatact

SEQ ID NO: 30071 - DNA, 390 bp, Glycine max
  Clone ID: LIB3138-038-Q1-N1-A12
cctcagtccatttcacagcaaactgtttggaatcaaatggcaacagtgagaacaccattgaattttgattctagcaagcagagcttttgtcagttttctattgaccttctcggtggaggaatcttagtggacaaaactggagattggatcacacttatacaaaattctccaattagtaacttgttgagagttgctgcttggaagaaaggctgtttaatggtcaagattgtgatgtctgggaatgcagcagtcaaaaggagtgattgggcctcattggtacaagtgtttttaacaaacagcaacagtacagagcattttgatgcatgtaagtggacaaaatcagaaccacattcctgggaattgatctttccaatagaggtatgtggtcct

SEQ ID NO: 30072 - DNA, 386 bp, Glycine max
  Clone ID: LIB3138-038-Q1-N1-A3
aagaaaggctgtttaatggtcaagattgtgatgtctgggaatgcagcagtcaaaaggagtgattgggcctcattggtacaagtgtttttaacaaacagcaacagtacagagcattttgatgcatgtaagtggacaaaatcagaaccacattcctgggaattgatcttcccaatagaggtatgtggtcctaataatggttttgaaatgtggagttctgagtgggcaaatcaaacttcatggcatttgagtttccttattgacaatcccaaacagtctacagtttttgatattctcttgggaatctctcaagattttgaaattgctggtaatactcttatgccagctttttctgttccacaggctactgccagatcttctgaaaatgc

SEQ ID NO: 30073 - DNA, 413 bp, Glycine max
  Clone ID: LIB3138-038-Q1-N1-A4
ctcgagccgtgcagattgaaccagacatgaattcaaggtttcagcttttgagtaccactaccaatggtgattttgttcaagggaaagatctcgcaatggttaaagttaatgtagcatgtgctgctgttggcttgacatcaagttacactccaactccattgttggaatctggtttgcaaaaagacagagggttaattgtggagtattttggaaggatgtcttacgttgctcataacgttaatcagccccaagagaaagatttgttggagggaaatttttcctttgatattaaatctcgctctagattggaaaaagtttcctctacaaaagcacaatttgttagtggaaaaaccttcaaatatgatataattggtgctggttcacattcttcagaagattttcctgaaaaggaa

SEQ ID NO: 30074 - DNA, 115 bp, Glycine max
  Clone ID: LIB3138-038-Q1-N1-A7
gtgaatagaaaatcttgttttgttcactcatttggtaaaagccaatataccaggcacatgattccacaatgtcaagattctgatctactcatcccgcaccaggcattcaattaac

SEQ ID NO: 30075 - DNA, 397 bp, Glycine max
  Clone ID: LIB3138-038-Q1-N1-A8
tgcatgtaagtggacaaaatcggaaccacattcctgggaattgatcttcccaatagaggtatgtggtcctaataatggttttgaaatgtggagttctgagtgggcaaatcaaacttcatggcacttgagtttccttattgacaatcccaaacagtctacagtttttgatattctcttgggaatttctcaagattttgaaattgctggtaatactcttatgccagctttttctgttccacaggctactgccagatcttctgaaaatgcggaatcctctgcatgatctggaatttgtgttttctttcgtttgttcgtttgtttaattcaataaaggaaattagacatgaccctcttgttgagtatgctctgtctatttgaaaatttccacacctctttt

SEQ ID NO: 30076 - DNA, 320 bp, Glycine max
  unsure at all n locations
  Clone ID: LIB3138-038-Q1-N1-A9
aatgggcagtgcttctctgattccagtttcctggttgccttggcggccactttctcctttcaagggaacggtgaaaaccttggtcgcaaaaccatggctgaagaagattcagcaagcaagacccctcatttccgtggttaacaaggctgcctctctatcttcccccgtgacagcacccagcgtcggcgttcggtttcggctggacaatttggggccgcaaccgggttcgaggaagagggctaagagaaagggtagaggaatatccgcagggcaaggggcaaagtgtggttttgggatgagaggtcangaaatctcgatct

SEQ ID NO: 30077 - DNA, 393 bp, Glycine max
  Clone ID: LIB3138-038-Q1-N1-B1
ggagtaattaatgaacaaaatattgcagaatcaaaagtagctctagtatatggtcaaatgaatgaaccgcccggagctcgtatgagagttggtttaactgccctgactatggcggaatattttcgagatgtcaatgaacaagatgtacttctatttatcgacaatatctttcgcttcgtccaagcaggatctgaagtatctgccttattgggtcgaatgccttctgctgtgggttatcaacccactcttagtactgaaatgggttctttacaagaaagaatcacttctaccaaagaggggtccataacttctattcaagcagtttatgtacccgcagacgatttaaccgatcctgcgcctgctacgacatttgcacatttagatgctactact

SEQ ID NO: 30078 - DNA, 419 bp, Glycine max
  Clone ID: LIB3138-038-Q1-N1-B10
accacataaaagaacacctaagaaagcatcattcaacctctcaaagtctgatgatgacagtgatgaaagtccaaatccaaaggtcttttcaaggaagaagaaaaatgagaaaggaggaaagcagaagactgatgatgatagtgatgaaagtccaaatccaaaggtatttaaaaggaaaaagaaaaaaaatgagaaaacaaaaaaaaaagaaaaaaggaaaaataaagaagagaaaaaatgtgcaaaaaaaaaagaaaagaaagaaggaagaaaaagaagaagaaaggaaaaatagtaaaaaggtaaaattcaaaaacaatgaaaaaaagaaaaagaaaaaagaacgtgaaaaaagaagaaaaaacaaaaaaaagaaagaaaaaagaacgttgaaaaaaaagaagaaaaaacaaaattaa

SEQ ID NO: 30079 - DNA, 407 bp, Glycine max
  Clone ID: LIB3138-038-Q1-N1-B12
gccttactttagtggttctaaattgaaaagctttctagctagtcataacatcaccattactgatggtattgacaaaactagtgcaactttgcaatttagaaagttagcagattgtgattttctcaagagaaactttaagcagatgtctaatgttttgtgggtggctcctgaggacaaggcgagtttatggtcacaacttcattatgtttcgtgtaataatctggaaatgcaagaagcttatcttgtcaatctcgtaaatgtgttacgagaattgtatttgcacagtccagaggaagctcgccaattgagaaggaaagctctctctcgtattgaatggctgcaaaaagctgatgtgcctaccatagcacagattgaagagttccattcgatgcagaggatgatgaatg

SEQ ID NO: 30080 - DNA, 388 bp, Glycine max
  Clone ID: LIB3138-038-Q1-N1-B2
tagctatctatttatctatagcaggtgcgtcaagagacacgtggtaccctagctagagtgccattctgtggtttctttctttctttctttctgcatcacatcacaatttgcattgcctcgtgtcctttttcttctttgctctccaaaaatctcacacacacaggtatctagcaaatgggttctcaccaacaagaaccatggctattggagaatgggaaaccaagggttttgaccaaggagaccaggcatggccgttctgcacacagaatgtcctccacctctttgcgcaagaaatctagccgaactcttgtctcaaaggttccatgtgccactctcagaaactttctttcaaatttgcaagaggttattctttgcaccaagctttcca

SEQ ID NO: 30081 - DNA, 386 bp, Glycine max
  Clone ID: LIB3138-038-Q1-N1-B3
caagtagttgagaactaagaagaaggaaatggcttcctcaatgatctcctccccagctgttaccaccgtcaaccgtgccggtgccggcatggttgctccattcaccggcctcaaatccatggctggcttccccacgaggaagaccaacaatgacattacctccattgctagcaacggtggaagagtacaatgcatgcaggtgtggccaccaattggcaagaagaagttcgagactctttcctacttgccagacctcgatgatgcccaattggcaaaggaagtcgaataccttctaaggaaaggatggattccttgcttggaattcgagttggagcacggtttcgtgtaccgtgagcacaacaggtcacctggatactatgatggac

SEQ ID NO: 30082 - DNA, 411 bp, Glycine max
  Clone ID: LIB3138-038-Q1-N1-B4
gattccttatgcatttttagtcccttatcttccgtgttactcaaggcaacttcagtatccactaactatccctggttgcaactagtgactcatcaacagcatattctagccatgtcaagtcctcagtgttttgagaatccaccaaaccttaactcggacatccatggagcaggaactgtccaagaacttggaggacttaattcctacgtcactggatcttccgattccaaattggcactcatcctggtttctgatgtttttgggtatgaagcaccaaaactaaggaaacttgcggacaaagtagcagcagctggattcttggttgttgttcctgatcttctgtatggtgattacattgttgaccttaataatcctcaatttgatcgagagtcatggcgaaaggctcatgga

SEQ ID NO: 30083 - DNA, 407 bp, Glycine max
  unsure at all n locations
  Clone ID: LIB3138-038-Q1-N1-B5
aaanaaaaannaaaaaaaaaaaaaaaaaaaaaaaaaaaaaaaaaagaaaaaaaaaaaaaaaaaaaaaaaaaaaaaaaaaaaaaaaaaaaaaaaaaaaaaaaaaaaaaaaaaaaaaaaaaaaaaaaaaaaaaaaaaaaaaagggggggcccccccttaggggcctctcccccccggaattaatttcgggccgggtccctgggggggccccatttttccttttagggggccgtttaaaagttgggggaaaaaagggaaaaaggtgttcccgggggaaaattgttttccgttaaaatttccacaaaaaaaacaacccggaaccataaagggaaaacccggggggccctaagggggggcctaccccacattaatggggtggccctaactgcccgttttcaagggggaaaac

SEQ ID NO: 30084 - DNA, 413 bp, Glycine max
  Clone ID: LIB3138-038-Q1-N1-B6
caagattgttgctgtagaagagaagaaagagattgaagagacccagcagaccgacaaggacagatggaagggtcttgcctatgatatctcagacgaccaacaggacatcacaagaggaaagggtttggttgactcccttttccaagctccacaggatgctggaactcactatgctgtcatgagctcctacgagtaccttagcactggacttcgccagtacttggacaacaacatggatggattttacattgctccagcttttatggacaaacttgttgttcacattaccaagaacttcatgaccctgcccaacatcaaggttcctctcattcttggtatctggggaggcaagggacaaggaaaatctttccaatgtgagcttgtctttgccaagatgggaatcaaccccatca

SEQ ID NO: 30085 - DNA, 280 bp, Glycine max
  Clone ID: LIB3138-038-Q1-N1-B7
cgttaacgccgtcgaggaggccgggaagaccggcttggctccggtctacgacaggtgccaccttgatccccgcgaggtactgaaatacgccgatcgcaaggtcggccgaattggaccgtcacgtacccttcaacgtgaagaaggtctgctcccaggcccgctgcgtcatctacgaagtccggcgagatggtgtctccttctacgccagaatcggctactcgaagtatgagcccactgcagaacactgtgccagctccgcatggaggaagctcaaccaggt

SEQ ID NO: 30086 - DNA, 397 bp, Glycine max
  Clone ID: LIB3138-038-Q1-N1-B9
cacgatgccgaaggaagtcaagcagaagtctggtctcatcgttggcctcaacgccggccacaaggtcacccccaggacccccgctcccaggatctcgaggaggaagggtttcctctccaagcgcactgcgtttgtccgtgagatcaccaaggaggttgctggtcttgccccatacgagaagcgcatcatcgaattgcttcgcaactccaaggacaagcgtgcccgccgtctagcgaagaagaggctcggtaccttcggtcgctcaaagagaaaggtcgacgagatgaccaaggtcatcgccgagtcgaggcgcgctggtcactaaacggtttcacgatttgcggtggatgaagcaacacggcgaacgaacgaccgacttacttttcgattttattct

SEQ ID NO: 30087 - DNA, 77 bp, Glycine max
  Clone ID: LIB3138-038-Q1-N1-C1
tgagtcttgcaattgaagttgaagtcttgccctttttttttaaactccaaccccaagacatcatattccagggttgc

SEQ ID NO: 30088 - DNA, 382 bp, Glycine max
  Clone ID: LIB3138-038-Q1-N1-C10
ggtggaaaagggggtcttgactctaccgtgtcagagtggtgcatgaagctgcaaaaatggctagtaacacaaacaccaacaacagcaacaagaaggagaaagaccttgagtttttctttgaggaagatatcaacgaattgggtgcacaacaaatggatgctgaaactgccaagttagagagtgagagtagcagcagcgatgacgagggaaatgatacaacacgccgtcactctttcacttctcagcaatggcctcaaagttacaaagagaccacagattcttacacacttgccgcaactccaaattttgaatcaattctacgagttccaagtattatatattccagttttgaaagtcgttcaaagaataacttggacataga

SEQ ID NO: 30089 - DNA, 400 bp, Glycine max
  Clone ID: LIB3138-038-Q1-N1-C11
attccacaagaactctccaaggatcctccttcccacgagattctttggtgggaaaaatccaagaggtttgaaatttgaaggcagggaagatggattatttcaatgcaccaggaagaaaccatctctttgttccagggccggttaacattccggaccagatcatccgggccatgaacagaaacaatgaggactaccgttctccagcaattccagctatgacaaaaactttgcttgaggatgtcaagaagattttcaagaccactactggaaccccatttctcatccctacaactggtactggtgcttgggagagtgctctcacaaacacactgtctccctgggatcgaattgtatcgttcctgattggccaattcagcttgctttggattgatcagcagca

SEQ ID NO: 30090 - DNA, 355 bp, Glycine max
  Clone ID: LIB3138-038-Q1-N1-C12
cgcagtcatgcatggaccccaacgtgatggaggcgaaggttgtggtgagctcttgtgggcacgatggaccctttggcgccactggggttaagaggttgaagagtattgggatgattgatagcgttcctggaatgaaggctttggatatgaatgctgctgaggacgctattgtcaggctcactagggagattgtgcctggcatgattgtcactggcatggaggttgcagaaattgatggctccccgagaatgggtccgacgtttggggcgatgatgatatcagggcagaaggcggctcatttggcgttgaaggctttgggtaggaacaatgcaattgatggaacgtgtggagttgg

SEQ ID NO: 30091 - DNA, 408 bp, Glycine max
  Clone ID: LIB3138-038-Q1-N1-C2
cggctcgaggtcacaacttcattatgtttcgtgtaataatctggaaatgcaagaagcttatcttgtcaatctcgtaaatgtgttacgagaattgtatttgcacagtccagaggaagctcgccaattgagaaggaaagctctctctcgtattgaatggctgcaaaaagctgatgtgcctaccatagcacagattgaagagttccattcgatgcagaggatgatgaatgctcctgattcaaatgataatattgatttactgttgagcattgatttgttgggtttacaaggagcaggtaaagcttttccaaacaaaattgtttttgatgataagcttgtgttggctaacacacaagaattctttgatggaaattttccagtggattcttggttaccaatttttgtgaattg

SEQ ID NO: 30092 - DNA, 232 bp, Glycine max
  Clone ID: LIB3138-038-Q1-N1-C4
gatttactaatatggaatagactggtacttcactcaagctggacgaagctgcatcattggtgcgcatcgcgcgcacctacaacacccacaagtaggaaaaatgttggccgattgagattgtctcaagtgtaactacattcagagcgctaatgatggagggggtgactgccaaggccaccgcctaaaaatgatatataaataactatggtaatggtacagctcgcaaaaacta

SEQ ID NO: 30093 - DNA, 412 bp, Glycine max
  Clone ID: LIB3138-038-Q1-N1-C5
ttttctcaagagaaactttaagcagatgtctaatgttttgtgggtggctcctgaggacaaggcgagtttatggtcacaacttcattatgtttcgtgtaataatctggaaatgcaagaagcttatcttgtcaatctcgtaaatgtgttacgagaattgtatttgcacagtccagaggaagctcgccaattgagaaggaaagctctctctcgtattgaatggctgcaaaaagctgatgtgcctaccatagcacagattgaagagttccattcgatgcagaggatgatgaatgctcctgattcaaatgataatattgatttactgttgagcattgatttgttgggtttacaaggagcaggtaaagcttttccaaacaaaattgtttttgatgataaagctgtgttggctaacaca

SEQ ID NO: 30094 - DNA, 386 bp, Glycine max
  Clone ID: LIB3138-038-Q1-N1-C6
ctcgagccgcgcacgcattgcttcgcctcacaacagcagctgcagcagcaatggctcccaaacgaggtggaaaggctccggctcttgccgctaagaagaagcctgagaaggtcacgaatccgttgttcgagaagcgtccgaagcagttcggaatcggaggggcgttgcctccgaagagagacttgactaggttcgtgaagtggccaaagaatgttcaaattcagaggaagaagaggattctgaagcagaggttgaaggttcccccagctttgaaccagtttaccaaaactcttgacaaaaacctagcaacaagtctgttcaagttgcttctgaagtacaggcccgaggacaaagctgaaaagaaggagaggctcttgaaagggctc

SEQ ID NO: 30095 - DNA, 393 bp, Glycine max
  Clone ID: LIB3138-038-Q1-N1-C7
ccctattccaaatcaccaattctaattccattcttcaggtgttcaattgaattcgtgatgaagagggatcaccgagatagctgcggcggcggcggcggagggagtgtgaagggtgagtgttcctcaatgccgtcgaacgggaaggcaaatatgtgggaggaacaacaacaacaacaacaggggatggacgagttgctggcggcgttggggtacaaggttcgtgcttccgacatggccgacgtggcacagaagctggagcagttggagatggtcatgggttgtgcccaggaagagggaatttcccacctcgcctccgacaccgtccactacgatcccacggatctttattcctgggtccaaaccatgttaaccgaactcaacccttgacccaac

SEQ ID NO: 30096 - DNA, 61 bp, Glycine max
  Clone ID: LIB3138-038-Q1-N1-C8
atttgaaaatttccacacctcttttaattgtcgtaatgatgtgtgaagtgtgtgttatttt

SEQ ID NO: 30097 - DNA, 409 bp, Glycine max
  Clone ID: LIB3138-038-Q1-N1-C9
acttgagccacattctgtccctggtggactcaagaagagtctttcataggacagttaaaattatagcttgcaaaaagggttcactagcaaacattgcaatggcctcaacctcttctgctctcactatatcctcttcttccacccttcttgatggcaaggctccaagacagtcaccagctgcttcccctcaatgtgtgagcctcccccctccccctttgcactctcagaaccgttcatggaagaccactgcttattgtcgcaaggttgctcgaaaagttatggcaatggccacaggagaggcaccagctgaagctaccccaactgaggtgccagagattgtcaagactcttcaagaaacttgggaccaagttgatgataagtatgcagtgagttcacttgccttggttgg

SEQ ID NO: 30098 - DNA, 397 bp, Glycine max
  Clone ID: LIB3138-038-Q1-N1-D1
ataccatcaattttgaggcttttccccacaagctggtgcagtttggagagattcaggaaaaagttgtattgaaattttcacaagaggaatttcttacagcttggtcaactcaggtgcgtcctgcaacaactctgttggctgatgggtgtccatatttgtatgcaatggtgcatgatagttcagtgtctacaataccaggtgattttgtcattggtgtcaagttgacaaccataaacaatatgtgtgcatattggctcaatcctggtatttcaagttctcgtcttttgggcaccattcctcagtccatttcacagcaaactgtttggaatcaaatggcaacagtgagaacaccattgaattttgattctagcaagcagagcttttgtcagttttctat

SEQ ID NO: 30099 - DNA, 407 bp, Glycine max
  Clone ID: LIB3138-038-Q1-N1-D10
catctccaacaagtgtttctgtaaccatggcatccaccactctatcccctacaaccccttctcagctatgctcaggaaagagtgggattttcagtccctcacaggcacttcttgtgaagccagtgaagaggcagatgatggggaagagcaagggaatgagaattgcatgccaagccaccagcattcctgctgatagagtccctgacatgggcaaaagacagctcatgaatctgcttcttcttggtgccatttcactcccctctgctggaatgcttattccctacacctacttttttgtccctccaggttcaggttcttcagctggtggtactgttgccaaagatgctgttggaaatgatgtaattgcagagaattggctcaaggcacatggacctggtgaccgaacc

SEQ ID NO: 30100 - DNA, 412 bp, Glycine max
  Clone ID: LIB3138-038-Q1-N1-D11
ctcgagccgggtttgcaaaaagacagagggttaattgtggagtattttggaaggatgtcttacgttgctcataacgttaatcagccccaagagaaagatttgttggagggaaatttttcctttgatattaaatctcgctctagattggaaaaagtttcctctacaaaagcacaatttgttagtggaaaaaccttcaaatatgatataattggtgctggttcacattcttcagaagattttcctgaaaaggaagatcaagaaaaacccaaaaagattgatgccagattgagacaaagaatagatcctcaatacaatgaggttcaggctcagatggaaacaaatttgtttaaattgtctcttgatgatgttgaaactcctaaaggttccatgttggatctgaaaatttctcaat

SEQ ID NO: 30101 - DNA, 409 bp, Glycine max
  Clone ID: LIB3138-038-Q1-N1-D12
ctcatatggctccttcgcaaatccgaattttctgtctctaaacttttctctctcctctctctctctctctctctccctacaaattcagttttctcgtttcttttccgcgaaagttcgctcacattgccgatctgtgcttgcgtatctgttgattccgctctgattctatccaattctcacacacgcttatcacttgttctccaatatatgggctcagtttgaagtcgatatactcaaagtcaaaatggatctctgtgtaatatgatcaagacatcgcccagccaactgggttttctgaaggttgcaacatgttgatggacctctccttttttgtagatctcttctacaatgaaaagtggattattgatgatactaaatgcttcatgctacattttaactctaacccacg

SEQ ID NO: 30102 - DNA, 389 bp, Glycine max
  Clone ID: LIB3138-038-Q1-N1-D2
attgatttactgttgagcattgatttgttgggtttacaaggagcaggtaaagcttttccaaacaaaattgtttttgatgataagcttgtgttggctaacacacaagaattctttgatggaaattttccagtggattcttggttaccaatttttgtgaattgtctttatcctgtaagtcaattaccttcagaagctgtcgttgtaaatgttacatgtggtagtggacgtgtggtttacccaccactgcttggattagttctgcagttaacaatcgctcctcagatatcaacaaaaggattcgcacagcacttgggaaaggtaagaaaattgtttttcttactagagttgatccttttccagtagctttactggctgttctttttggcgtt

SEQ ID NO: 30103 - DNA, 407 bp, Glycine max
  Clone ID: LIB3138-038-Q1-N1-D4
gctttggggtgttcattgtgtgttgccactctcctctcttgttgtacacttgttccttttggtttgcagaaaggaacatggaagctgtgtgtgctttttctgttggcacacttcacatcccaacagcacatgaaacatcaaactcctttaggaaatccatattcttgagcaaccaagtggcttcaccagtttcattggtttttctcaggggcagttcaaaatccaagcttttaactgccttgtcaccccctccattgacagaatccagtaaccaacctgaggctgagccagaatttgaaagtcatgcagagaaatttgactggtactctcagtggtaccctttgatgccaatttgtgaccttgacaagaggaagccacatgggaagaaggtgttgggaattgatgtg

SEQ ID NO: 30104 - DNA, 410 bp, Glycine max
  Clone ID: LIB3138-038-Q1-N1-D5
tgcaattgaagttaaaagcctaagccttccctacaactccaaacacaaagacatcatcatccatggctgcctccgtctccactgtcggagctgtcaacagagctcttttgaacctgaatggttctggagctggagcttcagctcccagttcagccttctttgggaccagcttgaagaaggttattgcctcaagggtccccaacagcaaggtttccggtggaagcttcaagattgttgctgtagaagagaagaaagagattgaagagacccagcagaccgacaaggacagatggaagggtcttgcctatgatatctcagacgaccaacaagacatcacaagaggaaagggtttggttgactcccttttccaagctccacaagattgctgaactcactatgcagtcatgagc

SEQ ID NO: 30105 - DNA, 409 bp, Glycine max
  Clone ID: LIB3138-038-Q1-N1-D6
accaggtgattttgtcattggtgtcaagttgacaaccataaacaatatgtgtgcatatgggctcaatcctggtatttcaggttctcgtcttttgggcaccattcctcagtccatttcacagcaaactgtttggaatcaaatggcaacagtgagaacaccattgaattttgattctagcaagcagagcttttgtcagttttctattgaccttctcggtggaggaatcttagtggacaaaactggagattggatcacacttatacaaaattctccaattagtaacttattgagagttgctgcttggaagaaaggctgtttaatggtcaagattgtgatgtctgggaatgcagcagtcaaaaggagtgattgggcctcattggtacaagtgtttttaacaaacagcaacagt

SEQ ID NO: 30106 - DNA, 115 bp, Glycine max
  Clone ID: LIB3138-038-Q1-N1-D8
tttggagagattcaggaaaaagttgtattgaaattttcacaagaaggatttcttaccgcttggtcaacttaagggccttccggcaccaactctgttggctgatgggtgtccatat

SEQ ID NO: 30107 - DNA, 381 bp, Glycine max
  Clone ID: LIB3138-038-Q1-N1-D9
cgagctcgtggccgccggcagccgtactccgtcgccgaagatgacggcggcggcgctgcggaagcggttcgaggagaagaacccctccgccgtgtcggtggaggtcggagagcatgtccagctcgcttatacccaccacaacgagtcgccgtttcagcccagatcctttgctgtcaaggatgaggtgttctgcttgtttgagggagcccttgacaatttgggaaacttgagacaacaatatggactggccaagtcagtcaatgaagtattgttggtcattgaggcttacaaagctttgcgtgaccgagcaccctaccctgctaatcatgttgttggccatctcagtgggagctttgcttttatagtttttgacaaatctac

SEQ ID NO: 30108 - DNA, 409 bp, Glycine max
  Clone ID: LIB3138-038-Q1-N1-E1
ggaaattttccagtggattcttggttaccaatttttgtgaattgtctttatcctgtaagtcaattaccttcagaagctgtcgttgtaaatgttacatgtggtagtggacgtggtggtttacccaccactgcttggattagttctgcagttaacaatcgctcctcagatatcaacaaaaagattcgcacagcacttgggaaaggtaagaaaattgtttttcttactagagttgatccttttccagtagctttactggctgttctttttggcgttaagaatgaaattctgagttctaacgccactaatcctatgctgacgcgacttcttgagaactgtaagagtctcaaatatctggttgatgagtgtccttttgcatttgtgaactagtatgtagtattttattcactta

SEQ ID NO: 30109 - DNA, 411 bp, Glycine max
  Clone ID: LIB3138-038-Q1-N1-E10
ctctggaactccactcgtgatccaacacgatagagagagaaaaagggtcttgcctttttttctgcttttgatttgactctttacaaatacaaataaataataaaatcccatcaagaagaaataaatatcaagcccaacccagtgcagtgctgcagggactgtcactgaactcaaaaatgaactgtcttcggaatctttctcgattctctgttttgcccttcgaaacacctgttacgcgccaccgcaagaaccttcccctttccctgggtttcgtcaacaattctcgtcaatatccaactatggccctcaaggctgcctcaggttctataccaagtgcagacacaagtagtgccgataaggaggaagaaaagtctgagacatatagtcataacatgacagaagccatgggtg

SEQ ID NO: 30110 - DNA, 403 bp, Glycine max
  Clone ID: LIB3138-038-Q1-N1-E12
gtcttttagctgttccagtgagttttgtgagtgagcatattgaaacccttgaagaaattgacatggagtacaaggaattggctcttgaatctggcatcaagaattgggcacgtgtacctgcccttggtgttaccccttccttcattacagatttagcagatgcagtaatagaagctctcccatcagcaacagcaatatatgcaccgaccagaacctctgaagatgttgatcatgacccagttagatattttatcaagatgttctttggttcaatcttggcattcatcttgttcttgtcacccaaaatgatcacggcattcaggaatcatgtcatttagaagaattaaatcctgcttgctgaattcaatctgcaagcatatagatgaaacctattgatagcaac

SEQ ID NO: 30111 - DNA, 359 bp, Glycine max
  Clone ID: LIB3138-038-Q1-N1-E2
tcgaaaaccaaaagcatgggtcagggaacaccgggcggtctgaaccggcagggtcttccgggggaccggaagccggacggcggcgacaagaaggagaagaagttcgagccggcggcgccgccggcccgcgtgggccgtaagcagcgtaagcagaagggcccggaggcggcggcccggttgccaacggtaaccccgttgtcaaagtgcaagctaaggctgttgaacctggagcgcataaaggactacctcttgatgagaggaggagttcgtggcaaacacaaagaggctgaacctcaaagaggagaaggccgaggaacacatatccaaggtctatgatctccgaggttcttatgagcggt

SEQ ID NO: 30112 - DNA, 413 bp, Glycine max
  Clone ID: LIB3138-038-Q1-N1-E4
tttcgtaggagatgctcaggagcagcacgctaacacagagtgttacagtcacctgtgttcgtcacagtcacagacaatggttccaatcaattcccgtaaattatagattctttgacgctgctcggaactctctatcatcacccaactccgcgatcttcaaatggaaaagaaaggccaattataaccgtcatagttctggaatggggaccttcaccactcgcgcgttggcgcagccgcttcagaacgccgacgaactcatcgactccgtcgagacatttatcttcgattgtgacggagttatatggaaaggtgataaattaatagacggagtgcctgaaacgcttgacatgcttcggtcaaagggcaaaagattagtttttgtcaccaataactcaacaaagtctaggaagcaa

SEQ ID NO: 30113 - DNA, 414 bp, Glycine max
  Clone ID: LIB3138-038-Q1-N1-E5
ctcccagcaaaggtgttggttaggttgaatctctcatagcaagagatgctcaaacccaaattcacctacttcgatgcttcccccaccttataaattcttgcattaatttaccactttcatcacccaatccacttcctctaattgacacccacctaaaccatggcttcccacttcctcaaatccctccttctcctctccacctatgccctcaccatctcagcagaatacacaggcttcgtgggaacactagacccaaagtccataggcatacaccacaagaaaaccctaagccacttcaggttctactggcacgaagtcttcagcggagaaaaccccacatcggttagaatcattccctcactccccaaatacaacgcaaccacaaccttcggctccgttggaatctttgacacc

SEQ ID NO: 30114 - DNA, 409 bp, Glycine max
  Clone ID: LIB3138-038-Q1-N1-E6
cttgtcaacctcgtaaatgtgttacgagaattgtatttgcacagtccagaggaagctcgccaattgagaaggaaagctctctctcgtattgaatggctgcaaaaagctgatgtgcctaccatagcacagattgaagagttccattcgatgcagaggatgatgaatgctcctgattcaaatgataatattgatttactgttgagcattgatttgttgggtttacaaggagcaggtaaagcttttccaaacaaaattgtttttgatgataagcttgtgttggctaacacacaagaattctttgatggaaattttccagtggattcttggttaccaatttttgtgaattgtctttatcctgtaagtcaattaccttcagaagctgtcgttgtaaatgttacatgtggtagtg

SEQ ID NO: 30115 - DNA, 216 bp, Glycine max
  Clone ID: LIB3138-038-Q1-N1-E7
gggctagagatatgggatgctatcaagtcttgggtggaagaatatgtctcattctactacaagtcagatgaggaacttcaaaaagaccccgagctccaagcttggtggaaagaacttgtagaggtgggtcatggggatttgaaggataagccatggtggcaaaagatgccaactcgtgaagaggtggttgaagctttcgcttcccttatatggatt

SEQ ID NO: 30116 - DNA, 294 bp, Glycine max
  Clone ID: LIB3138-038-Q1-N1-E8
ctcgagccgattcggctcgagcaccattcctcagtccatttcacagcaaactgtttggaatcaaatggcaacagtgagaacaccattgaattttgattctagcaagcagagcttttgtcagttttctattgaccttctcggtggaggaatcttagtggacaaaactggagattggatcacacttatacaaaattctccaattagtaacttgttgagagttgctgcttggaagaaaggctgtttaatggtcaagattgtgatgtctgggaatgcagcagtcaaaaagagtgattg

SEQ ID NO: 30117 - DNA, 220 bp, Glycine max
  Clone ID: LIB3138-038-Q1-N1-E9
gagcaagtgttgatttgcagcgcactcatcgtattagaggaatgattaaaatggtggccacagttggtattcctgagaatacaggtatatcattggcctgtgctatgaatagttcttttagggggcgcgccagttctgatatttacaccatctgctctcaagactgtgaattgtggaatcctgttggccaaaagccatgactattttatttaattcaaac

SEQ ID NO: 30118 - DNA, 237 bp, Glycine max
  Clone ID: LIB3138-038-Q1-N1-F1
cgcacctgctgttggcttgttgttcaaggatggcaatttgtaagaaagatgtttggagagttgaatgtggaatcccttctggatttccgctcacagttatttgcaatagcatttttaatgagatgctcattagatatagctatgaaaaattactgcgccaggctaaagctccaagtatgtttttacaatccttcaaaaattttggttctttgggtgtgtatggtgatgataacttaa

SEQ ID NO: 30119 - DNA, 409 bp, Glycine max
  Clone ID: LIB3138-038-Q1-N1-F10
attttctattgaccttctcggtggaggaatcttagtggacaaaactggagattggatcacacttatacaaaattctccaattagtaacttgttgagagttgctgcttggaagaaaggctgtttaatggtcaagattgtgatgtctgggaatgcagcagtcaaaaggagtgattgggcctcattggtacaagtgtttttaacaaacagcaacagtacagagcattttgatgcatgtaagtggacaaaatcagaaccacattcctgggaattgatcttcccaatagaggtatgtggtcctaataatggttttgaaatgtggagttctgagtgggcaaatcaaacttcatggcatttgagtttccttattgacaatcccaaacagtctacagtttttgatattctcttggga

SEQ ID NO: 30120 - DNA, 410 bp, Glycine max
  Clone ID: LIB3138-038-Q1-N1-F11
gttcttttagggggcgcgccagttctgatatttacaccatctgctctcaagactgtgaattgtggaatcctgcttgcacaaaagcaatgactatgtcatttaatccaaacccgtgttctgatgcatggagtttggaatttctgaagcgtactggatttcattgcgatatcatttgtgtcactggatggactgccaccccaatgcaggatgttcaggttacaattgattggtttatttcctctcaggaatgtgttcccaggacctattgtgttttaaatccacaaaatccttttgtgttaaataggtggatgggaaaattgactttcccccagggcacttcccgaagtgttaagagaatgcctctttctatagggggaggagctggtgcaaagaatgctattctcatgaat

SEQ ID NO: 30121 - DNA, 102 bp, Glycine max
  Clone ID: LIB3138-038-Q1-N1-F12
atttaagttgagacttcaacttcatgtgtattgctgaactttccagttgctggtaagatttaaacgtgatttaataatgaatgccaaattcgggtcttggct

SEQ ID NO: 30122 - DNA, 315 bp, Glycine max
  Clone ID: LIB3138-038-Q1-N1-F3
gtcaaaactttgaccgggaagaccatcacccttgaggtggaatcctcggacaccattgataatgttaaggccaagatccaggacaaagagggcatccccccagatcagcagaggctgatttttgccggtaaacaacttgaggatggaagaacccttgctgattacaacattcagaaggaatccacccttcacttggtgcttcgtttgagaggtggtatgcagattttcgttaaaactttgaccggaaagaccataaccttggaggtggagagttcagataccatagacaatgtgaaagctaagattcaggacaag

SEQ ID NO: 30123 - DNA, 407 bp, Glycine max
  Clone ID: LIB3138-038-Q1-N1-F4
ggaaccacttctggagttgttgtgttggcaggaacaaataggcctgaaatcttagacaaagctcttcttaggcctgggcgatttgaccgccagataacaattgacaaacctgatattaaaggtcgtgaccagatatttcagatctacttgaagaaaatcaaacttgatcatgagccttcatattattctccaaggcttgcagcccttacacctggatttgctggagcagacattgctaatgtctgcaatgaagctgctctgattgctgcaagaggtgaaggaacacaagtcacaatggaacattttgaggcagccattgataggatcattggtggtttggaaaagaggaacaaggtaataagcaagctggaaaggcggactgttgcctaccatgaagcaggccatgc

SEQ ID NO: 30124 - DNA, 412 bp, Glycine max
  Clone ID: LIB3138-038-Q1-N1-F6
gtcaagaatgatgtgatgggccagtttcacaatgccctatatatgggtgatgttcgagaacgtgtcaagatattggaaaatgtgggccatttgccacttgcttacatcactgcatcagtccatgggctacatgatgttgcagagcggcttgcaactgaactgggagataatgttccatctttgcctgcaggaaaagtaccttctctcatgatgcctccatcacctgtcatttgtggaagtgattggcctcttctcagggtcatgcaaggcatgtttgatggtgtgcttgacaatacaggtcggggagtcgctgatgaagaagagtatgaggctgctgatggtgattggggtgaggagcttgacatagttgatgcagatggcttacaaaatggagatgttgctgcgattttgg

SEQ ID NO: 30125 - DNA, 404 bp, Glycine max
  Clone ID: LIB3138-038-Q1-N1-F7
ttgtataactgattgtcaaaagcacaagaaatatgttcctcatacagaggaaagtctctttgggcctgcatttattgaggtggagaatgaatctggtttatcaaactttattcctgtactcattggggataaaaaaatttgtactgaaatgaagacactgcaacaaaaattagatgtatctctcctttctaaacaatttcggtctgcatctggtggttctatctgtagctcatgcgaaacttttgcacttagtcacacatcatcatcagacttacttgtagatatagcatggttgcttaaggacaccacttcagaaaattttgacagagtgatgacagcttcacaaattcaaagatattgccatttgttggactttctgatatgcaatgattcaacaatcattt

SEQ ID NO: 30126 - DNA, 316 bp, Glycine max
  Clone ID: LIB3138-038-Q1-N1-F8
ctaagatcactctcttcctcaaggaggatcagctagagtaccttgaggagcgccggttgaaggatttgattaagaagcattctgagttcattagctacccaatttctctttgggttgagaagactaccgagaaggagatttctgacgatgaggatgaggaagagaagaaggatgaggagggtaaggtggaggatgttgattaagagaaggagaaggaagaaaaaaagaaaaagaagatcaaggaagtgtcacatgaatggtccttggtgaacaagcaaaaacctatttggatgaggaagcctgaggagatcacaaa

SEQ ID NO: 30127 - DNA, 377 bp, Glycine max
  Clone ID: LIB3138-038-Q1-N1-F9
aaaaattgatgcgtgaaaggacgcacctgctgttggcttgttgttcaaggatggcaatttgtaagaaagatgtttggagagttgaatgtggaatcccttctggatttccgctcacagttatttgcaatagcatttttaatgagatgctcattagatatagctatgaaaaattactgcgccaggctaaagctccaagtatgtttttacaatccttcaaaaattttgtttctttgtgtgtgtatggtgatgataacttaattagtgttcatgaatatgtcaagccttactttagtggttctaaattgaaaagctttctagctagtcataacatcaccattactgatggtattgacaaaactagtgcaactttgcaattt

SEQ ID NO: 30128 - DNA, 393 bp, Glycine max
  Clone ID: LIB3138-038-Q1-N1-G1
aaaacagaaggctaagagagaatatggagagtagtgagggaattaggtgtaaggtatgcgtgaccggcggtgctagttacataggctcttgccttgtcaagaagcttctgcaaaagggctacaccgtccactccaccctcagaaactttaaggacgagtcaaagataggccttctgagagggttgcctcatgctaatgatgagagactggtgttatttgaagcagacatatataaaccagacgagtacgagccagcaattcaaggctgtgagattgtctttcacgttgctactccctatgaacatcaatcggattctctgctgtttaagaacacaagtgaagctgcaatagcgggggtgaaaagcatagctaagtattgcattaaatcgggaa

SEQ ID NO: 30129 - DNA, 385 bp, Glycine max
  Clone ID: LIB3138-038-Q1-N1-G10
gggaggagctggtgcaaagaatgctattctcatgaatatgccaaatgctgttctttcaatgtggagatattttgttggagatctcgtctttgaagtttctaagatgacttctccctacattaaatgtacagtctctttcttcatagcatttggaaatttggctgatgataccatcaattttgaggcttttccccacaagctggtgcagtttggagagattcaggaaaaagttgtattgaaattttcacaagaggaatttcttacagcttggtcaactcaggtgcgtcctgcaacaactctgttggctgatgggtgtccatatttgtatgcaatggtgcatgatagttcagtgtctacaataccaagtgattttgtcattggtgtc

SEQ ID NO: 30130 - DNA, 408 bp, Glycine max
  Clone ID: LIB3138-038-Q1-N1-G11
atggtcacaacttcattatgtttcgtgtaataatctggaaatgcaagaagcttatcttgtcaatctcgtaaatgtgttacgagaattgtatttgcacagtccagaggaagctcgccaattgagaaggaaagctctctctcgtattgaatggctgcaaaaagctgatgtgcctaccatagcacagattgaagagttccattcgatgcagaggatgatgaatgctcctgattcaaatgataatattgatttactgttgagcattgatttgttgggtttacaaggagcaggtaaagcttttccaaacaaaattgtttttgatgataagcttgtgttggctaacacacaagaattctttgatggaaattttccagtggattcttggttaccaatttttgtgaattgtcttta

SEQ ID NO: 30131 - DNA, 392 bp, Glycine max
  Clone ID: LIB3138-038-Q1-N1-G12
aaacagtctttgtggtggtgatgaaaaattgatgcgtgaaaggacgcacctgctgttggcttgttgttcaaggatggcaatttgtaagaaagatgtttggagagttgaatgtggaatcccttctggatttccgctcacagttatttgcaatagcatttttaatgagatgctcattagatatagctatgaaaaattactgcgccaggctaaagctccaagtatgtttttacaatccttcaaaaattttgtttctttgtgtgtgtatggtgatgataacttaattagtgttcatgaatatgtcaagccttactttagtggttctaaattgaaaagctttctagctagtcataacatcaccattactgatggtattgacaaaactagtgcaactt

SEQ ID NO: 30132 - DNA, 403 bp, Glycine max
  Clone ID: LIB3138-038-Q1-N1-G3
gatcttcgaagttcgattcctttcttgaatgaacgcaagtcacggttggtggtaagggctggcggtcgtcctcctcaaaatatgggcaaggacgaggatgagaagcagcagcagcgtgtcatacaacaacaacaacaacaagaacaacaagcacctccgcccgtgtctcttagcctggacgacgtgaaccccgtaggactgggtcgaagatcgcggcagttgttcgatgaggtttggagaaagttctcgggattgggtcagatttctaggacaatacggtcggatgatcaggaggctctggatgcccttctggtccgagaaggtccgatgtgcgagttcgcaatccctggcgctcagaatactactgtactcgttgttggtgccaccagccgcatcggtcgca

SEQ ID NO: 30133 - DNA, 405 bp, Glycine max
  Clone ID: LIB3138-038-Q1-N1-G4
gttgtcaagttggaatcaacccatactccatggaatggactggtttggccaatagattactgagtaagggcaatgatattctgtgttgcgattatgctagttttgatggtttgattaccaagcaagttatgagcaagatggcagaaatgataaacagtctttgtggtggtgatgaaaaattgatgcgtgaaaggacgcacctgctgttggcttgttgttcaaggatggcaatttgtaagaaagatgtttggagagttgaatgtggaatcccttctggatttccgctcacagttatttgcaatagcatttttaatgagatgctcattagatatagctatgaaaaattactgcgccaggctaaagctccaagtatgtttttacaatccttcaaaaattttgtttctt

SEQ ID NO: 30134 - DNA, 395 bp, Glycine max
  Clone ID: LIB3138-038-Q1-N1-G5
atttctttcaaccactcgtgttttttaactaatgctctcattcattcatgttttttcataatcctatggatttgagtcccttttgtctcactcgctctctctgatggggtcacggacaccatcctatgcaacttgccaaactcattctgtgtaatgaagaagcagaactactgcccctcacactgaacttgagaagttttcaaggtgtttgataatagtatggtttggtatttttgaatttttttcccctttgatctctctcgtgaaacatgttttgcttctaggtagcccctttgatgcacatatagttgagttagtgaagggagtttgaggaaagaaaaagggaaagttcaaagttgttgtctttcttgagttttttattttttcattgtctc

SEQ ID NO: 30135 - DNA, 379 bp, Glycine max
  Clone ID: LIB3138-038-Q1-N1-G6
ctcgagccgaatcggctcgagaaaaaagaagaaaagaatggtaacaatagctggtggtgtgagtctttcaagccctagcagggtatttgctaatgctaagggaatagactcagcacaaaaggcccaggccgtgaggtttccagctctgtcgaggcccattcaaaagtggcctggtttggtgaagacccggcccgttcgggcgacgccggagaagatatcggagaaggtagaggagagcataaagagcgcggaggaggcgtgctcgggaggcggcggtgacgcggaatgcgcggcggcctgggacgaggtggaagagctgagcgcggcggccagccacgccagggagaagcagaagcagtctgacccgctcgaaaattac

SEQ ID NO: 30136 - DNA, 409 bp, Glycine max
  Clone ID: LIB3138-038-Q1-N1-G7
ggaagaacccttgctgattacaatattcagaaggagtctaccttacacttggttcttcgtttaagaggtggcatgcagattttcgtcaagactttgacgggaaagaccatcaccttggaggtggagagttcagataccatagacaatgtgaaagccaagattcaagataaggagggtatccccccagaccagcagaggcttatctttgctggtaaacagcttgaagatggacgaacccttgcagattataacatccagaaggaatctaccctgcacttggttttgaggcttcgtggtggcatgcaaatctttgttaagactttgaccggaaaaacaataactttagaagttgaaagttctgataccatcgataacgtgaaggcaaagatacaggacaaagaggggattc

SEQ ID NO: 30137 - DNA, 394 bp, Glycine max
  Clone ID: LIB3138-038-Q1-N1-G8
cctaaaacatctcaatgggttcttcttctattacaacatcgcccgcaaccatgaccatggctgcgatcgtgctcctgttcacggtctttgccgtttcctccgccctagacatgtcgataatctcgtacgacagcgcccacgcggacaaggccgccacgttgcgcaccgaggaggagctgatgtccatgtacgagcagtggctcgtgaagcacgggaaggtgtacaacgcgctcggcgagaaggagaagcgcttccagatcttcaaggacaacctgcgattcatcgacgaccacaactccgcggaggaccgaacctacaagctcggactgaaccggttcgctgatctcaccaacgaggaatacagggccaagtacttgggaaccaagatcgatcc

SEQ ID NO: 30138 - DNA, 401 bp, Glycine max
  Clone ID: LIB3138-038-Q1-N1-G9
cttaatttgacgaaagaatggttgggatcatttcatctcgacgccgggagcgttagtgttgttgacttccctgatggacctaaggggaaaggtgtcataaggtgtataaattatactgcacatttggggagatggtccatacccattacaagatcaacagaggatggtgaagagttctaagtgtaaacttgtgattccaaaattgaattgaaatgacacccagcactcaattgaagagtttcagagggttaacgtggtcatgattgttgaaattttaaggcatgatgatagtaaaaatgaaatcttatatggtcatggggttgacctgggaatgggacaacactgtcggttttgcttgccttcctcgtaatgtatttcacttcaaagatatagatattact

SEQ ID NO: 30139 - DNA, 408 bp, Glycine max
  Clone ID: LIB3138-038-Q1-N1-H10
gaaactttaagcagatgtctaatgttttgtgggtggctcctgaggacaaggcgagtttatggtcacaacttcattatgtttcgtgtaataatctggaaatgcaagaagcttatcttgtcaatctcgtaaatgtgttacgagaattgtatttgcacagtccagaggaagctcgccaattgagaaagaaagctctctctcgtattgaatggctgcaaaaagctgatgtgcctaccatagcacaaattgaagagttccattcgatgcagaagatgatgaatgctcctgattcaaatgataatattgatttactgttgagcattgatttgttgggtttacaaggagcaagtaaagcttttccaaacaaaattgtttttgatgataagcttgtgttggctaacacacaagaat

SEQ ID NO: 30140 - DNA, 378 bp, Glycine max
  Clone ID: LIB3138-038-Q1-N1-H11
gcagcctccaattcgtgccactctcttcaaaatggccgttaccttctcaaatctccacacagaatcaggtctcaagtccctcgacgacttcctctctgggaaggtctacgtttctggggatcagttcacaaaggacgacatcaaagtgtatggtgctgttttggagaagccaggtgactcttttcccaatgctgccaagtggtacgaggttgtctcatctcagcttgctgcaagcttccccggcaatgctcaaggggtgagattcagtggcaaagcttctgctccagcggaggctgctcctgcgaaaccggatgcttctgctgctgaagatgatgatgaccttgatctctttggcgatgagactgaggaagacaaaaa

SEQ ID NO: 30141 - DNA, 312 bp, Glycine max
  Clone ID: LIB3138-038-Q1-N1-H12
gcaaaggaggctgctaacttcacagcccaagtcatcatcatgaaccaccctggtcagattggaaatggctatgcccctgtcctcgactgccacacttctcacattgctgtcaagtttgctgaactcatgaccaagattgacaggcgatccggcaaagagcttgagaaggagcccaagtttttgaagaacggtgatgctggttttgttaagatgattccaaccaaacccatggttgttgaaactttctccgagtatcctccacttggtaggtttgctgttagggacatgcgtcaaactgttgctgtgggagtc

SEQ ID NO: 30142 - DNA, 411 bp, Glycine max
  Clone ID: LIB3138-038-Q1-N1-H2
caagtcctgattgcaacatagttggtgcaatgcttttggttgatacttatcataccaatcctgaaaatgcagttcgtagtatttttgttgcgcctttcagaggcggaaggcccattcgggtggttacatttccgaataccattgtgcagattgaaccagacatgaattcaaggtttcagcttttgagtaccactaccaatggtgattttgttcaagggaaagatctcgcaatggttaaagttaatgtagcatgtgctgctgttggcttgacatcaagttacactccaactccattgttggaatctggtttgcaaaaagacagagggttaattgtggagtattttggaaggatgtcttacgttgctcataacgttaatcagccccaagagaaagatttgttggagggaaatt

SEQ ID NO: 30143 - DNA, 263 bp, Glycine max
  Clone ID: LIB3138-038-Q1-N1-H3
atttttatgcaacgacgcatgatagttctttctctaccatggctcactttaagggcacaggccatcaatagcctattttcaacactgcgtacatatgcgctctcgggaaggggatttttgcttctggtgaatcaaccaccacaacttggtccattttgggcacactctttgtaataatgtggtaatcatcaaaaattcattcatggaaggacgcatcaaccgttgccgtgctgttaaaaaatttcaaggtgtcatacactttt

SEQ ID NO: 30144 - DNA, 390 bp, Glycine max
  Clone ID: LIB3138-038-Q1-N1-H4
attttgttggagatctcgtctttgaagtttctaagatgacttctccctacattaaatgtacagtctctttcttcatagcatttggaaatttggctgatgataccatcaattttgaggcttttccccacaagctggtgcagtttggagagattcaggaaaaagttgtattgaaattttcacaagaggaatttcttacagcttggtcaactcaggtgcgtcctgcaacaactctgttggctgatgggtgtccatatttgtatgcaatggtgcatgatagttcaatgtctacaataccaggtgattttgtcattggtgtcaagttgacaaccataaacaatatgtgtgcatattggctcaatcctggtatttcaagttcttggcttttgggca

SEQ ID NO: 30145 - DNA, 359 bp, Glycine max
  Clone ID: LIB3138-038-Q1-N1-H6
gccactgccatcagcattctcaacacctcctccctcactcactcatcaatggcatcaacaatatcagcaatggccatgatcaacgccaaatgcgtcaacccaaagttccccaaccccaccaagctcgtaccatcaaaaccttcccttcaggtcaaccttccaaagggcctaatagcctcacccgaaaacaccaaactttccactgcgacagcaatcgcaggagcaatattcacaaccctcggaacctgcgacgccgctttcgccgttcaacaaatagccgacatagcagaaggcgacaaccgcggtctggcacttgtgctgcccataattcctgcaatagggtgggttctgttcaacat

SEQ ID NO: 30146 - DNA, 405 bp, Glycine max
  Clone ID: LIB3138-038-Q1-N1-H7
gtgcatgatagttcagtgtctacaataccaggtgattttgtcattggtgtcaagttgacaaccataaacaatatgtgtgcatatgggctcaatcctggtatttcaggttctcgtcttttgggcaccattcctcagtccatttcacagcaaactgtttggaatcaaatggcaacagtgagaacaccattgaattttgattctagcaagcagagcttttgtcagttttctattgaccttctcggtggaggaatcttagtggacaaaactggagattggatcacacttatacaaaattctccaattagtaacttgttgagagttgctgcttggaagaaaggctgtttaatggtcaagattgtgatgtctgggaatgcagcagtcaaaaggagtgattgggcctcattg

SEQ ID NO: 30147 - DNA, 409 bp, Glycine max
  Clone ID: LIB3138-038-Q1-N1-H8
gaaaagggacaaacttagttgtcaagttggaatcaacccatactccatggaatggactggtttggccaatagattactgagtaagggcaatgatattctgtgttgcgattatgctagttttgatggtttgattaccaagcaagttatgagcaagatggcagaaatgataaacagtctttgtggtggtgatgaaaaattgatgcgtgaaaggacgcacctgctgttggcttgttgttcaaggatggcaatttgtaagaaagatgtttggagagttgaatgtggaatcccttctggatttccgctcacagttatttgcaatagcatttttaatgagatgctcattagatatagctatgaaaaattactgcgccaggctaaagctccaagtatgtttttacaatccttcaaa

SEQ ID NO: 30148 - DNA, 409 bp, Glycine max
  Clone ID: LIB3138-038-Q1-N1-H9
atttgtatgcaatggtgcatgatagttcagtgtctacaataccaggtgattttgtcattggtgtcaagttgacaaccataaacaatatgtgtgcatatgggctcaatcctggtatttcaggttctcgtcttttgggcaccattcctcagtccatttcacagcaaactgtttggaatcaaatggcaacagtgagaacaccattgaattttgattctagcaagcagagcttttgtcagttttctattgaccttctcggtggaggaatcttagtggacaaaactggagattggatcacacttatacaaaattctccaattagtaacttgttgagagttgctgcttggaagaaaggctgtttaatggtcaagattgtgatgtctgggaatgcagcagtcaaaaggagtgattg

SEQ ID NO: 30149 - DNA, 311 bp, Glycine max
  Clone ID: LIB3138-039-Q1-N1-A1
atatttttgagattaaactatgaagaagtcattactgcttgggcaagtcaaggttctccatggactaatgggaccccacctaagttcttcaactctgatgattgctggctagacttcttggtaaattctcttcaaccctctttgcttatgcatgcagcagtgttatcttcttgcgtgtttggttcaacttatttttatgagaataactttttgatcagtttttcttatagtatcatagccggtctcttatctagctaaaggaggaaggttgtgttacgtcatcagtagccaacgtaaaattcgttgatata

SEQ ID NO: 30150 - DNA, 389 bp, Glycine max
  Clone ID: LIB3138-039-Q1-N1-A10
tgaagtgtgaaatctccatctaacagtttaatttgaatgtgttttaagtttgattaattacaactaagtaatagttagaagttggaatttaggatataggtttttctttgtacactaacacatttgtttggtgaatataaagaaagcgaatgagaatctgtcaatggatttgtataattaatatagatctaacagatttgttttaacttctttgaggggaaaatttgtagtagcggtagagaaaggggcttgtggaatttgcaatgtaattttttttttataatgttcagtttgctgttggtggaattgctgaaaggaaatttgctataagaaagttgttattggcacttgtgttgttattgtcaaggcgtgtgtgattggaacttttt

SEQ ID NO: 30151 - DNA, 355 bp, Glycine max
  Clone ID: LIB3138-039-Q1-N1-A11
actactgctagctgtgacttgttttgagttcaatcaaatcgcattggtatctgaaatcaggaaagatggttagcgtagctgagatcaggcaggcacaaagggcagaaggcccagcaaccatccttgccattggaactgcaaacccaccaaaccgtgttgatcagagcacctatcctgattactacttcagaatcaccaacagtgaccacatgaccgagctcaaagagaaatttcagcgcatgtgtgacaagtctatgatcaagacgagatatatgtacctaaacgaagagatcttgaaagagaatccaaacatgtgtgcttacatggcaccttctttggatgctaggcaagacat

SEQ ID NO: 30152 - DNA, 378 bp, Glycine max
  Clone ID: LIB3138-039-Q1-N1-A12
gaggaatcttagtggacaaaactggagattggatcacacttatacaaaattctgcaattagtaacttgttgagagttgctgcttggaagaaaggctgtttaatggtcaagattgtgatgtctgggaatgcagcagtcaaaaggagtgattgggcctcattggtacaagtgtttttaacaaacagcaacagtacagagcattttgatgcatgtaagtggacaaaatcagaaccacattcctgggaattgatcttcccaatagaagtatgtggtcctaataatggttttgaaatgtggagttctgagtgggcaaatcaaacttcatggcatttgagtttccttattgacaatcccaaacagtctacagtttttgatattc

SEQ ID NO: 30153 - DNA, 403 bp, Glycine max
  Clone ID: LIB3138-039-Q1-N1-A3
attttgctgataaagagctctccaagcagtcagagaaatcttgactatgatttatatatatacaatggttgcgacaaaactcttatcattgattagagaggaaagacagccaaactgagctgagtagactgtatcatactagatacactgtgattacatgtaaattaaaggtagaagctgatgtgttcctggatgaaatagatttagcaattgttgggaatgtacatgagcttttctagaacagctgattttaacacagattagcatgattgatagaaactgttgattttagcatagaataccgtattttcgctctttgtagcatgtgggtctccgaaatttcatttcctttgtaattagatattgtaagacaataatgtgctagtaactaattttatgctta

SEQ ID NO: 30154 - DNA, 254 bp, Glycine max
  Clone ID: LIB3138-039-Q1-N1-A6
cagccgcatcccccaccactttctctcttctccactccgccacccctttctccttcttcaccgccaccttcgccttccccttcccctcgcgcgtgcagattaccttcttccttcgcgcccgcccgctgtgccgcctgggctttgccgcggcggacccgctgctctcggcgagtgtatcggcgcgcgcggcggcggtgagaggaggaggaaagggcgcgcggggggtggggtctatagcgaaaaaaagcgcgggg

SEQ ID NO: 30155 - DNA, 261 bp, Glycine max
  Clone ID: LIB3138-039-Q1-N1-A7
aaagtttttaaattttgtgaggttcattatgaagaaaagggacaaacttagttgtcaagttggaatcaacccatactccatggaatggactggtttggccaatatattactgagtaagggcaatgatattctgtgttgcgattatgctagttttgatggtttgattaccaagcaagttatgagcaagatggcagaaatgataaacagtctttgtggtggtaatgaaaaattgatgcgtgaaaagacgcacctgctgttggc

SEQ ID NO: 30156 - DNA, 388 bp, Glycine max
  Clone ID: LIB3138-039-Q1-N1-A9
ttggttaccaatttttgtgaattgtctttatcctgtaagtcaattaccttcagaagctgtcgttgtaaatgttacatgtggtagtggacgtggtggtttacccaccactgcttggattagttctgcagttaacaatcgctcctcagatatcaacaaaaagattcgcacagcacttgggaaaggtaagaaaattgtttttcttactagagttgatccttttccagtagctttactggctgttctttttggcgttaagaatgaaattctgagttctaacgccactaatcctatgctgacgcgacttcttgagaactgtaagagtctcaaatatctggttgatgagtgtccttttgcatttgtgaactagtatgtagtattttattcactt

SEQ ID NO: 30157 - DNA, 341 bp, Glycine max
  Clone ID: LIB3138-039-Q1-N1-B1
ctcgagccgctcgagccgcggcgagttgcgctatctccctgtctatgaggaaacttacaagagtctgagatcgaggggtattcggttccctggccgcgacaatgaaagcttggctccaattttcactcctcctcgttcagtgtcttctgctccggaggctgatgtcaaccttcaacagcagtttgagcatgatattcctgagcaggttcatcatgatgttcccgtgcttagttttacgcctgaacagacaaaagaggcccttgatgttgcaaggaatagcattgagcttcttttcactgtgttgtcggcttcaccacaacaagatgctttacaggatgatt

SEQ ID NO: 30158 - DNA, 176 bp, Glycine max
  Clone ID: LIB3138-039-Q1-N1-B10
cttgtaagcctagttttatgcaatgttgctgttctggagcaccaacaatttcttttaaaaagaattctactggaatgggtagtacgcatgggagaacttgcaacactgacttggatttaaatacaggaaaaaagggaaggtcctctgcttttggggtctttaaaaggcgggatgct

SEQ ID NO: 30159 - DNA, 165 bp, Glycine max
  Clone ID: LIB3138-039-Q1-N1-B11
cccagatgaagctgttgcttatggtgctgcagtgcaggctgcgattctcagtggcgagggtaatgagaaagtgcaggatcttcttttgttggatgttactcctctatccactggtttggagactgcaagaggagtcatgactgtgttgattcccaaaaacacaac

SEQ ID NO: 30160 - DNA, 285 bp, Glycine max
  Clone ID: LIB3138-039-Q1-N1-B12
ttgcaacaccgcacatattcttccctaattccatcttgaagtaaccattgtcaccccagttgtggcttaaatgtatgcagagagatgtggtgcccgatatgcccgtgtaactgcaccttgcacgtcatgcttcgtatcggccatcttaaagggtgaaacattgtactgggataaaaatttacaggatatggtgatggttatctgtaaaataaggttggaattgggatggtcaattctcttgagcttaattacattacaaaatcgtactggaaattatttggcaca

SEQ ID NO: 30161 - DNA, 310 bp, Glycine max
  Clone ID: LIB3138-039-Q1-N1-B2
atgagatgagggttgaagagcgagattcgggttcttacccgggtttgcccggttgctacgttttgcacacgctcagtgccaccgtggagtgtttgcccgaaggggatttttgcacctacgaggtggatgagtatggaggggtttttgaagacaaaattgttgcggatgaagctgtttctgttaagaagcattattggacttgggttagtgctgattccatcggcacttgaattcatgtaaacctttttttttatatatagttgagtttaacggttaaagaattgacactttttactgtttcttgttcaaa

SEQ ID NO: 30162 - DNA, 372 bp, Glycine max
  Clone ID: LIB3138-039-Q1-N1-B3
gtgagatacacagtagttaggtagcaagcataagtgtctaaccttagaaacatatctgctacatatcgtgtgcattttggaattgtgccactaaaattctattcatctatggctgcctcatcttatgctatgcaatcaatccttgcaaaccctatgatccgcatttccagcgggtctagggagaaccattttggtgttcctgcttatcacatgagaaggaatgttggcctgagagttaggtccatggctgaggaagagcaaccaagtcagcctgcgaccccagttacaccaccaccagcagaacccaaaccacagccagtctctactccttcaccaaaggtgagcaccaagttttctgatgtgttggcgttc

SEQ ID NO: 30163 - DNA, 178 bp, Glycine max
  Clone ID: LIB3138-039-Q1-N1-B5
gggctcaaccacctaagcacgtctcagatttcccagatccaagcccaagcccaagcccagaactcgctctctcttaatttcttgggcccgaagcccgttcctatgaagcacgttggtgggccggcgaaccccacaaagcttaaccgggccttagggaaaagccattggggaaaggggt

SEQ ID NO: 30164 - DNA, 352 bp, Glycine max
  Clone ID: LIB3138-039-Q1-N1-B7
caaaaatatgccactcccatgatgcccctagatgaagaaattctttctaaggttgcacaagatatggttgaggaatggttcgattgtgttgatgaggaggattcctttgaggaagtttctttaagtgcagcacttaatggtgttgagggtttggactatatggaaagaattcctcttgccacatctgagggatttcctcatgtgctttcacgcaaaaatggtgaaaaaggcaaaaggagatttgtctctggggatggtgaagagatgacactgattccgggaaccagtgttgaagaagcttacaacaagctaatagttgaacttgagaaaagtgttcctacattggttggca

SEQ ID NO: 30165 - DNA, 406 bp, Glycine max
  Clone ID: LIB3138-039-Q1-N1-B8
ttctgaattggtcactcgagatgacagttatgtgaagaaagccaaatcatcgttttactccaatgggtatggatttgagcccactatcccatcaaaagctagtatcttggattcatcgttaaaacctacatcaactgcaggccaagatggggataagttgagtttgatcaagcttgctagcttaattgaagtgtctgcgaagaaagggactcgtgatctcaaactgcagaacaagttaatggatcaggttgattggctacctgattcgatagggaagttgtccagcttggtgactcttgatttgtctgagaatcggattatggccctacctgctacgattggtgggctttcgtcgttgaccagattggacttgcattccaatagaatcacggagcttcctgattct

SEQ ID NO: 30166 - DNA, 415 bp, Glycine max
  Clone ID: LIB3138-039-Q1-N1-B9
ttttgatggtttgattaccaagcaagttatgagcaagatggcagaaatgataaacagtctttgtggtggtgatgaaaaattgatgcgtgaaaggacgcacctgctgttggcttgttgttcaaggatggcaatttgtaagaaagatgtttggagagttgaatgtggaatcccttctggatttccgctcacagttatttgcaatagcatttttaatgagatgctcattagatatagctatgaaaaattactgcgccaggctaaagctccaagtatgtttttacaatccttcaaaaattttgtttctttgtgtgtgtatggtgatgataacttaattagtgttcatgaatatgtcaagccttactttagtggttctaaattgaaaagctttctagctagtcataacatcaccattact

SEQ ID NO: 30167 - DNA, 349 bp, Glycine max
  Clone ID: LIB3138-039-Q1-N1-C1
cacaaaatggctatacaagcatgtgcacagggttcatcatgagtatgctacaccgtttggtcttacttctgaatatgctcatcctgctgagatacttttccttgggtttgctaccatttttggtcccgccattactgggccccacttgataactctctggctatggatggttctgagagtcctagagacagttgaggctcactgtggttaccatttcccatggagtctttcgaacttccttccattgtatggaggagctgattttcacgactatcatcaccgtttattgtacaccaagtctgggaactattcatcaacttttacttacatggaccggatatttgggact

SEQ ID NO: 30168 - DNA, 416 bp, Glycine max
  Clone ID: LIB3138-039-Q1-N1-C10
acaaaattgagatattgcaagtgaaatgaaggccaggcacatctcattcttctcttgatatttctgatggcactcgctgcaaacaaagtttctagcagtcctattgtgactaaaagaacagctctttgcagatcacatgaaaaacactatttttcctcgtcaacaaggatcaatagaatacagttgtcaagacatagactggaacatggacatctgaactatagatgtctccacacacagagatcaaccttattcaatgactggttttggttctttaacggaaaacctgttggtttgatctccaagaaatcttctatctcatgtaaatcaacaggagcaaataatactgaagagaaagaaagtattacaacttatgatgatagggcacataccaaagatgagaaaaatgatcacac

SEQ ID NO: 30169 - DNA, 400 bp, Glycine max
  Clone ID: LIB3138-039-Q1-N1-C11
ctcgagccgattcggctcgagcgaacccagactacttcgacaacataggtgctggtacctactcgccatcttgcaagagcttcaggtgtaatcttgcatcttcgttggtcactctctctcctctatggtgggcctcctcgcttccatctctcaccctcatctcttcaccaaactcatcctcgtctctgcttctcaaaggtttttgaatgattcataatactttggagggttccagcaagaagatctgacccaactctacgacggaatccgatcgaactacaaaacatggtgttcggggttcgctccgcaagtgatcggcgcgacatggactcggtagcggtgcaggaattcagccgaaccctctttcacatgaggccagacataagccttgagttggcgc

SEQ ID NO: 30170 - DNA, 368 bp, Glycine max
  Clone ID: LIB3138-039-Q1-N1-C12
tgagctcaaacacaagttctttggaggagagactatagacatagtggacatagccgctggtttcatagctttctggctccctgcaattgaagaggctgttgggttgaaattgctgaccaatgagaagtttccaaaactctacaaatggggtgaagactacaccaaccaccctattgtgaaaaagaatcttccccaaagagataggcttgtggggttcttcaaagctcgatatgcatcatccaacactgcttccaaatagaccaattgtgggtgtgatagagactcatgatttggggaaattgttgtgtaataaatcttgtaatgagtaagtggcttcttgagggaggatctacatgatggaattatct

SEQ ID NO: 30171 - DNA, 382 bp, Glycine max
  unsure at all n locations
  Clone ID: LIB3138-039-Q1-N1-C2
cttaccgaaaactaaaggccaaggtctgtagtgtgcgggtgggtttgtttatctcaaacacagaacagaggtgtagagaagaaagctctcaaaagtatggcggcggagtcatcactgagggtggcgactcccactatttgcaacctcaatggttctcagagaagaccaaccactctctcttcgcttcgcttcatgggttttagccctcgaccctctcactctctcacttnctcttccctttcacacttcttcgggagcacaagaattaactccaattctttctccatttcacgccaacatgctccaagaagaaacttttccgttttcgccatgtccggcgatgatgcaaagcggagtgttccattgaaggattaccgcaaca

SEQ ID NO: 30172 - DNA, 407 bp, Glycine max
  Clone ID: LIB3138-039-Q1-N1-C7
gtattgacaaaactagtgcaactttgcaatttagaaagttagcagattgtgattttctcaagagaaactttaagcagatgtctaatgttttgtgggtggctcctgaggacaaggcgagtttatggtcacaacttcattatgtttcgtgtaataatctggaaatgcaagaagcttatcttgtcaatctcgtaaatgtgttacgagaattgtatttgcacagtccagaggaagctcgccaattgagaaggaaagctctctctcgtattgaatggctgcaaaaagctgatgtgcctaccatagcacagattgaagagttccattcgatgcagaggatgatgaatgctcctgattcaaatgataatattgatttactgttgagcattgatttgttgggtttacaaggagca

SEQ ID NO: 30173 - DNA, 380 bp, Glycine max
  Clone ID: LIB3138-039-Q1-N1-C8
ggtttgccagtcaaagaggtggttaaggatcagaagtggttggaggaagagttcactgaaaaggttcaaaagagaggtggtgcacttattcaaaaatggggaagatcatcagctgcatcaacttctgtgtcaattgttgatgccataagatctttagtaactcctactcccgagggtgattggttttcttctggtgtatatagcgatggaaatccttatggaatagctgaaggtattgttttcagtatgccatgccgatcaaagggtgatggcgattatgaacttgtcaaggatgtcatatttgatgactacctccagcagcgaatagctaagacggaagctgagttgttggccgagaagagatgtgtggctcacctaac

SEQ ID NO: 30174 - DNA, 414 bp, Glycine max
  Clone ID: LIB3138-039-Q1-N1-C9
cttgcatctaccattattattctatcacatccatggccacagttgtgaagctacatgttgtcccagaatgtttgaaccaacagaaaacgaggtcgctcaggaggggatttggctcatgcccttcccctggggtgcttggttttggccattattgtgatcggttctctgtgaaagtgtgcagggcttttaggactgaggatggtggggatgtaaaggagaaaaagttacgaaatttgaagaaaaatgaagagaaaaccaaaagggaaagtgggttttggagttccctcaagtctatcttgttgaggaatttcatggtgggttcaaaatcagatgatgagtatcgccaagctgtggccaaggtggagggtctcctatcctcgatcgccattcaaattggaagatatattgtgacta

SEQ ID NO: 30175 - DNA, 388 bp, Glycine max
  Clone ID: LIB3138-039-Q1-N1-D10
atcctggtcatctcagtggcaacaatagccaatatggtagtggccttggcggtctgggccaccagaaccctgctggtcatcagcagcagagtggttatggcggctacggtggcttcggcggaggctacggtggtggcagctacaaccgtggctggggcggcaattacggccagcactagacgccgctgcctgaccctaatggactgtctggccttgttggtccgccctcacctgatcctgatgaaagctttctgcgttgatggacgataacctaagcagtgctccttcttgggttatgtgttctcgcatgtctgcctcaaagtctctgtattatgacaagtttttttatctttctggtcccttaacatcagttcgcatgtttatgctc

SEQ ID NO: 30176 - DNA, 411 bp, Glycine max
  Clone ID: LIB3138-039-Q1-N1-D11
gggtcgcccaagaaccttccatgccttcataacatgcataatcttcgccttctccggtgctaccaatgcacttgtggcattcaataagtcaagattttctaggctttgtgggtattatgcaatggcttctatggcttctgctttggcaattctcttgtgggcagtgtgctgcacaggcatcaattagaatggctggactttgattctgaaactgctatcgctttataaagagtaaacagtgttgtgttgtatgttgaagatttttggtttcaacctcttaggaaactactggtttatgtgagagccagtaagaatgttagataaaagttttgagcaaaattaaaattaattattgattggtaatttattggattaataattataattctaatgcaaaaaacatattaaaat

SEQ ID NO: 30177 - DNA, 332 bp, Glycine max
  Clone ID: LIB3138-039-Q1-N1-D12
gcattgtcctgtttagaaataacggtcatggcttctctgctctctacaactgcaaccacacttcaacataatcacacaatctgcttctcccctgtcaaacccaccaccccaaataccattcccttctcaacaaaccggtgtttcaagaacaactcttcaaagtgcaatgctttttttgataaaatccccaaagacttgttggagaccacttttcatttggaccaattccctgtctttcaatcagtgatagggaagtttcaaaatgtaacttgagacttatcaaacctgcaaaggtgggggcttgggatcctaacaaggctgacatgggctta

SEQ ID NO: 30178 - DNA, 417 bp, Glycine max
  Clone ID: LIB3138-039-Q1-N1-D2
ctaacaacgtccctatttccggtttcaaattccctccggcgacacattcggattccaatatgaggacccgtttatcctcgactcgggtcatcttcgtggcctcgctctgtttcctcgcaagcttcgaattattgcaagccaaaaccatcgacccctacaagggtcttggggttgataaaaatgcaagtcagcgggaaattcagaaggcttttcacaagctatctcttcagtatcaccctgacaagaacaaagccaagggtgcacaagagaagttttctcagatcaataatgcatatgaacttttattcgatgaagagaagagaaagaattattacttgtatggagatgagaaaggaaaccctggatttcatggtggccatcctggaggtcaggatggatatacttattttacagggg

SEQ ID NO: 30179 - DNA, 391 bp, Glycine max
  Clone ID: LIB3138-039-Q1-N1-D5
gttgtattgaaattttcacaagaggaatttcttacagcttggtcaactcaggtgcgtcctgcaacaactctgttggctgatgggtgtccatatttgtatgcaatggtgcatgatagttcagtgtctacaataccaggtgattttgtcattggtgtcaagttgacaaccataaacaatatgtgtgcatatgggctcaatcctggtatttcaggttctcgtcttttgggcaccattcctcagtccatttcacagcaaactgtttggaatcaaatggcaacagtgagaacaccattgaattttgattctagcaagcagagcttttgtcagttttctattgaccttctcggtggaggaatcttagtggacaaaactggagattggatcacactta

SEQ ID NO: 30180 - DNA, 435 bp, Glycine max
  Clone ID: LIB3138-039-Q1-N1-D6
gtcatactctgtatcatttcatttcgataatcatccatagttactgaagaaaatggcaaccatctccgctgctatcacaaccccatcgatcacccgcgcatgtctagtgcaaaaacgttctcttgggttctcatctcccgttcttggttagttatcttctctttctaatttgccattatgaaataggacaatcatctttctggaacacaagtgaaatatatataagctctttcaatgcctgatatttcttcaacatgtgatgcaataagacgattaaaaaaaagaaaagaaagggataaaggaatgttgagagcgattatatagtatgagaattttaagatacgtgtttggttgatggatgatgttggttgatcaatcaaccattttcttaaaagagtttaacgggtatctgctatcaatctaattacattattt

SEQ ID NO: 30181 - DNA, 180 bp, Glycine max
  Clone ID: LIB3138-039-Q1-N1-D7
cagaggcaaaactaaagtatgctgttgttactggagccaacaaagggattggatttgggacttgtaaaaaacttgccttaaatggggtcaagggggggctcaccgcaagggatgagaaaaaagggcctggaaccttttagaggatggaagagggggggttcttttatttgggtatttttc

SEQ ID NO: 30182 - DNA, 165 bp, Glycine max
  Clone ID: LIB3138-039-Q1-N1-D8
gaaattctgagttctaacgccactaatcctatgctgacgcgacttcttgagaactgtaagagtctcaaatatctggttgatgagtgtccttttgcatttgtgaactagtatgtagtattttattcacttaaataaagcgcattactatgtgcaatgagtgtgttt

SEQ ID NO: 30183 - DNA, 362 bp, Glycine max
  Clone ID: LIB3138-039-Q1-N1-D9
tccagacaagggagtggaattggacaacatccttcgcaaaattgatgatgatggtcgtttggttggaattgtgaatggcatggatgttcaggagtggaatccaaccactgacaaatatatagctgtcaaatacgatgtttcaacagtattggaagcaaaggctcttttgaaagaagccctccaagcagaagttggattgccggtcgacagaaatattcctcttattggtttcattggtaggcttgaagagcaaaaaggttctgatattcttgcagaagctattccccaatttatcaaggagaatgttcagttggtagccctaggaacaggaaaaaaacaaatggaaaaacaactacaggaac

SEQ ID NO: 30184 - DNA, 295 bp, Glycine max
  Clone ID: LIB3138-039-Q1-N1-E1
tctcaagactgggaattggggaatcctgcttgcacaaaagcaatgactatgtcatttaatccaaacccgtgttctgatgcatggagtttggaatttctgaagcgtactggatttcattgcgatatcatttgtgtcactggatggactgccaccccaatgcaggatgttcaagttacaattgattggtttatttcctctcaggaatgtgttcccaggacctattgtgttttaaatccacaaaatccttttgtgttaaataggtggatgggaaaattgactttcccccagggcactt

SEQ ID NO: 30185 - DNA, 388 bp, Glycine max
  Clone ID: LIB3138-039-Q1-N1-E10
ctcgagccgcttttgtgaaggcctaggattgctgagtcaaacttgaattgaaggtgaagaaggagatggcagcaacttcttccttgtgttcatcgaccctccaatcccaaatcaatggattctgccttcacaaaacctctctttcccatcctcgttccctcactttctccaggaagaaaatttcaaccacagtgaaggctacatctcgtgttgacaagttttcaaaaagcgatatcattgtttctccatccattctttctgcaaactttgcaaaattgggagagcaggtgaaagcagtggagttggctggttgtgattggattcacgttgatgtaatggatggcccgtttgttccaaatattacaattggacctcttgtggttgatgc

SEQ ID NO: 30186 - DNA, 414 bp, Glycine max
  Clone ID: LIB3138-039-Q1-N1-E11
cttcttcccaaccactactactcactcactgcagatctcaattgcatcgctgtccatggctaccatcgttagcatcaaggcccgccagatcttcgacagtcgtggcaatccaactgtcgaggtggatttgactcgctccgatggtactttagccagagctgctgttccaagtggtgcatccactgggatttatgaggcccttgaattgagagatggaggatctgactaccttggaaagggtgtatcaaaggctgttgacaatgtgaacaccgtcattggccctgctttgattggcaaggacccaactgagcagactgctattgacaacttaatggttcaacagcttgatggaactgttaacgaatggggttggtgcaagcaaaaactatgagcaaaatgccatatggcagtgtc

SEQ ID NO: 30187 - DNA, 384 bp, Glycine max
  Clone ID: LIB3138-039-Q1-N1-E12
cttcattatgtttcgtgtaataatctggaaatgcaagaagcttatcttgtcaatctcgtaaatgtgttacgagaattgtatttgcacagtccagaggaagctcgccaattgagaaggaaagctctctctcgtattgaatggctgcaaaaagctgatgtgcctaccatagcacagattgaagagttccattcgatgcagaggatgatgaatgctcctgattcaaatgataatattgatttactgttgagcattgatttgttgggtttacaaggagcaggtaaagcttttccaaacaaaattgtttttgatgataagcttgtgttggctaacacacaagaattctttgatggaaattttccagtggattcttggttaccaattttt

SEQ ID NO: 30188 - DNA, 342 bp, Glycine max
  Clone ID: LIB3138-039-Q1-N1-E2
agatttctcagtttgcaacatatggcttccatcatcatgtcatttgctccagcaactggtagagtctttgcagccacagcagcaaagggtgctggtggaagcaaagagaaaggtcttcttgattggataattggaggattgcagaaagaagaccagctggtagagactgatcctatcctcaagaaagtggaggagaagaatggaggcaccaccaccaccaccactggccgcaacaagaactctgtggcagtgccacaaaaaaaaaaaggtggctttggaggcctctttgccaagaactgaagcagcagtgatgatttgttatttaccttacaattgttttta

SEQ ID NO: 30189 - DNA, 398 bp, Glycine max
  unsure at all n locations
  Clone ID: LIB3138-039-Q1-N1-E4
ggggtgtccatatttgtatccaatggtgcatgatagttcagtgtctacaataccaggtgattntgtcattggtgtcaagttgacaaccataaacaatatgtgtgcatatgggctcaatcctggtatttcaggttctcgtcttttgggcaccattcctcagtccatttcacagcaaactgtttggaatcaaatggcaacagtgagaacaccattgaattttgattctagcaagcagagcttttgtcagttttctattgaccttctcggtggaggaatcttagtggacaaaactggagattggatcacacttatacaaaattctccaattagtaacttgttgagagttgctgctttgaaaaaaagctgtttaatggtcaagattgtgatgtctgggaatg

SEQ ID NO: 30190 - DNA, 394 bp, Glycine max
  Clone ID: LIB3138-039-Q1-N1-E5
atcaaactcattaaaatgaatctgtaccactcctccaccacgaccaccaccaccaccatcttcaccgtcatattcctcctccttgcaatattattcactctcacaccctacacggccaacggtgccacgtgtcaccctgaggaagaagcgggcctgttgggctttaaatccggtatccgatccgacccgtccggcctgctcagtaactggatatcgggtacggactgctgcacatggaccggagtagaatgccactataacagcacccgggtccaaagattattcttaacgggtcaaaaacccgaaaccatcttatcgggtaccatctcacccaccctctcagaactcaaactcctcgatggactctacctcataaacctcatcaacatttcgg

SEQ ID NO: 30191 - DNA, 385 bp, Glycine max
  Clone ID: LIB3138-039-Q1-N1-E6
cgagaagctcatacagcggttagaatcggcggtgttgcgcttggagtcgctatcctctggactccacccctccgcttcacaatccggcggcgcccacgctcccgatgcggcgctcgatccctccgtcgtcgccttcgccgatctgatcgaccagtacgtcggtagggtttccggcgctgcagaggttatcggcggacaggtcttgggtgtcaccaaactggtgcaggaagctttcaatgttcagaaagagcttttgattaagctcaaacagactcagaagcctaacctcgctgggttgtctgaatttctgaaaccattgaatgaagtgatcacaaaagctaccaaattgacagaaggaaagagatctgatttttttaatcactta

SEQ ID NO: 30192 - DNA, 419 bp, Glycine max
  Clone ID: LIB3138-039-Q1-N1-E7
cgagaggaggggttcgggtgtgagagcgagaatcagaagatgaagaaggaagacacagtgaagctgatcagtgccgaaggttttgaatttgtggtcgacaaagaagctgcaatggtttcacagaccatacataacatgcttacttctccagggagtttcgctgagaggcagcacggcgaagttacctttcctgagatcagcaccaccattctcgagaagatttgccagtacttttattggcatctccaattcgccagtgggaaggagacggaatttcccattgaacctgaattaactctggagctaatgatggctgccaattacctccatacatagcattttgacttccccaagggtgatagttcttcggccacataatggaactattgcctagttgggcattcaaagggaaatcagcg

SEQ ID NO: 30193 - DNA, 356 bp, Glycine max
  Clone ID: LIB3138-039-Q1-N1-F10
attttgttggagatctcgtctttgaagtttctaagatgacttctccctacattaaatgtacagtctctttcttcatagcatttggaaatttggctgatgataccatcaattttgaggcttttccccacaagctggtgcagtttggagagattcaggaaaaagttgtattgaaattttcacaagaggaatttcttacagcttggtcaactcaagtgcgtcctgcaacaactctgttggctgatgggtgtccatatttgtatgcaatggtgcatgatagttcagtgtctacaataccaggtgattttgtcattggtgtcaagttgacaaccataaacaatatgtgtgcatatgggctc

SEQ ID NO: 30194 - DNA, 368 bp, Glycine max
  Clone ID: LIB3138-039-Q1-N1-F11
tgctgttgttgggattgttgtgctacttgcttccaatgctgttcaaatacagtggtgcctcagctgctctcactgtagacccttcactacacttgtcaagagcttctagcattgtgatgttgattgcatatgttgtctacattgtctttcaactgtggacacacagggagttatttgaagaagaagatgacggtaaagatggcgaggatggttcaaaagaacaagctgtgattggattatggagtggcattgcttggttggttggaatgactgtattcattgctgtgttgtctgaatatgtggtggatacaattgaggatgcatcagattcatggggtttgtctgtgagcttcctaagcataatcttg

SEQ ID NO: 30195 - DNA, 376 bp, Glycine max
  Clone ID: LIB3138-039-Q1-N1-F12
agcttggcgacattttgaggaccaaagagaatatggtgatattgtgagtgctattcagtctgccgtgcctggagctgtgctagttggggactatgttcttgagaatggagacggtattggtaggttaccagacgaacgtgctgaaggcaacattggcaacgccaatggaccatggttaaccaccactatcttgtttcagatgatggatagcaccgttgaaattgttagggaaccaagagcacattcgagtgcctggacaaggcaccgtcgttcagatgaacgtcggcgctatctgtggggtgagaatttattgggtcttcatgataatgacattgaggatgatctgcgtatatttagggatgcgggtgaagatgca

SEQ ID NO: 30196 - DNA, 397 bp, Glycine max
  Clone ID: LIB3138-039-Q1-N1-F3
ggctgttcaaacaggtactggtcaactaaatggtattcctgtagctattggaattatggattttcagtttatggggggcagtatgggatccgcagtaggtgagaaaatcacccgtttggtagaatatgctactaatcaacttttacctcttattctggtatgtgcgtccggaggagcgcgtatgcaagaaggaagtttgagcttgatccaaatggctaaaatctcttctgctttatatgattatcaaaaaaataaaaagttattctatgtatccatacttacatctcccactactgggggggtaactgctagttttggcatgttgggggatatcattattgccgaaccaaatgcttatattgcatttgctggtaaaagagtaattgaacaaacattg

SEQ ID NO: 30197 - DNA, 338 bp, Glycine max
  Clone ID: LIB3138-039-Q1-N1-F4
tgacaactaagtttgtcccttttcttcataatgaacctcacaaaatttaaaaacttttgacggaccacaagattaaactccatagggagaatagtgaagcagcgcgtcttaggtttgtcaaaaattttgcgacgaggaagtttctcatccttgggacattcaatgccaaccaatgtaggaacacttttctcaagttcaactattagcttgttgtaagcctcttcaacactggttcccggaatcagtgtcatctcttcaccatccccagagacaaatctccttttgcctttttcaccatttttgcgtgaaagcacatgaggaaatccctcagatgtggc

SEQ ID NO: 30198 - DNA, 246 bp, Glycine max
  Clone ID: LIB3138-039-Q1-N1-F5
cgtgactgaccctctgactgacaaccagcccattctggaggccagctacgtgaacatccccatcattgccttcgctgacactgatgcccctctgcgtcacattgatgtctccattccctgcaacaacaagggcaagcagtccatcgctctgatgtactggctgctggcccgcgaggtgcagcgcatgcgcggactgctgcagcgcgcgcagccgtggaacgtcatggtcgatctgttcatgtaccg

SEQ ID NO: 30199 - DNA, 293 bp, Glycine max
  Clone ID: LIB3138-039-Q1-N1-F6
atcgctgtcgccgtcgccgtcaaacaccgcccaccgtatccgctcgttttctcggacggactgacacactcgttacgccgtcggcctccaggatccattacggagtatagtgaagccctcgtgacaacacagcaagtcctgtcaatcagttatccggtccaaacccatcaccatgaaaccctcaatccaacaagcgctcctcctagccagcttgttcgcatgcacgaatgctctgaagctccaagtcggctccaactacgacgaaggcgtaaaagtcaacaccctgagcaaaa

SEQ ID NO: 30200 - DNA, 374 bp, Glycine max
  Clone ID: LIB3138-039-Q1-N1-F7
ctctttcttcttttttagctatccctctcttgaaaaatctagatctcgttcttccttgatctacgttacgcttttagtgaccggatctgtatggatctgaaccagatctacacgccgatggtggttttggcctggtctttcatagatctgatgcatggaggctcagatctactgtacagagatactgtagataatcgatgagaagaacgcagatccagccgcttccgcttgttcgatcgctacagacgcttgtatcggattattcatgattgattcataagcagcatgtcttcctccggctatagttgttgcagatctcggatgttgtaaaattagtgtatgatgtgaagctatgggcttgaaaatgtggatgt

SEQ ID NO: 30201 - DNA, 193 bp, Glycine max
  Clone ID: LIB3138-039-Q1-N1-F8
aacgccatgtcagcacgttggtcccgacacagcagagggtagaaatctgcgtgaccggacctaatgtggtatccgacactggctgtaacagagaggtggaaactgatgcactacttaagggtgtgaatgggaaagcagagcctgaaatacctgctgctcaccaattacctcgatgagtgaagctattatatta

SEQ ID NO: 30202 - DNA, 385 bp, Glycine max
  Clone ID: LIB3138-039-Q1-N1-F9
taaaagccttagccttccctacaactccaaacacaaagacatcatcatccatggctgcctccgtctccactgtcggagctgtcaacagagctcttttgaacctgaatggttctggagctggagcttcagctcccagttcagccttctttgggaccagcttgaagaaggttattgcctcaagggtccccaacagcaaggtttccggtggaagcttcaagattgttgctgtagaagagaagaaagagattgaagagacccagcagaccgacaaggacagatggaagggtcttgcctatgatatctcagacgaccaacaagacatcacaagaggaaagggtttggttgactcccttttccaagctccacaggatgctggaactcacta

SEQ ID NO: 30203 - DNA, 345 bp, Glycine max
  Clone ID: LIB3138-039-Q1-N1-G10
aaagatctcaagaacaagaataaatacgatgatgagcaataccgtgccaaactaaacaagtcaaatgagaggactctatcacttatcaaagcaggaattgatactgtggtagcagtaggactgcttcaattggcacccaagacagttactcctcgcgtaactggggcttttggatttgtttcgtctctaatatcttgctatcagttgcttcctgccccggtcaagtccaaaactgtgtgaagtgtggaagaatagaaaggttctcatgacgtgtctgtcgtcaaataattatatgaattggtcaagaaatgtcggttggtgtgagcattgaccaattttcatcat

SEQ ID NO: 30204 - DNA, 369 bp, Glycine max
  Clone ID: LIB3138-039-Q1-N1-G11
cgcccagactctcattagaaaggttgtgggttggagacttgtgaatgaggaaaatggacttaaaattcaatgcttgtggaaattgagagattttaaatgtggggttgaactcattaacaggatctctaaggttgtagaggctgaaggccatttcccaaatatctacttggagcaaccaaatcaagtgagagcagaactatggacagcttccattggaggtttaagtatgaatgattttattgttgctgcaaagatagatcagataaagacatcagatcttgtcccaaagaaaagggtttgggcgtaatgccttaatgaacttcataaaacattttgccgcttgattttctttaatatttgattaccact

SEQ ID NO: 30205 - DNA, 251 bp, Glycine max
  Clone ID: LIB3138-039-Q1-N1-G3
gcggagcaaggcatggaaagcctctcatttcaattgtatcttcacttggtaaacaagcattgggcttggagaaagaaccccttccagagaagcatgatgtcgacctaaggccatcaaccgtgaaagaaaataaggaccaaagctgctcaaaagtatttaccattctccaagaggcaccctgttcatatgtatctttcgccaacacgaatttaacatctatattattgccgctgagaaatttatgtgcccta

SEQ ID NO: 30206 - DNA, 297 bp, Glycine max
  Clone ID: LIB3138-039-Q1-N1-G4
cggctcgagacagaatctactctctttttttctaccttagattccttctccaacaatggctctcgccgtttccactacttcttcctcttcagcagctgctgcagcttctagctccttcttctctcgtctcggatcttcctccgacgcaaaagctcctcaaatcggttcgtttcggtttccggagaggtcgcttgtttcgtctgttgttgtcaatgtaactcaacgacgctccttggtgaggccactcaacgccgaaccgcaacggaacgattctattgttcctcttgcagcaactat

SEQ ID NO: 30207 - DNA, 324 bp, Glycine max
  Clone ID: LIB3138-039-Q1-N1-G5
gttttcatcttaaagacctctttcctttggttctaatttattaccctgaaataatgaattgagttcgtataggcattttggatgatgctattgaaatagcctttcttgctatattttctggtaccccacccatttcataaagtattttcccaggtttaacgacagctacccaatattcgggagaaccttttcctgaacccatacgtgtttcagtaggtcttactgtaaccggtttgtctggaaatatgcgtacccatatttgtccacctcggcgaacatttcgtgacattgcccgccgtcccgcttctatttgtctagatgtta

SEQ ID NO: 30208 - DNA, 171 bp, Glycine max
  Clone ID: LIB3138-039-Q1-N1-G6
ggcttatggtggatacctaggcacccagagacgaggaagggcgtagtaagcgacgaaatgcttcggggagttgaaaataagcgtagatccggggattcccgatataggtcaacctttcgaactgctgctgaatccacgggcaggcaagagacaacctggtgaactgaaaca

SEQ ID NO: 30209 - DNA, 271 bp, Glycine max
  Clone ID: LIB3138-039-Q1-N1-G7
ctagtttcttacaaggctctactctactgcttcaccttctgctctagaaaattcagtggtgatacatggcttcggctactctctctgtagccaaaccagcccttcaggcaaatgggaaaggcttctctgaattctctggcctccgcagctcatcaggcttccttcccttttctagaaaatcttcagaggatttccattctgtcattgccttccagacctatgcagttggaagcagtggaggatacaagaagggtgtgacagaagcaaaact

SEQ ID NO: 30210 - DNA, 354 bp, Glycine max
  Clone ID: LIB3138-039-Q1-N1-G8
gtttcttacaagcctctactatactgcttcaccttctgctctagaaaattcagtgctgaaacatggcttcggctactctctctgtagccaaaccagcccttcaggcaaatgggaaaggcttctctgaattctctggcctccgaagctcatcaggcttccttcccttttctagaaaatcttcagaggatttccattctgtcattgccttccagacctatgcagttggaagcagtggaggatacaagaagggtgtgacagaagcaaaactgaaggttgccataaacgggtttggaaggattggaaggaacttcttgaggtgctggcacggtcgcaaagactcccctcttgatgtca

SEQ ID NO: 30211 - DNA, 377 bp, Glycine max
  Clone ID: LIB3138-039-Q1-N1-G9
agaagcaatggctatgtgatttaatccaaacccgtgttctgatgcatggagtttggaattcctgaagcgtgctggacttcattgctatatcatttgagacactgggtggactgctaaccctatgcaggttgttcaacaaacaatcgaaaggtttatttcctttcatgaatgtggtgacaataactaaagtggtgtaaatgcacataatcctcctgagtttaataggtggaaagggaaaatgactttacctcagggtactatcaccagtgctgatagaatgcccatatctatagggggaggagcttgtacaaagaatgctattctgaagaatatgccaaaagcctttctttcaatgtggagatattttggtggagatc

SEQ ID NO: 30212 - DNA, 103 bp, Glycine max
  Clone ID: LIB3138-039-Q1-N1-H10
tatctccattattttttactggtgtgttggaggctgtggttgctgccctgtttatgaatatttatattgttggtttgaatcaattgtctgatgttgaaataga

SEQ ID NO: 30213 - DNA, 368 bp, Glycine max
  Clone ID: LIB3138-039-Q1-N1-H11
attcctcagtccatttcacagcaaactgtttggaatcaaatggcaacagtgagaacaccattgaattttgattctagcaagcagagcttttgtcagttttctattgaccttctcggtggaggaatcttagtggacaaaactggagattggatcacacttatacaaaattctccaattagtaacttattgagagttgctgcttggaagaaaggctgtttaatggtcaagattgtgatgtctgggaatgcagcagtcaaaaggagtgattgggcctcattggtacaagtgtttttaacaaacagcaacagtacaaagcattttgatgcatgtaagtggacaaaatcagaaccacattcctgggaattgat

SEQ ID NO: 30214 - DNA, 80 bp, Glycine max
  Clone ID: LIB3138-039-Q1-N1-H3
ctctgttctgtgtgtgcgagaaaaggcgattgccattgcgcttctcaggcttttatctttaattgacaaggctctgggcc

SEQ ID NO: 30215 - DNA, 225 bp, Glycine max
  Clone ID: LIB3138-039-Q1-N1-H4
ggctgaagacaatcacaacttggcagaagaataaacttgagtggaaggtcatgcatggactttcccgaatccgactctgacatatcatttgtaagctctgagaagcccaacagtgtgcgttcatcctctgttttctatgactattttgatcttcatgcccgaaatccacgaacttcaaccagcttaaatcatagcttgggatcaacccgtatgagacccaagttc

SEQ ID NO: 30216 - DNA, 223 bp, Glycine max
  Clone ID: LIB3138-039-Q1-N1-H5
gactgaagacagtctaaacttgccagaaaaataaacttgggtggaagggcatgcaccgactacaacaaatccgactctggcatagaatcagttagctcatgtagaactagacaagataaacaagccgcatctttcattaacatctggggaatatatcctcgaaactcacgtaactatagctgcatctattataattctgagtctagctgtatgaaacccaata

SEQ ID NO: 30217 - DNA, 218 bp, Glycine max
  Clone ID: LIB3138-039-Q1-N1-H6
gcgttgccattctcatcctcttctttctctctctaccattgccatggatccctacaagcaccggccatccagcgccttcaattctcccttctggactacaaattctggtgctcctatttggaacaacaactcctctttaaccgttggagctagaggtccaattctgctggaggattatcatcttgtggagaagcttgcaaattttgatagggaacgta

SEQ ID NO: 30218 - DNA, 361 bp, Glycine max
  Clone ID: LIB3138-039-Q1-N1-H8
ggaaaatctttccaatgtgagcttgtctttgccaagatgggaatcaaccccatcatgatgagtgctggagagttggaaagtggaaatgcaggagagccagcaaaactgatcaggcagagataccgtgaagccgcagacttgatcaagaagggaaagatgtgtgctctcttcatcaacgatcttgatgcaagagctggtcgtcttggtggaaccacccaatacactgtcaacaaccagatggtgaatgccaccctcatgaacattgctgataaccccaccaatgtgcagctttctggtatgtataacaaggaagagaatccccgtgtgcccatcatcgtcaccggtaacgatttcttcacac

SEQ ID NO: 30219 - DNA, 337 bp, Glycine max
  Clone ID: LIB3138-039-Q1-N1-H9
atcccagcctaggagagagatggtggggaaggatcaggatgtgtcgttgggagcatactatttcccggagagactgactattggaacggatgtgcaaagccaagactacggcacggactaccacgagccggcgccagcgccgttatttgaccatactgagtttacgtcatggtctttttacagagcaaggattgcagagtttgtgggcacttttttgtttgtctacatcaccgacttaaccgttatgggagatgccggggcttagtctaagtgtaccaccgttgggattcaaggaatcacttgggccttctgtggcatgatattcggcctcgtttac

SEQ ID NO: 30220 - DNA, 275 bp, Glycine max
  Clone ID: LIB3138-040-Q1-N1-A10
aaaagacagagggttaattgtggagtattttggaaggatgtcttacgtttctcataacgttaatcagccccaagagaaagatttgttggagggaaatttttcctttgatattaaatctcgctctagattggaaaaagtttcctctacaaaagcacaatttgttagtggaaaaaccttcaaatatgatataattggtgctggttcacattcttcagaagattttcctgaaaaggaagatcaagaaaaacccaaaaagattgatgccagattgagac

SEQ ID NO: 30221 - DNA, 324 bp, Glycine max
  unsure at all n locations
  Clone ID: LIB3138-040-Q1-N1-A11
cctatggctcgtcactccttgctcttagccctcctcctcttcgccgccgtggccaccgccgcgatggcggtggccgcgtccgacgccgacgacatcctgatccgtcaggtggtgccagatgttggcgaagccgaagaggaggacaacctgctgaacgccgagcaccacttcgcgagcttcaaggccaagttcgccaagacctacgccaccaaggaggagcacgatcatcgcttcggcgtcttcaagtccaacctccgcagagccaggctgcacgccaagctcgaccccttcgccgtncacggcgtcaccaaattcttcgatcta

SEQ ID NO: 30222 - DNA, 327 bp, Glycine max
  Clone ID: LIB3138-040-Q1-N1-A12
cgctgtttagttcccgaccacaaactacggataaggcaccagcaagccgaggctctatgtatgagggttatggttctccgataagagaagagcctccgtcatactcatcctctgtcatgcaaagacacgagtcatttgagaacccccttgcagggaatggattgcacagttttgggtctcaagatgatgagcgagcttcatctggaaattcttaacatggaagtgcactttatgacttcacagcaggaggagacgatgaattgagtttaaccgcaggagaagaagtcgacattgagtacgaagtaaattgctggttttatgttaaaa

SEQ ID NO: 30223 - DNA, 256 bp, Glycine max
  Clone ID: LIB3138-040-Q1-N1-A6
attccgtgaactatctgaaaaggaaagagaagatattgccaagaaaataactgtgatggggaggtcttctcctaatgacaagcttttgcttgtgcaagctctacgtaaaggaggggaagttgttgcggtcacaggagacggcaccaatgatgcttctgccctacatgaagctgatattggtctttctatgggcattcaaagaactgaagttgcaaaagaaagctcacatattataatcctagaccataactttgca

SEQ ID NO: 30224 - DNA, 348 bp, Glycine max
  Clone ID: LIB3138-040-Q1-N1-A7
taattctccaagaataagagaatccaaaagtctctcaaaaaataaccatgatgatgcatgtcctttgcttctcagtgttcctagcagcagcaatgcaaggaacactggcggttgaatacagtgtcaccaacaacgccctctcaacccctggtggtgttcgtttccgtgatgcaataggggacgaatacgccaaacaaacacttgactcagccacccaattcatatggggggtcttacagcaaaacgctcctgctgatagaaaagatatacaaaaaataaacttatttgtggaggacagggttgtgccaaatggtgttgttgcatatacaagcaaggatgagattcatg

SEQ ID NO: 30225 - DNA, 379 bp, Glycine max
  Clone ID: LIB3138-040-Q1-N1-A9
cacactttctagatagctagcctgtaagatatatatatagatatttcatatatatcctatggtccgtgagtgcccttgttctgtaccaaccctttcttccacatgttgagtttcagcatcgtcctctcttgagtccccatatcaaatacccaccgaattcaaccccccatataacaaatctcctcccatcccatttttcagcaccaaagtttgaaacttttctcaattgggttgaggagagtttgactcaaatttttatttttctaacgaagcagtagctattagaagtgcaaaaattaaatgtccaacatcttcttgttgatgtttgagattcatgtatccgattctcagtgaaatcttcttttccgggtgtatgatc

SEQ ID NO: 30226 - DNA, 381 bp, Glycine max
  unsure at all n locations
  Clone ID: LIB3138-040-Q1-N1-B1
taatgttttgtgggtggctcctgaggacaaggcgagtttatggtcacaacttcattatgtttcgtgtaataatctggaaatgcaagaagcttatcttgtcaatctcgtaaatgtgttacgagaattgtatttgcacagtccagaagaagctcgccaattgagaaagaaagctctctctcgtattgaatggctgcaaaaagctgatgtgcctaccatagcacagattgaagagttccattcgatgcaaaggatgatgaatgctcctgattcaaatgataatattgatttactgttgagcattgatttggtgggtttacaaggagcaagtaaagcttttccaaacaaaantgtttttgatgataagcttgtgtggctaacaca

SEQ ID NO: 30227 - DNA, 303 bp, Glycine max
  Clone ID: LIB3138-040-Q1-N1-B10
gctgaatactgggatttcaaggtctcgaatatggcgcaccattacatagaacattcaacagctaactgtatggaatcaaatggcaacagtgagaacaccattgaattttgagtttagcaagcaaagcttgtgccagttgtatagagacctgataaggggaggaatattagtggacaaaactggagattgactcacagttatacaaaagtgcgcaatgaatcaactattgagagttgctggttggcataaaggcatgctaatgggcaagatagtgatgtgtgtacaatgcccagtgaaaatgag

SEQ ID NO: 30228 - DNA, 331 bp, Glycine max
  Clone ID: LIB3138-040-Q1-N1-B11
gcagattgtgattttctcaagagaaactttaagcagatgtctaatgttttgtgggtggctcctgaggacaaggcgagtttatggtcacaacttcattatgtttcgtgtaataatctggaaatgcaagaagcttatcttgtcaatctcgtaaatgtgttacgagaattgtatttgcacagtccagaggaagctcgccaattgagaaggaaagctctctctcgtattgaatggctgcaaaaagcttattttcctaccatagcacagattgaagagttccattcgatgcagaggatgatgaatgctcctgattcaaatgattatattggattac

SEQ ID NO: 30229 - DNA, 317 bp, Glycine max
  Clone ID: LIB3138-040-Q1-N1-B12
atttgtaagaaagatgtttggagagttgaatgtggaatcccttctggatttccgctcacagttatttgcaatagcatttttaatgagatgctcattagatatagctatgaaaaattactgcgccaggctaaagctccaagtatgtttttacaatccttcaaaaattttgtttctttgtgtgtgtatggtgatgataacttaattagtgttcatgaatatgtcaagccttactttagtggttctaaattggaaaagctttctagctagtcataacatcaccattactgatggtattgacaaaactagtgcaactttgc

SEQ ID NO: 30230 - DNA, 409 bp, Glycine max
  unsure at all n locations
  Clone ID: LIB3138-040-Q1-N1-B2
tattgatttactgttgagcattgatttgttgggtttacaaggagcaggtaaagcttttccaaacaaaattgtttttgatgataagcttgtgttggctaacacacaagaattctttgatggaaattttccagtggattcttggttaccaatttttgtgaattgtctttatcctgtaagtcaattaccttcagaagctgtcgttgtaaatgttacatgtggtagtggaccgtggggttacccaccactgcttggattagttctgcagttaacaatcgctcctcagatatcaacaaaaagattcgcacagcacttgggaaaggtaagaaaattgtttttcttactagagtngatccttttccagtagctttactggctgntctttttggcgttaagaatgaaattctgagtt

SEQ ID NO: 30231 - DNA, 206 bp, Glycine max
  Clone ID: LIB3138-040-Q1-N1-B3
ggaatgattaaaatggtggccacagttggtattcctgagaatacaggtatatcattggcctgtgctatgaatagttcttttagggggcgcgccagttctgatatttacaccatctgctctcaagactgtgaattgtggaatcctgcttgcacaaaagcaatgactatgtcatttaattcaaacccgtgttctgatgcatggagttt

SEQ ID NO: 30232 - DNA, 400 bp, Glycine max
  Clone ID: LIB3138-040-Q1-N1-B4
tggaattgatcttcccaaagaggatgtggtcctaaaatggttttgaatgtggagttctgagtgggcaaatcaaacttcatggcatttgagtttccttattgacaatcccaaacagtctacagtttttgatattctcttgggaatctctcaagattttgaaattgctggtaatactcttatgccagctttttctgttccacaggctactgccagatcttctgaaaatgcggaatcctctgcatgatctggaatttgtgttttctttcgcttgttcgtttgtttaattcaataaaggaaattaggcatgaccctttttgtgagtatgctctgcctatttgaaaatttccacacctcttttaattgtcctaaatgatgtttgaagcgtgtgttattttaaaaa

SEQ ID NO: 30233 - DNA, 350 bp, Glycine max
  Clone ID: LIB3138-040-Q1-N1-B5
ctcgagccgaatcggctcgagattcctcagtccatttcacagcaaactgtttggaatcaaatggcaacagtgagaacaccattgaattttgattctagcaagcagagcttttgtcagttttctattgaccttctcggtggaggaatcttagtggacaaaactggagattggatcacacttatacaaaattctccaattagtaacttattgagagttgctgcttggaagaaaggctgtttaatggtcaagattgtgatgtctgggaatgcagcagtcaaaaggagtgattgggcctcattggtacaagtgtttttaacaaacagcaacagtacagagcattttgatgcatg

SEQ ID NO: 30234 - DNA, 387 bp, Glycine max
  Clone ID: LIB3138-040-Q1-N1-B6
gtcaattaccttcagaagctgtcgttgtaaatgttacatgtggtagtggacgtggtggtttacccaccactgcttggattagttctgcagttaacaatcgctcctcagatatcaacaaaaggattcgcacagcacttgggaaaggtaagaaaattgtttttcttactagagttgatccttttccagtagctttactggctgttctttttggcgttaagaatgaaattctgagttctaacgccactaatcctatgctgacgcgacttcttgagaactgtaagagtctcaaatatctggttgatgagtgtccttttgcattggtgaactagtatgtagtattttatttaatttaaataaagcgcattactatgtgcaatgagtgtgttt

SEQ ID NO: 30235 - DNA, 387 bp, Glycine max
  Clone ID: LIB3138-040-Q1-N1-B7
gaggaatcttagtggacaaaactggagattggatcacacttatacaaaattctccaattagtaacttattgagagttgctgcttggaagaaaggctgtttaatggtcaagattgtgatgtctgggaatgcagcagtcaaaaggagtgattgggcctcattggtacaagtgtttttaacaaacagcaacagtacagagcattttgatgcatgtaagtggacaaaatcagaaccacattcctgggaattgatcttcccaatagaggtatgtggtcctaataatggttttgaaatgtggagttctgagtgggcaaatcaaacttcatggcatttgagtttccttattgacaatcccaaacagtctacagtttttgatattctcttgggaa

SEQ ID NO: 30236 - DNA, 124 bp, Glycine max
  Clone ID: LIB3138-040-Q1-N1-B8
attgttgctccatagacatggcctccgaatctgctgcaggcggtgctattacctcattcactggccgtaaggcatgcgcaggctgagggagttgccgagacaaagtcttaccttcaaaagccac

SEQ ID NO: 30237 - DNA, 330 bp, Glycine max
  Clone ID: LIB3138-040-Q1-N1-B9
ggcaattttagagcaagtgttgatttgcagcgcactcatcgtattagaggaatgattaaaatggtggccacagttggtattcctgagaatacaggtatatcattggcctgtgctatgaatagttcttttagggggcgcgccagttctgatatttacaccatctgctctcaagactgtgaattgtggaatcctgcttgcacaaaagcaatgactatgtcatttaatccaaacccgtgttctgatgcatggagtttggaatttctgaagcgtactggatttcattgcgatatcatttgtgtcactggatggactgccaccccaatgcaagat

SEQ ID NO: 30238 - DNA, 327 bp, Glycine max
  Clone ID: LIB3138-040-Q1-N1-C12
cttttctaacatggctgctgggactggactctttgcagagattttggatggagatgtgtacaagtactatgctgatggagaatggaagaaatctgcttctgggaaaagtgttgccatcatcaaccccactaccagaaagactcaatacaaagttcaagcttgttcacaagaggaggttaacaaggtcatggacttggcaaaatctgcccaaaagttatgggcaaagaccccactatggaaacgtgctgaacttcttcacaaggcagctgctattcttaaaagagcacaaagcaccaaattgcagagtgcctggtgaaagaaatagca

SEQ ID NO: 30239 - DNA, 334 bp, Glycine max
  unsure at all n locations
  Clone ID: LIB3138-040-Q1-N1-C2
ctcgagccgcaatttccatcttcaacttcaacacttaaactccttttagtttcaataatccacaccccaaaccccaaatctttccctatttattttcatcttaggtttccctaggaccatatattataccatatttatatatcttcacatacttaataatatataataatgggtgttgtacggacgtgggaaagcaagagggcggagcttgaggcctttcgccggagcctggtggcagccgccggcattcagcggcggaaagacgatgagggggggaggacccacangtttgtttcctnctatgaacatgatgatggaaaggggaccttaatct

SEQ ID NO: 30240 - DNA, 377 bp, Glycine max
  Clone ID: LIB3138-040-Q1-N1-C5
caaaatcagaaccacattcctgggaattgatcttcccaatagaggtatgtggtcctaataatggttttgaaatgtggagttctgagtgggcaaatcaaacttcatggcatttgagtttccttattgacaatcccaaacagtctacagtttttgatattctcttgggaatctctcaagattttgaaattgctggtaatactcttatgccagctttttctgttccacaagctactgccagatcttctgaaaatgcggaatcctctgcatgatctggaatttgtgttttctttcgcttgttcgtttgtttaattcaataaaggaaattaggcatgaccctctttgtgagtatgctctgcctatttgaaaatttccacacc

SEQ ID NO: 30241 - DNA, 373 bp, Glycine max
  Clone ID: LIB3138-040-Q1-N1-C6
acaagctggtgcagtttggagagattcaggaaaaagttgtattgaaattttcacaagaggaatttcttacagcttggtcaactcaggtgcgtcctgcaacaactctgttggctgatgggtgtccatatttgtatgcaatggtgcatgatagttcagtgtctacaataccaggtgattttgtcattggtgtcaagttgacaaccataaacaatatgtgtgcatatgggctcaatcctggtatttcaggttctcgtcttttgggcaccattcctcagtccatttcacagcaaactgtttggaatcaaatggcaacagtgagaacaccattgaattttgattctagcaagcagagcttttgtcagttttctattga

SEQ ID NO: 30242 - DNA, 287 bp, Glycine max
  Clone ID: LIB3138-040-Q1-N1-C7
cacagggtatggctgcggtttaaaaaaaagcatggatggtttcagcgagctaaataagggacccagagctgccaagagttctgataataaaaatatcaaaagtcttggacctgtcacattattactcaaaggacagaaccttccagtgaagagtgataacaaagaagttcctccagttcctgacaaggaacagtacaatgggaaagattttgctgagaattattctgatgcaaagttttttgtcatcaaatcctataatgaggatgatattcataaaagcataaaat

SEQ ID NO: 30243 - DNA, 363 bp, Glycine max
  unsure at all n locations
  Clone ID: LIB3138-040-Q1-N1-C8
aaatacttttcttcttgtcactgacacagttgaatcccattgatgatcgtcccatgtctttaatttgatcccaaaactagaaatttcttctagcaaatgatccctctctctttttcttaattttccccagattcctctgtaagaggtagcatttgaaagctatgaagtcgattgaaattccataatcatattcaagcaaatttaaagcaaaagcttgtgtaatttttatacaactctcaaatggattatgaacctccattcctcgagacctacaaggccctngttaaaaccacgtcgatgattcaaagatgactcctctttgtggagagatgtgactaccagtgatcgatcttgcaagtcaac

SEQ ID NO: 30244 - DNA, 339 bp, Glycine max
  Clone ID: LIB3138-040-Q1-N1-C9
gccagaagccggagagcattcttggtctcagctcaacaacaaagcgatgttaaggaagcagagagcttgaaggtagaagaggagcaagagcaggaacaaatgcaaactcaaacaccgaagccaaaaggaacaacaccaaggccagtggaacctcagttgaatgtgaagagcaaaaacatgctgagggaatatggaaggcagtggctgagctgcgccacacgccatgtgaggatctatgctgcgtatatcgacccggtgacttgtgagtttgatcaaacccagatggataagctcacccttattcttgatcccactgatgaagttgtgtggaatactgag

SEQ ID NO: 30245 - DNA, 296 bp, Glycine max
  Clone ID: LIB3138-040-Q1-N1-D10
cgaagtgttaagagaatgcctctttctatagggggaggagctggtgcaaagaatgctattctcatgaatatgccaaatgctgttctttcaatgtggagatattttgttggagatctcgtctttgaagtttctaagatgacttctccctacattaaatgtacagtctctttcttcatagcatttggaaatttggctgatgataccatcaattttgaggcttttccccacaagctggtgcagtttggagagattcaggaaaaagttgtattgaaatttttcacaagaggaatttctta

SEQ ID NO: 30246 - DNA, 350 bp, Glycine max
  Clone ID: LIB3138-040-Q1-N1-D11
caggagtacatggaaccttttctctaccaccatgagcgcgaaatcgacgagttcattacccagagtcatgatcgcgccaagtcagcaggtatagcatacgtcgagatgggtattgagtgggtaaaggtcaacgtgttgggctttgcacccaggaagcccgactcaccgaggcccgatggacagacgtacgcgcaaaacctcatgagcaggttccagatgccgtcagcaaggggcagtaatgatctatacgggctggtcaaccaggcgctcagcggagccagtgcgctttatggtgctgccggtaccgcaggtacaagagacgcgcaagcctcggacctgagccgtggtgc

SEQ ID NO: 30247 - DNA, 329 bp, Glycine max
  Clone ID: LIB3138-040-Q1-N1-D12
agaaggggtaagggtgattattatgataatgatgaaagtggacacacatcggctaagtttgatttggatagggaaactatacctaggagatttgattacaaagaactagttgtagctaccaatgggttcgccgatgatacaaggcttggacgaggaggttcgggacaagtttacaaaggggttctgagtcatttaggaagggtggttgcagtgaaaaggattttcactaactctgaaaattcagaaagagttttcatcaatgaggttaggatcataagccgtcttatacacaagaaactttgtgcagttcgtagggtggtgccacgagc

SEQ ID NO: 30248 - DNA, 365 bp, Glycine max
  Clone ID: LIB3138-040-Q1-N1-D2
ggaagatcaagaaaaacccaaaaagattgatgccagattgagacaaagaatagatcctcaatacaatgaggttcaggctcagatggaaacaaatttgtttaaattgtctcttgatgatgttgaaactccaacatggaacctttaggagtttcaacatcatcaagagacaatttaaactcctaaaggttccatgttggatctgaaaatttctcaatctaaaattgcacttcccaagaacacagttggaggaaccattctgcgtagtgatctattggcaaattttttgacagagggcaatttttagagcatgtgttgatttgcagcgcactcattgtattagaggaatgataaaatggtggccacag

SEQ ID NO: 30249 - DNA, 319 bp, Glycine max
  Clone ID: LIB3138-040-Q1-N1-D3
cggctcgaggtagaatagcagatggcgatggtttccatggcattcggtgtcagcactgcgacttttccgaatctaaacaggtgtcgtggagtggcatatgcaagtttgagcaacaaagcaagtactacatctttgggagtgcgagttacagagggagaggggaatttgccgaagcttgttctcacttccccggccggtagtgaggctgagatatacctgtttggaggttgcattacttcttggaaagttcccagtggtaaggacctcctctttgttcgccctgacgctgttttcaatgggaacaaacccataagtggag

SEQ ID NO: 30250 - DNA, 366 bp, Glycine max
  Clone ID: LIB3138-040-Q1-N1-D4
gtgggattctgctttgagcacgaagaacaaatgctggtttatgagtatgttcaaaatggaagtttaaaggacgctctctcagggaagtcaggaattagattagattggattagaaggctaaaaattgcccttggtactgcccgtggtttggcttatcttcacgaacttgttaatcctcccatcatacatagggacatcaaatcaaacaatattttgctggatgaccgcctgaatgccaaagtttctgattttggtctctccaagtctatggttgattctgagaaagatcatgttaccactcaagttaaaggaacaatgggttacttggatccaaaagtttaatatgcttcaccaattgactgaaaa

SEQ ID NO: 30251 - DNA, 366 bp, Glycine max
  Clone ID: LIB3138-040-Q1-N1-D5
cggctcgagctcgagccgaatcggctcgaggtttgttcaaaactagcttctcttcaattcactcccaatttttcaccatattaatcttactatatttaatatttctttctttttcttcaatttctgagtttttttgctccagcagcttcgtcttaagaagctggtgttggaagtttgctcgcgatcatgcagaactgcgtgctcgatccacaagatcagagggttacttcctgcatggaggattcctctgcaatgactattgaattcctgcgggcaagggtgcttttctgaaagatccatctcaagaagtgctaaacagagagctgatgaactggcaaaaaaagtcatggaattgaggaacaactt

SEQ ID NO: 30252 - DNA, 230 bp, Glycine max
  unsure at all n locations
  Clone ID: LIB3138-040-Q1-N1-D6
ggaaattaggcatgaccctcttgttgagtatgctctgcctatttgaaaatttccacacctcttttaattgtcgtaatgatgtgtgaagtgtgtgttnnttttaaaaaaaaaaaaatacaattactgagtttttttgctacaacaacttcatcttaagaagctaatgttggaagtttgctagaaaatcatgcagaactgcgtgctctaaccacaatatcaagatggttact

SEQ ID NO: 30253 - DNA, 359 bp, Glycine max
  Clone ID: LIB3138-040-Q1-N1-D7
aaagaatgctattctcatgaatatgccaaatgctgttctttcaatgtggagatattttgttggagatctcgtctttgaagtttctaagatgacttctccctacattaaatgtacagtctctttcttcatagcatttggaaatttggctgatgataccatcaattttgaggcttttccccacaagctggtgcagtttggagagattcaggaaaaagttgtattgaaattttcacaagaggaatttcttacagcttggtcaactcaggtgcgtcctgcaacaactctgttggctgatgggtgtccatatttgtatgcaatggtgcatgatagttcaatgtctacaataccaagtgaatttg

SEQ ID NO: 30254 - DNA, 310 bp, Glycine max
  Clone ID: LIB3138-040-Q1-N1-D8
attggtcccaattgtggagccagagatcttgcttgatggggagcatggtattgacagaacttttgaagtagcaaaaaaggtctgggcagaggttttcttctaccttgctgagaacaatgtcctttttgagggtattcttcttaagcctagcatggttacacctggagctgagtccaaggacaaggccagtcctcagacagttgctgattacaccctcaagctccttcacaggagaattccccctgctgtccctggaaatatgttttgtctgtggacagtctgaggttgagctaccctcacttgatgcatg

SEQ ID NO: 30255 - DNA, 336 bp, Glycine max
  unsure at all n locations
  Clone ID: LIB3138-040-Q1-N1-E10
ctcccaacccccacccgtagtttctaccaccttcagtcacggcgtaatacactaaccaacccaccatgtcgctgcctgcttgtcccgccgaacaactggcccaacttctcggcccaaacaccacagacgcctccgccgccgcctcccttatctgcggccagttcgccgccgtggacagcaagttcgtcgacacggccttcgccgtcgacaacacctacctcctcttttccgcctacctcgttttttctatgcagctcggcttcgccatgctctgcgccggctccgtccgcgccaagaacacccatgaacatcatgctcaccaacgtnctggacgct

SEQ ID NO: 30256 - DNA, 341 bp, Glycine max
  Clone ID: LIB3138-040-Q1-N1-E11
tacaattgattggtttatttcctctcaggaatgtgttcccaggacctattgtgttttaaatccacaaaatccttttgtgttaaataggtggatgggaaaattgactttcccccagggcacttcccgaagtgttaagagaatgcctctttctatagggggaggagctggtgcaaagaatgctattctcatgaatatgccaaatgctgttctttcaatgtggagatattttgttggagatctcgtctttgaagtttctaagatgacttctccctacattaaatgtacagtctctttcttcatagcatttgggaaattggcttgatgataccatcaattttgag

SEQ ID NO: 30257 - DNA, 378 bp, Glycine max
  Clone ID: LIB3138-040-Q1-N1-E12
aaaatggcttctagttcagaatctcaatctcagtctaaaccgctccaagaccgagttgcaatcgtcaccggctcgtcccgcggaatcggccgagaaatcgcgcttcacctcgcctcactcggcgcgcgactcgtcgtcaactacacctccaactcggcccaagccgactcagtcgcggcgcagatcaacgccggttccgccaccacgacaccgcgcgccgtcgtggtccaagccgacgtgtccgatccggctcaggtgaagtcgctcttcgactcggccgagcgcgccttcgactcgccgatccacatccttgtcaactcggcgggcgtgatcgacggcacgtatcccttcgtcgccgacaccaccgtggagtccttc

SEQ ID NO: 30258 - DNA, 343 bp, Glycine max
  Clone ID: LIB3138-040-Q1-N1-E2
ggatgatgaatgctcctgattcaaatgataatattgatttactgttgagcattgatttgttgggtttacaaggagcaggtaaagcttttccaaacaaaattgtttttgatgataagcttgtgttggctaacacacaagaattctttgatggaaattttccagtggattcttggttaccaatttttgtgaattgtctttatcctgtaagtcaattaccttcagaagctgtcgttgtaaatgttacatgtggtaatggaccgtgtggtttacccaccactgcttggattagttctgcagttaacaatcgctcctcagatatcaacaaaaagattcgcacagcact

SEQ ID NO: 30259 - DNA, 311 bp, Glycine max
  Clone ID: LIB3138-040-Q1-N1-E3
ctgagtattctgatcgctccctgagagagctcgtcgcggcggttgcagaagaagattgcaagatgaagttcaacatcgcgaatcccaccactggatgccagaagaagctcgagatcgacgacgatctgaaactgcgagcattttgggacaagaggatctcacaggaggtcatcggagatgcactcggtgaggaatttaagggctatgtcttcaaaattaccggaggttgtgacaaacaaggatttccaatgaagcagggagtgctgactcctggtcgtgttagacttttgcttcacaggggaactccttgc

SEQ ID NO: 30260 - DNA, 381 bp, Glycine max
  Clone ID: LIB3138-040-Q1-N1-E4
aagaaaagggacaaacttagttgtcaagttggaatcaacccatactccatggaatggactggtttggccaatagattactgagtaagggcaatgatattctgtgttgcgattatgctagttttgatggtttgattaccaagcaagttatgagcaagatggcagaaatgataaacagtctttgtggtggtgatgaaaaattgatgcgtgaaaggacgcacctgctgttggcttgttgttcaaggattgcaatttgtaagaaagatgtttggagagttgaatgtggaatcccttctggatttccgctcacagttatttgcaatagcatttttaaatgagatgctcattagatatagctatgaaaaattactgcgccaggctaa

SEQ ID NO: 30261 - DNA, 305 bp, Glycine max
  Clone ID: LIB3138-040-Q1-N1-E5
gttaaagtgtccacttaactcaaaattatagaggaagacagtccaatatgaaaaatatagtaaaatcatctcaaacttggcatcttctctttgcacctaagacattgagttaaagtgtccacttaaattgaatttggtgccttttccttttgtcctaaagaaaaaaaagaaaaacagactttgtggtggtgatgaaaaaatgatgcgtgaaaggacgcacctgctgttggctcgatgatcaaggatggcaatttggaagaaagatgtttggagagttgaatgtggaatcccttctggatttccgc

SEQ ID NO: 30262 - DNA, 337 bp, Glycine max
  unsure at all n locations
  Clone ID: LIB3138-040-Q1-N1-E6
ctcgagccgaatcggttcgagttggaatcaacccatactccatggaatggactggtttggccaatacattactgagtaagggcaatgatattctgtggtgcgattatgctagctttgatggtttgattaccaagcaaggtatgagccagatggcagaaatgataaacagtctttcgggtggtgattaaaaattgatgcgtgaaaggacgcacctgctgttggcttgttgttcaaggatggcaatttgtaagaaagatgtttggagaagttgatgtggaatcccttctggatttccgctcacagntatttgcaatagcatcttttatgagatgctcat

SEQ ID NO: 30263 - DNA, 369 bp, Glycine max
  Clone ID: LIB3138-040-Q1-N1-E7
gagagaacaaatcacttagtgctattcaataattacgaaaaaccaacagcgagtgttgtttttgtttggtccaggctggaccagggaatgaatagagatgagaggctttcggttgaagagaactgagttaagcggcgaagccaaacgcagaatcggcggcagaaattgccaccggaagcacgtctaagacaggtgaaccaaacacagaattacatgcaccagttctgtttttaatccctaactcaaatctgtgaagaaaatctcaatgtctaaaattgaattcttagcactactgctagtagtaagtaaaaacaacaatttggaaagtgtagagctgttttttttctttttttcagtaggtttactttt

SEQ ID NO: 30264 - DNA, 364 bp, Glycine max
  unsure at all n locations
  Clone ID: LIB3138-040-Q1-N1-E8
cctgaggacaaggcgagtttatggtcacaacttcattatgtttcgtgtaataatctggaaatgcaagaagcttatcttgtcaatctcgtaaatgtgttacgagaattgtatttgcacagtccagaggaagctcgccaattgagaaggaaagctctctctcgtattgaatggctgcaaaaagctgatgtgcctaccatagcacagattgaagagttccattcgatgcagaggatgatgaatgctcctgattcaaatgataatatngatttactgttgagcattgattttgtgggtttacaaagagcaagtaaagcttttccaaaacaaaattgttttgatgataagcttgtgttggcttacacac

SEQ ID NO: 30265 - DNA, 328 bp, Glycine max
  Clone ID: LIB3138-040-Q1-N1-E9
gttaatgtagcatgtgctgctgttggcttgacatcaagttacactccaactccattgttggaatctggtttgcaaaaagacagagggttaattgtggagtattttggaaggatgtcttacgttgctcataacgttaatcagccccaagagaaagatttgttggagggaaatttttcctttgatattaaatctcgctctagattggaaaaagtttcctctacaaaagcacaatttgttagtggaaaaaccttcaaatatgatataattggtgctggttcacattcttcagaagattttccttgaaaggaagatcaagaaaaacccaaaa

SEQ ID NO: 30266 - DNA, 401 bp, Glycine max
  Clone ID: LIB3138-040-Q1-N1-F1
attgccgttccatgaatggtaatgggtccttaactttaatttaaattccttgggagttccgtatggcattttcatttttggttgatgtaatgtgtgattgggttagcttgtttggaaaaaatgactttgttttttaaaattaatctataaaatattggttgctgattctgaattaaggagaatttgtaacctccgaagagattacactctttggaatttcctatgatttttcatttttgtcgatgtaatgtgtgattggtttagcttggtatgaaaaatatgaaattctttgtttcatttggaacccttgaaagagattatatgaactacttatagaagtagcttataacttcattttaagctcttttcaacatatttcatcatgtgttcaaaatctgaaa

SEQ ID NO: 30267 - DNA, 294 bp, Glycine max
  Clone ID: LIB3138-040-Q1-N1-F10
gtcacttcgaggaccacgtggagctatgatattctacagaaaaggggttaaagaaattaacaaacaaggaaaagaggtattgtatgactacgaagacaaaatcaaccaagctgttttccctggactgcaaggtggccctcacaaccacactattactggtttagctgttgcgttgaagcaggccactactcccgaatatagagcatatcaagagcaagttctcagcaacagctttaaatttgcacaggctctgagtgagagaagctatgagcttgtctctggtggaaccgagaa

SEQ ID NO: 30268 - DNA, 314 bp, Glycine max
  Clone ID: LIB3138-040-Q1-N1-F11
ggaaattaggcatgaccactattgctgagaatgctctgactatgggaaaaatttccacacctctattaattagacgtaatgatgtgtggacgtgtgtgttcattttaaaccaaactagagataaataaaatgcaggggggggcctccaccttgtgtgttttttgcccggggttttatttcggaccgggtccctgcggccgaacctgttttccttaaagggggcggttttaaacttgggcaaaatattggacagggctgttccttggagaaaattttatcccgtttaaaattccacccaaaatcccccccggaac

SEQ ID NO: 30269 - DNA, 273 bp, Glycine max
  Clone ID: LIB3138-040-Q1-N1-F12
aaataatcaggaaaaagaaaagaaaaaaaaagattctttcttggcttgtctaatgaaggaataagagcctccaagcaaggaggaacgtgtctgaatctccttataaacaccgagatttcagagagaagcagaatctcgtgccacctcctacgttaagttaaaggaatcctatttttgggcatggaaatcctctcatatggatctggaccatgcagtcaagcagtggattcgaagtggaaatttgttgacaaatgcttgaattcacgtcaatca

SEQ ID NO: 30270 - DNA, 406 bp, Glycine max
  unsure at all n locations
  Clone ID: LIB3138-040-Q1-N1-F2
actatctttatataataatataaataagaataaaaaaataaaaaaaaaaaaagaatctatataaatataaaaataatatatataaggtacaaatagtaaatcgaggtacccattttatgataaactttccttccatttttgttcctctagtaggcctagtatttccggcaattgcaatggcttctttatttcttcatgttcaaaaaaacaagattttttagatacagaaaacaaagtaaaattctggggttttttattccccaattataatactaaattcaaaaaaaggagagtaatgagtataatctttcgctcagacgatgtactgatatattctatggcggaggttcgaaaaacaagcaatttattttgggccgntttcactttgttaggttcaatggggtta

SEQ ID NO: 30271 - DNA, 328 bp, Glycine max
  Clone ID: LIB3138-040-Q1-N1-F3
gggaggattatcaatgccgaagccatggataatgcacagctgtggttggcttgggtgcaaagctctagttggcttgcaagccttatttttcagtttttacccaatatgatcatatttgttagcatgtatatagtgatcccttcggctctttcatatctatcgaagtttgaacggcatttgacagtgtctggggagcaaagagctgcgctcatgaagatggtttgcttcttccttgtgaatctcattctcttgaggggtttggtggaatcgtcgttagagagtatgatcttgaagaatgggcggtgctatttggatggagaagattgca

SEQ ID NO: 30272 - DNA, 402 bp, Glycine max
  Clone ID: LIB3138-040-Q1-N1-F6
tgctcattagatatagctatgaaaaattactgcgccaggctaaagctccaagtatgtttttacaatccttcaaaaattttgtttctttgtgtgtgtatggtgatgataacttaattagtgttcatgaatatgtcaagccttactttagtggttctaaattgaaaagctttctagctagtcataacatcaccattactgatggtattgacaaaactagtgcaactttgcaatttagaaagttagcagattgtgattttctcaagagaaactttaagcagatgtctaatgttttgtgggtggcttctgaggacaaggcgagtttatggtcacaacttcattatgtttcgtgtaataatctggaaatgcaagaagcttatcttgtcaatctcgtaaatgtgttac

SEQ ID NO: 30273 - DNA, 374 bp, Glycine max
  Clone ID: LIB3138-040-Q1-N1-F7
tctcaaccggcccaatttagcataagcccagcatggccaccgcaacagcagcagccacctcgtccttcatggggacgcgcctcctggaggcccactccggggcggggcgggtgcaggcccggttcgggtttggcaagaagaaagccgccgccccgaagaaagtttccagggggtcgggctctagctccgataggcccctgtggtatccgggcgccaaggcgcccgagtacctggatgggagccttgtcggagactacggattcgacccatttgggctagggaagcccgccgagtacctgcagttcgagttggactcgctggaccagaaccttgcgaagaacgtggctggggacatcattgggaccaggaccgag

SEQ ID NO: 30274 - DNA, 401 bp, Glycine max
  unsure at all n locations
  Clone ID: LIB3138-040-Q1-N1-F8
cttagttgtcaagttggaatcaacccatactccatggaatggactggtttggccaatagattactgagtaagggcaatgatattctgtgttgcgattatgctagttttgatggtttgattaccaagcaagttatgagcaagatggcagaaatgataaacagtctttgtggtggtgatgaaaaattgatgcgtgaaaagacgcacctgctgttggcttgttgttcaaggatggcaatttgtaagaaagatgtttggagagttgaatgtggaatcccttctggatttccgctcacagntatttgcaatagcatttttaatgagatgctcattaaatatagctatgaaaaattactgcgccaggctaaagcttcaaatatgtttttacaatccttcaaaaattt

SEQ ID NO: 30275 - DNA, 361 bp, Glycine max
  Clone ID: LIB3138-040-Q1-N1-F9
gttttggagatttagagaatccatattagaataacaaaataagtaaagaatatgattgtgaggaaaaacaagccaagtgcaaggtcactacttatgctttttgttatggttcttgcttttctctttgtcacttataatttggtgtttataatcaaacaccatatgggtggaacttgggtagcagaagagttgaggtttcttgatcctgtgatcagcatgcctggaaaggtgatggcattagcaaattccaattcaaaatttcatgttgcagtgaccgcaaccgatgcggcttacagccaatggcaatgccggattatgtactattggtataagaaggttaaagatattcctggatcaaaca

SEQ ID NO: 30276 - DNA, 385 bp, Glycine max
  Clone ID: LIB3138-040-Q1-N1-G1
caattaccttcaaaagctgtcgttgtaaatgttacatgtggtagtggacgtgggtggtttacccaccactgcttggattagttctgcagttaacaatcgctcctcagatatcaacaaaaggattcgcacagcacttgggaaaagtaagaaaattgtttttcttactagagttgatccttttccagtagctttactggctgttctttttggcgttaaaaatgaaattctgagttctaacgccactaatcctatgctgacgcgacttcttgagaactgtaagagtctcaaatatctggttgatgagtgtccttttgcatttgtgaactagtatgtagtattttattcacttaaataaagcgcattactatgtgccatgagtgtgttt

SEQ ID NO: 30277 - DNA, 359 bp, Glycine max
  Clone ID: LIB3138-040-Q1-N1-G10
aagtggacaaaatcagaaccacattcctgggaattgatcttcccaatagaggtatgtggtcctaataatggttttgaaatgtggagttctgagtgggcaaatcaaacttcatggcatttgagtttccttattgacaatcccaaacagtctacagtttttgatattctcttgggaatctctcaagattttgaaattgctggtaatactcttatgccagctttttctgttccacaggctactgccagatcttctgaaaatgcggaatcctctgcatgatctggaatttgtgttttctttcgcttgttcgtttgtttaattcaataaagggaattaggcatgacccctcttgtgagtatgct

SEQ ID NO: 30278 - DNA, 313 bp, Glycine max
  Clone ID: LIB3138-040-Q1-N1-G12
gtttggttgggattatttatgggaaaagaataactttttcttctaaagctctttcaagatgaaaaaagtgaatttatttcttcaaaataaactaatccaatcatggctcaaattactcatgttgtcatacattctataagtagcacagattttattctgtaattagtacagatttgatttttttttatttgtacagattttgttccattttatttcttttcttaattaggtcattggcagcttgtaaatgagtcttgtattcactcttcgaaagacagaattacattaatattcagattattatctttcaagt

SEQ ID NO: 30279 - DNA, 352 bp, Glycine max
  Clone ID: LIB3138-040-Q1-N1-G2
ctttgcaattaaaaaagttagcaaattgtgattttctcaagagaaactttaagcagatgtctaatgttttgtgggtggctcctgaggacaaggcgagtttatggtcacaacttcattatgtttcgtgtaataatctggaaatgcaagaagcttatcttgtcaacctcgtaaatgtgttacgagaattgtatttgcacagtccagaggaagctcgccaattgagaaggaaagctctctctcgtattgaatggctgcaaaaagctgatgtgcctaccatagcacagattgaagagttccattcgatgcagaggatgatgaatgctcctgattcaaatgataatattgatttact

SEQ ID NO: 30280 - DNA, 295 bp, Glycine max
  unsure at all n locations
  Clone ID: LIB3138-040-Q1-N1-G3
gaactatcactggagaagagtctgtttttcattggaattacttgtatttcaacatctaatccttttaggaggaggatatttgagcccatgggccgcatattgaattttggattagtcctaattttatgtgcgttagtgcccccggttgaactatntggtgtgtttgtggtggctgtacaagatttttgatgtatgtgggatgcacaaagcgtgcaaacatatacttctaggccttgtggtcgagtattatgcactagtattacgcaataaggtcatcatggatatgctttttaac

SEQ ID NO: 30281 - DNA, 368 bp, Glycine max
  Clone ID: LIB3138-040-Q1-N1-G4
tcaattttgaggcttttccccacaagctggtgcagtttggagagattcaggaaaaagttgtattgaaattttcacaagaggaatttcttacagcttggtcaactcaggtgcgtcctgcaacaactctgttggctgatgggtgtccatatttgtatgcaatggtgcatgatagttcagtgtctacaataccaggtgattttgtcattggtgtcaagttgacaaccattaacaatatgtgtgcatatgggctcaatcctggtatttcaggttctcgtcttttgggcaccattcctcagtccatttcacagcaaactgtttggaatcaaatggcaacagtgagaacaccattgaatttgattctagcaagc

SEQ ID NO: 30282 - DNA, 396 bp, Glycine max
  Clone ID: LIB3138-040-Q1-N1-G5
gcaagctcatcctagagttttaaaaatggcagcagcctcctccatggctctctcttccccatccttggctggcaaggccgtgaagctgggcccatcagcccccgaagtcgggagggtcagcatgaggaagaccgtcaccaagcaggcctcctccggaagcccatggtacggcccagaccgcgtcaagtacttgggcccattctctggcgagcccccgtcctacctcactggcgagttcccaggtgactacggctgggacactgctgggctttcggccgacccagaaaccttcgccagaaaccgtgagctcgaagtgatccactccaggtgggccatgctcggggcccttggctgcgtcttccccgaactgttgtcccgcaacggggtcaagtttgg

SEQ ID NO: 30283 - DNA, 388 bp, Glycine max
  Clone ID: LIB3138-040-Q1-N1-G7
ctcgcaatggttaaagttaatgtagcatgtgctgctgttggcttgacatcaagttacactccaactccattgttggaatctggtttgcaaaaagacagagggttaattgtggagtattttggaaggatgtcttacgttgctcataacgttaatcagccccaagagaaagatttgttggagggaaatttttcctttgatattaaatctcgctctagattggaaaaagtttcctctacaaaagcacaatttgttagtggaaaaaccttcaaatatgatataattggtgctggttcacattcttcagaagattttcctgaaaaggaagatcaagaaaaacccaaaaagattgatgccagattgagacaaagaatagatcctcaatacaatg

SEQ ID NO: 30284 - DNA, 405 bp, Glycine max
  Clone ID: LIB3138-040-Q1-N1-G8
aatttttgtgaattgtctttatcctgtaagtcaattaccttcagaagctgtcgttgtaaatgttacatgtggtagtggacgtggtggtttacccaccactgcttggattagttctgcagttaacaatcgctcctcagatatcaacaaaaggattcgcacagcacttgggaaaggtaagaaaattgtttttcttactagagttgatccttttccaagaactttactggctgttctttttggcgctaagaatgaaattctgagttctaacgccactaatactatgctgacgcgacttcttgagaactgtaagagtcttaaatatctggttgatgagtgttcttttgcatttgggaactagtatgcaatattttattcacttaaataaaagcgcattactatgtgcaa

SEQ ID NO: 30285 - DNA, 387 bp, Glycine max
  unsure at all n locations
  Clone ID: LIB3138-040-Q1-N1-G9
gtcgcgagtgctgtcacgcgccggaaccttgtcctccctccctcacctccgcaagccgccgcgggaggccgtctccagcgcctccctcgtcgccgtgaaggccgtgggctccgtcgcggacggcggaaacctgatttgggggaggcagctgcgcccggagctctgctcgccggtgctgaagaaggaggctgtccttctncggccatgcctcgccgccgccttctcgccggccgagggtagtgattccgccggagaagcaaaggttgctccggcggggttcttcgacaagtacccggctctggtcaccggatttttcttcttcacgtggtacttcttgaacgtgattttcaacatcctcaacaagaagatctacaattacttccccta

SEQ ID NO: 30286 - DNA, 120 bp, Glycine max
  Clone ID: LIB3138-040-Q1-N1-H10
gcctaattaagtattatttatggaaaaagaaaaacaagtgaggtctaaagctcttccaaaatgaaaaaaattcaacttttttcatttaaaaaaaaacttattccaacaacctcttaaaaa

SEQ ID NO: 30287 - DNA, 353 bp, Glycine max
  Clone ID: LIB3138-040-Q1-N1-H2
ctcgagccgctcgagccgattcggctcgagaacgaaacatggcaagagtggtggcactccaacagaaccaactatctttctctaccttagcttcctctctttctgacttcagtggaaccagacttcaaactcaacttcagttcaagagaaagcaatgccatccaaaagggtctttctacgtctccgcatcgagcaccaagaaaatcctaataatgggaggcaccaagtttattggtgtgtttttgtctaggctccttgtcaaagagggtcaccaggtgactttattcacaagaggtaaagcgcctgtcactcaacagttgccaggtgaatcagacagtgattatgctgatttt

SEQ ID NO: 30288 - DNA, 245 bp, Glycine max
  unsure at all n locations
  Clone ID: LIB3138-040-Q1-N1-H3
ggcaactcaaggtcaagtcattacctgcaaagctgcggtggcctgggaacccaacaagcccttaactgtccaagacgttcaagtggctccgcctcangccggcgaggttcgggttcaaattctcttcaccgctctctgccacaccgatgcttacacttggggcggcaaggatcccgaaggtctcttcccctgtattcttggccatgaaacttcaaggattgtggagagtgtttgaaaaagtgtta

SEQ ID NO: 30289 - DNA, 308 bp, Glycine max
  unsure at all n locations
  Clone ID: LIB3138-040-Q1-N1-H4
ctcgagccgaatcggctcgagtggagagattcaggaaaaagttgtattgaaattttcacaagaggaatttcttacagcttggtcaactcaggtgcgttctgcaacaactgtgttggctgatgggtgtgcatatttgtatgcaatggtgcatgatagttcagtgtctacaataccaggtgattttgtcattggtgtcaagttgacaaccataaacaatatgtgtgcatatgggctcaatccttgtatttcangttctcgtctttggggcaccattcctgagtccatttcacagcatactgtttggaatc

SEQ ID NO: 30290 - DNA, 232 bp, Glycine max
  unsure at all n locations
  Clone ID: LIB3138-040-Q1-N1-H6
gttcggccggttcgtgtggcctttcaggtggtgaatgggttccatttctacgagaatggagtttacactagtgacatttgcggtagcacttcccaggatgtgaaccatgccgtccttgctgtggggtatggagttgaaaatggcgtcccatattggctcataaaaaattcatggggagaaagttggggtgagaatggctacttcaaaatggaattggngaagaacatgtgtg

SEQ ID NO: 30291 - DNA, 404 bp, Glycine max
  Clone ID: LIB3138-040-Q1-N1-H7
gcaatgcatgcaggtgtggccaccagttggcaagaagaagtttgagactctttcctacctgccagaccttgatgatgcacaattggcaaaggaagtagaataccttcttaggaagggatggattccttgcttggaattcgagttggagcacggtttcgtgtaccgtgagcacaacaggtcaccaggatactacgatggacgctactggaccatgtggaagctgcctatgtttggttgcactgatgcttctcaggtgttgaaggagcttcaagaggctaagactgcataccccaacggcttcatccgtatcatcggattcgacaacgttcgccaagtgcagtgcatcagcttcatcgcctacaagcccccaggcttctaagtgtgaaaaatttgcaaagcatttg

SEQ ID NO: 30292 - DNA, 248 bp, Glycine max
  Clone ID: LIB3138-040-Q1-N1-H8
cgagaataaaacaaacaaaaaatattcaaagatacagagaaccataaccaaagccatagccaccttcctgaaacccaattcctcaatagtttctcacccttctcttcatctactctttccaaaagaattgatgtataaagtctggtggcctctgatgtgatccccttttgatgtcaaataccagaagagaatgaaactatgattgattgacgttgttttgatttaacaaaagaattagtggaaaatgg

SEQ ID NO: 30293 - DNA, 402 bp, Glycine max
  Clone ID: LIB3138-040-Q1-N1-H9
cgcaaacccaaaattccacagcggtccccagccaaagcaaactcaagactctagcctctttattaaggaccgactcgtcttctcgatagtccgttagtatgctctgcggttgctgaatcttatttagattattcctgaaccctgcaaaaccctcttatctctcttctatcgcttggcctgatattctttatggctgagagatcaagcgaaaatgagcgtggttggattagattttggtaatgaaagctgcattgttgctgtcgcaagacaaaaggggatcgacgttgtgctcaatgatgagtcaaagcgtgaaacacctgcaatagtatgctttggtgacaaacagcggttgcttgggacagctggggctgcttctacaatgatgaaccctaagaattccat

SEQ ID NO: 30294 - DNA, 401 bp, Glycine max
  Clone ID: LIB3138-041-Q1-N1-A10
ctactacaaccacctctacacttcgatcctccacccaacaccaaaaaaacccacctcaacacattcacaatggcatcaatcgagcagacatggagccttgccggcaaggtcgccgttgttaccggctcaggccgtggtatcggaaaggcgatggccattgagctggccaagcgtggcgcaaaggtcgccgtcaactacgccaacgccgtcgagggagctgagcaggttgtcaaggagatcaaggcccttggtaacggctcagatgccgctgccttcaaggctaacgttggcaacgtcgaggagtctgagaagctgatggatgacgtttgtgcccacttcggcaagctcgacatctgctgctcaaactctggtgtcggctcattcggtcacttcaaagacgt

SEQ ID NO: 30295 - DNA, 404 bp, Glycine max
  Clone ID: LIB3138-041-Q1-N1-A11
aattttcttttccttggtgaggcttggcagtgaaaatagattgggatgcttgaagcccctagggaaaagtaatatccttctctgcgataagaggaagcccaccacctcagaaaacagaaaacagagtgagtgagtgtgttgtgtaatatggataaaagctgtcatccctctagcaatactagtataagcacatcctctgctgccaaccccaacaacaatagcagggatcaatatcttcgccatctcaacaagctctctcaaaagatctccaaacccatcattaagaaacccgtctttgatcctcctcaggcccaagtcccaaacaatcaggtgcagcatcagccgccggtgtacaacatcaacaagaacgacttccgtgatgtggttcagaaactgacgggctc

SEQ ID NO: 30296 - DNA, 246 bp, Glycine max
  Clone ID: LIB3138-041-Q1-N1-A12
gttggaagaaaggttttcaaaatgaatgagtggggtagcgtgaaaatgggtatagaaaattgattttgttgttaggcatgctctgatgctcactcaaatgttggcacaggtaggcagaatttaagtgtggcagcaattattaatgctttggacataaagtcaagtcataaagaaaagatcattgtttaaaaaaacaaaactgacaaccacaacaacaataaaaaaggatcaaaattttaaaaaggg

SEQ ID NO: 30297 - DNA, 394 bp, Glycine max
  Clone ID: LIB3138-041-Q1-N1-A9
gaggagctggtgcaaagaatgctattctcatgaatatgccaaatgctgttctttcaatgtggagatattttgttggagatctcgtctttgaagtttctaagatgacttctccctacattaaatgtacagtctctttcttcatagcatttggaaatttggctgatgataccatcaattttgaggcttttccccacaagctggtgcagtttggagagattcaggaaaaagttgtattgaaattttcacaagaggaatttcttacagcttggtcaactcaggtgcgtcctgcaacaactctgttggctgatgggtgtccatatttgtatgcaatggtgcatgataattcagtgtctacaataccaggtgattttgtcattggtgtcaagttgacaac

SEQ ID NO: 30298 - DNA, 385 bp, Glycine max
  unsure at all n locations
  Clone ID: LIB3138-041-Q1-N1-B10
atttcttacagcttggtcaactcaggtgcgtcctgcaacaactctgttggctgatgggtgtccatatttgtatgcaatggtgcatgatagttcagtgtctacaataccaggtgattttgtcattggtgtcaagttgacaaccataaacaatatgtgtgcatatgggctcaatcctggtatttcaggttctcgtcttttgggcaccattcctcagtccatttcacagcaaactgtttggaatcaaatggcaacagtgagaacaccattgaattttgattctagcaagcagagcttttgtcagttttctattgaccttctcngtggaggaatcttagtggacaaaacttgagattggatcacacttatacaaaattcttcaattaat

SEQ ID NO: 30299 - DNA, 403 bp, Glycine max
  Clone ID: LIB3138-041-Q1-N1-B11
ggaaatggtgactggaactataccatatgaggacatgactcccatccaggctgcttttgccgtagtaaataagaatgtaaggccagttattccttcaaactgtccacctgcaatgcgagctttaatcgagcaatgttggtctttgcatccggacaagaggcccgagttctggcaggttgttaaggtattagaacaatttgagtcttcgcttgctcatgatggaactctgactctggtggaaaatccttgttgccctgatcataagaaagggcttctccattggattcaaaagcttggtcctgtgcatcataataatggccctgtgcctaaaccgaaatttacatgagtcttcaaagtggcctggctttttgtagtataccgggttcattgtaattaatattga

SEQ ID NO: 30300 - DNA, 363 bp, Glycine max
  Clone ID: LIB3138-041-Q1-N1-B12
aatttggctgatgataccatcaattttgaggcttttccccacaagctggtgcagtttggagagattcaggaaaaagttgtattgaaattttcacaagaggaatttcttacagcttggtcaactcaggtgcgtcctgcaacaactctgttggctgatgggtgtccatatttgtatgcaatggtgcatgatagttcagtgtctacaataccaggtgattttgtcattggtgtcaagttgacaaccataaacaatatgtgtgcatatgggctcaatcctggtatttcaggttctcgtcttttgggcaccattcctcagtccatttcacagcaaactgtttggaatcaaatggcaacagtgagaaca

SEQ ID NO: 30301 - DNA, 351 bp, Glycine max
  Clone ID: LIB3138-041-Q1-N1-C10
aaaaaaaaaaaaataaaaaaaaaaaaaaaaaaaaaaaaaaaaaagggaaaaaaaaaaaaaaaaaaaaaaaaaaaaaaaaaaaaaaaaaaaaaaaaaaaaaaaaaaaaaaaaaaaaaaaaaaaaaaaaaaaaaaaaaaaaaaaaaaaaaaaaatgggggggccccccctttaaaaaactctccccccccgaaataatttcggacccggtcccttaagggtaaccatttttcttttttggaggttttttaaaacttggccgaaaccagggaaaaacttttttccttgtaaaaattttttccctttacaatttccacaaaaataacaacccgaaaaaaaaaattttaaaccctg

SEQ ID NO: 30302 - DNA, 400 bp, Glycine max
  Clone ID: LIB3138-041-Q1-N1-C11
gtttcgtgtaataatctggaaatgcaagaagcttatcttgtcaatctcgtaaatgtgttacgagaattgtatttgcacagtccagaggaagctcgccaattgagaaggaaagctctctctcgtattgaatggctgcaaaaagctgatgtgcctaccatagcacagattgaagagttccattcgatgcagaggatgatgaatgctcctgattcaaatgataatattgatttactgttgagcattgatttgttgggtttacaaggagcaggtaaagcttttccaaacaaaattgtttttgatgataagcttgtgttggctaacacacaagaattctttgatggaaattttccagtggattcttggttaccaatttttgtgaattgtctttatcctgtaagtc

SEQ ID NO: 30303 - DNA, 348 bp, Glycine max
  Clone ID: LIB3138-041-Q1-N1-C12
cggctcgagattttaggtgcgtgggtacactttcggcatcaattcaggtgctgttgaagaacttgaacttgattcatttggactatccatcattccgtcaagtttggtaaggggtggcttctttgtacggtaaatagtacaagtacagaactattgattgcatgcaagttttgtgaatttaactggaaacatgtatcttatgcactggtggaggtttcctactaccagttttcacttgaatagtaacaaaaaaaattaagcaaaaccttattattagaatatatgaaaaatgtctcataatattaatattatatcttggaatatttttgagttattggtgcttatctc

SEQ ID NO: 30304 - DNA, 311 bp, Glycine max
  Clone ID: LIB3138-041-Q1-N1-C9
aaaaaaaaacaaataaaaataaaaaacaaaaactactcaaaacagacgaagaatataaaaaaaattaaaaaccacaaaacatcaccaacttaaaaacaaccaccaaaatcttaacaccaataacttaacaaaaaaaaccacaagctaagacctaatcttctcaccatcaaaaatataataggtggggtgccccccaccttataccctcctccccccattattaatttcacccctgtctcctactgatttcccttttttcatttaatggtccactcttaactctagtgaaaatttgcgttccatgctttctt

SEQ ID NO: 30305 - DNA, 335 bp, Glycine max
  Clone ID: LIB3138-041-Q1-N1-D10
ctaggacgttcatggattatgaatccataactcaggccatggatggcatatgtgcactgtatgaaaggaaactgaaggagttgaacccgaccataagaaatctctcgtatgacattactgatctctacaacttcatagatggtcttgcagacatgagtgccctagtgtatgatagttcaattcacgcttacatgccgcacgatcgacagtggattaagcaacgaactttccaacatctgaagaaattagcacactgattaatcccttaacttttggcaatttaatgtaaagaaaatcgagaatggccgagagccctgtctgttatgtgggctata

SEQ ID NO: 30306 - DNA, 402 bp, Glycine max
  unsure at all n locations
  Clone ID: LIB3138-041-Q1-N1-D11
ccttaatgaggtttttgagagttttgtagaaccaaagctcatccaacctacatttgttttagactatccaattgagatatctccactggccaaaccacacagaagatccacaggtttgactgagagatttgaactcttcatttgtggtcgtgagttgggcaatgcattctctgaattgactgatcctatagatcagagaggacgcttagaagatcaaattaggcagcatgaaaagaagagagcagctgtttcaacaaatgacgataaaaaggaaggaacggaagatgatgatgattcatatgaagtgactcttgatgatgactttctcacagctttggaatacggaatgcctccagcttctggaatgggacttggaatngataggctggtgatgnctttgac

SEQ ID NO: 30307 - DNA, 343 bp, Glycine max
  Clone ID: LIB3138-041-Q1-N1-D12
acaaaattctccaattagtaacttattgagagttgctgcttggaagaaaggctgtttaatggtcaagattgtgatgtctgggaatgcagcagtcaaaaggagtgattgggcctcattggtacaagtgtttttaacaaacagcaacagtacagagcattttgatgcatgtaagtggacaaaatcagaaccacattcctgggaattgatcttcccaatagaggtatgtggtcctaataatggttttgaaatgtggagttctgagtgggcaaatcaaacttcatggcatttgagtttccttattgacaataccaaacagtctacagattttgatattctcttggga

SEQ ID NO: 30308 - DNA, 394 bp, Glycine max
  Clone ID: LIB3138-041-Q1-N1-D9
tgaaattttcacaagaggaatttcttacagcttggtcaactcaggtgcgtcctgcaacaactctgttggctgatgggtgtccatatttgtatgcaatggtgcatgatagttcagtgtctacaataccaggtgattttgtcattggtgtcaagttgacaaccataaacaatatgtgtgcatatgggctcaatcctggtatttcaggttctcgtcttttgggcaccattcctcagtccatttcacagcaaactgtttggaatcaaatggcaacagtgagaacaccattgaattttgattctagcaagcagagcttttgtcagttttctattgaccttctcggtggaggaatcttagtggacaaaactggagattggatcacacttatacaaaattc

SEQ ID NO: 30309 - DNA, 390 bp, Glycine max
  unsure at all n locations
  Clone ID: LIB3138-041-Q1-N1-E10
ttgtcctttttcctcgcttaagatcacccaagagagaacctaagacacacaacacagactcacacaaagagttacaagagaaatcatcatggcatcagcagcatctgggtttgtgttgtcacttaatgttgcagctgccaccacaaactcaagggtggtcatgttcaacaccaagaacaacacttctaggtttgttgtaaaggcttcagatgagcctgcagcggcggcacccgccaccgccacacccccagctgaagctgaagctaaaccaaagccaccacctattggccccaagagaggtgctaaggtgaagattcttaggaaggaatcttactggtacaaangcaccggntcagtggtttgctgtgatcaggaccccaacactcgcta

SEQ ID NO: 30310 - DNA, 387 bp, Glycine max
  unsure at all n locations
  Clone ID: LIB3138-041-Q1-N1-E11
cacacactggtccacagtcatggcaaccagctcgacgttcagccagcagctgctgcagaagtatggcgccgaatttgagcgcgcaacgcaacacccgttcctcacggccgccggccagggctcgctagacaagaaagtgctggttgggtggctgcgacaggactatctgtacgcgtacgtggggtacatcaagttcgcttccatcctcatctcgcgcctcccttaccctaccgttccccccacaccatcatcttctggcacagccgacggagcgggcgcgggcgcgccgccgagccgggagcacgtnctgcacaaggccctctcgacgctcatcttttccctgtccaacgtcaagcgcgagacggggtttttcgtcgagacggcacg

SEQ ID NO: 30311 - DNA, 155 bp, Glycine max
  Clone ID: LIB3138-041-Q1-N1-E12
ggaagtacagatgtggtccgtgcccctcctttcctctacatcgatcaagtgaaaaactcactcactgaccggattgaaatatctgcccagaattcttgggttggaaaaggtggtgcttttactggagaaatcagcgcggaccacctaaaagatct

SEQ ID NO: 30312 - DNA, 395 bp, Glycine max
  Clone ID: LIB3138-041-Q1-N1-E9
gtgagaacaccattgaattttgattctagcaagcagagcttttgtcagttttctattgaccttctcggtggaggaatcttagtggacaaaactggagattggatcacacttatacaaaattctccaattagtaacttattgagagttgctgcttggaagaaaggctgtttaatggtcaagattgtgatgtctgggaatgcagcagtcaaaaggagtgattgggcctcattggtacaagtgtttttaacaaacagcaacagtacagagcattttgatgcatgtaagtggacaaaatcagaaccacattcctgggaattgatcttcccaatagaggtatgtagtcctaataatggttttgaaatgtggagttctgagtgggcacatcaaacttcatg

SEQ ID NO: 30313 - DNA, 398 bp, Glycine max
  Clone ID: LIB3138-041-Q1-N1-F10
ttcgatgcagaggatgatgaatgctcctgattcaaatgataatattgatttactgttgagcattgatttgttgggtttacaaggagcaggtaaagcttttccaaacaaaattgtttttgatgataagcttgtgttggctaacacacaagaattctttgatggaaattttccagtggattcttggttaccaatttttgtgaattgtctttatcctgtaagtcaattaccttcagaagctgtcgttgtaaatgttacatgtggtagtggacgtggtggtttacccaccactgcttggattagttctgcagttaacaatcgctcctcagatatcaacaaaaggattcgcacagcacttgggaaaagtaagaaaattgttttcttactagagttgatccttt

SEQ ID NO: 30314 - DNA, 402 bp, Glycine max
  Clone ID: LIB3138-041-Q1-N1-F11
aaagctttctagctagtcataacatcaccattactgatggtattgacaaaactagtgcaactttgcaatttagaaagttagcagattgtgattttctcaagagaaactttaagcagatgtctaatgttttgtgggtggctcctgaggacaaggcgagtttatggtcacaacttcattatgtttcgtgtaataatctggaaatgcaagaagcttatcttgtcaatctcgtaaatgtgttacgagaattgtatttgcacagtccagaggaagctcgccaattgagaaggaaagctctctctcgtattgaatggctgcaaaaagctgatgtgcctaccataacacagattgaagagttccattcgatgcagaggatgatgaatgctcctgattcaaatgataata

SEQ ID NO: 30315 - DNA, 249 bp, Glycine max
  Clone ID: LIB3138-041-Q1-N1-F12
ctcgagcccaatccgcttgggctcgaggtttggattcaatacatgaatggtctagtgttctttctctgggagagcagcaacgccttgcatttgctcgggggcggccgtcaactcctgagttggctttcctggatgagtataccggaccgctccatgaagccaaccaggttcatttataccaagtgattttagcacctgacataacataggtcatagctggccatcgggcatacttatgtgctgaccaca

SEQ ID NO: 30316 - DNA, 139 bp, Glycine max
  Clone ID: LIB3138-041-Q1-N1-F9
ctaccccctaaccttttatcaatatacttccacaatctcattcgggggtgtttaatatacattccataaacccactcttcatattttccccagtatttcaagtttacaacctctcttaacacttcttatgtttagagtt

SEQ ID NO: 30317 - DNA, 406 bp, Glycine max
  Clone ID: LIB3138-041-Q1-N1-G10
aacagattcctccgtgaggaacttttcaaaattgaacatggagtgtgcacaaattgccaattcgactgtcataagctcgttgaggatataagacctttgtcattggaaaggcggcgtgagtacatagagaaagtagcaccgaaagttgctaaacggaagaaaatgtttgagaagcttgtcaatgaaccaactgaaggcaatgcatggcatgctgaccatattgttccagtatatgacggaggaggtgagtgcaagctggagaatctgaggactctctgtgtagcctgccattatgatgtcactgctgcacaatgtgctgaacgacgcatagccaaagcaaatgccaggaaacaactaaaagcgttaatgaatagcatgaaaaatggtattaagggtgctactggca

SEQ ID NO: 30318 - DNA, 397 bp, Glycine max
  unsure at all n locations
  Clone ID: LIB3138-041-Q1-N1-G11
cttcaagccaagccaggtaagcacaaccaaagcaacaccccaaatggcttcagcttctgttcccatggcgttgtcactgagctctgttaccaacaacaacaagccttcatccgaagccttcttcaggccactacccctacgccaaccaaagaggaccctcttcaccacgaaggcggtgtcaaactccaagcctcaaatcaatgcatctttgaaggagaaggcagttgccggactcacagcagcttctgtgacagcatctatggtggttccggaggtggctcatgctgctggatatgagttctccccttccctaaagaactatctactcagcatctntgctggtggggttgttctagcagccatatttggagcccgtattggggtttccaactttgat

SEQ ID NO: 30319 - DNA, 399 bp, Glycine max
  Clone ID: LIB3138-041-Q1-N1-G12
attcctcagtccatttcacagcaaactgtttggaatcaaatggcaacagtgagaacaccattgaattttgattctagcaagcagagcttttgtcagttttctattgaccttctcggtggaggaatcttagtggacaaaactggagattggatcacacttatacaaaattctccaattagtaacttgttgagagttgctgcttggaagaaaggctgtttaatggtcaagattgtgatgtctgggaatgcagcagtcaaaaggagtgattgggcctcattggtacaagtgtttttaacaaacagcaacagtacagagcattttgatgcatgtaagtggacaaaatcagaaccacattcctgggaattgatcttcccaatagaggtatgtggtcctaataat

SEQ ID NO: 30320 - DNA, 195 bp, Glycine max
  Clone ID: LIB3138-041-Q1-N1-G9
ctgaaatcgaactttttcattctgggtcgcattcaatgggagtgggcgggtgattggtgaagccacatacatatatgcatctgctaacgcatgaaacactgtgtttgatgccacgcctgtcattggacgcacacttagcgactaagtcagtaagaaagatgctaaacattttgcatttactatcttacaacgtga

SEQ ID NO: 30321 - DNA, 239 bp, Glycine max
  unsure at all n locations
  Clone ID: LIB3138-041-Q1-N1-H10
ctttctcaggttttataaaatctcatgtctgttcaaagctttcttattcttcgtattcatcatacaccacgccaaatcacaatacccttcagtttttgggaattttggctcagttgagatctctgtgaaacgggtttggaaaattttttgatcttgaggtttatgagattttaactgtggaagaaagatggtgggtgagaagtttgtgtgagcgaaatgacagggtgtgtngagtctgt

SEQ ID NO: 30322 - DNA, 407 bp, Glycine max
  Clone ID: LIB3138-041-Q1-N1-H12
gcgagaagggcttgttgatacagcggttaaaactgcagacacgggatatatgtctcgtcaattaatgaaatccctagaggatttgtttttacattatgattatactgtaagaaatgctggtggctctattgttcaattttgctatggagatgatggcatggatccagcaggcatggaaggaaaaaatggaaaaccattgaattttgagcggttgtttcttaaaagcaaggccatatgtcccaatgatgaagatgatgaaattttatcttcctcagatgtgagtaaagtagttcatgagaagctctcagaatttgatatgtctaggttagcagagaaaggggtttttgaggtgggcttctctgctgacttcgttgaatctctacaatcctttatcaaagataatgcaa

SEQ ID NO: 30323 - DNA, 263 bp, Glycine max
  Clone ID: LIB3138-041-Q1-N1-H9
gatcataacccctttttctttgcattgcagcatcaaacttcaggggcgacattcctcagtccatttgacatcaaactgaatgtaatcaccatacaacatccttaccactattggctcattattctaactagcagatctcatctcttgcgctccattacctaatccatgtcacaatcttctcattcaaatctaaagattagatcgcactcacccataaatcttcattctgacactcatagctactggctgctttctataaaccc

SEQ ID NO: 30324 - DNA, 269 bp, Glycine max
  Clone ID: LIB3138-042-Q1-N1-A1
tctgcgtagtgatctattggcaaattttttgacagaaggcaatgttagagcaagtgttgatttgcagcgcactcatcgtattagaggaatgattaaaatggtggccacagttggtattcctgagaatacaggtatatcattggcctgtgctatgaatagttcttttagggggcgcgccagttctgatatttacaccatctgctctcaagactgtgaattgtggaatcctgcttgcacaaaagcaatgactttgtcatttaatctaaacc

SEQ ID NO: 30325 - DNA, 296 bp, Glycine max
  Clone ID: LIB3138-042-Q1-N1-A10
ctcgagccgaatcttctcgagttgcgatatcatttgtgtcactggatggactgccaccccaatgcattatgttcaggctacaatagattggtctagaacctcttatggatgtgttcccaggacctattctgttttaaatggacagaatcctcttgtgttgaataggtgcgaaaagaaaattgaccttccctcacagcacttgcagaagtgtatttcagaacgcctgattatatatgctgcggagctggagcaaaatattcatttactgttgagcttccaaatgctgggttttcaat

SEQ ID NO: 30326 - DNA, 367 bp, Glycine max
  Clone ID: LIB3138-042-Q1-N1-A11
gcaactaactccaaaaaacctcactgtatggccatcaatctcagcaccactgcttctcttcactccaagccttcttttctgacccataaacacaacaacctcatcaaaatctaccatccttcttcctctttactcacaacatgtgctcaaacacaagggactgacactggagttacacaggatgatgcttctgctggtaatggatctttatcttcttctcgtgcacagctggatcttttggagcatcttacatctacaagctcacctaatagtggtcatgaaagtgatggaagcaaacttacaatccgagagcagctcgagcagatgtttggagataggtatgatgatttcaccatacccctaggta

SEQ ID NO: 30327 - DNA, 268 bp, Glycine max
  Clone ID: LIB3138-042-Q1-N1-A12
atacaatgaggttcaggctcagatggaaacaaatttgtttaaattgtctcttgatgatgttgaaactcctaaaggttccatgttggatctgaaaatgactcaatctaaaattgcacttccgaagatcacagtttgaggaaccattctgcgtattgttctattggcatattatttgacgagagggcatctttagagcaagtggtgatgtgcagcttcctcactcaattataaggattgttttctttggagcgctcattttgttttactg

SEQ ID NO: 30328 - DNA, 258 bp, Glycine max
  Clone ID: LIB3138-042-Q1-N1-A2
gcgttgccattctcattcttctctgtctctctctctccaccattgccatggatccttacaagctccgtccattcagcgccttcaattctcccttctggactacaaattctggtgctcctgtttggaacaacaactcctctttaaccggtggagctagaggcccaattcatcttgaggattcatatcttgtggcgaagcttgctaactttgacagggaacctatcccacaacgtgttgtccatgccaggggagctagtg

SEQ ID NO: 30329 - DNA, 218 bp, Glycine max
  Clone ID: LIB3138-042-Q1-N1-A3
gagaagtcccttttcgctacatcttacaccgatggacaagaaatgccgaggatggtgtttttcctgacatggaatcatggattagctcttaaggacttaaaaattttgttcctttggagtttaagagaaactgcatctaaatccttaattgctgttgcaccatctttggaaagtattaactttgccttcaaattttacgcgagggtgggagaaagctt

SEQ ID NO: 30330 - DNA, 319 bp, Glycine max
  Clone ID: LIB3138-042-Q1-N1-A5
cagaagacccatctttgggagagaaaaaatgggtgtaatagcacccggcccggcctcaactggaaaccaaaccctaaaatactagccatgccaatccataaatacccctccctcttagcccaataaaaaactttatttgcaactccaacaactaaacgaaacgaaaacactttctctccgattcttagcatccaatcagaggttccatttctcttccttctttcgcaccgaagttccaatcgctcattactgcactatatgcttccaactaagagaccttgcgaaggactggttgcagaagaagagatcgaccacaaca

SEQ ID NO: 30331 - DNA, 388 bp, Glycine max
  Clone ID: LIB3138-042-Q1-N1-A6
caacattgccgtcttgcggactgctaacacctgcagtgaagaggggcctctgcataagcatgtgcactcaagactgcactaggtctagacaagactgagagggtgacaggacgaaccctttaccaaccgtttgaatcaggtgcgagatgcaaccacaccaccggatgatgcctgaccatcagagctggctcctatgctgattagctcattgagaccgctaacacagtagcttcaccagggaggggtatttagaccatggatcagtccaatgccacctgtgcgaagcgtttggcttcaatggggctagagaacactgaagctaaccgacaggcataccgtaccctcctcgtgacagtaacaggcctcggtcagaacatctctggtgcca

SEQ ID NO: 30332 - DNA, 177 bp, Glycine max
  Clone ID: LIB3138-042-Q1-N1-A7
gtttctgtctggcggacaatctgaggttgaagcaaccttgaacttgaatgctatgaaccagtctccaaacccatggcacgtgtccttctcctacgccagagctctccaaaacacctgcttgaagacatggggtggactccctgaaaccgtgaaggctgttcaggatgcctccttttt

SEQ ID NO: 30333 - DNA, 103 bp, Glycine max
  Clone ID: LIB3138-042-Q1-N1-A9
ccaaaaaaattctctataggtcgatactcttgatcgtagcgaatctctgttgtcgactgaacaacacaacgggtgtgcggtcatttattgctcactcaacaat

SEQ ID NO: 30334 - DNA, 156 bp, Glycine max
  Clone ID: LIB3138-042-Q1-N1-B1
gccggactatattatcaacgagcttaacataaactccgtgataaccacgccttgccacgaggagatcttgcccatcaactcatggactactcagatgccttatttcatcagaggctatgcgtattccggtggtgggagaaaggtgacacgtgttga

SEQ ID NO: 30335 - DNA, 394 bp, Glycine max
  Clone ID: LIB3138-042-Q1-N1-B10
ggattattacttattcaaaattctccaattagtaactgattgggagttgctgcttggaagaaaggctgcttaaaggtcattattgcgatgtctgggaatgcagccctcaaaaagagtgattgggcctcattggtacaagtgtttttaacaaacagcttccgtacatagcattttgatgcatgtttgtggacaaaatcagaaccacattcctgggaattgatcttcccaatataggtatgttgtcctaataatggtttttaaatgtgcaattctgagtgggcaaatcaaacttcatggcatttgattttccttattgacaatcccaaacaacctacaaattttgatattttcttgggaatctctcaagattgtgaaaaagctggtgatactctta

SEQ ID NO: 30336 - DNA, 367 bp, Glycine max
  Clone ID: LIB3138-042-Q1-N1-B11
cggctcgagcggctcgagaaacaatatgtgtgcatatgggctcaatcctggtatttcaggttctcgtcttttgggcaccattcctcagtctatttcacagcaaactgtttggaatcaaatggcaacagtgagaacaccattgaattttgattctagcaagcagagcttttgtcaattttctattgaccttctcggtggaggaattttagtggacaaaactggagattggatcacacttatacaaaattctccaattagtaacttgttgagagttgctgcttggaagaaaggctgtttaatggttaaaattgtgatgtctgggaatgcagcagtcataatgagtgattgagcctcattggtcaagtgt

SEQ ID NO: 30337 - DNA, 396 bp, Glycine max
  Clone ID: LIB3138-042-Q1-N1-B12
ctcgtcccacttttaccgaaaggaccgcttaatgtatgagcgtgagtattttctcgaaaaatatgctaagttggggtcagaatcgaagtgtctgggaatgcatgcacccaaaaagagtgattgggcctcattgctacaagtgtttttatctaacaacttcagcacagagcatttttatgcatgtgagtggacaaaatcagaaccacattcctgggaattgatcttgccagtacaggtttgtggtcctaataatggatttgaaatgtggagttctgaccgggcaaatcaaacttcatggcatttgagtttccttattgacaatcccaaacagtcgacaaaatttgatattctcttgggaatctctcaagattttgaaattgcttggaatactcttat

SEQ ID NO: 30338 - DNA, 388 bp, Glycine max
  Clone ID: LIB3138-042-Q1-N1-B2
gttgagaactaataagaaggaaatggcttcctcaatgatctccggcccagctgttaccaccgtcaaccgtgccggtgccggcatggttgctccattcaccggcctcaaatccatggctggcttccccacgaggaagaccaacaatgacattacctccattgctagcaacggtggaagagtacaatgcatgcaggtgtggccaccaattggcaagaagaagttcgagactctttcctacttgccagacctcgatgatgcccaattggcaaaggaagtcgaataccttctaaggaaaggatggattccttgcttggaattcgagttggagcacggtttcgtgtaccgtgagcacaacaagtcacctggatactatgatggacgctactgg

SEQ ID NO: 30339 - DNA, 374 bp, Glycine max
  Clone ID: LIB3138-042-Q1-N1-B3
cacccacgcggctcttgcttctacaaggatcccttcaaacacaaggttcccatccaaggcctctcactctttcccaacccaatgcgccttaaagagacttgaggtgacagaattctctgggcttagatccacttcatgtgtcacatatgctaacagtgctagagaatcttccttttttgatcttgtagcttcccaactcactcccaagcagaccaatggatcaactcctgtgaggggagagacagtggccaagttgaaggtggcaatcaatggtttcggacgcattggtagaaacttccttcgctgctggcacggccgaaaagactcaccccttgaagtcgttgttgtcaacgacagtggtggtgtcaagaatg

SEQ ID NO: 30340 - DNA, 284 bp, Glycine max
  Clone ID: LIB3138-042-Q1-N1-B4
gccaaatgctgttctttcaatgtggagatattttgttggagatctcgtctttgaagtttctaagatgacttctccctacattaaatgtacagtctctttcttcatagcatttggaaatttggctgatgataccatcaattttgaggcttttccccacaagctggtgcagtttggagagattcacgaaaaagttgtattgaaattttcacaagaggaatttcttacagcttggtcaactcaggtgcgtcctgcaacaactctgttggctgatgggtgtccatatt

SEQ ID NO: 30341 - DNA, 363 bp, Glycine max
  Clone ID: LIB3138-042-Q1-N1-B5
ctaatgctatcatcatgatgaccctcacttatacaacgagtgtgcattgtcatctgggcatgcaagatgctgaacaaagtacagctgacgccatagcagctcgaaaggcttatgtgagtacaagtccttcaatgctactgatacacgcttttcgttgaggacacgaaggagtttgacgagatgcgaaaataatccttgtcacaccccacaatatgtctactccatggcatagcgccacgcgtgttatgctttatcgaacacactagctacatgcacggctcaaatttttttatctggtctgggccgataccatggatgactcctacagatcctgtgcaaatctaagatgtactgaacaggatt

SEQ ID NO: 30342 - DNA, 412 bp, Glycine max
  Clone ID: LIB3138-042-Q1-N1-B6
gaactttacatacaggtcctaaagccaagataatggcaagttttggaatgtttctctttttgttttggtttgagtgtgtgagcaaatgctcgaaggttgagctagctacctcatttaaaagtgaaggtatgtcacttgcacttttagatagcctaatacgagggattttgagcagtggtgatataaaaataattgaaaatttttgataatgaaaattttttaaatttgtttttttcaagtgttttttgtctttacttttgttgtctggtttgtttccataatatttttttattggtacgggttttttctttttcttttgtttttatttttttttatcttttagtatttattatttcatgtttttttttttatttgttttttatttttctttatttcttatatttttttttct

SEQ ID NO: 30343 - DNA, 231 bp, Glycine max
  Clone ID: LIB3138-042-Q1-N1-B7
ctgctggagccggtgttgatgtctttgttatcgacactggagggtacactgagcatcaagagttcagcggaggtcgtgcaactatggtgtacaacgctatcactacagagtcggaccaagatctcaacggacacggaacttactgagcaggaactatcggaggtaccacttatggtgttgctaagaaggacactatcacgggagtgacagtacttgctggtaacggatcag

SEQ ID NO: 30344 - DNA, 145 bp, Glycine max
  Clone ID: LIB3138-042-Q1-N1-B9
ctcaaaccaaatatgctaaaagccctacactaaatctgggggggctttatttatagcatttgtaacttaaactgatcataccattatttttcagggtctgaccaaaaaactggtgcaaaaaatagagattcacgaatatggggtg

SEQ ID NO: 30345 - DNA, 288 bp, Glycine max
  Clone ID: LIB3138-042-Q1-N1-C1
gtaacaactcataagcagaacgcaaacccaaagtagttccccgcgagtgagacctaggccaaaacacgcgccatcaccgtcagtttcaacccctgcttccgctactcaaaacagacagagggagagcagttttgacgcggagaggcttgcttcggcgagaaggaggcttcaagagaactacaaagaggctgaaattgccaaaaggcaaagaacgattcatgtgatggacatccatgacttaccaaaggcaaaacccaagaataatgccttctctgggaagaacaaatg

SEQ ID NO: 30346 - DNA, 288 bp, Glycine max
  Clone ID: LIB3138-042-Q1-N1-C10
agtctctttcttcatatcatttggaaatttggctgatgataccatcaatttttaggctttttcccacaagctggtgcattttggatagattcaggaaaaagttgcattgaaattttcacatgaggaattgattacagcttggtctactctggagctttctgcaacaacactgtttgctgattggtgttcatatgtgcatgcaatgcagcatgatagcgctgtttctacatcaccatttgattaagtgatcggtggatagtcaacaactataaacaatttgggtgcata

SEQ ID NO: 30347 - DNA, 392 bp, Glycine max
  Clone ID: LIB3138-042-Q1-N1-C11
gcttccagatgccacaccagagcagatcaagaaggcatactacaattgcatgaaatcttgccacccggacttgagtggaaacgatcctgagaccacaaatttctgcattttcatcaatgaagtctacacggtgctcagcgatcccgtccaacgcaggatttatgatgaaattcatggctattctttaacttcaattaatcctttcctggatgattcaagcccaagggatcatgcctttgtcgatgaattcagctgcataggctgcaaaaattgtgccaatgtagctcctggtgtgtttgcaattgaggaagactttggaagagccagagcatacaaccaatctgggaaaccctgtattagttcaacaggaattgacagttgcctgttagctg

SEQ ID NO: 30348 - DNA, 320 bp, Glycine max
  Clone ID: LIB3138-042-Q1-N1-C12
ccttctttcattttcagatgattgcctgtgtttaagggggatatatcgtgtggtgcacgctcctaaccaaaaaatactaaaggcgcgcttaatgctcagtttcgcggatggcgcaaagtaatagacaactaccgtatacacaaggggctgtgcgccccaaactatttcgggaacccgttaacataatgtggcccatgtcgaccgggtttgcaatcatgctctgattgatggcttacagagcattgcagaatgtaacgaatattgtgggaccaacctataaatggaggtggatataagcccacaccactattcctccaatg

SEQ ID NO: 30349 - DNA, 363 bp, Glycine max
  Clone ID: LIB3138-042-Q1-N1-C2
gagttgttccattaggcactgtgcatggagacttcaagccttacttcagtggaaccatatcaaaaagacccctaactcatcttttcatctcgcttgccgatggatttgtcaggcccattgcggcttgcccatattccaagttggcaccttgtgataggttccacagaaacgatgaggagctgattcttgactagcggattgctacggtagcctccgtacgcttgtccgcacacattattgctgaggctgatatctacatgttagatccatgggactatccagctaacgccacctatgtggagcaagaatggtatttgctcagtcctagagacggaaagcacccaaatggtgcagggccataca

SEQ ID NO: 30350 - DNA, 407 bp, Glycine max
  Clone ID: LIB3138-042-Q1-N1-C4
caaaatttgtggtaaagcaaatggcgaaagttttctgtgattttcggttccttctcttggttgccgctggcgtcttcatctatatccagatgaggcttttcgcaactcaatcagaatatgctgatcgcctagctgcagctattgaagctgaaaaccattgtacaagtcaaacgcgatcactgattgatcagattagcttgcaacaaggacgaattgtggccctagaagaagagcggaaacgccgagaccaagaatgtggacaaatgaagtctcttgtacaagatcttgaaagaaaagacctacagaggctgattgataaaatgcaggttccggtggctgctgttgtgatcatggcatgtaatcgtgctgattacctagagaggactattaattctgtattaaaatac

SEQ ID NO: 30351 - DNA, 403 bp, Glycine max
  Clone ID: LIB3138-042-Q1-N1-C5
agaagcttatcttgtcaatctcgtaaatgtgttacgagaattgtatttgcacagtccagaggaagctcgccaattgagaaggaaagctctctctcgtattgaatggctgcaaaaagctgatgtgcctaccatagcacagattgaagagttccattcgatgcagaggatgatgaatgctcctgattcaaatgataatattgatttactgttgagcattgatttgttgggtttacaaggagcaggtaaagcttttccaaacaaaattgtttttgatgataagcttgtgttggctaacacacaagaattctttgatggaaattttccagtggactcttggttaccaatttttgtgaattgtctttatcctgtaagtcaattaccttcagaagctgtcgttgtaaat

SEQ ID NO: 30352 - DNA, 280 bp, Glycine max
  Clone ID: LIB3138-042-Q1-N1-C6
ttccgttcacgacactcccttttatcgtttcacttccggcgtcgtcgtcttcaattttggatcttcgaatcgaatcgcatcctatgggtagcagcagaggacacacgctcatggaggttggacccgactgggtcgccgtcatcaccatcgtcaaccctcccgttaattcactttcctttgatgtattgcgcagtttaaaggagagctttgatcaggcgttacagagagatgatgtcaaggcaactgttgttacaggtgcaaagggaaaattttctggagg

SEQ ID NO: 30353 - DNA, 396 bp, Glycine max
  unsure at all n locations
  Clone ID: LIB3138-042-Q1-N1-C7
atacccctacactggaaaagatggtgtatgcaaattctcagctgaaaatgttgccgttcaagtcattgactcggtcaatatcaccttgggtgctgagaatgaattaaaacatgcagttgcatttgttcggccggttagtgtggcctttcaggtggtgaatgggttccatttctacgagaatggagtttacactagtgacatttgcggtagcacttcccaggatgtgaaccatgccgtccttgctgtggggtatggagttgaaaatggcgtcccatattggctcataaaaaattcatggggagaaagttggggtgagaatggctacttcaaaatggaatnggggaagaacatgtgtggtgttgcaacttgagcgttttatccagttgtggcataaat

SEQ ID NO: 30354 - DNA, 404 bp, Glycine max
  Clone ID: LIB3138-042-Q1-N1-C8
ctgagtcttgcaattgaagttgaagtcttgcccttctctcttcaactccaaacacaagacatcatcatccatggctgcctccgtctccactgtcggagctgtcaacagagctcttttgaacctgaatgggtctggacctggggtttcagctcccagttcatccttctttgggagcagcttgaagaaggttattggctcaagggtccccaacacaaagatttcctctggaagcttcaagattgttgctgtagaagagaagaaagagattgaagagacccagcagaccgacaaggacagatggaagggtcttgcctatgatatctcagacgaccaacaggacatcacaagaggaaagggtttggttgactcccttttccaagctccacaggatgctggaactcact

SEQ ID NO: 30355 - DNA, 299 bp, Glycine max
  Clone ID: LIB3138-042-Q1-N1-D10
cggatactgagagttttctgcttcctggattgccccatgaattgaagatgacgcgtttgcagttaccggattggcttagagcaccgacaggttatacttatttgatgaacatgatgaaagactcggagagaaagagctatggatcgctgttgaatactttttatgagcttgagggagattatgaggagcattactagaaggccatgggaactaaaagttggagtgttggaccagttttcttttgggttaaccatgatgcttatgataatgccaatctaggtcatgcctaatatgatcac

SEQ ID NO: 30356 - DNA, 334 bp, Glycine max
  Clone ID: LIB3138-042-Q1-N1-D11
ggaaaaagttgtattgaaattttcacaagaggaatttcttacagcttggtcaactcaggtgcgtcctgcaacaactctgttggctgatgggtgtccatatttgtatgcaatggtgcatgatagttcagtgtctacaataccaggtgattttgtcattggtgtcaagttgacaaccataaacattatgtgtgcatatgggctgaatccgggtatttcaggtgctctgttttcggtcaccattgctcagtccatatcacagctgtctgttaggaatcaaatggctacagtgagaacaccatggaattttgattctatcaagcacagcttctgtcag

SEQ ID NO: 30357 - DNA, 406 bp, Glycine max
  Clone ID: LIB3138-042-Q1-N1-D2
aacttcattatgtttcgtgtaataatctggaaatgcaagaagcttatcttgtcaatctcgtaaatgtgttacgagaattgtatttgcacagtccagaggaagctcgccaattgagaaggaaagctctctctcgtattgaatggctgcaaaaagctgatgtgcctaccatagcacagattgaagagttccattcgatgcacaggatgatgaatgctcctgattcaaatgataatattgatttactgttgagcattgatttgttgggtttacaaggagcaggtaaagctcttccaaacaaaattgtttttgatgataagcttgtgttggctaacacacacgaattctttgatggaaattttccagtggattcttggttaccaatatttgtgaattgtctctatcctgt

SEQ ID NO: 30358 - DNA, 179 bp, Glycine max
  Clone ID: LIB3138-042-Q1-N1-D3
ggaaggaggttgttatttattatgctttttgcttgcagaaattggctggcctgccaattccctctggcattagaatttgaaattgagacgtcacttattgctttggggcatatgtatattcaggatctagtcggcattcatggctcatgaagtctggtattattgcttttgcacatatt

SEQ ID NO: 30359 - DNA, 407 bp, Glycine max
  Clone ID: LIB3138-042-Q1-N1-D4
agcttatcttgtcaatctcgtaaatgtgttacgagaattgtatttgcacagtccagaggaagctcgccaattgagaaggaaagctctctctcgtattgaatggctgcaaaaagctgatgtgcctaccatagcacagattgaagagttccattcgatgcagaggatgatgaatgctcctgattcaaatgataatattgatttactgttgagcattgatttgttgggtttacaaggagcaggtaaagcttttccaaacaaaattgtttttgatgataagcttgtgttggctaacacacaagaattctttgatggaaattttccagtggattcttggttaccaatttttgtgaattgtctttatcctgtaagtcaattaccttcagaagctgtcgttgtaaatgttacat

SEQ ID NO: 30360 - DNA, 402 bp, Glycine max
  Clone ID: LIB3138-042-Q1-N1-D5
ttgcaaagcgccttatggactacggttttcatgcaccaacaatgtcatggcctgtgcctggcacactcatgattgagcctactgagagtgaaagcaaggccgagttagacaggttctgtgatgctcttatttccattagacaagaaattgctgagattgagaaaggaaaggttgacattaacaacaatgtacttaagggcgcccctcatccaccatcactgctcatggctgatgcatggacaaaaccatactccagggaatatgcagccttcccagctccttggctccgtactgcaaagttctggcctaccacaggacgtgttgataatgtgtacggtgaccgcaacctcatttgcacccttctcccagcatcacaggctgttgaagaacaagcagctgcca

SEQ ID NO: 30361 - DNA, 403 bp, Glycine max
  Clone ID: LIB3138-042-Q1-N1-D6
cttcattatgtttcgtgtaataatctggaaatgcaagaagcttatcttgtcaatctcgtaaatgtgttacgagaattgtatttgcacagtccagaggaagctcgccaattgagaaggaaagctctctctcgtattgaatggctgcaaaaagctgatgtgcctaccatagcacagattgaagagttccattcgatgcagaggatgatgaatgctcctgattcaaatgataatattgatttactgttgagcattgatttgttgggtttacaaggagcaggtaaagcttttccaaacaaaattgtttttgatgataagcttgtgttggctaacacacaagaattctttgatggaaattttccagtggattcttggttaccaatttttgtgaattgtctttatcctg

SEQ ID NO: 30362 - DNA, 398 bp, Glycine max
  Clone ID: LIB3138-042-Q1-N1-D7
ggtcaagattgtgatgtctgggaatgcagcagtcaaaaggagtgattgggcctcattggtacaagtgtttttaacaaacagcaacagtacagagcattttgatgcatgtaagtggacaaaatcagaaccacattcctgggaattgatcttcccaatagaggtatgtggtcctaataatggttttgaaatgtggagttctgagtgggcaaatcaaacttcatggcatttgagtttccttattgacaatcccaaacagtctacagtttttgatattctcttgggaatctctcaagattttgaaattgctggtaatactcttatgccagctttttctgttccacaggctactgccagatcttctgaaaatgcggaatcctctgcatgatctggaatttgtg

SEQ ID NO: 30363 - DNA, 403 bp, Glycine max
  Clone ID: LIB3138-042-Q1-N1-D8
gagtgattgggcctcattggtacaagtgtttttaacaaacagcaacagtacagagcattttgatgcatgtaagtggacaaaatcagaaccacattcctgggaattgatcttcccaatagaggtatgtggtcctaataatggttttgaaatgtggagttctgagtgggcaaatcaaacttcatggcatttgagtttccttattgacaatcccaaacagtctacagtttttgatattctcttgggaatctctcaagattttgaaattgctggtaatactcttatgccagctttttctgttccacaggctactgccagatcttctgaaaatgcggaatcctctgcatgatctggaatttgtgttttctttcgcttgttcgtttgtttaattcaataaaggaaatta

SEQ ID NO: 30364 - DNA, 272 bp, Glycine max
  Clone ID: LIB3138-042-Q1-N1-D9
tggcaattgaagttgaagtcttgccctcctctcttcaactccaaacacaagacatcatcatccatggctgcctacgtctccactgtctgagctgtcaacagagctcttttgaacccgaatgggtctggacctggggtttcagctgccagttcatgcttctttgggagcagcttgaagaaggctattggctcaagggtccccgacacagagacttcctatggaagcttcaagattgatgcatgtgaagagacgaccgagattgattagacccc

SEQ ID NO: 30365 - DNA, 405 bp, Glycine max
  Clone ID: LIB3138-042-Q1-N1-E1
ccaaaaacgactcgtcgtacaatccatctcccagcagcatctgggagaaagaaagaaagaaagaaagaaagaaagcactctttctcgctcgcggcgagtgtgaacaccaaacggcggcgttcgcagcaaacagagtctcgaaaccctagttccctattcctcccatgtcctccgaagacatcactctcgtacccgaccagaggatcgagaacggtctcaattcccctctcgtcttccaagacgaccctctccgcttcaattgccccaccccgcaccagcgtcgggtcggggacccgcctccgaagacccgcgaacttggcgccttcatcgacgacaacaagatgttcatcgaccgcgaccgcttcttcgtcgccgcccagaaccccgaattccgccgctacgccg

SEQ ID NO: 30366 - DNA, 306 bp, Glycine max
  Clone ID: LIB3138-042-Q1-N1-E10
acaagaacccatcccctccccagccgctcccaaaatctcactctgcttactcttcttgctccaagagaagcaaacatccctgactttcaccacatcagcacacactgacaaagacaaccttgtgcgactccaatctaaacctatcaagcctgcgttcgaaaacctagagatccctgggcgagtaatcaagcccaagagtaggtgtatcatggacgctggtggccctggtgttgtagtctacaactggtggacaccgtggctgtagcctttgctaaaataaagcgagaatgttctatgcacgcttca

SEQ ID NO: 30367 - DNA, 270 bp, Glycine max
  Clone ID: LIB3138-042-Q1-N1-E11
gatagccagccatgtcgatcttttctattccctcaccaacgtaccgttgttcaatttcaatttcaatttctcggcagccattgccatgttctttcacggctcaagtgagaagaagagggaaagggaacgtggttatgagcatggaggcaggcattggagtgatgggcaccaagttgggtatgatgagctatttctaatccgacggagaggttgttcctgtcactgacgtgggttccaaagaaggcaacatcgtcactcatatcatatctg

SEQ ID NO: 30368 - DNA, 398 bp, Glycine max
  Clone ID: LIB3138-042-Q1-N1-E12
gaacagtgaaggatttatcttccagaaaggctcaccagtggccagagatttttccaaagctatactgcgtctcttggaggatggaacagtgaaggaattagaagacaaatggttgaaacctgatggagactgccacaataattcgacctcacagggtacagaaagtttgaggcttgaaagtttctgggttctgtatgtgatctatggtgccgcttctactatttgaatgctacattatacaatcctgtcgctgaaatctagacaaacaacccgggatgaggcacgagaaggtaatgccaacccatgtgaggaaagccgatgataaacgatagctataatagccaatcaaatttatagcatatataatgcaacagcgacacccgtgcatgactagccac

SEQ ID NO: 30369 - DNA, 353 bp, Glycine max
  Clone ID: LIB3138-042-Q1-N1-E3
cgaagtgttaagagaatgcctctttctatagggggaggagctggtgcaaagaatgctattctcatgaatatgccaaatgctgttctttcaatgtggagatattttgttggagatctcgtctttgaagtttctaagatgacttctccctacattaaatgtacagtctctttcttcatagcatttggaaatttggctgatgataccatcaattttgaggcttttccccacaagctggtgcagtttggagagattcaggaaaaagttgtattgaaattttcacaagaggaatttcttacagcttggtcaactcatgtgcgttctgcaacaactctgttggctgatgggtgtccata

SEQ ID NO: 30370 - DNA, 403 bp, Glycine max
  unsure at all n locations
  Clone ID: LIB3138-042-Q1-N1-E4
agtggtcaaggaaatttttcgaactgatggcgaacagttcctcaagtatccaccacctaaagtgatgcaggtggataagtctgcatggatgactgatgaagaatttgctagagaaacgattgctggtgttaatccaaatgtcattaagattcttgaggagttcccaccacgtagcaagctagattctcaagcctacggtgatcatacctctataataacaaaacaacacttggagcctaacttgggtgggctcaccgttgagcaggctatccagagcaagaagttgttcatcttagatcaccatgactatctcattccatatntgaggaaaataaatgcaactaccacaaagacttacgctacaagaaccatatttttcttgaaaagtgatggaaccttgacg

SEQ ID NO: 30371 - DNA, 402 bp, Glycine max
  Clone ID: LIB3138-042-Q1-N1-E5
ggcagcgtcactacaagcagcagctactttcatgcaacccaccaagttgagcaggagcaacactttgcagcaaaagtctactcagtccatttccaaggcttttggtttggaacctgttggagctaaaaaggtcacatgctcccttcaggctgatcttaaggacttggctcacaagtgtgttgatgctaccaaaattgcaggattcgcccttgccacctctgccctcgttgtctctggggcaagtgctgaaggtgttccaaagaggctaaccttcgacgaaatccagagcaagacctacttggaagtgaaggggacaggaacagcaaaccagtgcccaacaattgatggtggattggactcatttgccttcaagccggggaaatacaatgccaagaagttgtg

SEQ ID NO: 30372 - DNA, 403 bp, Glycine max
  Clone ID: LIB3138-042-Q1-N1-E6
agccttactttagtggttctaaattgaaaagctttctagctagtcataacatcaccattactgatggtattgacaaaactagtgcaactttgcaatttagaaagttagcagattgtgattttctcaagagaaactttaagcagatgtctaatgttttgtgggtggctcctgaggacaaggcgagtttatggtcacaacttcattatgtttcgtgtaataatctggaaatgcaagaagcttatcttgtcaatctcgtaaatgtgttacgagaattgtatttgcacagtccagaggaagctcgccaattgagaaggaaagctctctctcgtattgaatggctgcaaaaagctgatgtgcctaccatagcacagattgaagagttccattcgatgcacaggatgat

SEQ ID NO: 30373 - DNA, 399 bp, Glycine max
  Clone ID: LIB3138-042-Q1-N1-E7
cctgtatgggggttgggggcttgatttggcaggtggaagagattcactttgttgggttcttgagcaagcttcttgaaacaaaaataatgcaggttctccgtttcaagcatgggcagatatactctgtaggtgtttcagtatttcttggtggtaataaaccctcaagaataggtgacattcgtggagacattagcataaatttctcctgtgatccagagatatcttccaagctggtagatattgctttggatgaaatgttacgtcttcaagaggaagggcctttagaacaggatgtttcaaccatacttgaaattgagcaacgagctcatgagaatggactgcaggaaaattattactggctggataggattttgcacagctatcaatcaagagtctatt

SEQ ID NO: 30374 - DNA, 326 bp, Glycine max
  Clone ID: LIB3138-042-Q1-N1-E9
gtcgggaaaaggggcaaagggattgataacaggtaaaacctgagcttcagccaaagacaaagacaaagacaagaagaaacccgtttctcgttcttctagagctggtcttcagtttcctgttggacgaattcaccgtcttttgaagtcaagggtgagtgccaatggaagagttggggccacagctgctgtgtattctgctgctatactggagtatctaactgcagaggtgttggagttggctgtgaatgcatgcaaggatctgaatgtgtagcgcattacctctagacatctacagcttgctatacgtggagatgaagaacttgaca

SEQ ID NO: 30375 - DNA, 346 bp, Glycine max
  Clone ID: LIB3138-042-Q1-N1-F1
ttgcgtttccctttcattttccctcactttctcgctcgccaaacgcccctctctctcctccaatggccgaccagctcaccgacgaccagatcgccgagttcaaggaggccttcagcctcttcgacaaggacggcgatggttgtattactactaaggaacttgggactgtgatgcggtcactagggcaaaacccaactgaggcagaactgcaggatatgattaatgaggttgatgctgatggcaatggaaccatcgacttcccagagttcctcaacctgatggctcgcaagatgaaagacaccgactccgaagaggagcttaaggaggctttccgtgtgttcgacaa

SEQ ID NO: 30376 - DNA, 400 bp, Glycine max
  Clone ID: LIB3138-042-Q1-N1-F10
ctctgcctctgcaattcagcgggctcaagtgctcccgactctcatcttcttctctcttctccaaaccttctctttggacccaacaatcccaaaagcgcgtttcaattaccattgcgaactcaatagcaatatgccaatgcgcagatcaaagagagagcgaggcttaagaaactcttcgaagaagcctacgagagatgccgcaatgctcccatggacagtgtttccttctcctatcgagacttctcttgctgtcttgacaagtacgacttcctttcttgagtttgcggctagattaaaggcactgtgttctacacagataacattggatcaattgttgatctcactgcttagacttcttcttatttgccacttcacgaggcgatcatgcacagggctaagc

SEQ ID NO: 30377 - DNA, 389 bp, Glycine max
  Clone ID: LIB3138-042-Q1-N1-F12
ggaaggttctaaactcatcaaagaggaggagagagagactggaaaagttagcttacatatctataaactctactgcactgaggcttttgggtggtggggcattatagcagtaatctctctttctgtgttgtggcaagcatcaatgatggcaagtgattattggctggcatatgaaacatcagaagagcgtgctcagttgttcaatccttccatgtttatttccatctacgcgattattgcggtagtttcagttgttttaattgtgctaagatcctactctgtcacagtcctggggttaaagacagcacagattttcttctttcaaattctccacagcatcttgcatgcccccatgtctttctttgacaccacgccatctgggagaattt

SEQ ID NO: 30378 - DNA, 227 bp, Glycine max
  Clone ID: LIB3138-042-Q1-N1-F2
attctcaactatcctatttttagcaaccatctaagaagttcagggcctgaattatctctcaccttgcatgagaaaagcattcaaagctaagaacccaatttcactgattgcacctcaaacatctgcatgaagtcccaattgagtctcaattccacatccatccatgcatagttaactgtcacgcactgatacatacatctctgattacactgtccccaagaagttcc

SEQ ID NO: 30379 - DNA, 405 bp, Glycine max
  Clone ID: LIB3138-042-Q1-N1-F3
ctcgtctttgaagtttctaagatgacttctccctacattaaatgtacagtctctttcttcatagcatttggaaatttggctgatgataccatcaattttgaggcttttccccacaagctggtgcagtttggagagattcaggaaaaagttgtattgaaattttcacaagaggaatttcttacagcttggtcaactcaggtgcgtcctgcaacaactctgttggctgatgggtgtccatatttgtatgcaatggtgcatgatagttcagtgtctacaataccaggtgattttgtcattggtgtcaagttgacaaccataaacaatatgtgtgcatatgggctcaatcctggtatttcaggttctcgtcttttgggcaccattcctcagtccatttcacagcaaact

SEQ ID NO: 30380 - DNA, 409 bp, Glycine max
  Clone ID: LIB3138-042-Q1-N1-F4
atcttagtggacaaaactggagattggatcacacttatacaaaattctccaattagtaacttattgagagttgctgcttggaagaaaggctgtttaatggtcaagattgtgatgtctgggaatgcagcagtcaaaaggagtgattgggcctcattggtacaagtgtttttaacaaacagcaacagtacagagcattttgatgcatgtaagtggacaaaatcagaaccacattcctgggaattgatcttcccaatagaggtatgtggtcctaataatggttttgaaatgtggagttctgagtgggcaaatcaaacttcatggcatttgagtttccttattgacaatcccaaacagtctacagtttttgatattctcttgggaatctctcaagattttgaaattgctggta

SEQ ID NO: 30381 - DNA, 400 bp, Glycine max
  Clone ID: LIB3138-042-Q1-N1-F5
gaaatgataaacagtctttgtggtggtgatgaaaaattgatgcgtgaaaggacgcacctgctgttggcttgttgttcaaggatggcaatttgtaagaaagatgtttggagagttgaatgtggaatcccttctggatttccgctcacagttatttgcaatagcatttttaatgagatgctcattagatatagctatgaaaaattactgcgccaggctaaagctccaagtatgtttttacaatccttcaaaaattttgtttctttgtgtgtgtatggtgatgataacttaattagtgttcatgaatatgtcaagccttactttagtggttctaaattgaaaagctttctagctagtcataacatcaccattactgatggtattgacaaaactagtgcaactt

SEQ ID NO: 30382 - DNA, 404 bp, Glycine max
  Clone ID: LIB3138-042-Q1-N1-F6
ataccattgtgcttattgaaccagacatgaattcaaggtttcagcttttgagtaccactaccaatggtgattttgttcaagggaaagatctcgcaatggttaaagttaatgtagcatgtgctgctgttggcttgacatcaagtcacactccaactccattgttggaatctggtttgcaaaaagacagagggttaattgtggagtattttggaaggatgtcttacgttgctcataacgttaatcagccccaagagaaagatttgttggagggaaatttttcctttgatattaaatctcgctctagattggaaaaagtttcctctacaaaagcacaatttgttagtggaaaaaccttcaaatatgatataattggtgctggttcacattcttcagaagattttcct

SEQ ID NO: 30383 - DNA, 396 bp, Glycine max
  Clone ID: LIB3138-042-Q1-N1-F7
acaagctggtgcagtttgcagagatacaggaaaaagcgggattgaatttttcacaatatgcatttcttactgctagttcaactcacgcccgtgctgtagcaactatgaaggctgatgggtgtccatatctgattgcagtggtgcattatattgcattgtctacgataccaattgatgttgtgattgatgtcatcgtatgcatccatgaccaatatgcgtgcatatctgactcgatcctgatataacctgaacttggctattgggcaccatgcctaagctcatatacacgctaactgtatggcatcatatatcgccggacagttacacgattgaattttgattctagcaagcaaagactaatgccattgaactatcgacccactcggttgcagaatg

SEQ ID NO: 30384 - DNA, 407 bp, Glycine max
  Clone ID: LIB3138-042-Q1-N1-F8
atgggctcaatcctggtatttcaggttctcgtcttttgggcaccattcctcagtccatttcacagcaaactgtttggaatcaaatggcaacagtgagaacaccattgaattttgattctagcaagcagagcttttgtcagttttctattgaccttctcggtggaggaatcttagtggacaaaactggagattggatcacacttatacaaaattctccaattagtaacttgttgagagttgctgcttggaagaaaggctgtttaatggtcaagattgtgatgtctgggaatgcagcagtcaaaaggagtgattgggcctcattggtacaagtgtttttaacaaacagcaacagtacagagcattttgatgcatgtaagtggacaaaatcagaaccacattcctgggaa

SEQ ID NO: 30385 - DNA, 282 bp, Glycine max
  Clone ID: LIB3138-042-Q1-N1-F9
gttgagaactaacaaggagaagcaaatggcttcctcaatgatctcttccccagctgttaccactgtcaaccgagccggtgccggcatggttgctccattcactggcctcaagtccatggctggcttccccaccatatagaccaactttgacattacctccattgcttgcaactttggaagagtgcactgcatgcaccgttgtgccctagccttcaagactaattttgagactctatattacaccgtacaccatgatgatgcatatatggctatggatgtata

SEQ ID NO: 30386 - DNA, 155 bp, Glycine max
  Clone ID: LIB3138-042-Q1-N1-G10
tttggaaatattgttaacgctacgataaaatttgtggttctggtggaccaacgggtgcaagttggaaagattaaggaaaaattagctttgaaatgttcacatgtggaactctactcagccgggtcaacgcatgtgcgatttggatcatcaattgt

SEQ ID NO: 30387 - DNA, 388 bp, Glycine max
  unsure at all n locations
  Clone ID: LIB3138-042-Q1-N1-G11
aaaccggagaaggaggttggggatttgagacgaaacctctttcccacgccgttttcgtttttcgttgggagcacctttgagggcgcgcctagggagcaacaagcgctgcttgaattggaggacactgcggccagattgaagagggagaaggaaacgttgaagaacacgcttaattacctcactgctgcttctgctgttaaagacgtttttccctcttcttccaattcttcttgattggggcttatactttacctaaggtattgttgcttttaagtgtaacctcgtctcaatatattcagaaaatagatgtaaattatttttgtgcctaaacgctagttgntgttttttttttcatttgtgatacattttatatactgtgctacttgat

SEQ ID NO: 30388 - DNA, 342 bp, Glycine max
  Clone ID: LIB3138-042-Q1-N1-G12
cgagaaggctggttccgacctcacacaagacttgatgcggctacggcactatctgaagctgactacactagcgcggctgcctcatgctgcactggtcgaactggctagcgagctccactgggcttgaaccgcgtctaagctcgatgcttagttgccaatgtaaccttctgtggcaccagcttgaaaaagggtattgcctggagggctcctaacggcaagatttgctctggaaggttcaaaatcgatgccgcggaaaaagagattgttgagaaacaacagacagacaaggacagatggaaaggtcttgcctatgatgtttcagacgaccagcaagacattaca

SEQ ID NO: 30389 - DNA, 333 bp, Glycine max
  Clone ID: LIB3138-042-Q1-N1-G3
atcaaacttcatggcatttgagtttcctcattgacaatcccaagcgaggggacagtttttgatattctcttgggaatctctcaagattttgaaattgctggtaatactcttatgccagctttttctgttccacaggctactgccagatcttctgaaaatgcggaatcctctgcatgatctggaatttgtgttttcttccgcctgtccggctgtttaattcaataaaggaaattatgcataaccgcttggttgtgtatgctctgcctattttaatatttccacaccttgtttaatcgtcgtaacgatttgtgatgtgagtgtcctttttaaaaa

SEQ ID NO: 30390 - DNA, 407 bp, Glycine max
  Clone ID: LIB3138-042-Q1-N1-G4
ctcctgaggacaaggcgagtttatggtcacaacttcattatgtttcgtgtaataatctggaaatgcaagaagcttatcttgtcaatctcgtaaatgtgttacgagaattgtatttgcacagtccagaggaagctcgccaattgagaaggaaagctctctctcgtattgaatggctgcaaaaagctgatgtgcctaccatagcacagattgaagagttccattcaatgcagaggatgatgaatgctcctgattcaaatgataatattgatttactgttgagcattgatttgttgggtttacaaggagcaggtaaagcttttccaaacaaaattgtttttgatgataagcttgtgttggctaacacacaagaattctttgatggaaattttccagtggattcttggtta

SEQ ID NO: 30391 - DNA, 372 bp, Glycine max
  Clone ID: LIB3138-042-Q1-N1-G5
acctcatttttcatatttcatggtgttaacaacttcatggcggggtttgttttccaccttatcatcaccatccctcaccattttattactcctttctctccctttattcctgttttccctgtccataagtttctcttgcctatcttatttaatattactttattcttattttattttcttccaattttgctcttttctttcttcctttttcctttctgttttatttcatatccttttaattttattttttgttattaacttccttttatttttttatactttctcttattttttattatatctcttctattcttctttttaatatttgtttttctccctttatttttttcattattaatatttttctctttt

SEQ ID NO: 30392 - DNA, 405 bp, Glycine max
  Clone ID: LIB3138-042-Q1-N1-G6
ctggtttgcaaaaagacagagggttaattgtggagtattttggaaggatgtcttacgttgctcataacgttaatcagccccaagagaaagatttgttggagggaaatttttcctttgatattaaatctcgctctagattggaaaaagtttcctctacaaaagcacaatttgttagtggaaaaaccttcaaatatgatataattggtgctggttcacattcttcagaagattttcctgaaaaggaagatcaagaaaaacccaaaaagattgatgccagattgagacaaagaatagatcctcaatacaatgaggttcaggctcagatggaaacaaatttgtttaaattgtctcttgatgatgttgaaactcctaaaggttccatgttggatctgaaaatttctcaat

SEQ ID NO: 30393 - DNA, 400 bp, Glycine max
  Clone ID: LIB3138-042-Q1-N1-G7
ggctgtttggttcaagactggagctttgcttcttgatgggggtacattgaactacttcgggaaacctatccccatcaatcttattcttgctgttgttgctgagatagttcttgtgggtggtgctgagtactacagaattattaatggcctggacttggaagacaagcttcatccgggtggtccattcgacccattgggactagcaaaggatccagaccaagctgcacttctaaaggtgaaggaaattaagaatggtagactagctatgtttgcaatgcttggtttctacttccaagcatatgtcactggagaaggtccagttgagaacttagcaaaacatctcagtgacccttttggtaacaacttgctcactgtgattgctggctccgctgagagggct

SEQ ID NO: 30394 - DNA, 409 bp, Glycine max
  Clone ID: LIB3138-042-Q1-N1-G8
atgaaggtcttcggtttcctcgctgctgctcttgtcatcgccggcgctgctggccagagcaccaccactcctcccaccaccactggttccccctccactcctaccaactctccctccagcactccctctacttccggaaccccccccactacgggcaatcccaacagtgccactccgtccactccgtccactccgagttcgcctagttctagtactaactcgcccaactccaccccgaacccttccagcacccctactggcacgacgccttccacacccttctctggatccaatggatctaacaatgggttgaacggagctgctttggagactacggacaccaaggaaccgactgacaccaacagtccggatactcccaccaccctcagtaccacggaatcgtcgcact

SEQ ID NO: 30395 - DNA, 330 bp, Glycine max
  unsure at all n locations
  Clone ID: LIB3138-042-Q1-N1-G9
gcagaaagcaagctcatcctagagttttaaaaatggcagcaggctcctccatggctctctcttccccatccttggctggcaatggccgtgaagctgggcccatcagcccccgaagtcgggagggtcagcatgaggaagaccgtcaccaagcaggcctgctccggaagcccatggtacggcccaaaccgcgtcaagtacttgggcccattctctggcgagcccccgtcctaccttactggcgagttcccaggtgactacggctgggacactgctgagctntcggccgacccagaaaccttcgccagaaaccgtgagctcgaagtgatccac

SEQ ID NO: 30396 - DNA, 221 bp, Glycine max
  Clone ID: LIB3138-042-Q1-N1-H2
ttggttttcatattatcacgtaaaagcctttccaaacaaagagggggtttgattataaaacatgagctgtccatacacaccaccaaattctttgtttcgaaattttttcagacgcttcttttgtcaccaaactttgttaactttcttaatccttttatataattaccttcaaaaacattcctctcaaaacataccatttctctccggactctcctattttt

SEQ ID NO: 30397 - DNA, 281 bp, Glycine max
  Clone ID: LIB3138-042-Q1-N1-H3
ctcgaaaccaaatcctccataaaacaaagcatcgtcaaacagtgattcaaaggtgttttccttacaatgactaccactacccaccccctgccccattctacaaccctttctatctacaaaaatttttcttttttctagcccacattttcctgttcttcgcctccctcctttttctctatgtcaccattcttacctgtctttgcttctttcaccaaacagccacccccttcaatcccttcattttcttcatcttttctttgccataccttaataccattttt

SEQ ID NO: 30398 - DNA, 294 bp, Glycine max
  Clone ID: LIB3138-042-Q1-N1-H5
tgcatacatttgtctcatacactatggttacgattataccgtagaagtgattttcgacggaatgaaaaaaacatatatggtagaatcgtaaccatagaatatgaccctaatcgaaatgcatacatttgtctcatacactatggggatggtgagaaaaaatatattttacaccccagaggggctataattggagataccattgtttctggtacagaagatcctataaaaatgggaaatgccctacctttgagtgcggtttgaactattgatttacgtaattggaagtaaccaact

SEQ ID NO: 30399 - DNA, 399 bp, Glycine max
  Clone ID: LIB3138-042-Q1-N1-H7
ctctctctctccaatggccaaagacctcgaaacggagattcaaagtgggttgcctcacaaggactaccacgacccaccccccgccccattctacgaccccgccgagctccgaaagtggtccttcttccgagccctcatcgccgagttcgtcgccaccctcctcttcctctacgtcaccatcctcaccgtcatcggctacaaccaccagacagccaccgccgccgagccctgcagcggcgtcggcgtcctcggcatcgcttgggcctttggaggcatgatttttgtcctcgtctattgcaccgccggcatatcagggggacacataaacccggcggtgacgttcgggttgtttttggcgaggaaggtgtcgctgacaagagctgttgtgtacatggtggc

SEQ ID NO: 30400 - DNA, 405 bp, Glycine max
  Clone ID: LIB3138-042-Q1-N1-H9
gtggtgtgttccgtggtcaattaccatccacacgcctcaccgggaacatgtcatcggtggttgctggttcctcctcttcattctctgccaccttcactaccagaaggagcccctccttaaaaaactctcaactctctcattccaagacactaacttctcctcaatgccagaagacatctttacaaggcctctcacttcatgaagccaaaaggggtgtttcagaatccttcctagttgagaacaagaatggttcctccattgctggaaggagacttgagatcaaagcaagaactgctggggcctcaaagacaattgaagtggaggttgacaagccacttggcctcaccttatgccaaaagtctggtggtggtgttgtcatcactgcttgtgatggtggtgggaatg

SEQ ID NO: 30401 - DNA, 288 bp, Glycine max
  Clone ID: LIB3138-043-Q1-N1-A10
gacggttcaaaaggaagatttgggcttgagtctaagtttgagcttccctctcctctcctcttctccttccagccacaaccctcagaaaccctcttggaacgaccctattttcacttcttcaggtgaagctggatcattcctccgcggaatcgatgtgaaccggttaccttctgtggttgattgcgaaaaggaagcaggtgtttcatcttcaaacagcacggtttctagcgtcagtggaaagcgcaacgagagggaaaccaatggagaagaaaacgacacagaccgagc

SEQ ID NO: 30402 - DNA, 125 bp, Glycine max
  Clone ID: LIB3138-043-Q1-N1-A12
gcaaaattcgcagcaaccgagctgctcttgaggacggaaacaataccgtatctaggtttcgctgtagctgaattgccatggtatctacagcgatagccttgtttgccttcattctcgccgtcaac

SEQ ID NO: 30403 - DNA, 383 bp, Glycine max
  Clone ID: LIB3138-043-Q1-N1-A2
aaaaaaaggaaaggaacttgagccacattttgtccctggtggactcaagaagagtctttcataggacagttaattaaaattatagcctgaaataagggttcactagcaatggcctcaacctcttctgctctcactatatcctcttcttccacccttcatgattgcaaggctccaagacagtcaccagctgcttcaccacaatgtgtgagccttccctctccccttttgcactctcagaactgttcatggaagaccactgcttattgtcgcagtattgctcgaaatgttatggcaatggccacaggagaggcaccagctgaagctgccccgactgaggtgccagagattgtcaagactcttcaagaaacttgggacaaaagtga

SEQ ID NO: 30404 - DNA, 186 bp, Glycine max
  Clone ID: LIB3138-043-Q1-N1-A7
atctattggcaaattttttgacagagggcaattttagagcaagtgttgatttgcagcgcactcatcgtattagaggaatgattaaaatggtggccacagttggtattcctgagaatacaagtatatcattggcctgtgctatgaatagttcttttaaggggcgcgccagttctgatatttacacca

SEQ ID NO: 30405 - DNA, 141 bp, Glycine max
  Clone ID: LIB3138-043-Q1-N1-A8
ggttcaactgaggtgatggctttgaatttgccttctcccgcccaagtgaagcccttatttttctcttcaaataactccacaaaacttccaggtagcttttctttgaagagaaaagatagtgacacaacagtagagagacga

SEQ ID NO: 30406 - DNA, 228 bp, Glycine max
  Clone ID: LIB3138-043-Q1-N1-A9
atttggttcttctcttctctctatcgtcttcttcctctggtccattagggtttccttttctccctcggagcttccaattgaaatccaattcctcaatacctccacactttctcgttcggaaagctcgcgaattcgaaagacatcgacggctccacgtgatacgttttcttcctctctggttatcaatgttggctactagtgcagttgcatctttgcccgtattaccac

SEQ ID NO: 30407 - DNA, 308 bp, Glycine max
  Clone ID: LIB3138-043-Q1-N1-B10
gctagttttgatggtttgattaccaagcaagttatgagcaagatggcagaaatgataaacagtctttgtggtggtgatgaaaaattgatgcgtgaaaggacgcacctgctgttggcttgttgttcaaggatggcaatttgtaagaaagatgtttggagagttgaatgtggaatcccttctggatttccgctcacagttatttgcaatagcatttttaatgagatgctcattagatatagctatgaaaaattactgcgccaggcttaaagctcaagtatgtttttacaatccttcaaaaaattttgttc

SEQ ID NO: 30408 - DNA, 408 bp, Glycine max
  Clone ID: LIB3138-043-Q1-N1-B11
ctcaagagaaactttaagcagatgtctaatgttttgtgggtggctcctgaggacaaggcgagtttatggtcacaacttcattatgtttcgtgtaataatctggaaatgcaagaagcttatcttgtcaatctcgtaaatgtgttacgagaattgtatttgcacagtccagaggaagctcgccaattgagaaggaaagctctctctcgtattgaatggctgcaaaaagctgatgtgcctaccatagcacagattgaagagttccattcgatgcagaggatgatgaatgctcctgattcaaatgataatattgatttactgttgagcattgatttgttgggtttacaaggagcaggtaaagcttttccaaacaaaattgtttttgatgataaacttgtgtttgcttacaca

SEQ ID NO: 30409 - DNA, 347 bp, Glycine max
  Clone ID: LIB3138-043-Q1-N1-B12
gattcaggaaaaagttgtattgaaattttcacaagaggaatttcttacagcttggtcaactcaagtgcgtcctgcaacaactctgttggctgatgggtgtccatatttgtatgcaatggtgcatgatagttcagtgtctacaataccaggtgattttgtcattggtgtcaagttgacaaccataaacaatatgtgtgcatatgggctcaatcctggtatttcaggttctcgtcttttgggcaccattcctcagtccatttcacagcaaactgtttggaatcaaatggcaacagtgagaacaccattgaattttgattctagcaagcagagcttttgtcaattttcta

SEQ ID NO: 30410 - DNA, 369 bp, Glycine max
  Clone ID: LIB3138-043-Q1-N1-B2
gtaataatctggaaatgcaagaagcttatcttgtcaatctcgtaaatgtgttacgagaattgtatttgcacagtccagaggaagctcgccaattgagaaggaaagctctctctcgtattgaatggctgcaaaaagctgatgtgcctaccatagcacagattgaagagttccattcgatgcagaggatgatgaatgctcctgattcaaatgataatattgatttactgttgagcattgatttgttgggtttacaaggagcaggtaaagcttttccaaacaaaattgtttttgatgataagcttgtgttggctaacacacaagaattctttgatggaaattttccagtggattctttgttaccaaattttt

SEQ ID NO: 30411 - DNA, 413 bp, Glycine max
  Clone ID: LIB3138-043-Q1-N1-B3
ccaaaccaaaaaaacctccaacgacattacagcgttcaatctcaaaccttcaaacgacggtcacacacaacacaatccatgccattctgaaacgcttcttcttttgcttgaacgaccgtcgtttcgttccgaaatggggactctaacgagttgcagtttcatgcctctgaactcggagtttcgccgcgccttcagggagaggattcagtgccacaagctcacgcgcttgaggggcaccttctgcttgttctcacgcgcgcgagtacccaaatggggcaagtcgaagctccccaatttcgatagccttaggagttttgctactaagaacgacaacagcgacggcgacaaggacaacagcaaccacgttggagccgccggagaggaaagtggcggcgactattctaaatcaaatg

SEQ ID NO: 30412 - DNA, 340 bp, Glycine max
  Clone ID: LIB3138-043-Q1-N1-B4
tttcacagcaaactgtttggaatcaaatggcaacagtgagaacaccattgaattttgattctagcaagcagagcttttgtcagttttctattgaccttctcggtggaggaatcttagtggacaaaactggagattggatcacacttatacaaaattctccaattagtaacttgttgagagttgctgcttggaagaaaggctgtttaatggtcaagattgtgatgtctgggaatgcaccagtcaaaaggagtgattgggcctcattggtacaagtgtttttaacaaacagcaacagtacagagcattttgatgcatgtaagtggacaaaatcagaaccaca

SEQ ID NO: 30413 - DNA, 355 bp, Glycine max
  Clone ID: LIB3138-043-Q1-N1-B6
cgctaaattatttctccggccctctttatcagaggcctttgcattcaggtccattggttccaggttatggctgtgaaatggttggaagggaagccggtgaacggcggcctcatgtttcaaacaaagtcaacctaccaaaactatctgggttagtggcatctaggacttcttcattgtctggagatcaaaaagaaaatccagttccctcgaggcctcgggaaacaattgaagtacaaatatctttggagtcaactaatggatcagagtcaagaagaaggcatgataccaaacaccattctcagagaattgatcccaggaaaattgaaaatggaaaagtttcaactgaaaccttaat

SEQ ID NO: 30414 - DNA, 317 bp, Glycine max
  Clone ID: LIB3138-043-Q1-N1-B7
attttgtcattggtgtcaagttgacaaccataaacaatatgtgtgcatatgggctcaatcctggtatttcaggttctcgtcttttgggcaccattcctcagtccatttcacagcaaactgtttggaatcaaatggcaacagtgagaacaccattgaattttgattctagcaagcagagcttttgtcagttttctattgaccttctcggtggaggaatcttagtggacaaaactggagattggatcacacttatacaaaattctccaattagtaacttgttgagaagtgctgcttggaagaaaggctgtttaatggtc

SEQ ID NO: 30415 - DNA, 396 bp, Glycine max
  Clone ID: LIB3138-043-Q1-N1-B9
caagggatggatggagaagaaagtagaaaccgatactggttacgacaacacatcatattccaagccttctgatgactatgactctggtttcaacaagccatcgtatgagtcttctggcggtggctatgaaggtggttacaacaaaacatcttattctagtgatgagccagcttctggtggtggctatgaaggtgggtacaagaaaacaggttattctggtggcattgatgagacttctggtggctatggcgctggtggtggtggatactctgacgtcactgatggtggctacggcaaaccaagtggtggctatggcgccgctggtggtggtggtgtgtaccctgacactaccactgatggtgggtacagcaaaacaagtggtggtgggtatgatga

SEQ ID NO: 30416 - DNA, 367 bp, Glycine max
  Clone ID: LIB3138-043-Q1-N1-C10
atgggctcaatcctggtatttcaggttctcgtcttttgggcaccattcctcagtccatttcacagcaaactgtttggaatcaaatggcaacagtgagaacaccattgaattttgattctagcaagcagagcttttgtcagttttctattgaccttctcggtggaggaatcttagtggacaaaactggagattggatcacacttatacaaaattctccaattagtaacttattgagagttgctgcttggaagaaaagctgtttaatggtcaagattgtgatgtctgggaatgcagcagtcaaaaggagtgattgggcctcattggtacaagtgtttttaacaaacagcaacagtacaaagcattttga

SEQ ID NO: 30417 - DNA, 409 bp, Glycine max
  Clone ID: LIB3138-043-Q1-N1-C11
catagagacacaatacagagtgagttgttgctccttcgccacaactctctgccaacatgggtatctccagagattctatgcacaagaggcgtgccactggtggcaagaagaaggcctggaggaaaaagagaaagtatgagcttggtcgccagcctgctaacactaagctgtcaagcaacaagacagtcaggaggatccgtgttagaagtggaaatgtgaaatggagggcattgagattggatactggaaattactcctggggaagtgaagctgtaactcgcaagactcgtgtactagatgtggtttacaatgcctcaaacaatgagcttgtgcgtactcagactcttgtcaaaagtgctatcgttcaggttgatgctgctccattcaaacaagggtatcttcagcacta

SEQ ID NO: 30418 - DNA, 360 bp, Glycine max
  Clone ID: LIB3138-043-Q1-N1-C12
caggaatagtatccaggggagggtctattcatgcaaagtggtgcttagcttaccacaaagagaattttgcttatgagcactgggatgagatacttgacatctgcaaccagtatgatgtggctctatccattggtgatgggctaagacctggatccatctatgatgcaaatgacacagcacaatttgctgagctcttgacacaaggagaactgacccgtaaagcatgggaaaaggatgttcaggtgatgaatgaaggacctggacacatcccaatgcacaagattcctgaaaacatgcagaaacagttagaatggtgtaatgaagcgcctttttacactcttggtcctttaacaactgata

SEQ ID NO: 30419 - DNA, 371 bp, Glycine max
  Clone ID: LIB3138-043-Q1-N1-C3
actggatggactgccaccccaatgcaggatgttcaggttacaattgattggtttatttcctctcaggaatgtgttcccaggacctattgtgttttaaatccacaaaatccttttgtgttaaataggtggatgggaaaattgactttcccccagggcacttcccgaagtgttaagagaatgcctctttctatagggggaggagctggtgcaaagaatgctattctcatgaatatgccaaatgctgttctttcaatgtggagatattttgttggagatctcgtctttgaagtttctaagatgacttctccctacattaaatgtacagtctctttcttcatagcatttgaaaatttggctgatgataccatcaa

SEQ ID NO: 30420 - DNA, 366 bp, Glycine max
  Clone ID: LIB3138-043-Q1-N1-C7
gcacaatgtcgacctcttccattaacgggtggtgcctctcttccatctccccagccaaaacctctctcaagaaggccacattaggcccttctgtcttcgcaaccgttagcactccttcttctccttcttcttcttcttcttcttccttcccttctctcattcaagacaggcctgtctttgctgcccctgcccccatcatcaccccaactgtgagagaggatatggcaaaggaatacgagcaagctattgaagaactccagaaattgttgagggagaagagtgaactcaaagccacagctgctgagaaagtggagcatataacagcttctctgggaacatcatcatctgatggcatcccatcatcag

SEQ ID NO: 30421 - DNA, 404 bp, Glycine max
  unsure at all n locations
  Clone ID: LIB3138-043-Q1-N1-C8
cgcgccagttctgatatttacaccatctgctctcaagactgtgaattgtggaatcctgcttgcacaaaagcaatgactatgtcatttaatccaaacccgtgttctgatgcatggagtttggaatttctgaagcgtactggatttcattgcgatatcatttgtgtcactggatggactgccaccccaatgcaggatgttcaagttacaattgattggtttatttcctctcaagaatgtgttcccaggacctattgtgttttaaatccacaaaatccttttgtgttaaataagtggatgggaaaattgactttcccccaaggcacttcccgaagtgtaagaagatgccttttctataggggaggagctggtgcnagaatgctattctcatgaatatgccaaatgct

SEQ ID NO: 30422 - DNA, 190 bp, Glycine max
  Clone ID: LIB3138-043-Q1-N1-C9
gaaacacattacagaagaagcttaattattcaactgaggtggtggtggtacctttggtttgtacataaatggagaaactgaaagtgtctgctaagaatgatcctgctggcagcagtgatcaagcagattcattttcaatattcgaactgtgggagagtgaaaatgttggacagaagagcagttgaagaga

SEQ ID NO: 30423 - DNA, 294 bp, Glycine max
  Clone ID: LIB3138-043-Q1-N1-D11
ggttttcgtttggttaagcaagatggatttggaagcagagaaagagcatgaagctgcatttgcagtggcctcactctccctctctctccccaccattttccccttcgtccaacccaagaatatcccatcaaccacccttcaaccaaccaagctcaaagtcccaacccaagcctcatccctcacacacctttctctctccaccaccactcctcctccttccaaaacctccttcaaatccaccgtcttcgccaacccccttcacgcccctctctccctcgctccccaccgcccccg

SEQ ID NO: 30424 - DNA, 347 bp, Glycine max
  Clone ID: LIB3138-043-Q1-N1-D12
aaagaatgctattctcatgaatatgccaaatgctgttctttcaatgtggagatattttgttggagatctcgtctttgaagtttctaagatgacttctccctacattaaatgtacagtctctttcttcatagcatttggaaatttggctgatgataccatcaattttgaggcttttccccacaagctggtgcagtttggagagattcaggaaaaagttgtattgaaattttcacaagaggaatttcttacagcttggtcaactcaagtgcgtcctgcaaccaactctgttggctgatgggtgtccatatttgtatgcaatggtgcatgataattcagtgtctacaata

SEQ ID NO: 30425 - DNA, 405 bp, Glycine max
  Clone ID: LIB3138-043-Q1-N1-D2
ctaagtcccgaggagataaattggctgaactcctatcacgccacatgtaggaatattctggcgccatatttggatgaagttgaaaatgcatggctgaagaaagccactgaacctgtaggtgcatgagctgtgtttggagttgaaaagttaaataacttaaagatggttcagcgtaattttagtgtcttccgtatccataatactgtaatctagattttagatatcattgggaatggttattccttcaaattactatgcacagcatatataatatatcaatattctgctgcatcatatttgagggcgtgtacaacgttaaattgtctatccgcacggcatcactgcatgcatcagctcttttacttttccctaatattgtttataaataagatggatcttgtacct

SEQ ID NO: 30426 - DNA, 410 bp, Glycine max
  Clone ID: LIB3138-043-Q1-N1-D3
ttgaagttaaaagccttagccttccctacaactccaaacacaaagacatcatcatccatggctgcctccgtctccactgtcggagctgtcaacagagctcttttgaacctgaatggttctggagctggagcttcaacttccagttcagccttctttgggaccagcttgaaaaaggttattgcctcaaaggtccccaacaacaaggtttccggtggaagcttcaagattggtgcttgagaagagaagaaagagattgaagagacccagcagaccgacaaggacagatggaagggtcttgcctatgatatctcagacgaccaacaagacatcacaagaggaaagggtttggttgactcccttttccaagctccacaggatgctggaactcactatgcagtcatgagctccta

SEQ ID NO: 30427 - DNA, 326 bp, Glycine max
  Clone ID: LIB3138-043-Q1-N1-D7
atttaatccaaacccgtgttctgatgcatggagtttggaatttctgaagcgtactggatttcattgcgatatcatttgtgtcactggatggactgccaccccaatgcaggatgttcaggttacaattgattggtttatttcctctcaggaatgtgttcccaggacctattgtgttttaaatccacaaaatccttttgtgttaaataggtggatgggaaaattgactttcccccagggcacttcccgaagtgttaagagaatgcctctttctataaggggaggagctggtgcaaaaaaatgctattctcatgaatatgccaaaatgc

SEQ ID NO: 30428 - DNA, 362 bp, Glycine max
  Clone ID: LIB3138-043-Q1-N1-D8
gtttggagagattcaggaaaaaggagccttgaaattatcacaagacgaatttcttacagctcggtcaactcaagtgcgtactgcaacaactgtgtgggctgatgggagtccatatttgtatgcagggtgccatgatatgctatggtctacaataccatgtgattcagtcattaggagtcaagttgacaaccataaacaatatgcgagcatatgggctcaatactggtatttaacgatctcgtctacagggcgccatttctaattccatatcacagcatactgccaggaactaaactggctccgcgagaacaccattgaattttgattctagcaagcagagcttaagccagaactgtattgac

SEQ ID NO: 30429 - DNA, 378 bp, Glycine max
  Clone ID: LIB3138-043-Q1-N1-E10
gcaggagtcctgaagatgtggtttaacgccaaggtaaatcagtgtaacactagtttcatttttttgtatacctactagatcaacaaattgaagcagaaaagtcttagttactagtccttgagagcttttaaccaggaaggtggaccaagtccactgtgaagttatttttagggctgtgttcttcttgctgcaaatgcaacattgctgcttctccgccaattactggtgcattattttggttacagtgtttgtctctcccacattaaatactaggagagatgtaaacttttgagtagtctcgttttcccaatgtaacatgtgttttcaatgagaataagtcaggatttatttattggccaaagtgaatgatttcaattc

SEQ ID NO: 30430 - DNA, 376 bp, Glycine max
  Clone ID: LIB3138-043-Q1-N1-E11
tgccatttcaatccccagtttcttcttcaacgtcctcttacgagcagatcccaattctccttcccagtttcaaaccctaattccctcattcccatggcctcagaagagcccactgtcgcggtggaacccgctcccgaacctgccaccgccgagcctcccccggaggagaaggaggagcccaaacctgaagccaaggctaagaaaaccaaggaacccaaacctaaaaaggtttccagaccacgcaacccttccactcatccttcctacgaggagatgattaaagacgcaattacctcgctgaaggagaaaaccggttcgagccaacacgcgattgcgaagttcatcgaggagaagcacaagcagcttccaccgaact

SEQ ID NO: 30431 - DNA, 407 bp, Glycine max
  unsure at all n locations
  Clone ID: LIB3138-043-Q1-N1-E12
cactccctcctcttcacacattttcttagctctctccaacaatccctctcgttcacactttcagattgtgtgaagatgggggctggtggccgaactgctgttcctcctgccaacaggaagtcagaggctgaccctttgaagcgggtaccatttgaaaaacctcagtttagtctcagccagattaagaaggccattccacctcactgtttccagcgctctgttctccgctcattctcctatgttgtttatgacctcaccatagccttctgcctctattatgttgccacccattacttncacctccttcccggtcctctctctttcgtggcatggccaatctattgggctgtccagggttgcatccttactggtgtttgggtcattgcccatgagtgtggtcaccatgc

SEQ ID NO: 30432 - DNA, 382 bp, Glycine max
  Clone ID: LIB3138-043-Q1-N1-E2
aaacaaacagccaaagaatcaatcatcctccttcaagtaatcaagcacccttcaaatctcaaattcagaatcaatcaattaatcaaataatcaatcaggttgatcatggacaggttagtgaaagcagacacaaaggaagtggagatgatttttctgaagggccaaaagtgcagctccttcttcaagctcaccaacctcatgcacaccatgtcagtggcagtgtctttaaccaccacaaactcttctcttttctccatcaacaaacccttctccacaattcccccactatctacggcatcatacaaactacaactctctcagccctccgatcaaccccctctctccgaccctcccgacgccatcaccgtccgagcaaccatgc

SEQ ID NO: 30433 - DNA, 398 bp, Glycine max
  Clone ID: LIB3138-043-Q1-N1-E3
cagaaaaccctactgagtctcactctctctcccatggcgaaagacatcgaaactgaggtccaaagtgggctgccacacaaggactaccacgacccacccgccgccgcattctacgaccccgccgagctccgcaagtggtccttctaccgcgccctcatcgccgagtttgtcgccactctcctcttcctctacgtcaccatcctcaccgtcatcggctacaatcaccagaccgccaccggcagccccgacctctgcaatggcgtcggcgtcctcggcatcgcttgggccttcggaggcatgatatttgtccttgtctattgcactgctgggatatcagggggacacataaacccggcggtgacgtttgggttgtttctggcgaggaaggtgtcgcttat

SEQ ID NO: 30434 - DNA, 368 bp, Glycine max
  unsure at all n locations
  Clone ID: LIB3138-043-Q1-N1-E4
gtgaattaaaatatattcaattttgcgtttctctgcctaaaaggattgaaagatgggtcaagcattcggttgctaccaagtcgatcagtcaaatgtggctatcaaggagcattttggaaaatttgatgatgtcctagagcctggatgtcactgcctgccttggtgtcttgggtaccagattgctggtagtctgtcgctgcgagtgcagcaacttgatgttcgatgtgagacgaaaaccaaggacaatgtctttgtcaatgtggttgcatctgtgcaataccgagctgtgtctgagaaagcatctgatgcattctatangcttaccaacacaagggagccgaatccaatcatatgtttttgatgtcatc

SEQ ID NO: 30435 - DNA, 138 bp, Glycine max
  Clone ID: LIB3138-043-Q1-N1-E5
gctggtgttaatccatgcctaattgagtgccttcaagtgttcccttccaaaagcaagctttatcccacagtgttttgtggtcaaactagtacaataacccaagaacacttttagatcaacctttgtggactctttttg

SEQ ID NO: 30436 - DNA, 319 bp, Glycine max
  Clone ID: LIB3138-043-Q1-N1-E6
cagcaatagcttctggtgatctcgttttctcacattgctctcttccccctttctctctcctctttctctctcttccattgcttctccataagcaacgccacgcgaggtcaattgcgcaatctccatgactgtgatgactcctgctcccattgaccaccaccacgaggaccaggagatgcttgtcccgcacaccgatttagctgtgaataatcaccaacccatggaagttgtggctcaacctgatgctggcaacactgtggagagtcagcctgtcgaggattcttcaacgtcaaggttcacatggaaaattgacaacttt

SEQ ID NO: 30437 - DNA, 406 bp, Glycine max
  Clone ID: LIB3138-043-Q1-N1-E8
atcaattttgaggcttttccccacaagctggtgcagtttggagagattcaggaaaaagttgtattgaaattttcacaagaggaatttcttacagcttggtcaactcaggtgcgtcctgcaacaactctgttggctgatgggtgtccatatttgtatgcaatggtgcatgatagttcagtgtctacaataccaggtgattttgtcattggtgtcaagttgacaaccataaacaatatgtgtgcatatgggctcaatcctggtatttcaggttctcgtcttttgggcaccattcctcagtccatttcacagcaaactgtttggaatcaaatggcaacagtgagaacaccattgaattttgattctagcaagcagagcttttgtcagttttctattgaccttctcggtg

SEQ ID NO: 30438 - DNA, 334 bp, Glycine max
  Clone ID: LIB3138-043-Q1-N1-E9
aatttgcaagttccgtcagttcacccaaatcctgcgaggaaacttctgaggctgtgacaatggcggatttacatcatctatggcagcttgtggaggagaaagatggaggtctcccttggattcagatgatggatcgttctacccccaccatgagttacaaagcatggcgtagagaaccaaaggatggtcctccccaatatcgaagcagcactatttttgaagatgctacccctgagatggtgagggacttgttttgggatgatgagttccgaccgagatgggatgacatgcttgcatcctcctcaatcattgaagagtgtcccactactggtac

SEQ ID NO: 30439 - DNA, 397 bp, Glycine max
  Clone ID: LIB3138-043-Q1-N1-F10
gcccatgtatgtgaacgcaaagcagtaccatgctattctgagacgcaggcagtatcgtgcaaaactggaagcacagaacaaactcatcaaagaacggaaaccatatcttcatgagtcccgccatctacatgcactgaagagagctagaggttccggtggacgctttttgaatgccaaaaagctccaagagttgaaactcacttcagcaaaccgtggcctagatgtttctggctgtactcaattgaatctgagtggaaatatgtcagaatcaaaggttcaagcagtagaaaacttgaactacagaaatggtgcttctacaaccacgtgttctgatgtcattagtacatctaatagtgatgatgtcttccagcaacatgagtcagactttagggtatgt

SEQ ID NO: 30440 - DNA, 337 bp, Glycine max
  Clone ID: LIB3138-043-Q1-N1-F11
gacaaaatcagaaccacattcctgggaattgatcttcccaatagaggtatgtggtcctaataatggtttgaaatgtggagttctgagtgggcaaatcaaacttcatggcatttgagtttccttattgacaatcccaaacagtctacagtttttgatattctcttgggaatctcttaagattttgaaattgctggtaatactcttatgccagctttttctgttccacaggctactgccagatcttctgaaaatgcggaatcctctgcatgatctggaatttgtgttttctttcgcttgttcgtttggttaattcaataaaagaaattaagcatgaccc

SEQ ID NO: 30441 - DNA, 281 bp, Glycine max
  Clone ID: LIB3138-043-Q1-N1-F12
gtttcgttctctctgctggacatggctgcatgctccaatatgctctccttcaccttgctggctatgacactgttcaagaacaagaccttaaggaattccgacaatggggaagcagaactcctggacatcctgagaactttgagacccttggagttgaagtgaccacaagtcctcttggtcaaggcattgccaatgcttgtggattaacactagctgagaaagcacttgctgcacgatttaacaagcctgacaatgagattgtgaccatacacatatgtata

SEQ ID NO: 30442 - DNA, 132 bp, Glycine max
  Clone ID: LIB3138-043-Q1-N1-F3
agggatcaagacaagcctttccacccccaatcttggtgaatgcttgagacacaacctctcacacacgacaaatctttgacagaaatcttccattggcaacttggtgtacacactttgtgaaatgtatcccct

SEQ ID NO: 30443 - DNA, 295 bp, Glycine max
  unsure at all n locations
  Clone ID: LIB3138-043-Q1-N1-F7
gtggtttcagtgagtgatcggtgttcacttgatccttcataagtcgtcatcatcatcatcatcatcaccgttgattgaagaagatgccgatcagaaacatcgccatcggaaggcctgaagaggctactcaccccgacacgttgaaggcggggttggctgagttcatctccaccttgatcttcgtgttcgccggttcaagttccggcatcgcctacaacaagctcaccgacaacggcgccgncactcccgccggcctcatctncgcttccatcgcccatgctttcgccctcttcgt

SEQ ID NO: 30444 - DNA, 250 bp, Glycine max
  Clone ID: LIB3138-043-Q1-N1-F8
ctcgagccgtgaaagatgaaccttctacggtggaggcatattattggacaacactggctattggttcacactttttcaaagttctacaattcgcaacttgatgtgaagagctgcttgtgatacaggctgttaatggacaagatgaggtctctcggatgcagcaatctaaaggagcgattggcctattggtacaagcgctgtacatacacaacagccatagctgttgatgcatgtcaggggacaaaataga

SEQ ID NO: 30445 - DNA, 195 bp, Glycine max
  Clone ID: LIB3138-043-Q1-N1-G10
gttgacaatggcactctcgtgtctcacactcactggcaacccttcttccatcatctgcaaattcaaagcgttcctacctaccggtgcccacgcccttgaaggcaactaaattcggaggggcggccaacttggcggacaaatcggccggtttaacatccccccaccccaacttgggttgggtaatcggctccccct

SEQ ID NO: 30446 - DNA, 299 bp, Glycine max
  Clone ID: LIB3138-043-Q1-N1-G11
actaattacgacgggacaagataacagatgtaggggctacccatcttttattatacagctttgtgaagaatgagggaacactgttgtatgacacttggactgcttgtatatcaggcgattccaaaaccaggtcgagaaataaagactgttgatatggtatagcttgactgaaggtaaatctgcgactgctactacgagatagataaatgtattggatgagcatattaagagcgtaacaacttcaacctagttttagatggtatggtcgcatatgaagcttttctaggaagctcctgggt

SEQ ID NO: 30447 - DNA, 384 bp, Glycine max
  Clone ID: LIB3138-043-Q1-N1-G12
ccacagttggtattcctgagaatacaggtatatcattggcctgtgctatgaatagttcttttagggggcgcgccagttctgatatttacaccatctgctctcaagactgtgaattgtggaatcctgcttgcacaaaaacaatgactatttcatttaatccaaacccgtgttctgatgcatggagtttggaatttctgaagcgtactggatttcattgcgatatcatttgtgtcactggatggactgccaccccaatgcaggatgttcaggttacaattgattggtttatttcctctcaggaatgtgttcccaggacctattgtgttttaaatccacaaaatccttttgtgttaaataggtggatgggaaaaatgacttttcccc

SEQ ID NO: 30448 - DNA, 373 bp, Glycine max
  Clone ID: LIB3138-043-Q1-N1-G6
gcttctctgaattctctggcctccgcagctcatcaggcttccttcccttttctagaaaatcttcagaggatttccattctgtcattgccttccagacctatgcagttggaagcagtggaggatacaagaagggtgtgacagaagcaaaactgaaggttgccataaacggatttggaaggattggaaggaacttcttgaggtgctggcacggtcgcaaagactcccctcttgatgtcattgccatcaacgacaccggtggcgtgaaacaagcctctcaccttctcaagtacgattcgatcctcggaaccttcgatgctgatgtcaagcctgttggcagcgacatcatctctgtcgatggaaaggaaatcaaagt

SEQ ID NO: 30449 - DNA, 360 bp, Glycine max
  Clone ID: LIB3138-043-Q1-N1-G7
gccatctcttcctcattttggtttatgagtacttggtgttccacggagaatcatatttggctgctgggggggagcaaatcttcaagaatcttggccctggggtttttggtgctagggcctttgatattcttggtgctcttcctgagtcattaattcttgttgttactggactttccagcgataaggagagtgcacaagagtatgcttccactggagttggtttgttggctggatcatccattatgcttctgacagtagtttgggggacctgtgttttcattggcagacaaaagttgaaaaatgactcttactatggtggcacaaattcatcaagtgggggaataaaagaataactcactg

SEQ ID NO: 30450 - DNA, 410 bp, Glycine max
  Clone ID: LIB3138-043-Q1-N1-G8
ctaagactgggggtggggggtactttctgcatagtaacccaattgaagtgaaagagagctcaggagaagatgaaatttcacatattgacaaagtgactatagcttctgatcaggggagactgatgagtagtggttctcagttcacagaaagagatagaccctttcttcaatgttcagaggagaagccttctttgccgagttcgtttagaacttgtgatctgaatctcattgaagcgtctgaagtgcatgaaaatcatgttgatcatccagttctgctgtacccccctgcggtttctgaaacaaagaaagctgtgccaattgacatagatctgaccatgagtcatgctagtgtatcagggaaattcaatactcatgcaacaaatggcaaagagattgaagtaattgattta

SEQ ID NO: 30451 - DNA, 384 bp, Glycine max
  Clone ID: LIB3138-043-Q1-N1-G9
atttacaccatctgctctcaagactgtgaattgtggaatcctgcttgcacaaaagcaatgactatgtcatttaatccaaacccgtgttctgatgcatggagtttggaatttctgaagcgtactggatttcattgcgatatcatttgtgtcactggatggactgccaccccaatgcaggatgttcaggttacaattgattggtttatttcctctcaggaatgtgttcccaggacctattgtgttttaaatccacaaaatccttttgtgttaaataggtggatgggaaaattgactttcccccaaggcacttcccgaagtgttaagagaatgcctctttctatagggggaggagctggtgcaaaaaatgctattctcatgaatatg

SEQ ID NO: 30452 - DNA, 360 bp, Glycine max
  unsure at all n locations
  Clone ID: LIB3138-043-Q1-N1-H10
gccactaatcctatgctgacgcgacttcttgagaactgtaagagtctcaaatatctggttgatgagtgtccttttgcatttgtgaactagtatgtagtattttattcacttaaataaagcgcattactatgtgcaatgagtgtgtttaaattttnaaaaaaaaaaaaaaataaaaaaaaaaaaaaaaaaaaaaaaannaaaaaaaaaaaaaaaaaaaaaaaaaaaaaaaaaaaaaaaaaaaaaaaaaaaaaaataaaaaaaaaaaaaaaaaaaataaacaaaaaaaaaaaaaaaaatgggggggccccccacttttggaccttctccccccggaaataatttcggacccggtccctgggg

SEQ ID NO: 30453 - DNA, 123 bp, Glycine max
  Clone ID: LIB3138-043-Q1-N1-H11
cttgcagcaagtccttgttttgcatgggggcatggaggagcccatgcaagactacttttctattggggggaaacagcttacgtgtctaacatgggacaatattgggaaagggcctattactgg

SEQ ID NO: 30454 - DNA, 318 bp, Glycine max
  Clone ID: LIB3138-043-Q1-N1-H7
ggatttgaaggatacaattgtgaagggatttgggttcacggcggaagatgatgttacgattacggggttcgatcctcgagacgccgaggtagggcattccgtggagtaccaattcgacctcgaaatcgatcacaaggttattcccttcaagctccttgaagacgtcaaacactgggattacgtcgatctttccattttccgggccgaggcccaatccggtttggtccctaaacgggcttcgggtgacgggcgttcccgtttggctcccttcgttctcgctgggcccatggaactctggattcacgacgccaacgacat

SEQ ID NO: 30455 - DNA, 340 bp, Glycine max
  Clone ID: LIB3138-043-Q1-N1-H8
gttttcttaaaatttcttccttgccactgccagtgtgtcaccaccatggccaccgtcacaacccaagcctccgccgcgattttccggccatgtgcctcgaaatcgaggtttctgaccggctcttccggtaaactcaaccgggaagtgactatgaggccaatggggtgccctccttctgcctctttcaaggttgaagccaagaagggagagtggttacctggcttggcctccccaacttacctcaatggcactcttcctggtgacaatggatttgaccctctgggactagctgaggacccagagaacttgaggtggtacgtttaagccgagcttgtgaatg

SEQ ID NO: 30456 - DNA, 204 bp, Glycine max
  Clone ID: LIB3138-044-Q1-N1-A10
catgaaaattgaaccaaccatactacacagacactcctgctaaccttaaataattctgctctcacccttataaaaacactgattttaactcccacttttgcatttccacctatctatctatccatctatcttttctaacatggctgctgggactggactctttggagagattttggatggagatgcgtacaagtactatgctga

SEQ ID NO: 30457 - DNA, 346 bp, Glycine max
  Clone ID: LIB3138-044-Q1-N1-A11
ctcaagagaaactttaagcagatgtctaatgttttgtgggtggctcctgatgacaaggcgagtttatggatcacaacttcattatgttccgcgtaataatctggaaatgcaagaagcttatcttgtcaatctcgtaaatgtgtgacgagaatacgtatttgcacagtccagaggaagcttggcaattcatacagaaagctctctctcgtattgaatggctgcaaaaagctgatgtgccgtccatacctcagattgaacagttccattcgatgcagaagatgatgaatgctcctgattcaaaagataatattgatttactggtgcgcattgatttgttgggtttaca

SEQ ID NO: 30458 - DNA, 399 bp, Glycine max
  Clone ID: LIB3138-044-Q1-N1-A12
cttcaaatatagctagctaggtacaatacaattcaccggagcaaatactaaggaggtttagctcaattgattcagcaagtgtgtgagtgagttattgtaaactttctgatatctgtcttccatttttatgattaaaaaaatcagagcaatgaatgttttatatttaagctcaagttcaagcctaagcatgtccaagccgtttcaattctcaagtaaacatcatcaaagagcttctagtgtgaagtttggtggtgtttcatgcagagccgcaacgttaacccaagaaaacttgtacaaaatattgtctgtgtgtccaggaagtgcaacaatggatgagatcaagagggcttataagtcaatggctcttcagtaccaccctgatgtgtgccatgatccttc

SEQ ID NO: 30459 - DNA, 249 bp, Glycine max
  Clone ID: LIB3138-044-Q1-N1-A9
ctcgagccgctcgagccgcttggtgagagttgctgcttggaagaaaggctgtttaatggtcacgattgggatgtctgggaatgcagcagtcaaaaggagtggttgggcctcattggtaccagtggttttaacaaacagcgacagtgcagagcattttgatgcatgtaaggggacaaaatccgaaccacattcctgggaattggtcttcccaatagaggtatgtggtcctaataatggtttctgaatgtg

SEQ ID NO: 30460 - DNA, 399 bp, Glycine max
  Clone ID: LIB3138-044-Q1-N1-B10
gaaagatttaatgagatagttggaagtccatattacatggctcctgaggtattgaagagaaattatgggccagaagtggacatctggagtgctggagtaattctatacatcttactttgtggtgttccgccattttgggcagaaactgagcaaggagttgcacaagcaatcatacgatctgttgttgatttcaaaagggatccatggccaaaagtttctgataatgcaaaagaccttgtgaagaagatgctagatcctgacccgaggcggcggcttactgcacaagaagtgttagatcatacatggttacaaaatgcaaagaaagctcctaatgtttccttatgagaaactgttagagcaaggctcaagcaattttctgtaatgaacaagcttaagaaa

SEQ ID NO: 30461 - DNA, 333 bp, Glycine max
  Clone ID: LIB3138-044-Q1-N1-B11
ccaggatgagcggcattaagaggatttttcatgcctctagtgcttgtatctggcctgaatgcaaacagctggaaactaatgttcgcttgagcgagtctgatgcatggccagctgagccacaagatgcatatgggctaaaggagctcgcctcagaggaggtatgcacgcactataacaaggattttggaattcagtgccggattgggaggttccacaacatatacggtccttttgggacatgggaaggtggaagggagaaggctcctgctgatttttgtcgcaaagatatcactttctctgatagacttcagatgtcgggggatggattgcaaa

SEQ ID NO: 30462 - DNA, 395 bp, Glycine max
  Clone ID: LIB3138-044-Q1-N1-B12
ctcgagccgaatcggctcgagccctacattaaatgtacagtctctttcttcatagcatttggaaatttggctgatgataccatcaattttgaggcttttccccacaagctggtgcagtttggagagattcaggaaaaagttgtattgaaattttcacaagaggaatttcttacagcttggtcaactcaggtgcgtcctgcaacaactctgttggctgatgggtgtccatatttgtatgcaatggtgcatgatagttcagtgtctacaataccaggtgattttgtcattggtgtcaagttgacaaccataaacaatatgtgtgcatatgggctcaatcctggtatttcaggttctcgtcttttgggcaccattcctcagtccatttcacagcaaac

SEQ ID NO: 30463 - DNA, 376 bp, Glycine max
  Clone ID: LIB3138-044-Q1-N1-B9
aataaatcttcttagcttccatcaaatctcacactctcattcttagagccatggccatggattccatggccgcttccatcggagtctcggtccccgtgctacgcttcctcctctgctttgccggcaccgtgcccctcagcttcctctgccgcctcctcccccgtggcctccccaagcacctctactccgccgccgtcggcgtcgccctctcctacctctccttcggcgtctcctacaacctccacttgctcgtccccatgttcctcggctacgccttcatgctcctctttcgtccccgatgcggcatcctcaccttctttctcggattcggctacctcattggctgccacgtgtattacatgagcggtgacgcatg

SEQ ID NO: 30464 - DNA, 400 bp, Glycine max
  Clone ID: LIB3138-044-Q1-N1-C10
cctaaatcgacgcatttgttacttggtttctgtgagtgttcgtgaaccactcagcgaactcgactctgtgtggcacattatctcaatttttaaagcagatcaacagacaatggtgaactccacccccacctccttctaccgcaccaccactctcactccctctactattatctccactcctcttccttcttcttcttcttgcacccatcatcattcatgtgtacacccccgccgcttctgcttacactcacaacctcttcgcctaagcaaccttcggtgccacacccatttgccatcaaccccaaagacattcaaactgaattgttccatcagcgagcctctgaaggtgatgatatcaggtgcacctgcctcgggcaaaggcacgcaatgtgaattgatt

SEQ ID NO: 30465 - DNA, 379 bp, Glycine max
  Clone ID: LIB3138-044-Q1-N1-C11
agcttatcttgtcaatctcgtaaatgtgttacgagaattgtatttgcacagtccagaggaagctcgccaattgagaaggaaagctctctctcgtattgaatggctgcaaaaagctgatgtgcctaccatagcacagattgaagagttccattcgatgcagaggatgatgaatgctcctgattcaaatgataatattgatttactgttgagcattgatttgttgggtttacaaggagcaggtaaagcttttccaaacaaaattgtttttgatgataagcttgtgttggctaacacacaagaattctttgatggaaattttccagtggattcttggttaccaatttttgtgaattgtctttatccctgtagtcaattacct

SEQ ID NO: 30466 - DNA, 301 bp, Glycine max
  Clone ID: LIB3138-044-Q1-N1-C12
ctttgatggaaattttccagtggattcttggttaccaatttttgtgaattgtctttatcctgtaagtcaattaccttcagaagctgtcgttgtaaatgttacatgtggtagtggacgttgtggttcactcaccactgcttggatttgcattgcattctacagatgctccttgcttctgaaccaaatgattatctcagttctctggaaaggatagaaaatttgtgttctcactggacttgatactttttcacaaactaaactggttgttcttattggctttggtaaggtaacacacaagaat

SEQ ID NO: 30467 - DNA, 202 bp, Glycine max
  Clone ID: LIB3138-044-Q1-N1-C9
cgcaattttccagtgggttctagaggaccaagggaagagagtcgtttctatccggcacgtcaattaccgtcaaaagcttgcctttttcaatttacataggagctggtacaaagagtgctactctcacgattattccaaatgctgtgcttttaacgatcgcatatcatgtatcagctctcggatttgaagagcacttgatgac

SEQ ID NO: 30468 - DNA, 385 bp, Glycine max
  Clone ID: LIB3138-044-Q1-N1-D10
gccttactttagtggttctaaattgaaaagctctctagctagtcataacatcaccattactgatggtattgacaaaactagtgcaactttgcaatttacaaagttagcagattgtgattttctcaatagaaactttaagcagatgtctaatgttttgtgggtggctcctgaggacaaggcgagcttatggtcacaacttcattatgtttcgtgtaataatctggaaatgcaagaagcttatcttgtcaacctcgtaaatgtgctacgagaattgtatttgcacagaccagacgaagctcgccatttgagaaagaaagctctctctcgtattgaatggctgcagaaagctgatgtgcctaccataacacagattgaagagttccat

SEQ ID NO: 30469 - DNA, 362 bp, Glycine max
  Clone ID: LIB3138-044-Q1-N1-D11
caaaggagttgtaaattaagagcatggctgcacaagctcttgtatcatcatcatctcttaccttctcagccgaggctacaagacaaagtcttggaccaagatcactccaatctccatttggcttctcaagaaaagcctcctttcttgttaaggcagctgctactccccctgtcaagcaaggatcagacagacctttgtggtttgcatcaaagcaaagtctttcctacttggatggcagccttccgggtgactatggatttgaccctctgggactttcggaccctgaaggaacaggagggttcattgagccgaaatggctagcatatggtgagataatcaatggtcgttatgcaatgttgggt

SEQ ID NO: 30470 - DNA, 291 bp, Glycine max
  Clone ID: LIB3138-044-Q1-N1-D9
gggcccatcatcgtcaccggtaacgatttctacacactctatgcgcctttcatacgggatgggcgtatggagaagttctactggacaccaacaagggatgaccgcattggtgactgcactggaatttttcgcaccgattcaattcctgaacaggacgttgtcaagattggtgacaccttccctggccaatccattgatttctttggtgcactgagggccagagtatatgatgaccaagtgaggaagtggatttctggcgttggtgatgaccgcattgggaagaagcttgtg

SEQ ID NO: 30471 - DNA, 259 bp, Glycine max
  Clone ID: LIB3138-044-Q1-N1-E10
gactactgaagttactgcctaaatctaaatgccagcttcgtaaatttgatgacagtggacatttcctattcctggaagacagcattgacctggtaacaatcatcaaaggcacttcatactaccgccggggcaagtatcatgactatgcatcagattttatacctccaacacttgatgaggccaaaaacataatagaatcaaacagtttggttaaccttattgcaagtgctgtaatgctctcaactttggaggatgggac

SEQ ID NO: 30472 - DNA, 378 bp, Glycine max
  Clone ID: LIB3138-044-Q1-N1-E12
cccccagaccagcagaggctgatcttcgccggcaagcagctcgaggacggacgtacccttgctgactacaacatccagaaggagtcaactctccacttggtgttgcgtcttcgtggtggtatgcagatcttcgtcaagacccttacgggtaagactattaccctcgaggtggagagctccgacaccattgacaatgtgaaggcgaagatccaggacaaggaaggaatcccaccggaccagcagaggcttatttttgctggcaaacagctagaggatggaaggaccctcgctgactacaacatccagaaggagtcaactctgcaactggtgttgcgtcttcgtggggggttttaagcttgagctgatttctgtgtgatg

SEQ ID NO: 30473 - DNA, 268 bp, Glycine max
  Clone ID: LIB3138-044-Q1-N1-E9
ctcgcaccgggtatatgggctgccttactatagaggttctaagttgtgagccttgctggttgctcttatcatacccatttcggtgggcagagacaaacctataaccccgttgctgttgataatagaaacgaatcgttatttgatgaacataaacaggcatcagctgttgagtgtcacatgcgtcggcttcttacctcgagggcacggtatggttgcggctcgcttgtatcctgatgcacacacactgaaatacaggcatcttatcttg

SEQ ID NO: 30474 - DNA, 396 bp, Glycine max
  Clone ID: LIB3138-044-Q1-N1-F10
ggaaaattcagccccaagctcaatggccggaacctccgcgtggcggtggtgggaggcggtccggctggcggggccgccgcggagacgctggcgaagggcggcgtggagacgttcctgatcgagcgaaagatggacaactgcaagccgtgcggtggcgccatcccgctgtgcatggtgggggagttcgacctgccgctggacatcatcgaccggcgcgtgacgaagatgaagatgatatcgccgtcgaacgtggcggtggacatcgggaggacgctgaagccgcacgagtacatcggcatggtgcggcgcgaggtgctggacgcttacctcagggaccgcgccaaggagtacggtgcgaacgtcatcaatggcttgttcttgaaaatggatattcct

SEQ ID NO: 30475 - DNA, 393 bp, Glycine max
  Clone ID: LIB3138-044-Q1-N1-F11
ggacctattgtgttttaaatccacaaaatccttttgtgttaaataggtggatgggaaaattgactttcccccagggcacttcccgaagtgttaagagaatgcctctttctatagggggaggagctggtgcaaagaatgctattctcatgaatatgccaaatgctgttctttcaatgtggagatattttgttggagatctcgtctttgaagtttctaagatgacttctctctacattaaatgtacagtctctttcttcatagcatttggaaatttggctgatgataccatcaattttgaggcttttccccacaagctggtgcagtttggagagattcaggaaaaagttgtattgaaattttcacaagaggaatttcttacagcttggtcaactc

SEQ ID NO: 30476 - DNA, 395 bp, Glycine max
  unsure at all n locations
  Clone ID: LIB3138-044-Q1-N1-F12
ctcgagccgaatcggctcgagaattatatataggcagcatacaaagatgctgaaatacagatgcaggaatgaaaataatctaactcagctactactgcattgccaactcagcactcctctaacagaattggttagacaaaatcttctagatgctttggtgggaagatccttcttttgggcctctcattcgtgcctatgtgtgcagtatcttggtgagccattattcccttcataacattttcctattttgaacataactacataaatgccatgctttgtataactcatctaacatactaatgacgaaaagtatttttgggttgtaacccttgtatagtatatacatattctaataatatggtntgttccattgagaagatgtactagaagcaagc

SEQ ID NO: 30477 - DNA, 400 bp, Glycine max
  Clone ID: LIB3138-044-Q1-N1-G10
ctcgtaaatgtgttacgagaattgtatttgcacagtccagaggaagctcgccaattgagaaggaaagctctctctcgtattgaatggctgcaaaaagctgatgtgcctaccatagcacagattgaagagttccattcgatgcagaggatgatgaatgctcctgattcaaatgataatattgatttactgttgagcattgatttgttgggtttacaaggagcaggtaaagcttttccaaacaaaattgtttttgatgataagcttgtgttggctaacacacaagaattctttgatggaaattttccagtggactcttggttaccaatttttgtgaattgtctttatcctgtaagtcaattaccttcagaagctgtcgttgtaaatgttacatgtggtagtg

SEQ ID NO: 30478 - DNA, 368 bp, Glycine max
  Clone ID: LIB3138-044-Q1-N1-G11
caagcttgttgacaccttccctggccaatccattgatttctttggtgcactgagggccagagtatatgatgatgaagtgaggaagtggatttctggtgttggtgttgacagtgttgggaagaagcttgtgaactcaaaagatggacctccaacctttgagcagcccaagatgactctggagaagctcttgctgtatggtaacatgcttgtccaagaacaagagaatgtcaagagagtccaattggctgacaagtacttgaacgaggctgctcttggaaatgctaacgaggatgctattcagaggggaactttcttccagtcttgaattggaggcaaagcaaacttggcgagtaaatatttctgttcgt

SEQ ID NO: 30479 - DNA, 400 bp, Glycine max
  Clone ID: LIB3138-044-Q1-N1-G12
tttcgttcaactttcaacgccagttcacactctctgcttcgcgtgtaccaacaagtgcaagttcgaatcaatggccagcgctcagctcacagcaatagcgtcatcgatctctacggcgtcgtttgaagggcttcgaccttccgctgttcagtttgcttccacgggcagaattagaattggcaatctctcccaaaggtccttccggggcttggttgtcaaagccgccaccgttgttgcccccaaatacactgcgataaagcctctgggagatagagtgctaataaaaattaaggaagcagaggagaaaactgagggtgggattttgcttccatcaactgctcaaacgaagcctcaagggggtgaggtggttgctgttggggaaggaaagacagttgggaag

SEQ ID NO: 30480 - DNA, 360 bp, Glycine max
  Clone ID: LIB3138-044-Q1-N1-H11
aaggacgcacctgctgttggcttgttgatcaaagatggcaatttgctagaaagatgtttggagagttgaatgtcgaatcccttctggatttccgctcacagatatttgcatagcatttttaatgagatgctcattagatatagctatgaaaaaatactgcgccgggctaaagctccaagtatgtgcttacaatcccttcaaaaattttcctctctttgtgtgcgtatggcgatgataacttaattagtgttcatgaatatgtcaagccttactttagtggttctaaaatgaagagctttctagctagtcataacatcaccattactgatggtattgacaaaactagtgcagctttgcaat

SEQ ID NO: 30481 - DNA, 261 bp, Glycine max
  Clone ID: LIB3138-044-Q1-N1-H12
cgcactcatcgtattataggaaagattaagatggtggccacagccggtattagcgtgaatacaggtatatcataggcctagcctaagaatagatctcaagggggcacgccaagtctgatatttacaccatctgctatgcatgactgtgaattgtggaattctgcttgcgcaaaagctatgactatgtgatgaaatccacacccgcgatatggtgcatggcgtggggcatttctgaagcggactgaatatcattgcgatatc

SEQ ID NO: 30482 - DNA, 392 bp, Glycine max
  Clone ID: LIB3138-046-Q1-N1-A1
aggttgctgtaggagataagattgcagtagtgctaagtgctaacacctgcagtgaacaatggcctctgcatcagcatctctgctcaagtcttcacttgttcttgacaagtctgagtgggtgaagggacaaacccttcgccaaccttctgcatcagttgtgagatgcaaccccaccaccccatcaggcctcaccatcagagctggttcctatgctgatgagctcgttaagaccgcgaaaacagtggcttcaccagggaggggtattttggccatggatgagtccaatgctacctgtgggaagcgtttggcttcaattgggctagagaacactgaagctaaccgccaggcataccgtacccttctcgtgacagttccaggccttggtcagtaca

SEQ ID NO: 30483 - DNA, 389 bp, Glycine max
  unsure at all n locations
  Clone ID: LIB3138-046-Q1-N1-A10
gattttctcaagagaaactttaagcagatgtctaatgttttgtgggtggctcctgaggacaaggcgagtttatggtcacaacttcattatgtttcgtgtaataatctggaaatgcaagaagcttatcttgtcaatctcgtaaatgtgttacgagaattgtatttgcacagtccagaggaagctcgccaattgagaaggaaagctctctctcgtattgaatggctgcaaaaagctgatgtgcctaccatagcacagattgaagagttccattcgatgcagaggatgatgaatgctcctgattcaaatgataatattgatttactgttgagcattgatttngtgggtttacaaggagcangtaaagcttttccaaacaaaaatgttttgat

SEQ ID NO: 30484 - DNA, 362 bp, Glycine max
  Clone ID: LIB3138-046-Q1-N1-A11
aactgtttgcttgcattatttgacaatggtgttaaagaaggtttcattaagccttgtgcacggaatatagttgtctctgctacgtcagccaaagaacttatgatgaaaatggagcactacactccttcgcacgaacatgttgcccctcatcagagctggcagatgaaacaattaggtaatatccagatgcagagtgagactgttattgatggaaggtttttctccgaaaattgatttatgatgtgattcttcatcatttgagatgtatacaagagcctggatagatgggaccatatgttgtttgttaccgtgtactatgttgttttatgactggagtgcttatatattggctttgctgcttt

SEQ ID NO: 30485 - DNA, 336 bp, Glycine max
  Clone ID: LIB3138-046-Q1-N1-A12
ggaaatttggctgatgataccatcaattttgaggcttttacccacatgctggtgcactttggagagattcacgaaaaagttgtattgtaatttttacaagaggaatttattacagcttggtcaactcatgtgcgtgctgcaacaactatgttggctgatgggtgtccatatttgtatgcaatggtgcatgatagatcagcgtctacaataccaggtgatcatgacattggtgtcaaggtgacaaccataaacaatctgtgtgcatatgggctcaatcctggaatttcaagatatcacttattgggcaccatacctcagttcatttcacagcatact

SEQ ID NO: 30486 - DNA, 376 bp, Glycine max
  Clone ID: LIB3138-046-Q1-N1-A9
tctgagtctgctcaggtgttccttgtcaagagatccttttgtttttgaggtgtgaagggaaagagaaaaaagatgaatcagtgtggttatcagcagaagaaggccttgacaagctgtgaggagatgaggatggaatctgtggtgtgccctaaacctcgaagattgggcctgttgaaccactcaacctttgataaccacatcagacccttgaggccaccctttatcaactaccaatcagaaattgaagattcaggagttggggctgagcttatggacattattctccccaagagatctggggggcaagtggcttcatcaccgccatttttctgtggatctccacctagcagggcttcaaaccctgtgatccaagatg

SEQ ID NO: 30487 - DNA, 377 bp, Glycine max
  Clone ID: LIB3138-046-Q1-N1-B1
gttaaataggtggatgggaaaattgactttcccccagggcacttcccgaagtgttaagagaatgcctctttctatagggggaggagctggtgcaaagaatgctattctcatgaatatgccaaatgctgttctttcaatgtggagatattttgttggagatctcgtctttgaagtttctaagatgacttctccctacattaaatgtacagtctctttcttcatagcatttggaaatttggctgatgataccatcaattttgaggcttttccccacaagctggtgcagtttggagagattcaggaaaaagttgtattgaaattttcacaagaggaatttcttacagcttggtcaactcaggtgcgttctgcaacaactc

SEQ ID NO: 30488 - DNA, 383 bp, Glycine max
  Clone ID: LIB3138-046-Q1-N1-B10
gaagcaaagagtattttggaacaagaatatggaccgtatcacccagaaacacttggggtatatagtaatcttgctggcacatatgacgcaattggcaggctggatgatgcaattcaaattctggagtacgttgttaacacgagggaggaaaaactcgggaccgcaaatcctgaggtggatgatgagaagaggaggttgggtgagttgttgaaggaagcaggtagagttcggagcagaaaagccaggtcactggagaaccttcttgatggcaatgctcacgctgcaaacaatgttgtcatcagggcatgatgaggatgtctatcaatgactcatgaaagaaaatcggcgctttgcaggaactcaaagtggagcaagctaaaatg

SEQ ID NO: 30489 - DNA, 207 bp, Glycine max
  Clone ID: LIB3138-046-Q1-N1-B11
ggaaattgatagagaaataaaagcttcacttacagatatgattagcaacagagagaaagcactaaaggcgggtgaggctaccgagaatgacttgttaggtatacttttggagtcaaatcacaaggaaactgaagaacatggaaacagtaagaatgttggaatgagtcttgaagatgtaatcgaggaatgcaagctattctacttcgc

SEQ ID NO: 30490 - DNA, 310 bp, Glycine max
  Clone ID: LIB3138-046-Q1-N1-B12
gattcctcctaccatcctaataaccttaacaacaacgcttttggaggcttcaacaagggaatctattccaacaccacatcctcaccctatcttaacaacaaccaccaccacctcgacgacaacaacaacctcaacagaaataatctcaagggctacaagacatattttaagggtgaagatcagtttcacacacccaaaagtgccaagaagaagaacaccaccaacaacaccaacaacaagaagcatggggacaacactaataataatgatggcacaaagactggtgcttggaaaaaattcaaaacacttt

SEQ ID NO: 30491 - DNA, 395 bp, Glycine max
  Clone ID: LIB3138-046-Q1-N1-B2
ctcaaacattgtttgttgtaggaagaggaatcttgagaaatggcaggggacagcaagagcaagattctgttcatcggagggactggttacatcggaaaattcatcgtggaagccagcgccaaagctggccacccaactttccttttggtgagggagtccactctctccaaccccgcaaaatcacccctcatcgacaatttcaaaggcctcggtgtcaatcttgttttaggagatctatacgatcaccaaagtttggtgagtgctataaagcaagtcgatgtggtaatttctactgtaggacacctgcagctagctgatcaagataagatcatttctgcaattaaagaagcaggaaatgttaagaagttctatccatctgagtttggaaatgatgt

SEQ ID NO: 30492 - DNA, 413 bp, Glycine max
  Clone ID: LIB3138-046-Q1-N1-B3
agattactgagtaagggcaatgatattctgtgttgcgattatgctagttttgatggtttgattaccaagcaagttatgagcaagatggcagaaatgataaacagtctttgtggtggtgatgaaaaattgatgcgtgaaaggacgcacctgctgttggcttgttgttcaaggatggcaatttgtaagaaagatgtttggagagttgaatgtggaatcccttctggatttccgctcacagttatttgcaatagcatttttaatgagatgctcattagatatagctatgaaaaattactgcgccaggctaaagctccaagtatgtttttacaatccttcaaaaattttgcttctttgtgtgtgtatggggatgataacttaattagtgttcatgaataatgtaaagcctactttaa

SEQ ID NO: 30493 - DNA, 400 bp, Glycine max
  Clone ID: LIB3138-046-Q1-N1-B4
gcaaaaagctgatgtgcctaccatagcacagattgaagagttccattcgatgcataggatgatgaatgctcctgattcaaatgataatattgatttactgttgagcattgatttgttgggtttacaaggagcaggtaaagcttttccaaacaaaattgtttttgatgataagcttgtgttggctaacacacaagaattctttgatggaaattttccagtggattcttggttaccaatttttgtgaattgtctttatcctgtaagtcaattaccttcagaagctgtcgttgtaaatgttacatgtggtagtggacgtggtggtttacccaccactgcttggattagttctgcagttaacaatcgcttcttagatattaacaaaaggattcgcacagtactt

SEQ ID NO: 30494 - DNA, 394 bp, Glycine max
  Clone ID: LIB3138-046-Q1-N1-B5
ctcttcatctgtctctacccttatacgcaactttgcttcttttctattgagctttcaaatattctcacggcttgctatagtagttgcaccctccaaacacaaactgattcccttgtcttttcatctaattgcttggtctgtaatggacgcgctttaactttacgcacggaaactgataaggttcacgtacttgtaagagaacatactgtaaaactaaaaggaaaaaatggccttagatcacttcgaggagagtgtgcaccaaaaaggaaattggaaatcttccagtgaaatcattgcagattctggtagaaatgcctctggtagctttgactgcaacatctgcctggagtgtgttcaagatccagtggtgacactttgtggtcatgtttattgc

SEQ ID NO: 30495 - DNA, 397 bp, Glycine max
  Clone ID: LIB3138-046-Q1-N1-B7
gaggaagtgaatagatggggttgcttgaagcagacaggggtgagtctcaggtacatgatggaattcgggtccaaacccactaacaagaatttgctgatctctgcccagtttcttcacaaggaacttgccatcagaattgccagaagggccgttgaacttgagaatcttccctatggtttgtctcaaaaacctgctgttctgaaggttagggattggtatgtggattctttccgtgatgtcagagccttccctgacatcaagaatgtgaatgatgaaagagagttcactgaaatgattaaggccatcaaagtgaggcacaacaatgtggtacccacaatggccatgggaattcagcaattgaagaaaggtatggatccaaagattgtttatgaagatc

SEQ ID NO: 30496 - DNA, 384 bp, Glycine max
  Clone ID: LIB3138-046-Q1-N1-B8
ggcagcgattgatggttggtcacaccaccgaagaaggcttcaggaatctacatagctttttcctcagagcgttgaaaattcccacactcgctcgcttccccaaaatttcacccctttcattcaattcttccctcttctctgctactgatccatccctcgttttctccgaacaatggctgctggtgtcactgtcaagtccgaggttctagaatcttctcctcctgaaggagtttgttccaacacggtggaaaaccacctggtccagaccaatttgtctgatgggtcacccaacaagtctgtgccagcatctggacttgatgcagtgattcctagtgcaaatcagcttaccatcttctataatgggagtgtttgtgtctatgatgg

SEQ ID NO: 30497 - DNA, 390 bp, Glycine max
  Clone ID: LIB3138-046-Q1-N1-B9
ggaggaccacaacctctttcttggtcagtgaggatgaaagtagccattggtgctgccagaggactttcttttcttcataatgccaaatcacaagttatataccgtgattttaaagcatccaatatcctactagacgcagagttcaatgctaaactctctgattttggcttagcaaaggctggccctacgggtgatagaactcatgtctctactcaagtcatgggaactcaaggatacgcagcacctgaatatgttgcaacaggtcggctgacagctaaaagtgatgtatacagctttggggttgtgttgcttgaactattgtccggtagacgtgccgttgacagatcaaaagccggtgaaaagcagaatctagtagaatgggcaaaagca

SEQ ID NO: 30498 - DNA, 366 bp, Glycine max
  unsure at all n locations
  Clone ID: LIB3138-046-Q1-N1-C11
acagtacagagcattttgatgcatgtaagtggacaaaatcagaaccacattcctgggaattgatcttcccaatagaggtatgtggtcctaataatggttttgaaatgtggagttctgagtgggcaaatcaaacttcatggcatttgagtttccttattgacaatcccaaacagtctacagtttttgatattctcttgggaatctctcaagattttgaaattgctggtaatactcttatgccagctttttctgttccacaggctactgccagatcttctgaaaatgcggaatcctctgcatgatctggaatttgtgttttctttcgcttgttcgtttgtttaattcaataaaggaaattangcatga

SEQ ID NO: 30499 - DNA, 386 bp, Glycine max
  unsure at all n locations
  Clone ID: LIB3138-046-Q1-N1-C12
gcgtagaggctcagatctacggtaccgaggtacaacagagaatcgatgacaagaacgcagatccgacggtagatccagccgattccgcttgttcgatcgctacagacccctgtatcggatcattaagcagcgtgtctcgcgcgttctacacgtgttgccgatctcggatgttgtaaaattagtttatgatgtgaagctatggagtggaaaatatgtggatgtaggagatttcgggatgaatggcctcaaaacgctttgtcgtttgtggttattgagtcctgagtgatcttgtcatccgacctttgccatgacaggtgcgcttgcatggcangtcaaaaaatgttaataaaaaaaagtttattggtttggggagagatcgcacgggg

SEQ ID NO: 30500 - DNA, 316 bp, Glycine max
  Clone ID: LIB3138-046-Q1-N1-C2
agcttgttgacaccttccccggccaatctattgatttctttggtgcactcagggctagagtatatgatgatgaggtgaggaagtggatttctgctgttggtgttgacttcattgggcagaaactatgctactgcaaggaaggacctccaacctttgaccaaccgaagatgactttgagcaagctcttggagtatggtaacatgcttgtccaataacaagagaatgtgaagagagtacaactggcagacaagtacttgaaagacgctgctcttggtgatgctaatcaagattccatcaacagaagaactttctatgg

SEQ ID NO: 30501 - DNA, 405 bp, Glycine max
  Clone ID: LIB3138-046-Q1-N1-C3
gctgcctgtaagatttgcaatggacagggctggattagttggagcagatggtcccacacattgtggttcttttgatgtcacatttatggcatgcctgcctaacatggtggtgatggctccttctgatgaagccgaccttttccacatggttgccaccgcagcagccattaatgatcgacctagttgttttcgatacccaaggggaaatggcattggtgttcagctaccaactggaaataaaggaactcctcttgagattgggaaaggtaggatattgattgaaggggaaagagtggctctcttgggctatggatcagctgttcagaactgtttggctgcagcttccttagtggaatgtcatggcttgcgcttaacaattgctgatgcacgtttctgcaaaccact

SEQ ID NO: 30502 - DNA, 414 bp, Glycine max
  Clone ID: LIB3138-046-Q1-N1-C4
ctttcagctgaacttcgggttgattcagcaagggattttgatggtgaaattcagagggacactgaggaatcgtctttatcatatacagaagctagaattagctccagtcgccctgctgaaactgcaaccctatctgatatgagaactgagttccatgggaatactagtgttgaaggttcttctagaaacgttgcaacaaatagtcagaggaactgcttgtctgaacatgaggagcttgtccctccttatcaggtaagtgctggtcatactggtcatgaatcatatagtgatagtagcaacacagctagtacttcatttgtagaacagcagtcttcagatccagtctctgtaaatgtttctgctaacaaggatttagtcaatgatgttaataatccagtggttagtgatgtcttt

SEQ ID NO: 30503 - DNA, 266 bp, Glycine max
  Clone ID: LIB3138-046-Q1-N1-C5
gtttcgattaagcatccatgaagcacaggaagggagaaaagagagtgtttcattaggtgatacccatggtcttactggcatgcaattcagcaagatcagttttcctgatccatgctggtggaccaccacatatttttgatacgatgactgaagcctatatatgtactaatgcagaaagtcttgatcgatacgttgcaacgtatagatgcatgtgctgttaaggctgtaaataccagatttgttaatcagtatattgtagaacctat

SEQ ID NO: 30504 - DNA, 75 bp, Glycine max
  Clone ID: LIB3138-046-Q1-N1-C6
ctcgagccggcctatttgaaaatttccacacctcttttaattgtcgtaatgatgtgtgaagtgtgtgttattttt

SEQ ID NO: 30505 - DNA, 168 bp, Glycine max
  Clone ID: LIB3138-046-Q1-N1-C7
cactctcacaggaactgatgttgggtacccaggtggtctcagggttgacccactaagctctagaagcggttattctgatacgaccacggagttgataacaactgcgatcactagtgggctgttgctcatgtttgatgggaccgggacatatgtccagcgcatttacac

SEQ ID NO: 30506 - DNA, 299 bp, Glycine max
  Clone ID: LIB3138-046-Q1-N1-D1
tctaagtccgacaagaacccatcccctcctgatgggattgacaaaactagcgctacttactcttctaccaagctgggaagtagacatccctcacattcaccacagcagcacacacatacgaagacagccttgcttgtctccactcaaaacctttcaagctggcgctcgaaaaccaagacagccctgttcgagaaatgcagcacacttatcggggcaacatgggagctggaggcccagattatgatgtccacaacacgtaggcagcgtggctgaagcctatgctaaaagaaagtttcttt

SEQ ID NO: 30507 - DNA, 374 bp, Glycine max
  Clone ID: LIB3138-046-Q1-N1-D10
tgctgccaaccaaggagaccgtgccactaacgtaatcaggggcacaaagaaagaacaagttcaacaaatcatcaaagacattaaggagttcaaagaaagcactaaggttgacaaggtggttgtcctgtggacagccaacacagagaggtacagcaacgtagttgtgggactaaacgacaccatggaaaacctctttgcttccttggacaggaatgaggctgagatttccccttccaccttgtatgccattgcttgtgttatggaaaatgttcctttcatcaatggaagccctcagaacacctttgtcccaggactcattgatctggccatcaaaaagaatagtttgattggaggagatgactttaagagtggtc

SEQ ID NO: 30508 - DNA, 366 bp, Glycine max
  Clone ID: LIB3138-046-Q1-N1-D11
ccataaacgggtggtgcctctcttacatattcccagccaaaacctatatcaggaaggccacattgcgcccttccgacttcgcaacccataacactccttcatcttcttcctatacatgttccttgccctatctcattcaagacaggcactgtttttgctgcctctgcccccatcatcaccccaactgtgagagaggatatggcataggaatacgagaaagctattgaagaacttcagaaattgttgagggagaagagtgaactcaaagcgacagctgctgaaaaagtggcacagataacagcttctatagggacatcatcatctgatggcatgccatcatcagaagcctgagacaggatcaaagct

SEQ ID NO: 30509 - DNA, 115 bp, Glycine max
  Clone ID: LIB3138-046-Q1-N1-D12
gttaactaagttggtggccatgaatgtgggaagccttacttaagtggttctaaattgaagagctttctagctagtcatagcatcaccattactgatggtattgacaaaactagtg

SEQ ID NO: 30510 - DNA, 396 bp, Glycine max
  Clone ID: LIB3138-046-Q1-N1-D2
aaacagcagagagaagagaagggctacacaaacacaatctctaatggcactcaggatgtgggcttcttccactgccaatgcactcaaactctcttctgtctccagacctcatctcttgcctcctttttctttctccagatgcttatcttccgtcttggatggacttaagtacgctgattcacatgaatgggtcaagcacgaaggctcagtcgccaccattggtatcactgaccatgcccaggaccatcttggagaggttgtgtatgtggagctgccagaaccaggtggcacagtttccaagaagtctggcttcggagccgttgaaagtgttaaagcaacaagtgatataaactctccaatctcgggggagatcgttgaggttaacaaaaagctcac

SEQ ID NO: 30511 - DNA, 371 bp, Glycine max
  Clone ID: LIB3138-046-Q1-N1-D3
gagatttagaaaaggcacaacttggtctggggcatagttacagcagagcaaaggtgaagtttaatgttaaccgtgttgacaacatggttattcaagctatcttccttcttgatacacttgacaaggatgttaattcgttctccatgagagtcagagagtggtattcatggcactttcctgagctggtgaaaattgtaaatgataattatctgtatgccaaagttgcaaaatttattgaggataaggcaaagttggctgaagacaagattccagccttaactgacatagttggagatgaagataaagcaaaggagattgtggaagctgccaaagcctccatgggacaggatttgtccccagtggacttgatc

SEQ ID NO: 30512 - DNA, 98 bp, Glycine max
  Clone ID: LIB3138-046-Q1-N1-D4
tgagaaacagaaccatcatttttcttttaaacttgtactgagaaacagaaccatggattttctctgccttctcattgtgcaataaaattcttaccttg

SEQ ID NO: 30513 - DNA, 304 bp, Glycine max
  Clone ID: LIB3138-046-Q1-N1-D5
gggctatcgatctggtgcttatgctccaatacgtgttaaggaaaagccttactggatcataaagagttcatggagggagagctggggagatgaccgttatttcaggatctgcagaggtcgcaatgtatgtggggtggactcgatggtctcaactgtagctgctatacatgtttctaaccattaaatataacgatggatgcctaaacatggtaggggcaccagtatagtgcgtatgtaaataatatacatgatgcataatgatatggaggaagaaactgcttatcccatgtctatgcttttatgc

SEQ ID NO: 30514 - DNA, 401 bp, Glycine max
  unsure at all n locations
  Clone ID: LIB3138-046-Q1-N1-D6
ctttgctttcgccccatcttctccgccgttaccggtaatcgccgccgccaagctcgccggaatctctccctcgattgatacctctctctctcctgactcacctcccgcatttatcttctccgatgggctcaagttgcatggagcatatgctcttctacgttatatcggccgagttgccagccttcccaatttctatgggcaaaatgcattagaatctagccagattgatgaatggctggactatgctcctatcctctcatctggccctgcttttgagaatgcatgcaaatatatagatgagtacctggagaagtgtacttttttggttggttattcattgtcaattgcagacctagcaatctgggcaggtcttgcangttcttgaaagagatgggaaagtc

SEQ ID NO: 30515 - DNA, 229 bp, Glycine max
  Clone ID: LIB3138-046-Q1-N1-D7
gtcgtaacattatcatggctggtgcggtttgaacaaaatgggcaaacttgataagctagtggggagtaacacacactacttgttatggggagatttggccaatgatttatggtttccgggttgtgccaatcggcaatgccatgttactggatcaccttgattaactgctcggcgaaatattagcaatgggagaggactgattggctgactttgcagtggtgatgaaaaa

SEQ ID NO: 30516 - DNA, 113 bp, Glycine max
  Clone ID: LIB3138-046-Q1-N1-D8
ctttttctctctctttgccctttgaaagatgcacttcacttctctcttttggcaaagaccagcatccttaattcttcaaaattcttttactatgtaacaccccccccccccca

SEQ ID NO: 30517 - DNA, 396 bp, Glycine max
  Clone ID: LIB3138-046-Q1-N1-D9
gccagttctgatatttacaccatctgctctcaagactgtgaattgtggaatcctgcttgcacaaaagcaatgactatgtcatttaatccaaacccgtgttctgatgcatggagtttggaatttctgaagcgtactggatttcattgcgatatcatttgtgtcactggatggactgccaccccaatgcaggatgttcaggttacaattgattggtttatttcctctcaggaatgtgttcccaggacctattgtgttttaaatccacaaaatccttttgtgttaaataggtggatgggaaaattgactttcccccagggcacttcccgaagtgttaagagaatgcctctttctatagggggaggagctggtgcaaaagatgctattctcatgaatatg

SEQ ID NO: 30518 - DNA, 395 bp, Glycine max
  Clone ID: LIB3138-046-Q1-N1-E12
gcccaaacccttggcggctgcgagacccgttgggttctctcttctctctctttttttttctctttccctctcttcttcgccgctctttttagggttttctcaactcttcgatttggggcttaaaccctcgcttccgattcagattcggatttagggcttccgtttctcgattctgcctcccaagaaaaaccagatctcgtgattgattattcatcatggccactgttgctagtcccgcggatcaagcaactgatttgctgcagaagctatcgttggaaactcagcccaagcccttggagattcctgagccaaccaagaaggccactgggaatcagtatggatcagttgattcaggaaatgctgcgaatggccagatcccatcgtatgatcggtct

SEQ ID NO: 30519 - DNA, 379 bp, Glycine max
  Clone ID: LIB3138-046-Q1-N1-E2
tctggaacaagtcgagatgtaaaaggacaacttacttcccaagctggtatagtagaaagcttggatgtcttggttaaggagtttgtagctgccagcgatgaagagaagaaattcgtgtttacccgaatggaagaggaagttgagaagctgaagggttctgcctcaaggcacgggaagatttacttgaaagctgccaagaattacttggaaaaaggttctgattatgctaagaacgaaatccagcgcctacagcgcatacttgacaagtccattagtcctgccaaggccgacgagttaactctaaagaaaaatatcttgtcgacatatgcggcttgacttttttgtgcatcattaaccatctctcatggaagctcgtgat

SEQ ID NO: 30520 - DNA, 393 bp, Glycine max
  Clone ID: LIB3138-046-Q1-N1-E3
tttgtatttagctaccctcagtgagggtgtagtttaccccttcatcatcttttctgttttttttcaaagaaaagtaagaagggattggtagtagtcttttgcagtatctgcttcagtttttaggattaatccatgtcactccacctactagtaaacccctgatatgtttcattccgagtaatgcttatttccttagtcctagacctagttctctcctggcttatcttccattttcatggggtgtgttgaccgttctatgccaaattttaagggtggcaaaactttatgaagtttgtttggatcgtgacttgtgagatgtggtcagttgcaactcagtttttctccctaatgtcccgtgtggctcataaatttgtctgtgtttctttctttctg

SEQ ID NO: 30521 - DNA, 318 bp, Glycine max
  Clone ID: LIB3138-046-Q1-N1-E4
ctcctcttccccgatcgattgcgttctagctaagcgatttttgttaatgcttctgacaatgataatatatgtgttttctgattgagaaatcaaatcacgatggatattagatttttgtgtgccatgctcgtttgtttcatgcttacttgtttgttttcaatacttgccaccttccctgttatataggatttccttttctacaatcaattttttttttctgcttgtgttgtcagttttctacaatgggaaggaaaaagacagaagatgctggcccatctgcgaaagtaaaggctggtagcaaagatcctcctaagaagg

SEQ ID NO: 30522 - DNA, 323 bp, Glycine max
  Clone ID: LIB3138-046-Q1-N1-E5
cttctcttccccgatcgattgcgttctagctaagcgattcttgtgtgatgcttctggcaatgataatatatgtgttttctgattgagaaatcaaatcacgatggatattagatttttgtgtgccatgcttgtttgtttcatgcttacttgtttgttttcaatacttgccaccttccctgttatataagatttccttttctacaatcaattttttttttctgcttgtgtttgcagttttctacaatgtgaaggaaaatgacagatgatgcttgtccattttccatggttaaagcttggtagcaaatgattctttcttagaagcg

SEQ ID NO: 30523 - DNA, 363 bp, Glycine max
  Clone ID: LIB3138-046-Q1-N1-E6
tctttctctctctaccattgccatggatccctacaagcaccggccatccagcgccttcaattctcccttctggactacaaacatctggtgctcctatttggaacaacaactcctctttaaccgttggagctagaggtccaattctgctggaggattatcatcttgtggagaagcttgcaaattttgatagggaacgtatcccagaacgtgttgtccatgccaggggcgctagtgcaaagggtttctttgaggtcacccatgacatttctcacctgacatgtgcagatttccttcgagcccctggagttcagacgcctgtaattgttcgtttctcaactgtcattcatgagcgtggtagccctg

SEQ ID NO: 30524 - DNA, 151 bp, Glycine max
  Clone ID: LIB3138-046-Q1-N1-E8
ctcgagccgaatcggctcgaggctattctcatgaatatgctaaatgctggtctttcaatgtggagatattttggtggagatctcgtctttgaaggttctaagaagacctcttcctacattaaatgtaccggctctttctttatagcatttg

SEQ ID NO: 30525 - DNA, 175 bp, Glycine max
  Clone ID: LIB3138-046-Q1-N1-E9
tttcgatttagctaccctcaatgagggtgtactctacccctccggcagcttttctgatttttaccaaacaaaattaataagggatcggcacttttcctttgctattatctgcttcattttttaggattaatccatgtcactccacctactaattaacccctgtatatcttcattc

SEQ ID NO: 30526 - DNA, 362 bp, Glycine max
  Clone ID: LIB3138-046-Q1-N1-F1
gatggaccacacacatagaaccccaccaccaagaatgaagaagatgattctaaccctcttcttcaatatcattttatctctcctctccctctcccacgcctccgtggtggatttctgcgtagcagactacacaggccccaatggccccgcagggtactcatgcaagagcccagcaaaggtcacggtggacgacttcgtctactccggccttggcaccgccggcaacacctcaaacatcatcaaagccgcggtgacgccggcgttcgacgcgcaattccccggcgtcaacgggcttggaatctccattgcacgcctagacctagcagccggtggagtcatccctcttcacacgcaccctggtg

SEQ ID NO: 30527 - DNA, 400 bp, Glycine max
  Clone ID: LIB3138-046-Q1-N1-F10
ctggatggcacccgaggttgtaatgaatacaaatggctatagtcttcctgttgatatatggagtttgggatgcacaattcttgaaatggcaacatcaaagcctccttggaatcagtatgaaggggtagctgcaatatttaaaattggtaacagcagagatatgcctgaaattccggatcacctctcaagtgaggcaaagaatttcattcagctatgcttacaaagagatccatcagcccgcccaacagcccagaagttaatagagcatccctttattcgagatcagtcagcaacaaaagctacaaatgtcagaataaccagggatgctttcccctacatgtttgatggaagtcggacgcctccgccagttttagatcattccaatagaacaagtttaact

SEQ ID NO: 30528 - DNA, 347 bp, Glycine max
  Clone ID: LIB3138-046-Q1-N1-F11
ggcaattttagagcaagtgttgatttgcagcgcactcatcgtattagaggaatgattaaaatggtggccacagttggtattcctgagaatacaggtatatcattggcctgtgctatgaatagttcttttagggggcgcgccagttctgatatttacaccatctgctctcaagactgtgaattgtggaatcctgcttgcacaaaagcaatgactatgtcatttaatccaaacccgtgttctgatgcatggagtttggaatttctgaagcgtactggatttcattgcgatatcatttgtgtcactggatggactgccaccccaatgcaggatgttcaggttacaattga

SEQ ID NO: 30529 - DNA, 380 bp, Glycine max
  Clone ID: LIB3138-046-Q1-N1-F12
aaaatttagaaacaaaaacatgttggtgaaggtgtacggtccaacctatggagcccccaagagggtgctggtgtgtctgattgagaaggaaattgagtttgaaacagtacatattgatctcttcaagggagagaataaggaacctgagttcctaaagctgcaggttcaattttaactttatttgctctatcacacactgtttgcttcactttgtttccatttttttttataatatgttttcatgttcaattacacttgtgtctaataaatctgcagccatttggatcacttcctgttattcaagatggtgattatactctctatgaatctcgtgcaataatcagatactttgcagagaagtataaagaccaaaggacaga

SEQ ID NO: 30530 - DNA, 257 bp, Glycine max
  Clone ID: LIB3138-046-Q1-N1-F2
agaataccccctcttttgctgcatcacaggagttgtgcatcaagagcatggctgcacacgctcttgtatcatcatcttctcttaccttctcagcggatgctgctagacaaagtcttggaccaagatcactccaatctccatgtggcttattcagaagagcctgcttacttgttaaggcagctgctaccccccctgtcaagcaaggatcacacacacctttgtggattgcatcaaagcagagtgtttcttacttggat

SEQ ID NO: 30531 - DNA, 382 bp, Glycine max
  Clone ID: LIB3138-046-Q1-N1-F3
gttgagaagcattatggaattcatattgagtacatgttccctgatgcggttgaggttcaggcattagtaagaactaaggggctcttctcattttacgaggatgggcatcaagagtgctgtagagtaagaaaggtgaggcccttgaggagagcccttaagggtctcaaagcatggattactggacagagaaaagaccagtctcctggtactaggtctgaaatccctattgtccaggttgatcctgtttttgagggactggatggtggaattggcagcctggtgaagtggaacccggttgcaaatgttaatggtctagacatatggaacttccttaggaccatgaatgttcctgtaaattcattgcattcccaaagatatgttt

SEQ ID NO: 30532 - DNA, 413 bp, Glycine max
  Clone ID: LIB3138-046-Q1-N1-F4
gttgaagaggcttacaacaagctaatagttgaacttgagaaaagtgttcctacatgggttggcattgaatgtcccaaggatgagaaacttcctcgtcgcaaaatttttgacaaacctaagacgcgctgcttcactattctccctatggagtttaatcttgtggtccgtcaaaagtttttaaattttgtgaggttcattatgaagaaaagggacaaacttagttgtcaagttggaatcaacccatactccatggaatggactggtttggccaatagattactgagtaagggcaatgatattctgtgttgcgattatgctagttttgatggtttgattaccaagcaagttatgagcaagatggcagaaatgataaacagtctttgtggtggtgatgaaaaattgatgcgtgaaag

SEQ ID NO: 30533 - DNA, 170 bp, Glycine max
  Clone ID: LIB3138-046-Q1-N1-F5
cccagttacattcacaccatggattgcatggtacttatcgaacgtgctcgtatacaggaccgcattgagcgcactactgatagggatcgaggtgggcctggaccatggctaccttctggtgcgcccagttgtgatagcctggcctgtgaggaacaccgagatcgccgggc

SEQ ID NO: 30534 - DNA, 390 bp, Glycine max
  Clone ID: LIB3138-046-Q1-N1-F6
gtcacaacttcattatgtttcgtgtaataatctggaaatgcaagaagcttatcttgtcaatctcgtaaatgtgttacgagaattgtatttgcacagtccagaggaagctcgccaattgagaaggaaagctctctctcgtattgaatggctgcaaaaagctgatgtgcctaccatagcacagattgaagagttccattcgatgcagaggatgatgaatgctcctgattcaaatgataatattgatttactgttgagcattgatttgttgggtttacaaggagcaggtaaagcttttccaaacaaaattgtttttgatgataagcttgtgttggctaacacacaagaattctttgatggaaattttccagtggattcttggttaccaatttt

SEQ ID NO: 30535 - DNA, 400 bp, Glycine max
  Clone ID: LIB3138-046-Q1-N1-F7
gcaaaagcttagtggcatatcatgaagttgggcatgctatttgtggaactttgactcctggtcatgatcctgtacaaaaagtaaccttagttcctcgcgggcaagctcgtggtcttacttggttcattcctgctgatgacccaactctgatctctaaacaacaactctttgcaagaattgttggtggactaggtggcagagcagcagaggaagttatttttggtgagtctgaggttacaactggagcagtcggtgatttgcagcaaataaccagtttggccaagcagatggtaaccacatttggaatgtctgatattggtccttggtcactcgtggactcatcagctcaaagtgatgttatcatgagaatgatggcaagaaactcaatgtcagaaaaagc

SEQ ID NO: 30536 - DNA, 370 bp, Glycine max
  Clone ID: LIB3138-046-Q1-N1-F8
cctgcaacaactctgttggctgatgggtgtccatatttgtatgcaatggtgcatgatagttcagtgtctacaataccaggtgattttgtcattggtgtcaagttgacaaccataaacaatatgtgtgcatatgggctcaatcctggtatttcaggttctcgtcttttgggcaccattcctcagtccatttcacagcaaactgtttggaatcaaatggcaacagtgagaacaccattgaattttgattctagcaagcagagcttttgtcagttttctattgaccttctcggtggaggaatcttagtggacaaaactggagattggatcacacttatacaaaattcttcaattagtaacttgttgagagttg

SEQ ID NO: 30537 - DNA, 395 bp, Glycine max
  Clone ID: LIB3138-046-Q1-N1-G1
atgataaacagtctttgtggtggtgatgaaaaattgatgcgtgaaaggacgcacctgctgttggcttgttgttcaaggatggcaatttgtaagaaagatgtttggagagttgaatgtggaatcccttctggatttccgctcacagttatttgcaatagcatttttaatgagatgctcattagatatagctatgaaaaattactgcgccaggctaaagctccaagtatgtttttacaatccttcaaaaattttgtttctttgtgtgtgtatggtgatgataacttaattagtgttcatgaatatgtcaagccttactttagtggttctaaattgaaaagctttctagctagtcataacatcaccattactgatggtattgacaaaactagtgcaac

SEQ ID NO: 30538 - DNA, 261 bp, Glycine max
  unsure at all n locations
  Clone ID: LIB3138-046-Q1-N1-G10
cttctcttccctttcaacttcaactcaacaacccttcccttctcaaactcattcttgcctttctttttgttcatacttttatttttattgctacttactttttatttctatccaatcatccatggccgaggaaccccaaaaaccagcctccgctgaagaagtggtgcctgttcctgcggacacgccaccaactacccaatctgaagctgaagctgaagttgaagcaaatgcagaaagcatcgaanaagtggtggcggaagc

SEQ ID NO: 30539 - DNA, 389 bp, Glycine max
  Clone ID: LIB3138-046-Q1-N1-G11
ttttgtcattggtgtcaagttgacaaccataaacaatatgtgtgcatgggctcaatcctggtatttcaggaactcgtcttttgggcaccattcctcagtccatttcacagcaaactgtttggaatcaaatggcaacagtgagaacaccattgaattttgattctagcaagcagagcttttgtcagttttctattgaccttctcggtggaggaatcttagtggacaaaactggagattggatcacacttatacaaaattctccaattagtaacttattgagagttgctgcttggaagaaaagctgtttaatggtcaagattgtgatgtctgggaatgcagcagtcaaaaggagtgattgggcctcattggtacaagtgtttttaacaaac

SEQ ID NO: 30540 - DNA, 396 bp, Glycine max
  Clone ID: LIB3138-046-Q1-N1-G12
ggatttcattgcgatatcatttgtgtcactggatggactgccaccccaatgcaggatgttcaggttacaattgattggtttatttcctctcaggaatgtgttcccaggacctattgtgttttaaatccacaaaatccttttgtgttaaataggtggatgggaaaattgactttcccccagggcacttcccgaagtgttaagagaatgcctctttctatagggggaggagctggtgcaaagaatgctattctcatgaatatgccaaatgctgttctttcaatgtggagatattttgttggagatctcgtctttgaagtttctaagatgacttctccctacattaaatgtacagtctctttcttcatagcatttggaaatttggctgatgataccatc

SEQ ID NO: 30541 - DNA, 381 bp, Glycine max
  Clone ID: LIB3138-046-Q1-N1-G2
attttgttggagatctcgtctttgaagtttctaagatgacttctccctacattaaatgtacagtctctttcttcatagcatttggaaatttggctgatgataccatcaattttgaggcttttccccacaagctggtgcagtttggagagattcaggaaaaagttgtattgaaattttcacaagaggaatttcttacagcttggtcaactcaggtgcgtcctgcaacaactctgttggctgatgggtgtccatatttgtatgcaatggtgcatgatagttcagtgtctacaataccaggtgattttgtcattggtgtcaagttgacaaccataaacaatatgtgtgcatatgggctcaatcctggtatttcaggttctcgtc

SEQ ID NO: 30542 - DNA, 230 bp, Glycine max
  Clone ID: LIB3138-046-Q1-N1-G3
cgaaggttccaacatttttttgttttacaaggcttccaaccggcgggggtatcgcgcctattaactttttggcaaaggccatcaaccctttcagcggggggtcctttgtcgtttcccacgacttccgtctcctcgacaagattgccaaggacattatggtctgcgagcacaagacttgccgcaggtgggacggttctatcggcgagtacaagaaccacctccgcaagaag

SEQ ID NO: 30543 - DNA, 371 bp, Glycine max
  Clone ID: LIB3138-046-Q1-N1-G6
atgggctcaatcctggtatttcaggttctcgtcttttgggcaccattcctcagtgcatttcacagcaaactgtttggaatcaaatggcaacagtgagaacaccattgaattttgattctagcaagcagagcttttgtcagttttctattgaccttctcggtggaggaatcttagtggacaaaactggagattggatcacacttatacaaaattctccgatgaatcacattggacagagctgtagattggatcacagttatttaatggtcaagattgtgatgtctgggaatgcagcaatcaaaaagagtgatttggcctcattggtacaagtgtttttaacaaacagcaacagtacagagcattttgatgca

SEQ ID NO: 30544 - DNA, 252 bp, Glycine max
  Clone ID: LIB3138-046-Q1-N1-G7
cttgggaatctctcaagattttgaaattgctggtaatactcttatgccagctttttctgttccacaggctactgccagatcttctgaaaatgcggaatcctctgcatgatctggaatttgtgttttctttcgcttgttcgtttgtttaattcaataaaggaaattaggcatgaccctcttgttgagtatgctctgcctatttgaaaatttccacacctcttttaattgtcgtaatgatgtgtgaagtgtgtt

SEQ ID NO: 30545 - DNA, 394 bp, Glycine max
  unsure at all n locations
  Clone ID: LIB3138-046-Q1-N1-G8
cccggatgaccgtgtggagtatgaattgtggaccaacagcaatgacgagtgtggagttaaatgtgatatgttgatggaatttgtgaaagattttaaaggtgcagcacagatattggagaaaggtggttatactcaattcacaccccattatataacttggtactgtcctcaggcattcacaatgagcaaacagtgcaagtcccagtgcataaatcatggaagatattgtgctccggatcctgagcaagatttcagcactggttatgatgggaaagatgtggttattgaaaatttaaggcagctatgtgttttcaaggtggcaaatgaaaccaaaaagcctggggtgtggtgggactatgtcactgatnttcaaattagatgcccaatgaaggag

SEQ ID NO: 30546 - DNA, 96 bp, Glycine max
  Clone ID: LIB3138-046-Q1-N1-H1
caattctcccaacattttattttttctcaagccaaccaacagtcgcgatattagggatatttactcatactcccatgccataaacactttcagcga

SEQ ID NO: 30547 - DNA, 106 bp, Glycine max
  unsure at all n locations
  Clone ID: LIB3138-046-Q1-N1-H10
ggttgtagtgtaatgcttattcaacttttaccatcatgttgaactgtggattgtccagtgtaacaagtaatgctactaattatggcaattaattttgtgcgccnaa

SEQ ID NO: 30548 - DNA, 267 bp, Glycine max
  Clone ID: LIB3138-046-Q1-N1-H11
ctgatattcacccttttgcaccagttgaccaggctcaaggttatcaggaaatgttcaataatttgggtgaactgttgtgcaccatcactgggtttgactccttctccttgcaaccaaatgctggtgctgctggagaatatgccggacttatggttattcgtgcatatcatttggcaaggggagaccaccaccgcaatgtttgcattatacctgtctcagcacatggtacaaatcctgctagtgctgctatgtgtggaatgaaaattg

SEQ ID NO: 30549 - DNA, 372 bp, Glycine max
  Clone ID: LIB3138-046-Q1-N1-H2
gaacaatctgcttcagctgccattatgactgttaattctggcattagaaaaattcttccagattctgagatttgtgactttgactttgagccatgtggttattcaatgaactctgttgaaggtgctgctgtttctaccattcatgttaccccagaagatggtttcagttatgcaagctttgagactgttgggtatgacttcaaagtggtgaatctgaacgaaatggttaagagggtattggcatgttttctcccaactgagttctctgttgcagttcatgtggatggtgcaagcaagttgtttgatcagacgtgttttctggatgttaagggatactgtcgcgaagagaggagccacgaagggcttggaatg

SEQ ID NO: 30550 - DNA, 320 bp, Glycine max
  Clone ID: LIB3138-046-Q1-N1-H4
ggtatgtaataataagtgtattattgtcacagatattggtgtgatgagtggagcagccttgtacataaaaagggacctgaaagtgtcggatgtgcaaatcgagatcctgctcggaatcatcaacctctactctctgataggctcatgcctcgccggcagaacctccgactggataggtcggcgttacacgattgttttcgccggcgccatcttctttgtcggagcacttctcatgggtttctcccccaactattcctttctcatgttcggccgtttcgttgccggcatcggcatcggctacgccctcatgatagcccccg

SEQ ID NO: 30551 - DNA, 369 bp, Glycine max
  Clone ID: LIB3138-046-Q1-N1-H6
gctcagtatcatagtgatctgtgaccaattactgcgccaggctaaagctccaagtatgtttttacaatccttcaaaaattttgtttctttgtgtgtgtatggtgatgataacttaattagtgttcatgaatatgtcaagccttactttagtggttctaaattgaaaagctttctagctagtcataacatcaccattactgatggtattgacaaaactagtgcaactttgcaatttaaaaagttagcagattgtgattttctcaagagaaactttaagcagatgtctaatgttttgtgggtggcttctgaagacaaggcgagtttatggtcacaacttcattatgtttcgtgtaataatctggaaatgca

SEQ ID NO: 30552 - DNA, 331 bp, Glycine max
  Clone ID: LIB3138-046-Q1-N1-H8
ttccagaggactgccactatgaaccagaggatcttgtcaatttatttcttcatgccttatgtaaagggcatcggtaggcaggctaggtagctctcaggtgaatccgcggatgtatcaggcgaacaatgcagtgcctatgaattaattccttcctgggacaatgtgagtgttagcgatgatgatctgactgatctacatagtgtaatggatgtctctacctcacttattgctcagccacgatagatcaatatagttgaagtacagtatgacacaacattcagacaagtcaacgctcatgctctgaaaataacactttgggaccatattcaag

SEQ ID NO: 30553 - DNA, 331 bp, Glycine max
  Clone ID: LIB3138-046-Q1-N1-H9
gtttcggcgtgtgcggtttccgccaccgtcaaccaccttcgcctccgccaaaacgccgtcgtttccttcaggaagaagaagcctctcactctcagagtggtctcaatgtcttccgttcctccttcccaacccttcgaaatcgccgttaaagcttccgtcaccacacccaacaggctcggcgactgccctttttgccaaagggtgctgctgacactggaggaaaaacatctaccttatgaccccaagttggtggatttgaccaacaagccagaatggttccttaaagtcaaccctgatggtaaagttcctgtcataaagtttgatgagaagt

SEQ ID NO: 30554 - DNA, 382 bp, Glycine max
  Clone ID: LIB3138-047-Q1-N1-A10
ctcgagccgaatcggctcgagcaattttgaggcttttccccacaagctggtgcagtttggagagattcaggaaaaagttgtattgaaattttcacaagaggaatttcttacagcttggtcaactcaggtgcgtcctgcaacaactctgttggctgatgggtgtccatatttgtatgcaatggtgcatgatagttcagtgtctacaataccaagtgattttgtcattggtgtcaagttgacaaccataaacaatatgtgtgcatatgggctcaatcctggtatttcaggttctcgtcttttgggcaccattgctcaatccatttcacagcaaactgtttggaatcaaatggccacagtgagaacaccattgaattttgattct

SEQ ID NO: 30555 - DNA, 347 bp, Glycine max
  Clone ID: LIB3138-047-Q1-N1-A11
gcgtctctgaagtttctaagatgactttgtcgtgcattaaatgtacaggctctatcttcatagcatttggaaatttggctgatgaaaccatcaacatggaggcttttccccacaagctgctgcactttggagagatgcacgacaaagttggattgaaaattgtacataaggaatttcttacaggttgggcaactcaggggcgacctgcaccaactctgatggctgaggggtcgccatatttgcctgcaacggtgcatgatcattcagtgtctacaataccatgtgattttgtcatttgtggcaagctgacaaccataaacattatgagtgcatatggacgcaatcct

SEQ ID NO: 30556 - DNA, 369 bp, Glycine max
  Clone ID: LIB3138-047-Q1-N1-A12
agatctgctagttttggcagatcttgtgctcctgggctatatagaaagtttgcacatagagattttcttaagagatgctttaggcagagctctaatgtaagggggttggctcctgacgacatcgcttgtaaatgatcacgaatcaattatgattcaaggcttcatctgtgaaggcgataagctgctatcgatgatctggtccatgtgatacaagactcgtgtctgcacagtccataggtagctcgccaattgagaaggagagctgtctatcgtcaagaatgggtgcaaaacgcagatgtgcctaccatagcacaaattgcagaattacatccaatgcacaagatgatgaatgctcctgatacagactat

SEQ ID NO: 30557 - DNA, 396 bp, Glycine max
  Clone ID: LIB3138-047-Q1-N1-A2
gtcccaattgcatccttttcttcaggccacaacaactccttctactgcctctctctagctagttccttcttcttcttcaaagattctgtactatataaaatcaaaggaagaaaagaggcctaattaagtagctttcagttgtggaatcatcatattgcagcgttgatggggcatttttcatctgcgttcaataggttggcaaagtcttttgcaacgaagaaagggaggagttctgatgaatgtaatggaagagaagcggcggtagcaatggcaaaggaagccaaaagaaatcacttcatgttgcatagctccggcacagttaatgttgatggttctaacaactttgcctcagttttctccaaaaaaggccagaaaggagtcaatcaggattgctgc

SEQ ID NO: 30558 - DNA, 231 bp, Glycine max
  Clone ID: LIB3138-047-Q1-N1-A4
gagtcttgcaattgaagatgaaggcttgcccttctctcttcaactccgaacacacgacatcatcatgcatggctgcctacggcttcactgtcagagctgtcaacagagctcttttgaacctgaatgggactggacctggggcttgagctcccaaatcattcttctttgggagcagcttggacaaagttattggctcaagggtccccaacacaaaagcttcctctggaagct

SEQ ID NO: 30559 - DNA, 390 bp, Glycine max
  Clone ID: LIB3138-047-Q1-N1-A6
attagtctctgactctcggccacgaaaatatagtggcaaagataataaacaaacatactggggcgaatcccatttgcttgcaaaatccacagcaaggtgaaaattgcattggatcacaatgctacaaaagaaggaatcacaagtgttgaatgtgatcatcaagatagtgtgacgttagaatttgaacaggcataaagtggaagtcgctcgaaaggtttgaattcctagacatatggagacatgaagagatcttgaaggattgcattgattgcacaccatctgacactaattgggttgcaagcagaatcgtttttgcacgaacggatcttgttgaagaaggtacattagtcacatcggctacattcagaatgaagaacatgtgtttaattt

SEQ ID NO: 30560 - DNA, 206 bp, Glycine max
  Clone ID: LIB3138-047-Q1-N1-A8
gtcgtaatgatgtgtgaagtgtgtgctatttttaacaaacgagagacaaaacaccagatctggcaaagaataactaatcatccactagggaaaagggtcacatcaacaatgacgacattggacgtgtcaactctgggaagtccacccccactggtaacctgatctacgagcgtcgaggtattgacaagcgtctgaattgatacgtt

SEQ ID NO: 30561 - DNA, 373 bp, Glycine max
  Clone ID: LIB3138-047-Q1-N1-B10
cccaggtattccttcacccaacaatgatgctgcagaaccaagcatagcacaattaaacctggaaactggaattcccatttatgaagcggagcctcttcttctgtttttcatcctcttcaccctgctaggagccattggaggtttaggtgaccgtggaaaatttgtcgatgacgaacctactactggaggtgttattccttcaggcaaaggcttcagggaagcccttgggctcggatcaggtcctttattcggattcacgaaagcgaacgagctatttgtgggaagattggctcaattgggtttcgttttctcattgattggagaaattattactggaaagggagctctagcccaactcaacattgagacgggg

SEQ ID NO: 30562 - DNA, 370 bp, Glycine max
  Clone ID: LIB3138-047-Q1-N1-B11
cattcctcagtccatttcacagcaaactgtttggaatcaaatggcaacagtgagaacaccattgaattttgattctagcaagcagagcttttgtcagttttctattgaccttctcggtggaggaatcttagtggacaaaactggagattggatcacacttatacaaaattctccaattagtaacttgttgagagttgctgcttggaagaaaggctgtttaatggtcaagattgtgatgtctgggaatgcagcagtcaaaaggagtgattgggcctcattggtacaagtgttattaacaaacagctacagtacagagcattttgatgcatgtaagtggacaaaatcagaaccacattcctgggaattgatc

SEQ ID NO: 30563 - DNA, 388 bp, Glycine max
  Clone ID: LIB3138-047-Q1-N1-B12
cggctgcaggtgcgacggctctggtggtgacaaggcgggtcttgctaagcttattggacttgcaggagagacaaatgttcagggtgaagagcaaaagaaattggatgtcctatccaatgatgtcttcatcaaggcattgatcagcagtggacgaacatgcatcttggtgtctgaagaagatgaggaagcaacatttgtggaaccttctaagcgtggaaaatactgtgttgtttttgacccgctggatggttcctctaacattgattgtggtgtttcaattggcacaatctttgggatttatttgataaaagaagaccatgaaccaaccgtagaagatgttttgcaacctgggaagaacatgttggcagctggttattgcatgtatgga

SEQ ID NO: 30564 - DNA, 399 bp, Glycine max
  Clone ID: LIB3138-047-Q1-N1-B2
gatctctttggaagtccaagaagcctactgtgtccaaatctgcaatttgcaagtgaactggtgtagctcaaaatgctcattctccattttgaagttcccattcagtacttttcaatgactttttgtgacaattagtcaacacagtgacggatctagaatcctaagctaggaaggacaatttattaaaaaaataaaatttaataattaatattatgaaaggggtaaaaaattagagtgggtgtcaaatacacaaaattaggggggcagggggtgacggacaaaatttctacactcaacatatttatatgttattttaaaaaaatgagggaatgtagcattaatacattataatgtggatctaccactgagttagcgattcatctagcatcgaacatagct

SEQ ID NO: 30565 - DNA, 369 bp, Glycine max
  unsure at all n locations
  Clone ID: LIB3138-047-Q1-N1-B4
caaccctagtggtttgcaacatattangtgtatataagcattcatgtagaaaactatctcaggtaattaagttgatggacagaaacttgatcaagcatatggacctgcttggaattccgtggttggaaaagactttggatcttgcatcacacatttatgtggaagtaccatattctatcgtgtggagatgatggaatttctgatcttcaaagatgcgaagaatttcacagaaagcagggatgaagctattggcgtgctgcagaaggctagacattgtgattagtaaattccaaaattcttagtgttatagaacaacctaaactctttaatattcctaattaatctaagctaaacatgttcaaattacct

SEQ ID NO: 30566 - DNA, 391 bp, Glycine max
  Clone ID: LIB3138-047-Q1-N1-B5
caagttgacaaccataaacaatatgtgtgcatatgggctcaatcctggtatttcaggttctcgtcttttgggcaccattcctcagtccatttcacagcaaactgtttggaatcaaatggcaacagtgagaacaccattgaattttgattctagcaagcagagcttttgtcagttttctattgaccttctcggtggaggaatcttagtggacaaaactggagattggatcacacttatacaaaattctccaattagtaacttgttgagagttgctgcttggaagaaaggctgtttaatggtcaagattgtgatgtctgggaatgcagcagtcaaaaggagtgattgggcctcattggtacaagtgtttttaacaaacagcaacagtacagag

SEQ ID NO: 30567 - DNA, 391 bp, Glycine max
  Clone ID: LIB3138-047-Q1-N1-B6
ggagaattgacttttccacaaggcactttcctaagtgctaagagaatgcctctctctatagggggaggagctggcgcaaacaaagctaatctcataaatatgccaaatgctgctctttcaatgaggagatattccgttggagatctactctttcaagcttctaagatgacttctccctacattaaatgtacagtctctatcttcatagcatttagaaatttgactgatgacaccatcacttttgaggctattccccacaagctggtgcagttttgatagattcaagaacaagttgtattgaaatattcacaagaggaatttcttacagctcggtcaactcaagtgcgtcctgcaacaactctggtggctgatgggcgtccatatttctatg

SEQ ID NO: 30568 - DNA, 391 bp, Glycine max
  unsure at all n locations
  Clone ID: LIB3138-047-Q1-N1-B8
ctcagaatctgtcaaattcatccaagaaatgggacctacagctgaaagaatcatggaaggaggacatttttctgctcatacaagaacattgattagctcatggaaaaaaatttggtcctatgtatctaaaacttaggtaacatgctcttttctcagtatttgttgggtactcgtttgttgtaccaaactgagtattacatgtttccaatctgcaggctataattggtgacagntctgtttttaattattcaaattactagagagactagacataggaaaaccaccgtcgtggtttggaaattttttgagggatgtgaaacaaatgtacttagaatgtctcaaaattaaaaataaacacaaggagaaaatttactgagagtgatagaagata

SEQ ID NO: 30569 - DNA, 360 bp, Glycine max
  Clone ID: LIB3138-047-Q1-N1-B9
tgaatgtggaatcccttctggatttccgctcacagttatttgcaatagcatttttaatgagatgctcattagatatagctatgaaaaattactgcgccaggctaaagctccaagtatgtttttacaatccttcaaaaattttgtttctttgtgtgtgtatggtgatgataacttaattagtgttcatgaatatgtcaagccttactttagtggttctaaattgaaaagctttctagctagtcataacatcaccattactgatggtattgacaaaactagtgcaactttgcaatttagaaagttagcagattgtgattttctcaagagaaactttaagcagatgtctaatgttttgtgggt

SEQ ID NO: 30570 - DNA, 393 bp, Glycine max
  Clone ID: LIB3138-047-Q1-N1-C1
ctccagtgggttcttcttcttctattacaacaacgtcgtccaagaccatgaccatggccatggccacgatcctgctcctgttcacggtcttcgcggtttcatcggccctagacatgtcgataatctcgtacgacaacgcccacgccgccacgtcgcgcagcgacgaggagctgatgtccatgtacgagcagtggctagtaaagcacggcaaggtgtacaacgcgctcggagagaaggagaagaggttccagatcttcaaggacaacctgcgattcatcgacgaccacaactcccaagaggaccgaacctacaagctcggactgaaccggttcgcggatctcaccaacgaggagtacagggccaagtacttgggaaccaagatcgatcccaacc

SEQ ID NO: 30571 - DNA, 390 bp, Glycine max
  Clone ID: LIB3138-047-Q1-N1-C10
cttccgacaaattttctctctgtcttccgtttcgttcttccaatttcaggcatgaatcgtgcatcggtgttccggtagagcatatgacgagggaggttatcggaactgcgaatcgattgcatgggtttagagaatgccagagcttcgtagtggtgtgcgacgggggcgtggccgtggccagaaagcattggaacctgcaaggaaggaggtgaaggctcgtgcggcgccgagagggagacccaagactcgattggcggcgaacgaattggagcttcaagagccgttgatcccgataccaccgacaccgataccggaaccgttgatcccgatactggagccggcgaaagaagagaaaaaggaagttggtgtgggcgcgaatatgggtgacca

SEQ ID NO: 30572 - DNA, 323 bp, Glycine max
  Clone ID: LIB3138-047-Q1-N1-C11
ctcgagccgctactgcacacactctctctctctctctcattggatggccgccaattcgagtagccgagggatcaccgccttggggaagcgagtcgccaaccagatctggacttccaaccccccctcagctcctctcacttccaggaggggagcaatagcagctgcatacagtagcagcggcgggtcagtgtatgacaagaaccctgatgatcagatccactctggggcggtcccagacgatgtgatccaggcaacacaatccggcaaatactgggccccacacccacagactggggtatttggggcccccggaggagcaggag

SEQ ID NO: 30573 - DNA, 388 bp, Glycine max
  Clone ID: LIB3138-047-Q1-N1-C12
gccgacgtgcgttgaattgtgcttggcttgactgcaggcatggggagagttatctttgcggggactagattaaagagaattactggatattctcgccaaaactcaaggatataccgtcccacaacaagaaacgtttgggctatactctgtctgccatcaatttgctgattggacttgggaggagttctaaaggcacagacttacacctagcgcgaattggtctgtgcttcttaatagctaccacatgctcaccgatatttttcttcctacgactaaggactggctaaaaacacgtctagagagaataagtaaacatcaatggtgctgcggctcattctattcgttgagcagaactacggctaattgagcaagctatttgcaaacattt

SEQ ID NO: 30574 - DNA, 394 bp, Glycine max
  Clone ID: LIB3138-047-Q1-N1-C2
tgacaatactgatttccatcaagaatggaaaatggttaaaaaggtcaataaaatgaggcttgctgaatacatcgaaacaatgagtggtgtgaaggtcagtttggatgctatgtttgatgttcaggtgaagcgtatacatgaatacaaaagacaattgcttaatatacttggaataatccatagatatgattgtatcaagaatatggacaagaatgacaggaggaaagttgtaccccgtgtttgcataattggtgggaaagcagctcctggttatgaaattgctaagaagattatcaaactttctcatgctgtggcagaaaaaatcaataatgacactgatattggagatcttctgaaattggtttttatccctgattataatgtctcttgtgct

SEQ ID NO: 30575 - DNA, 391 bp, Glycine max
  Clone ID: LIB3138-047-Q1-N1-C4
tgaggcttggactaatgttccctccatccttccacaaaatgcttatgatcgtgctaatgctcgattttggtttgcctacattgatgagaagtggtttacgtccttgagaagtgttctagtggctgaagatgatgaggcaaagaagccacactttgagcaagcagaagaagggcttgagaggttggaagaagtgttcaacaagtacagtgaagggaaggcctatttcggaggagatagcattggattcattgacattggttttgggagcttcttgagttggatgagagtcatagaggagatgagtggaagaaaattgcttgatgaaaagaagcaccctggtttgacccaatgggctgaaacgattgctgctgatcctgctgtgaagggcatt

SEQ ID NO: 30576 - DNA, 389 bp, Glycine max
  Clone ID: LIB3138-047-Q1-N1-C6
ggtgtccatatttgtatgcaatggtgcatgatagttcagtgtctacaataccaggtgattttgtcattggtgtcaagttgacaaccataaacaatatgtgtgcatatgggctcaatcctggtatttcaggttctcgtcttttgggcaccattcctcagtccatttcacagcaaactgtttggaatcaaatggcaacagtgagaacaccattgaattttgattctagcaagcagagcttttgtcagttttctattgaccttctcggtggaggaatcttagtggacaaaactggagattggatcacacttatacaaaattctccaattagtaacttattgagagttgctgcttggaagaaagctgtttaatggtcaagattgtgatgtctg

SEQ ID NO: 30577 - DNA, 395 bp, Glycine max
  unsure at all n locations
  Clone ID: LIB3138-047-Q1-N1-C8
catgagccaagaccagtgcgtaagggcactggcagaacatgcagggattaagccacttgttactgttacagtgtggaaagagttgcaaaaggagaacaaggagttctttagagcatatttgcaagttaccactcccaggccattattcatgagtaagatctaaacttccatgtcctttcgaggataaagctgcgttaaacttttaaactaagatgttttaaatttataaactaattataattaaagatttgtatgcaactcaacattagtttatgaccataaatatttgtataattaagcttttatatgttgtgcatgcaataccataaataagttatctgcagcatactgatatcagntattgtttgtttcctttttaaggtagatgttttcaa

SEQ ID NO: 30578 - DNA, 382 bp, Glycine max
  Clone ID: LIB3138-047-Q1-N1-C9
ggccgtgaagctgggcccatcagcccccgaagtcgggagggtcagcatgaggaagaccgtcaccaagcaggcctcctccggaagcccatggtacggcccagaccgcgtcaagtacttgggcccattctctggcgagcccccgtcctacctcactggcgagttcccaggtgactacggctgggacactgctgggctttcggccgacccagaaaccttcgccagaaaccgtgagctcgaagtgatccactccaggtgggccatgctcggggccttgggctgcgtcttccccgaactgttgtcccgcaacggggtcaagtttggagaagctgtgtggttcaaggccgggtcccagatcttcagcgagggtgggctggactacttg

SEQ ID NO: 30579 - DNA, 388 bp, Glycine max
  Clone ID: LIB3138-047-Q1-N1-D10
caagattgtgatgtctgggaatgcagcagtcaaaaggagtgattgggcctcattggtacaagtgtttttaacaaacagcaacagtacagagcattttgatgcatgtaagtggacaaaatcagaaccacattcctgggaattgatcttcccaatagaggtatgtggtcctaataatggttttgaaatgtggagttctgagtgggcaaatcaaacttcatggcatttgagtttccttattgacaatcccaaacagtctacagattttgatattctcttgggaatctctcaagattttgaaattgctggtaatactcttatgccagctttttctgatccacaggctactgccagatcttctgaaaatgcggaatcctctgcatgatctgga

SEQ ID NO: 30580 - DNA, 225 bp, Glycine max
  Clone ID: LIB3138-047-Q1-N1-D11
gttcggagagatgcatgataaacttgcattgaaattttcacaagcggcatttgttacagcttggtcaacttatgcgcgtcctgcaacaactctgctggctgatgcgtgtccatatttgtatgcaatggagcatgatacatcagtgtctacaataccaggtgatttggccattggtgtcaaggtgacaaccataaacaatatgtgtgcatatgggctcactcctgg

SEQ ID NO: 30581 - DNA, 383 bp, Glycine max
  Clone ID: LIB3138-047-Q1-N1-D12
agggtttggtgccccttgcaggttccaacgacgagtcatggtgccaaggtttggatggtctagcctctcgctcagctgcatactacgagcaaggtgcccgtttcgccaaatggcgtactgttgtgagcatccccaacggtccctctgctctggcagttaaggaagcagcctggggtctggctcgctatgctgcaattgctcaggacaatgggttggtcccaattgtggagccagagatcttgcttgatggggagcatggtattgatagaacttttgaagtagcccaaaaggtctgggcagaggttttcttctaccttgctgagaacaatgtcctttttgagggtattctacttaagcctagcatggatacacctggagccgag

SEQ ID NO: 30582 - DNA, 390 bp, Glycine max
  Clone ID: LIB3138-047-Q1-N1-D2
gttgggaggaggcactgtggcagaagtcttaggagtgtaaaacagagacgcaaaatgaagacgattctatcgtccgagaccatgaatattcccgacggcgtgagcatcaaggttcacgctaaggttatcgaggttgagggccctcgtggaaaactcgtgcgagacttccaccatctgaacttggacttccaacttattaccgacgatggcggtaaaaggaagctcaagattgattcttggtttggttctcgtaaaaccttcgccgccatccgcaccgccctcagccacgttgagaatttgatcaccggcgtcaccaagggataccgatacaaaatgagattcgtgtacgctcattttccgatcaacgctagcattggcaacaacagcaag

SEQ ID NO: 30583 - DNA, 392 bp, Glycine max
  Clone ID: LIB3138-047-Q1-N1-D3
gaagacaatgcagtttttaaaggaaattatcctttgcttgcccaattgccaattgatatgagaccagtattggcaccttgtcgccacaataaaattcctatatcagtgaggcaggcccagctttaccgcctgacagagcgcttattgaggaacacaaatctggctgtgattcgcagaactgcagatacagaattagctgttgcagatgcagttaatattgaaaaagaagttgctgacagatcaaacagcaaacttgtgtatttgaaccttagttcacaagaactcttgcatcgcacaaataacacaaaaaccaatgtagccacagatacaagtccatcagcctcatcagcaatgcttactgatcaacaatcggaacttaatactgatgatct

SEQ ID NO: 30584 - DNA, 293 bp, Glycine max
  Clone ID: LIB3138-047-Q1-N1-D4
accaggtgattttgtcattggtgtcaagttgacaaccataaacaatatgtgtgcatatgggctcaatcctggtatttcaggttctcgtcttttgggcaccattcctcaatccatttcacagcaaactgtttggaatcaaatggcaacagtgagaacaccattgaattttgattctagcaagcagagcttttgtcagatttctattgaccttctcggtggaggaatcttattggacaaaactggagattggatcacacttatacaaaattcttcaattagtaacttgttgagag

SEQ ID NO: 30585 - DNA, 387 bp, Glycine max
  Clone ID: LIB3138-047-Q1-N1-D5
aaaatcacttcatcatggcttcctcgtgtgcttcctctgccattgcagctgttgccatctccacaccaagttcccagaagaatggatcactcttgggaagcacaaaagcttcttttcttagtgggaggaaactgaaggtgaacaactttacagcaccagttggagcacgatccagcactacagtttgcgcagttgctgagcctgataggcctctgtggttcccaggcagcacccctcctccatggctagatggcagtttgccaggagattttggctttgatcctctaggtcttgcatctgatcctgagagcctgagatggaatgtccaagcagagcttgtgcactgcagatgggccatgttgggagctgctggcattttcatcccag

SEQ ID NO: 30586 - DNA, 379 bp, Glycine max
  Clone ID: LIB3138-047-Q1-N1-D6
gattcgtttttctctctctgcgtgaaaattctgaggttgggggggctccgaaaccatctgggtcgggtgatggaagaagaggttatttgccaatggagcgtgtttagatctctcttggcaatacttcaatggtgggctttcaatgtcactgtcattatcatcaacaagtggatcttccagaaattggatttcaagtttccactgtcggtatcatgcatccactttatctgctcagccattggaggatatgtggtgattaaggtgctgaagcttaaaccactgataactgttgaccctgaagaccgctggagaagaatctttcctatgtcatttgtgttctggattaacattgtgctagggaatgtgagcctaagataca

SEQ ID NO: 30587 - DNA, 237 bp, Glycine max
  Clone ID: LIB3138-047-Q1-N1-D8
ctaacgcagcattgctattctcttcattccatggctttgcccaaccagcaaaccgtggattaccctagtttcaaactcgttatcgtcggcgatggtggcacaggaaagacaacctttgtgaaaaggcatctcaccggggaattcgagaagaaatattagccaaccatctgtgtggagggtcactcattggatttttttacaaactggggaaaggttcgaatttactggtgggatact

SEQ ID NO: 30588 - DNA, 386 bp, Glycine max
  Clone ID: LIB3138-047-Q1-N1-D9
aacataacataacatccttaaccctttgaacatcgttttgcagccatggaaacaggcatagcatgctacactcgcgggcctttcttgcctagtgtttcttccaagcactctccaccttccatttctccatcttttggcttgaggagtctgaaatcaagctctttatttggagaatcgctaagagtggcctccaaatcaacaataaaggtttcaaagacaaagaatacttcactcgtgaccagatgtgaaattggtgacagtctcgaagaattcctcacaaaagcaacaccagataaggggttgatcaggttgttggtgtccatgggagaagcattgagaacaatttccttcaaagtgaagacggcttcatgtggtggaacacaatg

SEQ ID NO: 30589 - DNA, 389 bp, Glycine max
  Clone ID: LIB3138-047-Q1-N1-E1
ggagggaatcttcagatgccaatgacccttctgatgttcttcccaacggagtacttgagatagaacctgggagcaataatcctggtgtagctgaatcatcatctccatcatccagtgttgcattaacaaaggatgagcagatagctactgatgagccatcagcatctctcaatgactcaagcattgaaacctctgacagaaacaaggacaaaactgagccaactcaaggagttgaaactccaagcacacgtgcatctgccacttctgtggatgacccagtcaccgaggttggaggagaccgtaacaaggacacaactgacaacaaaaaagctgtggataggcctgtcactgcggtggaaggagacagtaacaaggacacaactaacaac

SEQ ID NO: 30590 - DNA, 374 bp, Glycine max
  Clone ID: LIB3138-047-Q1-N1-E10
gattaacgatttataacaacaacaacgacgacgacactttgacacacctaaccctccaaattcctatctctcttcgaatggaatccgcagctctgtcgcgcataggcctggcgggcctggccgtgatgggccaaaacctagccctgaacatcgcggaaaaggggtttcctatctccgtctacaaccgcacagcctcgaaagtggacgagaccgtagatcgggcccgcaacgagggctccctccctctcacgggccaatacacccctcgcgacttcgttctctccctccagcgccctagatccgtcatcatcctcgtcaaggccggcgcccccgtcgaccaaaccatcgccgtcctcttcgaccaccttgacccc

SEQ ID NO: 30591 - DNA, 382 bp, Glycine max
  Clone ID: LIB3138-047-Q1-N1-E11
gccggatctgctaaaatacgcttgatccatatgggcctcctcgaccacttgtgggacgacaccgtcgccggcccaaggccggaaaacggtctcggcaagctccgaaaacaccacaccttcactttccgacctagctccggcaaggaaacggagggcgggagcgtgagatcgtacggagacgaatcgtcggaggaagcgactagagtgacgcgtagtatcatgatcgtgaaaccgcccgggtaccagagtggatcgcctccggtttctcccgccggttctactactccgatttctccgttttccggtaaggaggaaaagattcgtttcggtttcgaagaaggtcggcatcagatgcgtacgagaagagagggcagaacagatc

SEQ ID NO: 30592 - DNA, 345 bp, Glycine max
  Clone ID: LIB3138-047-Q1-N1-E12
tgatgaccgcaaagatgcacaggatgctatacgagaattggatgggatttcctcaactagctagttaagacttttttatggcctatggggcaagcagatgctgctatgtctttcttatacatgtgccttggcctgcagtaatgggtttttcttcaatgcgtcttactcaaattctgctgctttgtacagcatgactacttctactactactgcatgtgaagagaattaagaatgtgaacacaggggatgtgcactgctatccggagctacacttatgttgcataatgggtttgctttatgagatgtgtgcttctacacttaaactatggggaccatgtgcgtgct

SEQ ID NO: 30593 - DNA, 390 bp, Glycine max
  Clone ID: LIB3138-047-Q1-N1-E2
ctcgagccgatcaattttgaggcttttccccacaagctggtgcagtttggagagattcaggaaaaagttgtattgaaattttcacaagaggaatttcttacagcttggtcaactcaggtgcgtcctgcaacaactctgttggctgatgggtgtccatatttgtatgcaatggtgcatgatagttcagtgtctacaataccaggtgattttgtcattggtgtcaagttgacaaccataaacaatatgtgtgcatatgggctcaatcctggtatttcaggttctcgtcttttgggcaccattcctcagtccatttcacagcaaacttgttggaatcaaatggcaacagtgagaacaccaattgattttgattctagcaagcagagcttttgt

SEQ ID NO: 30594 - DNA, 315 bp, Glycine max
  Clone ID: LIB3138-047-Q1-N1-E3
gttttaaatccacaaaatccttttgtgttaaataggtggatgggaaaattgactttcccccagggcactttccgaagtgttaagagaatgcctttttctatagggggaggagctggtgccaagaatgctattctcatgaatatgccaaatgctgttctttcaatgtggagatattttggtggagatctcgtctttgaaggttctaagatgacttcttcctacattaaatggacaggctttttcttcataacatttggaaatttggctgattataccatcaattttgaggctttttcccacaagcttgtgccagtt

SEQ ID NO: 30595 - DNA, 353 bp, Glycine max
  Clone ID: LIB3138-047-Q1-N1-E4
ataccgaatgagagcatcaaactcttcttcttcgatttccattgcgaagcgttactttttcttcttctttctcttcattttcttcgctcttcgatcttcgtccggggactgctccgaataccaccaccaccactcgccgatggccacgatcggaggcttacacgactcccaaggctctcaaaacagcgtcgaaaccgaagccctcgctcgattcgccgtagacgaacacaacaagaagcagaattcgcttctggagtttgctagggtggttagggcacaagaacaggttgttgctggtaccctgcatcaccttactcttgaagctattgaagctggtgagaagaagctctatg

SEQ ID NO: 30596 - DNA, 392 bp, Glycine max
  Clone ID: LIB3138-047-Q1-N1-E7
aacaacttctgctacttcctactccaaccgcacttctgctccgcaattatcatgggcaaggtcaagatcggaatcaacggatttggaagaattggccgtttggtagccagagtggctctgcagagagacgatgttgaactcgttgccgttaacgaccctttcatcaccaccgattacatgacatacatgtttaaatacgacagtgttcatggacactggaagcatcacgatgtcaccgttaaggacgagaagacccttctcttcggtgacaagccagtcactatttttggacacagaaaccctgaagagatcccatgggggtcaactggagctgacatcattgttgagtccaccggagttttcaccgataaggacaaggccgccgcacattt

SEQ ID NO: 30597 - DNA, 272 bp, Glycine max
  Clone ID: LIB3138-047-Q1-N1-E9
gtacaggtcccatactacgaatctggatatcttagatgataccgttgaggggtgcgcccgggacttgatttggtctgtgatttaaaaggcttaatgagttgcgcggcccagcaaagacatgactacctagcttgatctattattggaagctctagtcagcgtgtatatcctatgggggggggcactgctacttatcctactaaaacagaccgccaatgtgactgaccagacacactctctatcgtacacagtgactaaaagtgttgatactt

SEQ ID NO: 30598 - DNA, 390 bp, Glycine max
  Clone ID: LIB3138-047-Q1-N1-F10
caggaagtgggatataagcagttgcaggcatcggttatttctgctggtgatccaggacgctactcgcagggtattcattctacacaagaattgatgtggaaaaataagcctgcaggagtttgaacatttgatggattgagcttgaggcagcatatacagatgtcgcagcttttaaatggctgtgaaacagaatctcttatttaatgcttcaaggtagggaaccaccgcttcattttgatcccatgtgaccctgtaacaatttatttgcattggcgagttattttggtcctcgttgtcgaggtttcactatcacttactggctcagcactaaggatatgtgggattcaaaatacatggcagggaaatgccctacccagatcgtcctgtacc

SEQ ID NO: 30599 - DNA, 347 bp, Glycine max
  Clone ID: LIB3138-047-Q1-N1-F11
gaggaagtggatttctggtgttggtgttgacagtgttgggaagaagcttgtgaactcaaaagatggacctccaacctttgagcagcccaagatgactctggagaagctcttgctgtatggtaacatgcttgtccaagaacaagagaatgtcaagagagtccaattggctgacaagtacttgaacgaggctgctcttggaaatgctaacgaggatgctattcagaggggaactttcttccagtcttgaattggaggcaaagcaaacttggcaagtaaatatttctgttcgtgaaggttgttgtactaatccaagtgctagaagttgtgattgaacttgcgtgtaacat

SEQ ID NO: 30600 - DNA, 306 bp, Glycine max
  Clone ID: LIB3138-047-Q1-N1-F12
ggtggtgcaatgcttttggctgatacttatcataccaatgctggaaatgcacttcgcaatatttttgctgcgcctttcagaggcagagggcccattcaggcggttacatttgcgaataccattgggcatattgaaccagacatgaattcacggtttcagcttttgagtaccactaccaatggtgatcatgttcaagggaaagatctctcaatggttaaagagaatgtaacatgtgctgcagttggcttgacatcaagctacactccaactccattgttgggatcatggttgctgaaagacaaaagg

SEQ ID NO: 30601 - DNA, 399 bp, Glycine max
  Clone ID: LIB3138-047-Q1-N1-F2
ctcgagccgcaacaactctgttggctgatgggtgtccatatttgtatgcaatggtgcatgatagttcagtgtctacaataccaggtgattttgtcattggtgtcaagttgacaaccataaacaatatgtgtgcatatgggctcaatcctggtatttcaggttctcgttttttgggcaccattcctcagtccattttacagcaaactgtttggaatcaaatggcaacagtgagaacaccattgaattttgattctagcaagcagagcttttgtcagttatctattgaccttctcggttgaggaaatttagcggacacaactggagagtggatcacacttatacaaaattcttcgattagtaacttgttgagagatgctgcttggaaaaaggctgtttaat

SEQ ID NO: 30602 - DNA, 372 bp, Glycine max
  Clone ID: LIB3138-047-Q1-N1-F4
ggtttgggaatatggatgggtttcgatagcctgtgtcttctgtctgtatcagcatcaggtctgctccaacgcctagagcaccctgtcaaagctgatggctcacttagccttatggtcattggagactggggaaggaaaggaacatacaaccaatctcaagttgccactcaattgggagggttgcttcaaagataaatatccactttgtgatattcacttgagacaatttctacgatgatggattgactggtatagatgaccctgcatttgaaatttccttctcaaaaatctacactgccaagagcctccaaaagcaatggtatagtgtgttgggccaccatgactacaggggtgatgttgaagctcaattga

SEQ ID NO: 30603 - DNA, 387 bp, Glycine max
  Clone ID: LIB3138-047-Q1-N1-F5
attgaaaagctttctagctagtcataacatcatcattgctgatggtattgacaaaactagagcaacttttcaatttagaaagctagcaaattgtgattttatcaatagcaactttaaacagatgtttaatgctttgtgcgttgctcctgaggaccaggcgagtctatggtcacaacatcattatgttgcgagtaataatctggaaatgcaagaatcttatatcgtcaatcttgtaaatgtgttactagaattgtatttgccccatccagaggaagctcgccaattgagaaagtaagctctctttcttattcaatggctgcatatagctgatgtgcctaccatcacaccaattgtagagttccattcgatgcaaaggatgatgaatgc

SEQ ID NO: 30604 - DNA, 293 bp, Glycine max
  Clone ID: LIB3138-047-Q1-N1-F6
gctgatcttttggtctttcttctctctttctctctccttcaacgcatcccaaccctgtggcgctataccctcctagatctactctctaaccgctatacaggctggtactaagagctgtggttagtcatagatggcgctctcagcttcacgggcaatgtcaaagggtgtggtggtatctgtgcctgatctgggtctatctgctttagtggctactggtttcctgttcttccttttgggctctctttcattctgctactgccctactgcttaagaaatctctggcttcaatgtta

SEQ ID NO: 30605 - DNA, 283 bp, Glycine max
  Clone ID: LIB3138-047-Q1-N1-F8
aacttattgagagttgctgcttggaagaaaggctgtttaatggtcaagattgtgatgtctgggaatgcagcagtcaaaaggagtgattgggcctcattggtacaagtgtttttaacaaacagcaacagtacagagcattttgatgcatgtaagtggacaaaatcagaaccacattcctgggaattgatcttcccaatagaagtatgtggtcctaataatggttttgaaatgtggagttctgagtgggcaaatcaaacttcatggcatttgaagtttcttattg

SEQ ID NO: 30606 - DNA, 370 bp, Glycine max
  Clone ID: LIB3138-047-Q1-N1-F9
ctggtttatttgcagcccttgtgataagtagtaggtgtgtatggttataatacttaaatgttgcatatcaaaagatgagttggagaacagctagtagtcagaaatatcagacagttggaaagggccttttaaagattactcaactttttgtagctttcatgaatgtatgactctaggtctttggggacctgatatttaatttggatgcttcatattctcccgcatttatttcccaatgttcattctgaatattgacttaacaggtaaagaggctcttgatcagattcaactatcatactcagtctttcctttgtcaagttcctcatcgcaagaacgccatgtgcaacaatcaatgcatgcaccacctttt

SEQ ID NO: 30607 - DNA, 387 bp, Glycine max
  unsure at all n locations
  Clone ID: LIB3138-047-Q1-N1-G1
aacttagttgtcaagttggaatcaacccatactccatggaatggactggtttggccaatagattactgagtaagggcaatgatattctgtgttgcgattatgctagttttgatggtttgattaccaagcaagttatgagcaagatggcagaaatgataaacagtctttgtggtggtgatgaaaaattgatgcgtgaaaggacgcacctgctgttggcttgttgttcaaggatggcaatttgtaagaaagatgtttggagagttgaatgtggaatcccttctggatttccgctcacagttatttgcaatagcatttttaatgagatgctcattagatatagctatgaaaaattactgcgccaggctaaagctccaagtatgnttttac

SEQ ID NO: 30608 - DNA, 327 bp, Glycine max
  Clone ID: LIB3138-047-Q1-N1-G10
gggaaaacggacggtcctatccaccacttaccggaaggttgacagaatgccacttactatactcaggtggagctaatgcacagaatgacattgtcatgaatatgccaaaagctgttcaaaaaatgtggacatatcatgcgcggaaatcatgcatctgaggataataagatcacttctccctacattaaaagaacagtgtcgtgcttcaagcatctcgaaaagatgcttcaaacaaaatcgatattcaggctaattccaacacgcttgcgcacaatgaatagatgctggaaaaagttcaattgacacttggacaccaagtattttgta

SEQ ID NO: 30609 - DNA, 390 bp, Glycine max
  Clone ID: LIB3138-047-Q1-N1-G11
tccttatgctgatccagagcaatgtgcagatacaaagcaatcctttggagcctcttccagtggggttacttctcttgatagcatccagaaacataagttgaacatagattctgattctttaggctgtatacagacacaaattcctatgacacgccctgactatagtcatgctccaaatcacacttccctctttccgactttgtctggatcaagatctgagcatgatggacatctgtctccttctcttaaagaatcatcttatgcatcaaacatggagagttcccatggtcattctttggaggctgtggccttgaaaacaaaagagaatagagaaaagttgtataattgctgtgatggacccctaaatagtagtttcaaaaatgaaaatac

SEQ ID NO: 30610 - DNA, 369 bp, Glycine max
  Clone ID: LIB3138-047-Q1-N1-G12
aaacctttatgggttatatccgaagacatggaaagggatgtttttatgtcagcagcagaagcccaagcttacggaattgtagatcttgtagccgttgaataaaaaataagtggcaaggattattctaaaaaaatacaggatttgaaatttcatttttgaatcttcttactttcattttaatataatatctctattagttaatctattaatatctattagttaatctattaatagaatataagtaatatagaatctaagtaattcacggttaggatagatctaaaccagctcattatatatatattacaacttactatgccaactatgaaacaacttattagaaacacaagacagccaatccgaaacgtc

SEQ ID NO: 30611 - DNA, 401 bp, Glycine max
  Clone ID: LIB3138-047-Q1-N1-G2
ctcgagccgcgccagttctgatatttacaccatctgctctcaagactgtgaattgtggaatcctgcttgcacaaaagcaatgactatgtcatttaatccaaacccgtgttctgatgcatggagtttggaatttctgaagcgtactggatttcattgcgatatcatttgtgtcactggatggactgccaccccaatgcaggatgttcaggttacaatcgattggtttatttcctctcaggaatgtgttcccaggacctattgtgttttaaatccacaaaatccttttgtgttaaataggtggatgggaaaattgactttcccccagggcacttcccgaagtgttaagagaatgcctctttctatagggggaggagctggtgcaaagaatgctattctcatga

SEQ ID NO: 30612 - DNA, 277 bp, Glycine max
  Clone ID: LIB3138-047-Q1-N1-G3
ctttctgtgtatcgtatcgtattggtaggttgaaaaacaaaaagtgtgtgttgttgttgtgtggtttggttttcacttttgttcatcgtttgcgagacacacacgagagaagagatggcgactagggtggtggctgaacagaagccgaagacaaagattgtgtgcacgctggggcccgcataccgctctgtcccaatgatcgagaagcttctgcgggcgggcatgaacgtggctcgcttcaacttctcccatgggtcccacgagtaccaccaggaaa

SEQ ID NO: 30613 - DNA, 248 bp, Glycine max
  Clone ID: LIB3138-047-Q1-N1-G4
caaacccttggcggctgcgagacccgttgtgttctctcttctctctcttttttttctctttccctctcttcttcgccgctctttttagggttttctcaactcttcgatttggggcttaaaccctcgcttccgattcagattcggatttagggcttccgtttctcgattctgcctcccaagaaaaaccagatctcgtgattgattattcatcatggccactgttgctagtcccgcggatcaagcaactg

SEQ ID NO: 30614 - DNA, 384 bp, Glycine max
  Clone ID: LIB3138-047-Q1-N1-G5
aaaaccatccactgctagtacttcggaagaaattaaaggaactgtcaatcaaggggaaactgtattggatgttcctgacatgcaggggggaccagaaagcagcaagatgacagatgatgttccttctgctgaaaatgatatttctgaaaatgtgtgaaccagttcaactaatggctcgtcaacagctcttgtggatgatgaaagtaacctagtcagcaatgtttctagcccaaagacaggtatagatagtgccattgagaaagaataagaggtagcttttggaagcataattcctgaataggatctatctactgtaaatccactaattgaggaagctgctcagacagatgtcgcaacactcgatttgtaaactgacgcacctgt

SEQ ID NO: 30615 - DNA, 361 bp, Glycine max
  Clone ID: LIB3138-047-Q1-N1-G6
ctgtatcttccgccaacaagaattcaacatcaatattagtgccgctgagaaattcatgtgccctaaggaagtttataccttcggtgaaagatgtgataactcaagatgaaaccaacgactcttttgttactgatgatcttgaaaatcagaagttggagatagatgatggcaagcacactcaaaagtctaatggcacttgtaaagtctctaagtcggagaattctggtgcttcagaattggttcaaactgagaaaacagatggtcttaattgtgcattaacaattgaaggggtgcaaggcaatcagaattacccaagacatgtccctgtgcacgttgttgatgggaaccttggaactagtac

SEQ ID NO: 30616 - DNA, 387 bp, Glycine max
  Clone ID: LIB3138-047-Q1-N1-G7
cttctttttcttttctttttttcgtttcgttcggaaaacgcgtaggctgtgccgtcgtttttagtgggtggatgggaacgacgtcgtgtgagtacgtgagctgggaggaggtgtttatgtcgaacgacaaggggaggagggaggttcattacttgcttaaacgactaggcggtggctcggatctggccgttttgggaaaagagaagagcctcaaacacatgtcggatcgctacgccattcgaaacacgtcgtcgcttcggccttactttaagctcaggtcgcgcagagaggttgttgattggatggattcaattgtttcagattcgtcttctggggatgcggctatggtgggaaaacatggttatgaacctgaaattggagccttga

SEQ ID NO: 30617 - DNA, 237 bp, Glycine max
  Clone ID: LIB3138-047-Q1-N1-G8
cgacaccactgatgatgctaatgcagaaatacatgaaaagggaggtttttcaccaaacctgtagagggttatttttgcacgagagcatctggataatctgcgtaccctggcttattataatatacagaaagcatccactgtgcatttgcagacgaggcttcacggtggcatgctagtattggtcaagactctgacagggtatactgtaaacttcgaagtggatagctctgataccat

SEQ ID NO: 30618 - DNA, 389 bp, Glycine max
  Clone ID: LIB3138-047-Q1-N1-G9
gaagaacaagtagttgagaactaataaggagaagcaaatggcttcctcaatgatctcttccccagctgttaccactgtcaaccgtgccggtgccggcatggttgctccattcactggcctcaagtccatggctggcttccccaccaggaagaccaacaatgacattacctccattgctagcaacggtggaagagtgcaatgcatgcaggtgtggccaccagttggcaagaagaagtttgagactctttcctacctgccagaccttgatgatgcacaattggcaaaggaagtagaataccttcttaggaagggatggattccttgcttggaattcgagttggagcacggtttcgtgtaccgtgagcacaacaagtcaccaggatactacg

SEQ ID NO: 30619 - DNA, 359 bp, Glycine max
  Clone ID: LIB3138-047-Q1-N1-H1
caaagctgcttgcccaacaaccatagttccttttttcggcgatcaaccattttggggtgagagagtacatgttagaggagttggtcctccacctatcccagttgatgagttttcgcttcccaagttagttgatgcattaaaacttatgctggatcccaaggtaaaggaacgtgcaattgaacttgctaaggccatggaaaatgaggatggagtgacaggagctgtgaaagcattttttaaacagcttcctcaaaaaaaaccagagcctgatgcagatccgcaacccactagttttttctctgtaggaagatgttttggttgttcctgattcaaatgcagtgggtgaaaccccacttttt

SEQ ID NO: 30620 - DNA, 356 bp, Glycine max
  unsure at all n locations
  Clone ID: LIB3138-047-Q1-N1-H11
ctccttcactctcagagaactcatatggccgccacactcactcttctaaagcttccaatccttcctaacaagccattactgccacgcccatcaacctcaaaactttttccacttccttccatctattcaaaattaaatatcccaaaagattatattgtttcttctaacaacatcgatgctctcaagcctgcctttctttccctctcggcaatcacatttccattgttattagaaaccaaggatgcacttgctgttggtggagagtttgggatattggaaggaagatcatttgctctcatacaccccattgngatggggtcttttttcttgtatacactgtgggcagggtactttgg

SEQ ID NO: 30621 - DNA, 364 bp, Glycine max
  Clone ID: LIB3138-047-Q1-N1-H12
ggctaaagctccaagtatgtttttacaatccttcaaaaattttgtttctttgtgtgtgtatggtgatgataacttaattagtgttcatgaatatgtcaagccttactttagtggttctaaattgaaaagctttctagctagtcataacatcaccattactgatggtattgacaaaactagtgcaactttgcaatttagaaagttagcagattgtgattttctcaagagaaactttaagcagatgtctaatgttttgtgggtggctcctgaggacaaggcgagtttatggtcacaacttcattatgtttcgtgtaataatctggaaatgcaagaagcttatcttgtcaatctcgtaaatgtgtta

SEQ ID NO: 30622 - DNA, 359 bp, Glycine max
  Clone ID: LIB3138-047-Q1-N1-H2
aaaagcccaattacccttcccaattttcaccaaaacctaatactgccacaccaatcttcgatcatggacgccgattcacaacctcaacaactcgaagagagaacagaggagcaagaactgaagtacctggaattcgtgcaattcgcgaccatacaggctctgatgcgctgcgccatcctctactcatacgccaaggagcgcgcgggtcctctgaagcccggtgtcgacaccgtggaggaggccgtgaagaccgtcgtggctccggtctacgataggttccaccttgtccccggcgaggtcctcaaatacgcggatcggaaggttgccgagttagacagccacgttccctccaacgtgaa

SEQ ID NO: 30623 - DNA, 381 bp, Glycine max
  Clone ID: LIB3138-047-Q1-N1-H4
atcgggaggacgctgaagccgcacgagtacatcggcatggtgcggcgcgaggtgctcgacgcttacctaagggaccgcgccaaggagaacggcgccaacgtcatcaacggcttgttcttgaaaatggatattcctaaggataataactgcccctacgttctgcattactctagctacgacgggaaaaccaatggagctggtgagaagcgtaccttggaagttgacgctgtcattggcgccgatggggccaattctagagtcgccaagtctatcgatgccggtgattatgagtatgccatcgcttctcacgagagggtaagaattccggatgataagatggtgtattacgagaatcttgcggagatgtacgtggcggatgat

SEQ ID NO: 30624 - DNA, 182 bp, Glycine max
  Clone ID: LIB3138-047-Q1-N1-H7
caggctccacaaaacatctcatcattcacccaacaaaatggcgctgcttctgataattcccatctcactggtcaccctctggctcggttacaccctataccagcggttaagaggcaagctccctccgggtccacgggcctggccggtatactgtaacctctactgcgtaaaacccctccgct

SEQ ID NO: 30625 - DNA, 364 bp, Glycine max
  Clone ID: LIB3138-047-Q1-N1-H8
agaatttcttgtacattttggtcctcgggctgcctcatgtagagcaaaagagaagtggggttcagaagaggttgttttctgggtaaatcttgctcagaagcagctacagcaagctattgataaagaaaaaatatggtcaagattgacaacatctgaaagtattgaggtcttggagaaggatttggctgtttttgggttctttattgctttaggcagaagtacaaggtcatttcttttgacaaatggttttgatactctagatgatccaattgaagatttcatcaggtatcttattggaggcagtattttatactaccctcagctctcatccattagttcatatcaaatgtacgtagaggtagtt

SEQ ID NO: 30626 - DNA, 330 bp, Glycine max
  Clone ID: LIB3138-047-Q1-N1-H9
cggctgtctacttgatgctcatagatgggcatcgtgttaaagagcgatatggaatggtgtgtctctgatacctcttttgtctctccctcctcttattttgcggaggctttttgctgaagtgctcattaaatatagtattggagactactcgtccaggcttaaactccaagtgtgtttttacaacccgtcaaaaaaatggtgtatctctgtgtgtatggtgatggtaacttaattagtgtgtatgaatatatatagccgtactttagctgttcttacttgtaaagcgttctagctagttataacatcaccgttactgatggtattgacaaa

SEQ ID NO: 30627 - DNA, 399 bp, Glycine max
  Clone ID: LIB3138-048-Q1-N1-A1
ctcgagccgctcgagccgaaaaaaaaaaaaaaaaaaaaaaaaagggatgattacttgaggaggaacgaacttattattaaaaatatacggggctataaatacacaaccagccgccgggaacagaggggctcgggggtgggaactcgtgcgggttccaccactagcagcattctctttgccattgggctcccgggctctattcttggcgtggccaatttatctgcacttccaaagggcgataaactctaccgacactggctttaagagatggcccgaaatgaaccttttatgggacctgaaacatattatggccatgaccatgatggtcaccttgatgtccgcagcgcataggatagtatgggaacttatgtgccggaaaagcctgccctttcacaagct

SEQ ID NO: 30628 - DNA, 192 bp, Glycine max
  Clone ID: LIB3138-048-Q1-N1-A11
ctcgagccgttttacttcccctatggctcgtcactccttgctcttagccctcctcctcttcgccgccggggccaccggcgcgatggcgggggccgcgtccgacgccgacgacatcctgatcccgcaggtggtgccagatgttggggaagcccaaaaggaaggcaacctggtggacgcccagcaccacttcgc

SEQ ID NO: 30629 - DNA, 409 bp, Glycine max
  Clone ID: LIB3138-048-Q1-N1-A12
ctgaggacaaggcgagtttatggtcacaacttcattatgtttcgtgtaataatctggaaatgcaagaagcttatcttgtcaacctcgtaaatgtgttacgagaattgtatttgcacagtccagaggaagctcgccaattgagaaggaaagctctctctcgtattgaatggctgcaaaaagctgatgtgcctaccatagcacagattgaagagttccattcgatgcagaggatgatgaatgctcctgattcaaatgataatattgatttactgttgagcattgatttgttgggtttacaaggagcaggtaaagcttttccaaacaaaattgtttttgatgataagcttgtgttggctaacacacaagaattctttgatggaaattttccagtggattcttggttaccaat

SEQ ID NO: 30630 - DNA, 407 bp, Glycine max
  Clone ID: LIB3138-048-Q1-N1-A2
aaacaacttcagcagaaaagatccatgctacattgtaaacaattggtttcaagcagatttaaataagttggcagcacgtatctttcatttcatgggttgtttacacattttttgtgagcactaaagaggatgaaatactcaaggaaattggaaacttgcattaatttctgtattacattgttgtgaaagtgcattcaaagtctgcgcaatggcacggtccaattaactagcttctaccaacttcttagccacccttagtccaaacattgtgtaaatttaagggtttttgatgtcaaggatacaacttaaagtaatttttttcattaaataaaaaacatattatgttaaaaatataaaagctagtatttctctttttaattacgatttttttgttctatattcctata

SEQ ID NO: 30631 - DNA, 341 bp, Glycine max
  Clone ID: LIB3138-048-Q1-N1-A3
cgaccttgttctgcgtctccaatccaatctctcacctctccgcatttgcttccttgagggccccgcccttcttcttcaactctccggcgcttcgcatccacgccggcggccgggaacggcggggctcggcggtggcgactcgtgcgggtcccagcactagcagcatcctctttgccattgcgctcccgtcctctctcctcggcgtcaccattttagctgcacttcgaatgggcgataagctcgaccgagactggcttgaagagatggcaagaatgaagctttaatggaacttgaaacatatgatgacgatgacaatgatgataacgatgatgtcagcagcg

SEQ ID NO: 30632 - DNA, 179 bp, Glycine max
  Clone ID: LIB3138-048-Q1-N1-A6
ctttgggccatgcttatattagaccatagggttcaaattgtgtgcataaaccccccgttaggggaatatcatgtgactgaccctacattaaaatatgtctcaacctgataataccattattaattacacaatccatatttagatgaaaaaactaagataatctaagtttctcacaaaat

SEQ ID NO: 30633 - DNA, 227 bp, Glycine max
  Clone ID: LIB3138-048-Q1-N1-A7
gaaattttcacatgaggagatttttacagcctggtcaacgtatgtgcgtcctgcaacaactctgttgtctgatgggcttccatatttgtattcaatggttcatgattgtgtagtgtcttctatactaggagacaatgtcaatggtgtgatgttgtctaccataaacattatgagtgcgtaattgctggttatactcttatgacgactttttcttttttgcacgatac

SEQ ID NO: 30634 - DNA, 328 bp, Glycine max
  Clone ID: LIB3138-048-Q1-N1-A8
ctgcttcaaaatgctgagtttgatatcaagaaagaagctgcttgggctatctcaaatgctacatccggtggttctcatgaacaaatcaagttcctagtaagccaagggtgtattaagcccttgtgtgatcttctcatctgtcctgatcctagaattgtcacagtttgtctggaatgcctcgaaaacctcatggaagggggagaagccggtataaacattagaaaatcctgtgatttgaattttttttcccaaatttttttttcaacctagggattggagaaaatttagaaccttcttaggcatgacaacacaaaaatttacgaaaagg

SEQ ID NO: 30635 - DNA, 373 bp, Glycine max
  Clone ID: LIB3138-048-Q1-N1-A9
ctcctgaccccattttacaccatattgcttggaatcaaatgggatcaggcgtaacactattgaacgtcgaggctagcaagcagagcttttgtgagttttctattgacctcctcgttgtaggactctaagtggagacaaatgtagattgaatcacacttgtagacaaccttctgaattccaaccaacacgttagtgagctttaaggaacaatggctgaatacctaccccgacagggatgagcacgatcattgcttccgcgtcttgaagtccaacctcctgagagccaggctgcacgccaagcttgaccccttcggcgttcactgggtcaccaaatttttcgatctaactacggccgagttccggcgtcagtttc

SEQ ID NO: 30636 - DNA, 409 bp, Glycine max
  unsure at all n locations
  Clone ID: LIB3138-048-Q1-N1-B10
cacaacttcattatgtttcgtgtaataatctggaaatgcaagaagcttatcttgtcaacctcgtaaatgtgttacgagaattgtatttgcacagtccagaggaagctcgccaattgagaaggaaagctctctctcgtattgaatggctgcaaaaagctgatgtgcctaccatagcacagattgaagagttccattcgatgcagaggatgatgaatgctcctgattcaaatgataatattgatttactgttgagcattgatttgttgggtttacaaggagcaggtaaagcttttccaaacaaaattgtttttgatgataagcttgtgttggctaacacacaagaattctttgatggaaattttccagtggattcttggttaccaatttttgtgaattgtctntatcctgt

SEQ ID NO: 30637 - DNA, 404 bp, Glycine max
  Clone ID: LIB3138-048-Q1-N1-B11
cgctgctccagccaccagcccgaacgtggcccaaccgagacgccaagagcctgaaaagcccagcttcatgcagaagctgtccagcattctgtgctgcggtggcggaaaatagtactgctcgaaatatttgcctttgtcatctttgtgttgcatcctggagttcgttcattgagcgacaattttccatcggtcacgtttgcttcctgtataggtatcttgtaatgattgatagacggatcgaaaatctccttccctgggcttgataggcactcgtcacgaccaccagccgaccgatcacatctgcgccaacgtggatctcactccttaccacatcctcgttctcttctctcccgatcccacccaacccgacactttcgcgttgcgcgtatacacgacctggcact

SEQ ID NO: 30638 - DNA, 409 bp, Glycine max
  Clone ID: LIB3138-048-Q1-N1-B12
ggagattggatcacacttatacaaaattctccaattagtaacttattgagagttgctgcttggaagaaaggctgtttaatggtcaagattgtgatgtctgggaatgcagcagtcaaaaggagtgattgggcctcattggtacaagtgtttttaacaaacagcaacagtacagagcattttgatgcatgtaagtggacaaaatcagaaccacattcctgggaattgatcttcccaatagaggtatgtggtcctaataatggttttgaaatgtggagttctgagtgggcaaatcaaacttcatggcatttgagtttccttattgacaatcccaaacagtctacagtttttgatattctcttgggaatctctcaagattttgaaattgctggtaatactcttatgccagctt

SEQ ID NO: 30639 - DNA, 412 bp, Glycine max
  unsure at all n locations
  Clone ID: LIB3138-048-Q1-N1-B2
ggtgatagtgatgattggcagtgtgttcaaacgcttggggaacccaataacggtcatacttccactgtttgggccctctccttcaatgtgagtggtgacaaaatggttacgtgtagtgatgatcttacactgaaggtatgggaaacagaaagtgtagggacgcaatctggtggtggatttgcaccttggacacattttttgcactctctcagggtatcatgatcggacaatattctcagttcattggtcaagagaaggtatctttgccagtggagccgcagataatgctatacggctttttgtggatgacaatgaaagtcaggttggtggtcctctctacaagttgctgctgaagaaagagaangcccatgacatgcatataaattctgtgcagtggacccctgtggagaag

SEQ ID NO: 30640 - DNA, 414 bp, Glycine max
  Clone ID: LIB3138-048-Q1-N1-B3
cttcaacttctagtgaaatatctgatcaattaatggctcagtatttctttttgtttgttttggtgtttgccagccaactgatggctggattcaatgcaccgctaccgctaccatctccgtcatatggaaatcatacaaccattctcagcatagacggtggtggtatcaggggcattattcctgcgactgttcttgaatacttagacaaggctcttaaggctaaggatccaacaacatctttagcccattattttgatgtgatatcaggaactagtactggtggcctcatgactgctatgttagcagccccaaactcatctaatgccaatagtcctctctttactccctcggaagtcgtgcaattctacaagaactatggccctaaaatatttgaacctagagcttggtatgatc

SEQ ID NO: 30641 - DNA, 124 bp, Glycine max
  Clone ID: LIB3138-048-Q1-N1-B4
cttgaaaacttagtccaactttttaccatctaacgacagagtagcattgcatattgagagagacgtctgccagccctatcacggctgtatctactgcacaccataccgttaccatctatcatat

SEQ ID NO: 30642 - DNA, 165 bp, Glycine max
  Clone ID: LIB3138-048-Q1-N1-B6
gcagaagatcaagtagttgtgaactacgattgagaagcgcatggcttcctcaatgatctctgccccagctgtcaccactgtcaaccgtgccggtgccagcatggttgctccattcactgtcctcaattacatggctggcttccccaccaggaagaacgccatctg

SEQ ID NO: 30643 - DNA, 234 bp, Glycine max
  Clone ID: LIB3138-048-Q1-N1-B8
cattgttaaatatttttctggttcaaaaaattggaacctttcactgttgaattttgatgactacacccttggaacatgattacataggcttatcaaaggcgtcatccatggggaaaagctgtgataagatattcttttcattttcctccaatctttcttctgagggtgagaacacaaccttatttcttgaactctaagagaacgaacctgaggcttggcctgccaggttgggat

SEQ ID NO: 30644 - DNA, 304 bp, Glycine max
  Clone ID: LIB3138-048-Q1-N1-C1
atataaagatcaaggttgaataatgaaaattttgttacaagaggatttccaaactcttatcaaaagaagattttccgacatgcataaacgcagatcatagtttcatatatatatatttttataaatatcatatggtgatgaaggtggctaggcctcttcattgcagatacacacgacctctaagcatggcccctatagcttccaatgcagaatggtggccacatctttaacctaacaaagaagaaaaatgcagtggtgaaagaccataaaaaaatattgcatgtttctttgatcaaaatggatt

SEQ ID NO: 30645 - DNA, 243 bp, Glycine max
  Clone ID: LIB3138-048-Q1-N1-C10
ctcgtctttgaagtttctaagatgacttctccctacattaaatgtacagcctctttcttcatagcatttggaaatttggctggtgataccatcaattttgaggcttttccccacaagctggttcatgttggagagaattaggaaaaaattgtattgaaattttcaccatagggatttcttacagcttggtcaactcaagtgcgccccgcaaccactctggtggctgatgggtggccatatttg

SEQ ID NO: 30646 - DNA, 401 bp, Glycine max
  Clone ID: LIB3138-048-Q1-N1-C11
ctccattggttcttcatctgcatgcacacacttgcatagttttggaaaccaagaatttttgaagggtagcatcaacaagaagttctggaaatggagatcaccaatgtcagcgagtatgaagctattgcaaagcagaagttgccaaagatggggtttgactactacgcatctggtgcagaagaccagtggactctgcaggagaacagaaatgccttttccagaattttgtttcggccacgtattcttattgatgtgagcaagatagacatcacaactactgtcctgggcttcaaaatatccatgccaatcatgcttgccccaacagccatgcagaaaatggctcatcctgagggagaatatgcaacagcaagagctgcatctgctgctggaacaatcatgac

SEQ ID NO: 30647 - DNA, 408 bp, Glycine max
  unsure at all n locations
  Clone ID: LIB3138-048-Q1-N1-C12
cacaaaatccttttgtgttaaataggtggatgggaaaattgactttcccccagggcacttcccgaagtgttaagagaatgcctctttctatagggggaggagctggtgcaaagaatgctattctcatgaatatgccaaatgctggtctttcaatgtggagatattttggtggaaatctcgtctttgaaggttctaaaaatacttctccctaccttaaatggacagtctcttttttcataacatttggaaatttggctgatgataccatcaattttgaggcttttccccacaagctggtgcagtttggagagattcangaaaaagtgtattgaaattttcacaagaggaatttcttacagcttgntcaactcatgtgcgtcctgcaacaactctgttggctgatgggtg

SEQ ID NO: 30648 - DNA, 378 bp, Glycine max
  Clone ID: LIB3138-048-Q1-N1-C2
ggaagagatacaatttgagcttaggtcttggactgaacaaagttgctgggaaggttttcagaattggacatcttggcaacttgaatgagttgcaactgttgggatgtctagctggtgtggagatgatactgaaagatgtgggctatcctgtaaagcttggaagtggagttgctgctgccagtgcatacttacaggacactattcctatgatcccttccaggatttgagtcacaagtcattcttgtctttacttccttttttctgctctttcggaaattctgtaaaatatatattaccctcttttacactcctttgaagatgaacatacactctactttcaggtttaatgcattgcttcttttaattgtcctgtatatc

SEQ ID NO: 30649 - DNA, 138 bp, Glycine max
  Clone ID: LIB3138-048-Q1-N1-C3
gagtgatcagtcatggcgaaagccgtaatccgagaagaaacgcgactcaaattggcgggggatccgctcaacccatccccaattccatcccaggggggtcttttaatcggaaaggtcaagctccctttgggcccggcc

SEQ ID NO: 30650 - DNA, 319 bp, Glycine max
  Clone ID: LIB3138-048-Q1-N1-C4
gtgtgtaccacttttgagtgccacagagttctgagtttcacacgagtaaaattgtgacaggataacataccccaaccgtcgagtcagtatcaggagcacctccaactgctgctgctgatcttcgatttgttcctgccgctgctgttgcatctcatgctcccgaggctcaacaggctgtgactgccgagctgcctgctcacccagcccctcatgctgatggcccgccaatctaaatccaagtcctagctctgtgagtcatgtttccttatgatcgacaaggactgcctcctcgaacatgtacgccaggattctagaatgc

SEQ ID NO: 30651 - DNA, 293 bp, Glycine max
  Clone ID: LIB3138-048-Q1-N1-C5
cttttcatgataacaactctccatgtagggcaaacttcagttcaattgaactaacttgtctgtggctctttgtagattgattcaattcaatgggttcagtaatgctcagtggaactgaattgctcactctcatatccctaaccggtaacggcttaggtttcactggttcggatttgcacggtctgatctttccaagagtgagtctcgctgctaccactcgtgcttaagttcccaactttagtagcatattagtactcaattgtagtgtctcaggttcaggccaagctcatatc

SEQ ID NO: 30652 - DNA, 314 bp, Glycine max
  Clone ID: LIB3138-048-Q1-N1-C6
gaacaagtagttgagaactaagaaggagaagcaaatggcttcctcaatgatctcttccccagctgctaccactgtcaaccgtgccggtgccggcatggttgctccattcactggcctcaagtacatggctggcttccccaccaggaagaccaacaatgacattacgtccattgctagcaacggtggaagagtgctatgcatgcaagtgtggccaccagctggcaagaagaagtttgagactctttcctacctgccagaccttgatgatgcacaattggcaaaggatgtagaataccttcttaggaagggatgga

SEQ ID NO: 30653 - DNA, 391 bp, Glycine max
  Clone ID: LIB3138-048-Q1-N1-C7
acctcttccataaacgggtggtgcctctcttccatctccccagccaaaacctctctcaggaaggccacattacgcccttccgtcttcgcaacccttaacactccttcttctccttcctcttcatcttccttcccctctctcattcaagacaggcctgtttttgctgcccctgcccccatcatcaccccaactgtgagagaggatatggcaaaggaatacgagaaagctattgaagaacttcagaaattgttgagggagaagagtgaactcaaagcgacagctgctgaaaaagtggagcagataacagcttctgctagggacatcatcatctgatggcatcccatcatcagaagcctcagacaggatcaaagctggtttcattcacttcaag

SEQ ID NO: 30654 - DNA, 369 bp, Glycine max
  Clone ID: LIB3138-048-Q1-N1-C8
gcttattttgtcatccgctggtggtttcattggaatttgggttgctttgaccatctatatgggtcttagggcatttgctggcttcttgagaattggaacgggatcaggaccttgggagtttctaaggagctcatgagtgcacatggcagacaccataattatagcttcatattaggcctaggtttcagtggtgtttgctgattacattaaagtgagataagctacccctaggttgttaaatcgcttgaaaaattcttctgaaagactagacaattctccctgcttgattgtgcttggggtatttggtgaaaaatctacctctgcatcataatatggacaagaaaaatctaactctactctcagtctcat

SEQ ID NO: 30655 - DNA, 282 bp, Glycine max
  Clone ID: LIB3138-048-Q1-N1-D1
ctcgagccgctctgagagaccctttgggaggaaacgccagaaaacccaaagttttgttcttcctctctttgcaatctctacacagaagatttatggataaaatttgcaaatttggttcactgcagcactgttccgtcgcaaatttcttccaccgacaagtgtttgacttcgtggttccgtcgctttttcaacccttcgatagattcattccttggttacgctttctggctctcaaaatacaattcaagctacccttttgtcttggaaatttcttctgaattg

SEQ ID NO: 30656 - DNA, 260 bp, Glycine max
  Clone ID: LIB3138-048-Q1-N1-D11
ctggtacggggcgcaccagctgtgatatttacaccatctgctgtcaagactgggaatcgggcaatcccgctcgcacaaaagcaatgactctctcaatgcatccaaacccgggtgctgcagcatggtgtacggcatctgtgtaccctactggatttgatcgcaatattattcgtgtcactggatggactgtctccccaatgcaggctgtatacgttacaatggactggttcatcgcctctgaggaatgcgataccaggacc

SEQ ID NO: 30657 - DNA, 413 bp, Glycine max
  unsure at all n locations
  Clone ID: LIB3138-048-Q1-N1-D12
ggagcttcttgggttggttcttttaggttttacctcctttgggtctggtccaaaaagggttaattttttttggttccaagaaaaaattcttgttttggatttggtgggtttcaaacctggtggtaaaaggaaatgccccaccgttctcttgtccccaatttgggcattgggaatagtggaaaaaatgttccttatccagcatattttgacaaggcccggaagggtcgaactggggcaaggataataaatccaaatgcccctgaggaaaatcctgatttaagtctggataatccatcatctgatcacctaccttctaccagacccagagctaattcagaggatcnaatccgaaaaggatcattgcctttggaagatgatcctaagcattttgtcgactcttcagctcgtcatga

SEQ ID NO: 30658 - DNA, 370 bp, Glycine max
  Clone ID: LIB3138-048-Q1-N1-D2
gtcctaataatggttttgaaatgtggagttctgagtgggcaaatcaaacttcatggcatttgagtttccttattgacaatcccaaacagtctacagtttttgatattctcttgggaatctctcaagattttgaaattgctggtaatactcttatgccagctttttctgttccacaggctactgccagatcttctgaaaatgcggaatcctctgcatgatctggaatttgtgttttctttcgcttgttcgtttgtttaattcaataaaggaaattaggcatgaccctcttgttgagtatgctctgcctatttgaaaatttccacacctcttttaattgtcgtaatgatgtgtgaagtgtgtgttattttac

SEQ ID NO: 30659 - DNA, 351 bp, Glycine max
  Clone ID: LIB3138-048-Q1-N1-D3
agcgcactcatcgtattagaggaatgattaaaatggtggccacagttggtattcctgagaatacaggtatatcattggcctgtgctatgaatagttcttttagggggcgcgccagttctgatatttacaccatctgctctcaagactgtgaattgtggaatcctgcttgcacaaaagcaatgactatgtcatttaatccaaacccgtgttctgatgcatggagtttggaatttctgaagcgtactggatttcattgcgatatcatttgtgtcactggatggactgccaccccaatgcaggatgttcaggttacaattgattggtttatttcctctcaggaatgtgttccca

SEQ ID NO: 30660 - DNA, 369 bp, Glycine max
  Clone ID: LIB3138-048-Q1-N1-D4
agcccaatcctccactcagagccagcaagtgatgggcgcccacaggcagtattcgtcagaatccaagtctctgattgccctgcgcgatcaataaatcttctacgacgcacacaccttcagatatttacaccatgtgcgtgtgagactgtgtatagtggactcctgcttgcacaaaagcaaggactatagcatgtaatgacaacccatgttctgatgcatggagtttggaatctctgcagcgtactggatctcattgcgatatgatttgtgtcactggatggactgccaccccaatgcatgatgttcacgctacaattgagtggcttatttcctctcaggaatgtgttcgcaggacctattgtgttttaa

SEQ ID NO: 30661 - DNA, 233 bp, Glycine max
  Clone ID: LIB3138-048-Q1-N1-D5
aatctggaaatgcaagaagcttatcttgtcaatctcgcagatgtgttacgagaattgtatttgcacagtccagaggaagctcgccaattgagaaagaaagctctctctcgtattgaatggctgcaaaaagctgatgtgcctaccatagcacagattgaagagttccattcgatgcagaggatgatgaatgctcctgattcaaatgataatattgatttactggtgagcattga

SEQ ID NO: 30662 - DNA, 206 bp, Glycine max
  Clone ID: LIB3138-048-Q1-N1-D8
gccttcatcaaaactcaaatccttctccttcaaagtgcgggggggggtatcgatgggggggccgttgtccgtaaaaacaaagatgcctgtcattaactattgatcgtctcacccgagacgtaagcatctctctatgattgggcatttactaacaaatgcttgtgttcgaaatttctacgtcctacgtgaggatcctgagacgagag

SEQ ID NO: 30663 - DNA, 408 bp, Glycine max
  Clone ID: LIB3138-048-Q1-N1-D9
gaaacccaaacccttcatcttcgccaagcgcttcccaattccgttgctttttttcttttccattttctccgcaacaacaacgttttctcttctccactcacaatcgccactccttcgacgaagccgttccaggttgcagcgccgtttaccaacacgtgctcaagttccagcgtccaccgaccattcggtggagcccgcacctcgagaacaccgctagtttcatcggcaccgtctcccgcgaaccgacgcgcgttaactcaacaaccggttaattcggagtttacaccgtgcttaatgttccaaaatccaaccaatcaaatagctcctctttgcggttgcttctgatgatgcggaacaatgtggcttaacttgcttcggaacacttgaaatcgaatgatttaattcatg

SEQ ID NO: 30664 - DNA, 230 bp, Glycine max
  Clone ID: LIB3138-048-Q1-N1-E1
gcagaagccctaggagactggccagagcgagcacctcaacatcaaggtgaccgacaacaacaacgaggtcttcttcaagatcaagcgaaccaccacgctcggcaagctcatgaacgctttttgcgatcgtcagggcaagaatattaacagcgttcgcttgctgttcaatggccagcgtgtgaccgcacaagacaacccagatacgcttgacatgcaagatggcgatacac

SEQ ID NO: 30665 - DNA, 402 bp, Glycine max
  Clone ID: LIB3138-048-Q1-N1-E10
gtgatgcctacactcctgctggagaacctattcccactaacaagaggcacgctgctgccaaggttttcagccatcctgatgttgttgctgaagtgccatggtacggtattgaacaagaatacaccttgttgcagaaagatatccaatggcctcttgggtggcctgttggtggtttccctggacctcagggtccatactactgtggtgttggcgctgacaaggcttttggccgtgacattgttgacgcacactacaaagcctgtatttatgctggcatcaacatcagtggaattaatggagaagtgatgcccggtcagtgggaattccaagttggaccttcagttggaatctcagctggtgatgagatttgggcagctcgttacatcttggagaggatcactg

SEQ ID NO: 30666 - DNA, 407 bp, Glycine max
  Clone ID: LIB3138-048-Q1-N1-E11
attatatttttgtgtaaatagaggaaaaactcgatggaaaaatggtggtttaattctatgttgtttaataggaagttagaatacaggtgtgaattaagtaaatcaatggatagtcttggtcctattgaaaataccagtctaagggaagaccctaaaattttaaccgatatagaaaaaaaaattcacagggatttggattatttagaaatggaaggttttttttttctagcgatctgaatactgtttctaagaatgatgatgatcattacatgtatgagactcaatttagttttaacaataatattactagtttcattgatagttgcattgagagtttcaatttatgtgatattgacaaatacaatgatatttatttttatagctacatttttttgaagggcagaaat

SEQ ID NO: 30667 - DNA, 382 bp, Glycine max
  Clone ID: LIB3138-048-Q1-N1-E12
ctcgagccgtgaatatgtcaagccttactttagtggttctaaattgaaaagctttctagctagtcataacatcaccattactgatggtattgacaaaactagtgcaactttgcaatttaaaaagttagcagattgggattttctcaagagaaactttaagcagatgtctaatgttttgtgggtggctcctggaggacaggcgaagttatggtcacaacttcattatgtttcgtgtaataatctggaaaatgcaagaagcttatcttgtcaatctcgtaaatgtgttacgagaattgtatttgcacagtccagaaggaagctcgcccattgagaaagaaagctctctctcgtattgaatggctgcaaaaagctgatgtgccta

SEQ ID NO: 30668 - DNA, 367 bp, Glycine max
  unsure at all n locations
  Clone ID: LIB3138-048-Q1-N1-E3
caatgagttcgtcgaacctcagagatcttcaacgcgaattggagaacaaagccaatgatctcagcaagcttcaaaaggaaattgcgaagaatcaccaaatgagaaagaaatacacggtccagcttggcgagaacgagctcgtccttaaggaactggatttattgaaagacgacgcaaatgtttataagttgattgggccagtacttgttaagcaagatttggccgaggccaatgcaaatgtccgcaagagaatcgaatacatctcagctgaattgaagcgtctggatgccactgttcaagatttggaagagaagcaaaatagcaagaaagatacgatactaaaantgcaacaaaggattcaatcatt

SEQ ID NO: 30669 - DNA, 120 bp, Glycine max
  Clone ID: LIB3138-048-Q1-N1-E4
cttccatctccccagccataacctatctcaagaaggccacattacgcccttccgtttttgcaaccctgcacactcctgcttctgcttactattaatctttcgttccgtatttcattcaag

SEQ ID NO: 30670 - DNA, 188 bp, Glycine max
  Clone ID: LIB3138-048-Q1-N1-E5
gttagtggaaaaaccttcaaatatgatataattggtgctggttcacattcttcagaagattgtcctgaaaaggaagatcaagaaaaacccaaaaagattgatgccagattgagacaaagaatagatcctcaatcaatgatgttcaagctcatattgaaacagatacgctaaattgtctcttgatgatg

SEQ ID NO: 30671 - DNA, 378 bp, Glycine max
  Clone ID: LIB3138-048-Q1-N1-E6
aaagctataagtattatacgtcttcgttcagacctccagaaagctattgagaatgaggattatgccttggctgctgaattacgtgatgaaatttccaaacttgaagcagagtctctagctgcatcagctacagctttggcacatgaaaatgctcaatatgcattccgcttggggcagaaagtgagacataaaaaatttggctatagagctgtgatctgtggaatggatccagtatgcagtgaatcaagttcatggatggaaaatgcacaagtcaaaaaattgtctcgtggttccgctcaaaccatttatcaagttcttggtgatgtacatgctgaaccaaaattattagtggcatatgttccagaggagaaattttta

SEQ ID NO: 30672 - DNA, 251 bp, Glycine max
  Clone ID: LIB3138-048-Q1-N1-E8
caggtgcgtcctgcaacaactctgttggctgatgggtgtccatatttgtatgcaatggtgcatgatagttcagtgtctacaataccaggtgattttgtcattggtgtcaagttgacaaccataaacaatatgtgtgcatatgggctcaatcctggtatttcaggttctcgtcttttgggcaccattcctcagtccatttcacagcaaactgtttggaatcaaattgcaacagtgagaacaccatttaattt

SEQ ID NO: 30673 - DNA, 121 bp, Glycine max
  Clone ID: LIB3138-048-Q1-N1-E9
acagagagtagaaaagatggcgcggttgatcacagtggtgtggtgcgcggtggcgttcctactgtgcgccccaacaggaacgtccagggtggaggaggcggaaaacccgatacgaataatg

SEQ ID NO: 30674 - DNA, 353 bp, Glycine max
  Clone ID: LIB3138-048-Q1-N1-F1
aaatttccacacctcttctaatcgtcgcaatgatgtgtgaagtgtgtgttatttcaacaacaacaaagacttcataaaaaacaaacaaaccaccacaacaaaaaaagctggtcagccctcttctcgtgcgcccacccacccataaatacatccctcacctgctcctgcatgcccaccacctttcctctcaagacaacccttataccctggacatacaatatgcctatacacttcctgtgcaacattaacataccctcacattctcacacatcattcgatccgctatcatacaatgcccacccaccggtgcccaatgattctgctacctaacattaatgacgtagctctcactg

SEQ ID NO: 30675 - DNA, 408 bp, Glycine max
  Clone ID: LIB3138-048-Q1-N1-F10
gggcattctcagcaatcggtgcagtagaaggaataaataagatagtaacaggcgaactgatttcgttatcagaacaagaattggtggattgtgatactggatataaccaaggatgcaatggaggacttatggactatgcatttgagttcataatcaacaatggcggcattgattctgatgaggattacccataccgcggtgttgatggtagatgcgacacatataggaaaaatgctaaagtcgtttctattgatgactacaaagatgttcctgcctatgatgagttagccttgaaaaaggccgttgcatatcagcccgtgagcgttgctattgaaggaggtggcagggaatttcaattatatgtatctggtgtattcacggggagatgtggcacagcactagatcatg

SEQ ID NO: 30676 - DNA, 268 bp, Glycine max
  Clone ID: LIB3138-048-Q1-N1-F3
gtttgtaacaacttgtgcaagtacaactcacatacattaaaaatatactgataaagatagaataagagagagagagagagaatggaagggagagagagttgtcacccattgctgagaggaggtaggagaagagaggagaaaggttacaaccatggcttatccaccactcaaatgcatgtcatggctgccatatgtgatgccctcattccttcccttccactcaacaaggacacttcacaagaccaagctctctcagacttctacaata

SEQ ID NO: 30677 - DNA, 327 bp, Glycine max
  Clone ID: LIB3138-048-Q1-N1-F4
ctcactcaaccctgtcacaggtgccaagcacatacatttgatagagtgtgttgcaaatggaggaggagagagagagagagaatggaagggagagagagttgtcacccattgctgagaggaggtaggagaagagaggagaaaggttacaaccatggcttatccaccactcagatgcatgtcatggctgccatatgtgatgccctcattccttccctcccactcaacaaggacacttcacaagaccaagctctcttagacttctacaatacctctgcttctcaacttccttttcctgattaagcttgagagctgttgtacaagaagact

SEQ ID NO: 30678 - DNA, 327 bp, Glycine max
  Clone ID: LIB3138-048-Q1-N1-F5
atgatcctgttatcattgattcaggagtaacatatgaaagaatgtggataaaaaagtggtttgatgagggtaatgacatatgtcccaaaaccagaaagaaactagtccatatgggattaactccaaacatggccatgaaagacttaatatcaaagtggtgcagaaataatggagtctccattccagaaccttagtaggcatgcagaagatatttgtgcatgggaaggctcaaacacttccattagcagcttaagaagttatttcaatgatttcaccgcaccagtggatcttagtagcatgtcaattgggccattggatactagtttc

SEQ ID NO: 30679 - DNA, 342 bp, Glycine max
  Clone ID: LIB3138-048-Q1-N1-F7
ctctaatagtaacagtaatagtaatatacataacataaccaatggaagcacgtgcaggagccaatcaacgtattgcaagaatctctgctcatcttcagccttcaaatttccaggaagggagtgatgttcttcttaagagaggtgagtgcagagcaaaaggcggggcacctggattcaaagttgcaattttagggggctgctggaggaattggtcaatccctttctttgctgatgaagatgaacccactggactcagttcctcatccttatgatgatgtcaacacccctggtgtcacagctgatgttaggcacatggacactggtgctgaggttccgtggctt

SEQ ID NO: 30680 - DNA, 357 bp, Glycine max
  Clone ID: LIB3138-048-Q1-N1-F9
gtggttacattttcgaataccattgtgcatattgaaccatacatgaattcaaggtttcagcttttgagtaccactaccaatggtagattttgttcacgtggaaagatctctcaaaggttaaagtgaaagtagcatgtgccgcttttgtcttgtcatcaagttacactccaacttctttgttggtatctggtacgcaaatataccgatgtattattgccgtgtattctgatcggcacacttataatgagaacatccatacatatatatatatgtatgtatagatgtatgtatatatatatattatatatatatattggctatattactataggcgggccattttatgcaagctgaatt

SEQ ID NO: 30681 - DNA, 392 bp, Glycine max
  unsure at all n locations
  Clone ID: LIB3138-048-Q1-N1-G1
cttattttggagctacatttcctcacctttttctgatgacttatgggaatctgaagccacagaagcaatcacagaactatgtacctagagtttttggtttcaaagttcacaagtcctgaagctggatggagtttcaagctttcatcaaagtaggaatctgagcatgccttgcttagttgtatttctttaaaattcagtgaattttcagtttctgaaatcagtacattctagatccatatgttctgtaaacgtaaagatatatgcaggcaccaacatcaaagccacaagagattaattttgttctctgcttcaaatcagtgttgccttgtaaagttttctgatagaatttaatgattagtattgaatgcactnttcaaatatatactataaaa

SEQ ID NO: 30682 - DNA, 277 bp, Glycine max
  Clone ID: LIB3138-048-Q1-N1-G11
gccgaacaaaaacagccaaacatcgttcacaagtggcttgcttggtcggactaggaaagttttcaaagccaagcaaatacgagctttacccaatcttcttgctgctgaatcatccactgtatcaatcttcaaaatcacatttatctcaatcttcaccttctgggttgctatcatacttatttattattcttctatttctttcgttttcgctatggaatctaaaaaccctgctaggtttacgctggggaagcaatcttcgcttgccccacaacgccat

SEQ ID NO: 30683 - DNA, 278 bp, Glycine max
  Clone ID: LIB3138-048-Q1-N1-G12
ctcgaacaaaaacaacaatacatcaatcacaaaaaacttgcttggtctgactaaagaaagttatcaaagccaaacaaatacggagctttacccaattttcttgctgctgaattttacactgttcaatcttcaaaatcacatttttctcgatcttcaccttttgggatgctatctttctttttcctccttcttcttcttgtttttttttcactgttgaatctaaaaacccttgctggtttacgctaaggatgcaatctttggttgtcccacaacgccat

SEQ ID NO: 30684 - DNA, 252 bp, Glycine max
  Clone ID: LIB3138-048-Q1-N1-G2
ttgggaatctctcaagattttgaaattgctggtaatactcttatgccagctttttctgttccacaggctactgccagatcttctgaaaatgcggaatcctctgcatgatctggaatttgtgttttctttcgcttgttcgtttgtttaattcaataatggaaattaggcatgaccctcttgttgagtatgctctgcctatatgaaaatttccacacctcttttaattgtcagaatgatgtgtgaagtgagtgt

SEQ ID NO: 30685 - DNA, 404 bp, Glycine max
  unsure at all n locations
  Clone ID: LIB3138-048-Q1-N1-G3
tgttctttcaatgtggagatattttgttggagatctcgtctttgaagtttctaagatgacttctccctacattaaatgtacagtctctttcttcatagcatttggaaatttggctgatgataccatcaattttgaggcttttccccacaagctggtgcagtttggagagattcagggaaaagttgtattgaaattttcacaagaggaatttcttacagcttggtcaactcaggtgcgtcctgcaacaactctgttggctgatgggtgtccatatttgtatgcaatggtgcatgatagttcagtgtctacaataccaggtgattttgtcattggtgtcaagttgacaaccatanacaatatgtgtgcatatgggctcaatcctggtatttcaggttctcgtcttt

SEQ ID NO: 30686 - DNA, 375 bp, Glycine max
  Clone ID: LIB3138-048-Q1-N1-G4
caggagctcaaaagggtattctctgcggcctgtgaacctcccggagctgggtagagcgggcttctcagggctgataaaaccaccaagaagtgtttaccaaagctaaggatagatgtgaccttacggtgcgccagcacaagactacagaaactatgatgtcctgttacttggcggcctcgggataggagctacaccttttatcagcattcttaaagaacttctcaacaatattatcaaaatggaggagctggcggattcagtctctgattcaagtagaggtacacaccttagcactgggagtgcagatccaatatctcctaatatgatgtcttctaaacggaggaagacactgtaaactacatacgctcattttac

SEQ ID NO: 30687 - DNA, 305 bp, Glycine max
  Clone ID: LIB3138-048-Q1-N1-G5
tctcaatccagactttctggaatgctcaaacattctttcatgaaggtgatacaacgtcatgaatccaattattgccactcataacattgctacagctaaaaagatttccactgaagaacctgaagtgttagggttttcctcacaagcaggttccattcatacagattttgggaaaatttgttttgaaattttcccatgatgagtttcttacatcttgggctactcaagtgctgtcttcaacaactctattggcttatgggtgcccctatttctatgccacggcgcatgatttttcatctcctaca

SEQ ID NO: 30688 - DNA, 220 bp, Glycine max
  Clone ID: LIB3138-048-Q1-N1-G6
cacagttggaggaaccattctgcgtagtgatctattggcaaatggtttgacagagggcatttttagagcaagtgccgatttgcagcgcactcatcgcattagaggaatgagttaaatggtggccacagtcgggattcctgagactacaagtgttctgtttctcctgtgccttggaatgggatcttcagcctctctcaagattttataagaactccttaac

SEQ ID NO: 30689 - DNA, 270 bp, Glycine max
  Clone ID: LIB3138-048-Q1-N1-G7
tccaattcacagagcaacacaacgaaccaacaatggcgcagcctcagccgcagtcgcagccgcagcacgggcaagcagcgctggagcaggtgcagtgcttcggtcgcaagaagaccgtcgcggccgtgacctactgcaagcgcgggcgcggtctcatcaagatcaacggctgccccattgagctcgtggagcctgagatcctgcgcttcaaggccttcgagcctatcctgctggtgggtgagagccgcttcggcggcgtcgacgtgcgca

SEQ ID NO: 30690 - DNA, 271 bp, Glycine max
  Clone ID: LIB3138-048-Q1-N1-G8
atcaatttgtccatctgcgcctcgctccaacactacagaactctgatgcgcagtcgcatccacagcacattcaaccacccctaaatcatttccagtgcttccgctgcatggacaccaccgtgccctatgcccaagtctacatacactctcaggttcatttagatctacgtctggcccttggagcatcagcttccattaacattttgaaacaacgtcttagcgcgaatcttaaagtggagtagcaggcgtttttactgagtgaacttactca

SEQ ID NO: 30691 - DNA, 336 bp, Glycine max
  Clone ID: LIB3138-048-Q1-N1-G9
gttggaatcaacccatactccatggaatggactggtttggccaatagattactgagtaagggcaatgatattctgcgttgcgattatgctagttttgatggcttgattaccaagcaaggtatgagcatgatggcagaaatgataaacagcctttgcgggggcgatgaaaaattgatgcttgtaaggacacacctgctgttggcttgttgttcaaggatggcaacaggtaagaacgatatttggagagttgaatgtggaatcccttctggatttccactgacagttatatgcactagcatttttaatgagatgctcattagatatagctttgaaaaa

SEQ ID NO: 30692 - DNA, 416 bp, Glycine max
  unsure at all n locations
  Clone ID: LIB3138-048-Q1-N1-H1
cacaatacaagggtcaccccaatggtattggtgagagtggttcccatggcttcttcttcttcgattcgacccactctctcctcccttagattcttaacaccgtcatctctttcgctctccaacccttcttctcgtatctctttctcccatcttccctctccctctgtgtctcaatccaatagttttggcctcaaagcttccagagagttgagacaacatggcaactccacgagaatcatggcatcagggcacgtgtctcaatcgatttcagctgcttcaccagaaaatgtgcttgagtgggtcaaacaggacaagcgaagaatgcttcatgtngtatatcngtgtggggacttggacaggaccataaagttttatacagagtgcctangaatgaagctcctcagaaagagggacat

SEQ ID NO: 30693 - DNA, 377 bp, Glycine max
  Clone ID: LIB3138-048-Q1-N1-H10
cttccctattgtaatttctgccagcctcaaaaaagacttgctctgcctctgccactctctgagtacagactacactgccatggctgcctcagtctccactgttggagctgtcaacggagctccactgagcttgaacagctctggagctggagcttcagttcccagttcagccttctttggcaccagcttgaagaaggttattgcctcaagggtccctaacgtcaagatttcttctggaagtttcaaaatcgctgccgcggaaaaagagattgatgagaaacaacagacagacaaggacagatggaaaggtcttgcctatgatgtttcagacgaccagcatgacatcacaagagggaagggtttggttgattccctct

SEQ ID NO: 30694 - DNA, 411 bp, Glycine max
  Clone ID: LIB3138-048-Q1-N1-H11
gtgttttgttcggtggtcaattcccatccacacgcctcaccggaaacatgtcagcggtggttgctggttcctcctcttcattctctgccaccttcactaccagaaggagcccctccttaaaaaactctcaactctctcattccaagacactaacttctcctcaatgccagaagacatctttacaaggcctctcacttcatgaagccaaaaggggtgtttcagaatccttcctagttgagaacaagaatggttcctccattgctggaaggagacttgagatcaaagcaagaactgctggggcctcaaagacaattgaggtggaggttgacaagccacttggcctcaccttaggccaaaagtctggtggtggtgttgtcatcactgctgctgatggtggtgggaatgcagcaa

SEQ ID NO: 30695 - DNA, 310 bp, Glycine max
  unsure at all n locations
  Clone ID: LIB3138-048-Q1-N1-H12
cttctccctacattaaatgtacagtctctttcttcatagcatttggaaatttggctgatgataccatcaattttgaggcttttccccacaagctggtgcagtttggagagattcaggaaaaagttgtattgaaattttcacaagaggaatttcttacagcttggtcaactcaggtgcgtcctgcaacaactctgttggctgatgggtgtccatatttgtatgcaatggtgcatgatagttcagtgtctacaataccangtgattttgtcattggtgtcaagttgacaaccataaacaatatgtgtgcata

SEQ ID NO: 30696 - DNA, 127 bp, Glycine max
  Clone ID: LIB3138-048-Q1-N1-H3
gttcacactttctttgtttcttattgagtttttggcttctcactgctttttttctttcacactctcaacgaaatgatttataacagtgtttaattgaaattccaaacatggattgggttcgaggaga

SEQ ID NO: 30697 - DNA, 308 bp, Glycine max
  Clone ID: LIB3138-048-Q1-N1-H4
ctcgagccgctcgagccgctcgagccgttttttaaagcccttattacctggcgaaaatgcactggaccagcttgtatagattatcaagttgaacgctaggaataaatctgcagccgtagaatgctatacaagaatagaggtttgtctggaaggttactcaaatgaagcatgagcatgacaagaggcaagcatgcctcatatctgaacacaacgaacagctaaagcgttcccaactgcaagctgaaaatgaattgagagagaaaacaatgtctatgaggaatgatcatgaagctcagatcaaagcattg

SEQ ID NO: 30698 - DNA, 292 bp, Glycine max
  Clone ID: LIB3138-048-Q1-N1-H5
ctacaacactcatcaagccagacaaccaacaccactaccgcaatcatcatgtctgactacgagccaactgagcactaccgtctccgcatggacggccagccagaccagcttgtctgcaccggacagtttgcagcgagcaaggtggattccgcggaagctagctagttaggcggcaacacctattgaagtggcttcatctatgccaggctgagcagcgtgagtctctacaatccaactgggtatgatacgatacacaagggctgtcttgcctatggtcgtgtccaacgataat

SEQ ID NO: 30699 - DNA, 239 bp, Glycine max
  Clone ID: LIB3138-048-Q1-N1-H7
ggcgagtgcaagattggaatcatgcccggacacatccacaagcaaggaaagattggaatcgtatctcgatctggaactttgacatatgaggctgtggaccaaaccaccgttgtgggtcttggacaatcgacatgtgttggaatcggaggagatccattcaatggaaccaacctctgtgatgtactcaagatgttcgccaaggatcccgaaactgaaagaatcatcctcatccgagagat

SEQ ID NO: 30700 - DNA, 290 bp, Glycine max
  Clone ID: LIB3138-048-Q1-N1-H9
ggcaatttgtaagaaagatgtttggagagttgaatgtggaatcccttctggatttccgctcacagttatttgcaatagcatttttaatgagatgctcattagatatagctatgaaaaattactgcgccaggctaaagctccaagtatgtttttacaatccttcaaaaattttgattctttgtgtgtgtatggtgatgataacataattagtgtgcatgaatatgtcaagccttactgtagtggttctaaattgaaaagctgtctagctagtcatagcaatcccattactg

SEQ ID NO: 30701 - DNA, 343 bp, Glycine max
  Clone ID: LIB3138-049-Q1-N1-A10
gaagggctatatagcataaacatttgagtcttcattgcacaatgtcgacctcttccattaacgggtggtgcctctcttccatctccccagccaaaacctctctcaagaaggccacattaggcccttctgtcttcgcaaccgttagcactccttcttctccttcttcttcttcttcttcttccttcccttctctcattcaagacaggcctgtctttgctgcccctgcccccatcatcaccccaactgtgagagaggatatggcaaaggaatacgagcaagctattgaagaactccagaaattgttgagggagaagagtgaactcaaagccacagctgctgagaa

SEQ ID NO: 30702 - DNA, 343 bp, Glycine max
  Clone ID: LIB3138-049-Q1-N1-A11
ttttgatgcatgtaagtggacaaaatcagaaccacattcctgggaattgatcttcccaatagaggtatgtggtcctaataatggttttgaaatgtggagttctgagtgggcaaatcaaacttcatggcatttgagtttccttattgacaatcccaaacagtctacagtttttgatattctcttgggaatctctcaagattttgaaattgctggtaatactcttatgccagctttttctgttccacaggctactgccagatcttctgaaaatgcggaatcctctgcatgatctggaatttgtgttttctttccgctggttcgttgtttaaatccaataaaggaa

SEQ ID NO: 30703 - DNA, 386 bp, Glycine max
  Clone ID: LIB3138-049-Q1-N1-A12
accattactgatggtattgacaaaactagtgcaactttgcaatttagaaagttagcagattgtgattttctcaagagaaactttaagcagatgtctaatgttttgtgggtggctcctgaggacaaggcgagtttatggtcacaacttcattatgtttcgtgtaataatctggaaatgcaagaagcttatcttgtcaatctcgtaaatgtgttacgagaattgtatttgcacagtccagaggaagctcgccaattgagaaggaaagctctctctcgtattgaatggctgcaaaaagctgatgtgcctaccatagcacagattgaagagttccattcgatgcaaaggatgatgaatgctcctgattcaaatgataatattgatttact

SEQ ID NO: 30704 - DNA, 345 bp, Glycine max
  Clone ID: LIB3138-049-Q1-N1-A3
caagaagcttatcttgtcaatctcgtaaatgtgttacgagaattgtgtttgcacagtccagaggaagctcgccaattgagaaggaaagctctctctcgtattgaatggctgcaaaaagctgatgtgcctaccatagcacagattgaagagttccattcgatgcagaggatgatgaatgctcctgattcaaatgataatattgatttactgttgagcattgatttgttgggtttacaaggagcaggtaaagcttttccaaacaaaattagttttgatgataagcttgtgttggctgacacacaaaaattctttgatggaaattttccaggggattcttgggtacca

SEQ ID NO: 30705 - DNA, 374 bp, Glycine max
  Clone ID: LIB3138-049-Q1-N1-A4
ggaagcttcaagattgttgctgtagaagagaagaaagagattgaagagacccagcagaccgacaaggacagatggaagggtcttgcctatgatatctcagacgaccaacaagacatcacaagaggaaagggtttggttgactcccttttccaagctccacaggatgctggaactcactatgcagtcatgagctcctacgagtacctcagcactggacttcgccagtacttggacaacaaaatggatggattctacattgctccagcttttatggacaagcttgttgttcacatctccaagaacttcatgaccctgcccaacatcaaggttcctctcattctttgtatctggggaagcaagggacaaggaaaatc

SEQ ID NO: 30706 - DNA, 310 bp, Glycine max
  Clone ID: LIB3138-049-Q1-N1-A5
ttttgaggcttttccccacaagctggtgcagtttggagagattcaggaaaaagttgtattgaaattttcacaagaggaatttcttacagcttggtcaactcaggtgcgtcctgcaacaactctgttggctgatgggtgtccatatttgtatgcaatggtgcatgatagttcagtgtctacaataccaggtgattttgtcattggtgtcaagttgacaaccataaacaatatgtgtgcatatgggctcaatcctggtatttcaggttctcgtcttttgggcaccattcctcagtccatttcacagcaaact

SEQ ID NO: 30707 - DNA, 383 bp, Glycine max
  Clone ID: LIB3138-049-Q1-N1-A6
gtgaaaatggaagacaatcatcatcatcatcatcaggaacttggtttgcctagacagttcttgggggtcaataataaccctagcacaaatgagcaatattggagtggtggtggtggtgccacttctgcttggactgatctttctgctttcagctcttcttccactactagtaataacgcactatagaattttctgctatctctttgtgaagtttctggcttttggttcttctgtttcctttcacaaagtttcaaccaacttggttataattaaccccacgtgaagaagcttcgaggatggttaagtactttggtttcattttaaaatcaaatatgaaaaccctaaggatggtagaacctcttctatggttaatctttatattg

SEQ ID NO: 30708 - DNA, 368 bp, Glycine max
  Clone ID: LIB3138-049-Q1-N1-A8
caaggaattaggcaacgccgttcccaaggagccggtgttgtttctgaaaccgacgtcgtcttacttgaaaaacggcggaaccatccaaatcccacacaacgagggctctctgcatcacgaggttgagctcgctgtggtcatcgccaagaaagcacgtgacgtctccgaatcctctgcgatggattatgtcgccggttatgcactggctctggatatgactgctagggaccttcaagctgctgctaagtctgcaagtcttccatggagtttggcaaaaggccacgacactttcaccccaattagttctattttgccaaagactgcagtgccaaatcctgatgatctagaattatggttaaaggtagatg

SEQ ID NO: 30709 - DNA, 375 bp, Glycine max
  Clone ID: LIB3138-049-Q1-N1-A9
gacagactatgttaattcacgagaaatatcctgtgaaatggttttggaacctgagccaaagggatatactatagttcctactactatacaccccggtgaagaagcaccgtttgtactttctgttttcaccaaggcgtcgataactctggaagctttgtagtgcctagggatagtttttacatgtatcttgtcctcttgataagtttctctgcctgggttctcggtggatcatttacttgtactgccggagcccgtctttagaacaatcggcattgagatactattcctggcggaaacgacatggcatctgtttgagagatgaatgaggtataactgcgcataaactcttggtctttgaatctgacgatttgtcat

SEQ ID NO: 30710 - DNA, 387 bp, Glycine max
  Clone ID: LIB3138-049-Q1-N1-B10
tgaattttgattctagcaagcagagcttttgtcagttttctattgaccttctcggtggaggaatcttagtggacaaaactggagattggatcacacttatacaaaattctccaattagtaacttattgagagttgctgcttggaagaaaggctgtttaatggtcaagattgtgatgtctgggaatgcagcagtcaaaaggagtgattgggcctcattggtacaagtgtttttaacaaacagcaacagtacagagcattttgatgcatgtaagtggacaaaatcagaaccacattcctgggaattgatcttcccaatagaggtatgtggtcctaataatggttttgaaatgtggagttctgagtgggcaaatcaaacttcatggcatt

SEQ ID NO: 30711 - DNA, 283 bp, Glycine max
  unsure at all n locations
  Clone ID: LIB3138-049-Q1-N1-B11
cttttattgctgagaaaaaaaagtacttgaattgatgtgtttgcgatgtcagtgtatcattagtatgtacttactagtagaaaaactgaagatatgctgttgcattgtgttgtagcaattaaataaaaatttcagttcaaagttactttgagttacgaatatatatgaacacttgtttactctccattnaaaaaaaaaaaaaaaaaaaaaaaaaaaaaaaaaaaaaaaaaaaaaaaaaaaaaaaaaaaaaaaaaaaaaaaaaaaaaatattggggcggccccc

SEQ ID NO: 30712 - DNA, 384 bp, Glycine max
  unsure at all n locations
  Clone ID: LIB3138-049-Q1-N1-B12
ctcgagccgaatcggctcgagatttggcataatacattgattggtggcttaaaaacaacactgcaatgtctgccatatttctgcttgttggaatgctatcgtccattacagttgcacaatccataggagtttgctatggagtgattggtgataatctaccatcaaggcaagaagttgtggacttatataaaacaaatggcattggtagaatgcgtatatactacccagatgaagaagcactccaagcccttagaggttcangcattgagttgattatggacgtggctaaggaaacccttcaatcattgacagactccaatgcttctaccagattggtcaataaaaatgttacaccttactcgcaagacgtcaatttcaagtaca

SEQ ID NO: 30713 - DNA, 372 bp, Glycine max
  Clone ID: LIB3138-049-Q1-N1-B4
cgtctttgaagtttctaagatgacttctccctacattaaatgtacagtctctttcttcatagcatttggaaatttggctgatgataccatcaattttgaggcttttccccacaagctggtgcagtttggagagattcaggaaaaagttgtattgaaattttcacaagaggaatttcttacagcttggtcaactcaggtgcgtcctgcaacaactctgttggctgatgggtgtccatatttgtatgcaatggtgcatgatagttcagtgtctacaataccaggtgattttgtcattggtgtcaagttgacaaccataaacaatatgtgtgcatatgggctcaatccctgtatttcaggttctcgtcttttggg

SEQ ID NO: 30714 - DNA, 274 bp, Glycine max
  Clone ID: LIB3138-049-Q1-N1-B6
ctgcacatggctatcaatctattgatgacatttcatatggttttaagaagctacatgaagatgcagatggaaatggttcactggtagatggtgatactcatgcaattggacctgccctccctgatgatgaggaggagctgttacctggcataacaggtgattttgacctacatggcttgcctggatcccttgaggacttggaagagtatgatctttatggtcgtggcggaggtatggtactagaaactgatgcacaggaaggtctcactggggg

SEQ ID NO: 30715 - DNA, 376 bp, Glycine max
  Clone ID: LIB3138-049-Q1-N1-B8
ataaaagcatatttgtgtttataagcagtgtgactcagtgaagtgagttagttaattatgcctagtggtagtaggaaccctcttgttgttgggcgtgttataggggaagtaatagacccctttgaaagttctattcctttcagggtgacctatggtaataaagaagtgggcaatggttgtgagcttaaaccttctcaagttcccaaccaacctagagtgagtattggtggagatgatctcaggaaattctacactatggtcatggtggatcctgatgctcctagcccaagtaaccctaatttcagagagtatcttcattggttggtgactgatattcccgaaactacagggcctaatttcggtaacgagatcgtaa

SEQ ID NO: 30716 - DNA, 196 bp, Glycine max
  Clone ID: LIB3138-049-Q1-N1-B9
atttgcttcatcattatggctgtgaaccttgggaacttggcgttgctactggacctgacttcgccgcggagcgtgattctggagaggaaagcgcgtcccgccggatccgacgtcgttttgtgcgcgccgtcgtccaagagggactacccctccttctcctcctacgctgtggtggcgcgtgggaagtcgaactcgg

SEQ ID NO: 30717 - DNA, 385 bp, Glycine max
  Clone ID: LIB3138-049-Q1-N1-C10
atcctccatcatcgattcgattctcttgctctttgttatttccttcggtggtgaacaaagcaaaacaattccatcgatgaatcgggcgtcgcagctttcctgataatgatcttggcgctgcgaatcgattgcatgggtttggagaatgtcggagctttgtagtggaccgtgacgacgtcgtgctccgattgctcgtaaaagctccgaaccaccgtctctggcggggagatacgtcaagacccgcgctgcagtcgccagggaggcagcggcggcggctgataggccaagaactcgtttggcggccaaaatagaggagaagccccttacagtaatatccgatcacgctaagaaagacgccgccgccatggctgacgagagcggttgc

SEQ ID NO: 30718 - DNA, 388 bp, Glycine max
  Clone ID: LIB3138-049-Q1-N1-C11
ggatgatgaatgctcctgattcaaatgataatattgatttactgttgagcattgatttgttgggtttacaaggagcaggtaaagcttttccaaacaaaattgtttttgatgataagcttgtgttggctaacacacaagaattctttgatggaaattttccagtggattcttggttaccaatttttgtgaattgtctttatcctgtaagtcaattaccttcagaagctgtcgttgtaaatgttacatgtggtagtggaccgtgtggtttacccaccactgcttggattagttctgcagttaacaatcgctcctcagatatcaacaaaaggattcgcacagcacttgggaaaggtaagaaaattgtttttcttactagagttgatccttt

SEQ ID NO: 30719 - DNA, 384 bp, Glycine max
  Clone ID: LIB3138-049-Q1-N1-C12
tattttcaaagtgttctgcctctctatgttgttgggatttatatctactgggtgtatatatacatttgtttttatgtccttggtctatatatacatttggtgataattgtctattttatttgtgtgtgttctctttgcaacatagactgatactttttgttattccccactatgtgcttcagacagtgtatgtccacagtttgaggaaaacctgatatctgaatggtagcagtatgaatcactgatatgtggcatgttaacaagcacaatggcagggtgcaatgattggcgtcactctatggcaataactatttgctgaatttgaggcaaagttgcattgtggttctgcatatttgattcagaacattaaagttgttgacaatc

SEQ ID NO: 30720 - DNA, 381 bp, Glycine max
  Clone ID: LIB3138-049-Q1-N1-C2
cttctcttaaaagattctttgctttttctttaagcctttccgaatgaagtacttgtttcattttctctcgaaacaagaaaaatgttcatcgagagtttcaaggttgagagtcctaacgtgaagtacacagagactgagattcagtccgtgtacaactatgaaaccactgaacttgttcacgagaacaagaatggcacttatcagtgggttgtcaagcccaaaactgtcaaatatgaatttaaaaccaacacccatgtccctaaactaggggtaatgcttgtggggtggggtggaaacaatggctcaaccctcaccgattgtgttattgctaaccgaaagggtatttcatgggcaacaaaagacaatattcaacaagcctat

SEQ ID NO: 30721 - DNA, 380 bp, Glycine max
  Clone ID: LIB3138-049-Q1-N1-C3
gaggaagctcgccaattgagaaggaaagctctctctcgtattgaagggctgcaaaaagctgatgtgcctaccatagcacagattgaagagttccattcgatgcagaggatgatgaatgctcctgattcaaatgataatattgatttactgttgagcattgatttgttgggtttacaaggagcaggtaaagcttttccaaacaaaattgtttttgatgataagcttgtgttggctaacacacaagaattctttgatggaaattttccagtggattcttggttaccaatttttgtgaattgtctttatcctgtaagtcaattaccttcagaagctgtcgttgtaaatgttacatgtggtagtggacgtggtggtttacccac

SEQ ID NO: 30722 - DNA, 374 bp, Glycine max
  Clone ID: LIB3138-049-Q1-N1-C4
ctcgagccgaaagaatagatcctcaatacaatgaggttcaggctcagatggaaacaaatttgtttaaattgtctcttgatgatgttgaaactcctaaaggttccatgttggatctgaaaatttctcaatctaaaattgcacttcccaagaacacagttggaggaaccattctgcgtagtgatctattggcaaattttttgacagagggcaattttagagcaagtgttgatttgcagcgcactcatcgtattagaggaatgattaaaatggtggccacagttggtattcctgagaatacaggtatatcattggcctgtgctatgaatagttcttttagggggcgcgccagttctgatatttacaccatctgctct

SEQ ID NO: 30723 - DNA, 315 bp, Glycine max
  Clone ID: LIB3138-049-Q1-N1-C5
ctggacttgcacctgagggatcacagttcgatgctcgtcaatatgattctaaaatgagtgacttactttcatctgatggacaggacttcttcacatcctatgacgaggtttatgatagttttgacgctatgggtttgcaggaaaatcttctcaggggaatttacgcatatggttttgagaagccatctgccattcagcaaagggggatagttcccttctgcaagggacttgatgttattcagcaggctcagtctggaactgggaagacggctactttctgctctggtattctgcagcaacttgactatagcttga

SEQ ID NO: 30724 - DNA, 385 bp, Glycine max
  Clone ID: LIB3138-049-Q1-N1-C6
gcctaccatagcacagattgaagagttccattcgatgcagaggatgatgaatgctcctgattcaaatgataatattgatttactgttgagcattgatttgttgggtttacaaggagcaggtaaagcttttccaaacaaaattgtttttgatgataagcttgtgttggctaacacacaagaattctttgatggaaattttccagtggattcttggttaccaatttttgtgaattgtctttatcctgtaagtcaattaccttcagaagctgtcgttgtaaatgttacatgtggtagtggacggtgtggtttacccaccactgcttggattagttctgcagttaacaatcgctcctcagatatcaacaaaaagattcgcacagcactt

SEQ ID NO: 30725 - DNA, 165 bp, Glycine max; identical to SEQ ID NO: 30182
  Clone ID: LIB3138-049-Q1-N1-C8

SEQ ID NO: 30726 - DNA, 376 bp, Glycine max
  Clone ID: LIB3138-049-Q1-N1-C9
gcaactgcattctttaatgataacaattcatcgctagctagagctttatcagaactgatgcaagaagcaaatcaagaagtacctgcttggctctcacggtatgctgctcgatcttcttttggtggaggcaggaaccggcgatcaggcggtcgatttggtagtcgtgactttcgaagagagggctctttcagtagaggttcttctgattactacagtgcgggaaacagcagtggtggtggatatggaggctctggtgggtatgctggtggagggtatggtcctggggtcactagtgcttgggattgactttcttcttttcatagcattacataccatcttaagtataggtgtggatacgcctacaagatgatttttc

SEQ ID NO: 30727 - DNA, 338 bp, Glycine max
  Clone ID: LIB3138-049-Q1-N1-D1
caagttggaatcaacctatactccatggaatggactggtttggcgcggtagattactgagtaagggcaatgatattctgtgttgcgattatgctagatttgatggtttgattaccaagcaagttttgagcaagatggcagaaatgataaacagtctttgtggtggtgatgaaaaattgatgcgtgaaaggacgcacctgctgttggcttgttgttcaaggatggcaatttgtaagaaagatgtttggagagttgaatgtggaatcccttctggatttccgctcacattttttgcaatagcatttttaatgagacgctcattaaatattactttgaaaa

SEQ ID NO: 30728 - DNA, 386 bp, Glycine max
  Clone ID: LIB3138-049-Q1-N1-D10
taatggcacaggtggatattctgtcttctagtgcaagtgatttcagagctgcaatggtgagtaaaaatagcaagcctcaagctactgcaatgcatgtgggagctatagaaattatcattgatagtttcgcaagtcctgattgcaacatagttggtgcaatgcttttggttgatacttatcataccaatcctgaaaatgcagttcgtagtatttttgttgcgcctttcagaggcggaaggcccattcgggtggttacatttccgaataccattgtgcagattgaaccagacatgaattcaaggtttcagcttttgagtaccactaccaatggtgattttgttcaagggaaagatctcgcaatggttaaagttaatgtagcatgtgct

SEQ ID NO: 30729 - DNA, 384 bp, Glycine max
  Clone ID: LIB3138-049-Q1-N1-D11
ctgagctcaatttcaatatgattggctttatgggggctatgatatgaaatttggcattcgtcttccgcaatatattctcaaagaaagggatgaagggaatgtctgttagtggaatgaactactatgcttgtctttccataatgtcactactaattctcacaccttttgccattgctgttgagggccccaaggtttggattgcaggctggcaaacagctgtgtctcagattggtcccaattttgtatggtgggtagctgcccagagtgtcttctaccacttgtacaatcaagtctcatacatgtctcttgatcagatttctcccttaacattcatcattggaaacacaatgaagaggatttcggtcattgtctcttccatcctta

SEQ ID NO: 30730 - DNA, 388 bp, Glycine max
  Clone ID: LIB3138-049-Q1-N1-D12
ccaattttaaaattgaatactaaaataagcaaaataatcaagagagtaaattcataactaggggattaaatttacaattatgagataaaggaaccaaatttacaaaattttgcaggtaggaggaattgagttgaaatcgaaagggaagcggtggtttaggttaggatttggtgagtgagtggggatggcgaagttcaatgtggtgcagaagcgaaggagagctctaatagcagagaagaagagacagcttcacggagaccctttaaccggcaagctcaagatcaaggaccaacccctttccctatccggaaaacgcaaacgcaagctcttcaaaaaatggcgccgggaccaaaaggacgccttacagaatggtttggtaaccatggaa

SEQ ID NO: 30731 - DNA, 351 bp, Glycine max
  Clone ID: LIB3138-049-Q1-N1-D4
gcctattttatattttccacacctcttttaattgtcgtaatgatgtgtgaagtgtgtgttattttaaaaaaaaaaaaaaaaaaaaaaaaaaaaaaaaaaaaaaaaaaaaaaaaaaaaaaaaaaaaaaaataaaaataaaaaataaaaataaaaaatataataaaaaaatataataataattatataactatatttattattaattatatttaataataatttatattaacattatatacccatctttattaaatttttttattattgatttcttttattattactactatataatatttatctttataatttattttaaatcaattatatttaatatatatatttataata

SEQ ID NO: 30732 - DNA, 380 bp, Glycine max
  Clone ID: LIB3138-049-Q1-N1-D5
gcacctttttgcccatagccatggctgaatcaattttaggtttcacccttttcaaatcacacactcttagttcatgtctacaaacaaaaaagtttcaagtgaaccattcttcaagattgccaaagcagcattcaaagtctacccttttcaacagaccgtggcaggtcttagagggcaagagcgaaaaaagaggatctttgtgcaaagtgaatggcttgccagattggccactgatggcaattatagtagagcaaatggaggggcaaagagatttgatcactgagaaaacagtttcccatcttagtgatcgggcaataaagaatgtttactcttggtacataatgttcaccgtttgggggtgcttattctttggtgccatg

SEQ ID NO: 30733 - DNA, 381 bp, Glycine max
  Clone ID: LIB3138-049-Q1-N1-D7
gtcacaacttcattatgtttcgtgtaataatctggaaatgcaagaagcttatcttgtcaatctcgtaaatgtgttacgagaattgtatttgcacagtccagaggaagctcgccaattgagaaggaaagctctctctcgtattgaatggctgcaaaaagctgatgtgcctaccatagcacagattgaagagttccattcgatgcagaggatgatgaatgctcctgattcaaatgataatattgatttactgttgagcattgatttgttgggtttacaaggagcaggtaaagcttttccaaacaaaattgtttttgatgataagcttgtgttggctaacacacaagaattctttgatggaaattttccagtggattcttggtt

SEQ ID NO: 30734 - DNA, 380 bp, Glycine max
  unsure at all n locations
  Clone ID: LIB3138-049-Q1-N1-D9
agtacccaaatcaatgttcacactcacttctccttcttccagggccttacccatggattctcttcccaaattgcgccacccttctccatttcccactcccttatcctcttccctctccttccgctctttaccgccaccccattttccttcgtcgtcgtttaggttaccctccatcagagcctcctcctcaccctcccaaaacgaccccgcttttcgcaccccgagtaacacgccctccctcccccccctcctccaaaccctaacctccttcctctcccccctcctcgaaaccacctgcatcgtcatcgccgccgccgccttcttcttcatgcgcttncaccacacgcccgccgtcatcgccgctccgctcactttccccg

SEQ ID NO: 30735 - DNA, 375 bp, Glycine max
  Clone ID: LIB3138-049-Q1-N1-E1
tgcaggagttgctcaagtactccaacgaggagaagaagcgcaactggttggagaccgtcgagctccagatcggcctcaagaactacgatccccagcgtgacaagcgtttctctggcaccgtcaagcttccccgtgtccctcgccccaacatggccatctgcattctcggtgaccagcacgatatcgaccgtgccaagcacggcggtgtcgacgccatgttcgccgacgacttgaagaagctcaacaagaacaagaagctcatcaagaagcttgctcgcaagtacgatgccttcgtcgcttccgacgccctcatcaagcagatcccccgtctcttgggtcctggtctctccaaggccggcaagtttcctacccccg

SEQ ID NO: 30736 - DNA, 385 bp, Glycine max
  Clone ID: LIB3138-049-Q1-N1-E10
ggaccattcagtgggtttgaactgtgggcgttgggattacattttcagttatgttaagaccttccaagctcatccagatcgcctcttaccagatagggtcctagttggcatgactcaacacttcatgaaaagttattctgatcttctcatcaggacgtgccacaggcgcggcgtgcatgctatgggaggaatggcagcgcagattccaatcaaagaagatccagtggctaacgaggtagcactggaacttgtaaggaaggacaagcttagagaagtgaaggcagggcacgatggaacttgggctgcgcaccctggtctcattccagcctgcatggagattttcaacaacaacatgggcaatgcttccaaccagatagacacagtg

SEQ ID NO: 30737 - DNA, 385 bp, Glycine max
  Clone ID: LIB3138-049-Q1-N1-E11
attgagagttgctgcttggaagaaaggctgtttaatggtcaagattgtgatgtctgggaatgcagcagtcaaaaggagtgattgggcctcattggtacaagtgtttttaacaaacagcaacagtacagagcattttgatgcatgtaagtggacaaaatcagaaccacattcctgggaattgatcttcccaatagaggtatgtggtcctaataatggttttgaaatgtggagttctgagtgggcaaatcaaacttcatggcatttgagtttccttattgacaatcccaaacagtctacagtttttgatattctcttgggaatctctcaagattttgaaattgctggtaatactcttatgccagctttttctgttccacaggctact

SEQ ID NO: 30738 - DNA, 385 bp, Glycine max
  Clone ID: LIB3138-049-Q1-N1-E2
ttggaatcaaatggcttcagtgagaacaccattgaattttgattcgagcaagcagagcttttgtcagttttctattgaccttctcggtggaggaatcttagtggacaaaactggagattggatcacacttatacaaaattctccaattagtaacttattgagagttgctgcttggaagaaaggctgtttaatggtcaagattgtgatgtctgggaatgcagcagtcaaaaggagtgattgggcctcattggtacaagtatttttaacaaacagcaacagtacagagcattttgatgcatgtaagtggacaaaatcagaaccacattcctgggaattgatcttcccaatagaggtatgtggtcctaataatggttttgaaatgtgg

SEQ ID NO: 30739 - DNA, 383 bp, Glycine max
  Clone ID: LIB3138-049-Q1-N1-E3
agctgcttcatttaacatcattcctagcagcactggagctgccaaggctgttggaaaagtccttcctgctttgaacggaaaattgactggtatggcattccgtgttcccaccgtggatgtctctgttgttgacctcacagtgaggctggagaaggaagcctcctacgatgaaattaaaaatgctatcaaggaggaatcagagggcaagttgaagggaattcttggttacactgaagatgatgtggtctccaccgactttgtgggcgatagcagatcaagtatttttgatgcaaaggctggaattgcattgaataagaactttgtgaagcttgtctcttggtatgacaacgagtggggatacagctcacgtgtcattgacctgc

SEQ ID NO: 30740 - DNA, 382 bp, Glycine max
  Clone ID: LIB3138-049-Q1-N1-E4
gctaatgaaaaacttaaccgactacgctctgacaagggttggttggaattggaggaagctattgaattgggtcctgtacgaggttttggggaaaagcttagctccattattgatgcctgcctttcacaatatgatgaggaggcaatcttctttgatgaagctgtgagaaatgcaaaacgaaagcaattggaatcaaaggctttggatcttgtgtaccctgcttatacaacattgttagggcatatacgctctaaagctctagatgattttaagactaagctggaacaatcactaaacaatggagaagggtttgcttcatctgttcgcacttggactcagtctattatgcttcagtttgacaaagcatctgctgatgctgctg

SEQ ID NO: 30741 - DNA, 382 bp, Glycine max
  Clone ID: LIB3138-049-Q1-N1-E5
aatcctggtatttcaggttctcgtcttttgggcaccattcctcagtccatttcacagcaaactgtttggaatcaaatggcaacagtgagaacaccattgaattttgattctagcaagcagagcttttgtcagttttctattgaccttctcggtggaggaatcttagtggacaaaactggagattggatcacacttatacaaaattctccaattagtaacttattgagagttgctgcttggaagaaaggctgtttaatggtcaagattgtgatgtctgggaatgcagcagtcaaaaggagtgattgggcctcattggtacaagtgtttttaacaaacagcaacagtacagagcattttgatgcatgtaagtggacaaaatcag

SEQ ID NO: 30742 - DNA, 381 bp, Glycine max
  Clone ID: LIB3138-049-Q1-N1-E6
gcaagtgcgagacctattctcctctcgtcgattccaagatagcatggagaagctgccgaacctggtggcggacattgtgcagacgtccttaaacactggtcccaggggtgtccttaggttggctcaaggtgttcaggccttccttggcgttggtcaggagtggttaactgatgtctctaagtcagcaaattcatctactgggttaccgactgaactgaagcttggtttactcttccccttttatttgaggaggctgtttgagcgcatgggtgcaacctatatcaaattgggtcagttcatagcatcagcaccaatgctgttccttttgaggaaattgaatctatattgcgcaaggaattaggaaagccattagaaagcgtt

SEQ ID NO: 30743 - DNA, 380 bp, Glycine max
  Clone ID: LIB3138-049-Q1-N1-E7
caggtattcagtgctgttttcagaaaatggaaggtatctcctgcaaaggcagaagaactttatgaggtcgatggtccacaatctgctataaaaggcagtagaaagattcggcacactgatgattttgagtaagcattgagattgctaattttctttttatacttggttgtattgaattagtacacctagttgataattgaaaatttgaaactttatatctgtgatttgtttattatattgggcagattcatggacaaggcagcaacaattaaagagactgaagagcatagtccaaagaatccatggaggctctgcactgtgactcaagtggaggaagccaaatgtgtgttaagaatgttaccagtttggctatgcaccat

SEQ ID NO: 30744 - DNA, 380 bp, Glycine max
  Clone ID: LIB3138-049-Q1-N1-E8
atgcaaccccaccaccccatcaggcctcaccatcagagctggttcctatgctgatgagctcgttaagaccgcgaaaacagtggcttcaccagggaggggtattttggccatggatgagtccaatgctacctgtgggaagcgtttggcttcaattgggctagagaacactgaagctaaccgccaggcataccgtaccctccttgtgacagttccaggacttggtcagtacatctctggtgccattctctttgaggaaactctctaccaatccacaactgatggcaggaagattgtcgacgtgctcctcgagcaaaacattgttcccggtattaaagtcgacaagggtttggtaccccttgctggttccaacgacgagtcat

SEQ ID NO: 30745 - DNA, 380 bp, Glycine max
  Clone ID: LIB3138-049-Q1-N1-E9
cagcagtcaaaaggagtgattgggcctcattggtacaagtgtttttaacaaacagcaacagtacagagcattttgatgcatgtaagtggacaaaatcagaaccacattcctgggaattgatcttcccaatagaggtatgtggtcctaataatggttttgaaatgtggagttctgagtgggcaaatcaaacttcatggcatttgagtttccttattgacaatcccaaacagtctacagtttttgatattctcttgggaatctctcaagattttgaaattgctggtaatactcttatgccagctttttctgttccacaggctactgccagatcttctgaaaatgcggaatcctctgcatgatctggaatttgtgttttcttt

SEQ ID NO: 30746 - DNA, 377 bp, Glycine max
  Clone ID: LIB3138-049-Q1-N1-F1
gggaaaattgactttcctccaaggcacttcccgaagtgttaagagagtgcctctttctatagggggaggagctggtgcaaagaatgctattctcatgaatatgccaaatgctgttctttcaatgtggagatattttgttggagatctcgtctttgaagtttctaagatgacttctccctacattaaatgtacagtctctttcttcatagcatttggaaatttggctgatgataccatcaattttgaggcttttccccacaagctggtgcagtttggagagattcaggaaaaagttgtgttgaaattttcacaagaggaatttcttacagcttgagcaactcatgtgcgtcctgcaacaactctgttggctgatgggt

SEQ ID NO: 30747 - DNA, 384 bp, Glycine max
  Clone ID: LIB3138-049-Q1-N1-F10
agaaagtggaggagaatgaaggagaagtagttgcagaacaagactgtgattcctctgccaccaagctttattttgggaatttgccttatagtgttgatagtgccaaacttgcagggctaattcaggattttggtagcgcagaactaattgaggttctttacgacagggatactggaaaaagtagaggctttgcatttgttacaatgagttgtattgaagactgtaatgcagtaatagaaaatcttgatggaaaagagttcctgggcagaaccttgagggtgaacttctctagcaaaccaaaaccaaaagaacccttgtaccctgaaactgaacacaagctttttgttgggaacctgtcatggtcagtaactaatgagatattga

SEQ ID NO: 30748 - DNA, 382 bp, Glycine max
  Clone ID: LIB3138-049-Q1-N1-F11
gctgatgataccatcaattttgaggcttttccccacaagctggtgcagtttggagagattcaggaaaaagttgtattgaaattttcacaagaggaatttcttacagcttggtcaactcaggtgcgtcctgcaacaactctgttggctgatgggtgtccatatttgtatgcaatggtgcatgatagttcagtgtctacaataccaggtgattttgtcattggtgtcaagttgacaaccataaacaatatgtgtgcatatgggctcaatcctggtatttcaggttctcgtcttttgggcaccattcctcagtccatttcacagcaaactgtttggaatcaaatggcaacagtgagaacaccattgaattttgattctagcaagc

SEQ ID NO: 30749 - DNA, 382 bp, Glycine max
  Clone ID: LIB3138-049-Q1-N1-F12
ctcgagccgaatcggctcgagattggtgctggttcacattcttcagaagattttcctgaaaaggaagatcaagaaaaacccaaaaagattgatgccagattgagacaaagaatagatcctcaatacaatgaggttcaggctcagatggaaacaaatttgtttaaattgtctcttgatgatgttgaaactcctaaaggttccatgttggatctgaaaatttctcaatctaaaattgcacttcccaagaacacagttggaggaaccattctgcgtagtgatctattggcaaattttttgacagagggcaattttagagcaagtgttgatttgcagcgcactcatcgtattagaggaatgattaaaatggtggccacagttggta

SEQ ID NO: 30750 - DNA, 316 bp, Glycine max
  Clone ID: LIB3138-049-Q1-N1-F2
cggagagttcgagaagaagtacattgcgacgctcggagtcgaggtccaccctctcggcttcactacaaacctcggccccatccagttcgacgtctgggacaccgcaggtcaggagaagtttggtggtctccgtgatggctactacatcaacggccagtgcggtattatcatgttcgacgtcacctcgcgtatcacatacaagaacgtccccaactggcaccgtgacttggtccgtgtctgtgagaacatccccatcgttctgaccggcaacaaggtcgacgtgaaggagcgcaaggttaaggcgaaatcaatcacc

SEQ ID NO: 30751 - DNA, 128 bp, Glycine max
  Clone ID: LIB3138-049-Q1-N1-F3
gtctctttcttcatagcatttggaaatttggctgatgataccgtcaattttgaggcttttccccacaagccggtgccagttggaaaggttcaaggaaaaagtggattggaattttcacaagaaggatt

SEQ ID NO: 30752 - DNA, 383 bp, Glycine max
  Clone ID: LIB3138-049-Q1-N1-F4
aaaattactgcgccaggctaaagctccaagtatgtttttacaatccttcaaaaattttgtttctttgtgtgtgtatggtgatgataacttaattagtgttcatgaatatgtcaagccttactttagtggttctaaattgaaaagctttctagctagtcataacatcaccattactgatggtattgacaaaactagtgcaactttgcaatttagaaagttagcagattgtgattttctcaagagaaactttaagcagatgtctaatgttttgtgggtggctcctgaggacaaggcgagtttatggtcacaacttcattatgtttcgtgtaataatctggaaatgcaagaagcttatcttgtcaatctcgtaaatgtgttacgag

SEQ ID NO: 30753 - DNA, 321 bp, Glycine max
  Clone ID: LIB3138-049-Q1-N1-F5
agactgcttggtattaaatggctgcagttatatcaccaccgtagtcttgttttcgcacgcgctgctttcgtccattgcctattgtccttctttgtggacgactcattctggacctaacgggtgattgaaccactcttattcaaacgtctgcacttgatgaccagttgtgagtggcggctatgatgaaaggctgaatcatggtcactattgcaaggtacgggtacgcaaacgtgttaaggattgattgggccctattgctacaggtgtttttgacgtaccacatcacatctgatcactgtgatgcacgtatgtggtcaaaac

SEQ ID NO: 30754 - DNA, 383 bp, Glycine max
  Clone ID: LIB3138-049-Q1-N1-F6
aaatcattattttttcaggcagagggaagatgacaagtggaaacatgatctctatgaggatgatgaaccccagctctctagtatggattgattaagttattctcatatgcaagtataagttgctgctcttgttggatgccgatagttcattttatgggttttgactgtgtgttaatgacttgtgaagatcgcaaggtcactgctcaagatcttcgtctgaagcttcaaaggaaaggtcttcatcctggaggtcaaactggaaaaagttctgttcatggtgagcgggatctccgtgaaaggctatcagggacaatgactcaacaacctaaaaactatgacccaccaaagcctaaagtggccgctaaacctagcagtaaaagtat

SEQ ID NO: 30755 - DNA, 367 bp, Glycine max
  Clone ID: LIB3138-049-Q1-N1-F7
aaatcctagatcaactacttcagatgatactccttgtatggataagactgatgatagtcttacttcagaaaaggttgaggatgacattcccttcgattataatcttgttgataatctccaagacaatgataaggacttggaggatagaaatgctccctcaggtcaaaagctatctggtgttgattacttgagatgcaaaatgaaactcttgaattctgttcctgttgagcctgaatgggaggatgatgatatttacattagcaatcgaaaggatgcattgaagacaatgaggttagcatcacgccattctaaagcagcttctagtgcttttctaagaggtgatcatttttctgctcaacatcattca

SEQ ID NO: 30756 - DNA, 381 bp, Glycine max
  Clone ID: LIB3138-049-Q1-N1-F9
gaaaaattactgcgccaggctaaagctccaagtatgtttttacaatgcttcaaaaattttgtttctttgtgtgtgtatggtgatgataacttaattagtgttcatgaatatgtcaagccttactttagtggttctaaattgaaaagctttctagctagtcataacatcaccattactgatggtattgacaaaactagtgcaactttgcaatttagaaagttagcagattgtgattttctcaagagaaactttaagcagatgtctaatgttttgtgggtggctcctgaggacaaggcgagtttatggtcacaacttcattatgtttcgtgtaataatctggaaatgcaagaagcttatcttgtcaatctcgtaaatgtgtta

SEQ ID NO: 30757 - DNA, 208 bp, Glycine max
  Clone ID: LIB3138-049-Q1-N1-G1
gttgcttatgggtttccagaataaattgatttggttaaattgcttggttagttagttggtttgctccaattgggcatgtatgctaatttttggagattagcaaaatccaataattgcagcctggatgaaagtgtatgcaaatagatggaaaaccgttgaaaatataaaacctaatttatatttaaattgggaaattgtggttactctt

SEQ ID NO: 30758 - DNA, 384 bp, Glycine max
  Clone ID: LIB3138-049-Q1-N1-G10
aatggttaaagttaatgtagcatgtgctgctgttggcttgacatcaagttacactccaactccattgttggaatctggtttgcaaaaagacagagggttaattgtggagtattttggaaggatgtcttacgttgctcataacgttaatcagccccaagagaaagatttgttggagggaaatttttcctttgatattaaatctcgctctagattggaaaaagtttcctctacaaaagcacaatttgttagtggaaaaaccttcaaatatgatataattggtgctggttcacattcttcagaagattttcctgaaaaggaagatcaagaaaaacccaaaaagattgatgccagattgagacaaagaatagatcctcaatacaatga

SEQ ID NO: 30759 - DNA, 385 bp, Glycine max
  Clone ID: LIB3138-049-Q1-N1-G11
cccatacatctgggggagtacagaaagaaaaggactatccatacaccgggagagatggcacctgcaaatttgacaaaaccaaagttgcggctactgtatctaattacagtgtggtttcccttgatgaagaacaaattgctgcaaacctagtaaagaatggccctcttgcagttgctatcaatgcagtttttatgcagacatatgttggtggcgtctcatgcccatacatctgtgggaagcatttggatcatggggttcttctagttggttatggtgaaggtgcatatgctcccattcgttttaagaacaaaccttactggatcattaagaattcatggggcgagagctggggagagaatggatattacaagatctgcagaggtcg

SEQ ID NO: 30760 - DNA, 81 bp, Glycine max
  Clone ID: LIB3138-049-Q1-N1-G2
ctttgaaggattggaccttggaaagatggacaaagctgatgactctggacttgcttcatatgttgccggtcaaattgatcg

SEQ ID NO: 30761 - DNA, 383 bp, Glycine max
  Clone ID: LIB3138-049-Q1-N1-G3
atttgcaatagcatttttaatgagatgctcattagatatagctatgaaaaattactgcgccaggctaaagctccaagtatgtttttacaatccttcaaaaattttgtttctttgtgtgtgtatggtgatgataacttaattagtgttcatgaatatgtcaagccttactttagtggttctaaattgaaaagctttctagctagtcataacatcaccattactgatggtattgacaaaactagtgcaactttgcaatttagaaagttagcagattgtgattttctcaagagaaactttaagcagatgtctaatgttttgtgggtggctcctgaggacaaagcgagtttatggtcacaacttcattatgtttcgggtaataatct

SEQ ID NO: 30762 - DNA, 384 bp, Glycine max
  Clone ID: LIB3138-049-Q1-N1-G5
gaaagataagaagtaaggaggtagtaggcagtgtgtttgtttgtgttgtgttgggcgttaaggatggtgttgaattgcaaaagcaaaaacatcctccttttagttttgttagccatagcaatagaaacgggatggtcatcagaagaagaaagcagcatcatatcacgattccagcaatacctgaaaatcaacactgcccaacccaccccgcgttaccacgaagccgccgatttcctgatatcccaaggtaaagccctctccctggaatcccaaagcattgagtttgtggcaggcaagccacttgtccttctgaaatgggaaagctcaaaccctaacctcccctccatcctcctctattcccacaccgacgtcgtcccatcggag

SEQ ID NO: 30763 - DNA, 375 bp, Glycine max
  Clone ID: LIB3138-049-Q1-N1-G6
cttctccctacattaaatgtacagtctctttcttcatagcatttggaaatttggctgatgataccatcaattttgaggcttttccccacaagctggtgcagtttggagagattcaggaaaaagttgtattgaaattttcacaagaggaatttcttacagcttggtcaactcaggtgcgtcctgcaacaactctgttggctgatgggtgtccatatttgtatgcaatggtgcatgatagttcagtgtctacaataccaggtgattttgtcattggtgtcaagttgacaaccataaacaatatgtgtgcatatgggctcaatcctggtatttcaggttctcgtcttttgggcaccattcctcagtccatttcacagc

SEQ ID NO: 30764 - DNA, 381 bp, Glycine max
  Clone ID: LIB3138-049-Q1-N1-G7
aaaaagctaactaatcctcacaccactttgttgttcttcttgttgagttctcacactcattcattcttattattactatccacaccctttcgttcgttttggttggttctcatgggttgaacttgacccccttgccactgcgacgccgtttccgttaaatggagtgggacagcaattccgatctcagcgatgacgacgccgtttcgtatgtcctaaacgacgacgatgatgacgccgttggacccctccccttccccgtcctccaaacggcaccgtgcggcttcgtcgtcaccgacgcgctcgaccccgaccaccccatcatatacgtcaacgccgtcttcgagatggtcaccggataccgcgccgaggaaatgctcggtc

SEQ ID NO: 30765 - DNA, 311 bp, Glycine max
  Clone ID: LIB3138-049-Q1-N1-G8
ctctttcctcttattattcagaaggaaagtgtgttttgttcggtggtcaattcccatccacacgcctcaccggaaacatgtcagcggtggttgctggttcctcctcttcattctctgccaccttcactaccagaaggagcccctccttaaaaaactctcaactctctcattccaagacactaacttctcctcaatgccagaagacatctttacaaggcctctcacttcatgaagccaaaaggggtgtttcagaatccttcctagttgaaaacaagaatggttcctccattgctggaaggagacttgagatc

SEQ ID NO: 30766 - DNA, 386 bp, Glycine max
  Clone ID: LIB3138-049-Q1-N1-H10
caaaactggagattggatcacacttatacaaaattctccaattagtaacttattgagagttgctgcttggaagaaaggctgtttaatggtcaagattgtgatgtctgggaatgcagcagtcaaaaggagtgattgggcctcattggtacaagtgtttttaacaaacagcaacagtacagagcattttgatgcatgtaagtggacaaaatcagaaccacattcctgggaattgatcttcccaatagaggtatgtggtcctaataatggttttgaaatgtggagttctgagtgggcaaatcaaacttcatggcatttgagtttccttattgacaatcccaaacagtctacagtttttgatattctcttgggaatctctcaagattttg

SEQ ID NO: 30767 - DNA, 88 bp, Glycine max
  Clone ID: LIB3138-049-Q1-N1-H2
aaagtattgagagaatcttttttgttttatatgtctatattattattttgtaagaatactacagttatattgacatttgacttgaacc

SEQ ID NO: 30768 - DNA, 350 bp, Glycine max
  Clone ID: LIB3138-049-Q1-N1-H3
ctgaggctttgctgtatggactcctccagctgcagaaaaagatcaataggcgcaaagacttcctccactggtggacaaagtgaggtcgattcggtttattttcttggcatcgaagctattttataataagcaattacatggtagtttaccttgctaagaagcactcatgttagatggagattgtgtccgtacaatactttgtcacagtttctgaatgttttatgtgctgctgcttttacggggcttcaggcccatttgaagttgaataatggatgtttattgttatctgtcaatgcttaatctgcacctgagagtgtaaacaatttctgaatgactcatgtttggtttgt

SEQ ID NO: 30769 - DNA, 384 bp, Glycine max
  Clone ID: LIB3138-049-Q1-N1-H4
gcaagtgttgatttgcagcgcactcatcgtattagaggaatgattaaaatggtggccacagttggtattcctgagaatacaggtatatcattggcctgtgctatgaatagttcttttagggggcgcgccagttctgatatttacaccatctgctctcaagactgtgaattgtggaatcctgcttgcacaaaagcaatgactatgtcatttaatccaaacccgtgttctgatgcatggagtttggaatttctgaagcgtactggatttcattgcgatatcatttgtgtcactggatggactgccaccccaatgcaggatgttcaggttacaattgattggtttatttcctctcaggaatgtgttcccaggacctattgtgtttta

SEQ ID NO: 30770 - DNA, 381 bp, Glycine max
  Clone ID: LIB3138-049-Q1-N1-H7
attaaaaaaaaaaattagaaaacaatatagatacgatcttttatccgataattttatcaattatgcagataagaaagactcatatatttatggatatagatccctatttcaagtaaaaaaaaaccaagtgatttcttctaattacaacacgtataaaaaagaattattggatatcatagataatctctttatcaagaattatatattggaagatgcgattctagatatggaaaaaaatatgtatagaaagtattttgattggatgggaatcaatagagaaatactaaatcgttccatatcgaatccagaattttggttcttttcaaaatttgtgatattttatgacgcatataggggtaactcgcaggttataccaatcaa

SEQ ID NO: 30771 - DNA, 361 bp, Glycine max
  Clone ID: LIB3138-049-Q1-N1-H8
atcaaagtttcacttcagccttatccggtttagggtttcggtttttgacccaacctttgacgtatcgaaaccttaagtttcggatcaggtctgagcaatctggttggtagaacctttggtcttagagagtcaagttttatgtctgaattagacgatcaaattcctactgccttcgatccttttgctgatgcaaatgctgatgactcgggtgctgggtcaaaggagtatgtgcatattcgcgtacagcagcgaaatggaaggaaaagcctgacaaccgttcagggattgaaaaaagaattcagctataacaagatacttaaagatgttaagaaagagttctgttgcaatggaacagttgttc

SEQ ID NO: 30772 - DNA, 313 bp, Glycine max
  Clone ID: LIB3138-049-Q1-N1-H9
ccaaatctaaaacaaatgccggtcctgctaacactaaggctacagagccaatgcacaaggtcgaagatggtgtctttggcactgtcggacgattcagagtgtactaaccagaacgagccctttgctgctactgtcgctatgctagcatctgcaacatgattgatgggagaaagaataactggcacatgaatgctaagtcaattaaacacaggaactggtactcccatttatgagagcggagcctatagatccgctacacatgctcattaccctgctcagagccattggagggacaagagaccgtggaaaattt

SEQ ID NO: 30773 - DNA, 400 bp, Glycine max
  Clone ID: LIB3138-050-Q1-N1-A1
cgagcactcttgttaaatcaagggaaggtggtctcgattgcgggtgatccactatacactctactcttgagaaagccttcaaacccagtcccacagaattcttctgctttaccatgccaccaaagcctttagactatgggtcaataaatgaaaacgtgaagaagagtcgatatgctgtcagaggtgaatgataccttcgagcttctgaacttccgaaagagggcgaaaagattatctttactaatgatggcagcccgcatgcattgggacagaaaccactgagcttccctcgccgggttgtagctttgtgccgagctccattcctacttgatgatcctaatgttggactgctataccctgctgagcaattgcaagagctaaacactatctttcattgacc

SEQ ID NO: 30774 - DNA, 290 bp, Glycine max
  Clone ID: LIB3138-050-Q1-N1-A10
agcgacacttttcaacttcaataatcgcatcgcacaagcggagcgcggcgcatctcattgtctacggaattgatcgacccaactttgagcaatcacatccagcggatcgggcggtaccatctcaagccgtgctatctgataggcgatggcgcattgtgctgtccaagcgtagggctaaggttgccggcaactacaccaacgccgacctgggagctgagcaagttggcaaggatatcaacgcccttggcgacggcttagatgtcgctggcttcaaggctaactttggcaac

SEQ ID NO: 30775 - DNA, 399 bp, Glycine max
  Clone ID: LIB3138-050-Q1-N1-A11
gtggatgggaaaattgactttcccccagggcacttcccgaagtgttaagagaatgcctctttctatagggggaggagctggtgcaaagaatgctattctcatgaatatgccaaatgctgttctttcaatgtggagatattttgttggagatctcgtctttgaagtttctaagatgacttctccctacattaaatgtacagtctctttcttcatagcatttggaaatttggctgatgataccatcaattttgaggcttttccccacaagctggtgcagtttggagagattcaggaaaaagttgtattgaaattttcacaagaggaatttcttacagcttggtcaactcaggtgcgtcctgcaacaactctgttggctgatgggtgtccatatttgtatgc

SEQ ID NO: 30776 - DNA, 389 bp, Glycine max
  Clone ID: LIB3138-050-Q1-N1-A12
aaggagagtttcagggcacctcaaggtacaaattggacagaaatggaaaaatttatgaacacaaagttgataatttggcattcaatttccctcagaatattaaaccagtttcagttttggatttggttactgcatgccctgcaagtccaaatcctacctttttgtggggtcctgttgatgcatactcttcttcatggatagccttttacaaggcagttagggacacattggatcaagaaaggagtttgctaccacaagatggtctagctacatgttcatagctatgtatgagctagcacttaatgtttcataggttattatgtataccttaagggtttataggttagggataaatataaagaatttgatccatagcataaaatggtttt

SEQ ID NO: 30777 - DNA, 270 bp, Glycine max
  Clone ID: LIB3138-050-Q1-N1-A2
ggacaactctgcttgcaacgatgcaaggtggtctagactgcacgggaccgggtgatcacgttattgttgtcaaaatcacaaccctcaacactaagtgtgcatattggctaacatgccgccttctactttatactatggtgcgcaccattactacgtgcattatactccaaactctttcgaagcaaaaggctaccttgagaacaccaaactacatagagaggggcaagcaaagatcttgactggtgtctgtcgcccttctgcgttggggca

SEQ ID NO: 30778 - DNA, 252 bp, Glycine max
  Clone ID: LIB3138-050-Q1-N1-A3
ggtgaacgctggtcaaaaaaatgatgggtgggcatgaatgagggacatggagtgatcgcgcctccttggaccaagtgttgctacccaacaccaacaaattattgctgtttgatgtacgtcggcggacacacactaagcctcatttctgggaatcgatgcttgactattggtaaccaaggacctggagaatgctaccgtaatggcttgttacctactgtgcagaagccaactaagatggacctttgcttttgc

SEQ ID NO: 30779 - DNA, 277 bp, Glycine max
  Clone ID: LIB3138-050-Q1-N1-A4
ggtccaggctgtagaaggagtgattgggcctgattggtacaagtgtttggaacaaacaggaacggtacatagcattttgatgcatggaagcggacaaaatcaaaaccacattcctgggaattgatcttaccaatagaggaatgcggtcctaataatgggattgaaatgtggagttcttagtgggcaaatcaaactttatggcgtctgagtttccttattggcgagacaaaacagcatacagtttgtgatatactcttgggaatctggcacgattttg

SEQ ID NO: 30780 - DNA, 387 bp, Glycine max
  Clone ID: LIB3138-050-Q1-N1-A6
gtgaagtaaaagctgctaacccaaattcttgtcagtggtaaccatgacagttggttccttcttcatcaggacctccagggttctcaactcctccaactttctgcttctctgcactctcagagaaaaggagaagtgaatttttgggaggcagaatgtgtcaagattgattattcgaacaaaaaggttttctgtcggtccaatattgacaacttggtgggaagtaacgaattttccttggactatgacttcttggttgtagcagtaggagcacaagtaaacacttttaacacccctggtgtcaaggagaactgtcattttctgaaggatgttgaggatgctcagaagattagactgtctgtgattgattgctttgagaaggctgttctt

SEQ ID NO: 30781 - DNA, 381 bp, Glycine max
  Clone ID: LIB3138-050-Q1-N1-A8
gcagtcaaaaggagtgattgggcctcattggtacaagtgtttttaacaaacagcaacagtacagagcattttgatgcatgtaagtggacaaaatcagaaccacattcctgggaattgatcttcccaatagaggtatgtggtcctaataatggttttgaaatgtggagttctgagtgggcaaatcaaacttcatggcatttgagtttccttattgacaatcccaaacagtctacagtttttgatattctcttgggaatctctcaagattttgaaattgctggtaatactcttatgccagctttttctgttccacaggctactgccagatcttttgaaaatgcggaatcctctgcatgatctggaatttgtgttttctttcgc

SEQ ID NO: 30782 - DNA, 104 bp, Glycine max
  Clone ID: LIB3138-050-Q1-N1-A9
ctagagcaggtatttactctgttctgcatgttggttctggcagcgactcctccccgagagaagattattcaatatctttggttggaggaaatccggtatcttag

SEQ ID NO: 30783 - DNA, 398 bp, Glycine max
  Clone ID: LIB3138-050-Q1-N1-B1
aagcaacttgtgtttccaggtttgtttacattttcaacgagggacatggttttactttagaatttttttaaaaaaagttatacttttagttttggggattttcagaatagtacgtagagtggtggtggcagtaagtagtaaccttcatgatggctggaatgataaagcgtgaatgtttaatttccaaagaaaggaaagtggatagttctaataattaaaataaaataagaaaaatgttttcttttaggtttaaaattataaagaatgaacatactatgtaaaaattgtcaaatgtgagtaatatttggacattttcagacaactaatttatgttgattaatgttacttccaattgagtaacagtggattaggtaaatggtttctacatgtttaggggt

SEQ ID NO: 30784 - DNA, 205 bp, Glycine max
  Clone ID: LIB3138-050-Q1-N1-B10
ctttcttaataatttatgcaaactactctggaatttcaatgaagccaccaaaatgttgaaaaaaaaaaaaaaaaaaaaaaaaaaaaaaaaaaaaaaaaaaaaaaaaaaaaaaaaaaaaaaaaaaaaaaaaaaaacaaaaaaaaaaaaaaaaagggggaaaatgagttaaaataatggtttttaaaggataatgaataacgggcaa

SEQ ID NO: 30785 - DNA, 288 bp, Glycine max
  Clone ID: LIB3138-050-Q1-N1-B11
ccatattttcattttgttcaatcttctcttgactttcgggcacgccgcctttgactccatctacactcttttatcactgccatcttttttactctcttaatcccatcatcaaattctaactctacactcaccactttcttttattaatccccccacatcgattgtctcagagggtgtcagtgttaccatattacactccatcgtttatgccatagcatcctgttccactgctgagtataccaccaaattcgcgaaatatccaaatgactctactatttttactaacac

SEQ ID NO: 30786 - DNA, 182 bp, Glycine max
  Clone ID: LIB3138-050-Q1-N1-B12
gggaattttgatacggttctgaactatttcctctaagggccgcatcggctacagatcggcagcactagtgcgagtactctcaggctatcgtcgatgatcaaacagaccacaaatagcacttgctcagcgacgacgcttatgaagaagaccgcgatggcgatggccatagctcctttgtcact

SEQ ID NO: 30787 - DNA, 223 bp, Glycine max
  Clone ID: LIB3138-050-Q1-N1-B2
ctgctgggcttgatcaaactagtgcagctttgtaatttacaagggttggtgatagtgactatctctagagaaactgttaaaacatggcatatgctagctggcaagcttctgacgacaaggcgagtttaaggccacaccttccttatggtacacgtcaaaatttgcaagtgcaataacctaaaggaggcaatgagctaaataccttaccagaagggtttttgca

SEQ ID NO: 30788 - DNA, 357 bp, Glycine max
  Clone ID: LIB3138-050-Q1-N1-B3
atggtggagtaggagcatccaagtactgctatattggtggatgtgatgcaacaagcaatgttgcagcaggaaagttattcgggataccccttcgtggtactcattcccatgcctttggtagttcatacatgagcctggatgagattacagactggtaacttaacagaaaagatggctcacgtacatgtgatgattttgtcagtctcgtctatacattgtttcacaaaattaagatatcaaatggtgtttttggtgaaaccacaccaaagtgagtgggctcgatgcacatcatatgctttgtcatttcctgatggatgacttgacctcgtaatacatattacgttatgagaagtggaa

SEQ ID NO: 30789 - DNA, 347 bp, Glycine max
  Clone ID: LIB3138-050-Q1-N1-B4
cagcagtgaaaaggagtgattgggcctcattggtacaagtgtgtgtaacaaacagcaacagtacagagcattttgatgcatgtaagtggacaaaatcagaaccacattcctgggaattgatcttcccaatagaggtatgaggtcctaataatggttctgaaatgtggagttctgagtgggcaaagcaaacttcatggcatttgagtttccttattgacaatctcaaacagactacagtttttgatattctcttgggaatatatcaagattttgaaattgctggtaatactcttatgccaactttttctgctccacaggctaatgtcagatcttctgaaaaagcggaa

SEQ ID NO: 30790 - DNA, 396 bp, Glycine max
  Clone ID: LIB3138-050-Q1-N1-B5
cagaagcaaaactgaaggttgccataaacggatttggaaggattggaaggaacttcttgaggtgctggcacggtcgcaaagactcccctcttgatgtcattgccatcaacgacaccggtggcgtgaaacaagcctctcaccttctcaagtacgattcgatcctcggaaccttcgatgctgatgtcaagcctgttggcagcgacatcatctctgtcgatggaaaggaaatcaaagttgtctctgaccgcaaccctgccaaccttccttggaaggatttggggatagacttggtgattgaaggaactggggtgtttgtagacagagaaggtgcagggaaacacattcaagcaggagctaagaaagtgctcattactgctcctggtaaaggagacatcc

SEQ ID NO: 30791 - DNA, 386 bp, Glycine max
  Clone ID: LIB3138-050-Q1-N1-B6
gcaagatacaaatacttaagggttttacatttaagtgattcctcttttgagactctacccaattcaattgctaaattggagcacttgcgagctctcaatcttgcaaataactgcaaaataaaaagacttcctcattcgatatgcaaactccaaaatttgcaagttttgtcactgagaggatgcatggagcttcaaacattgcctaaaggattagggatgttaatgagccttcgaaaattttatataaccacaaaacaatctattctgtcagaggatgaatttgcaagattgagaaatcttcatactctgagttttgaatattgtgacaatttgaaatttttgttcaaagtggcacaagtcagttctcttgaagttttgatcgttca

SEQ ID NO: 30792 - DNA, 396 bp, Glycine max
  Clone ID: LIB3138-050-Q1-N1-B7
caaaaccatccaactctcatgttcgaagaaaacatacacaatctcttcaaactctaattttcttttcctttcatttaatttcctcaatggcggcttccgtcgaccagcgtccgtaccccggcctccacaatggcgtcgttcggcccctcaaaccaggcccggatatcccgcgtcccaagaagctaccccagccgccgccgccactctcggattcctcaagcgacgaagaagaagacaccaccttgaacttgaaggacctgattcgcaagggaacaacggaagttgaatcctccattttcgacccgcgcgacgatggaacctctgaccactggatccaacggaactcttcccttgtccgtttaacgggaaagcacccgtttaactcggagccacccc

SEQ ID NO: 30793 - DNA, 364 bp, Glycine max
  Clone ID: LIB3138-050-Q1-N1-B8
gaaaaaaactggggagatattctgatcagaaaaattggggtttgaactttgaagcattaaggaactactaaggcatcaatttctctttcttcttgggaagaattttcttctgcgcaccgaaattgcatcttctacagtggtccatctgttcttcttctttctgcttctgggttggtttgactttgtatccttgatggaatggaaggagaaagtgtttcaagttcaagtaagtcacaaaatgatgtcatagagaaaatgtctttcaatgagggcatggaggatgggaatggggaagcgccagagcacggtcttcaaaagtggtacaacttaatgaggaagtttgagaacctaaagttgggatgac

SEQ ID NO: 30794 - DNA, 115 bp, Glycine max
  Clone ID: LIB3138-050-Q1-N1-B9
gcagatttgcattttgtttactcttgaattcactttcagccacggcgtctttgacggcgtggacacttttttatgagcgtcatcctttttgctctgtgcatgccaatcatcaatg

SEQ ID NO: 30795 - DNA, 306 bp, Glycine max
  Clone ID: LIB3138-050-Q1-N1-C1
ctacataaaaatcaccacattactgggaatcaaaaaaacaaagagaagggtgtcacactcaataatgtcttttcctttcattaaatttcctcaatggcgtcttacgtcgactaacgtccgaacccctgtctccaatatgaaactggttgccctctatgatattgtcttgacaacctgaaaagatcttgaatatgctattactactcgaactccatctttttctgattcaacagaataaaaggacaacactttgaacttgaacgatcagattcacaatctaacaactgagtttcaatatcacacgct

SEQ ID NO: 30796 - DNA, 322 bp, Glycine max
  Clone ID: LIB3138-050-Q1-N1-C10
gccatggaaacaggcatagcatgctacactcgcgggcctttcctgcctagtgtttcttccaagcactctccaccctccatctctccatcttttggcttgaggagtctgaaatcgagctctttatttggagaatctctaagagtggcatccaaatcaacactaaaggtttcaaagacaaagaatacttcactcgtgaccagatgtgaaattggtgacagtctggaagaattcctcacaaaagcaacaccagataaggggttgatcaggttgttggtgtccatggaagaagcattaaaaccaatttccttcaaagggaaaacgg

SEQ ID NO: 30797 - DNA, 383 bp, Glycine max
  Clone ID: LIB3138-050-Q1-N1-C12
atcaattttgaggcttttccccacaagctggtgcagtttggagagattcaggaaaaagttgtattgaaattttcacaagaggaatttcttacagcttggtcaactcaggtgcgtcctgcaacaactctgttggctgatgggtgtccatatttgtatgcaatggtgcatgatagttcagtgtctacaataccaggtgattttgtcattggtgtcaagttgacaaccataaacaatatgtgtgcatatgggctcaatcctggtatttcaggttctcgtcttttgggcaccattcctcagtccatttcacagcagactgtttggaataaaatggcgacagtgagaacaccattgaatttgattctagcaagcagagcttttgtcag

SEQ ID NO: 30798 - DNA, 392 bp, Glycine max
  Clone ID: LIB3138-050-Q1-N1-C2
caagtgttgatttgcagcgcactcatcgtattagaggaatgattaaaatggtggccacagttggtattcctgagaatacaggtatatcattggcctgtgctatgaatagttcttttagggggcgcgccagttctgatatttacaccatctgctctcaagactgtgaattgtggaatcctgcctgcacaaaagcaatgactatgtcatttaatccaaacccgtgttctgatgcatggagtttggaatttctgaagcgtactggatttcattgcgatatcatttgtgtcactggatggactgccaccccaatgcaggatgttcaggttacaattgattggtttattttctcttaggaatgtgttcccaggacctattgtgttttaaatccacaa

SEQ ID NO: 30799 - DNA, 161 bp, Glycine max
  Clone ID: LIB3138-050-Q1-N1-C4
aaacaaggaaaaaaaaaaaacccttagccaacacagccatcagggccaccgtgggttcaaataatcccatgcactgggcaaactgcatcgaccgggtactgagctcatgcgcaagaccggtgggccggcaaggtcacttgccgcctgaccgcaagagtggt

SEQ ID NO: 30800 - DNA, 385 bp, Glycine max
  Clone ID: LIB3138-050-Q1-N1-C6
gctcgccgtctacatcctcgacgctgtcctcgtctttttcgttatccccttcgccatgttcttctacgagggcgaccaggacaagagtgtggggaagaggattaagagtgcgttgatgtggatggtcaccacggctatagtgtgcgccctcgttctgggaattttgtatgggctggttggtaaggtggactttactattaggcatctctcttcatccacaacttcatttcctagcacatggacattcagtagtggtcaaccttgtattggaagtgatgcccatcagtgttcagcattctctgctagtccttcatcagagaaaacatggaccatgcgtactacctttccagaatatgttgttgcacttgctactattgttggatct

SEQ ID NO: 30801 - DNA, 383 bp, Glycine max
  Clone ID: LIB3138-050-Q1-N1-C8
agacaataaagcagtctgtggagatgaggaatagtgtctgtcatagtgctacaatatatgccaatgcaataatgcatgctggaacaactgtggatactttcctcagggaaaatttggattggttgagcagagctactaattgggccaaatttagtgcaacggctggtcttggtgttatccatagaggccatttgcagcaggggaggtcactgatggcgccctacttacctcagggtgggactggagctggtggtagtccatactcagaaggtggtgctctctatgcccttggtcttattcatgctaaccatggagagggcatcaaacaatttctttcggatagcctgcgcaatactactgttgagggtatacaacatggtgca

SEQ ID NO: 30802 - DNA, 354 bp, Glycine max
  Clone ID: LIB3138-050-Q1-N1-C9
gccaaatgaagatggttaacttgagctgcttcactcacacgaagcatatgagatgattcaaaaccacctggctctcattctcggtaacagagctggagatttaacatcaatagctgaaatcagcaaattcagggtagggcaggtctacgcagcatcagtgatgtatggttattttcttagacgagttgaccaaaggttccagttggagaagacaatgaaagttcttccaaatgcaacagaaaaagagaatagtgctcatcaaactacaatggacaatgcaagacccagtattgaagaggacacttctcaagtgatgtctcatcctgaagtatctacctggcctggtggtgatgt

SEQ ID NO: 30803 - DNA, 121 bp, Glycine max
  Clone ID: LIB3138-050-Q1-N1-D1
acagactacagtttttgatttcttatcagcaatgctctcaatattgtgaaattgacggacatactctgatgccatattttctgttaaccacgctttgccatatcatcaaaatgcctaatct

SEQ ID NO: 30804 - DNA, 218 bp, Glycine max
  Clone ID: LIB3138-050-Q1-N1-D10
gctaaatcttattttagcaatagctacccgtatcacaacggtacgtgtattaggcaaaaacacgaaatgggaggggataaagagcagcctaagaatgaatccgtgtggaatcccgaggaggccgccgtatcctccaggaaagacgacagacccattccttactgttacatactcgacttgcatctcacgtgatgcgccatggacatctaacgcacatg

SEQ ID NO: 30805 - DNA, 356 bp, Glycine max
  unsure at all n locations
  Clone ID: LIB3138-050-Q1-N1-D11
ctcgagccgctcgagccgcaccattcctcagtccatttgacagcaaactgtttggaatcaaatggcaacagtgagaacaccattgaattttgattctagcaagcagagcttttgtcagttttctattgaccttctcggtggaggaatcttagtggacaaaactggagattggatcacacttatacaaaattctccaattagtaacttgttgagagttgctgcttggaagaaaggctgtttaatggtcaagattgtgatgtctgggaatgcagcagtcaaaaggagtgattgggcctcattggcacaagtgtttttaacanacagcaacagtgcagagcattttgttgcatgtaagt

SEQ ID NO: 30806 - DNA, 363 bp, Glycine max
  Clone ID: LIB3138-050-Q1-N1-D12
gggggaggagctggtgcaaagaatgctattctcatgaatatgccaaatgctgttctttcaatgtggagatattttgttggagatctcgtctttgaagtttctaagatgacttctccctacattaaatgtacagtctctttcttcatagcatttggaaatttggctgatgataccatcaattttgaggcttttccccacaagctggtgcagtttggagagattcaggaaaaagttgtattgaaattttcacaagaggaatttcttacagcttggtcaactcaggtgcgtcctgcaacaactctgttggctgatgggtgtccatatttgtatgcaatggtgcatgatagttcagtgtctacaata

SEQ ID NO: 30807 - DNA, 257 bp, Glycine max
  Clone ID: LIB3138-050-Q1-N1-D2
cgaaaatacaatatttaattgctattcatcaatgggtatttctataaacgtagtccgaaaaaaagttgtctgacggtcattcagatttattgactaactgaaacaactgggaaggaaacaatgaatctgatgagtctcacattttttctacaaaagaaaaatgtgtattaatttcgcttagtggatatcattttattaagaagttcgttactaatcattctccaagcgatactggtaacgcttggcaataaaatgat

SEQ ID NO: 30808 - DNA, 304 bp, Glycine max
  Clone ID: LIB3138-050-Q1-N1-D3
cctgaatacattatttcatttcttaccatcaatggcttactctgttgagcttgacagccttattatgtatgcctataaaccccaatacctcactctcccactttcaatccaacctttctccttcactacataatcttactttatgaaacaccagaaaataccctctagaatccactctggtgctaccatcacagccacttatatcatgctcaaccccgtccggaaccactgcctaacctaaaggcattaacattaaatcgagtcgcacctaaacgattaatggttacatgactgtaaccaattt

SEQ ID NO: 30809 - DNA, 255 bp, Glycine max
  Clone ID: LIB3138-050-Q1-N1-D4
aacagcaacggttctgaactttttgctgcatgttagcgcacaaagtaagcaccacattcctgggaattgctcttttcaatataggtttgtgaaccttataaaggtcttgtaatgtgatgtgcttattgaccaaatgaaacattctggccttcgagaattcttattgacaaacccatacagtctaacaaattttgatattctcttgggagtctctaatgaatttgaaactcattgtaatactcttattcaatcttt

SEQ ID NO: 30810 - DNA, 389 bp, Glycine max
  Clone ID: LIB3138-050-Q1-N1-D5
ctcttccattaacgggtggtgcctctcttccatctccccagccaaaacctctctcaagaaggccacattaggcccttctgtcttcgcaaccgttagcactccttcttctccttcttcttcttcttcttcttccttcccttctctcattcaagacaggcctgtctttgctgcccctgcccccatcatcaccccaactgtgagagaggatatggcaaaggaatacgagcaagctattgaagaactccagaaattgttgagggagaagagtgaactcaaagccacagctgctgagaaagtggagcagataacagcttctctgggaacatcatcatctgatggcatcccatcatcagaagcctcagacaggatcaaagctgtgttcattcact

SEQ ID NO: 30811 - DNA, 389 bp, Glycine max
  Clone ID: LIB3138-050-Q1-N1-D6
gaagagtggaagaagcggctcacaaatgaacagttctatattactcgtcagaagggaactgaaagagctttcactggggagtactggaatactaaaaccccggggatttaccattgcatatgttgcgacacacctttattcgaatcatctactaagttcaatagtggaactgggtggccatcctattaccagacaattgggaaaaatgtgaaatcaaagttggatttgtcaattattttcatgccgcgccaggaggttctctgtgctgtttgtgatgctcatcttggacatgtgtttgacgatggtcctccacccacgggaaaacgtttctgtatcaatagtgctgcccttaagctcaaaccaaagcagtagacagtgaaatacctact

SEQ ID NO: 30812 - DNA, 360 bp, Glycine max
  Clone ID: LIB3138-050-Q1-N1-D8
acaaaactggagattggatcacacttatacaaaattctccaattagtaacttattgagagttgctgcttggaagaaaggctgtttaatggtcaagattgtgatgtctgggaatgcagcagtcaaaaggagtgattgggcctcattggtacaagtgtttttaacaaacagcaacagtacagagcattttgatgcatgtaagtggacaaaatcagaaccacattcctgggaattgatcttcccaatagaggtatgtggtcctaataatggttttgaaatgtggagttctgagtgggcaaatcaaacttcatggcatttgagtttccttattgacaatcccaaacagtctacagtttttgata

SEQ ID NO: 30813 - DNA, 397 bp, Glycine max
  Clone ID: LIB3138-050-Q1-N1-D9
attctgctgccacagcgaggacttacaaagaatcattcgattgcgccgcaaacaagctttacgctgatcacataattcctcacattctgcatctgtatggatcgagtgcaacgtcttgcgactttgaaatctatgccgcacatgcttcatatgaggatccacttatgtgtgcacacggggtgaaacagatcaaattagcgttctatactcttcccaaggtatctaaggagtcaaagatagttgaatatagtatcaaagaaaatatggcttcaccaggaaatggagagatattaattgacaataagctctactacaaattcttggggaaggatatatatatgagttcgcttatcaagttgtatattgacgagggtcaagttgtttgccatgatgactg

SEQ ID NO: 30814 - DNA, 398 bp, Glycine max
  Clone ID: LIB3138-050-Q1-N1-E1
ggctttttcaatccctaatgcgccttctgcgttcaattctcagagctacgttggtctcacagcgccactgaggaccttcaacttttcttctcctaaagctgccaaaattcctcgctcccaacgccttttcgtcgtcagagccttcgattcggagttcgtagccgccggtgtcgccggtaaggttccgccggcgcctattgtgccgaccagaccggcggctacggttggaacaccggtggttccttcactatcacttcaccggcgtcctcgtaggaaccggaagtcgccggcgcttcagtcggcttttcaggaaacgagcatttctccggcaaataacgcgtatccggttctcattcacgaaggtgaagaggatactgcaattggggctatgcctggat

SEQ ID NO: 30815 - DNA, 331 bp, Glycine max
  Clone ID: LIB3138-050-Q1-N1-E10
aattatactactactatagtctatagagatatcaaatggtactgcccaattaaggttgtttttgcttgcttgattttcttttccaatttggttggtgagctgaccctgctgcaacaagccgtgcagagacctctattgaagactttctctttgttctctttttttatgcaatggcttaagtggtggtgggtcttctcttctcagaatcttggtacaaaaacagaagagaaaaacgggatttttggttttgttgaactaagagaagctgacgctttttgggatcaaactatatgtgtttgaacttgagtctatttaaagtcttgttgcaatg

SEQ ID NO: 30816 - DNA, 335 bp, Glycine max
  Clone ID: LIB3138-050-Q1-N1-E11
ctgtaactaccgactggcgaccaactccatgtacagcgggcatgggttaccgaggtttggccccaaattttaacgctcatctctacacccgttgctcaccgccgccggccagggctcgctagacaagaacgtgctggttgggtggctgctacaggactatttgtactcgtacgtggggtacatcaagttcgctttcatgctcatatcgcgcctaccttaccctaccgatccacccacaccatcattttctggcacagtctacagagcggacgctgtctcgccgtctaaccgagagcacgttctgcacaaggacctctagacgctcatttttttcc

SEQ ID NO: 30817 - DNA, 386 bp, Glycine max
  Clone ID: LIB3138-050-Q1-N1-E12
cgtcttttgggcaccattcctcagtccatttcacagcggactgtttggaatcaaatggcaacagtgagaacaccattgaattttgattctagcaagcagagcttttgtcagttttctattgaccttctcggtggaagaatcttaaaggacaaaactggagattggatcacacttattcaaaattctccaattagtaacttgttgagagttgctgcttgtaagaaaggctgtttaatggtcaagattgtgatgtctgggaatgcagcagtcaaaaggagagattgggcctcattggttcaagtgtttttaacaaacagcaacatttcagagcattttgattcattgtagtggacaaaatcagaaccacatttctgggaattgatctt

SEQ ID NO: 30818 - DNA, 168 bp, Glycine max
  Clone ID: LIB3138-050-Q1-N1-E3
cgctaatctaatttatgtgtcccctgaagcgtatatgtccaagcgcgacgtagcttgcacatcgacaatgatggctgtcatttctttttattccataccaaacgatgatgtgctttccatataacagattgaagagttccattcaatgcagatagatgactaaatgct

SEQ ID NO: 30819 - DNA, 338 bp, Glycine max
  Clone ID: LIB3138-050-Q1-N1-E4
ggcaatgccactttctatatcgccaggtgcagctacgattaatgccagggttacaaatatagcgatcccttggcctatcaactgatgttacttccatggcgactttgacatgcttggaaacaccctgtatcctactggcgccacatggacagattttttagtctttgggcgtgccagctataagactcattctcttgtattgatcatcccaagtgaggcttgcggaccaaataatggttttgaaatgtggagttctgagtgggcaaattaaacttcatggcatttgagtttccttattgacaatcccaaacagtctacagtttttgatattctcttgg

SEQ ID NO: 30820 - DNA, 382 bp, Glycine max
  Clone ID: LIB3138-050-Q1-N1-E5
agaaaaaaaagcatccaaaaatggttctcacatccactgccactcacccagatgaaaaagaccagagcctaaactctacttttgcttccagatatgtgcgtgatcctattccaaaattcaagatgccagagaaatcaataccaaaggatgcagcttttcagataataaacgatgagttgatgttggatggtgcaccaaggctcaacttggcttcgtttgtgaccacttggatggagcctgagtgtgacaagctcataatggcttcacttaacaaaaactatgttgatatggatgagtatcctgtcaccactgagctccagaaccgttgtgttaatataatagcaaatctattccatgctcctataagtgaagaggagactgc

SEQ ID NO: 30821 - DNA, 383 bp, Glycine max
  unsure at all n locations
  Clone ID: LIB3138-050-Q1-N1-E7
cacacannccacctctccctatagacacctagatcgcatcaccatggccgtcaaccgcgctttcatcaaaaagtggctgcctaccgagacctggcccatctttggcatcgtgggcatcgcttgcggcggggccggctactacctgtataagctttcaagnnnncccgaggttgtttgggaccgcaagggcgactggaggccttgggacaaggtcaagcacgaccagaacctcaagttcctctcgtacaaccccgacttttgggccaagcgcaaggaagaggccgccgcgcgcgaaaagcagcgcatggtcgatgccatctagatgtcgtccaaggcggggactaccctggatgtttcttcttgatcgtttctctttttactcg

SEQ ID NO: 30822 - DNA, 381 bp, Glycine max
  Clone ID: LIB3138-050-Q1-N1-E8
tccaattagtaacttgttgagagttgctgcttggaagaaaggctgtttaatggtcaagattgtgatgtctgggaatgcagcagtcaaaaggagtgattgggcctcattggtacaagtgtttttaacaaacagcaacagtacagagcattttgatgcatgtaagtggacaaaatcagaaccacattcctgggaattgatcttcccaatagaggtatgtggtcctaataatggttttgaaatgtggagttctgagtgggcaaatcaaacttcatggcatttgagtttccttattgacaatcccaaacagtctacagtttttgatattctcttgggaatctctcaagattttgaaatgctggtaatactcttatgccaactttt

SEQ ID NO: 30823 - DNA, 385 bp, Glycine max
  Clone ID: LIB3138-050-Q1-N1-F1
ccgcaacacagtttgaggaaccattctgcgtagcgacttataggcaacttttttgacagagggcaattatagagcaagtgttgattacgcagcgcacttatcgcattagaggcatgactaatatggcggccacactgggcactcctgagaatacagttttatcattgacctgtgctatgaatagatcttttacggggcgcgccagctctgatatttacaccatctgttctaaaaactgttgattcgtggaatcctgcttgcacaaaatgcatgactatgtcattaaatcctaacccgtgttttgaagcatagtgcttgtgattttttgagccgactgcattgcattgcgatgatatttgtgtcattggatggtctgacaccccaa

SEQ ID NO: 30824 - DNA, 399 bp, Glycine max
  Clone ID: LIB3138-050-Q1-N1-F10
ctcgagccgaatcggctcgaggtttggattcaatacatgaatggtctagtgttctttctctgggagagcagcaacgccttgcatttgctcgtcttttgctttcaaagcctcaattggctttactggatgagtctacaagtgcacttgatgaagtcaatgaggtacatttgtaccaaaagattggagcagctaacataacatatgtcagcattggccatcggtcatccttatgtgcttaccacgacaagatcttaagcatatccacatttaattctgacagtgaacagctaaattggtgcattgaacccattgaacccactagacccgagttctctttaaaatttacaaatctttgagctagcaatgctttgctgcttaccatcttatgagacacacatg

SEQ ID NO: 30825 - DNA, 261 bp, Glycine max
  Clone ID: LIB3138-050-Q1-N1-F11
aactaactctaagtaagctactcatagatgaagagctgggcaaatctggtgcacccttacaagctatgaaagatagctgctagtgactgtctcacgaaaaacgtgacgcgtatgtgtaacgtattgtggggggctcctgaggacatggcgggtgattggacaccactagagtatggtaatagtgacaaaccggaaacgcaagaagccgattttgtcaatcgcgtatatgtgctacgggacttgaagttgcacagctcagat

SEQ ID NO: 30826 - DNA, 369 bp, Glycine max
  Clone ID: LIB3138-050-Q1-N1-F12
attggaatttggaagcacagcgaggcagagtagaagatgtttatgtggcgggaacctcttgactctggagaagaaaacccgcgtttccttgggtagtcgaaaggaagcagaatgggatccaaaattcttccaaaatgggcatcgaagccttgcgtaatgggaatcgacgaagctggaagaggccccgttttagggcctatggtctacggttgcttatactgctctcagtcctatctgaagaccctttccacgttgagttttgcagattctaagacactcaaggaagagaagagggaagaattgtttgaaactttaaaactcaatgattctattggatgggatgttgatgtcattgacccccgggaactc

SEQ ID NO: 30827 - DNA, 294 bp, Glycine max
  Clone ID: LIB3138-050-Q1-N1-F2
gaattgtggaatcctgcttgcacaaaagcaatgactatgtcatttaatccaaacccgtgttctgatgcatggagtttggaatttctgaagcgtactggatttcattgcgatatcatttgtgtcactggatggactgccaccccaatgcaggatgttcaggttacaattgattggtttatttcctcttaagaatgggttcccaggacctattgtgttttaaatccacaaaatccttttgtgttaaataggtggatgggaaaattgactttcccccaaggcactttcccaagtgtt

SEQ ID NO: 30828 - DNA, 221 bp, Glycine max
  Clone ID: LIB3138-050-Q1-N1-F3
ctagagcacagtctgctttaccattgagctacgtgaattgtagggaacggttatcactgagctcttgcaaagagcctgattttactatcagttcacagattgcattgcacgagcaattacattagtggtaacactacgaattcggggtattacatgtttctcacgggaaaatgctatcaacttgctcaacaagggtgcctcctgcaataacatattcagca

SEQ ID NO: 30829 - DNA, 387 bp, Glycine max
  Clone ID: LIB3138-050-Q1-N1-F5
gtcaaggccgctgctcaaaaccccatgcgggaactccgcatcgagaagctcgtcatcaacatctccgtcggagagtctggtgataggctcactcgtgcggccaaggttctcgaacaattgaccggtcaaactcccgtcacctcgaaggctcgttacactgtccgaactttcggtatccgtcgtaacgaaaagattgccgttcacgtcacgatccgtggacccaaggccgaagagatcctcgaacgtggtttgaaagtcaaggagttcgaactcaagaagaagaacttctccgcgactggtaactttggtttcggtatcaatgaacacatcgatatgggaatcaagtacgatcccggaatcggtatcttcggaatggacttctacact

SEQ ID NO: 30830 - DNA, 142 bp, Glycine max
  Clone ID: LIB3138-050-Q1-N1-F6
cttttgttgaataggcataccaaagagtagcctcggaccggcttttaaagatagcaggaatagaagatgacaaactcttgataatggctgatgttgatgagatacgttgtgctcacacagttaaccctatcgaggtggtgca

SEQ ID NO: 30831 - DNA, 384 bp, Glycine max
  Clone ID: LIB3138-050-Q1-N1-F7
cggctcgagatccgaagaagatcgcttaaccgtagcaagagcacgaaaaattgagcgtttcttatcacaaccttttttcgtagcagaagtttttaccggttcgccggggaaatatgttagtctagcagaaacaattagagggtttaaattgattctttctggagaattagatggtcttcctgaacaagccttttatttggtaggtaatatcgatgaagctactgcgaaagctacgaacttagaaatggagagcaatttgaagaaatgactttaaatctttgtgtactgacccccaatcgaattgtttgggattcggaagtgaaggaaatcattttatctactaatagcggacaaattggagtattaccaaatcatgcgcctatt

SEQ ID NO: 30832 - DNA, 384 bp, Glycine max
  Clone ID: LIB3138-050-Q1-N1-F8
attgcacttcccaagaacacagttggaggaaccattctgcgtagtgatctattggcaaattttttgacagagggcaattttagagcaagtgttgatttgcagcgcactcatcgtattagaggaatgattaaaatggtggccacagttggtattcctgagaatacaggtatatcattggcctgtgctatgaatagttcttttagggggcgcgccagttctgatatttacaccatctgctctcaagactgtgaattgtggaatcctgcttgcacaaaagcaatgactatgtcatttaatccaaacccgtgttctgatgcatggagtttggaatttctgaagcgtactggatttcattgcgatatcatttgtgtcactggatggact

SEQ ID NO: 30833 - DNA, 396 bp, Glycine max
  Clone ID: LIB3138-050-Q1-N1-F9
ctcatcttaaaagctatattgctgcacgatctcgtgatggtgatatttctgtcattgcaaagatagaaagtattgactcattgaagaacatagaagagatcattctagcggcagacggagctatggtggcacgaggagacttgggagctcaaatacctttagaacaggttccatctgctcaacaaaggattgttgaaatttgcaggcaattgaataagcctgtcattgttgcctctcagctacttgaatccatgattgagtaccctacacctaccagagctgaagttgcagatgtttctgaagcagtcaggcaacgagctgatgctttgatgctctctggtgaatcagccatgggccagtaccctgagaaggccttaactgttttaaggagtgtca

SEQ ID NO: 30834 - DNA, 369 bp, Glycine max
  Clone ID: LIB3138-050-Q1-N1-G1
gggaacccttgggtatttgaacgcgcagttatttccaatatcagagttattgaaattctcaatagatatcgctattacaaattactgcgccaggctaaagctccaagtatgtgcttacaatccttcaaaaaatgcccgactttgtgtgggtacggccatcgataacttaattagcgttcatcagtgtggcaagccttactttagggtgactaagttgcaaagtttgctggctagtcataacatcaccattactgatggtgttgacaaaacttgttcaactttgcagtttagaagagtagcagactgggattaactgaagataaactttcaactgatgtctaatgttttgtgattagctcctgatgacaa

SEQ ID NO: 30835 - DNA, 263 bp, Glycine max
  Clone ID: LIB3138-050-Q1-N1-G10
ggtgattttgtcattggtgtcaagttgacaaccataggcactgtgtgtgcatatgggcactatcctggtatttcagggtctcttctttcgggcaccattgcacagtccatttgacagattactgttgggaatcaaatggcaactgatcgaactccattgaatgtttattctatcaagctaagcttttgtcgcttttcttttgaccgtctccgtagaggaatcgttattgacgtaagtggtgagtgcatcacacttaatcaaaa

SEQ ID NO: 30836 - DNA, 108 bp, Glycine max
  Clone ID: LIB3138-050-Q1-N1-G11
gccaaatttcatatacgtaaaaaatatgaaaatataagaggggggggcatttattttcattgcaaacgaaaataactataatctcaccaactaccatatacaatatcc

SEQ ID NO: 30837 - DNA, 218 bp, Glycine max
  Clone ID: LIB3138-050-Q1-N1-G2
cttaggtggccacaataacaattacaagggcagtctaactacaagctgaatgtacctttatgcagcccaccaaggtggacatggccactcgcaacctcaaatctacacaatgcattactaaggcttttggcttggaacccgttgcagctaaactcatttgctcccttaaagccgatctcaaagattttgctaaaaaatgttttgacgcccccaaaaat

SEQ ID NO: 30838 - DNA, 242 bp, Glycine max
  Clone ID: LIB3138-050-Q1-N1-G3
ctcatctttgaagtttctaagatgactgctccctacattaacgggacagtctctttgttcatagcatttggaaattaggctgatgataccatcaattttgaggcttttccccacaagctggtgtatttaggagagattcaggagaaagttgctttgaaattctcacaaaaagaatttcttacagcttggtcaactcacgtgcgttcagcaacaactttattggctgatgggtggccatattt

SEQ ID NO: 30839 - DNA, 326 bp, Glycine max
  Clone ID: LIB3138-050-Q1-N1-G4
gtcacaacttcattatgtttcgtgtcataatctggaaatgccagaagctgatcttgtcaatctcgtaaatgtgttacgagaattgttttcgcacagtccaaaggaagctcgccaattgagaaggaaagctctctctcgtcttgaatggctgcaaaaagctgatgttcctaccatagcacagattgaagagttccatactatgcagaggatgatgaatgctcctgattcaaatgattatattgattcactgtcgagcattgatttgtagggtttacaaggagcatgtttagcatttccaaacaaaattgtttttgttgataaacttt

SEQ ID NO: 30840 - DNA, 136 bp, Glycine max
  Clone ID: LIB3138-050-Q1-N1-G5
cttaatgtgtgactgctcaagagggactgcgagcatgagggggagcaccatgctcaagaatgcaatggggagcaccgcggtgaacacaatgatggatcaaccgaatcgtccagggtgtcacaaacacacgagatcc

SEQ ID NO: 30841 - DNA, 378 bp, Glycine max
  Clone ID: LIB3138-050-Q1-N1-G6
ctctgttggaactgatgccaagggaaacattaatatagaagagctgaggaaggctgctgaaacacacaaggataacttatctgcacttatggtaacatatccttcaacccacggtgtttatgaggaaggtattgacgaaatttgcaatattattcatgataatggaggccaagtatatatggatggtgccaacatgaatgctcaggtgggactcacaagcccgggttggataggagcagatgtttgccatctcaatctccacaagacattttgcattcctcatggaggaggtggccttgcatgggacctattggtgtaaagaaacacttggcaccattttaccttcacaccctgtgataaaactggggaatttcttgc

SEQ ID NO: 30842 - DNA, 110 bp, Glycine max
  Clone ID: LIB3138-050-Q1-N1-G7
ctctgtttgaactgacgccattggatatattaataggggagagctgtagaaggttgtggaaacacacaataataacttatctgcactaatggaaacataaccaccaaccc

SEQ ID NO: 30843 - DNA, 379 bp, Glycine max
  Clone ID: LIB3138-050-Q1-N1-G8
caaatggcaacagtgagaacaccattgaattttgattctagcaagcagagcttttgtcagttttctattgaccttctcggtggaggaatcttagtggacaaaactggagattggatcacacttatacaaaattctccaattagtaacttgttgagagttgctgcttggaagaaaggctgtttaatggtcaagattgtgatgtctgggaatgcagcagtcaaaaggagtgattgggcctcattggtacaagtgtttttaacaaacagcaacagtacagagcattttgatgcatgtaagtggacaaaatcagaaccacattcctgggaattgatcttcccaataaaggtatgtggtcctaataatggttttaaatgtggag

SEQ ID NO: 30844 - DNA, 393 bp, Glycine max
  Clone ID: LIB3138-050-Q1-N1-G9
cgcactcatcgtattagaggaatgattaaaatggtggccacagttggtattcctgagaatacaggtatatcattggcctgtgctatgaatagttcttttagggggcgcgccagttctgatatttacaccatctgctctcaagactgtgaattgtggaatcctgcttgcacaaaagcaatgactatgtcatttaatccaaacccgtgttctgatgcatggagtttggaatttctgaagcgtactggatttcattgcgatatcatttgtgtcactggatggactgccaccccaatgcacgatgttcaggttacaattgattgggttatttcctctcaggaatgtgttcccaagacctattgtgttttaaattcacaaaatccttttgtgttaaat

SEQ ID NO: 30845 - DNA, 392 bp, Glycine max
  Clone ID: LIB3138-050-Q1-N1-H1
gtttcacaacaggcccaaggcaaatggcggcgactcatgcaaggatctctgacgtagctcatagcgcgactcatcctcgagcgacagattcgtggtcgggaagtgcttcctctgcacttaaatctctctctagattggaaagagcctcctctaacctagcacaatgggctagtgggatcaccttgaattatgatatgcttgcggccgcgtcacatctcttggaacaatttcctgttcaggacgatcaaaaactacccaacccgatatgtgccttattgtcacatataatatatccctagtaccatgaggttcaggctgccatggagacaaataagttctagttgactatagatgatgttgcatctcctaaaagttccatgtgggatctaaaa

SEQ ID NO: 30846 - DNA, 137 bp, Glycine max
  Clone ID: LIB3138-050-Q1-N1-H10
aggctcttttgttcagcggactaaactgcagacaccggatatatgtcttgccaaataatgaaatccctagaggatttgcttttacattatgaatatactgtaagaaatgctggtggctctattgtgcaatattgcta

SEQ ID NO: 30847 - DNA, 285 bp, Glycine max
  Clone ID: LIB3138-050-Q1-N1-H11
gggctccttattgactaataagaagtaatgcatttgagggtctatgaaatacatagccttgaaatgggccccacttggcaagggctcaacctattctgcatggactatgttcgttacatccacccttcacgattgctaggcgccaagacgcgtcaccagctgcttcagacaataagtgagccttgcatgtgcccttaagcactctgagaactgttcatggaagaccactgcttatcgtcgcagtcatgctcgaaataaaatggcggcggccaccggataggcacc

SEQ ID NO: 30848 - DNA, 306 bp, Glycine max
  Clone ID: LIB3138-050-Q1-N1-H12
ttcatcttctgttctgatccaggtatggcttctaaacgcatcttgaaggagctcaaggatttgcagaaggatcctcctacctcatgcagtgcaggccctgtggttgaggacatgtttcactggcaagccacaatcatgggacctgctgatagcccatatgcaggtggtgttttcctagtttcaattaattttcttcttgacaatcctttaaaccaacaaaaggtgctttttcgactaagggggtccaacccaacattaaccagcaatggcagtatatgtcttgacattctcaaggagcattggagc

SEQ ID NO: 30849 - DNA, 379 bp, Glycine max
  Clone ID: LIB3138-050-Q1-N1-H2
cattttgatgcatgtaagtggacaaaaccacaaccacattcctgggaattgatcttgccaatagaggtatgcggtcctaataaagggtttgaaacgtggagttctgattgggcaaaacaaacttcatggcatttgagtatacttattgacaatcccaagacacgatacagaatttgatattctctagggaatctctcaagatttagaaattgctggtcatactcttatgccagctttttctgttccacaggctactgccagatattctgacaatgcggaaacctatgcttgatctggaatatgagtaatctttcgcttgctcggttggttaacttaataaacgaaatttggcaagatcctattgttgaaatttctctgg

SEQ ID NO: 30850 - DNA, 144 bp, Glycine max
  Clone ID: LIB3138-050-Q1-N1-H3
ggatcacatagtttccaaggtagcagactacgacctaaacagggaactcttatctatctagaaggaggaccccttccaaagcgaccgagtcttacgagaatggcgcatgctgtactattaatgtgctgatagaaatggaggaga

SEQ ID NO: 30851 - DNA, 312 bp, Glycine max
  Clone ID: LIB3138-050-Q1-N1-H4
ctcctacgacgttcttattttcacgaccagcgttggtggtctcggactcaacctgacgggggctgacaccgtcatcttagaagagcgtgactggaacccacaaaaggacattcacgccatggaccgtgcgcatcgaatcggccaaaagaaggtcgttaacgtataccgcatcgttacgcgctggactctggaggagaagaacctcaatctccaacgctttaggatcgacgtcgcatgctccgccctcaatcaacacaacgcctgtcttgggttcatgccgactgaccaaatcctggatctgatcaacattaa

SEQ ID NO: 30852 - DNA, 382 bp, Glycine max
  Clone ID: LIB3138-050-Q1-N1-H5
gaggttttgacgcaacacactttcactgagaaaggagctctatctaccaaggagcagaataaaacccttctctctggtaagtgaataagagaatggcttcagatcggaaacttcacactttcgaggaggtggcaaagcacgaccagaccaaggattgctggctcatcatttctggcaaggtgtatgatgtcacccctttcatggaggatcatcccggaggtgatgaggttttgttatctgcaacagggaaagatgcaaccaaagattttgaagatgttggacacagtgattctgctagagatatgatggaaaaatactacattggtgagattgattcatcaactgttccactaaaacgtacctacattccacctcagcaagc

SEQ ID NO: 30853 - DNA, 397 bp, Glycine max
  Clone ID: LIB3138-050-Q1-N1-H6
ttcagttttgattctccgccaccgttttggctgttgttactttggttcttccgagagaagggagccatatatagaaagtattttatggtgcgccgatgagcagaactgatgttattggcagtagaaggaggaggattcttctctgcttcggcttcagggtatactaagggcctgagccttctcctcttgggtcagaggaatgaggataaacccatgagagtagcgccgtggaaccagtatcagttggtagaccaagaatctgaccctgagctccagctggctttcacaaagaattgcctctcccgcggctgtgcctcctttgtttgctttggtcgcactttcgcaggacttgatactccgtcttctcttaaagtgggcccttgctaacaacatgatg

SEQ ID NO: 30854 - DNA, 383 bp, Glycine max
  Clone ID: LIB3138-050-Q1-N1-H7
cggctcgaggccggactgacttgtttcaaccacgagacatatctctagcaaaaactcagcatctagatctgaattatatcctctctaatgttgggttgcctaaatggagcagtaccgaaattaggaatcaggagcctcataccaatggtcctgttctggatgatgttttgctagcagacccagaggttgccgatgccattgaaaatgaaaaggtggttaataagaccataaaaatatacaacattgatcgtgctgtatgtggacgtatagctggtgtcattgcaaagaagtacagtgacactgtgtttgctggacagttgaatataacatttacaggaagtgctgggcagtcatttgcatgctttctgactcctggaatgaac

SEQ ID NO: 30855 - DNA, 372 bp, Glycine max
  Clone ID: LIB3138-050-Q1-N1-H8
attggcctgtgctatgaatagttcttttagggggcgcgccaggtctgatatttacaccatctggttttaagaatgggaattggggaatcctgcttgcacaaaaaccatgactatttcattttatccaaacccgtgttctgatgcatggagtttggaatttttgaaacgtactggatttcattgcgatatcatttgtgtcactggatggactgccaccccaatgcaggatgttcaagttacaattgattgggttatttcctctcaagaatgtgttcccaggacctcattgtgttttaaaatccacaaaatccttttgtggttaaaataggggggttgggggaaaaattgatttttccccccaggggcaccttt

SEQ ID NO: 30856 - DNA, 117 bp, Glycine max
  Clone ID: LIB3138-050-Q1-N1-H9
ctgcacgtgtgtcaattgacaagggaagctctctgtggaggagaactaatgtataaacctgaaaagcgtgccatagggcatgggtcataagcctcatagcatgaaagtgacaagagt

SEQ ID NO: 30857 - DNA, 322 bp, Glycine max
  Clone ID: LIB3138-051-Q1-N1-A10
gttgatttgcagcgcactcatcgtattagaggaatgattaaaatggtggccacagttggtattcctgagaatacaagtatatcattggcctgtgctatgaatagttcttttagggggcgcgccagttctgatatttacaccatctgctctcaagactgtgaattgtggaatcctgcttgcacaaaagcaatgactatgtcatttaatccaaacccgtgttctgatgcatggagtttggaatttctgaagcgtactggatttcattgggatatcatttgggtcactggattgactggcaccccaatgccagatggtcaaggta

SEQ ID NO: 30858 - DNA, 339 bp, Glycine max
  Clone ID: LIB3138-051-Q1-N1-A12
aagaatgcttcgcacctgcttaaatatgattccatgctgggagcttttaaagcagatgtgaaaatactggacaatgaaaccatcactgttgatggtaagcccatcaaggttggttaaagcaggacccctttaaactttccttggcctgacttggaaatgacatttttaattaagggaaccgaatggttgtggattgcccttgggcttgtaaacacattcaaacaggtgccaagaaaggtattatcactgctactgcaaagggtgctgatattacaacttatgttgttggtgtaaatgaaggggactacactcatcagatctctaacattataagcaacg

SEQ ID NO: 30859 - DNA, 323 bp, Glycine max
  Clone ID: LIB3138-051-Q1-N1-A3
gaggactttataatcatgcctcttttgttaaaaacaactatagccgaaacgaagattgaatagtagtgtttgtgttgtgtgtatgccaatgatttcaatcttggtggtttgttaaactcactttgtgtatgagattcatgctcactattatttgctgaaccaagttttgtgtttggatagcttaaagcatcaatcttctttgcatctttttttttttttgctggtactcctttttatgtatatatacaagaaggtgatcctttttatatatcatgcgtttgtagactttttataaagcttcagctatgtgatgatggggggga

SEQ ID NO: 30860 - DNA, 263 bp, Glycine max
  Clone ID: LIB3138-051-Q1-N1-A4
cacggccaggggacataaatatgacaccaccaagatcttaacccctgagtatgtccttaatgttgatgcatacaacaagtacagcaaggtataccttagccctctgtttgcattatctattggatcaggttttgcaagatttacggcaaccctcactcatgtagcactctttaatggaagagacatttggagacagagtagatcagcaatgagtaacgcaaaattggatatccatggtagactgatgaaagcttataagcaag

SEQ ID NO: 30861 - DNA, 376 bp, Glycine max
  Clone ID: LIB3138-051-Q1-N1-A5
acgatggattcattcttgttcgtgcacgtgtcaaaaatttacgccggcacctcgcgaggatggggatgagtcaaaacgacgacgtggatgataccgtagacgagaagcacgtttacgtaccggttcgggtttgggtggaccccgagataggatccatttattgcgctgggctgatgcttggaccagtccacggacaacaaagagagcgaatgggtaacacaaaagattgtggacggtgattatctggacaacgcagggttctaacgtcaaaactggtgccaactcagtgtagaggacgcgaacatggagctgtacaatggaccaagactcgtgagggaacccggcgatcttctacgacggttggcatgataacact

SEQ ID NO: 30862 - DNA, 369 bp, Glycine max
  Clone ID: LIB3138-051-Q1-N1-A8
ccccttttgcactctcagaactgttcatggaagaccactgcttattgtcgcagtattgctcgaaatgttatggcaatggccacaagaaaagcaccaacttgaacttgccccactggagggcccaaaaatggcaaaaacttttaaaaaaacttggaacaaagttgatgataagtatgcagtgagttcactggccctggttggtgtggttgcattgtggggctcagttgggttgatctcattactacatcactttgaaacaggcaattgataggcttcctttgattcctgggatacgtgagattgtatgcattggatacgcaggccggtttgtatataagaacatagttttcaagccagacagggaagctt

SEQ ID NO: 30863 - DNA, 338 bp, Glycine max
  Clone ID: LIB3138-051-Q1-N1-A9
ctcgagccgtttccaaacaaaattgtttttgatgataagcttggggtggctaacacacaagaattctttgatggaaattttccagtggattcttggttaccaatttttgtgaattgtctttatcctgtaagtcaattaccttcaaaagctgtcgttgtaaatgttacatgtggtagtggacgtggtggtttacccaccactgcttggattagttctgcagttaacaatcgctcctcagatatcaacaaaaggattcgcacagcacttgggaaaggtaagaaaattgtttttcttactaaagttgatccttttccagtagctttactggctgttctttt

SEQ ID NO: 30864 - DNA, 398 bp, Glycine max
  unsure at all n locations
  Clone ID: LIB3138-051-Q1-N1-B10
ttgatgaggaaggggtccttcagtcagttgatgtaagtgctaaatttgtcaatgggaagccctcaataattgaagccaagtatgtaatgcggagtccacgggactgggatagattcatgagattcatggagcgatactcaaatgcaaatggtttgcaattcatcaaaaaatgagttaatgtgctaactctgcccttctattcttttgcccttttcaagaagtttgtgttctacgatatagtcacatataaaacctgagtgaaatgctatattggcgtacatgtaacttcaattcacatactcatgcattttctgacaccccaagattttatgaaattttgcttgtccaaannaaaaaaaaaaaaanaaaaaaaaaaaacaaaaaaaaaaaaataaaaa

SEQ ID NO: 30865 - DNA, 395 bp, Glycine max
  Clone ID: LIB3138-051-Q1-N1-B11
attttatccaattgaaattttaaaaatgactgggataaactgaagaattcaattattgaaattgaataagtaaacaatttaattggattggtcgaatggtgtcaaaaaaatggagtactaactcccatttcttatttattattgaattaaccgatcaacttgctttgttatcgaacatttctttttgatttcaaaaattttccggaaaaaatttgaatctatttttatatgcgaatcaatcctactacttctggtcctgaggtttctgcgcttgaaaaaaaaaatctgggacgtatcgcccaaataattggtccggtactagatgtagcttttcccccaggtaagatgcctaatatttacaacgctctgatagttaagggtcgagatactgttgg

SEQ ID NO: 30866 - DNA, 376 bp, Glycine max
  Clone ID: LIB3138-051-Q1-N1-B12
tttcctttgtttctatggcttctgcagaagtagagttccgatgctttgttggtgggcttgcttgggccaccgaccacgatgctctcgagaaagccttctctcaatttggcgaaatcgtcgaatcgaaggtcatcaacgatcgtgaaactggaagatccagagggtttggatttgtgaccttcgccacagagcaggcgatgagagacgcaattgaaggaatgaacggccagaacctcgacggtcgtaatataaccgtgaacgaggctcaatcccgtggaaaaagtggcggcggcggcggcggcggctacagaggaggtggtggtggttactgtggcggcggaagttacagccgcggtggaagaggatatggtggcgg

SEQ ID NO: 30867 - DNA, 336 bp, Glycine max
  Clone ID: LIB3138-051-Q1-N1-B2
aaaaaaaaaaaatatttaaattgaaaacccttcaaactataaacgggggtcaaaaccaatctattgccctaaaacaaaaaaaattgaaatcggattactctattcttggaactccggaatttggaccaaaaaacacttccccaaatcttgctttttgtctcgctcttgaatctaactcgctaatgtcaatgcgaccaaataatctctccctagttgattgcgctatggcccaagtaggatcaaaatcgggcaacatataaactttgattacccaccttcgtggattttcatatctattgcaaccatgataattgttgataccagtgtctaacgtaa

SEQ ID NO: 30868 - DNA, 393 bp, Glycine max
  Clone ID: LIB3138-051-Q1-N1-B3
gcagcgccgtctctgtgtcaaggaccgctccaaggactggtggcgggggtgcaacagcccggacttccccgaagaggaattccggcgccacttccgcatgagcaaggccaccttcgacatgatctgccagcacctggactccgccgtcaccaagaagaacaccatgctccgagaagccatcccggtccggcagcgcgtggcggtgtgcatttggcgcctcgccaccggcgaccccctccgcgaagtttcgaagcgcttcggcttgggaatctccacgtgtcacaagctggttctggaggtctgctccgccatcaaaagcgttctgatgcccaagttcctccactggccaaacgaagccgaaatgaaacccatcaccgaaaaattcgagtctct

SEQ ID NO: 30869 - DNA, 393 bp, Glycine max
  Clone ID: LIB3138-051-Q1-N1-B4
cgaagtagagtgaaacaagatctatttcaagcaaagaaggaagctcctcttgttgtagctaaattcttactcggattcgttctcacaatccagtttgtaccatcaaaatccgattttcaagtgcttatctataccaagataacatcgaaatggagtgtgcaataaaacaagatgttactgaactaattggaaacactccaatggtgtatctgaacaaagttgtggaaagttgtgtggcccgcattgctgccaagttggaatcaatggaaccctgctcaagtgtcaaagacaggttagcattaagtatgatcaaggatgctgaggacaagggactgattacaccaagaaagactgtgcttgttgagactactagtggaaacactggcattggat

SEQ ID NO: 30870 - DNA, 402 bp, Glycine max
  Clone ID: LIB3138-051-Q1-N1-B5
aaaactacttccaccatctcggctacatccccaatgcaccacacttcgacgacaacttcgatgacaccctcgtatctgccatcaaaacctaccaaaagaattacaacctcaacgtcaccggcaagttcgacatcaacactcttaaacaaatcatgacaccccggtgtggcgtccccgacataataatcaacacaaacaaaaccacatcgtttggcatgatctcggactataccttcttcaaagacatgccgcggtggcaagctggaaccacacaactcactacgctttctccccggagccaagacttgatgacactttcaaaagcgcgattgcaagggccttcagcaagtggaccccagtggtgaacatcgcgttccaggagacgacgtcgtatgaaacagc

SEQ ID NO: 30871 - DNA, 176 bp, Glycine max
  Clone ID: LIB3138-051-Q1-N1-B6
cataaaaacacgaatgcctgaactggtaccgtgaactacatggctgactgaatgatatctaacgcaggtgaacacactgtctatcgggcctgcaccggtatagttgcttcatatactggcctcaagtccatggctggttgactcaccggaaagagcaacattgacatgacctgcat

SEQ ID NO: 30872 - DNA, 172 bp, Glycine max
  unsure at all n locations
  Clone ID: LIB3138-051-Q1-N1-B7
aaaagtttcctctacaaaagcacaatttgntagtgggaaaaaccttcaaatatgatataattggtgctggttcacattcttcagaagattttcctgaaaaggaagatcaagaaaaaccccaaaagattgatgcccgattgagacaaagaatagatcctcaatacaatgaggg

SEQ ID NO: 30873 - DNA, 334 bp, Glycine max
  Clone ID: LIB3138-051-Q1-N1-B8
cccgcgagcacgcccttctcgcctttacccttggtgttcgtcagctcatcgttgccatcaacaagatggacaccaccaagtggtccgaggcccgataccaggaaattgtcaaggagactttcaactttattaagaaaggcggattcaaccccaagactggtgcttttgtccccattttcgggttggaccgagaccacatgttggaggaatcttccaacattaactggtttaagggattgaagaaaggaaaccaattttggcaattccaaggaaaaaaccttcttgagggcattgaattgattcaagcccctttgggaaccaaccaccaagccct

SEQ ID NO: 30874 - DNA, 280 bp, Glycine max
  Clone ID: LIB3138-051-Q1-N1-B9
gccagccatgtcgatcttttctattccctcaccaacgtaccgttgttcaatttcaatttcaatttctcggcagccattgccatgttctttcacggctcaagtgagaagaagagggaaagggaaagtggtaatgagcatggaggcaggcattggagtgatgggcaccaagttgggtatgatgagctatttcgaatccgacggagaggttgttcctgtcactgtcgtgggtttcaaagaaagcaacatcgtcacccagatcaaaactgaagccaccgatgga

SEQ ID NO: 30875 - DNA, 143 bp, Glycine max
  Clone ID: LIB3138-051-Q1-N1-C10
gtttcacgctcatctttcagtttcactaacaatgacagtttcttctgagaatggcgtctcaagcggccagagttctctcaccggtcttgctccacttggaactgggctctttggtataaatggaacactttgggattctgatc

SEQ ID NO: 30876 - DNA, 374 bp, Glycine max
  Clone ID: LIB3138-051-Q1-N1-C11
caaatggcaacagtgagaacaccattgaattttgattctagcaagcagagcttttgtcagttttctattgaccttctcggtggaggaatcttagtggacaaaactggagattggatcacacttatacaaaattctccaattagtaacttgttgagagttgctgcttggaagaaaggctgtttaatggtcaagattgtgatgtctgggaatgcagcagtcaaaaggagtgattgggcctcattggtacaagtgtttttaacaaacagcaacagtacagagcattttgatgccatgtagtggacaaaatcagaaccacattcctgggaaatgatcttcccaatagaggtatgtggtcctaataatggttttgaaat

SEQ ID NO: 30877 - DNA, 339 bp, Glycine max
  Clone ID: LIB3138-051-Q1-N1-C12
actgagtaagggcaatgatattctgtgttgcgattatgctagttttgatggtttgattaccaagcaagttatgagcaagatggcagaaatgataaacagtctttgtggtggtgatgaaaaattgatgcgtgaaaggacgcacctgctgttggcttgttgttcaaggatggcaatttgtaagaaagatgtttggagagttgaatgtggaatcccttctggatttccgctcacagttatttgcaatagcatttttaatgagatgctcattagatatagctatgaaaaattactgcgccaggctaaagctccaagtatgtttttacaatccttcaaaaattt

SEQ ID NO: 30878 - DNA, 390 bp, Glycine max
  Clone ID: LIB3138-051-Q1-N1-C3
gagattcaggaaaaagttgtattgaaattttcacaagaggaatttggtacagcttggtcaactcaggtgcgtcctgcaacaactctgttggctgatgggtgtccatatttgtatgcaatggtgcatgatagttcagtgtctacaataccaggtgattttgtcattggtgtcaagttgacaaccataaacaatatgtgtgcatatgggctcaatcctggtatttcaggttctcgtcttttgggcaccattcctcagtccatttcacagcaaactgtttggaatcaaatggcaacagtgagaacaccattgaattttgattctagcaagcagagcttttgtcagttttctattgaccttctcggtggaagaatcttagtggacaaaactgga

SEQ ID NO: 30879 - DNA, 394 bp, Glycine max
  Clone ID: LIB3138-051-Q1-N1-C5
gaggcgcataaagctgcttggagtcttttaaagggtgctaatggggttctagttccaggaggttttggtgatagaggagtgcaagggaaaattcttgctgctaagtatgctcgagaacataatgttccatttcttggcatttgcctggggatgcaaattgctgttattgagtttgcacgatctgttctcggtctgcatgatgctactagcacagaattcaatcctgaaaccaagaccccttgtgtcatatttatgccagaaggctccaagactcatatgggaagaactatgcgtcttggttcaagaagaacttactttgaagttgctgactgcaaatctgcaaaattgtatggcaatgctagctttgttgatgagcgacatcggcatagatatg

SEQ ID NO: 30880 - DNA, 330 bp, Glycine max
  Clone ID: LIB3138-051-Q1-N1-C7
ctcaaacttcaacaaactacaactaccactttcaaaccttcaaccaaccaccaacaatcaacatgtctgactctatgcgcaagggcctcggcgagcaagcctctgagaagatcacccccgactctcaaaagtccaccaccgagaaggccagcgagagcctcaccggagcttgtgaccggattgcccgcgccgtccaacctgagggccaaaaattcaccggacagaagcttggggacgcaacccgcttccgcggcgattaaggccaaggcgttatgaagcaagcccaagacgcttttgggaacgcttggcaaaacattttcgacacccttt

SEQ ID NO: 30881 - DNA, 336 bp, Glycine max
  Clone ID: LIB3138-051-Q1-N1-C8
cttggatctaaagcttgtatttaatcatcaatttcaatatattaaccctaaaatgtgaaatttaaaaaaaaaaaaaaaaaaaaaaaaaaaaaaaaaaaaaaaaaaaaaaaaaaaaaaaaaaaaaaagggaaaaaaaaaaaaaaaaaaaaacaaaaaaaggaaaaaaccgaacatataaaaaaaaaaaataaaaaaatttccataaaaaatggggcataacaccactctaaagaaaaatttataatgcaattccaatttcacttcaaaatatgaacacagaaacataaatataaaaaaacgggggttgactaaaaaagatagctaaattataataaa

SEQ ID NO: 30882 - DNA, 232 bp, Glycine max
  Clone ID: LIB3138-051-Q1-N1-C9
gattcaggaaaaagttgtattgaaattttcacaagaggaatttcttacagcttggtcaactcaggtgcgtcctgcaacaactctgttggctgatgggtgtccatatttgtatgcaatggtgcatgatagttcagtgtctacaataccaggtgattttgtcattggtgtcaagttgacaaccataaacaatatgtgtgcatatgggctcaatcctggtatttcaggttctcgt

SEQ ID NO: 30883 - DNA, 248 bp, Glycine max
  Clone ID: LIB3138-051-Q1-N1-D10
cccagatggccttaaagaacagctcttgcagcttcgagctgcgggtgttgacggggttatggttgatgtgtggtgggggatcatagaactgaaagggcctaagcagtatgattggagagcctacaagagtttgtttcaactggttcaagaatgtggcttgacactgcaagctattatgtcattccatcaatgtggagggaacctaagaaatataattaacattccaatttcccaatgggtgcttgaca

SEQ ID NO: 30884 - DNA, 399 bp, Glycine max
  Clone ID: LIB3138-051-Q1-N1-D11
gcagataatcagaaaacaatggccgtagcaataggaagaagcttctccattcagcccggctctttattcaacaacaagagcttggatagaggttcaccagctggaagattatcgtggcttggggatggtgctgctgccactccacgttataggcaaacttgtgttggggcgcaacagcgacctacatggctcccaggacttgatcccccacctcatcttgatggaactcttgctggagattttgggttcgacccacttggacttgcagaggatccggcaagcttaaggtggtatgtgcaggcagagctggttcattgtcgctttgcaatgcttggggtcttcggaattctagtgacagatctacttcgcgtcacaagaattagtaagataccggtttgg

SEQ ID NO: 30885 - DNA, 393 bp, Glycine max
  Clone ID: LIB3138-051-Q1-N1-D2
ataacataaccaatggaagcacgtgcaggagccaatcaacgtattgcaagaatctctgctcatcttcagccttcaaatttccaggaagggagtgatgttcttcttaagagaggtgagtgcagagcaaaaggtggggcacctggattcaaagttgcaattttgggggctgctggaggaattggtcaatccctttctttgctgatgaagatgaacccattggtttcagttcttcatctttatgatgttgtcaacacccctggtgtcacagctgatgttagccacatggacactggtgctgtggttcgtggctttctggggcagcaacaacttgagagtgcactcactggcatggacttggtaatcatacctgctggggtgccaaagaaacctggg

SEQ ID NO: 30886 - DNA, 395 bp, Glycine max
  Clone ID: LIB3138-051-Q1-N1-D3
gtaggaccaaatagatagcacaagatcaaccatatttggctcagctagtaacatccattccaatggtgaaaagcaatccgaaaatgttgctcatataccttctgttggaaacaaccaaactcccaaggtgaggaaaccatataccattactaaacaaagggagaagtggactgaggaagagcatcaaaagttccttgaagctttgaaattgtatggtcgtggctggcgccaaattgaagagcatataggtaccaaaaatgctgttcagattcgaagccatgctcaaaagtttttctctaaggttgtgagggaatctgagggcagcgctgagagttctatacaaccaattaacatacctcctcctcggcctaagaggaaacccctgcatccatatc

SEQ ID NO: 30887 - DNA, 108 bp, Glycine max
  Clone ID: LIB3138-051-Q1-N1-D4
gctccgaattagggttttccaattcgcagagcaactcaacacaacggaccaaaccaacaatgtcgcagccgcagcctcagtcgcagccgcaacacgggcaagcggcgc

SEQ ID NO: 30888 - DNA, 364 bp, Glycine max
  Clone ID: LIB3138-051-Q1-N1-D7
tgcaaagaatgctattctcatgaatatgccaaatgctgttctttcaatgtggagatattttgttggagatctcgtctttgaagtttctaagatgacttctccctacattaaatgtacagtctctttcttcatagcatttggaaatttggctgatgataccatcaattttgaggcttttccccacaagctggtgcagtttggagagattcaggaaaaagttgtattgaaattttcacaagaggaatttcttacagcttggtcaactcaggtgcgtcctgcaacaactctgttggctgatgggtgtccatatttgtatgcaatggtgcatgatagttcaatgtctacaataccaagtgattttgtc

SEQ ID NO: 30889 - DNA, 337 bp, Glycine max
  Clone ID: LIB3138-051-Q1-N1-D8
atggctgcctcactacaagctgcagctaccttcatgcaacccaccaaggttggcatagcctctcgcaacctcaaatctacacaatgcatttctaaggcttttggcttggaacctgctgcagctaaactcacttgctcccttcagcctgatctcaaagaatttgctcaaaaatgtgtcgacgctaccaaaattgcaggattcgcccttgccacctctgctctcgttgtttctggagcaagtgcagaaggtgttccaaaaaggctaaccttcgacgaaatccagagcaagacatacttggaagtgaagggaactggaactgctaaccagtgcccaacca

SEQ ID NO: 30890 - DNA, 362 bp, Glycine max
  Clone ID: LIB3138-051-Q1-N1-D9
gagagattcaggaaaaagttgtattgaaattttcacaagaggaatttcttacagcttggtcaactcaggtgcgtcctgcaacaactctgttggctgatgggtgtccatatttgtatgcaatggtgcatgatagttcagtgtctacaataccaggtgattttgtcattggtgtcaagttgacaaccataaacaatatgtgtgcatatgggctcaatcctggtatttcaggttctcgtcttttgggcaccattcctcagtccatttcacagcaaactgtttggaatcaaatggcaacagtgagaacaccattgaattttgattctagcaagcagagcttttgtcagttttctattgaccttctc

SEQ ID NO: 30891 - DNA, 400 bp, Glycine max
  Clone ID: LIB3138-051-Q1-N1-E11
ctcgagccgaatcggctcgaggcttttccaaacaaaattgtttttgatgataagcttgtgttggctaacacacaagaattctttgatggaaattttccagtggattcttggttaccaatttttgtgaattgtctttatcctgtaagtcaattaccttcagaagctgtcgttgtaaatgttacatgtggtagtggacggtggggtttacccaccactgcttggattagttctgcagttaacaatcgctcctcagatatcaacaaaaggattcgcacagcacttgggaaaggtaagaaaattgtttttcttactagagttgatccttttccagtagctttactggctgttctttttggcgttaagaatgaaattctgagttctaacgccactaatcctatgc

SEQ ID NO: 30892 - DNA, 401 bp, Glycine max
  Clone ID: LIB3138-051-Q1-N1-E12
ctcagagggtctgtgacacacagactcacttccaagttccaagctttggccatttattcccactgtttattgagaacaactgcagaacatggcacagattttggctccctctacgcaatggcagatgagaatctcaaaatcctctcccaatgcaagtcccattacatcaaacatgtggagttctttattgtggaaacaaaataagaaagtttcacccacaagttctgctaaatttagagtgatggcaattaagtctgacaatagcatcatcaacaggctagagggtctacttaatttggatatcactccattcacggacaagataattgctgagtacatttggattggggggacaggaattgatgtgcgcagtaaatcaagaacaatatcaaagcctgttg

SEQ ID NO: 30893 - DNA, 382 bp, Glycine max
  unsure at all n locations
  Clone ID: LIB3138-051-Q1-N1-E3
cttttgtgttaaataggtggatgggaaaattgactttcccccagggcacttcccgaagtgttaagagaatgcctctttctatagggggaggagctggtgcaaagaatgctattctcatgaatatgccaaatgctgttctttcaatgtggagatattttgttggagatctcgtctttgaagtttctaagatgacttctccctacattaaatgtacagtctctttcttcatagcatttggaaatttggctgatgataccatcaattttgaggcttttccccacaagctggtgcagtttggagagattcangaaaaagttgtattgaaattttcacaagaggaatttcttacagcttggtcaactcaggtgcgtcctgcaacaac

SEQ ID NO: 30894 - DNA, 406 bp, Glycine max
  Clone ID: LIB3138-051-Q1-N1-E4
tctcaacaagttgtcttaaataatactgaagatatgtcggcaacagttctggcaccacctaaactagacagacataaagattctgcagctctggacttccatctccattgtgaaaaccataactgtattgctgacaacatgaagcatcagctgccacctgatcatgatgctgaatctataaagaaaatggctactgctgctccacattgtggatcatcaaacgtggaagaagtgctagttgaaggtaatgttggaaaccacagtatcaatagaagtgtttcaagcagcaacaatggaagcaatggacaaaatgggagcagcacagcagttaatgctggagggacaaacacggaaagcaacaatggactcactgggaatagtggcagtggtgatgctagtggaagtg

SEQ ID NO: 30895 - DNA, 389 bp, Glycine max
  unsure at all n locations
  Clone ID: LIB3138-051-Q1-N1-E6
aaaagattcgcacagcacttgggaaaggtaagaaaattgtttttgttactagagttgatccttttccagtagctttactggctgttctttttggcgttaagaatgaaattctgagttctaacgccactaatcctatgctgacgcgacttcttgagaactgtaagagtctcaaatatctggttgatgagtgtccttttgcatttgtgaactagtatgtagtattttattcacttaaataaagcgcattactatgtgcaatgagtgtgtttaaattttacacaaaaggagcaaagataaaaaaaaaaaaaaaaaaaaaaaacataaaaaacaaaaaattacaaancatcaccaagctccaaaaatcaacaaaagcagaagaatgaagcact

SEQ ID NO: 30896 - DNA, 378 bp, Glycine max
  Clone ID: LIB3138-051-Q1-N1-E7
gaaactgggaactgatgaaaagacttttatccacatattcagtgaacggagtgcggcgcatttggctgccgtcagttcttattaccatgacatgtatggtcattcactgaagaaggcagtaaagaatgaaacatctggggcctttgaacatgcacttttgacaataatccaatgtgctgttaatccaagaaagtattttgcaaaggtgttgcataaggcgatgaaaggcttggggactgatgattccacactcattaaggtcgttgtgacaaggactgaggttgatatgcagtatatcaaagctgcatatttaaagaaacacaagaagactctgaacgatgaagtacactcagaaacatccagtcactacaggacttt

SEQ ID NO: 30897 - DNA, 369 bp, Glycine max
  Clone ID: LIB3138-051-Q1-N1-E8
attctgcgtagtgatctattggcaaattttttgacagagggcaattttagagcaagtgttgatttgcagcgcactcatcgtattagaggaatgattaaaatggtggccacagttggtattcctgaaaatacaagtatatcattggcctgtgctatgaatagttcttttagggggcgcgccagttctgatatttacaccatctgctctcaagactgtgaattggggaatcctgcttgcacaaaagcaatgactatgtcatttaatccaaacccgtgttctgatgcatggagtttggaatttctgaagcgtactggatttcattgcgatatcatttgtgtcactggatggactgccaccccaatgcaagat

SEQ ID NO: 30898 - DNA, 392 bp, Glycine max
  Clone ID: LIB3138-051-Q1-N1-E9
ggggtgctaacacttgggtcagttcatgatgcatcagctgccaagactggtggtagaattggtggccaggccttcaagtcagcagctccacgctccgcaccaagaatcaacaattccaggaccaacatctatatcaatcctcgagtggcacctccgcttgttggtggctatggctatggttatggtggctggggatggtctccattttcattctttgcaccaggtcccagtgtagctgtaggcgttggaggtggatttgacactattcttctgtttatgtttcttggtgttgctgctgcagttgtgaggagattctttgggtcaagaaatgaagatgatgactactagcagcataaaaggctttttaaagagagtgttattttgatgtatag

SEQ ID NO: 30899 - DNA, 331 bp, Glycine max
  unsure at all n locations
  Clone ID: LIB3138-051-Q1-N1-F10
tgaaaatgcggaatcctctgcatgatctggaatttgtgtttgctttcgcttgttcgtttgtttaattcaataaaggaaattaggcatgaccctcttgttgagtatgctctgcctatttgaaaatttccacacctcttttaattgtcgtaatgatgtgtgaagtgtgtgttattttaaaaaaaaaagactaaaggaaaccaacaaacaaggtttacagtggaagcttaaaaattgatgctgtaaaaaaagaaaaaagagattgaagagaaccaaacngacctacaaaaaaagggcggcccgcacttagggatcttttctcccccgaaattaa

SEQ ID NO: 30900 - DNA, 393 bp, Glycine max
  Clone ID: LIB3138-051-Q1-N1-F11
ctcaatcctggtatttcaggttctcgtcttttgggcaccattcctcagtccatttcacagcaaactgtttggaatcaaatggcaacagtgagaacaccattgaattttgattctagcaagcagagcttttgtcagttttctattgaccttctcggtggaggaatcttagtggacaaaactggagattggatcacacttatacaaaattctccaattagtaacttgttgagagttgctgcttggaagaaaggctgtttaatggtcaagattgtgatgtctgggaatgcagcagtcaaaaggagtgattgggcctcattggtacaagtgtttttaacaaacagcaacagtacagagcattttgatgcatgtaagtggacaaaatcagaaccacat

SEQ ID NO: 30901 - DNA, 334 bp, Glycine max
  Clone ID: LIB3138-051-Q1-N1-F12
ggaatcccactatgtaaagctgtccttgaggcctatagggaccttggcttcagagggaacagacagaaaacaagaatgatgtggttgattgacgaattggggatagaagtattcaggtcacaggtggaaaaaagaatgccagggaagcagctggagagagcatctgaggaagaactggttaacaaaaaatgggaaagaagagactacttaggtgttcatccacagaaacaagatggcctaagctatgtagggattcacattccagttggtagagttcaagcagatgatatggatgagttggcgcgattggtggacaaatatggaactggagagc

SEQ ID NO: 30902 - DNA, 305 bp, Glycine max
  Clone ID: LIB3138-051-Q1-N1-F2
ttaccaagcaagttatgagcaagatggcagaaatgataaacagtctttgtggtggtgatgaaaaattgatgcgtgaaaggacgcacctgctgttggcttgttgttcaaggatggcaatttgtaagaaagatgtttggagagttgaatgtggaatcccttctggatttccgctcacagttatttgcaatagcatttttaatgagatgctcattaaatatagctattaaaaattactgggccaagcttaagcttcaaatttttttttaccattcttcaaaaaatttggttctttggggggggattgg

SEQ ID NO: 30903 - DNA, 388 bp, Glycine max
  Clone ID: LIB3138-051-Q1-N1-F4
ggagagagaaagagatagagaactcgttcttctttttccattaacgttttcaatctttttcacctaacacaccatctcctttccattcctttcttccttcgtcccattctcgaattggcgtgtgcctcttgcaatcccccaaaggttttttgaagcagaagaatggacttctttactagagacataaatgaggattctatgcttagatgcccattcttggggaacatcaatgagcctactaacttctcattctcttcacctttggctttaccaatgcctgttcggggagctaaaggtccaatttttgaagatggtcccaattttgatttggcatttaggcttttccacgggagtgatggtgtagtacccttatctgacagatcttttc

SEQ ID NO: 30904 - DNA, 409 bp, Glycine max
  Clone ID: LIB3138-051-Q1-N1-F6
gcaccatcagggtgagcagattacaaggagtcaccatgttgctgctgatattgatcacgatttgagtcggggagaaaagcttttgggaagtcttggtggcatgttctccaaaacttggaaaccaaagaagacaggcacaataactggccctgttgtttttggagatgatccggtgagaagaaagggcaaccacttggagcaaagggagaagttaggattgacttctgccccaaaagggcagtcgaagtcacggccaacactttctgagccatcaaatgcgctcgaaaaagttgaggttgaaaaagggaagcaagatgatgcactgtcagatttaagtgatctcttgggagaactgaaaggcatggccattgacatgggatctgaaatcgggaggcaaaaccaagccttg

SEQ ID NO: 30905 - DNA, 394 bp, Glycine max
  Clone ID: LIB3138-051-Q1-N1-F7
tggaactttcggaagtcgcgcgttgtaattaaccgcaacccgaaacggtgcactgcagtcttgtctaccatcggcgttcactgctctcccagagagaggcgagagccactgaaacaaaacaaccatcaaatcaagtttaaatttcagttctgttctgcttctaatggtaatggggagtttcagaaacgctgcaatcaacgtcgtcagagtgatcaattccaacaaagccaccatcgctgcttccacaaacccccttcacactctcaggtttacccctttctcgtcccacactcaaaatcaaaccctggaaatcgatttatctaacgaagaaagcaaaagacgcttgtttaaccagctattatatagaagcaaacagcgagggttcctggaactg

SEQ ID NO: 30906 - DNA, 186 bp, Glycine max
  Clone ID: LIB3138-051-Q1-N1-F9
tgcaattgaagttaaaagccttagccttccctacaactccaaacacaaagacatcatcatccatggctgcctccgtcttcactgtcggagctgtcaacagagctcttttggacctgaatgggtctggagcttgagcttcaacttccaagtcaagcttctttgggaccaacttggaaaaaggtattg

SEQ ID NO: 30907 - DNA, 406 bp, Glycine max
  Clone ID: LIB3138-051-Q1-N1-G10
attcaattcacgtaccttggaatcgattcttagggtttctgactcctttatgtgtttgtctcgcaattgatcatcgcaaccacaatgtccggtcccctcgatcgttttgccagaccttgctttgaggggttttcgggcagtgacgagaagaaggagaggagatctgacttcgagaactccgaggatgaaaggaggaccagaattggatctctcaaaaagaaggcacttaatgcatcctccaaattcaaacacactcttagaaagaagagtagcaggaggaaaagcgatggccgtgttagctccgtttcaattgaggacgttcgcgatttcgaggagctccaggctgtcgacgcctttcgccaatccttgatcatggacgaattgctccccgaagcctttgatgatt

SEQ ID NO: 30908 - DNA, 377 bp, Glycine max
  Clone ID: LIB3138-051-Q1-N1-G11
atcaatgacctcatcttggttccctaagttaaagatgtggccaccattctccattggaagctataggggccatgcttagaggtcgtgtgtatctgcaatgaagaggcctagccaccttcatcaccatatgatatttataaagatatatatgaaactatgaactgcgtttatgcatgtcggaaaatcttcttttaataagagttggaaatcctcttgttttaaaaaaaaaaaagcaaactacaaaaaaaaacacactcttaaaaaaaaaacaaaaaaaaagaaaaagagaaggacctctaaacatacgataaaaatgacagacgatctaaaatacaaaaggggggccccctattaaggactttttccacccgggaata

SEQ ID NO: 30909 - DNA, 386 bp, Glycine max
  unsure at all n locations
  Clone ID: LIB3138-051-Q1-N1-G5
ggagaagttctactgggcaccaacaagggaagaccgcattggttgtgcaccggaattntccgcactgatggtatttctgaacaggacattgtcaagcttgttgacacctttcctggccaatccattgatttctttggtgcactgagggccagagtatatgatgatgaagtgaggaagtggatttctggtgttggtgttgacagtgttgggaagaaacttgtgaactcaaaagatggacctccaacctttgagcaacccaagatgactctggaaaagctcttgctgtatggtaacatgcttgtccaaaaacaagagaattgtaagagagtccaattggctgacaagtacttgaacgaggctgctcttggaaatgctaacgaggatgc

SEQ ID NO: 30910 - DNA, 393 bp, Glycine max
  Clone ID: LIB3138-051-Q1-N1-G7
gtgcatttcaggatgcacagaagagaatggaagagaaaggatgcaagtgccctgtgttccttttcttttcggtcaatgctagtggtcaattttgcggagtagctgagatgactggacgagttgatttcaacaaaagtatggatttctggcaacaggataagtggaatggatatttctctgtcaaatggcacattataaaggatgttccaaatcctcaactacgccacataatactcgagaataatgatcacaagcctgtcacaaatagtagagacacacaagaggtgagttttccccaaggtgttgaaatgcttaacattttcaagaattatgtggcaagaacttccatattggatgactttgaattttacgaaagccgccagaaggtattgc

SEQ ID NO: 30911 - DNA, 394 bp, Glycine max
  Clone ID: LIB3138-051-Q1-N1-G8
ccttccacttccaattttcaataattcacgactccttccgagatctctctctctcgcccacaatccaaccatggcgaatacggggaatttagacgcggcgatagagcaattgctgaacgtggagaagcagatgaggctcgccggtgacgtggcgggtaccagaaaagcagccaccgatattttgcagctctgcttcgatgcacgagcctggaaaacactcaatgaccagattgtcgttttgtcaaaacgacgtggccagctcaagcaggctgtaacagctatggtgcaacaagctatgcaatatattgacgagacaccagatatcgaaactcgcatagaactcatcaaaacgttgaacagtgtgtctgcagggaagatatacgtggaaattgag

SEQ ID NO: 30912 - DNA, 396 bp, Glycine max
  Clone ID: LIB3138-051-Q1-N1-G9
attgaagagttccattcgatgcagaggatgatgaatgctcctgattcaaatgataatattgatttactgttgagcattgatttgttgggtttacaaggagcaggtaaagcttttccaaacaaaattgtttttgatgataagcttgtgttggctaacacacaagaattctttgatggaaattttccagtggattcttggttaccaatttttgtgaattgtctttatcctgtaagtcaattaccttcagaagctgtcgttgtaaatgttacatgtggtagtggacggtgtggtttacccaccactgcttggattagttctgcagttaacaatcgctcctcagatatcaacaaaaggattcgcacagcacttgggaaaggtaagaaaattgtttttctt

SEQ ID NO: 30913 - DNA, 406 bp, Glycine max
  Clone ID: LIB3138-051-Q1-N1-H10
attgatttactgttgagcattgatttgttgggtttacaaggagcaggtaaagcttttccaaacaaaattgtttttgatgataagcttgtgttggctaacacacaagaattctttgatggaaattttccagtggattcttggttaccaatttttgtgaattgtctttatcctgtaagtcaattaccttcagaagctgtcgttgtaaatgttacatgtggtagtggacggtgtggtttacccaccactgcttggattagttctgcagttaacaatcgctcctcagatatcaacaaaaggattcgcacagcacttgggaaaggtaagaaaattgtttttcttactagagttgatccttttccagtagctttactggctgttctttttggcgttaagaatgaaattctga

SEQ ID NO: 30914 - DNA, 328 bp, Glycine max
  Clone ID: LIB3138-051-Q1-N1-H11
atgataagagacaacctaaaaaaggagatatctccattacttggactgtgtatacaagctccaagaaactcgcgtcaaagtctaataaaaggacgtgcacaggcaaatgcagttgctcagcaagctttaattgctcactggcaaagtattgtgaaaagcttaaacaattatctaaagataatgaaagccaactatgcaccccctttcttggtccgaaaagtgttcactcaaatattctcattcatcaatgttcaattattcaatagtcttctgttgcgtcgggagtgttgttcgtttagcaatggagagtatgtaaaaacaagtctgg

SEQ ID NO: 30915 - DNA, 327 bp, Glycine max
  Clone ID: LIB3138-051-Q1-N1-H12
tctctcttctttcacaccaatttccagcatttgaaacatggcggattcaaaatcaggattgaggaaaccagtgttcaccaaggttgatcagctttgcccggggaccagtgggcacactttaactgtgaaagtggtcaatgctaaaatggtgatgcacaaagggcgctctgatggtcctcaatctcgtcaaatgcgaattgctgagtgcttggttggtgatgagactggaatgatcatattcaccgccagaaatgatcaagtggatacgatgacagagggagctactgtgatcctgcgtaacgccaaaattgacatgttcaaaggatc

SEQ ID NO: 30916 - DNA, 408 bp, Glycine max
  Clone ID: LIB3138-051-Q1-N1-H4
ctcgagccgctcgcgtctcagcctcagtttcggatctctcccttcgctcaccaatttccaggatttgaaaaatggcagattccaaaccaggattgaggaagccagtgttcaccaaggtcgatcagcttcgtccagggaccagcgggcacactttaactgtgaaggtggtcgatgctaagatggtgatgcagaaaggtcgttctgatggtcctcaatcccgccaaatgcgaattgctgaatgtttggttggtgatgagactggaatgatcatattcactgccagaaatgatcaagtggatatgatgaaagagggtgctactgtgaccctgcgcaatgccaaaattgacatgttcaaaggatcaatgaggcttgctgcggacaagtggggccgtgtggaagtcacagaac

SEQ ID NO: 30917 - DNA, 412 bp, Glycine max
  unsure at all n locations
  Clone ID: LIB3138-051-Q1-N1-H5
tctacgactgatgcccaccaagaagatcaagcgtaccaccacgacgacgactaccaagtcgaccaaggccgtcaaggtttcgggtgcctcgaagaagaaccccctcttcgtgtctacgcccaagaacttccgcaagggtggtgacattcagcctaagcgtgatctgtcgcgcttcgtgcgctggccgcgctacatacgcctncagcgtcagcgcaagatcctgtaccaacgcctgaaggttcctccttcgatcaaccagttctcgaataccctggagaagaacattgcgacggacctgttcaaactgttgcttaagtaccagccggagaccaaggctgctaagactctgcgtctgcgcaacatcgctgctggcaaggaggaagcctcggcccctcctgccgtcgtgaaattt

SEQ ID NO: 30918 - DNA, 394 bp, Glycine max
  Clone ID: LIB3138-051-Q1-N1-H7
caagggcaagtcctcgtcttcgtcgtgtttctcttctctgggctgattcgagatctgccagccatgttcgtgctcttcagattctctctcctgcctctcttcctgtatctggtcttcgcttccgagtcagatcacaggtatcaacaagatgacccagttaccctttgggtgaacaaagttggtccttataacaatccacaagaaacgtacaattattacagcctaccattatgccgtccacctggtaatactgcacacaaatggcgtggtcttggtgaggtcctgggtggcaatgagctcattgatagccaaccttgagataaagttcctaggaaatgtggagaagaccatattttgccgtatagaacttgatgaagcaaaggttcaacagttc

SEQ ID NO: 30919 - DNA, 309 bp, Glycine max
  Clone ID: LIB3138-052-Q1-N1-A1
ggcgagacaaaggagccgtcactaacgtcaaggaccaaggggcgtgtggttcgtgctggtctttcagtaccacgggagcgttggaaggagctcattatctggccactggtgagcttgtgagccttagtgagcaacagcttgtggattgcgaccacgtgtgtgatccagaagaatatggagcgtgtgactcgggctgtaatggtgggttgatgaacaatgcatttgagtacatacttcagtctgggggagtacagaaagaaaaggactatccatacacggggagagatggcacctggcaatttgacaaaa

SEQ ID NO: 30920 - DNA, 261 bp, Glycine max
  Clone ID: LIB3138-052-Q1-N1-A10
gtcaagttgacaaccataaacaatatgtgtgcatatgggctcaatcctggtatttcaggttctcgtcttttgggcaccattcctcagtccatttcacagcaaactgtttggaatcaaatggcaacagtgagaacaccattgaattttgattctagcaagcagagcttttgtcagttttctattgaccttctcggtggaggaatcttagtggacaaaactggagattggatcacacttatacaaaattctccaattagtaac

SEQ ID NO: 30921 - DNA, 311 bp, Glycine max
  Clone ID: LIB3138-052-Q1-N1-A11
attttggcggaggttagctgcggattgggtgaagccatggttggtatcaatttgaccgatgacaaggttgagaggttcgccaatcgctctgaatgaaatgaataataattctcagatttgtttctctgtggcgcttcaatttggactattaagggttttagttgcttcttatatattataataaggttatgtttttagttttcggtgttttgaaccgtgttaattggattttagaaaaaccaaaaagaaaaaatagattgggtgctatttgggcatgccttggtaatatgcctattctttttttttacata

SEQ ID NO: 30922 - DNA, 366 bp, Glycine max
  Clone ID: LIB3138-052-Q1-N1-A12
agcgaataaaaaaaggcaaatcaaattcgagagaaggagagaatttagagagggaaaggatgaagatcacggcgttgttggtgcttaaatgcacgggcgagggatccgatccggtgattctggcaaacgcttccgatgtcagccacttcggctacttccagcgttccagcgttaaggaattcatcgttttcgttggtcgtacagtcgccagtcgcactcctcagggccaacgccaatccgtacaacacgaagagtacaaggtgcacacatacaacaggaatggtctttgcgcgttgggatttatggatgatcattacccgattcggagtgcgttttctcttctcaatcaagttatagatgaatatc

SEQ ID NO: 30923 - DNA, 362 bp, Glycine max
  Clone ID: LIB3138-052-Q1-N1-A2
gtagtaatgggtgaatctatatctttgccacaagagttctttgatgcgatcaaggacaggggatatataacaagttggtgtgttcaagagaaagtgctttctcatccatcagttggggcctttctaacccattgtggttggaattctacacttgaaagtatatctgcaggtgtgcctatgatttgttggcctttctttgccgagcaacaaacaaattgcaagtatgcatgcacaacttggggaatcggaatggaaattaaccatgatgttaggagagaagagatagcaaagcttgtgaaagaaatgatgatgggagaaaagggaatggaaatgaaacaaaaatccttagagtggaagaagaa

SEQ ID NO: 30924 - DNA, 317 bp, Glycine max
  Clone ID: LIB3138-052-Q1-N1-A3
gtgaattcatggaaaggcacactgtctccaaacttattggttcacctcctggatatgttggttacactgaaggtggtcaattgaccgaggcagttcggcgtcgtccttacactgttgtactgtttgatgagattgagaaagcccatcctgatgtgttcaacatgatgcttcagatcctggaagatggaagactaacagacagtaagggcagaacagtggatttcaagaacacacttcttataatgacatcaaatgttggaagcagtgtgattgagaaaggaggccgcaaaattggatttgatctggattacgatgag

SEQ ID NO: 30925 - DNA, 227 bp, Glycine max
  Clone ID: LIB3138-052-Q1-N1-A4
ttctcatattcagtggattcatttcatcaatcactttgcctttctgatcataatcaccaaaatggcccccattggaaaggttcgtttcaaatacatgcaagccataataatatttatgatgttgcaggttgttgtttctgctcaagaccatattatgtgcattgagactgagagggaagcactcctccaatttcaaggctgcacttttggatccctatggcatgctt

SEQ ID NO: 30926 - DNA, 326 bp, Glycine max
  Clone ID: LIB3138-052-Q1-N1-A5
gtttatggtcacaacttcattatgtttcgtgtaataatctggaaatgcaagaagcttatcttgtcaatctcgtaaatgtgttacgagaattgtatttgcacagtccagaggaagctcgccaattgagaaggaaagctctctctcgtattgaatggctgcaaaaagctgatgtgcctaccatagcacagattgaagagttccattcgatgcagaggatgatgaatgctcctgattcaaatgataatattgatttactgttgagcattgatttgttgggtttacaaggagcatgtaaagcttttccaacaaaaaatgttttgatgata

SEQ ID NO: 30927 - DNA, 236 bp, Glycine max
  Clone ID: LIB3138-052-Q1-N1-A6
cttgcccctacattaattgtacgggctctttgtccataccattgggaaatatggctgacgatcccatcaatcttgtggcgtttccacacatgctggtgctgtgtgtagagattcatgaaaaatggccttagtactgtcagcagacgaatttcatacagctcgatcaactcacgtgcagccggcatcaactctgatgactgatgggtgtacatatttagactgcaacagggcatgat

SEQ ID NO: 30928 - DNA, 132 bp, Glycine max
  Clone ID: LIB3138-052-Q1-N1-A8
aaaaggatgacttgtggacttttgagagtttttagatttgtgtttggtgaagtatatgttattgcaatgtacttcagataatgtgaattatcttgtgtatcccaatccaacttaatgttacttgctttttac

SEQ ID NO: 30929 - DNA, 289 bp, Glycine max
  Clone ID: LIB3138-052-Q1-N1-A9
ccattttcgcttctcgtagcgttttcggaacagttatggcttccatggccggatccaactgcgtcgctctccgaaccgccaacttcggcgcctccggtaaccggaaaatctgccagatccgccaatggtctccgattctcacgaatctccgtcccgtttccggtcttcgtcaccgatcgaatactccgtttagctcctccggtgtgagagcacaggttgctactctggaggaagcaggaaccggaagcaactcataaagtggaagcgccggttgcagtggtgaccggag

SEQ ID NO: 30930 - DNA, 218 bp, Glycine max
  Clone ID: LIB3138-052-Q1-N1-B1
ccactactactacgattgtaatatacctatacttaactaccacagtcatgcatcttatgttggtgccggtcccacaagacgcggcgaagcgcatatacacgctcaaaaaggtcatggatggcgaaatcagcatgagcgcgcatccagcgcgcatgtggcctgatgacaagtactcgaggcataaggttacgatccataagagatatcgattgcttttg

SEQ ID NO: 30931 - DNA, 318 bp, Glycine max
  Clone ID: LIB3138-052-Q1-N1-B11
ctttctagctagtcataacatcaccattactgatggtattgacaaaactagtgcaactttgcaatttagaaagttagcagattgtgattttctcaagagaaactttaagcagatgtctaatgttttgtgggtggctcctgaggacaaggcgagtttatggtcacaacttcattatgtttcgtgtaataatctggaaatgcaagaagcttatcttgtcaatctcgtaaatgtgttacgagaattgtatttgcacagtccagtagtagctcgccaattgagaaggaaagctctctctcgtattgaatggctgcaaaaagc

SEQ ID NO: 30932 - DNA, 286 bp, Glycine max
  Clone ID: LIB3138-052-Q1-N1-B12
ggagaacattgtggggccaacaagtaatacgccgccatctatgtcgccaatttcgaacgcttcgtcaaatggatcaatccccatgaaagtcaagaggccgagtcttggtagcgcatcacgtgcaactgctggaacagcagcttccgttgcaagagcaacagcaaaattaacagcgcgaggtcagtctatcagtcgttcggcgtcacctggaccaacgaagaagcgcgcaaggtcacacatgagttcatcaggacccggttggcagaaatagcttcatgtacgactc

SEQ ID NO: 30933 - DNA, 394 bp, Glycine max
  Clone ID: LIB3138-052-Q1-N1-B2
tggtgactgtatgactgtcactggaaaaaccctagctgaaaatgcagaacttgtccctcctctgtccaacgggcaggaaataataaggccagtagaaaatcccatcaagaagacggctcacattcaaatattatatggaaaccttgcaccacagggttccgttgctaaaattactggaaaagaagggctgtacttctctggtcctgcacttgtctttgaaggagaagaggcaatgattgctgccatttcagaggatccttcgagttttaaggggaaagtggttgtaatcaggggagagggacccaaaggtggtccgggaatgcctgagatgttaacaccaacaagtgcaataatgggtgcaggtcttggaaaggaagttgcattattgactgat

SEQ ID NO: 30934 - DNA, 361 bp, Glycine max
  Clone ID: LIB3138-052-Q1-N1-B3
aatgaattaagactaaggaaacaatgaagaattgaagaagaagaagaggaggagttaaaaaacaaccatgtcagaatcaaacgcaattgcaaatggtttagctggtgcaggtggtggaattattgctcaaatcataacttatcctcttcaagcggtaaatacgcgccagcaaactgagagaacactcaagaggaacaagcaaagttttacctccaactcaaccactgctcctggcactcttcttcagatctttcaggtcattggaactgagggttggggtggactctatagtggcctcaagccttctcttcttggaactgctgcttctcagggcatttactactatttctatcaagttttt

SEQ ID NO: 30935 - DNA, 220 bp, Glycine max
  Clone ID: LIB3138-052-Q1-N1-B4
tgctagttcacctaattaggccagataaattctatagaatgagagagtttaccagagggtaaggatgaagatcacggagttgttggtgcttaaatgcacgggcgatggatccattcctgtgattctggataacccttccagtgtacatcactttcaatacttcggagcccccggaagggttcgtggcgccttcctcctttgacgacgggcctctggagac

SEQ ID NO: 30936 - DNA, 313 bp, Glycine max
  Clone ID: LIB3138-052-Q1-N1-B5
gtaaattgagaatcccattaaggaattcctcactctcttgctaataataatataaagtgtttaatgtaaaaagcatgttaaagagttttccattctcgatcaatcagaatttataataggtaagaattgtaaggtactagtagttcttattcttataggaagttaacaacttaccatatatgacaattgtaaatgcatatactattttctctaatgtaaatgtggtaaaaacattatagctgcatgatggcttctatttctttgtctacatcttttcaaaccttacaatgacttttttttttggtggaaattc

SEQ ID NO: 30937 - DNA, 392 bp, Glycine max
  Clone ID: LIB3138-052-Q1-N1-B8
ctaccacaaagctcatgccaggttctgggctgattttgtagatcagggggtgtatcatgcttctaagagagtttggatttcaaagggagatgagaaagaggtggcaaaaaaggacttcctagagagcttaaagcaattggaggagtttcttggagacaagccttattttgggggtgacacatttgggtttgttgatgttgctcttattcctttctattgctggttttatacttatgagacttttggaaacttcaaagtggagggagagtatccaaaacttatctcctgggccaagagatgcatgcagaatgaaagtgtatctgaaactcttgcagatgagagggaggtttatgaagctggtttggattataaaaacaaattttattgaacta

SEQ ID NO: 30938 - DNA, 335 bp, Glycine max
  Clone ID: LIB3138-052-Q1-N1-C1
cgctcaattccattttgctctgcgggattcgttccggtgcggccgtgcttattttgcagaagtttgagatcactactctgttggagctcatcgagaagtacaaggtgacggttgcgtcgtttgtgccgcccatcgttttggcgttggttaagagcggagagactcatcgctacgacctgtcgtctattcgcgctgtggtcaccggcgcggcacccttaggaggggaacttcaagaagccgttaaagctaggctaccacacgctacttttggacagggatatgggatgacagaagcaggaccacttgccattagcatggcatttgcaaaagtaccc

SEQ ID NO: 30939 - DNA, 207 bp, Glycine max
  Clone ID: LIB3138-052-Q1-N1-C10
caaccagcgtctgatggtttaaccgccactggaacatcaaagaagcagaattttgaagtggaataagtgaagcgctagttcatctttagtgaggcaggagactagcctcgaaatctattacatgtgccttgctaggtaataagttgtgatagcacacccatcttcctattttaactttttaggatttatcgtcttgacatgttataa

SEQ ID NO: 30940 - DNA, 335 bp, Glycine max
  Clone ID: LIB3138-052-Q1-N1-C11
ccgcggggagagaggccatcgcgagagagaaccccgtcgtgaaggccgcgaagatcgtcaaagtctgacaaccctaaatcggagaacaaatctagaagaagaaggggcaaaaaggggataacacaaaacgacgacgtttccactcgatcgcggttaggtgattgattaattaattattaattactcgcgtcgcgtcttttcttcgagacgcgactaggcgcgtgggtggaaacccggtgaatttgtaaccgggaaagatgaatttctcgggggaccctttttcttttttcttaattttaatggtttaatttcttaaatttttatgcccttttttt

SEQ ID NO: 30941 - DNA, 195 bp, Glycine max
  Clone ID: LIB3138-052-Q1-N1-C12
atgacatctgagactctcaaggtaatatagtcatggttgttctaggagagaacagccatgacatctgagactctcaaggtaatatagtcagaaccatctttgcccttgaagtcatttccagcatatttggagtacaaaactgtgttcccttgagagtcttatatgtcatggctgttctctcctagacaaccttaa

SEQ ID NO: 30942 - DNA, 204 bp, Glycine max
  Clone ID: LIB3138-052-Q1-N1-C2
tctccgagttggttttgccaaagctgcctaacaagacatgttggagattatatatggcatgttttaataagctcgttattgtattgtaaataaacctttctgtaacctactatggcacaaggtttaacattattagatccctgcggaaatgtaccttggtgaaaaacttattgccaccccctgaatgttatttgtggtggcctt

SEQ ID NO: 30943 - DNA, 275 bp, Glycine max
  Clone ID: LIB3138-052-Q1-N1-C4
atagaatctaagtaattcacggttaggatagatctaaaccagctcaggatgtgtgtattacaacttactatgccaactatgaaacatcttattagaaacacaagacagccgatccgaaacgtcacaaaatccccagctcttcggggatgccctcagcgccgaggaacgtgttccagggtgtatgagcgactcgtgcagatcatatactaagaagaaaaaaccaattgcattttttcagaatcgtggatcggctaaaaaagggggaatgtagtttt

SEQ ID NO: 30944 - DNA, 313 bp, Glycine max
  Clone ID: LIB3138-052-Q1-N1-C5
cggattctcgaatcggatctcgaggcggcgctggcggcgctgaagatgaaggaggatcacttgatggaggcggagaggacggtgttgttggagaatagtaagttgaagctcacgaaggaggagctggagcggcaagagagtgaaaaagagcagcctaagattgaaaccgagaagaagcccgaggaggccgccgtatcccccaagaaagactacggacccatccctgtcgttttcaaactcgacttgcattgtgagggatgcgtaatgaatatcaaacgcacatgtcgccatttccaaggtgtggaaaccgtta

SEQ ID NO: 30945 - DNA, 240 bp, Glycine max
  Clone ID: LIB3138-052-Q1-N1-C6
gtgcatatgggctcaatcctggtatttcaggttctcgtcttttggggaccattcctcagtccattttacagcaaactgtttggtatcaaatggcaacagtgtgaacaccattgtatttttattctagcaagcagagcttttgtcagttttctattgaccttttcgggggaggaattttattggacaaaactggtgattgggtctcaccttttctaaaattttccattattaaactacttt

SEQ ID NO: 30946 - DNA, 69 bp, Glycine max
  Clone ID: LIB3138-052-Q1-N1-C8
tctcccagttggttttgccaaagctgccttacaagacatgttggagattatattgggcctgtttttata

SEQ ID NO: 30947 - DNA, 393 bp, Glycine max
  unsure at all n locations
  Clone ID: LIB3138-052-Q1-N1-C9
atagattttgcaagttgcgtgtgtgtgagagtgagtgagtgcagaagatgtggccattcagcagaaaagggtcttctgggttttcatcatcatccactgcagagcaagtcactgaaggaattgatggaactggtctcactgccattgtcacaggggcatccagtggtattggaactgagacttcacgtgttcttgctttgcgcggtgtccatgtgattatgggtgtgagaaatatgcttgctgctaaagatgtcaaagaaaaaatacttaaggagattccctccgctaaagttgatgccatggagttagatctcggttcgatggagtctgtcaagaaatttgcatcnagcgttaagtcgtctggtcttccattgaacatcttgataaacaatg

SEQ ID NO: 30948 - DNA, 338 bp, Glycine max
  Clone ID: LIB3138-052-Q1-N1-D1
gctgttgttactggagcaaacaaagggataggatttgtgactgtagaagagctggcctcaaatggagtcaaggtggtgctcacagcatgagatgagaaaaaaggccatgaagcctttgagagattgaaagagtgtggtttctctgatttggttatttttcaccagcttgatgtcactgaatctgctagtttttcttcactagtagagttttgtaagaccaattttgggaagcttgatttattggtgaacaatgcaggaatcagtggtgccaatctggatgaattggaaagatcaacatttaaatgggaaggaactgactcaaaccaaatttatatgac

SEQ ID NO: 30949 - DNA, 182 bp, Glycine max
  Clone ID: LIB3138-052-Q1-N1-D10
ccaagtcattctagagccacggatgatggcttgtaccgagccattgacacgtatctaaaagcacatccagatgtgtcaaagcaagaaaggaagggcctgtgtaggctgcttgatagccggaaactcacaacggaggccttactttatgcagctcaaaatgatacggctgcctgtgatagctg

SEQ ID NO: 30950 - DNA, 251 bp, Glycine max
  Clone ID: LIB3138-052-Q1-N1-D11
gctatatagcataaacatttgagtcttcattgcacaatgtcgacctcttccattaacgggtggtgcctctcttccatctccccagccaaaacctctctcaagaaggccacattaggcccttctgtcttcgcaaccgttagcactccttcttctccttcttcttcttcttcttcttccttcccttctctcattcaagacaggcctgtctttgctgcccctgcccccatcatcaccccaactgtgagagagga

SEQ ID NO: 30951 - DNA, 328 bp, Glycine max
  Clone ID: LIB3138-052-Q1-N1-D2
gaaccattctgcgttttgatctattggcaaattttttgacagagggcaattttagagcaagtgttgatttgcagcgcactcatcgtattagaggaatgattaaaatggtggccacagttggtattcctgagaatacaggtatatcattggcctgtgctatgaatagttcttttagggggcgcgccagttctgatatttacaccatctgctctcaagactgtgaattgtggaatcctgcttgcacaaaagcaatgactatgtcatttaatccaaacccgtgttctgatgcatggagtttggaatttctgaagcgtactggaatttattg

SEQ ID NO: 30952 - DNA, 352 bp, Glycine max
  Clone ID: LIB3138-052-Q1-N1-D3
ggaagaggaaaaagaggattggagggtcgccacgtttagcaacaaccaaaccctctctactctttcttcttctcttcgctagggttttagcttcttcctcttcacttcgttcttctggcctctacaatgagcaacgacaaggacaccttcaacgtcgctgatctcacttccgctctcaacgaggacaatagagcagaccttgtcaatgctctcaagagcaagatacagagtttggctggacagcattctgatattctagagtctctgtcgcccaatgtcaggaagcgtgtggaggttcttagagagatccagggtcaacatgatgaattagaggcaaaattttttgaagaga

SEQ ID NO: 30953 - DNA, 366 bp, Glycine max
  Clone ID: LIB3138-052-Q1-N1-D4
atactcatcatcagggtctctctgtttcggagccaaaccaaaaacacacacacttgttcttctatggctggccttcaacaatacaacttcttccccaccgatctcttgtaccctcgtccacaaccacaacaagcttctcctaagcccactgtgcttcccctccaaacccctaatgttcaagatcacactcagcctcaacaaccacctatgaccaatgccaccccttctacctctgctgttctttctagccaaaagggtcattctattgctgccgttgccaacaagctctccaaattctaatcagacccacttttttggctggcttttggatccactgattgatgaaaaatttttggaattcttccc

SEQ ID NO: 30954 - DNA, 259 bp, Glycine max
  Clone ID: LIB3138-052-Q1-N1-D5
gactatgtcatttaatccaaacccgtgttctgatgcatggagtttggaatttctgaagcgtactggatttcattgcgatatcatttgtgtcactggatggactgccaccccaatgcaggatgttcaggttacaattgattggtttatttcctctcaggaatgtgttcccaggacctattgtgttttaaatccacaaaatccttttgtgttaaataggtggatgggaaaattgactttcccccagggcacttcccgaagt

SEQ ID NO: 30955 - DNA, 305 bp, Glycine max
  unsure at all n locations
  Clone ID: LIB3138-052-Q1-N1-D6
ggaatttcttacagcttggtcaactcaggtgcgtcctgcaacaactctgttggctgatgggtgtccatatttgtatgcaatggtgcatgatagttcagtgtctacaataccaggtgattttgtcattggtgtcaagttgacaaccataaacaatatgtgtgcatatgggctcaatcctggtatttcaggttctcgtcttttgggcaccattcctcagtccatttcacagcaaactgtntggaatcaaatggcaacagtgagaacaccattgaattttgattctagcaagcaaagcttttgtcagt

SEQ ID NO: 30956 - DNA, 290 bp, Glycine max
  Clone ID: LIB3138-052-Q1-N1-D7
gagaaacactcaattttaattttcagctcattagctatttgctgaaaactaggagtgagaaagatggcatcttcaaaaccgcatggtgtagaaaacgttggaagttgtttgagaaacaccaaaggcttcaccctccaagtccttaccggttgttggttcatggagttctcctcattcatgatcatgtcagtgtcaggagcaagctacatgtttagtctttactcaagggatatcaagtcagttttggggtatgaccaatccaccctcaatttcttaagcttcttcaaaga

SEQ ID NO: 30957 - DNA, 344 bp, Glycine max
  Clone ID: LIB3138-052-Q1-N1-D8
aatccttcaaaaattttgtttctttgtgtgtgtatggtgatgataacttaattagtgttcatgaatatgtcaagccttactttagtggttctaaattgaaaagctttctagctagtcataacatcaccattactgatggtattgacaaaactagtgcaactttgcaatttagaaagttagcagattgtgattttctcaagagaaactttaagcagatgtctaatgttttgtgggtggctcctgaggacaaggcgagtttatggtcacaacttcattatgtttcgtgtaataatctggaaatgcaagaagcttatcttgtcaatctcgtaaatgtgttacgagaa

SEQ ID NO: 30958 - DNA, 347 bp, Glycine max
  Clone ID: LIB3138-052-Q1-N1-E1
aaaatttctcaatctaaaattgcacttcccaagaacacagttggaggaaccattctgcgtagtgatctattggcaaaattttttgacagagggcaattttagagcaagtgttgatttgcagcgcactcatcgtattagaggaatgattaaaatggtggccacagttggtattcctgagaatacaggtatatcattggcctgtgctatgaatagttcttttagggggcgcgccagttctgatatttacaccatctgctctcaagactgtgaattgtggaatcctgcttgcacaaaagcaatgactatgtcatttaatccaaacccgtgttctgatgcatggagtttgg

SEQ ID NO: 30959 - DNA, 150 bp, Glycine max
  Clone ID: LIB3138-052-Q1-N1-E10
aaaaaaaaaaattaaaaaaaaaataaaaaaaaaaaaaataaagggaaaaaaaaaaaaaaaataaatataaaaaaaaaaatatataataatattattattaataatatattaatgtatatattataaaaaattatatttggggggggcccc

SEQ ID NO: 30960 - DNA, 279 bp, Glycine max
  Clone ID: LIB3138-052-Q1-N1-E11
gcccccttggaacacctactccttcaacaccgtcctcattgccttatagccagtgctttcttcccttgggcatctcattccgccactaaactcaaaatccccaggcttgtctttcatggcaccggtgtcttcgccttatgtgcctctgaatgcgtccgactctaccagcctcacaagaatgtttcttctgacaccgacccctttatcattcctcatcttccgggagacatccagatgacaaggctgttgttgcccgattacgcctaaacccgatggaga

SEQ ID NO: 30961 - DNA, 143 bp, Glycine max
  Clone ID: LIB3138-052-Q1-N1-E12
tgcaattgaagttgaagtcttgcccttctctcttcaactccaaacacaagacatcatcatccatggctgcctccgtctccactgtcggagctgtcaacagagctcttttgaacctgaatgggtctggacctggggtttcagct

SEQ ID NO: 30962 - DNA, 371 bp, Glycine max
  Clone ID: LIB3138-052-Q1-N1-E2
aatatattagctgatgaattagtagttgttgttcttgtttctttaggacctttagtagttcctatacctgtcatgttccttggattattcacaagcggtatttaagctctcatttttgctactttagctgcggcttatataggtgaatccatggaaggccatcattgaccagttttctacaaaatagtccttttcgtttagcttgccggacatattattgcggctcaatataatctacttagtaaacatctatatctatctacctatatctattatgatttaggttgatagatttagataggttttttgtttaacctatttttagccatattttaaggtttatttttggaatattccaaaatatttagatt

SEQ ID NO: 30963 - DNA, 306 bp, Glycine max
  Clone ID: LIB3138-052-Q1-N1-E3
gctagatatttctgatatgaacggtgaaccggatcccccttcgaagtgaattatattgcagcgaatcacacacactctgaacaacgcccaccatgcaggccagtgataggtttaacatcaattcccagcttgagcatctccaagccaaatatgttggaactggccatgccgatttgaacagatttgagtgggcagtgaacattcaacgagatagctatgcatcatatattggacactaccctttactgggattctttgctattgctgaaaatgaatctattggaagagaacgctacagctttatgc

SEQ ID NO: 30964 - DNA, 330 bp, Glycine max
  Clone ID: LIB3138-052-Q1-N1-E4
cgacctcgaccgataagaactttgcaaggcattcgaattatacaagctgccgctggggctgggaggacaatgttggtaagtgattctggtcaggtttatgcatttggggaagctgagtatggagttcaaggttctaaaactgttgcagctccacagatagtggagtctttgaaaaacatatttgttgtccaagctgcaattggtaactttttcacagctgtgttatcaagagaaggcagggtttatacattttcttggggcagtgatgaaaaacttggtcattacactgatcaaagtgatgtggaacctcatcccttgttaggtgctctt

SEQ ID NO: 30965 - DNA, 366 bp, Glycine max
  Clone ID: LIB3138-052-Q1-N1-E5
gtgagaacaccattgaattttgattctagcaagcagagcttttgtcagttttctattgaccttctcggtggaggaatcttagtggataaaactggagattggatcacacttatacaaaattctccaattagtaacttattgagagttgctgcttggaagaaaggctgtttaatggtcaagattgtgatgtctgggaatgcagcagtcaaaaggagtgattgggcctcattggtacaagtgtttttaacaaacagcaacagtacagagcattttgatgcatgtaagtggacaaaatcagaaccacattcctgggaattgatctttcccatagaagggatgtgggcccaataatggttttgaaaatgt

SEQ ID NO: 30966 - DNA, 107 bp, Glycine max
  Clone ID: LIB3138-052-Q1-N1-E6
gtctatcttaaagagatttctccaggagatattccttgtgagggtgaagatcctggattatcccataaaggttgccagccctgtccaggttgaggattgaagaaatc

SEQ ID NO: 30967 - DNA, 67 bp, Glycine max
  Clone ID: LIB3138-052-Q1-N1-E7
acaaaactggagattggatcacacttatacaaaattctccaattagtacctggttaaaagtggctgc

SEQ ID NO: 30968 - DNA, 225 bp, Glycine max
  Clone ID: LIB3138-052-Q1-N1-E8
ctaataaaaaattaaaaaaaaaaaaaatataaaagaataaaagaaaaaaagaactaagttaattaaatataaaaaacaaaaaaaattattatatgagagtttaaaggtatgagagtacaaaactttgggggcgccgcgacttttattcactccttccccgatattttatacctgccaggttgtggaagggatcataaatttcactttttagggtggttttaaagc

SEQ ID NO: 30969 - DNA, 343 bp, Glycine max
  Clone ID: LIB3138-052-Q1-N1-E9
gttgaattagcaaatatcaagaaagatataatagctccctacaggcatctagtaggcaccataccaagagccgaatcagcttcatttgaaaaacgtaccacactggtgtatttccagggagcaatatacaggaaagatggaggagccattcgccaagaactgtactacctcctcaaagatgagaatgatgttcatttcacatttgggagcataggtggaaatgggattaatcaggcaagccagggcatggccttgtcgaaattctgcctcaacattgcaggggataccccatcctcaaatcgcctttttgatgccatagtaagccactgtgttcctgtgatca

SEQ ID NO: 30970 - DNA, 351 bp, Glycine max
  Clone ID: LIB3138-052-Q1-N1-F1
ctcgagccgtgcaaatagctgatgtgcctaccatagcacagattggagagttccattcgatgcagaggatgatgaatgctcctgattcaaatgataatattgatttactgttgagcattgatttgttgggtttacaaggagcaggtaaagcttttccaaacaaaattgtttttgatgataagcttgtgttggctaacacacaagaattctttgatggaaattttccagtggattcttggttaccaatttttgtgaattgtctttatcctgtaagtcaattaccttcagaagctgtcgttgtaaatgttacatgtggtagtggacgtggtggtttacccaccactgcttgga

SEQ ID NO: 30971 - DNA, 352 bp, Glycine max
  Clone ID: LIB3138-052-Q1-N1-F10
gcaagaagcttatcttgtcaatctcgtaaatgtgttacgagaattgtatttgcacagtccagaggaagctcgccaattgagaaggaaagctctctctcgtattgaatggctgcaaaaagctgatgtgcctaccatagcacagattgaagagttccattcgatgcagaggatgatgaatgctcctgattcaaatgataatattgatttactgttgagcattgatttgttgggtttacaaggagcaagtaaagcttttccaaacaaaattgtttttgatgataagcttgtgttggctaacacacaaaaattctttgatggaaattttccagtggattcttggttaccaattttt

SEQ ID NO: 30972 - DNA, 244 bp, Glycine max
  Clone ID: LIB3138-052-Q1-N1-F11
gcaatggttaaagttaatgtagcatgtgctgctgttggcttgacatcaagttacactccaactccatttttggaatctggtttgcaaaaagacagagggttaattgtggagtattttggaaggatgtcttacgttgctcataacgttaatcagccccaagagaaagatttgttggagggaaatttttcctttgatattaaatctcgctctagattggaaaaagtttcctctacaaaagcacaat

SEQ ID NO: 30973 - DNA, 395 bp, Glycine max
  Clone ID: LIB3138-052-Q1-N1-F12
tgcaattgaagttgaagtcttgcccttctctcttcaactccaaacacaagacatcatcatccatggctgcctccgtctccactgtcggagctgtcaacagagctcttttgaacctgaatgggtctggacctggggtttcagctcccagttcatccttctttgggagcagcttgaagaaggttattggctcaagggtccccaacacaaagatttcctctggaagcttcaagattgttgctgtagaagagaagaaagagattgaagagacccagcagaccgacaaggacagatggaagggtcttgcctatgatatctcagacgaccaacaggacatcacaagaggaaagggtttggttgactcccttttccaagctccacaggatgctggaactcac

SEQ ID NO: 30974 - DNA, 251 bp, Glycine max
  Clone ID: LIB3138-052-Q1-N1-F3
ttggcctaattgaaattcgcagtgaaactcgggatctcgtccacgcttccatggaattgaattaacaattcaattccatttctattaataaaagactgatagcacacactcaaatggaatgcgtatggtgggggcaacaatatcataaaaaatactgagttaaaaaaaccaaaatactgtatcgcaattgcattgcaattcgcaacgaacaataggtcgagatcattgtcttatcatggttctatattaat

SEQ ID NO: 30975 - DNA, 318 bp, Glycine max
  Clone ID: LIB3138-052-Q1-N1-F4
attggatgagaaagcgaaagctaaaacggtctttcctgcttagggttttccagggtcatcaatcaaagagagctccacttatccctaagcccttgctgcgaaaaaggaggtcatttaagagacaacctagtcagtttagtagaggcaatcaaccaagtgtgttgaaagcatttgcagctgaacaagatgccatggaagaaaatgcaatgctcaagattgaagaagccaatgccaatgcaaacatgtccatggaattagccataaataaacgcaaaaaggctcaatgtcttgctcagaatgcaaatttggccacctaca

SEQ ID NO: 30976 - DNA, 260 bp, Glycine max
  Clone ID: LIB3138-052-Q1-N1-F5
gaaactgactttcccccagggcacttcccgaagtgttaagagaatggctctttctatagggggaggagctggtgcaaagaatgctattctcatgaatatgccaaatgctgttctttcaatgtggagatattttgttggtgatctcgtcttttgaagattctaagatgacttctccctacattaaatgtacattctttttcttcatatcattctggaaatttggctgatgacaccatctattttgaggcttttccccacaa

SEQ ID NO: 30977 - DNA, 338 bp, Glycine max
  Clone ID: LIB3138-052-Q1-N1-F6
atggactgccaccccatttcatgatgttcaggttacaattgattggggtatttcctctcatgaatgtgttcccaggacctattgtgttttaaatccacaaaatccttttgtgttaaatatgtggatgggaatattgacttttccccagtgcactttccgaagtgttaagagaatgcctctttctatatttgtgaggagctgttgcaaataatgcttttctcattaatattccatatgcttttctttcaattgttagatattttgttttaaattctcttcttagaagattctgatatgaatttttccctttaatttaatatttacatgtcttctttttt

SEQ ID NO: 30978 - DNA, 353 bp, Glycine max
  Clone ID: LIB3138-052-Q1-N1-F7
gctgatgggtgtccatatttgtatgcaatggtgcatgatagttcagtgtctacaataccaggtgattttgtcattggtgtcaagttgacaaccataaacaatatgtgtgcatatgggctcaatcctggtatttcaggttctcgtcttttgggcaccattcctcagtccatttcacagcaaactgtttggaatcaaatggcaacagtgagaacaccattgaattttgattctagcaagcagagcttttgtcagttttctattgaccttctcggtggaggaatcttagtggacaaaactggagattggatcacacttatacaaaattctccaattagtaacttattgaaagttgc

SEQ ID NO: 30979 - DNA, 289 bp, Glycine max
  Clone ID: LIB3138-052-Q1-N1-F8
gaatcgaccgacctgtctttcggatcaagatggacacagaaaatcctcgctcaagagtcactcaggccgaagatttctttgtgaacgcgttggaaagctggaggaaggctcaaaagctcggaagtatgacactggttggacatagcttgggaggttatctcacgacagcttatgccctccgctatccagaacatgtcacgaagctcattcttgtgtcgacggcgggctttcaccgacacataccgaatgtctatgacctttcaaaacaacacgagagcgcacagcaaga

SEQ ID NO: 30980 - DNA, 383 bp, Glycine max
  unsure at all n locations
  Clone ID: LIB3138-052-Q1-N1-F9
tgaaatcttagattttcttgcaagattatgtcaagaccctttcttgcctcctctcattaggataactggctttgccaaatttgcaattttttttttgggttcagttacatggggtgctctttttaccttctctaatttgttttccttgtaaaaagccttgaaatttgatggagtatattattgattgctattactctatgcaattcatcaaaatagttttggattgtgagatgatttctatgcatatgatccacctcataggagaatagttaaatttttgtgccattttttcacttaatttgcctcatcatttaatgcangtattaaagaaatactctttcgtgaagctcttgatataacagagcatcatcggcagatgggtc

SEQ ID NO: 30981 - DNA, 267 bp, Glycine max
  Clone ID: LIB3138-052-Q1-N1-G1
ggatgatggagttaagcttactctacttgcttcgtggatgactctctttgtgatatttgctggaaggaaatctacccacgcccatcaaggaggacactggtaacaagtccgttttcatagacaatcctatccctgatgacaagaggtaagccttgctagaaaaactagcacagcacaatattcataatcaagatgcattgctttaactagatgccggaaaatttcggaaggaccatctcacgctctgtgaaaaaatttccactaaca

SEQ ID NO: 30982 - DNA, 326 bp, Glycine max
  Clone ID: LIB3138-052-Q1-N1-G10
gatgtgttgactccaaaggttttcattggtttgattgtgggtgcaatgcttccttactggttttctgccatgaccatgaagagtgtgggaagtgctgctctgaagatggttgaggaagtacgcaggcaattcaacaccattccaggattgatggagggaactgctaagcctgactacgccacttgtgttaagatctccactgatgcttccattaaagaaatgattccacctggtgctcttgtcatgcttacaccccttgttgttggaatcctttttggtgtcgaaacactttctggtgtcctagctggatctttggtgtctggtgt

SEQ ID NO: 30983 - DNA, 109 bp, Glycine max
  Clone ID: LIB3138-052-Q1-N1-G11
cacaataaactccttcctcatttctcatttctcattcaacaccatggcaagaaaaaccaagtccattttcttggccttcttactactatgctctttctcactgggggta

SEQ ID NO: 30984 - DNA, 371 bp, Glycine max
  Clone ID: LIB3138-052-Q1-N1-G12
atttcaggttctcgtcttttgggcaccattcctcagtccatttcacagcaaactgtttggaatcaaatggcaacagtgagaacaccattgaattttgattctagcaagcagagcttttgtcagttttctattgaccttctcggtggaggaatcttagtggacaaaactggagattggatcacacttatacaaaattctccaattagtaacttattgagagttgctgcttggaagaaaggctgtttaatggtcaagattgtgatgtctgggaatgcagcagtcaaaaagagtgattgggcctcattggtacaagtgtttttaacaaacagcaacagtacagagcattttgatgcatgtaagtggacaaaatc

SEQ ID NO: 30985 - DNA, 300 bp, Glycine max
  Clone ID: LIB3138-052-Q1-N1-G2
gtgtgtttctttctctctcatgttgtagtatctcactagtggttttgattcgtttctgaaccacacaaacatcaccaccgtacaatgccgacggggttaccggcggcgaattccttagtggcgccggacgaagaggggtgggtgtgggggcagatcaaggctgatgcgcgcctcgacgccgagttggagcctgctttggcgagctacctttacttgacaattcttttgcactcattgttcgagcgttctctgtcttttcacccttgaaattaagctcttgttccttcaccgctttttttt

SEQ ID NO: 30986 - DNA, 171 bp, Glycine max
  Clone ID: LIB3138-052-Q1-N1-G3
tgaaaatttccacacctcttttaattgtcgtaatgatgtgtgaagtgtgtgttattttaaaaaaaaaaaaaaaaaaaaaaaaaaaaaaaaaaaaaaaaaaaaaaaaaaaaaaaaaaaaaaaataaaaaaaaaaaaaaaaaaaaaaaaaaataaaaaaaataaaataaataa

SEQ ID NO: 30987 - DNA, 249 bp, Glycine max
  Clone ID: LIB3138-052-Q1-N1-G4
cgatgggtcaaaacattggctctcaaactagccaacatggacatgtggacagtaacatgagcttacagggttttcccattcctcatctagatgtaaacggcttgatgccatcagagcatttaaatggtactgaaggctatgtaaatgacaaagagcatccttctgaattggaacgtaatcctcaactagtgttaagatcaaagattaaacttttaacaaacaaatgattccacctggggctctttttta

SEQ ID NO: 30988 - DNA, 345 bp, Glycine max
  Clone ID: LIB3138-052-Q1-N1-G7
atcccttctggatttccgctcacagttatttgcaatagcatttttaatgagatgctcattagatatagctatgaaaaattactgcgccaggctaaagctccaagtatgtttttacaatccttcaaaaattttgtttctttgtgtgtgtatggtgatgataacttaattagtgttcatgaatatgtcaagccttactttagtggttctaaattgaaaagctttctagctagtcataacatcaccattactgatggtattgacaaaactagtgcaactttgcaatttagatagttagcagattgtgattttctcaagagaaactttaagcagatgtcttaatggttt

SEQ ID NO: 30989 - DNA, 338 bp, Glycine max
  Clone ID: LIB3138-052-Q1-N1-H1
aactcgttcttcttcttttgttgttctgtgtttgtgtttgttttttctctcacctgaaaatgtcttgctgcggtggtaactgtggttgcggaagctcctgcaagtgcggcaacggctgcggaggctgcaagatgtacccagacttgagctacactgagtcaaccaccaccgagaccttggtcatgggagtggcacctgttaaggctcaatttgagggtgctgaaatgggtgtgcccgctgagaacgatggctgcaaatgtggaccaaactgctcctgcaacccctgcacttgcaagtgaagtgttgggagagcaagcttcaagcagagatagccctta

SEQ ID NO: 30990 - DNA, 375 bp, Glycine max
  Clone ID: LIB3138-052-Q1-N1-H10
atggattccatctacgcgagctcgacgtgcacggttcctcaccttctccgtcgcgagactctgttcttgccgcgaacatcgattccttcttcctcgcttcggcgagcgaagaaggcgcggcgcgcgagggtttcgagttctgcctcgacgacgacgacggcgagcagtatcgcttcaaacggcgccgtttcgagggcgttgcagggagtgagcaataagagtaacactgcgctggagcagctcgacatcgagcgtggcgtatgcatccctttccgcaagtactcgccggagatcgtgaggaataaggtattaaaatcaagagggtccattttgtcacttatgttgcggggagtggagatagtttggaatctgggc

SEQ ID NO: 30991 - DNA, 276 bp, Glycine max
  Clone ID: LIB3138-052-Q1-N1-H11
ggatggcatgtgttgttgagtgaagtgtgaaaggatgaccaattttgttggactaaggttgcacacgaggttgccattgccagtgttgggtgatgtttctgccactgccacttccactactctgtcaagagcagtattaaagaagtggaattggagagttaagggtcctcgtcgtatgctattgggccttggggtttccttcttgtctatggctggtagcaaatccttcattgccttggctaggataacggctggtccctctgtggatgagatact

SEQ ID NO: 30992 - DNA, 329 bp, Glycine max
  Clone ID: LIB3138-052-Q1-N1-H12
gcaacagtacagagcattttgatgcatgtaagtggacaaaatcagaaccacattcctgggaattgatcttcccaatagaggtatgtggtcctaataatggttttgaaatgtggagttctgagtgggcaaatcaaacttcatggcatttgagtttccttattgacaatcccaaacagtctacagtttttgatattctcttgggaatctctcaaaattttgaaattgctggtaatactcttatgccagctttttctgttccacaagctactgccagatcttctgaaaatgcggaatcctctgcatgatctggaatttgtgttttctttcgc

SEQ ID NO: 30993 - DNA, 276 bp, Glycine max
  Clone ID: LIB3138-052-Q1-N1-H2
attatgatgaggcgtctgaaggcaatgcttggaggcttcttgctgaggtgtccctttctcaagagaggtttcaagaagtcaatgatcttgtttttgaagccattggctgtggtgaattggaggatgtcaatgttcaaagtgtcaaaaaagaagttgatgcagtcagcacaagcgaacaccctactgtggtggtggtggctggttcacaagaatgtgttgttctacactaacaaggctcttgtattttgaacaaattcagacaatctgcagtgtttt

SEQ ID NO: 30994 - DNA, 313 bp, Glycine max
  Clone ID: LIB3138-052-Q1-N1-H3
tgagacgtggctggttcaactgaggtgatggctttgaatttgccttctcccgcccaagtgaagcccttatttttctcttcaaataactccacaaaacttccaggtagcttttctttgaagagaaaagatagtgacacaacagtagagagacgagtttattgctctgccgctgctcaatcaccaccaccagcatggccaggaacagctattcccgagccttctgatttcaagacatgggatgggcaaaaacctatttctgtcttaggatctacgggttcaattgggacctcaaacacctgagtatagtgggctg

SEQ ID NO: 30995 - DNA, 352 bp, Glycine max
  Clone ID: LIB3138-052-Q1-N1-H4
cggaatttctgaagcgtactgtatttcattgcgatatcattcgtgtgactggatggactgccaccccaatgcaagatgttcaggttacaattgattggtttatttcctctcaggaatgtgttcccaggacctattgtgttttaaatccacaaaatcctcttgtgttaaataggtggatgggaaaatcgactttcccccagggcacttgccgaaatggtaagagaattcctctttctataaggggaggaactcgggcaaagaatgctattctcatgaatatgcccaatgctgatctttcaatggggagatattttgatggaaatctcgtctttgaagtttctaaaatgacttc

SEQ ID NO: 30996 - DNA, 401 bp, Glycine max
  Clone ID: LIB3138-052-Q1-N1-H5
acaaaatgtcaacataactctaagtgagcctcttaaaaacaaacataactctaagtgagagtggctttcaaatgagatgttttattaatctgctaatggttacacaaatatggctaaataaagaaaaatataaaatatttttttgtattttcatagcgttaaatatacatttttgatttataaaatattaaaaacattattaagagaattttgtcgcagcatatagcttaacatttaagtacactaattgctcgaagtaatcctatttttgatggctggaccccgaggatgtcggaccaacgagagtaagtgggtatttcttattgggatggataatgctatctattgtgttatctattgcactaaacttgttaagagaaaaccaattctacaatgtttta

SEQ ID NO: 30997 - DNA, 394 bp, Glycine max
  Clone ID: LIB3138-052-Q1-N1-H6
gaatgcctctttctatagggggaggagctggtgcaaagaatgctattctcatgaatatgccaaatgctgttctttcaatgtggagatattttgttggagatctcgtctttgaagtttctaagatgacttctccctacattaaatgtacagtctctttcttcatagcatttggaaatttggctgatgataccatcaatattgaggcttttccccacaagctggtgcagtttggagagattcaggaaaaaagtgtattgaaattttcacaagaggaatttcttacagcttggtcaactcaagtgcggtctgcaacaactttgttggctgattggtgtccatatttgtatgcaatggtgcatgataattcaatgtctacaatacacagtgattttgt

SEQ ID NO: 30998 - DNA, 300 bp, Glycine max
  Clone ID: LIB3138-052-Q1-N1-H7
attcggctcgagctctcctccaattcttcacgctccaccgcacaaaccctaataaccccctcctcgctccccttcccccgatcccctcccccgccgtcggctccgcctacgccgtcctcggccccaccatctacgtcctcggcggctccatccacgacgtcccctcccccaacgtctggctcctcgactgccgcttcaaccgctggctccgcggtccctccatgcgcgtcggccgcgaattcgccgccgcgggagtcctccacggcaagatctacgtcctcggcgggtgcgtcgctgaca

SEQ ID NO: 30999 - DNA, 316 bp, Glycine max
  Clone ID: LIB3138-052-Q1-N1-H8
tttcggaaccggaggtaacggtaactgagcgtagtgaggaggatgagtgtttgatattagggagtgatgggctatgggacacagtgcaaaacgacatcgcatgcaaagtggtgcggatgtgtctgaacgcgcagaagccgccatcgccgccctcgtctccgaggagggagatggcggtggactgctccgacaaggcttgctccaacgcctccattctgctgaccaaattggcgttggttaggcagagttccgacaatgtgagcgtggtggtggttgatttgaggagaacctaaaatgggaactgtgcgtggacacc

SEQ ID NO: 31000 - DNA, 376 bp, Glycine max
  Clone ID: LIB3138-053-Q1-N1-A1
gagaaatgaacaagaaagagattgaaaagtggattggaggagatgagagtgcctcggagatgctgagtagagtgagcagcatgcgacctttcttgtttcctccgccgctccacagggttcctctccgcgtcggaaacgtcgtcgagcttgtggggccctctccttccgccaaaacgcacattctcatccacgccgccatcacttccgttctccccaaatgctacggaggcctcgaccacttggtcctctttctcgacctcgattgtcgcttcgacattgcgcgcttcttccaattgctcattcatcgcattacccaacacggaacggattcttatgataaaacgctggatgctctctgtatggcccggtttttgta

SEQ ID NO: 31001 - DNA, 374 bp, Glycine max
  Clone ID: LIB3138-053-Q1-N1-A2
ctcctgagcagctctctcattgaagcagcccagagaatcgcattctgggtcactcctcaaaaacatacaagaggtaccaccggatttcatcttcattgactgcttgggggaaagaagcgcagtttctgatttgatattccgggttcgacctcttttctatctgcaaacaggtttcatctagtacatcatggtccgcgtatccgtcctcggcgactgcctcaacaacatctgcaatgcagagcgaaccggaaagcgccaggtcctcatcaggcccagcagcaaggtcatcgtcaggttcttgaccgtcatgcacaagcacggctacatcgacgagttcgaagagatcgacgaccaccgctcttgcaagattgtca

SEQ ID NO: 31002 - DNA, 346 bp, Glycine max
  Clone ID: LIB3138-053-Q1-N1-A3
atcttttcaaagtttttgctggtggaaagccggtccccttcactgctgcatctcttgcaccagaagttcagagtgcgattccttctggattagttaggaagagcccttatctgacacactctatctttaacatgtaccaaactgagcatgagttgcttaggtacttgtataagctacaatcaaaagatctctcactatgccacagtatgattccacttggatcttgtacaatgaagctgaatgcaacaactgaaatgatgcctgtgacatggcccagctttactgatattcacccttttgcaccagttgaccaggctcaaggttatcaggaaatgttcaataattt

SEQ ID NO: 31003 - DNA, 379 bp, Glycine max
  Clone ID: LIB3138-053-Q1-N1-A4
gttattcgaatgagtaaaacaagctttgctagccaacaagagaatggggctgtcgaagctgaagtaataccctcagatcttgattcatgcctgcagcagcattctgtttcatataatgcaagatctgcattcagtaacataactggtttggggtctcttggtcaatctggtctaagtgttgataatcttgcattaatggagcaacaaatcttatcaggcattgggaatcgagataatgttaacccttgtgtaaatgcctcaagttccttgaacatgtctcaactaaaaacagatggagaccatctacttggccacaatatgagttgtgacagtacttcactagtgggaggagtcccactacatggtgggatgagtactc

SEQ ID NO: 31004 - DNA, 363 bp, Glycine max
  Clone ID: LIB3138-053-Q1-N1-A5
gagtgagggagcaatggagaagattgcagcactcactgctaatactatccacacccctctcttacccaacaacaccactcttccaaagacttcatcttttcaaccctttttttctaaccagctacttggcctccccttatcttcttcttcatcttctgcttcttctttaaccgccgccaaacggttctcttgcaggcctatcaagtgttccgtttccgaagccacagagcccaaaacagagaagaagaggcaattgctgagaagaggggatgtgaggaacataactattgttgctcaagttgaccatggtaaaactactcttgttgatgccatgctcaaacaaactaaggtattatgtgataa

SEQ ID NO: 31005 - DNA, 386 bp, Glycine max
  Clone ID: LIB3138-053-Q1-N1-A6
atccaactgggtcattattactggttctgagtggtcttgcttcagatcaggtttttttgctaagaacaactcagattttcagtacagtgttactgccaagcagaagttgaattaacgtggataatgattaccgcgcttgaagagtagaagcaataattcagcagtgtttgtgtcaaaatattttgcagctcgagtatatcaaagaactggctagttctcaatgcaaacatctcagaatcataaaatttcttatggctctggcgggttctatgctgagcctgtgcaaaatttggagtcatattgcatgccatcaagtgagaacatagacaattactcttcctctgataacagcagccaaacaacctacccttcagtccaaactttaa

SEQ ID NO: 31006 - DNA, 379 bp, Glycine max
  Clone ID: LIB3138-053-Q1-N1-A7
gatctgatcacttcgagtaaaaattccaaatgagtcgggcacaggatgcaaaccaatcattcttcccttttggaaatccttttaggatgatatcacctaagggccctaaaatttcttcacagctgttgtcaattctacatgcttttgacgcaactttggaagagaggctgataaagcttattcccaagagcaaggatgagatcctcagcttgtcttggatgactctggctatgcaatcactttgtgagagccataatgacattaaaaccatcataacagatcttgagcttcctgtacatgattgggatgagaaatggatagacgtgtacttggacattattgtgaagttgctagatatatgcatcgcatttagctctga

SEQ ID NO: 31007 - DNA, 374 bp, Glycine max
  Clone ID: LIB3138-053-Q1-N1-A8
gagcaagatggcagaaatgataaacagtctttgtggtggtgatgaaaaattgatgcgtgaaaggacgcacctgctgttggcttgttgttcaaggatggcaatttgtaagaaagatgtttggagagttgaatgtggaatcccttctggatttccgctcacagttatttgcaatagcatttttaatgagatgctcattagatatagctatgaaaaattactgcgccaggctaaagctccaagtatgtttttacaatccttcaaaaattttgtttctttgtgtgtgtatggtgatgataacttaattagtgttcatgaatatgtcaagccttactttagtggttctaaattgaaaagctttctaactagtcataaca

SEQ ID NO: 31008 - DNA, 265 bp, Glycine max
  Clone ID: LIB3138-053-Q1-N1-B1
gtttttaacaaacagcttctgtacagagcattttgatgcatgtaaggggacaaaatcagaaccacattcctgggaattgatcttgccaatagaggtatgtggtcctaataatggtggtgaaatgtggagttctgagtgggcaaatcaaacttcatggcttttgagtttccttattgacaatttttatcaaacgacagtttttgatattttcttgggaatctttcaagaattccttttagctttttatactcttatgccagctttt

SEQ ID NO: 31009 - DNA, 382 bp, Glycine max
  Clone ID: LIB3138-053-Q1-N1-B2
ggagaaagaagaattgataaaagccttgacatctgaatcatctgagtgttccaggatgaaggaaataaacaaggagttgtcctgaaagcttgaggtccagacacaaagattagagcttttgactgctcaaagcatggtcaatgaaaatgtttctgcaaagcaaccagattctcgtgctatgtatgagaacaccccatatgcagatgagggtgatgaggtcgtggaaagggtgttaggatggattatgaagctctttcctggtggaacttcaagacggagaaccagcaaacttctttgattggatttacattagacttttgtatttgttgtcaccaaagtcttactcaactgttaggatggatcatgaaactgttttctaata

SEQ ID NO: 31010 - DNA, 387 bp, Glycine max
  Clone ID: LIB3138-053-Q1-N1-B3
tgaggttcaggctcagatggaaacaaatttgtttaaattgtctcttgatgatgttgaaactcctaaaggttccatgttggatctgaaaatttctcaatctaaaattgcacttcccaagaacacagttggaggaaccattctgcgtagtgatctattggcaaattttttgacagagggcaattttagagcaagtgttgatttgcagcgcactcatcgtattagaggaatgattaaaatggtggccacagttggtattcctgagaatacaggtatatcattggcctgtgctatgaatagttcttttagggggcgcgccagttctgatatttacaccatctgctctcaagactgtgaattgtggaatcctgcttgcacaaaagcaatgac

SEQ ID NO: 31011 - DNA, 251 bp, Glycine max
  Clone ID: LIB3138-053-Q1-N1-B4
ctcaagccgaatctgttttagctcgagcctgtccagcacgtatatttggggacacgcatgaccgggtctactctcgcatctcctgctacagcataggcgatgcacaacctggccgaacacctcaccggtgcgacggcttaataggagacctgaagaagcccaatcggtgtctggtgcaacgagctgatatacgctcgcgacaacgacgactatgactacaatatcgtcagaggcatgcgtcgcggctctca

SEQ ID NO: 31012 - DNA, 386 bp, Glycine max
  Clone ID: LIB3138-053-Q1-N1-B5
tcacattttacaagaataccccctcttttgctgcatcagaggagttgtaaattaagagcatggctgcacaagctcttgtatcatcatcttctcttaccttctcagcggaggctgcaagacaaagtcttggaccaagatcactccaatctccatttggcttctccagaaaagcctcctttcttgttaaggcagctgctaccccccctgtcaagcaaggatcagacagacctttgtggtttgcatcaaagcaaagtctttcttacttggatggcacccttccgggtgactatggatttgaccctctgggactttcagaccctgaaggaacaggacggttcattgagccgaaatggctaccatatggtgagataatcaatggtcggtat

SEQ ID NO: 31013 - DNA, 384 bp, Glycine max
  Clone ID: LIB3138-053-Q1-N1-B6
ggggcttctgtctttcccatatgatggaacctactctactgattttattgaggagtgggtcaaaattggcttgcctgcaaaggcaaaggtgaagacacaacatggggatgcaccttttgctgagttgtgctcacactgtgagaaggaagctgtgaatgtttcccttggaaaccttctaacatacccatttgttagagatggcttggtgaacaagacattgtcactaaaaggaggatactatgactttgttaagggatcttttgagctctggggccttcagtttggccttgcatcctctttctccgtatgaacatcaaccattatcaatgacctcatcttggttccctaagttaaagatgtggccaccattctgcattggaagct

SEQ ID NO: 31014 - DNA, 381 bp, Glycine max
  Clone ID: LIB3138-053-Q1-N1-B7
ggaagaacaaggttttggagatgatttttacgaggagtggtgatgtttcggttgtcggtatttgcgggattggtgggtccgggaaaaccactcttgctagagaggtctgcagagatgaccaagtgagatgttatttcaaggagaggatcttgtttttgactgtgtcgcagtccccgaatgtggagcagctgagagagagtatctgggtacacatcatgggcaaccaaggtttgaatggcaattatgcggttccacaatggatgccacagtttgagtgtaaagtggaaactcaagtacttgttgttttggatgatgtgtggtcactctcagtgctggacaagcttgtgttgaaaattcctggctgcaaattccttgtggtat

SEQ ID NO: 31015 - DNA, 384 bp, Glycine max
  Clone ID: LIB3138-053-Q1-N1-B8
ccaggacctattgtgttttaaatccacaaaatccttttgtgttaaataggtggatgggaaaattgactttcccccagggcacttcccgaagtgttaagagaatgcctctttctatagggggaggagctggtgcaaagaatgctattctcatgaatatgccaaatgctgttctttcaatgtggagatattttgttggagatctcgtctttgaagtttctaagatgacttctccctacattaaatgtacagtctctttcttcatagcatttggaaatttggctgatgataccatcaattttgaggcttttccccacaagctggtgcagtttggagagattcaagaaaaagttgtattgaaattttcacaagaggaatttcttacag

SEQ ID NO: 31016 - DNA, 370 bp, Glycine max
  Clone ID: LIB3138-053-Q1-N1-C1
gtcagttatatattgaccttctagggggaggaatcttagtggacaaaactggagattggatcacacttatacaaaatttttcaattagtaacttattgatagttgctgcttggaaaaaaggctgtttaatggtcaagattgtgatgtctgggaatgcactagtctaaaggagtgattgggcctcattggtacaagtgtttataacaaacaacacctgtgcagagcattttgatgcatgttactggacaaaatcagaaccacattcctgggaattgatcttaccaatagagggatgtggtcctaataatggttttgaaatgtggagctctgagtgggcaaatcaaacttcatggcatttgagtttccttat

SEQ ID NO: 31017 - DNA, 389 bp, Glycine max
  Clone ID: LIB3138-053-Q1-N1-C2
gctagtcataacatcaccattactgatggtattgacaaaactagtgcaactttgcaatttagaaagttagcagattgtgattttctcaagagaaactttaagcagatgtctaatgttttgtgggtggctcctgaggacaaggcgagtttatggtcacaacttcattatgtttcgtgtaataatctggaaatgcaagaagcttatcttgtcaacctcgtaaatgtgttacgagaattgtatttgcacagtccagaggaagctcgccaattgagaaggaaagctctctctcgtattgaatggctgcaaaaagctgatgtgcctaccatagcacagattgaagagttccattcgatgcagaggatgatgaatgctcctgattcaaatgataa

SEQ ID NO: 31018 - DNA, 377 bp, Glycine max
  Clone ID: LIB3138-053-Q1-N1-C3
caaaatcagaaccacattcctgggaattgatcttcccaatagaggtatgtggtcctaataatggttgtgaaatgtggagttctgagtgggcaaatcaaacttcatggcatttgagtttccttattgacaatcccaaacagtctacagtttttgatattctctagggaatctctcaagattttgaaattgctggtaatactcttatgccagctttttctgttccacaggctactgccagatcttctgaaaatgcggaatcctctgcatgatctggaatttgtgtgttctttcgcttgtctcgttggttaattcaataaatgaaattacgcatgaccctcttgttgagtatgctctgcctatttgaaaatttccacacc

SEQ ID NO: 31019 - DNA, 384 bp, Glycine max
  Clone ID: LIB3138-053-Q1-N1-C4
accttttggagcacccttatccgataatacctgctatacaccatatgttccacaacgatgacgactgccgcgcagctccccacaccagcacaccagctgtccgctcccacatcctctgccaccacatcatcatccaagtcagaagacgtcaacttccaaggcctccccatcccccgtggcgctgtcaacgcctctctatccttctacaagagcccggaagatggcgcacctccacacaactacgtcgagccactgccaggtgtaccgcaacgaaactggggcgacaattggcagaatgtaactcataacgacctgcgtggctcagaacaacagtttaccctcgatcacaatgcgttcgatacatactcgaacattcccagcaac

SEQ ID NO: 31020 - DNA, 358 bp, Glycine max
  Clone ID: LIB3138-053-Q1-N1-C5
agaagaacaagtttttgagaactaagaaggagaagcaaatggcttcctcaatgatctcttccccagctgttaccactgtcaaccgtgccggtgccggcatggttgctccattcactggcctcaagtccatggctggcttccccaccagaaagaccaacaatgacattacctccattgctagcaacggtggaagagtgcaatgcatgcaggtgtggccaccagttggcaagaagaagtttgagactctttcctacctgccagaccttgatgatgcacaattggcaaaggaagtagaataccttcttaagaagggatggattccttgcttggaattcgagttggagcacggtttcgtgta

SEQ ID NO: 31021 - DNA, 372 bp, Glycine max
  Clone ID: LIB3138-053-Q1-N1-C6
gaaatttttcctttgatattaaatctcgctctagattggaaaaagtttcctctacaaaagcacaatttgttagtggaaaaaccttcaaatatgatataattggtgctggttcacattcttcagaagattttcctgaaaaggaagatcaagaaaaacccaaaaagattgatgccagattgagacaaagaatagatcctcaatacaatgaggttcaggctcagatggaaacaaatttgtttaaattgtctcttgatgatgttgaaactcctaaaggttccatgttggatctgaaaatttctcaatctaaaattgcacttcccaagaacacagttggaggaaccattctgcgtagtgatctattggcaaattttt

SEQ ID NO: 31022 - DNA, 381 bp, Glycine max
  Clone ID: LIB3138-053-Q1-N1-C7
ggcaaattttttgacagagggcaattttagagcaagtgttgatttgcagcgcactcatcgtattagaggaatgattaaaatggtggccacagttggtattcctgagaatacaggtatatcattggcctgtgctatgaatagttcttttagggggcgcgccagttctgatatttacaccatctgctctcaagactgtgaattgtggaatcctgcttgcacaaaagcaatgactatgtcatttaatccaaacccgtgttctgatgcatggagtttggaatttctgaagcgtactggatttcattgcgatatcatttgtgtcactggatggactgccaccccaatgcaagatgttcaagttacaattgattggtttatttcctc

SEQ ID NO: 31023 - DNA, 290 bp, Glycine max
  Clone ID: LIB3138-053-Q1-N1-C8
gaaaagggtattgatgacattatggtgtcattggctgccaaagatggcattgattggactgagtacaagaggcaattgaagaaatcagagcaatggaatgtcgaagtctattaatttctgttcacttgcacaaatatcatctcctactttgtgctgcaacaagtctatcaaccctcctgcgttgtgtagatatatgacgtccctgtaatttttctttgacgatttttatactgttcatgaacaacttcaatgtcagttttacaagtactatttttgagggatgatgcaat

SEQ ID NO: 31024 - DNA, 383 bp, Glycine max
  Clone ID: LIB3138-053-Q1-N1-D1
ctcgagccgctggacgggaaccccatgaaggcacttacgatctgcatgatcggcgctggcggcttcataggctcgcatctctgcgagaagctcatgtccgaaacccctcacaccgtcctcgccctcgacgtctacaacgacaagatcaaacacctcctcgaaccctccgattccccctgggccggccgcatcaccttccaccgcctcaacatcaaacacgactctcgcctcgaaggcctcatcaagatggcagatctcactattaatctggctgccatttgcactcccgcggattacaacacccgccctctcgacaccatttacagcaatttcatcgacgcgctccccgtggtgaaatactgttccgagaacaacaagcgcct

SEQ ID NO: 31025 - DNA, 275 bp, Glycine max
  Clone ID: LIB3138-053-Q1-N1-D2
tccagataacagtgaaggaaaagtccataggcagcaggtccaccacttttagtgaatttcgttagtttggaatttattacacttggatcttaacatctacagaagcttttctgacgtttctgttggcaacttggcatcaggcctaggcaactatatttttggttctgcccttctttttttcctttgttcatattgatgtaaaatgagttaatataagaaaaagcattcatattaaatttctaacaaactttctcttcaaattagaggagaccctg

SEQ ID NO: 31026 - DNA, 382 bp, Glycine max
  Clone ID: LIB3138-053-Q1-N1-D3
atttctcaatctaaaattgcacttcccaagaacacagttggaggaaccattctgcgtagtgatctattggcaaattttttgacagagggcaattttagagcaagtgttgatttgcagcgcactcatcgtattagaggaatgattaaaatggtggccacagttggtattcctgagaatacaggtatatcattggcctgtgctatgaatagttcttttagggggcgcgccagttctgatatttacaccatctgctctcaagactgtgaattgtggaatcctgcttgcacaaaagcaatgactatgtcatttaatccaaacccgtgttctgatgcatggagtttggaatttctgaagcgtactggatttcattgcgatatcattt

SEQ ID NO: 31027 - DNA, 379 bp, Glycine max
  Clone ID: LIB3138-053-Q1-N1-D4
tggtggcttgcgaaacatgaagaggggcactgtgttatgcatgttcaatggcatgtcattgtgcttcttacaatgccttttcattttcaccaaccagagagttcttcgccaccaaccacatcatgtcaaaaccatcatccactactactagatgcagaccctttctcttgtccatcaccaatgccacaccatcctacaacacccttgtttctgaggctgttaggctcttggttccttcagcaagatttgaaccttcaaaactgaaggttgttctattggaagatcagataaacaaacatgcaagttttactcctagaacctacattctatcccattgtgactttacagctaatctgactttagctgtgtccaatgtgat

SEQ ID NO: 31028 - DNA, 383 bp, Glycine max
  Clone ID: LIB3138-053-Q1-N1-D5
aaaaaaaaaaataaaaaaaaaaaaaaaaaaaaaaaaaaaaaaaaaaaaaaaaaaaaaaaaaaaaaaaaaaaaaaaaaaaaaaaaaaaaaaaaaaaaaaaaaaaaaaaaaaaaaaaaaaaaaaaaaaaaaaaaaaaaaaaaaaaaaaaggggggggcccccctcttggggtcttttccccccggaatttaatttgggccgggtccttgggggggtccaattttttcttattggggggggtttaaaacctgggggaataaatggttaatgttttttctgggggaaaattttttttcgttaaaaatttcccaaataattcggtcggggactttaaatggtaaatcctgggggcccttttggggggccctcccccatttttttgggg

SEQ ID NO: 31029 - DNA, 379 bp, Glycine max
  Clone ID: LIB3138-053-Q1-N1-D6
attcagtaattgttgactctcttgccattattatgtatttggaagataagtatcctgaccctcctctgcttcctcgtgatattcaccaaagagccatcaatttccaagctgccactattgtttcctcatctatacagccttttcaaaattatactgtagtgaagtacatagaggaaaaagttggcactgatgaaaaacttccttggacccaaagtgtaattggaaaaggctttatggcactcgaaaaattgttgaaagaccatgctaggagatatgcaactggagatgaaattttactggcagatttgtttttagcacctcagttagatacagcaattaagagattcaacgttgacatgaaggaattccctactctatc

SEQ ID NO: 31030 - DNA, 382 bp, Glycine max
  Clone ID: LIB3138-053-Q1-N1-D7
ctgcaaaggaagcctcttgcaattcaaacttttctccaacatcttcatatgattgcaagcaaaatattaataatagttttcaacgagatgggaaatcgaaaaagttggggaacgaagttcttattgaggacttgcagaaggaccttaatgctagactccaaagagaagctgcattagaagcagctctatctgtgaaagttgaaatagaagatgacctaagaagtacacttgatgaaataaaacaccaaaaacaagatttggaatatgagcttacaaacatgcggatgctggtgtcaaagatgaaaaagtctgggattaatgttgaggacaagtcaactaatgatgtgcaaaccaaggttaaaaatgggcatccaacatctaa

SEQ ID NO: 31031 - DNA, 377 bp, Glycine max
  Clone ID: LIB3138-053-Q1-N1-E1
actgaactgaattgagtctcaacaacccagttgagtaactaagatggcgcaagtgaggaacaagcaagtgcttctaaaggactatgttaccggttttcccaaagaatccgacatgaatattgtcgaaagtaccataacattgaagcttccacaaggttccaatgatgtcttgctcaaaaatttgtacttgtcttgtgatccgtatatgaggaatctcatgaacaagcccgaaggccctcccaatagtcgtgcttacactcctggctctgtaagtcatgctttttttttttttttttttttttgcaaattatataatttgattgtttaaaaaattattttgcttttgttggtttgattttggaaatatataatttttg

SEQ ID NO: 31032 - DNA, 377 bp, Glycine max
  Clone ID: LIB3138-053-Q1-N1-E2
gaaattttccagtggattcttggttaccaatttttgtgaattgtctttatcctgtaagtcaattaccttcagaagctgtcgttgtaaatgttacatgtggtagtggacgtggtggtttacccaccactgcttggattagttctgcagttaacaatcgctcctcagatatcaacaaaaagattcgcacagcacttgggaaaggtaagaaaattgtttttcttactagagttgatccttttccagtagctttactggctgttctttttggcgttaacaatgaaattctgagttctaacgccactaatactatgctgacgcgactttttgagaactgtaagaatctcaaatatctggttgatgagtgtccttttgcattt

SEQ ID NO: 31033 - DNA, 343 bp, Glycine max
  Clone ID: LIB3138-053-Q1-N1-E3
cttcctcagtagtgtcttttacgcttctcttctctgcagcaactatgcctaaccctaagggcttctttgacatgaccattggggggcaatctggtggccggattgggatggaacttttccccgacgttaattcccggaccggccagaactttcgcgcgctttgcacccgccagaaaggcgttaggcggaacggcaagccccttcacttcaaggggttgttcttgcaccgggtgatcccgagttttatgtgtcaaggtggggacttcaccggcggaaaccgaacccgcggcgagtcgatttattgcgcccaggttgccgaccagaactctgtgaagaaacacac

SEQ ID NO: 31034 - DNA, 386 bp, Glycine max
  Clone ID: LIB3138-053-Q1-N1-E4
gaatttagtacggttgaaggattttgggtctgctactgccatcttgctcgtcctgcttctttacctagtccaacagatttgcaccttttcaaggaaggaatccgtcctctatgggaggactctgctaactgcaatggtggtaaatggattatacgattcaaaaaggttgtctctggccgtttttgggaggacctggttcttgccttggtgggtgaccaattggattatggggataacatatgtggtgcagtactaagcattcgtttcaacgaggatatattgagtgtctggaatcgcaatgcttcagaccatcacgctgtaatggctctgagagattcaatcaaacgtcacttaaagcttcctcacagctatgttatggagtacaa

SEQ ID NO: 31035 - DNA, 274 bp, Glycine max
  Clone ID: LIB3138-053-Q1-N1-E5
ccgctcgagcctctcgagcggctcgaggtgacaaaaaaaaattaaaaatatattaaaattaaaataataaaatataaaaaaaaataaatttaaataattaaaaataaaaaaaaaaaattgggctgccccctattttttaactttttcacctcgatataaattccatacctttacctgtaatcttaccaatttttcctttaatgagttttattaaaaatttgctttaaatatagtcatagttgtttcttttttaaaatatttattcctttaaaat

SEQ ID NO: 31036 - DNA, 371 bp, Glycine max
  Clone ID: LIB3138-053-Q1-N1-E6
cgatttttgccagacaaagctatcgatttgattgatgaagctggttcacgagtccggcttcaacatgcacagttacctgaagaagcaagagaacttgacaaggaggtgaggcagattattaaggagaaagaagaagctgttcgcaaccaagactttgaaaaggctggagagctacgtgatagagagatggatcttaaggcacagatctcaacacttgtagagaaaggcaaggagatgagcaaggcagagactgaggcaggggatgaaggtcctattgtgactgaagctgacatacagcatattgtctcatcctggactggtattcctgttgagaaagtctcaacagatgaatctgatcgcctcctgaagat

SEQ ID NO: 31037 - DNA, 377 bp, Glycine max
  Clone ID: LIB3138-053-Q1-N1-E7
catctgagggttttcctcatgtgctttcacgcaaaaatggtgaaaaaggcaaaagaagatttgtttctggggatggtgaagagatgacattgattccgggaaccagtgttgaagaggcttacaacaagctaatagttgaacttgagaaaagtgttcctacattggttggcattgaatgtcccaaggatgagaaacttcctcgtcgcaaaatttttgacaaacctaagacgcgctgcttcactattctccctatggagtttaatcttgtggtccgtcaaaagtttttaaattttgtgaggttcattatgaagaaaagggacaagcttagttgtcaagttggaatcaacccatactccatggaatggactggtttggcc

SEQ ID NO: 31038 - DNA, 329 bp, Glycine max
  Clone ID: LIB3138-053-Q1-N1-F1
cgagaattgtatttgctcagtccagaggaagctcgccaattgagaaggaaagctctctctcgtattgaatggctgcaaaaagctgatgtgcctaccatagcacagattgaagagttccattcgatgcagaggatgatgaatgctcctgattcaaatgataatattgatttactgttgagcattgatttgttgggtttacaaggagcaggtaaagcttttccaaacaaaattgtttttgatgataagcttgtgttggctaacacacaagaattctttgatggaaattttccagtggattcttggttaccaatttttgtgaattgtcttta

SEQ ID NO: 31039 - DNA, 386 bp, Glycine max
  Clone ID: LIB3138-053-Q1-N1-F2
gaagcatctaagtgagatacacagtagttaggtagcaagcataagtgtctaaccttagaaacatatctgctacatatcgtgtgcattttggaattgtgccactaaaattctattcatctatggctgcctcatcttatgctatgcaatcaatccttgcaaaccctatgatccgcatttccagcgggtctagggagaaccattttggtgttcctgcttatcacatgagaaggaatgttggcctgagagttaggtccatggctgaggaagagcaaccaagtcagcctgcgaccccagttacaccaccaccagcagaacccaaaccacagccagtctctactccttcaccaaaggtgagcaccaaattttctgatgtgttggcgttcaat

SEQ ID NO: 31040 - DNA, 387 bp, Glycine max
  Clone ID: LIB3138-053-Q1-N1-F4
ggcgaagagatggccaccgttccagggcagctcgtgtgggagatcgtcaagaaaaacaattccttcttggtcaagcagtttggaaggggcacccagagcgtcgaattcagcagagagagcaacaatctctacaacctcaattcgttcaagtactctggtttggcaaacaagaaaactgttactgttcagcctgagggcaaagatcaggctgtgttgttggctacaaccaagacaaagaagcaaaacaagcccgctgcattgctccacaaatctgtgatgaagaaggagttcaggaggatggcaaaagctgttgaaaaccaggtggccaaaaattactacaggcctgatctcaagaaagctgcccttgcaaggttgagtgctgttcac

SEQ ID NO: 31041 - DNA, 384 bp, Glycine max
  Clone ID: LIB3138-053-Q1-N1-F5
atcgatcccaatggaaacttcctcatcaatcatccttctgtcgtcaccgatctttccaacccaaccacacctgcttcagcttttggaatcatcatcgaagccttacgattacgaagagacgctggcatcaaacccttcacagtcatgtcttgcgataatctcagacacaacggtgaccaagccaagaaagcctgcatatcatttgctcgtgctctcgatccccaactcgctgattggatctctgagaatgtctgctttcccaatggcatggtcgatcgtatcactcccgccactactcccgatatccgaaccgatttgaattccaaatcaggaatcgaagatttggttcccgtcatttgcgaagactttatccaatgggtcttg

SEQ ID NO: 31042 - DNA, 383 bp, Glycine max
  Clone ID: LIB3138-053-Q1-N1-F6
ctaatatttacaacgctctgatagttaagggtcgagatactgttggtcaacaaattaatgtgacttgtgaagtacagcaattattaggaaataatcgaattagagctgtagctatgagtgcgacagaaggtctaatgagaggaatggaagtgattgacacaggagctgccctaagtgttccagtaggtggagcaactctaggacgaattttcaacgtgcttggagagcccattgataatttaggtcctgtagatactcgcacaacatctcccattcatagatctgcgcctgcctttatacaattagatacaaaattagccatttttgaaacaggaataaaagtagtagatcttttagctccttatcgtcgtggaggaaaaata

SEQ ID NO: 31043 - DNA, 382 bp, Glycine max
  Clone ID: LIB3138-053-Q1-N1-F7
ctcgagccgtgtgaattgtggaatcctgcttgcacaaaagcaatgactatgtcatttaatccaaacccgtgttctgatgcatggagtttggaatttctgaagcgtactggatttcattgcgatatcatttgtgtcactggatggactgccaccccaatgcaggatgttcaggttacaattgattggtttatttcctctcaggaatgtgttcccaggacctattgtgttttaaatccacaaaatccttttgtgttaaataggtggatgggaaaattgactttcccccagggcacttcccgaagtgttaagagaatgcctctttctatagggggaggagctggtgcaaagaatgctattctcatgaatatgccaaatgctggtc

SEQ ID NO: 31044 - DNA, 383 bp, Glycine max
  Clone ID: LIB3138-053-Q1-N1-F8
ctcgtcttttgggcaccattcctcagtccatttcacagcaaactgtttggaatcaaatggcaacagtgagaacaccattgaattttgattctagcaagcagagcttttgtcagttttctattgaccttctcggtggaggaatcttagtggacaaaactggagattggatcacacttatacaaaattctccaattagtaacttgttgagagttgctgcttggaagaaaggctgtttaatggtcaagattgtgatgtctgggaatgcagcagtcaaaaggagtgattgggcctcattggtacaagtgtttttaacaaacagcaacagtacagagcattttgatgcatgtaagtggacaaaatcagaaccacattcctgggaattg

SEQ ID NO: 31045 - DNA, 374 bp, Glycine max
  Clone ID: LIB3138-053-Q1-N1-G1
ctcattagatatagctatgaaaaattactgcgccaggctaaagctccaagtatgtttttacaatccttcaaaaattttgtttctttgtgtgtgtatggtgatgataacttaattagtgttcatgaatatgtcaagccttactttagtggttctaaattgaaaagctttctagctagtcataacatcaccattactgatggtattgacaaaactagtgcaactttgcaatttagaaagttagcagattgtgattttctcaagagaaactttaagcagatgtctaatgttttgtgggtggctcctgaagacaaggcgagtttatggtcacaacttcattatgtttcgtgtaataatctggaaatgcaagaagctta

SEQ ID NO: 31046 - DNA, 369 bp, Glycine max
  Clone ID: LIB3138-053-Q1-N1-G2
ctcgagccgttcaaatatgatataattggtgctggttcacattcttcagaagattttcctgaaaaggaagatcaagaaaaacccaaaaagattgatgccagattgagacaaagaatagatcctcaatacaatgaggttcaggctcagatggaaacaaatttgtttaaattgtctcttgatgatgttgaaactcctaaaggttccatgttggatctgaaaatttctcaatctaaaattgcacttcccaagaacacagttggaggaaccattctgcgtagtgatctattggcaaattttttgacagagggcaattttagagcaagtgttgatttgcagcgcactcatcgtattagaagaatgattaaaatg

SEQ ID NO: 31047 - DNA, 362 bp, Glycine max
  Clone ID: LIB3138-053-Q1-N1-G3
atctttactctctctttcccctaattccgaccatggaagccacggcctccgcaatgagcttcgcccttccctcaacaaaagcccaagcccaagcccaactcctgacccggcccaccaatccattcaccattccctcccgcagcccagcccaccgccccccgccgcgcctccccaccatccgcgccgcaattccccgcacaaagaaagaggcaacggtggagactgtgcgggagcagctcgagaactgttacctcctcgccggcatcaactacaagggcttcacggtgaagcagttccaggagcttcgaaagacgctcccagaaacaacgaaactgatcgtggcgaaaaacacgctcgtttac

SEQ ID NO: 31048 - DNA, 390 bp, Glycine max
  Clone ID: LIB3138-053-Q1-N1-G4
ctttgagttgttccaatggaagaagcgaaaccagcgatgggtcctcctcctcctcctgctcctcccactacgaagaagaggccactggaagactccaatgcccactccaattacttcaagattcgcgctgttattcgagaccttcgtcctcactttctcgaggttctccgaactccagactacaaaaattgcaaggcatcccatgaaattcaagaacagctgaagattgtggtcaagttatacgagaatatgaaagcagatgcggcttcactagcaaagtctaagaatgtgcaagatggccagatgaaggctggccagaacatggatcagaaaacactgaaagagcagcaacctcaacatggcaagcagagtcaagtagagaaatcattt

SEQ ID NO: 31049 - DNA, 329 bp, Glycine max
  Clone ID: LIB3138-053-Q1-N1-G5
ttcagcttttgagtaccactaccaatggtgattttgttcaagggaaagatctcgcaatggttaaagttaatgtagcatgtgctgctgttggcttgacatcaagttacactccaactccattgttggaatctggtttgcaaaaagacagagggttaattgtggagtattttggaaaggtgtcttacgttgctcataaccgtaatcaaccccaaaaaaaaaaattggtggaaggaaatttttcctttgatattaaatctcgctctagattggaaaaagttttctctacaaaagcacaatttgttagtggaaaaaccttcaaatatgatata

SEQ ID NO: 31050 - DNA, 379 bp, Glycine max
  Clone ID: LIB3138-053-Q1-N1-G6
ggcaaattttttgacagagggcaattttagagcaagtgttgatttgcagcgcactcatcgtattagaggaatgattaaaatggtggccacagttggtattcctgagaatacaggtatatcattggcctgtgctatgaatagttcttttagggggcgcgccagttctgatatttacaccatctgctctcaagactgtgaattgtggaatcctgcttgcacaaaagcaatgactatgtcatttaatccaaacccgtgttctgatgcatggagtttggaatttctgaagcgtactggatttcattgcgatatcatttgtgtcactggatggactgccaccccaatgcatgatgttcaggttacaattgattggtttatttcc

SEQ ID NO: 31051 - DNA, 307 bp, Glycine max
  Clone ID: LIB3138-053-Q1-N1-G7
agaaaattcaatgctgaaacatggcttcggctactctctctgtagccaaaccaaccctttaagccaatgggaaaaggttcttttaattcttttgccttccaaacttatcaagcttccttcccttttctagaaaatcttcaaaggatttccattctggcattgccttccaaacctattccagtggaaaccagggaagattccaaaaaggtgggacagaagcaaaactgaagggtgccataaaccggtttggaaagaatggaaagaacttcttgaggggcttgcaccggcgcaaagacttcccttttga

SEQ ID NO: 31052 - DNA, 385 bp, Glycine max
  Clone ID: LIB3138-053-Q1-N1-G8
atccatggtggcatgctctttcaattcccaattgaaattcccccaaagccaccttttttttattcaataaatcaacacccaattttcaaaattccaacttgtaaattgtaatcaattttctttccatttgtcaaaccataccaatcaaccaacctcgttgcttcttgtgatcactctttgaaccaccctcatggatattgatgagtgggagtttctctctgatgatggctaccttgatttcaatgaagagggtgggaagcaaaagcaaaagcaaagttcctttggaaaattggactcaaagggtgtctttgacatggactacttttgctcatcaccaccaccaagggtgagaactcaactagtccctttgccaattcaattggag

SEQ ID NO: 31053 - DNA, 174 bp, Glycine max
  Clone ID: LIB3138-053-Q1-N1-H1
gaaaatgcggaatcctctgcatgatctggaatttgtgttttctttcgcttgttcgtttgtttaattcaataaaggaaattaggcatgaccctcttgttgagtatgctctgcctatttgaaaatttccacacctcttttaattgtcgtaatgatgtgtgaagtgtgtgttatttt

SEQ ID NO: 31054 - DNA, 249 bp, Glycine max
  Clone ID: LIB3138-053-Q1-N1-H2
cttgttacttaaacaataaccagttgagttaatgattcatgggcaggttcaagtctaaaaaaaaaaaaaaaaaaaaaaaaaaaaaaaaaaaaaaaaaaaaaaaaaaaaaaaaaaaaaaaaaaaaaaaaaaaaaaaaaaaaaaaaaaaaaaaaaaaaaaaaaaaaaaaaaaaaaaaaaaaaaaaaaaaaaaaaaaagggggcccccccaaaaagaaactccacaccccggaaaaaaattcggaaccggac

SEQ ID NO: 31055 - DNA, 255 bp, Glycine max
  Clone ID: LIB3138-053-Q1-N1-H3
atgattctatcctacagatactatcaaaatgactgggataaacatgggagtctaattattgaatgtgagtactgaaacaatagaattggatagcccgaatggtattaaaaatatggcgtactaactcacattagtcatttatgataccatttaccgaacagctagcgtcgctatggaacataactttatggtttcaaaaagaagccggaaaaaagttgcttctattgagatatgcgaaatagtcgctatacttct

SEQ ID NO: 31056 - DNA, 383 bp, Glycine max
  Clone ID: LIB3138-053-Q1-N1-H4
gtgagggttgtttgcaggaaaatttacgactacatacgctatgatctcaaagaaatctcttttccctcttctttgccagaccctcctaacatcaaaaagcgccgcatattgacctgggacgaacgtatctgggtttttaagagagctgccaggctttatgccgcaagctgggttcgtgacattggtcctgaccttcggcctgatgattataagaaggatgatgacatgactgatgaaacaaatggtgaaaagaaaacaactaaaggaaaagaatcctcaacactggaggaccttgctgtagctgcaagagggggaatggagactctcagaccggctttgcagcgtgtgtacatgaccagagcatctgcatacagagatgctct

SEQ ID NO: 31057 - DNA, 379 bp, Glycine max
  Clone ID: LIB3138-053-Q1-N1-H5
caagcccaacatctccaccataggagctgatcaatttgatgattttcaccctaaagagaagttacacaagctatccttcttcaattggtggatgttcagcatcttctttgggacactctttgcaaacagtgttctagtttatatccaagataatgtggggtggactcttggctatgctcttccaactcttggccttttagtatcaatcatgatattcgtggcagggacacccttctataggcacaaagtgcctgcagggagtaccttcactagaatggctagggtcgttgtggctgctttgaagaaatcaaaagttcctgttcctagtgactctaaagaactatatgagcttgacaggaagagtatgcaaagaaaggga

SEQ ID NO: 31058 - DNA, 380 bp, Glycine max
  Clone ID: LIB3138-053-Q1-N1-H6
caaaattgtttttgatgataagcttgtgttggctaacacacaagaattctttgatggaaattttccagtggattcttggttaccaatttttgtgaattgtctttatcctgtaagtcaattaccttcagaagctgtcgttgtaaatgttacatgtggtagtggacgtggtggtttacccaccactgcttggattagttctgcagttaacaatcgctcctcagatatcaacaaaaagattcgcacagcacttgggaaaggtaagaaaattgtttttcttactagagttgatccttttccagtagctttactggctgttctttttggcgttaagaatgaaattctgagttctaacgccactaatcctatgctgacgcgacttc

SEQ ID NO: 31059 - DNA, 293 bp, Glycine max
  Clone ID: LIB3138-053-Q1-N1-H7
atgataacttaattagtgttcatgaatatgtcaagccttactttagtggttctaaattgaaaagctttctagctagtcataacatcaccattactgatggtattgacaaaactagtgcaactttgcaatttagaaagttagcagattgtgattttctcaagagaaactttaagcagatgtctaatgttttgtgggtggctcctgaggacaaggcgagtttatggtcacaacttcattatgtttcgtgtaataatctggaaatgcaagaagcttatcttgtcaatctcgtaaat

SEQ ID NO: 31060 - DNA, 386 bp, Glycine max
  Clone ID: LIB3138-053-Q1-N1-H8
gcaagcacagcttttgtcagttttatattgaccttctcggcggaggaatcttaatggacaaaactggagattggatcacacttatacaaaattctgcaattagtaacttattgagagttgctgcttggaagaaaggctgtttaatggtcaagattgtgatgtctgggaatgcagcaatcaataagagtgattgggcctcattggtacacgtgtttttaacatacagccacagtacagagcattttgatgcatgtaagtggacaaaatcagaaccacattcctgggaattgatcttgccaatagaggtatgtggtcctaataatggatgtgaaatgtggagttctgagtgggcaaatcaaactttatggcatttgagtttacttatt

SEQ ID NO: 31061 - DNA, 320 bp, Glycine max
  Clone ID: LIB3138-054-Q1-N1-A1
tggatcttccccccaagggtggcttcagttttgatctatgccgaagaaacgcaatgcttcaaaacaagggcctcaaagccccaacctttctcaaaactggcaccactattgtcggtttaattttccaagatggtgtcattcttggggctgatactagggcaactgaaggacctatagtggctgataaaaactgtgagaaaattcattatatggcacccaacatatattgcttgggagcaagcacagctgctgatacagaggctgtaacagacatgggtagctcacagctgcaactacatcgctaccatactggtcgggaa

SEQ ID NO: 31062 - DNA, 59 bp, Glycine max
  Clone ID: LIB3138-054-Q1-N1-A11
ttgaaaatttccacacctcttttaattgtcgtaatgatgtgtgaagtgtgtgttatttt

SEQ ID NO: 31063 - DNA, 415 bp, Glycine max
  Clone ID: LIB3138-054-Q1-N1-A12
gtagctccaatcaagattgggagtatattttacccttgctcattcgtggtgctggattctcccaatatggagtttctcttcggactggatatgctccgaaagcaccagtgtataattgatttgaaagaaaatgttttgcgagttggtggaggagaagtttctgtgccatttttgcaagagaaagacataccatctcggtttctagacgaggaaaagtatgctaaggaagcttcaggctctggtggtcaaatttcatcaggcagcaataatccatcaacaggaggccactcttctggtggagcttctggtgataaggctaaggattctgagtttgaagccaaagttgcaaagcttgttgaattgggatttgaaagaaatgcagttatacaagctcttcaattattcaatggaaatg

SEQ ID NO: 31064 - DNA, 276 bp, Glycine max
  Clone ID: LIB3138-054-Q1-N1-A2
aatttagaaagttagcagattgtgattttctcaagagaaactgtaagcagatgtctaatgttttgtgggtggctcctgaggacaaggcgagtttatggtcacaacttcattatgtttcgtgtaataatctggaaatgcaagaagcttatcttgtcaatctcgtaaatgtgttacgagaattgtttttgcacagtccagaggaagctcgccaattgagaaggaaagctctctctcgtattgaatggctgcaaaaagctgatgtgcctaccatagcac

SEQ ID NO: 31065 - DNA, 299 bp, Glycine max
  unsure at all n locations
  Clone ID: LIB3138-054-Q1-N1-A3
caacgcanatagttgaattgataagagcgtcacacttactatatgatattttttatcactgtgatattggtgtggaatattcataaactttactaataattagtttgtgcctaacaattttgtcaatcatctttaatgagattttttctttcaatcaccttttcatatgcaaaactcaaatgaatttgagagaatttgagatcttgcttaggagatctgaacccaatttcacttaagccaatgacatgttgatgcagtgtggcttgatcctaagcataccatngntatatttcataaat

SEQ ID NO: 31066 - DNA, 227 bp, Glycine max
  Clone ID: LIB3138-054-Q1-N1-A4
cggctcgagcggctcgaggggccctagtcaaccattgcagggttgagcaaaattgggcaatggtctgagaaattctgctccaattgggttcaacatctagataattttatgaatatgcagatttctgcccaggcagggtttaagagaagtttgtttgaaaggctggttcttttgggtcatgaaaaacaccgtctcaatggtcaatatagagtgcgtccatccattag

SEQ ID NO: 31067 - DNA, 289 bp, Glycine max
  Clone ID: LIB3138-054-Q1-N1-A6
gggaatgctctcaagtgcagtgcctgtcaaggttattgtcacacgggttgttccgtgagttcaacagtctctacatgtgaagaagttgagttcttggccacatgcaaacaatgtcatcatgccaaattacttactcaaaaagagtcctgtaatgaatctccaactagtcccttactcttatcaggacaagaacgtaacactttggcagttctgaaggggccaaggcctaaatgtgatggtcaaggattgatttctactatgacaaagaatagtcgacttgacatgaaac

SEQ ID NO: 31068 - DNA, 277 bp, Glycine max
  Clone ID: LIB3138-054-Q1-N1-A7
ctttggttcccctccaattttctccctccccctcagtagaactcaccacatttcttcatcatcacaaactccaccaccaactcctcctccacaatctcagcctccaacttcgtctccacagcagctaagaacaacaaatttgaatgatgaatcaatgcaagtgtgcactgaagctaagcaacagaagcccatcaaaccatccactaaggttgaatccacagattggatagccacttccttgaccagaaggtttgggataggagctggtcttgcatgg

SEQ ID NO: 31069 - DNA, 205 bp, Glycine max
  Clone ID: LIB3138-054-Q1-N1-A8
ctttgattccaaataaccaccatcaccttgttgacggatcgtaaactagccttgacattaacaccacctcgtccatgcactgcacccttgacaccaatctcttcagcttctggatttctgctcatgcagggcaatggaaagcactgatgccatcgccaaagcttgttctactttatactatggccactgcagatcaacaagggaa

SEQ ID NO: 31070 - DNA, 252 bp, Glycine max
  Clone ID: LIB3138-054-Q1-N1-A9
aaaatttatctagaaacaaccataaatggcactaatttatggggggcgtgaaaaaaaaaaaaaaaaaaaaaaaaaaaaaaaaaaaaaaagggaagaaaaaaaaaaaaaaaaaaagaaaaaaagggaaaaaaaaaagaaaaaggaaagagaaagaggaaaaaaaaagaaaaaaagagagaaagaaaaagagatggggggaaaaaaaggaaaaaggggagaagaagagagaaaaggtaatgggggggacaggaa

SEQ ID NO: 31071 - DNA, 371 bp, Glycine max
  Clone ID: LIB3138-054-Q1-N1-B1
gctccacaggatgctggaactcactatgcagtcatgagctccgacgagtacctcagcactggacttcgccagtacttggacaacaaaatggatggattctacattgctccagcttttatggacaagcttgttgttcacatctccaagaacttcatgaccctgcccaacatcaaggttcctctcattcttggtatctggggaggcaagggacaaggaaaatctttccaatgtgagcttgtctttgccaagatgggaatcaaccccatcatgatgagtgctggagagttggaaagtggaaatgcaggagagccagcaaaactgatcaggcagagataccgtgaagctgcagacatgatcaagaagggaaagat

SEQ ID NO: 31072 - DNA, 415 bp, Glycine max
  Clone ID: LIB3138-054-Q1-N1-B10
ctaataatggttttgaaatgtggagttctgagtgggcaaatcaaacttcatggcatttgagtttccttattgacaatcccaaacagtctacagtttttgatattctcttgggaatctctcaagattttgaaattgctggtaatactcttatgccagctttttctgttccacaggctactgccagatcttctgaaaatgcggaatcctctgcatgatctggaatttgtgttttctttcgcttgttcgtttgtttaattcaataaaggaaattaggcatgaccctcttgttgagtatgctctgcctatttgaaaatttccacacctcttttaattgtcgtaatgatgtgtgaagtgtgtgttattttaaaaaaaaaaaattttttaaaaaattaaattttgtcttcaaaatttattt

SEQ ID NO: 31073 - DNA, 413 bp, Glycine max
  unsure at all n locations
  Clone ID: LIB3138-054-Q1-N1-B11
accttgctgatcctcatcatgggaaccatttttcctcctcactctctctctccactcctcaacatcaaaccttcaccctcaagaattctcttggctccctctccccaacccaagtcaaattctctcttttgctccaaacccattgtttcaagtctcagaaagaaccaaacttcatctcccaaaccttcatcgggcacaagctggttggctcatgctcaacagggcctagcagctttggctatctccttggcactcaactttagcccagttttgtttaatggcaatgcattggcatctgagtttgatgtgcttaatgagggtccacccaaagattcttatgtgtttgatgatgcangagtgcttagtagggtgaccaggtctgatttaaagcagttgttgtctgatttggaatc

SEQ ID NO: 31074 - DNA, 409 bp, Glycine max
  Clone ID: LIB3138-054-Q1-N1-B12
gttcagtgtctacaataccaggtgattttgtcattggtgtcaaggtgacaaccataaacaatatgggtgcatatgggctcaatcctggtatttcaagttcttggcttttgggcaccattccttaatccatttcacaacaaactggttggaatcaaatggccaccggggaaaccccattggattttgattctaaccagccaaacttttgtcaagtttctattgaccttctcggtggaggaatcttagtggacaaaactggagatgggatcacacttatacaaaattctccaattagtaaccttgttgagaagtgctgcttggaaaaaaaggctgttaatggtcaagattgtgatgtctgggaatgcagcagtcaaaaagagtgattgggcctcattggtacaagtgtttt

SEQ ID NO: 31075 - DNA, 328 bp, Glycine max
  Clone ID: LIB3138-054-Q1-N1-B2
ggcaagcaatatggactagcgacaaacctcaagaccgagatcgaggagaagcaacggcagaaggcggcggagcgcaaggcggcggagaaagaatggaaaccacgattcttcactggagcagtcacacctgtcggcagaccagacctcaccaaggacggcgaggaagctctgaagggtttgcacgcggagaactaccaactgccaccaaacgaggaatacgccgccttttgatcgcatcctctttttctcgaatgttaggaagaaattgcagaataggacgaaccagtacagcaggaccttcactacgatatccactatattttgactc

SEQ ID NO: 31076 - DNA, 361 bp, Glycine max
  Clone ID: LIB3138-054-Q1-N1-B3
ctcgagccggcaccattggcaaaattggaatctacaaatgatgagaaagaaagagattatctgcccaaagtcaattatgaacatgaagtagacaagttactggacggtcttggccctagatacacagattggcctggatgtgatccattgcctgtcgatgcggatatgcttccagtaactgttcccggttaccaacctcccttcagacattagctgtagccatgattaaattgtgggaaataagttctattgcaaaggttgcactcaaacgtggtgtgcagctaacaaccagtgagagaatggcagaagagatcaagaaattgacaggtggtattctactctccagaaataaagacttctt

SEQ ID NO: 31077 - DNA, 334 bp, Glycine max
  unsure at all n locations
  Clone ID: LIB3138-054-Q1-N1-B5
aaaaaaattacatagaaatcaaatactgtactatgatctcacgcagacaataatttagctctggagactcaggtggttctaacgtgtgcagctgaaacctccgtgtcccacgaaaaccttacaaaattgaattgtggtattacagtatccaacagcaccatgctggattctgccactccccatgacaaaatcaccacagcagcttctggcttcgtacttgaggatgttcctcatctatctgcttacatccctcacctncaaacatatnctgacccgttgcaagacaatnctttctattctagtgttgcgcaatattacgtgaatgtggatgata

SEQ ID NO: 31078 - DNA, 360 bp, Glycine max
  Clone ID: LIB3138-054-Q1-N1-B6
acaacttcattatgtttcgtgtaataatctggaaatgcaagaagcttatcttgtcaatctcgtaaatgtgttacgagaattgtatttgcacagtccagaggaagctcgccaattgagaaggaaagctctctctcgtattgaatggctgcaaaaagctgatgtgcctaccatagcacagattgaagagttccattcgatgcagaggatgatgaatgctcctgattcaaatgataatattgatttactgttgagcattgatttgttgggtttacaaggagcaggtaaagcttttccaaacaaaattgtttttgatgataagctagtgttggctaacacacaagaattctttgatggaaattt

SEQ ID NO: 31079 - DNA, 398 bp, Glycine max
  Clone ID: LIB3138-054-Q1-N1-B7
gttcagtgtctacaataccaggtgattttgtcattggtgtcaagttgacaaccataaacaatatgtgtgcatatgggctcaatcctggtatttcaggttctcgtcttttgggcaccattcctcagtccatttcacagcaaactgtttggaatcaaatggcaacagtgagaacaccattgaattttgattctagcaagcagagcttttgtcagttttctattgaccttctcggtggaggaatcttagtggacaaaactggagattggatcacacttatacaaaattctccaattagtaacttattgagagttgctgcttggaagaaaggctgtttaatggtcaagattgtgatgtctgggaatgcagcagtcaaaaggagtgattgggcctcattggta

SEQ ID NO: 31080 - DNA, 420 bp, Glycine max
  Clone ID: LIB3138-054-Q1-N1-B9
gtgaaaagtttaaccagccaatatttcactgcaacaatctctctggacatgttgaacctgtggtcccaaatgaccaacacagagctctttactcaacacactcatttaagatcttattcaaagagggaggctgtggaaccttcattccccttttcttcaatttgattacttcagtgaggcagtataatcaacacactaatatgcagacacaaaattatgtggatcctttgcaggcatctcagactccagttgatgagatgatgagacatgcgtatgttgatcctaatgatccaacaaaaatatttctgcaacaacccaattctgattctcagcttaggcgtcgaacatatcagccacaggcagatggaggccatgtctgagtctgaaatttcactctcctcactttcatcgtactatata

SEQ ID NO: 31081 - DNA, 332 bp, Glycine max
  Clone ID: LIB3138-054-Q1-N1-C1
ctcgagccgaataaaaaaataaaaaaaaaaaaaaaaaaaaaaagaaaaaaaaaaaaaaaaaaaaaaaaaaaaaaaaaaaaaaaaaaaaaaaaaaaaaaaaaaaaaaaaaaaaaaaaaaaaaaaaaaaaaaaaaaaaaaaaaaaaaaataaaaaaaaaaaaaaaaaaaaaaaaaaaataaatgggggcggcccccctttttttatcctttcccccccctattttttttcgaacccggcccctaagggaaacccattttccttttaaaagacccttttaaaacttggggaaaataaagaaaaaaacatgtcccctgaaaaaaattattcccccc

SEQ ID NO: 31082 - DNA, 393 bp, Glycine max
  Clone ID: LIB3138-054-Q1-N1-C10
tgatgagtacgtttttcttcaaatttattttcatcttttgggagcggtttttcttcaagccactcaaaagcctccgaagaagtgttagcaacatcacatatgcaacccatcaattcaaataccagaggtaccactctctacttcatcgtaattcagatctcaatgaccacactctcatctttgacgtagaaggtgcgttgttgaaatcctcttcagtgttcccatttttcatgctcgttgcgtttgaagcacgagggttattaagagctattgttctgcttttagtgtacccttttgtttgtttagttggagatgaaatgggggtgaagatgatggttatgatatgcttctttgggatcaaagaagagagtttcagagtgggaagaaccgttt

SEQ ID NO: 31083 - DNA, 355 bp, Glycine max
  Clone ID: LIB3138-054-Q1-N1-C11
cttgctggttgtcacactacaccgatatttccaccaaacccggtggcgttgttgtttgcgaataaatggcaactaagaggagcgtgggaacgttgaaggatggtgatttgaaggggaagagggtattcgtgagggtcgatctgaacgtgcctttggatgacaaccttaacatcaccgatgacactagagtccgtgctgctgttcccaccatcaagtacttgactggttatggtgctaaagtgatcctttctagtcatttgggacgcccaaaaggtgtaacacctaaatacagtttgaagcctcttgtgccaaggctgactcaacttcttggaattgaggttacaatggccaatga

SEQ ID NO: 31084 - DNA, 416 bp, Glycine max
  Clone ID: LIB3138-054-Q1-N1-C12
cagacggtctttgcttgaaacctctgaattcctcaagaatgattgtttgaaaatcaactgtacagttggagttgtggtttcagcaattgattgtccacaacttcactctattaacatcccggaatctgacattggatcacactttggtgcactattggataatatggaaggttcagatattacttttgatgtagctggggataagttccctgctcataagttggtgttggctgccagatccccacaatttcgatctaaattttttaatggtttagatgaagaaaagaatgagattattgtaacagatttagaaccaaaggtttttaaggtaaaaactatatgtttcccctttccatattttctttccctggtagcatcaagcttgtttaggatttattctgttattctgtattttt

SEQ ID NO: 31085 - DNA, 311 bp, Glycine max
  Clone ID: LIB3138-054-Q1-N1-C5
gcagcttgaagaaggttattggctcaagggtccccaacacaaagatttcctctggaagcttcaagattgttgctgtagaagagaagaaagagattgaagagacccagcagaccgacaaggacagatggaagggtcttgcctatgatatctcagacgaccaacaggacatcacaagaggaaagggtttggttgactcccttttccaagctccacaggatgctggaactcactatgctgtcatgagctcctacgagtaccttaacactggacttcgccagtacttggacaacaacatggatggattttacatt

SEQ ID NO: 31086 - DNA, 395 bp, Glycine max
  Clone ID: LIB3138-054-Q1-N1-C6
tgacaatttttccatcatcatcaacagaggaacatagtccgaggaacagccaccacatgtatggcagggagttccgatcgatgttggacggactcgacgaggaagggtgtgttgaagaaccggggcatcaatctgagaagaagcgtcgactaagtgtggaacaagtgaaggctttggagaagaactttgaggttgaaaacaagcttgaacctgagaggaaggtcaagcttgcccaagaacttgggttgcaacctagacaagtagccgtttggttccaaaaccgccgagccagatggaaaaccaaacaattggagagagattatggtgtcctcaaagccaattatgatgctcttaagcttaactttggcaccctcaatcaggacaacgaagcctta

SEQ ID NO: 31087 - DNA, 391 bp, Glycine max
  Clone ID: LIB3138-054-Q1-N1-C7
gttcaaggatggcaatttgtaagaaagatgtttggagagttgaatgtggaatcccttctggatttccgctcacagttatttgcaatagcatttttaatgagatgctcattagatatagctatgaaaaattactgcgccaggctaaagctccaagtatgtttttacaatccttcaaaaattttgtttctttgtgtgtgtatggagatgataacttaattagtgttcatgaatatgtcaagccttactttagtggttctaaattgaaaagctttctagctagtcataacatcaccattactgatggtattgacaaaactagtgcaactttgcaatttagaaagttagcagattgtgattttctcaagagaaactttaagcagatgtctaatgt

SEQ ID NO: 31088 - DNA, 403 bp, Glycine max
  Clone ID: LIB3138-054-Q1-N1-C8
gatgtatcgaaggccaatgtttgatttcgatccaatgtagaaaattcacaactccctgacgagtcattgcaacactacgctgcagaagtgcagattagaaagaaaaaatcataatatctaagtaaataaaaaaataaaaaaaatactactgtggtcttatttttatgcactcacaatgctttaacttctgtgtgcttttaataacttaaaaacaacttttatgctctcggtaaacaatcgcgaatgcaagaagcaccattaaaagtgctcacaaagtaggcgctcatttaactcgtcctctgcagtgccgcagctcagtggccgcgtgtcctatggttgccaaatcaatcttaaaagaccactgctatcacatttaaatatttgttaaataaacgtattttct

SEQ ID NO: 31089 - DNA, 420 bp, Glycine max
  Clone ID: LIB3138-054-Q1-N1-C9
ccaatttccatggcactctcctttcgccccgtcatccacccccgcgtcaccgaccggtcactctttcagttcctcccacccaagcctccccctcttccaacttcgccacctccctccgttctcctccccctcacgcgtcgccgcggcggcttccttccctcctgcctctccgacgacgccgtctccacccgcaacttcgaccgcggcttcaccgtgatcgccgccatgctccgccgcatcgagcccctcgacaactccgccatctccaaaggcgtgtcccccgccgccagagactccatgaagcagaccatctccaccatgctcggattgctaccctccgatcacttcgccgtcaccatcaccgtctccaaacaccccctccaccgccttctcttctgctccatcgtcaccgggtacact

SEQ ID NO: 31090 - DNA, 394 bp, Glycine max
  Clone ID: LIB3138-054-Q1-N1-D1
gtgcatgatagttcagtgtctacaataccaggtgattttggcattggtgtcaagttgacaaccataaacaatatgtgtcctattggcctaaatcctgttttttaaggtgctcattttttggccccatttcctaattcctttccacactaaactgtttggaatcaattggcaacagtgaaaacacctttgattttggattctacaagcagagctttcgtcagttttctattagaccttctcggtggaggaatcttagtggacaaaactggagattggatcacacttatacaaaattctccaattagtaacttgttgagagttgctgcttggaagaaaggctgtttaatggtcaagattgtgatgtctgggaatgcagcagtcaaaaggagtgatt

SEQ ID NO: 31091 - DNA, 411 bp, Glycine max
  Clone ID: LIB3138-054-Q1-N1-D10
ctcgagccgctcgagcggctcgagcggctcgagaatgactagctgcatgaatatagaagagctggagtatggtaaaacatcaggagacagttatcacgatttacgctgattttggtggtaatcttattaaatatttcagtacaaatgaagacttaaacttagttaacaaaatggaggttattcttgtttggagaatagttacggaagtggaaataagatttacgctaactgactgtaagtctttacgttagttgtgcctaattaatttttttgtatgattatgtctattaatgacaagaagttgtttgcatcattacgaagctgaaagccctaggattgtattatagatgtgttaattttacgtgctttaatgtccacttcagcatccactcagttcagtcggggatgatg

SEQ ID NO: 31092 - DNA, 297 bp, Glycine max
  Clone ID: LIB3138-054-Q1-N1-D11
tttgaaaggaggccactgtcaccccctccacctcttttgccatcacttcctcaccatcgtggtggtcgatgggctcgagatgttagacagagaagccgctctccaataagaggtggcccaccaccaaaagaatatcgccgggatacgttcatgcatcgtgcaacagatgataggcgcggaatgggacgagatagaattggaggaatgtattagctgcggatgtttaatgtactttgtgatgtaactatattagcttcattagacgttgggatgaagaatttgagagattagcccctg

SEQ ID NO: 31093 - DNA, 397 bp, Glycine max
  Clone ID: LIB3138-054-Q1-N1-D12
gtccagaggaagctcgccaattgagaaggaaagctctctctcgtattgaatggctgcaaaaagctgatgtgcctaccatagcacagattgaagagttccattcgatgcagaggatgatgaatgctcctgattcaaatgataatattgatttactgttgagcattgatttgttgggtttacaaggagcaggtaaagcttttccaaacaaaattgtttttgatgataagcttgtgttggctaacacacaagaattctttgatggaaattttccagtggattcttgggtaccaatttttgtgaattgtctttatcctgtaagtcaattaccttcagaagctgtcgttgtaaatgttacatgtggtaatggacgtgggtggttacccaccactgcttggat

SEQ ID NO: 31094 - DNA, 405 bp, Glycine max
  Clone ID: LIB3138-054-Q1-N1-D2
gctagagctatgtctggtggtggcaaagaaagtcagggagaggttgatcgtgtaaaagatacagaagagggaattattgactcaaaaacttctcattcacattcagtgggcattactaatgagaatggtgaaagcatacatcttgagcagtctctgaaaggtgtggagacaagggccggttatggtggtgataccacggagacctttgccaacaatatggccttgagtgaggaggtgaatggaacagcagatgatgtggaggagaatgatgctgagtataggagtgaatcccgtggggaagatgctggtggagttgacaatgaggatgatgaagaagattacctgcaacccggtgaagcttcaatagggaagaagctttggaatttttttacaacataacaactc

SEQ ID NO: 31095 - DNA, 407 bp, Glycine max
  Clone ID: LIB3138-054-Q1-N1-D3
gaaaaagttgtattgaaattttcacaagaggaatttcttacagcttggtcaactcaagtgcgtcctgcaacaactctgttggctgatgggtgtccatatttgtatgcaatggtgcatgatagttcagtgtctacaataccaggtgattttgtcattggtgtcaagttgacaaccataaacaatatgtgtgcatatgggctcaatcctggtatttcaggttctcgtcttttgggcaccattcctcagtccatttcacagcaaactgtttggaatcaaatggcaacagtgagaacaccattgaattttgattctagcaagcagagcttttgtcagttttctattgaccttctcggtggaggaatcttagtggacaaaactggagattggatcacacttatacaaaattc

SEQ ID NO: 31096 - DNA, 332 bp, Glycine max
  Clone ID: LIB3138-054-Q1-N1-D4
gacaccgctccaatacaagcctcaacaatggctctgaatcttggtatctgacctaactgataatgggctccatccacggcctccttagatagtgcatattctctgagatctccacttggttgttgtttcgctaacataaactttgctcgcaccatgtaaaccgctagctatactgtcgagtctcgtgaagaccgcgagtctaagtgctagacctagcgtggtatcttcggggccgacaattacagtgcaacctgtcactaacgtttacaatgtttcgttctagccaacacataaggctatcggcgatcataccgttcgcttctacatacaca

SEQ ID NO: 31097 - DNA, 345 bp, Glycine max
  Clone ID: LIB3138-054-Q1-N1-D5
aaaaaaaaaaattaaaaaaaaaaaaaaaaaaaaaaaaaaaaaggaaaaaaaaaaaaaaaaaaaaaaaaaaaaaaaaaaaaaaaaaaaaaaaaaaaaaaaaaaaaaaaaaaaaaaaaaaaaaaaaaaaaaaaaaaaaaaaaaaaggggggggcccccgttttgggggctcttcacccgggaatttatttcgggccgggtcctggggggggccccatttttccttttgggggggggtttaagggtggggggaaatttgggcaaaagggtttcccgggggaaaatggttttccggaaaaattcccccaaaaattaggggcgggaggtttaagggtaaaagccgggggg

SEQ ID NO: 31098 - DNA, 302 bp, Glycine max
  Clone ID: LIB3138-054-Q1-N1-D8
aaaagagcctttgctttttctttaggcctttccgaattaagtacttgtttcattttctctcgaagcaagaaaaatgttcatcgagagtttcaaggttgagagtcctaacgtgaagtacacagagactgagattcagtccgtgtacaactatgaaaccactgaacttgttcacgagaacaagaatggcacttatcagtgggttgtcaagcccaaaactgtcaaatatgaatttaaaaccaacacccatgtccctaaactaggggtaatgcttgtggggtggggtggaaacaatggctcaaccc

SEQ ID NO: 31099 - DNA, 404 bp, Glycine max
  Clone ID: LIB3138-054-Q1-N1-D9
gaaaattgactttctcccagggcacttcccgaagtgttaagagaatgcctctttctatagggggaggagctggtgcaaagaatgctattctcatgaatatgccaaatgctgttctttcaatgtggagatattttgttggagatctcgtctttgaagtttctaagatgacttctccctacattaaatgtacagtctctttcttcatagcatttggaaatttggctgatgataccatcaattttgaggcttttccccacaagctggtgcagtttggagagattcaggaaaaagttgtattgaaattttcacaagaggaatttcttacagcttggtcaactcaagtgcgtactgcaacaactctgttggctgatgggtgtccatatttgtatgcaatggtgcatgat

SEQ ID NO: 31100 - DNA, 410 bp, Glycine max
  Clone ID: LIB3138-054-Q1-N1-E10
gcattttgatgcatgttagtggacaaaatcagaaccacattcctgggaattgatcttcccaatagaggtatgtggtcctaataatggttttgaaatgtggagttctgagtgggcaaatcaaacttcatggcatttgagtttccttattgacaatcccaaacagactacagtttttgatattctcttgggaatctctcaagattttgaaattgctggtaatactcttatgccagctttttctgttccacaagctactgccagatcttctgaaaatgcggaatcctctgcatgatctggaatttgtgttttctttcgcttgttcgtttgtttaattcaataaaggaaattaggcatgaccctcttgttgagtatgctctgcctatttgaaaatttccacacctcttttaatt

SEQ ID NO: 31101 - DNA, 179 bp, Glycine max
  Clone ID: LIB3138-054-Q1-N1-E11
tggaaatgtttctaggaaaatagcaatctgttattgagccaaccagttagatttgctcttagttggttgttgctgcattatactatcactactaggatttggtcatttgcaatatgtaacaatttgcccaatgtagtttcttggctaaataaaagttaattaaccttgtagtcttgtgc

SEQ ID NO: 31102 - DNA, 413 bp, Glycine max
  Clone ID: LIB3138-054-Q1-N1-E12
ggcaacagtgagaacaccattgaattttgattctagcaagcagagcttttgtcagttttctattgaccttctcggtggaggaatcttattggacaaaactggagattggatcacacttatacaaaattctccaattagtaacttattgagagttgctgcttggaagaaaggctgtttaatggtcaagattgtgatgtctgggaatgcagcagtcaaaaggagtgattgggcctcattggtacaagtgtttttaacaaacagcaacagtacagagcattttgatgcatgtaagtggacaaaatcagaaccacattcctgggaattgatcttcccaatagaggtatgtggtcctaataatggttttgaaatgtggagttctgagtgggcaaatcaaacttcatggcatttgagtt

SEQ ID NO: 31103 - DNA, 406 bp, Glycine max
  Clone ID: LIB3138-054-Q1-N1-E2
cagaagaacaagtagttgagaactaagaaggagaagcaaatggcttcctcaatgatctcttccccagctgttaccactgtcaaccgtgccggtgccggcatggttgctccattcactggcctcaagtccatggctggcttccccaccagaaagaccaacaatgacattacctccattgctagcaacggtggaagagtgcaatgcatgcaggtgtggccaccagttggcaagaagaagtttgagactctttcctacctgccagaccttgatgatgcacaattggcaaaggaagtagaataccttcttaggaagggatggattccttgcttggaattcgagttggagcacggtttcgtgtaccgtgagcacaacatgtcaccatgatactacgatggacgctactgga

SEQ ID NO: 31104 - DNA, 397 bp, Glycine max
  Clone ID: LIB3138-054-Q1-N1-E3
taaaaaattaaaaaaaaacatcaaccgaaggggtcatttctcccaatccgctagcttctgctttctgtcttccaggcatattttgaatgacagtgcgtgaaggatacgatgaacatcatgtctacccaccagtgtagttggcctgtgagaattcaggatcatcctgacaaaggaagtattaacaaggctccattttccagaggatcggaattccttaatgttggataccatgctcaaaaatatggccatagtgccagaaaatgtatgcccatttttgccagttcagtgagcaacagtatggatccttctgattcagatgacactgataagaaaaaacctcagaatggtgaaatgggaggagtgaatagtgaaatgcttagagagagtctcgagaaaa

SEQ ID NO: 31105 - DNA, 359 bp, Glycine max
  Clone ID: LIB3138-054-Q1-N1-E4
cgagctcaagcaccgtatcgtcatggcgccgttgacgcgcaaccgggcgaccgtgcccacgttggccccgaacgacatgatcgcagagtactacgagcagcgcgcgtccgacggtggtctgctcatcactgaggtgagtattgtgctcctcgccgagctggcacgcgcaggctgtggacgacggcgtccgacaggagacacatctgacacgcaggcgacgtatccctccggtgaatcgggtggataccccaacaccccgggactgtacaccgacgagcacgtgcgggagtggaagaaggtgacggaccgcgtgcacgccaagggcgggttcatctatactcagctgtgggctctcggac

SEQ ID NO: 31106 - DNA, 398 bp, Glycine max
  Clone ID: LIB3138-054-Q1-N1-E5
gtttgttgtgagctataagctagtttatcgtgaggagaatatgaagttgtttgttttctttgttgctgcagtagttttggtagcatggccatgccatggcgcaagctaccaaaggttccctctccgaatgaaaactggctatggtgagcgttcttcggaggtaaaatgcgcaagttttaggcttgctgtggaagcacacaacatccgagcctttaaaaccattcctgaagagtgcgttgaaccaacaaaggactacattaatggcgaacaatttagatcagactctaaaacagttaaccaacaagctttcttttatgctagtgaacgcgaagtccatcacaacgacatatttatattcggcataaataacaccgtactctctaatatcccatactatg

SEQ ID NO: 31107 - DNA, 402 bp, Glycine max
  Clone ID: LIB3138-054-Q1-N1-E6
ttgcgatatcatttgtgtcactggatggactgccaccccaatgcaggatgttcaggttacaattgattggtttatttcctctcaagaatgtgttcccaggacctattgtgttttaaatccacaaaatccttttgtgttaaataggtggatgggaaaattgactttcccccagggcacttcccgaagtgttaagagaatgcctctttctatagggggaggagctggtgcaaagaatgctattctcatgaatatgccaaatgctgttctttcaatgtggagatattttgttggagatctcgtctttgaagtttctaagatgacttctccctacattaaatgtacagtctctttcttcatagcatttggaaatttggctgatgataccatcaattttgaggcttt

SEQ ID NO: 31108 - DNA, 388 bp, Glycine max
  unsure at all n locations
  Clone ID: LIB3138-054-Q1-N1-E7
gaccttacaattatagaggtcttgtcaaggcatgcttccgatgagttgtaccttggacagagagatggtggtgaattttggacttttgacaaagagccattagaggccttcaagaggtttggaaagaagttggcagaaattgagcaaaagctcatccaaaggaacaatgatgagacactgaggaaccgatacggcccagtgcagatgccctacacattgctttatccttctagtgaagaagggttgacttgcagaggcattcctaacagcatctccatctaaagaggtttatggttgtgttgcaatttaaataaaagatgaggtgtaattccttcattcccggggttttaagaaagaataaaaaaangcttaaagagagtattaaaaa

SEQ ID NO: 31109 - DNA, 348 bp, Glycine max
  Clone ID: LIB3138-054-Q1-N1-E8
gatgttgaaactcctaaaggttccatgttggatctgaaaatttctcaatctaaaattgcacttcccaagaacacagttggaggaaccattctgcgtagtgatctattggcaaattttttgacagagggcaattttagagcaagtgttgatttgcagcgcactcatcgtattagaggaatgattaaaatggtggccacagttggtattcctgagaatacaggtatatcattggcctgtgctatgaatagttcttttagggggcgcgccagttctgatatttacaccatctgctctcaagactgtgaattgtggaatcctgcttgcacaaaagcaatgactatgtcattt

SEQ ID NO: 31110 - DNA, 411 bp, Glycine max
  Clone ID: LIB3138-054-Q1-N1-E9
cgaagataccttctttcagcctcccttcaacacccttttggccctgtattcttcaaagtctcaaagcaaagctcgaagacctgagaagaacaaagggttgattaaattctgtgtggttgttgttggaggttgaaacacaagttgccaccccaagtgtgtgttaatcttaaatttcacaagcaagttgcttttttggagtattatattgtatgaccaaatatttttgtgttttaggactagatattttgcttctggtggcaatttttctcttctccttctggttctcatcctttgtgttcttctttgtctctcatctgtctgaagatttttccatcttagttcctggaggcaccaggaacctgacccaataaacaaaccctgttttttctttctaatttttctaaagtttca

SEQ ID NO: 31111 - DNA, 313 bp, Glycine max
  Clone ID: LIB3138-054-Q1-N1-F1
cgatggctctctctgcgcatatttgccgtttccccgccacacgcgctgacacttctttgccggagagtctcaccagaatccggtgccggaaacctctctccgtccgatgctccggcgattccacttccggctctgtgggttcggagttcgatccgaaggtgtttcggaagaaccttactcggagtaagaattataaccgcaaaggatttgggtacaaggaagagaccctccaactcatgaatcgcgagtacaccagtgatatcattaagactttgaaagaaaatgggtatgagtatacatggggtactgtcac

SEQ ID NO: 31112 - DNA, 411 bp, Glycine max
  Clone ID: LIB3138-054-Q1-N1-F11
cttctttcaacaacttatcattgtattgtcttcaaactttgctgcttccatactttcttctttttccttagccatcattgattgttgcctttcttggctttaaaatggagttcgaggaccgcttcagacaccaggctcagagaccaaaatatgactgccttctttttgatttatatgacactttgtatcccctcaaatctggtcttgcaaaatcatgtctacaaaatattaaagactacatggttgagaagcttggcatacaccctatcaaaattgatgacttgtccaacctcctttacaagaattatggaacaactatggctggtctaaaggcaattggatatgactgtgactatgatgaatatcacagctttgttcatggaagattaccttatgagaacctaaaaccag

SEQ ID NO: 31113 - DNA, 414 bp, Glycine max
  Clone ID: LIB3138-054-Q1-N1-F12
gagaatccgaggcgaagagaagagaaaaattaagatggaggggaaggagcaggatgtgtcgctgggagcgaacaagttcccggagagacagccgattgggacggcggcgcagagccaagacgacggcaaggactaccaggagccggcgccggcgccactggttgacccgacggagtttacgtcatggtccttttacagagcagggatagcagagtttgtggccacttttctgtttctatacatcactgtcttaaccgtcatgggagtcgccggggctaagtctaagtgcagtaccgttgggattcaaggaatcgcttgggccttcggtggcatgatcttcgccctcgtttactgcaccgctggcatctcaaggggacacataaacccggcggtgacatttgggctgtttttggc

SEQ ID NO: 31114 - DNA, 219 bp, Glycine max
  Clone ID: LIB3138-054-Q1-N1-F2
aaattttgtgagggtcattatgaagaaaagggacaaacttaagtgtcaaggtggaatcaacccatactccattgaatggaccggtttggcccattaatttctgagttaaggccatggttttctggggtgcgaatattcctagtttgatgggttgattacccaaccaggttttaaccaaattggcgaaattattaaccagctttgggggggggataaaaa

SEQ ID NO: 31115 - DNA, 375 bp, Glycine max
  Clone ID: LIB3138-054-Q1-N1-F3
gcaatggccatggtggtggtgtaagggacttgtatggagaggattgtgccacagaggaccagcttatcaccccatggactttctctgtggccaggggatgcagctcgctgagagatccacgctacaacacatgactggcctttactgagggagagagagatgctcattacttgcgtggccttttacctgcagctgtcttcaatcaagaacttcaggaaaagaggttgatgcacaatcttcgccagtatgaggttcctctacataggtacatggccatgatggatcttcaggagaggaatgaaaggctgtttcacaagcttctgatcgataatgttgaggaactgcttcctgttgtttacactccaactgttggag

SEQ ID NO: 31116 - DNA, 369 bp, Glycine max
  Clone ID: LIB3138-054-Q1-N1-F4
gtgccgttgaaggttaccgtattgctggtggccccctcggtgaggtcactgacccaatctacccaggtggcagcttcgacccattgggccttgctgatgacccagaggcttttgctgagcttaaggtgaaggaactcaagaacggacgattggccatgttctctatgtttggcttctttgttcaggccattgtcaccggaaagggtccattggagaacctcgccgatcaccttgctgaccctgtcaacaacaacgcctgggcctatgccaccaacttcgtccccggaaagtgagcgtcaaagaacgaaatgacttttgagagtttttagatttgtgtttggtgaagtacttcagataatgtgaattatc

SEQ ID NO: 31117 - DNA, 285 bp, Glycine max
  Clone ID: LIB3138-054-Q1-N1-F5
aattagtgttcatgaatatgtcaagccttactttagtggttctaaattgaaaagctttctagctagtcataacatcaccattactgatggtattgacaaaactagtgcaactttgcaatttaaaaagttagcagattgtgattttctcaaaagaaactttaagcagatgtctaatgttttgtgggtggctcctgaggacaaggcgagtttatggtcacaacttcattatgtttcgtgtaataatctggaaatgcaagaagcttatcttgtcaatctcggaaatgt

SEQ ID NO: 31118 - DNA, 312 bp, Glycine max
  Clone ID: LIB3138-054-Q1-N1-F6
tggaagcggaatggagaaggaagaaagattattggagatgtcacttcaagaagaagatgagtcaaaaagaagttcactaccataggaagccatggataagagcttgaaggtaagagaagaggagtcgaaggagagggagagaaagagcatgaaattttgtgtctcaaatgaggtctgaactttgaagtgtaattctcaaatgattaaagttgaaaaaatgcatacatatgacctctatttataacctaagtgtcacacaaaattggagagaaatttgaatttctattcaaatttcatttgaatttgtggagc

SEQ ID NO: 31119 - DNA, 343 bp, Glycine max
  Clone ID: LIB3138-054-Q1-N1-F7
gtgattttgtcattggtgtcaagttgacaaccataaacaatatgtgtgcatatgggctcaatcctggtatttcaggttctcgtcttttgggcaccattcctcagtccatttcacagcaaactgtttggaatcaaatggcaacagtgagaacaccattgaattttgattctagcaagcagagcttttgtcagttttctattgaccttctcggtggaggaatcttagtggacaaaactggagattggatcacacttatacaaaattctccaattagtaacttgttgagagttgctgcttggaagataggctgtttaatggtcaagattgtgatgtctgggaatgc

SEQ ID NO: 31120 - DNA, 401 bp, Glycine max
  unsure at all n locations
  Clone ID: LIB3138-054-Q1-N1-F8
gctgcttggaagaaaggctgtttaatggtcaagattgtgatgtctgggaatgcagcagtcaaaaggagtgattgggcctcattggtacaagtgtttttaacaaacagcaacagtacagagcattttgatgcatgtaagtggacaaaatcagaaccacattcctgggaattgatcttcccaatagaggtatgtggtcctaataatggttttgaaatgtggagttctgagtgggcaaatcaaacttcatggcatttgagtttccttattgacaatcccaaacagtctacagtttttgatattctcttgggaatctctcaagattttgaaattgctggtaatactcttatgccagctttttctgtccacatgctactgncagatcttctgaaaatgcggaatcc

SEQ ID NO: 31121 - DNA, 406 bp, Glycine max
  Clone ID: LIB3138-054-Q1-N1-G10
attttattcacttaaataaagcgcattactatgtgcaatgagtgtgtttaaatataaaaaaaaaaaaaaaaaaaaaaaaaaaaaaaaaaaaaaaaaaaaaaaaaaaaaaaaaaaaaaaaaaaaaaaaaaaaaaaaaaaaaaaaaaaaaaaaaaaaaaaaaaaaaaaaaaaaaaaaggggggccaaaaaataggggaactttcaaaaccgggaataaatcagggcgggaaacttttgggggaaaaaaatttccttttattaaatgttttaaaaattgggcgaaaaaaaatcaataaagtggtaccggggaaaaatttttattcgttaaaaatttaaaaaaaaataagaccaaaaaccttaaattgtaaaactgggggtgcctaaggagggagcaacttaaaattaat

SEQ ID NO: 31122 - DNA, 415 bp, Glycine max
  Clone ID: LIB3138-054-Q1-N1-G11
gaaacttgcttttgttcccaattttctcaaattgctttcgggtttcgttctgattctgcaaaatcatggagatggagcgcatcgttgaattccctcacacatacatggatcgacccccgagaaagagagcgcgtttgggctgggacatcgctgaggtccccaagataagattcatggcaaaatgggcgaaggaacttttgggcaggtcttggagtgctgggacagagaaaggaaggaaatggtcgccataaaaattgttcgtgggataaagaaatatcgagaggcagccatggtagaaattgaggtactgcaacagcttgggaaacacgataaaagtagcaatcgttatgcatgacttacacatgatccatactgacctgaagccggaaaacatacttctagtttcaccagagta

SEQ ID NO: 31123 - DNA, 418 bp, Glycine max
  Clone ID: LIB3138-054-Q1-N1-G12
ccaaaacggctgagtcagaatcagtgacaccaccacctgctgctgctccttcacaggctcctccagctgctgaggctgaacatgttcctgaggctccaaaggatgtggctgaggagaaatctgtaattccagtgccttcttctgatgacaaacctgatgagtccaaggctcttgtcttagttgagaagactcaagaagttgccgaagtgaaaccaactgagggctctgtcaaccgagatgcagtgcttgcaagagttgcaactgagaagagattgtcactaatcaaagcatgggaagaaagtgaaaaatcaaaagctgaaaacaaggctcacaaaaagctttcatccgtttctgcatgggaaaacagcaagaaagctgctgtggaggctgacctgaaaaagattgaagaagaactgga

SEQ ID NO: 31124 - DNA, 238 bp, Glycine max
  Clone ID: LIB3138-054-Q1-N1-G2
aaagaatcgtaaaagctggtggttttattcatgcgggacgaggtaatgggagtttaagccttgcaagagctataggtgacatggaatttaagcagaatagattcctttctgctgaaaagcaaatggtgacagccaatccagacattaataccggtgaaccttgtgatgaaaaagaatttattgggccggcttgggaaggcatatgggattgcttggcaagcccacaattggtagattt

SEQ ID NO: 31125 - DNA, 243 bp, Glycine max
  Clone ID: LIB3138-054-Q1-N1-G3
agtacatgtttagttgtttgctgaagccaaaccaaataattctgcatttgatcactgtgtctttattttgattcaaaggctacaagacttcataactacctactaaatgcttatcttgttcctcatttcctggatcataacccaacctcttcattttgcctcatcaattcctcttcttagagatggcttgtgaaaccaagacatgggtgggtatgggtcttcttttcttggctgcttactact

SEQ ID NO: 31126 - DNA, 392 bp, Glycine max
  Clone ID: LIB3138-054-Q1-N1-G4
aaattctggtgctcctgtttggaacaacaactcctctttaaccgttggagctagaggtccaattctgcttgaggattatcatcttgtggagaagcttgcaaactttgacagggaacgtatcccagaacgtgttgtccatgccaggggagctagtgcaaagggtttctttgaggtcacacatgacatttctcacctgacatgtgcagatttccttcgagcccctggagttcagacgcctgtaattgttcgtttctcaactgtcattcatgagcgtggtagccctgaaaccttgagggaccctcgaggttttgccgtgaagttttacaccagagagggtaactttgaccttgttggaaacaaccctttcgtcttcttgtacgtgacggcatgaa

SEQ ID NO: 31127 - DNA, 212 bp, Glycine max
  Clone ID: LIB3138-054-Q1-N1-G5
aaattctgagttctaacgccactaatcctatgctgacgcgacttcttgagaactgtgagagtctcaaatatctggttgatgagtgtccttttgcatttgtgaactagtatgtagtcttttattcacttaaataaagcgcattactatgtgcaatgagtgtgtttaaatattagagagctaaaagaaagcctacgctctgtatacattagcat

SEQ ID NO: 31128 - DNA, 396 bp, Glycine max
  Clone ID: LIB3138-054-Q1-N1-G8
ctcgagccgattcggctcgagcaggttctcgtcttgtgggcaccattcctcagtgcatttcacagcaaactgcttggaatcaaatggcaacagggagaacaccattgaattttgattctggcaagcatagcttttgtcagttttctattgaccttctcggcggaggaatcttagtggacaaaactggagattggatcacacttatacaaaattctccaattagtaacttattgagagttgctgcttggaagaaaggctgtttaatggtcaagattgtgatgtctgggaatgcagcaatcaaaaggagtgattgggcctcattggtacaagtgtcgttaacaaacagcaacagttcagagcattttgatgcattgtagcggacaaaatcagaaccac

SEQ ID NO: 31129 - DNA, 309 bp, Glycine max
  Clone ID: LIB3138-054-Q1-N1-G9
tgacaatctcgcatatgtgatactagaattgtattagcaccgtggggaagaagctacccaactgagaacgaaagctctctctcctatgagatgtctgcaaaaagctgatgtgcctaccatagcacatatcgaagagttacattcaatgcagaagatgataaatgctgctgattgaaaagataatattgatacacggttgagcatatgatgaaactgtatacatagagcaagtaaagctgttgcaaacaaaatggataaatgatgataagctcaggtaggctaacacacaagaattcattgatggaaatt

SEQ ID NO: 31130 - DNA, 414 bp, Glycine max
  unsure at all n locations
  Clone ID: LIB3138-054-Q1-N1-H10
cttttgtgttaaataggtggatgggaaaattgactttcccccagggcacttcccgaagtgttaagagaatgcctctttctatagggggaggagctggtgcaaagaatgctattctcatgaatatgccaaatgctgttctttcaatgtggagatattttgttggagatctcgtctttgaagtttctaagatgacttctccctacattaaatgtacagtctctttcttcatagcatttggaaatttggctgatgataccatcaattttgaggcttttccccacaagctggtgcagtttggagagattcangaaaaagttgtattgaaattttcacaagaggaatttcttacagcttggtcaactcaagtgcgtcctgcaacaactctgttggctgatgggtgtccatatttgtatg

SEQ ID NO: 31131 - DNA, 415 bp, Glycine max
  Clone ID: LIB3138-054-Q1-N1-H11
gcaaaaatggcatcattcaccatgacagcttccatccttggcggcgcagccgtcaccaaccggttggcagtagcaacgcagaggagatcactcgtagtgaatgctgccaaagctgttgaagcggaaaaggtcagttatgacaatgacatggatggtagcaatggaaggaggaacttgatgttcgccgcggcggcggcggctgctgtttgctctgttgctgggatggcagtggcagatgagccaaaaccaggaaccccagcagccaagaaaaagtatgctccgatttgtgtcaccatgccaactgctaggatttgtcgcaattgaaggactcggtttttattttacttctgatgatcggaaatgtgcattagggttgtagtaatgttttgatttcacatgatcctcactgtactag

SEQ ID NO: 31132 - DNA, 362 bp, Glycine max
  Clone ID: LIB3138-054-Q1-N1-H2
gaaggcccttttccttcccactgggataggtcttgcggttgcaggccctagtgctcttgaagcctcaaaacatgctaaatcacttagagttatcttcgactggaaagactacctctaattctaccagctaggaacctattgaccatacactccttccatacatttgctgcatggtctgagagctgctcttgatctgattcttgaagaaggactcgaaattgtgatcgcaaggcacagtcattgaggcaaagcaaccagacttgctgtagacgcatggggtttgaagaattgcacccaaaccgaccagtggttcagtgacactgagactgcttttcttggtactgcttacattgatagcactg

SEQ ID NO: 31133 - DNA, 318 bp, Glycine max
  Clone ID: LIB3138-054-Q1-N1-H3
agattatcgtgaatgcgtataaaaggaaaataaagaaattagcgtcaaaatgttgggtgtgttcagcagctccatagtgtcgccgccggacgagctcgtggccgccggcagccgtactccgtcgccgaagatgacggcggcggcgctgcggaagcggttcgaggagaagaacccctccgccgtgtcggtggagatcggagagcatgtccagctcgcttatacccaccacaacgagtcgccgtttcagcccagatcctttgctgtcaaggatgaagtgttctgcttgtttgagggagcccttgacaatttgggaaactt

SEQ ID NO: 31134 - DNA, 291 bp, Glycine max
  Clone ID: LIB3138-054-Q1-N1-H6
gaatatcattatcaccaaaaaccctttgtgtttgagcttccgagaaagtcttgatctccgctcatggcttctccgcgagctgcagaaaacaccgagaatagcttggagaagatcaagcgccagctcgcttccgcttccggtagaaacctgttgcaaggaccacttctcaagagatctgaaaccctgagaaaatggaacgagcgttgggtcatcttggacccgactacggggagaatggaatacaagataagacgaaatgaaccttctgttaaaagaacaattatatttgac

SEQ ID NO: 31135 - DNA, 364 bp, Glycine max
  Clone ID: LIB3138-054-Q1-N1-H7
caaatggcaacagtgagatcaccattgaattttgattctagcaagcagagcttttgtcagttttctattgaccttctcggtggaggaatcttagtggacaaaactggagattggatcacacttatacaaaattctccaattagtaacttgttgagagttgctgcttggaagaaaggctgtctaatggtcaagattgcgatgtctgggaatgcaacagtcaaaaggagtgattgggcctcattggtacaagtgttttaacatacagcaacagtacagaccatttgatgcatgtaagtggacaaatcagaccacatgcctgggattggtccttccaaataaaggattggggccctataatgggttt

SEQ ID NO: 31136 - DNA, 415 bp, Glycine max
  Clone ID: LIB3138-054-Q1-N1-H9
gcattttgatgcatgtaagtggacaaaatcagaaccacattcctgggaattgatcttcccaatagaggtatgtggtcctaataatggttttgaaatgtggagttctgagtgggcaaatcaaacttcatggcatttgagtttccttattgacaatcccaaacagtctacagtttttgatattctcttgggaatctctcaagattttgaaattgctggtaatactcttatgccagctttttctgttccacaggctactgccagatcttctgaaaatgcggaatcctctgcatgatctggaatttgtgttttctttcgcttgttcgtttgtttaattcaataaaggaaattaggcatgaccctcttgttgagtatgctctgcctatttgaaaatttccacacctcttttaattgtcgg

SEQ ID NO: 31137 - DNA, 290 bp, Glycine max
  Clone ID: LIB3138-055-Q1-N1-A1
gtgggtttaaaaaatgagtttgttgctgagaggtgctaaagaaattctggttttttttcctgttggtgggtcacaactaagtttatccccttgttttgtgctctttttttttctgtccccagccccgttttctctttgccccttctgctcccatcctttttttttttttggttaggttaagcattggatttgatgatcttatgaacagctgcaaattctcttcaccagatgattgtgtgaagtttgttcttggaagttctgttggtgttttagtttccgtttttttcttg

SEQ ID NO: 31138 - DNA, 303 bp, Glycine max
  Clone ID: LIB3138-055-Q1-N1-A11
acccaagctcggtcgtaagaagagttcaccatattcagagtcagatggaaacaacagctgcagttcacgactagctcgtttaagtctggatgagaaagtgtcagagagtgacctgactaagggacctactcctcctgtacatcaaacgaagccacaacgaagatctgttactgctccgctggcccctgaaaggaacagtgtatcagattcaaggactgcaccaacttcattcaaggctatgaaagatgaaaagttctccttgtatagtgctgctaaaaagacatccagcttatccaatgctac

SEQ ID NO: 31139 - DNA, 375 bp, Glycine max
  Clone ID: LIB3138-055-Q1-N1-A12
tgggtttcaattgttgcggccataatgtcctttacatactcatctattggacttggacttggcatcacaacagtaatagaaaatggaagaattatgggtagtttaacaggagtaccggcttcaaatattgctgacaagttatggttagtcttccaaggaattggtgatattgcctttgcctatccatacacagtcatcctccttgagatacaggacactctagagtctcctccaccagaaaacaagaccatgaaaaaggcctccatgattgctatcctcattacaacattcttctacctctgctgtggatgctttggatatgcggcttttggaaatcaaacaccaggaaacctcttgacagggtttggaatttac

SEQ ID NO: 31140 - DNA, 133 bp, Glycine max
  Clone ID: LIB3138-055-Q1-N1-A4
ctctcttgagaatttggactagcatgggaccaaattaatgtttactagtgtgattggatctcccgttgaaaactcaaagctatgcttctgttgaattcactttcgccgaataataggagcattttgaaaaatt

SEQ ID NO: 31141 - DNA, 379 bp, Glycine max
  Clone ID: LIB3138-055-Q1-N1-A5
aaaatggtggccacagttggtattcctgagaatacaggtatatcattggcctgtgctatgaatagttcttttagggggcgcgccagttctgatatttacaccatctgctctcaagactgtgaattgtggaatcctgcttgcacaaaagcaatgactatgtcatttaatccaaacccgtgttctgatgcatggagtttggaatttctgaagcgtactggatttcattgcgatatcatttgtgtcactggatggactgccaccccaatgcaggatgttcaggttacaattgattggtttatttcctctcaggaatgtgttcccaggacctattgtgtttaaatccacaaaatccttttgtgttaaataggtggatgggaaa

SEQ ID NO: 31142 - DNA, 291 bp, Glycine max
  Clone ID: LIB3138-055-Q1-N1-A7
gcaatttcctaccctctaaattccagcagcagcaacagcagcagcagcagcagcagtctggatcaaagaagtggtggcatcttggtctgggcaacaacggcgatggcatggatcaggttccacaaaacggagaccacgccaacgggagcctcggcgtgcggtattgagcagccgccactgctgccacatccatcgcctatcaaatccccactctggaccgccctggaagtttccttgcctcgttggccgtcactatcattccaccgagattccccatttgcatttgcaacg

SEQ ID NO: 31143 - DNA, 328 bp, Glycine max
  Clone ID: LIB3138-055-Q1-N1-A8
gttggctgatgggtgtccatatttgtatgcaatggtgcatgatagttcagtgtctacaataccaggtgattttgtcattggtgtcaagttgacaaccataaacaatatgtgtgcatatgggctcaatcctggtatttcaggttctcgtcttttgggcaccattcctcagtccatttcacagcaaactgtttggaatcaaatggcaacagtgagaacaccattgaattttgattctagcaagcagagcttttgtcagttttctattgaccttctcggtggaggaatcttagtggacaaaactggagattggatcacacttatacaaaat

SEQ ID NO: 31144 - DNA, 360 bp, Glycine max
  Clone ID: LIB3138-055-Q1-N1-A9
gcttaagatgagaaaaagcaaccacttgatcggtctcttaaacttcctaacattcctgctgtcgattccgatcctaggaggcgggatatggctgagcagcagggcgaacaacaccgactgcctcaagttcctgcagtggccgctcatcatcatcggcgtcagcatcatggtcgtgtccctggcggggttcgccggcgcgtgttaccgcaacaccttcctcatgcggctctacctcgtcgtcatgttcctggtcattgccgttctgatcgggttcatcatattcgcctacgttgtcaccgacaaggggtccggtcggagggtgatgaaccgcgcttacttggagtattatcttgaagacta

SEQ ID NO: 31145 - DNA, 353 bp, Glycine max
  Clone ID: LIB3138-055-Q1-N1-B1
atcattggcctgtgctatgaatagttcttttagggggcgcgccagttctgatatttacaccatctgctctcaagactgtgaattgtggaatcctgcttgcacaaaagcaatgactatgtcatttaatccaaacccgtgttctgatgcatggagtttggaatttctgaagcgtactggatttcattgcgatatcatttgtgtcactggatggactgccaccccaatgcaggatgttcaagttacaattgattggtttatttcctctcaggaatgtgttcccaggacctattgtgttttaaatccacaaaatccttttgtgttaaataggtggatgggaaaattgactttccccc

SEQ ID NO: 31146 - DNA, 350 bp, Glycine max
  Clone ID: LIB3138-055-Q1-N1-B10
gttcccaggacctattgtgttttaaatccacaaaatccttttgtgttaaataggtggatgggaaaattgactttcccccagggcacttcccgaagtgttaagagaatgcctctttctatagggggaggagctggtgcaaagaatgctattctcatgaatatgccaaatgctgttctttcaatgtggagatattttgttggagatctcgtctttgaagtttctaagatgacttctccctacattaaatgtacagtctctttcttcatagcatttggaaatttggctgatgataccatcaattttgaagcttttccccacaagctggtgcagtttggaaagattcaggaaaa

SEQ ID NO: 31147 - DNA, 328 bp, Glycine max
  Clone ID: LIB3138-055-Q1-N1-B12
ctcatccttcatcaccatgtctcttacgcggttctctgcagtcaccctccgaaaaggcgcgtgcctacggacattacattcaacgctcagcgtgagtaaagatctcgttcaagatttgtatatgaaagagattcgagcttacaaagcgccggctgttgccgccgatgctcatgaaagcgttgtccgcaagttctccgagccttcgaagccctcgatgccgagccttgtcagcgaactacaagctacgctgcctgcgtatattgcgcacgaaccctcatatgtgaccccgactgctaagagtgtggagggctccgacactgaaggacaa

SEQ ID NO: 31148 - DNA, 398 bp, Glycine max
  Clone ID: LIB3138-055-Q1-N1-B2
ggtgaaggagatgacaaatatctgattgcaacagcagagcagccactctgtgcatatcatttagatgattggatccaccctacccagctaccaataagatatgctggatattcatcatgctttcgtaaagaagctggatctcatggttgagacactctaggaatattccgagttcaccaatttgagaaagtggagcaattttgcctcactagtccaaatgacaatgattcatgggacatgcatgaggaaatgctgaagaactctgaagatttctacaaagcgttaaatcttccctatcaagttgtttccattgtatctggtgcattgaatgatgctgcagcaaagaagtatgatctagaagcatggtttccagcctctcaagcttacaaagagctagt

SEQ ID NO: 31149 - DNA, 410 bp, Glycine max
  Clone ID: LIB3138-055-Q1-N1-B3
atgggctcaatcctggtatttcaggttctcgtcttttgggcaccattcctcagtccatttcacagcaaactgtttggaatcaaatggcaacagtgagaacaccattgaattttgattctagcaagcagagcttttgtcagttttctattgaccttctcggtggaggaatcttagtggacaaaactggagattggatcacacttatacaaaattctccaattagtaacttgttgagagttgctgcttggaagaaaggctgtttaatggtcaagattgtgatgtctgggaatgcagcagtcaaaaggagtgattgggcctcattggtacaagtgtttttaacaaacagcaacagtacagagcattttgatgcatgtaagtggacaaaatcagaaccacattcctgggaattg

SEQ ID NO: 31150 - DNA, 343 bp, Glycine max
  Clone ID: LIB3138-055-Q1-N1-B5
ttggattcgaggcttgctaggtgaagtcaacaaagaaagaaaaaaagctttctccgagaaagcttctgttcacgtcagggtccggggtaggcttcttcattgagattgggttggtgttcagtgtgaatgcatttccagtgagataagagaaaaggaacgaggggaagaagcgacttatattaagaaatattaatatacttaatttaatattaatgttcgggtacccccctccggctcgtagttgagaagagctttcgtttaggaaagggctaaatgggtgcgatccctctcgttgagagtcaagggtcttctggagtagaaagcacatcctggatctattaag

SEQ ID NO: 31151 - DNA, 199 bp, Glycine max
  Clone ID: LIB3138-055-Q1-N1-B6
gtgctatatggaaaaatgatactagaacagagaacaggtgagttaaaacaaaaatcttaggggattagtttactcaatgtgactgattctggatgatggataaaagtagggctgtttttactaattactgaaagatttataccagctcatctatgaacctgttgtgtatcattgtaacgagggtacaattttttcctat

SEQ ID NO: 31152 - DNA, 381 bp, Glycine max
  Clone ID: LIB3138-055-Q1-N1-B7
tggtgtcaagttgacaaccataaacaatatgtgtgcatatgggctcaatcctggtatttcaggttctcgtcttttgggcaccattcctcagtccatttcacagcaaactgtttggaatcaaatggcaacagtgagaacaccattgaattttgattctagcaagcagagcttttgtcagttttctattgaccttctcggtggaggaatcttagtggacaaaactggagattggatcacacttatacaaaattctccaattagtaacttgttgagagttgctgcttggaagaaaagctgtttaatggtcaagattgtgatgtctgggaatgcaacagtcaaaaggagtgattgggcctcattggtacaagtgtttttaacaaa

SEQ ID NO: 31153 - DNA, 370 bp, Glycine max
  Clone ID: LIB3138-055-Q1-N1-B8
ggcggaacaaaaaatttgtgtccatggagaaaaactctgttgattatagtcctttgctttctcctcgaggtgatgaaactgcaatcaagacaacatcttttcttgtgtcagctactaaatggactctcaagactttgatcttggtgatctttgttctatggacaactttcattttttctctccctgcaaagcctgtgaatgagttgttctcaaaatggaatgatctcaaccgtgacactccttttggagtcacaggaagcatttttctggtcttcactgccccaattctcataattgcatttcttgccatcgcacacctaattcttactggggaggatcaacttcaggggaagaagacgttcaaactttc

SEQ ID NO: 31154 - DNA, 391 bp, Glycine max
  Clone ID: LIB3138-055-Q1-N1-B9
gatcttcccaatagaggtatgtggtcctaataatggttttgaaatgtggagttctgagtgggcaaatcaaacttcatggcatttgagtttccttattgacaatcccaaacagtctacagtttttgatattctcttgggaatctctcaagattttgaaattgctggtaatactcttatgccagctttttctgttccacaggctactgccagatcttctgaaaatgcggaatcctctgcatgatctggaatttgtgttttctttcgcttgttcgtttgtttaattcaataaaagaaattaagcatgaccctcttgttgagtatgctctgcctatttgaaaatttccacacctcttttaattgtcgtaatgatgtgtgaagtgtgtgttatttt

SEQ ID NO: 31155 - DNA, 314 bp, Glycine max
  Clone ID: LIB3138-055-Q1-N1-C1
gcaagtgctacacaggatcctatggggggatcagtcagccaaggttacagtgcctatccaacaactgctccagtttatgctccacccactagtgctggtggtggtggtcatacaggccatgcgccttctgcagattatggccccctatatggtaccaattatgggtattaagatgcttaatttaatttttgtcaaggagcgctgtgtaaactatatactgtaaactttacgttcagattatttgttttcattttttatttttggctattaggttatcatactgttggtactcttgctttggcttttattatttc

SEQ ID NO: 31156 - DNA, 370 bp, Glycine max
  Clone ID: LIB3138-055-Q1-N1-C11
caaaagtttttaaattttgtgaggttcattatgaagaaaagggacaaacttagttgtcaagttggaatcaacccatactccatggaatggactggtttggccaatagattactgagtaagggcaatgatattctgtgttgcgattatgctagttttgatggtttgattaccaagcaagttatgagcaagatggcagaaatgataaacagtctttgtggtggtgatgaaaaattgatgcgtgaaaggacgcacctgctgttggcttgttgttcaaggatggcaatttgtaagaaagatgtttggagagttgaatgtggaatcccttctggatttccgctcacagttatttgcaatagcaatttttaatgag

SEQ ID NO: 31157 - DNA, 372 bp, Glycine max
  Clone ID: LIB3138-055-Q1-N1-C12
aaagagctttcactggggagtactggaatactaaaaccccggggatttacgcattgcatatgttgcgacacacctttattcgaatcatctactaagttcaatagtggaactgggtggccatcctattaccagacaattgggaaaaatgtgaaatcaaagttggatttgtcaattattttcatgccgcgccaggaggttctctgtgctgtttgtgatgctcatcttggacatgtgtttgacgatggtcctccacccacgggaaaacgtttctgtatcaatagtgctgcccttaagctcaaaccaaagcagtagacagtgaaatacctacctatcactcggaagcaaatgggattaatattctaaatatgtgat

SEQ ID NO: 31158 - DNA, 361 bp, Glycine max
  Clone ID: LIB3138-055-Q1-N1-C2
caaggctctactctactgcttcaccttctgctctagaaaattcagtggtgatacatggcttcggctactctctctgtagccaaaccagcccttcaggcaaatgggaaaggcttctctgaattctctggcctccgcagctcatcaggcttccttcccttttctagaaaatcttcagaggatttccattctgtcattgccttccagacctatgcagttggaagcagtggaggatacaagaagggtgtgacagaagcaaaactgaaggttgccataaacggatttggaaggattggaaggaacttcttgaggtgctggcacggtcgcaaagactcccctcttgatgtcattgccatcaacgaca

SEQ ID NO: 31159 - DNA, 396 bp, Glycine max
  Clone ID: LIB3138-055-Q1-N1-C3
aaaaaagagagtaaacacagtttaacaagagactacataaatctttttttaatttctctagcagttgagtttaattccgatgaataagaaaaatataatcataatcatattatactatgtcttcattggtactgaactcttccgttgcggtactgaactcttccgttgctgtcgttgctgtccttggggaggcaactggcaggaagatctcttctccctgacactttcaacaccgcaatccaccattaatcgggaacccgacaagagcagagctcccgcccgattacggaaagataaaaggcgtgaaagagcaggtattgggatgcagatcagtgagaacaacaacttattcgagcaatctcgacgcaaagagaagataaccaatttaaatgctca

SEQ ID NO: 31160 - DNA, 348 bp, Glycine max
  Clone ID: LIB3138-055-Q1-N1-C4
atctgggcagatgcctcttccacctgaagagttaaggtgtccaatatcggtgcaactcatgtatgatcctgttatcattgcttctgggcagacttatgaaagggtttgtatagagaaatggttcagtgatgggcacaacaactgcccaaagacccagcagaaactttcacatctttgtttgactcctaattattgtgttaagggccttgtttctagttggtgtgaacaaaatggagttcctattcctgaaagccctcctgaatctcttgatcttaactactggggattggtattatcagagtctgaatctacaaattcaaatcttgtaatagtgtcaccttttgcaag

SEQ ID NO: 31161 - DNA, 365 bp, Glycine max
  Clone ID: LIB3138-055-Q1-N1-C6
atgcgtctttgaccacaactgcttcttcaatttccaatctttttggacaccctctattgctattcctcccttggtgttgtttgtgttaaagggtatctctctacttaatataaagttccattgtctcttgaggcaattttcaaccttagttgtgtgttttggagagtttttttgtgttgttttgttgaggttgggtttgtgagtgagagaatggtgggtgctctatctgttgtgggctcatcagtgatggactctcacactggcccttgtttgtgtgttgatgctctcccaacaactagtgttaatctcaagagtggtggagattgtttgtacaagaattttgatggggaaggaagcataatttt

SEQ ID NO: 31162 - DNA, 300 bp, Glycine max
  unsure at all n locations
  Clone ID: LIB3138-055-Q1-N1-C7
ggcctacagaaaattgaggaatctaataatcttgttgaagaagattatgttccagcaatttcaattgttggtagacctaatgttggcaaaagtagcattttgaatgcactggttggtgaggacagaacaatagtcagccccatcagtggcactacccgtgatgctattgatactgaatttactggaccagatggacaggaaaagaacagccattgcttcagctgggagtacaacagaggctttatcagtgaatcgagcatttcgtgctattcgtcgntctgatgttgttgctcttgtcat

SEQ ID NO: 31163 - DNA, 366 bp, Glycine max
  Clone ID: LIB3138-055-Q1-N1-C8
tctgcttcaacttgctccctcagaagcgaagaagaagccacagagaactagtctcctactctcacccgcaagaaaaaaatggcatctcacatcgttggatacccccgtatgggtcccaagagagagctcaagttcgctctcgagtctttctgggatggcaagagcagcgccgaggatttgcagaaggtgtcttctgatctcagggcatccatctggaagcagatggctgatgctgggatcaagtacatccccagcaacactttctctcactatgaccaggttctcgacgccaccgccaccctcggtgccgttccaccaaagtacggctggaccggcggcgagattgggttgatacctacttcttca

SEQ ID NO: 31164 - DNA, 379 bp, Glycine max
  Clone ID: LIB3138-055-Q1-N1-C9
gtagatgtaaatggaaatggaatgaaatttgtatgcctccctagaggcacagcctgtgctgcggtcgttcgttgcagtcggagaagacgccacatctcaatcatttcaacctcgccctcgccgggaatatatatataaaacatattctattcactttttttttcgctttcctttaattcttccaaatctgcgaattcagacacacaataatcgaattccctctttctccgcaattcatcctctcttccacgaaatcccttactaaccgactcaatctacttcaatggatcagttcgaatcgtttttcaagagagcagatttggacggagatggcagaatcagtggagccgaagctgtctttttttttcaaggatccaat

SEQ ID NO: 31165 - DNA, 371 bp, Glycine max
  Clone ID: LIB3138-055-Q1-N1-D1
agattggaaaaagtttcctctacaaaagcacaatttgttagtggaaaaaccttcaaatatgatataattggtgctggttcacattcttcagaagattttcctgaaaaggaagatcaagaaaaacccaaaaagattgatgccagattgagacaaagaatagatcctcaatacaatgaggttcaggctcagatggaaacaaatttgtttaaattgtctcttgatgatgttgaaactcctaaaggttccatgttggatctgaaaatttctcaatctaaaattgcactttccaagaacacaattggaggaaccattctgcgtagtgatctattggcaaattttttgacagaaggcaattttagagcaagtgttga

SEQ ID NO: 31166 - DNA, 334 bp, Glycine max
  Clone ID: LIB3138-055-Q1-N1-D11
gtcaagattgtgatgtctgggaatgcagcagtcaaaaggagtgattgggcctcattggtacaagtgtttttaacaaacagcaacagtacagagcattttgatgcatgtaagtggacaaaatcagaaccacattcctgggaattgatcttcccaatagaggtatgtggtcctaataatggttttgaaatgtggagttctgagtgggcaaatcaaacttcatggcatttgagtttccttattgacaattccaaacagtctacagtttttgatattctcttgggaatcttttaaaattttgaaaattgctggtaaatactcttatgccaaccttttt

SEQ ID NO: 31167 - DNA, 291 bp, Glycine max
  Clone ID: LIB3138-055-Q1-N1-D12
gacccctacatcctccctctttccctccgcatccccttcacatacttctcgcaactctcgttggacacttggtgcatccgatatcatgttcaccaaccccgtcttttcccgcttctttggtgctggacaagtgatagagactgtccgaggtggaggggtgtttcagcccgcgatagataaggctgtcaagctgttacaagatggcgaatggatacatatcttcccagaaggcaaggtcaatcagcacgccatgaaccctccaggagggctctttcggttcaaatggggcgt

SEQ ID NO: 31168 - DNA, 360 bp, Glycine max
  Clone ID: LIB3138-055-Q1-N1-D2
accttagcttcctctctttctgacttcagtggaaccagacttcaaactcaacttcagttcaagagaaagcaatgccatccaaaagggtctttctacgtctccgcatcgagcaccaagaaaatcctaataatgggaggcaccaggtttattggtgtgtttttgtctaggctccttgtcaaagagggtcaccaggtgactttattcacaagaggttaagcgcctgtcactcaacagttgccaggtgaatcagacagggattatgctgatttttttttcaagatctttcatttgaaaggagacaggaaggacttcgacttttgtaaatccagtctcttagcaaaagggatttgatgttgttta

SEQ ID NO: 31169 - DNA, 378 bp, Glycine max
  Clone ID: LIB3138-055-Q1-N1-D3
aaacactcataacacaaagcacaaagcaaagctcatccttgagttaaaaaatggcagcagcttcttccatggctctctcatccccatccttggctggcaaggccgtgaagctgggcccatcagccccagaagtgggaagggtgagcatgaggaagaccgtcaccaagcaggtctcctcaggaagcccatggtacggcccagaccgagtcaagtacttgggcccattctctggcgagcccccgtcctacctaaccggtgagttcccaggcgactacggctgggacactgctgggctttccgcagaccccgaaacctttgccaagaaccgtgaactcgaagtgatccactccaggtgggccatgctccgagccctgggct

SEQ ID NO: 31170 - DNA, 322 bp, Glycine max
  Clone ID: LIB3138-055-Q1-N1-D5
gttggagtgagtttcacggagacgccaaaagaagttcaaagggggccgaaagtaggttgaagacttctaggagttatgtacattgagattgattgtcacataattcgagagaagatgattcaatgactagtgaaatgacttcttgtttcctctgcaaaccagcttgcatatatctacaccaaggctctcatgcctggtgcttttcattttttttcttatattccaagctaggaatgtccaacatccattcctaacttgaagagggctcttagcatagatatagacttgatcatggttattttaacttgatcataatgtaacc

SEQ ID NO: 31171 - DNA, 379 bp, Glycine max
  Clone ID: LIB3138-055-Q1-N1-D8
ctcgagccgttccattcctcgacatataatatttatgtttgttttacctcttttttaacgggattgtaaaatttgttctaattaaaaatggcgttaagcaaccctaacccatcttatttctgcaattaatacgtggaatcaatcataataccataatacgtaagccaattgcaccaatcacataagataggttatgtaatctcattttcagttagaataaattagataacttctttttaaaatatttgcggcactctaggacagagattttgctcttttaaaaaataatagaatatcttttttaatgtcattttttttcaaaattaatacaacatggcatctttaaaactactagtattttttaatacaccatttcatg

SEQ ID NO: 31172 - DNA, 388 bp, Glycine max
  unsure at all n locations
  Clone ID: LIB3138-055-Q1-N1-D9
ctcgagccgtttgtaagaaagatgtttggagagttgaatgtggaatcccttctggatttccgctcacagttatttgcaatagcatttttaatgagatgctcattagatatagctatgaaaaattactgcgccaggctaaagctccaagtatgtttttacaatccttcaaaaattttgtttctttgtgtgtgtatggtgatgataacttaattagtgttcatgaatatgtcaagccttactttagtggttctaaattgaaaagctttctagctagtcataacatcaccattactgatggtattgacaaaactagtgcaactntgcaatttagaaagttagcagattgtgattttctcaagagaaactttaagcagatgtctaatggttt

SEQ ID NO: 31173 - DNA, 338 bp, Glycine max
  Clone ID: LIB3138-055-Q1-N1-E1
gattcaggaaaaagttgtattgaaattttcacaagaggaatttcttacagcttggtcaactcaggtgcgtcctgcaacaactctgttggctgatgggtgtccatatttgtatgcaatggtgcatgatagttcagtgtctacaataccaggtgattttgtcattggtgtcaagttgacaaccataaacaatatgtgtgcatatgggctcaatcctggtatttcaggttctcgtcttttgggcaccattcctcagtccatttcacagcaaactgtttggaaataaatggcaacagtgagaacaccattgaattttgattctagcaagcagagcttttgtc

SEQ ID NO: 31174 - DNA, 249 bp, Glycine max
  Clone ID: LIB3138-055-Q1-N1-E10
gctgttcaaatacagtggtgcctcagctgctctcactgtagacccttcgctccacttgtcaagagcttctagcattgtgatgttgattgcatatgtagtctacattgtcttttaactgtggacacacaggcagttatttgaagcctaatatgagggtgaggatggttaggactgtgaacaataacaagctgtgattggattatggaaaggcattgcttggttggtaagaaagacctgtttcaattgctt

SEQ ID NO: 31175 - DNA, 246 bp, Glycine max
  Clone ID: LIB3138-055-Q1-N1-E5
tggcgttcaccgtcgccattggcagtggcgtggctataatcccctgcggcaataccaccaccgcaattccttacacccgtggtggtggtcaccgaacgagaagaaagctccatctccatgtggcgcgcgcgaagaagcccctgaacggcgacgacgtttccatttacactgagctcctcaaaaccgaagtttccgttttcgaaaataagcccctcggcgacaacgatgccgctttgaagttcgtag

SEQ ID NO: 31176 - DNA, 409 bp, Glycine max
  Clone ID: LIB3138-055-Q1-N1-E6
cttaaacccatttccataatcactttttcctactttcttctccatccatcccttgactaattaattatccctcacaactaccaatggccgaagagaaacaccacaagcaccgcctcttccaccaccacaaggacgaggataataagccagtagaaaccgatactggttacgacaacacatcatattccaagccttctgatgactatgactctggtttcaacaagccatcgtatgagtcttctggcggtggctatgaaggtggttacaacaaaacatcttattctagtgatgagccagcttctggtggtggctatgaaggtgggtacaagaaaacaggttattctggtggcattgatgagacttctggttgctatggcgcttgtggtggtggatactctgacgtcactga

SEQ ID NO: 31177 - DNA, 114 bp, Glycine max
  Clone ID: LIB3138-055-Q1-N1-E7
aataaaagtaacctccctcatggaagagctctcagcggggcctctcgtccccgccgtcgtcaaacctgaaccggccaaaggcgcctccggcgctggcttcgggggcacgttccc

SEQ ID NO: 31178 - DNA, 308 bp, Glycine max
  Clone ID: LIB3138-055-Q1-N1-E9
atttttcttcctcagtagtgtcatttacgcttctcttctctgcagcaactatgcctaaccctaaggtcttcttcgacatgaccatcggcggtcaatctgctggccgcatcgtgatggagctctacgccgacgtcactccccgcaccgccgagaacttccgcgcgctttgcaccggcgagaagggcgtagggcggagcggcaagcccctccactacaagggctcgtccttccaccgcgtgatcccgagtttcatgtgtcagggtggcgacttcaccgccggaaacggaaccggcggcgagtcgatttat

SEQ ID NO: 31179 - DNA, 317 bp, Glycine max
  Clone ID: LIB3138-055-Q1-N1-F1
cactaggagctcttctccattggttcttcatctgcatgcacacacttgcatagttttggaaaccaagaatttttgaagggtagcatcaacaagaagttctggaaatggagatcaccaatgtcagcgagtatgaagctattgcaaagcagaagttgccaaagatggtgtttgactactacgcatctggtgcagaagaccagtggactctgcaggagaacagaaatgccttttccagaattttgtttcggccacgtattcttattgatgtgagcaagatagacatcacaactactggcctgggctttaaaatatccatg

SEQ ID NO: 31180 - DNA, 260 bp, Glycine max
  Clone ID: LIB3138-055-Q1-N1-F10
cgagaattgtatttgcacagtccagaggaagctcgccaattgagaagggaagctctctctcgtattgaatggctgcaaaaagctgatgtgcctaccatagcacagattgaagagttccattcgatgcacaggatgatgaatgctcctgattcaaatgataatattgatttactgtggagcatagagttgttgggtttacaaagagcacgttaagcttttccaaaacaaaaaagttttgatgataaacttgtggtggctaa

SEQ ID NO: 31181 - DNA, 181 bp, Glycine max
  Clone ID: LIB3138-055-Q1-N1-F3
ctcgagccaatcaagccttttgtaaaattctctcaactaattcgctagcggcttgtattaaacaaagcaagcaagcatatccatttcaacatggccctcaaaactggttcagttgaaatgttcttcttcccctttgtaggatgaggacatcatatttcaatgattgacacagcaagagtgt

SEQ ID NO: 31182 - DNA, 380 bp, Glycine max
  Clone ID: LIB3138-055-Q1-N1-F4
ctcggccgcaaacgcaaagggcgattccaccactcgagtttcgtaacgggtgctccaatctttgcagccggcaagatcatcgtaaaaaatggcgtcattgtcgccgtcgagccgcacagtggccactttaaaccgcgactggggaatctcctggctctttgcttcatgctggcaaaacatggtgttgacattgacaacatcgcctttgttaagccaaagaagtggacctgtgcctggccttttccatcacaaccggacctcgagcttgaacattttgtcagcgccttagacacggactacggcgactcagaagagtcgtagtcagtagaataaggccagcattatcatgtaccttggtgcgtttgtatttatcacgattt

SEQ ID NO: 31183 - DNA, 298 bp, Glycine max
  Clone ID: LIB3138-055-Q1-N1-F5
gcgcggcacccacacacacagttcgtcggaatgggaagggtgattcgcgctcagcgtaagggtgctgggtcggtgttcaagtctcacactcaccaccgcaagggtccggcgaggttccgcagcctcgacttcggcgagcgcaacggctacctcaagggcgtcgtcaccgacatcatccacgaccccggtcgcggcgcccctctcgccaaggtggcattccgccaccccttccgctacaagaagcaaacggagctcttcgtcgccgccgagggcctctacaccgggcagttcgtctact

SEQ ID NO: 31184 - DNA, 308 bp, Glycine max
  Clone ID: LIB3138-055-Q1-N1-F6
ctcgagccgcctaattctcatttcttcatcgttcgattcttctcctcctaaagatgcagatcttcgtgaaaactttgaccggtaagaccatcacccttgaggtggagtcctccgacaccatcgataacgtgaaagctaagattcaagacaaggaagggatcccacctgaccagcagagacttatctttgcgggtaaacagcttgaggatggtcgaacccttgccgactacaacatccaaaaggaatccactctccacctcgtgcttcgcctcaggggtggcatgcaaatctttgtcaagactttgact

SEQ ID NO: 31185 - DNA, 330 bp, Glycine max
  Clone ID: LIB3138-055-Q1-N1-F7
atcatcttgaattttatgttttgttggttccttcacctaaaacaatttttactcccacctgaaaagctaaaataatttagttcttaatcaattctactcacggctggattgattttaagaactccaaaaattacctagacaactattgttagtttacgaataaattcttttgggccttaaacaaataggacattagttggaagttcattttaacaattttttttttcttgttttgattacagttggtgaccttaaccacctgatatctgccaccatgagtggagttacttgttgtctacgtttccctggcaactgaactctgatcttcgc

SEQ ID NO: 31186 - DNA, 154 bp, Glycine max
  unsure at all n locations
  Clone ID: LIB3138-055-Q1-N1-F8
gaagtngaacagaagagaaaagagaaaacaaaggggagagagatgggaactccaaaaacctcaagggaaccatgttcagaacccattctggacgaaataagccgcgccttccgcattggccccgggggtgggttcccctttcactttcttaaag

SEQ ID NO: 31187 - DNA, 292 bp, Glycine max
  Clone ID: LIB3138-055-Q1-N1-G1
ctgacaagtacttgaacgaggctgcacttggaaatgctaacgaggatgctattaacaggggaactttcttccaatcttgaattggaggcaaagcaaacttggcaagtaaatatttctgttcctgaaggttgtgctgatccaagtgctagaagttgtgatgggacttgcgtgtaacattcttagaattctcaatgtcttaggtgcaaagagaagatgccaagtttgagatgattttactatatttttcatattggactgtcttcctctataattttgagttaaagtgtccact

SEQ ID NO: 31188 - DNA, 362 bp, Glycine max
  Clone ID: LIB3138-055-Q1-N1-G10
ctcgagccgaatcggctcgagattgcgatatcatttgtgtcactggatggactgccaccccaatgcaggatgttcaggttacaattgattggtttatttcctctcaggaatgtgttcccaggacctattgtgttttaaatccacaaaatccttttgtgttaaataggtggatgggaaaattgactttcccccagggcacttcccgaagtgttaagagaatgcctctttctatagggggaggagctggtgcaaagaatgctattctcatgaatatgccaaatgctgttctttcaatgtggagatattttgttggagatctcgtctttgaaagttctaagatgacttctccctacattaaatgt

SEQ ID NO: 31189 - DNA, 350 bp, Glycine max
  Clone ID: LIB3138-055-Q1-N1-G11
ctcgagcgattcggctcgaggcaaaacattgttcctggtattaaagtcgacaagggtttggtgccccttgcaggttccaacgacgagtcatggtgccaaggtttggatggtctagcctctcgctcagctgcatactacgagcaaggtgcccgtttcgccaaatggcgtactgttgtgagcatccccaacggtccctctgctctggcagttaaggaagcagcctggggtctggctcgctatgctgcaattgctcaggacaatgggttggtcccaattgtggagccagagatcttgcttgatggggagcatggtattgatagaacttttgaagtaacccaaaaagtctgggc

SEQ ID NO: 31190 - DNA, 109 bp, Glycine max
  Clone ID: LIB3138-055-Q1-N1-G3
tcgaaagattttatccaattgaaattttaaaaatgactgggataaacttaaaaattcaattattggaattgaataaataaccatttaattggattggtcgaatggtatc

SEQ ID NO: 31191 - DNA, 336 bp, Glycine max
  Clone ID: LIB3138-055-Q1-N1-G4
ctggtggggtggccgccggtgagggcaagcaggaagaatgctatgaagagctgttgcaagttggtgaaggtggcggtggatggagctccttatctaagaaaagtggatcttgacatgtacgatagttatgagcatttgatgagggaattagagacaatgttttgtggcttagccattcgtaatcatttgatgaatgagaggaaactgatggatcctggaaatgggattgaatacatgcccacctatgaggacaaagatggtgactggatgttggtcggggatgtaccctggaaaatgtttgttgaatcatgcaagaggataagacttatgattagc

SEQ ID NO: 31192 - DNA, 376 bp, Glycine max
  Clone ID: LIB3138-055-Q1-N1-G5
ctcgagccgcttgtgttggctaacacacaagaattctttgatggaaattttccagtggattcttggttaccaatttttgtgaattgtctttatcctgtaagtcaattaccttcagaagctgtcgttgtaaatgttacatgtggtagtggacgtggtggtttacccaccactgcttggattagttctgcagttaacaatcgctcctcagatatcaacaaaaagattcgcacagcacttgggaaaggtaagaaaattgtttttcttactagagttgatccttttccagtagctttactggctgttctttttggcgttaagaatgaaattctgagttctaacgccactaatcctatgctgacgcgacttcttgagaact

SEQ ID NO: 31193 - DNA, 158 bp, Glycine max
  Clone ID: LIB3138-055-Q1-N1-G6
gcccctttttatctacccttactttggatcggtgcgatccgcttcaaaaaattaaaagggttccttccaacctggaaaccttcttttgaatgggtttcccaaccctggccttcttaaacctaaaccttgtggttgaataaggaggggtttttattgtt

SEQ ID NO: 31194 - DNA, 275 bp, Glycine max
  Clone ID: LIB3138-055-Q1-N1-G7
ggtcaagattgtgatgtctgggaatgcagcagtcaaaaggagtgattgggcctcattggtacaagtgtttttaacaaacagcaacagtacagagcattttgatgcatgtaagtggacaaaatcagaaccacattcctgggaattgatcttcccaatagaggtatgtggtcctaataatggttttgaaatgtggagttctgagtgggcaaatcaaacttcatggcatttgagtttccttattgacaatcccaaacagtctacagtttttgatattc

SEQ ID NO: 31195 - DNA, 229 bp, Glycine max
  Clone ID: LIB3138-055-Q1-N1-G8
ggctcagatggaaacaaatttgtttaaattgtctcttgatgatgttgaaactcctaaaggttccatgttggatctgaaaatttctcaatctaaaattgcacttcccaagaacacagttggaggaaccattctgcgtagtgatctattggcaaattttttgacagagggcaattttagagcaagtgttgatttgcagcgcactcatcgtattagaggaatgattaaaatg

SEQ ID NO: 31196 - DNA, 332 bp, Glycine max
  Clone ID: LIB3138-055-Q1-N1-H1
ggaatcttcaccagccctcttggctttaagaacctgctcccgcctggaaggctcaattcctagtccattgcaggaagaacctggagggcagcgtgctctaatatttgatcaaggaaacagaatatcacagggcatcagctgtgctgatgtagctgatatatgtgtgaaggcactacatgatacaactgcaagaaacaaaaactttgatgtatgttacgagtatattgctgaagatggaagggagctttatgagctggttgcacacttgcccgacaaagcaaataactacttgacaccagcactctctgtcttagagaaaaatacctgatcat

SEQ ID NO: 31197 - DNA, 296 bp, Glycine max
  Clone ID: LIB3138-055-Q1-N1-H11
gcttggaggaagaagagaaagtatgagcttgggaggcagccagcaaacacaaagctatcaagcaacaagacggttaggaggattagggttcgcggtgggaacgtgaagtggcgcgctttgaggcttgatactgggaactactcttgggggagtgaggctgcaacccgcaagacaaggattcttgatgtggtgtacaatgcatccaacaatgagcttgttcggactcagacattggtcaagagtgccattgttcaggtcgatgcagcacccttcaagcagtggtatctgcagcatta

SEQ ID NO: 31198 - DNA, 280 bp, Glycine max
  Clone ID: LIB3138-055-Q1-N1-H2
caaccttccaaagggcctcatagcctcacccgaaagcactaaactttccggcgcgacagcaatcgcaggagcaatattcacaaccctcggaacctgcgacgccgcattcgctgttcaacaaatagccgacatagcagaaggcgacaaccgcggactggcactgttgctgcccataatcccagcaatagggtgggttctgttcaacattctgcagccggcgctgaaccagctgaaccgaatgcgcagcaccaaaggcgtgatcattggcttggggcttggc

SEQ ID NO: 31199 - DNA, 200 bp, Glycine max
  Clone ID: LIB3138-055-Q1-N1-H4
ggagcaggtaaagccaacaaatcaatgctcaacagtagatcaatattatcatttgaatcaagagcattgatttgttgggtttacaaggagcaagtaaagcttttccaaacaagattgtttttaatgataagcttgtgttggctaacacacaaaaattctttgatggaaattttccaagggattcttggttaccaattttt

SEQ ID NO: 31200 - DNA, 382 bp, Glycine max
  Clone ID: LIB3138-055-Q1-N1-H5
ctaaaacatgcagttgcatttgttcggccagttagtgtggcctttcaggtggtgaatgggttccatttctacgagaatggagttttcactagtgacacttgtggtagcacttcccaagatgtgaaccatgccgttcttgctgttggatatggagttgaaaatggtgtcccatattggctcataaaaaattcatggggagaaagctggggtgaaaatggctacttcaagatggaattggggaagaacatgtgtggtgttgcaacttgtgcatcttatccaattgtggcataaattgcataacaatatggtccctggtgactaccaccttgtcatgcttcaaaagttaaagcgtattgctgatgccagtattgatgaatgatga

SEQ ID NO: 31201 - DNA, 287 bp, Glycine max
  Clone ID: LIB3138-055-Q1-N1-H7
gcaattgaagttaaaagccttagccttccctacaactccaaacacaaagacatcatcatccatggctgcctccgtctccactgtcggagctgtcaacagagctcttttgaacctgaatggttctggagctggagcttcagctcccagttcagccttctttgggaccagcttgaagaaggttattgcctcaagggtccccaacagcaaggtttccggtggaagcttcaagattgttgctgtagaagagaagaaagagattgaagagacccagcagaccgacaaggaca

SEQ ID NO: 31202 - DNA, 354 bp, Glycine max
  Clone ID: LIB3138-055-Q1-N1-H9
tggtgcagtttggagagattcaggaaaaagttgtattgaaattttcacaagaggaatttcttacagcttggtcaactcaggtgcgtcctgcaacaactctgttggctgatgggtgtccatatttgtatgcaatggtgcatgatagttcagtgtctacaataccaggtgattttgtcattggtgtcaagttgacaaccataaacaatatgtgtgcatatgggctcaatcctggtatttcaggttctcgtcttttgggcaccattcctcagtccatttcacagcaaacttgttggaatcaaatggcaacagtgagaacaccatttgaatttgattctagcaagcaaagcttttgtc

SEQ ID NO: 31203 - DNA, 418 bp, Glycine max
  Clone ID: LIB3138-056-Q1-N1-A1
caaaagattttaaattttgcgaggttcattatgaagaaaagggacaaagttagttgtctagttggaatcaacccatactccatggaatggactggcttggccaatagattactgagtaagggcaatgatattctgcgttgcgattacgctagttttgatggtttgattaccaagcaagttatgagccagatgacacaaatgataaacagtctctgtggtggtgatgaaaaattgatgcaccaaacgacgcacctgctgttggctcgttgttcaaggatggctatttgttaaaaagatgtttggagagctgaatgtggaatcccttctgaatttccgctcacacttatttgcaaccgcatctctaatgagatgctcattagatattgctatgaaaaaatactgcgccaggctataactc

SEQ ID NO: 31204 - DNA, 270 bp, Glycine max
  Clone ID: LIB3138-056-Q1-N1-A10
ctcgatccgctctagccgctcgagccgttcgagccgattcggctcgagggcatttgacattgtctctgttgcaaacatgctgcgctcatgaacatggattgctccatacgcgaaatctcatactttcgaggggctgggtggaatcattgccagagagtgtgagcctgaatagggggcagtgctaccggaagagactatattgctagtggaatgagctggatttgcaattttgagatttgtacaaatattgcgtataatcacgtggatgtt

SEQ ID NO: 31205 - DNA, 383 bp, Glycine max
  Clone ID: LIB3138-056-Q1-N1-A11
ctcgagccgattcggctcgagattgaatggctgcaaaaagctgatgtgcctaccatagcacagattgaagagttccattcgatgcagaggatgatgaatgctcctgattcaaatgataatattgatttactgttgagcattgatttgttgggtttacaaggagcaggtaaagcttttccaaacaaaattgtttttgatgataagcttgtgttggctaacacacaagaattctttgatggaaattttccagtggattcttggttaccaatttttgtgaattgtctttatcctgtaagtcaattaccttcagaagctgtcgttgtaaatgttacatgtggtagtggacgtggtggtttacccaccactgcttggattagttctgc

SEQ ID NO: 31206 - DNA, 372 bp, Glycine max
  Clone ID: LIB3138-056-Q1-N1-A2
gtcttgcaattaaagtttttgtctcgcccttctctcttcaactccagggacaagacatcatcatccatggctgcctccctctccactgtcggagctgtcaacagagctcttttgaacctgaacgggtctggacctggggtttcagatcccagttcatacttctttgggagcagcttaaataacggtattggctcaagggtccccatcacaaagacctcctctggaagcttcaagattgttgctgtacaacagaagaaacagattgaccagacccatcagaccaacccggacagatggaacggcctcgcctatgatatctcacacgaccaacaagacatcacaagaagaaagggtttggtcgactcccttttc

SEQ ID NO: 31207 - DNA, 181 bp, Glycine max
  Clone ID: LIB3138-056-Q1-N1-A4
gtccgtgctctgcacacattttcttagctctttactacaatacatctagaccacactctctgattgtacgaagatgggggctggcggccgctctgatgttcatgccgcaaacaggaagtcataggctgactcttcgaagcagactccagttgtaaaaccgtaacttaggcggacccagatt

SEQ ID NO: 31208 - DNA, 406 bp, Glycine max
  Clone ID: LIB3138-056-Q1-N1-A5
atttactgttgagcattgatttgttgggtttacaaggagcaggtaaagcttttccaaacaaaattgtttttgatgataagcttgtgttggctaacacacaagaattctttgatggaaattttccagtggactcttggttaccaatttttgtgaattgtctttatcctgtaagtcaattaccttcagaagctgtcgttgtaaatgttacatgtggtagtggacgtagtggtttacccaccactgcttggattagttctgcagttaacaatcgctcctcagatatcaacaaaaggattcgcacagcacttgggaaaggtaagaaaattgtttttcttactagagttgatccttttccagtagctttactggctgttctttttggcgtaaagatgaaattctgagttct

SEQ ID NO: 31209 - DNA, 338 bp, Glycine max
  Clone ID: LIB3138-056-Q1-N1-A6
caactactatggattcaacaacttccacagaaagcgaagtagcctatgacatgccacccatcctcaaagtctacaataacggtcgcatagagaggctcgcaggcttcgaggttgttactccgggtctcgaccccgaaactaacgtggaatcgaaagacgctgtaatcgccgaacataacggcgtgtcctgcaggctttacattaccaaaaccacttacccaccaacgcaaaagcttgctattttaagttaatttcacgggcgctcgcctataattggaacaacgttttgttcgaacgtccacaaacttcttaacaaccgtggtttaaaaggttatgtg

SEQ ID NO: 31210 - DNA, 412 bp, Glycine max
  Clone ID: LIB3138-056-Q1-N1-A7
gatgaatgctcctgattcaaatgataatattgatttactgttgagcattgatttgttgggtttacaaggagcaggtaaagcttttccaaacaaaattgtttttgatgataagcttgtgttggctaacacacaagaattctttgatggaaattttccagtggattcttggttaccaatttttgtgaattgtctttatcctgtaagtcaattaccttcagaagctgtcgttgtaaatgttacatgtggtagtggacggtgtggtttacccaccactgcttggattagttctgcagttaacaatcgctcctcagatatcaacaaaaagattcgcacagcacttgggaaaggtaagaaaattgtttttcttactagagttgatccttttccagtagctttactggctgttcttttt

SEQ ID NO: 31211 - DNA, 276 bp, Glycine max
  Clone ID: LIB3138-056-Q1-N1-A8
cgaacactcttcttcaatcaagcgaaggtggtctcgattgcaagtgatccacgatacactctacgcttgacaaaaccttcaaacccaattccacagaattcttctgcttcaccatgccaccaaagcctttagactatgggtcaataaatgaaaacgtgaagaagaatcaatatgctgtcagaagtgaattataccttcgagcttctgaacttcagaaagagggcaaaaagattatcttttcttatggtggccacccgcctgccttgggaccaaaac

SEQ ID NO: 31212 - DNA, 385 bp, Glycine max
  Clone ID: LIB3138-056-Q1-N1-A9
ctcgagccgctcgagccgctcgagccgctcgagccgattcggctcgagggcatttgacagtgtctggggagcaaagagctgcgctcatgaagatggtttgcttcttccttgtgaatctcattctcttgaggggtttggtggaatcgtcgttagagagtatgatcttgaagatggggcggcgctatttggatggagaagattgcaagaggattgagcagtatatgagtgcttcgatcctgtccaaatcatgcctctcctcacttgcatttctgatcacaagcactttcttggggatttcttatgatcttttggcacccattccctggatcaaaagatacattcagaaatttaggaagaatgacatgcttcaattggtgccagaaca

SEQ ID NO: 31213 - DNA, 389 bp, Glycine max
  Clone ID: LIB3138-056-Q1-N1-B10
cttttggttgatacttatcataccaatcctgaaaatgcagttcgtagtatttttgttgcgcctttcaaaggcggaaggcccattcgggtggttacatttccgaataccattgtgcagattgaaccagacatgaattcaaggtttcagcttttgagtaccactaccaatggtgattttgttcaagggaaagatctcgcaatggttaaagttaatgtaacatgtgctgctgttggcttgacatcaagttacactccaactccattgttggaatctggtttgcaaaaagacagagggttaattgtggagtattttggaaggatgtcttacgttgctcataacgttaatcagccccaagagaaagatttgttggagggaaatttttcctttga

SEQ ID NO: 31214 - DNA, 276 bp, Glycine max
  Clone ID: LIB3138-056-Q1-N1-B12
gcaaatcgacgtgaggggtgttattttttttgaattcaacaacatcgtgttggactgcatggaaactcttaaatgagagcgatcttttttgcgtccattaaacccaagacccaattcttacatatattccacccctccctttaattattcccccaaaatgattggctcaaagggcggcagtgttaccgtatgacacgtgtattgtggtgccatagcttgagtgacacttctgagtgtagcacccacatcgcggaaaaatctagtgacgctactatt

SEQ ID NO: 31215 - DNA, 401 bp, Glycine max
  Clone ID: LIB3138-056-Q1-N1-B2
acaaaattctccaattagtaacttattgagagttgctgcttggaagaaaggctgtttaatggtcaagattgtgatgtctgggaatgcagcagtcaaaaggagtgattgggcctcattggtacaagtgtttttaacaaacagcaacagtacagagcattttgatgcatgtaagtggacaaaatcagaaccacattcctgggaattgatcttcccaatagaggtatgtggtcctaataatggttttgaaatgtggagttctgagtgggcaaatcaaacttcatggcatttgagtttccttattgacaatcccaaacagtctacagtttttgatattctcttgggaatctctcaagattttgaaattgctggtaatactcttatgccagctttttctgttccac

SEQ ID NO: 31216 - DNA, 332 bp, Glycine max
  Clone ID: LIB3138-056-Q1-N1-B4
aattgaaaagctttctagctagtcataacatcaccattactgatggtattgacaaaactagtgcaactttgcaatttagaaagttagcagattgtgattttctcaagagaaactttaagcagatgtctaatgttttgtgggtggctcctgaggacaaggcgagtttatggtcacaacttcattatgtttcgtgtaataatctggaaatgcaagaagcttatcttgtcaatctcgtaaatgtgttacgagaattgtatttgcacagtccagaggaagctcgccaattgagaaggaaagctctctctcgtattgaatggctgcaaaagctgatg

SEQ ID NO: 31217 - DNA, 397 bp, Glycine max
  Clone ID: LIB3138-056-Q1-N1-B6
agattttgtcattggtgtcaagttgacaaccataaacaatatgtgtgcatatgggctcaatcctggtatttcaggttctcgtcttttgggcaccattcctcagtccatttcacagcaaactgtttggaatcaaatggcaacagtgagaacaccattgaattttgattctagcaagcagagcttttgtcagttttctattgaccttctcggtggaagaatcttagtggacaaaactggagattggatcacacttatacaaaattctccaattagtaacttattgaaagttgctgcttggaaaaaaagctgtttaatggtcaaaattgggatgtctgggaatgcaacaatcaaaaagagtgattgggcctcattggtacaagtgttttttacaaacagc

SEQ ID NO: 31218 - DNA, 385 bp, Glycine max
  Clone ID: LIB3138-056-Q1-N1-B7
tacttctacatttgctgtgccgtcgccaccgataagggactggtgtccctctgggctctgtacgccttttgcatgttcttgtgtttcgtgcaccatgccttatcccatctcacagtgaactgtcgcgtctccaatggcaccagtgtgaacacgactggatgttgattctagcacgcctaccttttgtcagttgtctattgaccttctcggtggaggaatcttatgggacaaaactggatgattggatcacacttatacaaaattctgcaattagtaacttattgagagttgctgcttggaatatatgctgttgaatggctaagattgtgatatctggtaatgcagcacacaaaaggagtgattgtgcctcattggtacaagtgtt

SEQ ID NO: 31219 - DNA, 393 bp, Glycine max
  Clone ID: LIB3138-056-Q1-N1-B9
attcttgatgggcatatccagctgacagaaaacgatgaatttgcttaccaagagatgctcactcaccttgcactctgttccattccagatccaaagaaggtgctgcttattggagggggagatggtggaattcttagggaaatatcacgccattcttctgttgagcatattgatatatgcgaactagaccaaatggtcattgatgtttattcggagtttttcccggatatagctgttggttacgaggatccccgagtgcatgttcatatcagcgatggagttgcgtctatcaattctgttcctgagggcacttacgatgtcattatatcggatgcttttccagcaatggggcatagagctgatgttcttgctgatgaatagctcttagaatca

SEQ ID NO: 31220 - DNA, 375 bp, Glycine max
  unsure at all n locations
  Clone ID: LIB3138-056-Q1-N1-C1
gttgtgtatgttatactatctccgatggctctctctgcacatattggccgtttccccgccacacgcgctgacacttntttgccggatagtctcaccacaatccggtgccggaaacctctctccgtacgatgctccggcgattccacttacggctctgatgcttctgagttgacacccctattgttgcgcttgaaccttactccgagcaagaattatcacccgcttggatttgggtacaaagaagagaccctccaactcatgaatcgcgagtacaaaccttgctgcaaaaatacttatcaaaaacattgctttgagggcgcattctttcctgtcccgttgtaaattggtgaagcctatagattttaacgtacgatg

SEQ ID NO: 31221 - DNA, 392 bp, Glycine max
  Clone ID: LIB3138-056-Q1-N1-C10
caatcatgaacttatgtgggactatggtatgtgtgttgataccaacagaggggctgcagtaagggacttaattgcaaaagctctgaaaggagcccttgcgcctgcacagcaagagcaagtccttgtggagctggcaaatgatccaaaacttgtatatcactgtggactgacaccaaaaaagttgccagacctggtggaaaacaatccccttattgcagttgatgttctcactaaattgataaattctccagaaatagcagaatacttcacagtacttgtcaatatggacatgagtctacattcaatggaagttgtgaacaggcttacaacagcagttgaactaccgtctcaattcattcacatgtacataactaattgtatagcatcctgtg

SEQ ID NO: 31222 - DNA, 375 bp, Glycine max
  Clone ID: LIB3138-056-Q1-N1-C11
gttctcattacaattcatgaaacacgctctcttctttcccatcatcactatttctgattctctctctcccttggtctagtcttcctttgttatgccttgccctttccttcgggcaaagtggtgtttccatgttgtttctgagtttacttcctcaatatcccaggatatgtgtgtgttcttatgaaggttgcagtgctaaagagtctatagattttatgctgcagcttcattagataccaattttggtgaatttttcttgataacttgctcttggatttttgttttgcggtgttgatgaagatggctatgggtggcctaatttccagtgctggtgttattattggtagtttctttctgctgattctctgtggcatg

SEQ ID NO: 31223 - DNA, 383 bp, Glycine max
  Clone ID: LIB3138-056-Q1-N1-C12
agaacactttccaacttgatcttgaagcatcacgagagtattggcttgcagatgacagattagtaaacgctgtcgagttcctggatctacgcgatggcgctggttgggagttacttcacgctatgcttaacgctgtctttcgaaaaagaccaactgctgaggctgccctcaatcatcggtttatgactggggcaggcctttgaattccaaggtcaacgaacatagtggtttgtggctgttatgaaatatctagcacatggctcactacataatgtcaatctgcttatcagatgccatgacttatttaggatttgtggtatgcgataatgcatggtcatttgttctttagaaaaaaatattctattttggattatcttattgca

SEQ ID NO: 31224 - DNA, 410 bp, Glycine max
  Clone ID: LIB3138-056-Q1-N1-C2
cagccttgaacttgaactatcgtgtcttcttggctctctctgttcaggatcaacatggatattgcatcacgagctttgctatttccgttggctatacttgtgctcatattaagcacaccttgctcacgtgcttttggcaagagtgaaactaatgcgaaaacagatatttttctgccccccaattttgtacttgcaccacgatcggaagccaacaaatatgattatgacgctgattttaaaagaggtcatatagcacttaagagtatccatgctgaagtaattgatgaagcaagtaaccctgtgcctcttcatgaaacttatctccaccactgagtcgttgcaagatcctattaacctagatatgtgacgacacacacaaactataatggacatatgatacttcacaactc

SEQ ID NO: 31225 - DNA, 418 bp, Glycine max
  Clone ID: LIB3138-056-Q1-N1-C3
tttgtctagttattataaaaaggcatttaatagtatcatttaggaaggaaaaaaaaaaaaaaaaaaaaaagaaaaaaaaaaaaaaaaaaaaaaaaaaaaaaaaaaaaaaaaaaaaaaaaaaaaaaaaaaaaaaaagaaaaaaaaaaaaaaaaaaaaaaaaaaaaaaaaaaaaaaaaaaggggggggggcgccaaaaaagaaccctccaccccggaaaaaaaatgggggcgggggccggggggggaaaaaaattccccttaaggggggggaaataaaaaggggggaaaaaaaggggaaaaaagggtcccggggaaaaaaagggtatgggcaaaaaatcccaaaaaaaaaaaaaggggaaaaaaaaaagggaaaaacggggggggcctaaagggggggcccaccccaattttgggggggg

SEQ ID NO: 31226 - DNA, 227 bp, Glycine max
  Clone ID: LIB3138-056-Q1-N1-C4
ctcgagccgattctgttcgtgagatcactcttttgacgtgactaaaagatgaattgattggttacactctcagcaggtgagagtctttcaagccctagcatggctttctctaatgctaacggaatttactcaacacaaaaggccctctccgctaggtttcctgctgtgtcgaggcccatccaaaagtacactggtttggtgaatacacgtcccattcagacaacccc

SEQ ID NO: 31227 - DNA, 371 bp, Glycine max
  Clone ID: LIB3138-056-Q1-N1-C5
caacctccaaaacacaacaccacaaggaaacaaaacaacccattgagagcttgcacaactctcatggtagtagtagcactactacttcacacactctctctctgagtgcctcacaccacagattctgtgatatatataccaatggaggccctcaatgctgctggcttgacccctctatctgtgctctctgatacaaaaacaacaagaactaaacacccttctgtttctgtatgcaaagtctcaaacttttccacctcaaccaacaaaaaacaaaccttgctgcaaagttgcatatcaaaaactttgcatggggggctgattcttgcagcttccgttgtaaatggtggagctgccacagctttaacgtacga

SEQ ID NO: 31228 - DNA, 403 bp, Glycine max
  Clone ID: LIB3138-056-Q1-N1-C7
ggacaaaatcagaaccacattcctgggaattgatcttcccaatagaggtatgtggtcctaataatggttttgaaatgtggagttctgagtgggcaaatcaaacttcatggcatttgagtttccttattgacaatcccaaacagtctacagtttttgatattctcttgggaatctctcaagattttgaaattgctggtaatactcttatgccagctttttctgttccacaggctactgccagatcttctgaaaatgcggaatcctctgcatgatctggaatttgtgttttctttcgcttgttcgtttgtttaattcaataaaggaaattaggcatgaccctcttgttgagtatgctctgcctatttgaaaatttccacacctcttttaattgtcgtaatgatgt

SEQ ID NO: 31229 - DNA, 407 bp, Glycine max
  Clone ID: LIB3138-056-Q1-N1-C8
aaactacaaatgggtatatgggagtgttgtgagctgctcaatgaaatgactgatgatatcaatcctgatttggatgaaccacaaatacaacatttgttgcaactcgatggagccattataaaagtctatcctaatgaagattggctacatttaactgctcttattcatgatcttggaaagatccttatgcttccaagcttacttggccttcctcaatggtctgttgatagagatacatttgcccttgtatatactcttgatgagtcaaatgatcaccacaagcatttcaaggacaatccgtataacacatattctacttataacacgtaaaatggaatctacaaagaaggaatcggactatacaatgtagtgatctcatggggacatgatgagtatatgtatttggt

SEQ ID NO: 31230 - DNA, 393 bp, Glycine max
  Clone ID: LIB3138-056-Q1-N1-C9
tgattaccaagcaagttatgagcaagatggcagaaatgataaacagtctttgtggtggtgatgaaaaattgatgcgtgaaaggacgcacctgctgttggcttgttgttcaaggatggcaatttgtaagaaagatgtttggagagttgaatgtggaatcccttctggatttccgctcacagttatttgcaatagcatttttaatgagatgctcattagatatagctatgaaaaattactgcgccaggctaaagctccaagtatgtttttacaatccttcaaaaattttgtttctttgtgtgtgtatggggatgataacttaattagtgttcatgaatatgtcaagccttactttagtggttctaaattgaaaagctttctagctagtcataaca

SEQ ID NO: 31231 - DNA, 335 bp, Glycine max
  Clone ID: LIB3138-056-Q1-N1-D1
gagtgggcaaatcaaacttcatggcatttgagtttccttattgacaatcccaaacagtctacagtttttgatattctcttgggaatctctcaagattttgaaattgctggtaatactcttatgccagctttttctgttccacaagctactgccagatcttctgaaaatgcggaatcctctgcatgatctggaatttgtgttttctttcgcttgttcgtttgtttaattcaataaaggaaattaggcatgaccctcttgttgagtatgctctgcctatttgaaaatttccacacctcttttaattgtcgtaatgatgtgtgaagtgtgtgttattt

SEQ ID NO: 31232 - DNA, 392 bp, Glycine max
  Clone ID: LIB3138-056-Q1-N1-D10
gtttttgatgataagcttgtgttggctaacacacaagaattctttgatggaaattttccagtggattcttggttaccaatttttgtgaattgtctttatcctgtaagtcaattaccttcagaagctgtcgttgtaaatgttacatgtggtagtggacgtggtggtttacccaccactgcttggattagttctgcagttaacaatcgctcctcagatatcaacaaaaggattcgcacagcacttgggaaaggtaagaaaattgtttttcttactagagttgatccttttccagtagctttactggctgttctttttggcgttaagaatgaaattctgagttctaacgccactaatcctatgctgacgcgacttcttgagaactgtaagagtct

SEQ ID NO: 31233 - DNA, 383 bp, Glycine max
  unsure at all n locations
  Clone ID: LIB3138-056-Q1-N1-D11
tctggatcatcaactgaagatgacacaagatttaataaggtggttgaagatggaaacaatggattgaggggtctgattcaaatccatgggagcttgcagatttcacaacaaccacctcaagagccagccgtatgctgggagagatttctcccattaagatcgataaaagttttgctggtggaagatgatgattcgacacgccatgttgtgcgtgctctgttacagaattgtagttacaaagtcactgccgtttccaatggccttcaagcgtggaaagtcctggaagatccagaaaatggcattgatcttgtnctaacagaggtagctatgccctatttgtctggaataagtcttttgtgcaagatcatgagccacaaaactct

SEQ ID NO: 31234 - DNA, 391 bp, Glycine max
  Clone ID: LIB3138-056-Q1-N1-D12
gtcattcttcgtttcaacctcgcaaaatgagcacatttgatttagcaattataataattcattgctatcctggacttgttgagatgcgaaacaaagatggagccactcctctcaaagttcttgcctgtaagccttcggccttcaggagtggaatcaatctcccatggtggaagaaaattctttattatggtatactcgtagaacatctagacgctgaaaaagcaataaaatcctatatggataaagttgaaaaatatgatcaggacaatgaactgaaagtcaatatacatttagaaagtagtgaagccaagaaagcacaaatttttgtggaaaaacagtatgccatttctgttcggtttgtaaagagcgcggttcgattagcattcaaagt

SEQ ID NO: 31235 - DNA, 412 bp, Glycine max
  Clone ID: LIB3138-056-Q1-N1-D2
atgataccatcaattttgaggcttttccccacaagctggtgcagtttggagagattcaggaaaaagttgtattgaaattttcacaagaggaatttcttacagcttggtcaactcaggtgcgtcctgcaacaactctgttggctgatgggtgtccatatttgtatgcaatggtgcatgatagttcagtgtctacaataccaggtgattttgtcattggtgtcaagttgacaaccataaacaatatgtgtgcatatgggctcaatcctggtatttcaggttctcgtcttttgggcaccattcctcagtccatttcacagcaaactgtttggaatcaaatggcaacagtgagaacaccattgaattttgattctagcaagcagagcttttgtcagttttctattgaccttctcgg

SEQ ID NO: 31236 - DNA, 373 bp, Glycine max
  Clone ID: LIB3138-056-Q1-N1-D3
gacattacctccattgctagcaacggtggaagagtgcaatgcatgcaggtgtggccaccaattggcatgaagaagttcgagactctttcctacctgccagaccttgatgatgcacaattggcaaaggaagtagaataccttcttaggaagggatggattccttgcttggaattcgagttggagcacggtttcatgtaccgagagcacaacatgtcaccaggatactacgatggacgctactggaccatgtggaagctgcctatgtttggttgcactgatgcttttgacgtgttgaaggagcttcaagaggctaagactgcataccccaacggcttcatgcgtatcatcggattcaacaacgttcggcaagtgc

SEQ ID NO: 31237 - DNA, 246 bp, Glycine max
  Clone ID: LIB3138-056-Q1-N1-D4
gactccacatcagtgggtgggagatccaaaaaaagacagtggaaaagatggcgcggttgatcacagtggtgtagtgctcggaggctgtgctattatgcacagctggctgatcctcatgggtggaggaagcggctatcccgactcgagtggggtctgacttgtaggcggaggtgcttcttgtgatacgggagtgcctaccggctgctcaacatgttaggttcatgatcacgttcacgaaaatttacc

SEQ ID NO: 31238 - DNA, 405 bp, Glycine max
  Clone ID: LIB3138-056-Q1-N1-D5
catgatagttcagtgtctacaataccaggtgattttgtcattggtgtcaagttgacaaccataaacaatatgtgtgcatatgggctcaatcctggtatttcaggttctcgtcttttgggcaccattcctcagtccatttcacagcaaactgtttggaatcaaatggcaacagtgagaacaccattgaattttgattctagcaagcagagcttttgtcagttttctattgaccttctcggtggaggaatcttagtggacaaaactggagattggatcacacttatacaaaattctccaattagtaacttattgagagttgctgcttggaagaaaggctgtttaatggtcaagattgtgatgtctgggaatgcagcagtcaaaaggagtgattgggcctcattggta

SEQ ID NO: 31239 - DNA, 407 bp, Glycine max
  Clone ID: LIB3138-056-Q1-N1-D6
gtttcttctagtttcttcactcttttcattacttttagcctgcatagttttaaataagaaaaaaaaaacagcgactttgtgactagttaagatcaccgtttcttcttcttcttcttgttcttcttcttctactactactactactacttttcctgcacaaaatgatgctcagaatcaagagggttcccactgtcgtttccaactaccaaaaagacgacgctgcatactctcctcgtcccgtcagaggttgtggtcggaattgcctcaaagcttgttgccttccagatgcatagctgcctttgtatgctttcaagaaggcttatgtgaaggatttggccctgcatgcatgcgccggagagcctcccctcacattcctcgactcacttcttcttggagagtgggaagat

SEQ ID NO: 31240 - DNA, 309 bp, Glycine max
  Clone ID: LIB3138-056-Q1-N1-D7
atagaatacagcatttcatttctcatcatcaatggctttctcttgtaaacttgacagcttcattctctctgcctataaaccccaaaactccattctcccactttcaatccaaccttcctccttccttccatctccttcttctttgaagcctcagaagcttcccttcagaattcgctatggttctaccatcagagccacgtcatcatcctcaaccccttccgcaaccattgccgaacctgaaagcattaagattaaatcgattccaaccaaacccattgatggacaaaagactggaaccagtgggcttcg

SEQ ID NO: 31241 - DNA, 313 bp, Glycine max
  Clone ID: LIB3138-056-Q1-N1-D8
cctgagttgattggcatcatcctttccatcctgcacagaagttatggccatcgatctacgttacaagcacagataggcctctggtcgccgtgatgtcaagagcgacaacgtatacctccgtctactagtcaagttataccggttcttacaccggagaactggatctgacttcaaccgtgtcgttctgaagagactcatcatgagcagaagaaacaagcccgccgtatccctcataaagctcatcatgtccctcgagggaagaaacgacaagatcgtcgtcgtcgtcgataccgtcaccgatgacgccagacta

SEQ ID NO: 31242 - DNA, 352 bp, Glycine max
  Clone ID: LIB3138-056-Q1-N1-D9
gacgaggacggctactttgccgagctttatgggtataaatggacatcactctgtcttcatactacaacaatgcttattgcgagttcggttgggattgtagctggtgtatcctatgccattcacagtggttaccagtctggcggtccactacttgggaggctgttctccgctatatgaatcattgaccatctattcccattgttgaagggtctcttatgcagagcaatatcgtaccccaaccattgttattgtatgagccgttcctgttgcttcaatatactccttgctgagggcgaagatcgatcccttcacctgtgtctacaacaaattcaccaatggccaatgagggatc

SEQ ID NO: 31243 - DNA, 382 bp, Glycine max
  Clone ID: LIB3138-056-Q1-N1-E1
ataataatcaccacaatttgcctatgccagtggtgaagttagaggaggagttagaactaagtctcgacgtttcgatgaatggtcgatttggggtggaccccacggcgaagaagataaagagaacatcttcgctaccggagtttgcaagcgacaaggagatgggatctgctacggcggggtgcacggggtctctgatgaggacgtgttcgcttccgacggagaccgacgaggagtggctgaagaggaaagagttgctgacgctgccgccgatggaggcgcggaggaagcgctccaagaagcagaggaacatgaaagccttgagagaacaacaacacaaggttgttggtgttgttgggtcccaccggagcaatccgattgatca

SEQ ID NO: 31244 - DNA, 386 bp, Glycine max
  Clone ID: LIB3138-056-Q1-N1-E10
cagtgacatggttgtagattggatccccctgagctcattaaaccccccaaaatcttagtcattgaaggtttgcacccaatgtttgattcccgtgtcagagatctcttggactttagcatctacctagacattagcaatgaggtcaaattcgcttggaaaattcagagagacatggcagagcgtggacacagtcttgaaagcatcaaggctagcattgaagcaaggaagcctgattttgaagcatatattgatccacaaaagcaatacgcagatgcagtgatagaagtgttgccaacgcaactcattccagatgacaacgagggtaagattttgagagtgagattgatacagaaagagggggttaagtactttagcccggtttactt

SEQ ID NO: 31245 - DNA, 390 bp, Glycine max
  Clone ID: LIB3138-056-Q1-N1-E11
caatcaccaaacacgacactttgagtggctacctcttcaacattgcacttctaaaaaatctcttcaggccccaatttcagttgcattgggtcaaaccgacaggaccgtatgagataactacacggtggaccatggttatgaaattggtgctacttccttggaaaccggaactgatctttacaggaacttccgttatgggcattaacccagaaaatggcaagttctgtagccacgtggacttttgggattcaatagagaaaaatgagtatttttcttttgaaggtttgttggatgtaatcaaacagttgaggatttataagacaccagaattggaatcacccaaatatcatatattgaaaaggacggaaaaatatgatgttagacagtaca

SEQ ID NO: 31246 - DNA, 381 bp, Glycine max
  Clone ID: LIB3138-056-Q1-N1-E12
attccttccacatcatacttttccgtcatatttccattcaatcttgtaacaccttctgacgcttagcagttactaccaaactcagcagcgtaggagccgctaccgttatgggaaaacgtaattctcaacgtaaaaatactgcaatgttggataacgacgatgatagtagtagtagtgtgagttcgtcatcaacttcccgaactgatcacgtctccgtctccgtctcagggaacgaagaagtgcacttcgatcaagatgctctgctcgatcaagctctcgatgctttggatgaaaaaagggattccacgagggagagagcgttgtcagtgatcattggggcattcagtagcaaaatgcagcatcagtttgtcgacaagaaat

SEQ ID NO: 31247 - DNA, 382 bp, Glycine max
  Clone ID: LIB3138-056-Q1-N1-E2
ttgggcctcattggtacaagtgtttttaacaaacagcaacagttcagagcattttgatgcatgtaagtggacaaaatcagaaccacattcctgggaattgatcttcccaatagaggtatgtggtcctaataatggttttgaaatgtggagttctgagtgggcaaatcaaacttcatggcatttgagtttccttattgacaatcccaaacagtctacagtttttgatattctcttgggaatctctcaagattttgaaattgctggtaatactcttatgccagctttttctgttccacaggctactgccagatcttctgaaaatgcagaatcctctgcatgatctggaatttgtgtttctttcgcttgttcgcttgtttaattc

SEQ ID NO: 31248 - DNA, 351 bp, Glycine max
  unsure at all n locations
  Clone ID: LIB3138-056-Q1-N1-E4
ggaagagaatccccgtgtgcccatcatcgtcaccggtaacgatttctgcacactctatgcgcctctcatccgtgatgggcgtatggagaagttctactgggcaccaacaagggatgaccgcattggtgtctgcactggaatttttcgcaccgattcaattcctgaacaggacgttgtcaagattgttgacaccttccctggccaatccattgatttctttggtgcactgagggccagagtatatgatgacgaagtgaggaagtggatttctggtgttggtgttgacggcattgggaagaagcttgtgaactcaaaagatggacctncaacctttgagcagcccaaaatgac

SEQ ID NO: 31249 - DNA, 295 bp, Glycine max
  Clone ID: LIB3138-056-Q1-N1-E5
ccatttcacccctcgtctttccttgtttccggtgagggccaaccacaacatatgttaaacaaggaacaacctccaaaacataacatcctacgccaaacaaaactttgacctccttcagatctatacccttctctctctctctcttctattttcaaattctacatcatgggcacggaggttctacggccacaagattgtttcacccaacgcatcggtgttccaccgcctggcttttcccggcgaaaaacctatggtacccaccacaacaacaaaaaacaatacgttaacaattatt

SEQ ID NO: 31250 - DNA, 241 bp, Glycine max
  Clone ID: LIB3138-056-Q1-N1-E6
ctcgcttcttccttctctcatcaacaacatgcagatcttcgtcaagactttgaccggcaagaccatcaccctcgaggtcgagagcagcgacaccatcgacaacgtcaaggccaagatccaggacaaggaaggtatccctcctgaccagcagaggttgatttttgctggtaagcagctggaagatggtcgcactcttgctgattataacatacaaaaggaatcaacacttcacttggtcttg

SEQ ID NO: 31251 - DNA, 394 bp, Glycine max
  Clone ID: LIB3138-056-Q1-N1-E7
ctcgagccgaatcggctcgagtcctgcaacaactctgttggctgatgggtgtccatatttgtatgcaatggtgcatgatagttcagtgtctacaataccaggtgattttgtcattggtgtcaagttgacaaccataaacaatatgtgtgcatatgggctcaatcctggtatttcaggttctcgtcttttgggcaccattcctcagtccatttcacagcaaactgtttggaatcaaatggcaacagtgagaacaccattgaattttgattctagcaagcagagcttttgtcagttttctattgaccttctcggtggaggaatcttagtggacaaaactggagattggatcacacttatacaaaattctccaattagtaactcgttgagagttgct

SEQ ID NO: 31252 - DNA, 403 bp, Glycine max
  unsure at all n locations
  Clone ID: LIB3138-056-Q1-N1-E8
ggcttcttcaatccctaatgcgccttctgcgttcaattctcagagctacgttggtctcagagcgccactgaggaccttcaacttttcttctcctcaagctgccaaaattcctcgctcccaacgccttttcgtcgtcagagcctccgattcggagttcgaagccgccgttgtcgccggtaaggttccgccggcgccttccgtgccgcccagaccggcggctccggttggaacaccggtggttccttcacttncacttcaccggcgttctcgtcggaaccggaagtcgccggcgcttcggtcggcttttcaggaaacgagcatttcgccggcgaatttcgtgtatccgcttttcattcacgaaggtgaagaggatactccaattggggctatgcctggatgctac

SEQ ID NO: 31253 - DNA, 392 bp, Glycine max
  Clone ID: LIB3138-056-Q1-N1-E9
ctctgttggctgatgggtgtccatatttgtatgcaatggtgcatgatagttcagtgtctacaataccaggtgattttgtcattggtgtcaagttgacaaccataaacaatatgtgtgcatatgggctcaatcctggtatttcaggttctcgtcttttgggcaccattcctcagtccatttcacagcaaactgtttggaatcaaatggcaacagtgagaacaccattgaattttgattctagcaagcagagcttttgtcagttttctattgaccttctcggtggaggaatcttagtggacaaaactggagattggatcacacttatacaaaattctccaattagtaacttattgagagttgctgcttggaagaaaggctgtttaatggtcaag

SEQ ID NO: 31254 - DNA, 188 bp, Glycine max
  Clone ID: LIB3138-056-Q1-N1-F1
ctgccgcacagtttgctattctcatgaatatgccaaatgctggggcttctatgtggagatattttgttgcagatctcgccttcgaagtttctaagatgacttctccctacattaaatgtacaagctctttcttcatcccattcggaaagttggctgatgataccatcatattttaggattttccccac

SEQ ID NO: 31255 - DNA, 379 bp, Glycine max
  Clone ID: LIB3138-056-Q1-N1-F10
ttcccataccgaacactcttcttcaatcaagcgaagggggtctcgattgcaagtgatccacgatacactctacgcttcacaaaaccttcaaacccaattccacagaattcttctgcttcaccatgccaccaaagcctttagactatgggtcaataaatgaaaacgtgaagaagagtcaatatgctgtcagaggtgaattataccttcgagcttctgaacttcagaaagagggcaaaaagattatctttactaatgttggcaacccgcatgcattgggacagaaaccactgagcttccctcgccaggttgttgctttgtgccaagctccattcctacttgatgatcctaatgttggactgctattccctgctgatgcaat

SEQ ID NO: 31256 - DNA, 342 bp, Glycine max
  Clone ID: LIB3138-056-Q1-N1-F11
aaaaaaaaaaaaaaaaaaaaaaaaaaaaaaaaaaaaaaaaaaaggaaaaaaaaaaaaaaaaaaaaaaaaaaaaaaaaaaaaaaaaaaaaaaaaaaaaaaaaaaaaaaaaaaaaaaaataaaaaaatataaagaaagaaaaaaaaattggagaaaaaaaataaaaaaaatgcttcctgtgagaaattgtgatgcggtcacaattccaaacaatataatagccggacgcataaaaggaaaaacttggagagcataataagagagctaacaccaattgatctcgataaggtaactgccggcttttcaatagtaaaacctgatgggccacctttattgaaaaatct

SEQ ID NO: 31257 - DNA, 370 bp, Glycine max
  Clone ID: LIB3138-056-Q1-N1-F12
gtcttattgcttccaaaattttctccttgcgagttctcggactctgtatacattgacaaaagttcatgttctggcgtttactacccggtcggcggtcgatcaactgtttttccccgatagaaatctcttgcgtctttgagttttttttccttgatgtttccacgaattaccagtccccaatacgaacacaatacccttcaggaatctggctttttaccctttcctcctgaatctaggggtcctccatagcattgaaagctggcgttcttgtttgtctattttgcatggtcatccactccagcatacaaaaaatccgctggctgctttctctcccctcaggcacaaagcggtacgcctgttcttaccttac

SEQ ID NO: 31258 - DNA, 329 bp, Glycine max
  unsure at all n locations
  Clone ID: LIB3138-056-Q1-N1-F2
gcgcactcatcgtattataggaatgattaaaatggtggccacagttggtattcctgagaatacaggtatatcattggcctgtgctatgaatagttcttttagggggcgcgccagttctgatatttacaccatctgctctcaagactgtgaattgtggaatcctgcttgcacaaaagcaatgactatgtcatttaatccaaacccgtgttctgatgcatggagnttggaatttctgaagcgtactggatttcatagcgatatcatttgtgtcactggatggactgccaccccaatgcaagatgttcaagttacaattgattggtttattt

SEQ ID NO: 31259 - DNA, 409 bp, Glycine max
  Clone ID: LIB3138-056-Q1-N1-F3
gttaaaagccttagccttccctacaactccaaacacaaagacatcaggatccatggctgcctccgtctccactgtcggagctgtcaacagagctcttttgaacctgaatggttctggagctggagcttcagctcccagttcagccttcttagggaccagcttgaagaaagttattgcctcaagggtccccaacagcaaggttcccggtggaagcttcaagattgttgctgtagaagagaagaaagagattgaagagacccatcataccgacattgactgatggaacggtctagcctatgatatctcagacgaccaacaagacatcacaagaggaaagggtttggttgactcccttttccaagctgctcatgatgctggaactcactatgcaatcatgagctactacgag

SEQ ID NO: 31260 - DNA, 210 bp, Glycine max
  Clone ID: LIB3138-056-Q1-N1-F4
gtgaagaaccccattgttaaattttgataatggcaaatggtaacgcgccgcagtcaagtggctattgaaaagtgtttgcctgctgtgtttgttcgaagctcggtttgcagattcgaccactcaaacccttacgctttcaacttggaaaggcttcggtccacaaaggaatttggtattagaattattattttacgataattcacttattta

SEQ ID NO: 31261 - DNA, 188 bp, Glycine max
  Clone ID: LIB3138-056-Q1-N1-F5
ctggtgcacacaatgcttttctcatgaatatgccaaatgctggccctccaatgtggagatattatggtggagagctcgcctgctaagtttgttagaagaccggttcgcacattaaatgtaccaaacccttactcatacaacttggaaagcctgctgttcataccgtcaattgttatgctatttcccac

SEQ ID NO: 31262 - DNA, 282 bp, Glycine max
  Clone ID: LIB3138-056-Q1-N1-F6
ccgtgaccatggcggctgcgtttacaagtacaagtgcaacactgagactgtcaaatgttggagagagcagaggtttgcagctgcgtaagtgtaaccctaatcctaataagctgaaggttatgggggggtttggaggttgttctggagtggcagtgggtgtgagagaaagaaaaggaattggaagggttagggttcgggttcgggcgagttcttcgtcggacgaagcagtgagtgcgcagtcaaaagtgactcaaatagtattctttgacgtcagtattggaa

SEQ ID NO: 31263 - DNA, 332 bp, Glycine max
  Clone ID: LIB3138-056-Q1-N1-F7
atccttttgtgttaaataggtggatgggaaaattgactttcccccagggcacttcccgaagtgttaagagaatgcctctttctatagggggaggagctggtgcaaagaatgctattctcatgaatatgccaaatgctgttctttcaatgtggagatattttgttggagatctcgtctttgaagtttctaagatgacttctccctacattaaatgtacagtctctttcttcatagcatttggaaatttggctgatgataccatcaattttgaggctttttcccaccagcctgtgccagttggaaaaaatcaaggaaaaagtggattggaaatt

SEQ ID NO: 31264 - DNA, 391 bp, Glycine max
  Clone ID: LIB3138-056-Q1-N1-F8
caagaacacagttggaggaaccattctgcgtagtgatctattggcaaattttttgacagagggcaattttagagcaagtgttgatttgcagcgcactcatcgtattagaggaatgattaaaatggtggccacagttggtattcctgagaatacaggtatatcattggcctgtgctatgaatagttcttttagggggcgcgccagttctgatatttacaccatctgctctcaagactgtgaattggggaatcctgcttgcacaaaagcaatgactatttcatttaatccaaacccgggttctgatgcatggaggttggaatttctgaagcgtactggatttcattgcgatatcatttgtgtcactggatggactggcaccccaatgcaagat

SEQ ID NO: 31265 - DNA, 393 bp, Glycine max
  Clone ID: LIB3138-056-Q1-N1-F9
agccacttcacactcactcactcttgttgccttcatggccaagccagtgtccattgaggtatggaacccaagtggcaaatacagagttgtcagcaccaaaccaatgcctggaactcgttggatcaatcttctcattcaaaatgatgttcgccttgaaatatgtaccgagaagaaaacgattttgtcagttgaagacatcattgctttgattggtgataagtgcgatggagttattggacagttgactgaagactggggagaagagttgttctctgctttgagcaaagcgggaggcaaagctttcagtaacatggctgttggttataacaacgtggatgttgatgctgcaaacaagtatggtgttgcttgtagaaaatactctagagtgctcac

SEQ ID NO: 31266 - DNA, 259 bp, Glycine max
  Clone ID: LIB3138-056-Q1-N1-G1
ccagttctgatatttacaccatctgctctcaagactgtgaattgtggaatcctgcttgcacaaaagcaatgactatgtcatttaatccaaacccgtgttctgatgcatggagtttggaatttctgaagcgtactggatttcattgcgatatcatttgtgtcactggatggactgccaccccaatgcaggatgttcaggttacaattgattggtttatttcctctcaagaatgtgttcccaggacctattgtgttttaaa

SEQ ID NO: 31267 - DNA, 380 bp, Glycine max
  Clone ID: LIB3138-056-Q1-N1-G10
gggatcacccatatagggaagaccggggaagatttaggaacagattaccttctggatcattggccacggtcacgtctattattggacccgcttcctcaaaaatcaccccggggggactgacagcatcctcaataatgctggcaccgactgcaccgaagagtttgacgccatccattctgacaaagcaaaaaaattgcttgaagattaccgaatcggggagctcatcaccactggctacacctcagactcatcgcccaacaactccgtgcatggcaattccgaattcactcatttggcccctattaaagaaactacaacaccaccatcacgtagtgtggctctcaacccacgcgagaaaatcccatgcaagctcgtgtcaa

SEQ ID NO: 31268 - DNA, 382 bp, Glycine max
  Clone ID: LIB3138-056-Q1-N1-G11
tgattattttgtctacgttgtcagcagcctctgaccgcaaatgcacgagatgttagttttttctagccacaaacgcagaccaacccctggcgcacattaaccaccattagctggctcactctaacatgcgcttctccagccgctgcagactctgctccacttgctacttcctctagaagaagcctttttcaaatctctctgccaccggacccgttttcttctgttcatttgggtttctctcttccaatttatggcttctttgagacctaccctctctcaactttccctttcccaatccaattttctcagaaaatctacatggaacaatcatctaccttgctatttacacaaaaggatcgcaaagttgcaaacttttaccact

SEQ ID NO: 31269 - DNA, 369 bp, Glycine max
  Clone ID: LIB3138-056-Q1-N1-G12
gcttagtccccaatcacaggaagattttcaattatttgcagatatctgttttaaatccttcggtgacagagtaaagtactgggtaaccttcaatgagccaaattatctagtcccacttgcgtaccgtttaggtatattcccaccattgcgctgctccagcaaatttgggaattgcagtgagggagattcagagaaagagccctttgtggcagcccataatatgatcctatcacatgcagctgcagttgatctttatagaaacaaataccagactgagcaggggggggaaatcggcattgtcctacactgtgactcatttgagccgttgagcaattccacagcagattaattggctactgaaagagcaca

SEQ ID NO: 31270 - DNA, 359 bp, Glycine max
  Clone ID: LIB3138-056-Q1-N1-G2
ctcgagccgcgagaattgtatttgcacagtccagaggaagctcgccaattgagaaggaaagctctctctcgtattgaatggctgcaaaaagctgatgtgcctaccatagcacagattgaagagttccattcgatgcagaggatgatgaatgctcctgattcaaatgataatattgatttactgttgagcattgatttgttgggtttacaaggagcaggtaaagcttttccaaacaaaattgtttttgatgataagcttgtgttggctaacacacaagaattctttgatggaaattttccagtggattcttggttaccaatttttgtgaattgtctttatcctggtagtcaattaccttc

SEQ ID NO: 31271 - DNA, 375 bp, Glycine max
  Clone ID: LIB3138-056-Q1-N1-G3
gtcacgtgaaggacatcataaagtgggggaccgattaccttctcaagaacttcaacagcaccgccgacaccatcacccagctgggcatgcaggttggatcaggggacacctcccaaggtagcaccactcccaacgaccactactgctggatgcgtcccgaggacatcgactacgaccgccccacccaaacctgcaccacatgctccgatctggccgccgagatggccgcggcgttggcggcggcatcgattgtgttcaaggacaacaaggcctattcgcagaaactggttcacggggcgaccacgctctttaagttctctatggattccagaggtaagtaccgtccaaatgggagggaggcttctgtattctaca

SEQ ID NO: 31272 - DNA, 380 bp, Glycine max
  unsure at all n locations
  Clone ID: LIB3138-056-Q1-N1-G4
ctcaagaatgtgttcccaggacctattgtgttttaaatccacaaaatccttttgtgttaaataggtggatgggaaaattgactttcccccagggcacttcccgaagtgttaagagaatgcctctttctatagggggaggagctggtgcaaagaatgctattctcatgaatatgccaaatgctgttctttcaatgtggagatattttgttggagatctcgtctttgaagtttctaagatgacttctccctacattaaatgtacagnctctttcttcatagcatttggaaatttggctgatgataccatcaattttgaggcttttccccacaagcttgtgcaagttggagagattcaggaaaaagttgtatcgaaattttca

SEQ ID NO: 31273 - DNA, 262 bp, Glycine max
  Clone ID: LIB3138-056-Q1-N1-G5
gggaggagctggtgcaaagaatgctatgctcatgaatttgccaaatgctgttctttcaatgtggagatattttgttggagatctcgtctttgaagtgtctaagatgacttatgcctacattaaatgtacagtctctttcttcatatgatttgcaaagtaggctgatgataccatcaattctgaggctgtccccatcatgctgtttcagtctggagagattcacgaaaatgtcgtattgaaattttcactagaaggaattctt

SEQ ID NO: 31274 - DNA, 348 bp, Glycine max
  Clone ID: LIB3138-056-Q1-N1-G6
aagaaagataaaattctcaaaatggcagccagttcgatccccatccgagtcgccggaatccaaccgtgctccacctccggccaccgcaggaccgatcccgatcgccggagagcctcctccaccagctggtggaccccgctgttcggctggtcctccgaaccggactacattgactcaaacaacagagcatcgagtcttcaacggaccaagcctgaaccggttacggcggcgacggagtcgaaagcgccgagaccgcgcttcgccggttgcttcacggaggagaaggcgaagcagctccggatgatgaccaacaagtcttttcacgacaccatgtatcactccgcgatc

SEQ ID NO: 31275 - DNA, 353 bp, Glycine max
  Clone ID: LIB3138-056-Q1-N1-G7
ggaatcccttctggatttccgctcacagttatttgcaatagcatttttaatgagatgctcattagatatagctatgaaaaattactgcgccaggctaaagctccaagtatgtttttacaatccttcaaaaattttgtttctttgtgtgtgtatggtgatgataacttaattagtgttcatgaatatgtcaagccttactttagtggttctaaattgaaaagctttctagctagtcataacatcaccattactgatggtattgacaaaactagtgcaactttgcaatttaaaaaggtagcaaaatgggattttctcaaaaaaaaccttaaaccaatgtcttatggtttgggggg

SEQ ID NO: 31276 - DNA, 283 bp, Glycine max
  Clone ID: LIB3138-056-Q1-N1-G8
ggaatctgtcctctattcaacaccgcagtggttggcaatggcttcattattgatatgctcatcagatctacattgaacatacagaggcgccaggctcaagcttcagccatgaactcaccctcctttgaaacatagctcgcatacggtgcaggaccgagatggacactacactcaatagctcatgatggtggcaagagctcactttagtgcggctaaagagacaggcgttctaaatcatgctaacatcgtcagttcctatggtattgtcgatgatatctcatct

SEQ ID NO: 31277 - DNA, 394 bp, Glycine max
  Clone ID: LIB3138-056-Q1-N1-G9
gcagaaaaacaagtagttgagaactaagaagaaggaaatggcttcctcaatgatctcctccccagctgttaccaccgtcaaccgtgccggtgccggcatggttgctccattcaccggcctcaaatccatggctggcttccccacgaggaagaccaacaatgacattacctccattgctagcaacggtggaagagtacaatgcatgcaggtgtggccaccaattggcaagaagaagttcgagactctttcctacttgccagacctcgatgatgcccaattggcaaaggaagtcgaataccttctaaggaaaggatggattccttgcttggaattcgagttggagcacggtttcgtgtaccgtgagcacaacaggtcacctggatactatgatgga

SEQ ID NO: 31278 - DNA, 368 bp, Glycine max
  Clone ID: LIB3138-056-Q1-N1-H10
atgatcactatgaagatgaccttttaagtattgctgatcctctcaatcagataaacctggcaaattaccttcttgatttctttgttagcttttctcaatctgacagacagctcttaaatcacatttgcaagagcttgtctcaatctcaacgaaatgccattcaaatggtactgaagagatgagaatttcgtgtcctgtcatcgagtgctgtctcaaagatgggttgataataccagagagagtgaaacaaagaaatggttggaaaccaatatcttacattgttcaggttggggaatctgtctgcagttctgaaaggtattttctttctgctgcagtgttcccccttggatgtctctgattctttttta

SEQ ID NO: 31279 - DNA, 392 bp, Glycine max
  Clone ID: LIB3138-056-Q1-N1-H11
aaattttgataaaccgcgatcacaggttgccgcaccttaaaaccggaaacaaaagcaatcgttacttgttctcaagaatcttcaaactttcttctgttttctctgcactcggttcttcaggaaaagaaaatcactctctgtattgattacagacttcgtgaatcattttcttttcaactttcagttcacttgctgaacactctcctataaatacataggacttcgtgtcagatttgaacttttcctgtctctttctcggttttctttcttattctcatcttctttaaattttaaagctcgtattttgtttctttaaactttctgttggactcatttgaaatacaacatgaagttctatccaggacaaaatgtctctgaaattgttaccattt

SEQ ID NO: 31280 - DNA, 362 bp, Glycine max
  Clone ID: LIB3138-056-Q1-N1-H12
cggctcgagcgccaattgagaaggaaagctctctctcgtattgaatggctgcaaaaagctgatgtgcctaccatagcacagattgaagagttccattcgatgcagaggatgatgaatgctcctgattcaaatgataatattgatttactgttgagcattgatttgttgggtttacaaggagcaggtaaagcttttccaaacaaaattgtttttgatgataagcttgtgttggctaacacacaagaattctttgatggaaattttccagtggattcttggttaccaaattttgtgaatagtctttatcctgtaagtcaattaccttcagaaagctgtcgtgtaaatgtacatgtggtagtgga

SEQ ID NO: 31281 - DNA, 388 bp, Glycine max
  Clone ID: LIB3138-056-Q1-N1-H2
gctttgacttgatcaaattgtagataagatgggcggaggaggcggagcggcgacagcgcaagcagaggcgcagtactcgacggcgaagacgtcggtgtggtgggacatagagaactgtcacgtgccgaaaggatgcgatccccacgccatcgcgcagaacataagctccgccctcgttcgcacgaactactgcgggcccgttttcatctccgcctacggcgacaccactcgcattactggcgtcgtccaacatgccctctccagcaccggcattttccttaaccatgttcccgccggcgtttaagatgcaagtgacaagaaaattcttgttgacatgctgttctgggcagtggacaatcctgcacccgctaattacctattaatttct

SEQ ID NO: 31282 - DNA, 308 bp, Glycine max
  Clone ID: LIB3138-056-Q1-N1-H3
gctagggattggaagtggtgacaaggttgctagaaatgttctgtttgtgtttcctgagcagtcaccggaaagaaacataacatttctagcatgggattggaagtggttacaaggttgctattgacttttgacattaagattatatgaagaaatgcttatatgtttcgaatgagatgttcattctttgacatggaaattttagtttaatctcacatcctttgaagatgttcagagcagtggcatatatcagcacacacagaagattcttatggattgctcttttcactgcaaataatagaaatttttgc

SEQ ID NO: 31283 - DNA, 286 bp, Glycine max
  Clone ID: LIB3138-056-Q1-N1-H5
atcaccttcacctcacttgcacatcacaatacaccgaataccatcaacacaacctttctctcaccaaaacaaacacactatgacccgttcccacaagtccactgaccgtgaccacgctggtctcgccaacggcactgccgtcccggaggacaacctccccaagtacttcggcaaggccggatacgccggcgagtctccgtccaagaccaagaagcatggcggtggcaagagcaactggtgtgctgtcggactctccgagctcgaaaactacgaactacacgccccc

SEQ ID NO: 31284 - DNA, 375 bp, Glycine max
  unsure at all n locations
  Clone ID: LIB3138-056-Q1-N1-H6
cttttgacttgagttacgttgaaaaagaccaccacagagactctagttttgggtggtgggcctgtgaaagcccaattggagggtgctggaatgggtgttgcatctgagaacggtggctgcaactgtggatcaagctgcacctgtgacccatgcaactgcaaagtaggtcaaagatgtattaccttgaagcagagatagcttgtatatatgtatcaacaaataataagaaagtaaaagtgcggttggaactttaaaataaaagagttgctatgtgttttagtggtcttttataaatatgtaatttgaatcatcaatctctgcttataaatgaatactnttggnngtatatgaaataaaaannnttgtggttatttc

SEQ ID NO: 31285 - DNA, 409 bp, Glycine max
  Clone ID: LIB3138-056-Q1-N1-H7
gaagcacgacaagcccaagccatgggacgacgacccaaacatcgaccactggaagatcgagaagttcgacccttcatggaacgacggcggcatgctcgaagtgagctccttctccactctctttcctcagtaccgcgaaaagtacctccaagaagcttggcccatggtcaaatccgctctcaaggaattcggcgttgcttgcgaactcaacctcgttgagggttctatgacagtttcaacaaccagaaagactaaggatccctatattatcatcaaagccagggatcttatcaagcttctatcacgaagtcttcctgctcctcaggcgataaaaatacttgacgatgaaatgcaatgtgacatcattaaaatcaatggcatggttcgcaataaggagcgatttgtaaaa

SEQ ID NO: 31286 - DNA, 299 bp, Glycine max
  Clone ID: LIB3138-056-Q1-N1-H8
gtttgcaaaaagacagagggttaattgtggagtattttggaaggatgtcttacgttgctcataacgttaatcagccccaagagaaagatttgttggagggaaatttttcctttgatattaaatctcgctctagattggaaaaagtttcctctacaaaagcacaatttgttagtggaaaaaccttcaaatatgatataattggtgctggttcacattcttcagaagattttcctgaaaaggaagatcaagaaaaacccaaaaagattgatgccagattgagacaaagaatagatcctcaa

SEQ ID NO: 31287 - DNA, 389 bp, Glycine max
  Clone ID: LIB3138-056-Q1-N1-H9
tcttagcgttctataatacctgcgctttggtatcgacctcggagacatctgcgcggcgaacaagcacacccattcggagccgctcatcgatcgacccgattcgatggactagacacgcaaccctgttgtctcccgcttcttgacgtctcatctacggcgcatataccccacaccaaccccagtcacgtctgtccgaaccttgcgcgcacctaagacgactcaataggttcgtttggtcgcccgtcatgtccggcacgcaagcggagaagggcaatcacacgctcggccagacggcgacgtaccagtccgtcatcatcgcccttgtcgcaggcgcgatactggtcatcgcgctcttctcgatcatctggcgccggcgccggcgcatgcag

SEQ ID NO: 31288 - DNA, 395 bp, Glycine max
  Clone ID: LIB3138-057-Q1-N1-A11
gtactggcccaacaagcccttctgaacaaaccgatccacgcggcccattcgcatttgcacggtagcacgagactcaaggtctatgagtgtgcctgtgcgaccacacacagacgattatttatcaagttagcttagctagggcaaagaaagataaaaacattgaagctggaaacgcatgtgtttgttgggtccaccgtctgcaccggttctttttggtgttttgctatgtgacgacgacgacgacgatgacgatccaacggtgcatgtttgttgacctgtccctagtagtagtagcatgtgtacagctatcgtatgtagaatgtagataggttcactactacacgttgttgtcatgtgatcatagaagctctcttactcggaaaaaataaaattga

SEQ ID NO: 31289 - DNA, 337 bp, Glycine max
  Clone ID: LIB3138-057-Q1-N1-A12
tccacaccgagctcataaacacacaccgatctagaatctatctgacaaacttcggcatcccatcacccacgcataacacctccaaactaccgccaaaatttccttcctgcgtcacttcttcacgcgcgccccctcgcccgccacaatgtccgctacaaagaccaaggtccagtccatcatcgacgagaaccccgtcgccgtcttctcaaagtcttactgcccttactgtcgccaggccaagcagttgctcagcgacagtggcgcaaagttctacgcgattgagttggaccaagttgatgacggctcagctattcagtctactctcggcgaaatgact

SEQ ID NO: 31290 - DNA, 364 bp, Glycine max
  Clone ID: LIB3138-057-Q1-N1-A4
gtgattttgtcattggtgtcaagttgacaaccataaacaatatgtgtgcatatgggctcaatcctggtatttcaggttctcgtcttttgggcaccattcctcagtccatttcacagcaaactgtttggaatcaaatggcaacagtgagaacaccattgaattttgattctagcaagcagagcttttgtcagttttctattgaccttctcggtggaggaatcttagtggacaaaactggagattggatcacacttatacaaaattctccaattagtaacttgttgagagttgctgcttggaagaaaggctgtttaatggtcaagattgtgatgtctgggaatgcagcaatcaaaaggagtgattg

SEQ ID NO: 31291 - DNA, 273 bp, Glycine max
  Clone ID: LIB3138-057-Q1-N1-A5
ccaaggtttggatggtctagccttggcaccatgactcgtcgttggaacctgcaaggggcaccaaacccttgtcgactttaataccaggaacaatgttttgctcaagcagcacgtcaacaatcttcctgccatcagttgtggattggtagagtgtttcctcaaagagaatggtgccaaggtttggatggtctagcctctcgctcagctgcatactacgagcaaggtgcccgtttcgccaaatggcgtactggtgtgagcattcccaacggtccc

SEQ ID NO: 31292 - DNA, 227 bp, Glycine max
  Clone ID: LIB3138-057-Q1-N1-A7
gaaaaacccaaaaagattgatgccagattgagacaaagaatagatcctcaatacaatgaggttcaggctcagatggaaacaaatttgtttaaattgtctcttgatgatgttgaaactcctaaaggttccatgttggatctgaaaatttctcaatctaaaattgcacttcccaagaacacagttggaggaaccattctgcgtaatgatctattggcaaattttttgac

SEQ ID NO: 31293 - DNA, 381 bp, Glycine max
  Clone ID: LIB3138-057-Q1-N1-A8
tgaaattttcacaagaggaatttcttacagcttgggcaactcaggtgcgtcctgcaacaactctgttggctgatgggtgtccatatttgtatgcaatggtgcatgatagttcagtgtctacaataccaggtgattttgtcattggtgtcaagttgacaaccataaacaatatgtgtgcatatgggctcaatcctggtatttcaggttctcgtcttttgggcaccattcctcagtccatttcacagcaaactgtttggaatcaaatggcaacagtgagaacaccattgaattttgattctagcaagcagagcttttgtcagttttctattgaccttctcggtggaagaatcttagtggacaaaactggagaatggatcacac

SEQ ID NO: 31294 - DNA, 357 bp, Glycine max
  unsure at all n locations
  Clone ID: LIB3138-057-Q1-N1-A9
cccaaacagattcactccgttgtcgtcagctacaacaataacagcatgaacaagttggtactcgcgtgtgttctcttaattgctttcacatatggagcgtatggcacatcatccatcaagtttgttaacaactgttctgctggagtgaatgtgtattctacaaccaataaccaggcctctgtctccgtgtgcggtaccatcgctcatggtggaagctgtgttaagtcctacgcctctggagctatcaacttcaaangtggacctgctggcaaaaccttgtttgagatctctcccaacagctggaacaacctcgacttctatgatctcagtgtaattgttggatttgactctactatg

SEQ ID NO: 31295 - DNA, 325 bp, Glycine max
  Clone ID: LIB3138-057-Q1-N1-B1
gtgagggaaaaagaagccacttccaatttcacacacacacagcaacacactgcactgtgtggaaagtaagcatggcaagagtggtggcactccaacagaaccaactatctttctctcccttagcttcctctctttttgacttcagtggaaccagacttcaaactcaacttcagttcaagagaaaactatgccatccaaaagggtctttctacgtctcggcatcgagcaccaagaaaatcctaataatgggaggcaccaggtttattggtgtgtttttatctaggctccttgttaaagagggtcaccaggtgactttattcacaag

SEQ ID NO: 31296 - DNA, 333 bp, Glycine max
  Clone ID: LIB3138-057-Q1-N1-B10
gagatgtcaggttcggccttctgattttcttccctttttgctgcattttttcagcttagcaaaatttatcctacttcctctttgccaccggtgttctttctgttaccaaaacctgaactcctgcatgacttgagttcattttgctggctttttttgcctgttgattgtcatgcttatcatattatattacagatattttcattcattgatgtggagaagagtgggacaattacgttcagacaggtaactatttgcaataatttaccctgtttctgtgctatattgatcagaagtagcaattgatactacaacatttttactattttgtttttt

SEQ ID NO: 31297 - DNA, 303 bp, Glycine max
  Clone ID: LIB3138-057-Q1-N1-B11
gagaaagcaaaaaaaaaaaaaaaaaataaaaaaaaaatacagagaaccgagaccgagattttctcttgtgaggttttgatcactttcattctagttcaacaccgtctcttaattgcaaaaacaagtttttgtgaagtggggtggtggtttaagctttgatccgggggactgatctctagtctcttggaaattgggtctgtgcagatgaagtccactatggctcagaatcagagtaattgggaagctgataaaatgcttgatgtttatatttatgattatttgatgaaaagaaaattacatgct

SEQ ID NO: 31298 - DNA, 335 bp, Glycine max
  Clone ID: LIB3138-057-Q1-N1-B2
cggctcgagcataaattgaagagatttagagagctcaagaaacaaaaggggttcttagattacatagtttttgtgagcgggagtgactaattaatagttgagtatggttgaggggtggaagggggagctgacaaagctcagagagaaagttgttatggcccgaaagagcctcttctccaaaggcaaagaggggtcagaagaagaacaagttgtgaagaaggaggctcacaaggttatgatggctgttcagagagacactcatgaaaccatgtcagaggcaacagtgtgcttgcttatggatagatttgtgccatgctgatgtacgtgcatgtgtg

SEQ ID NO: 31299 - DNA, 368 bp, Glycine max
  Clone ID: LIB3138-057-Q1-N1-B5
gttaaggatgaagaagaaattgatggtgatgtagcgtgttatctggaatcggtttttgatgatgcctttcattggaataacattgagtctgtgctgtcagatgcacgggaagagaaggagggtgtggtggcgtgtgatgtacgtgtcggtgatgaagaaggaggaacaaagagagacatatttttgagactaaactatgatgaggttattactgcttggtctagccaaggttcttctccatggacaacttcaaacccacctaagttcaactctgattatgacttctccttgggtttgagtggtgtaggtggggaagtaagaagcttaagagggcacctagatggtggaagagaagcaagagtgtcaag

SEQ ID NO: 31300 - DNA, 383 bp, Glycine max
  Clone ID: LIB3138-057-Q1-N1-B7
cggctcgagctgatcctcgctagttcacactagccacaaaagcttcaacccagctgatgacttaaaccttcgacgtccaacctacacggagttccaactatcccaacacgcttcctattccctcgtttgagccacaccgtccggtccctctacccatcatgcctcacggcacgggtcttgtggacggcgcaagtttacgatctctgtctagcttccgggcgttcagagatcgagcggtgtcggtgagaggtacctgggtcggcgtctatcgatgaagttggcggggagagcggtcgtcttcggttcttggttacctccgggtaccgccgtcgattcgcaccctcttcccgtgggcgtttcgaagcgagtctgatgggtccctt

SEQ ID NO: 31301 - DNA, 360 bp, Glycine max
  Clone ID: LIB3138-057-Q1-N1-B8
atttcctggacgaaaacgagagaatttataaacctgatctgtgtagtaacatcattttaaatccattctatttgaattggcattttctccaccataattattgtgaaaaaacgtttacaataatgagtcttggtcaatttatttgcgaaaatgtatgtatagttcaaacgaaaaatgcaccacacctaaaatcgggtcaaattctaacagttcaaatggattctgtaggaataagatcggctaacccttatttggcgactcctggagcaacggttcatggccattatggggaaatactttctgaaagagatatattagttacatttatctatgaaaaatcgagatcgggtgatataacac

SEQ ID NO: 31302 - DNA, 333 bp, Glycine max
  Clone ID: LIB3138-057-Q1-N1-B9
cttgtacgagggtattgacttctacacaaccattacccgtgcccgttttgaagagctaaacatggatttattcaggaagtgcatggagcccgtggagaagtgtttgcgggatgccaagatggataagagtaccgtccatgatgttgttcttgttggtggttctactaggattcccaaggttcaacagttgttgcaggacttcttcaacggaaaggaactttgcaagagtattaacccagatgaagctgttgcttatggtgctgcagtgcaagctgcgattctcagtggcgaaggtaatgagaaagtgcaggatcttcttttggtggatgttac

SEQ ID NO: 31303 - DNA, 209 bp, Glycine max
  Clone ID: LIB3138-057-Q1-N1-C1
gtcactcgctttgccaatctttttttctttggcagctgtctctcgctttccgacttttgaaacccgccttattcttaattataaatctctgaaagatgcgtttcacagacgtcttttctgtcagtgtgggggcgccttttggggcagctcacgggggggtcccacgagcacctaaaatttttggcctacccacagacttgctcgatgac

SEQ ID NO: 31304 - DNA, 147 bp, Glycine max
  Clone ID: LIB3138-057-Q1-N1-C10
aaaaaaaaaaattaaaaaaaaaaaaaaaaaaaaaaaaaaaaagggaaaaaaaaaaaaaaaaaaaaaaaaaaaaaaaaaaaaaaaaaaaaaaaaaataaaaaaaaaaaaaaaagaaaataaagaaaaaaaaggacaagcttaaaacaa

SEQ ID NO: 31305 - DNA, 347 bp, Glycine max
  Clone ID: LIB3138-057-Q1-N1-C11
gtttcgtgtaataatctggaaatgcaagaagcttatcttgtcaatctcgtaaatgtgttacgagaattgtatttgcacagtccagaggaagctcgccaattgagaaggaaagctctctctcgtattgaatggctgcaaaaagctgatgtgcctaccatagcacagattgaagagttccattcgatgcagaggatgatgaatgctcctgattcaaatgataatattgatttactgttgagcattgatttgttgggtttacaaggagcaagtaaagcttttccaaacaaaattgtttttgatgataagcttgtgttggctaacacacaagaattctttgatggaaattt

SEQ ID NO: 31306 - DNA, 328 bp, Glycine max
  Clone ID: LIB3138-057-Q1-N1-C12
ccttgatgatgcacaattggcaaaggaagtagaataccttcgtaggaagggatggattccttgcttggaattcgagttggagcacggtttcgtgtaccgtgagcacaacaggtcaccaggatactacgatggacgctactggaccatgtggaagctgcctatgtttggttgcactgatgcttctcaggtgttgaaagagcttcaagaagctaaaactgcataccccaacggcttcatccgtatcatcggattcgacaacgttcgccaagtgcagtgcatcaacttcatcgcctacaagcccccaggcttctaaatgtgaaaaatttgc

SEQ ID NO: 31307 - DNA, 359 bp, Glycine max
  Clone ID: LIB3138-057-Q1-N1-C2
cttttggctacagaaagtagtttctttagtcgggtttctttcaaaaaatggtgcagagtctctgtttgatggcttctcatggttaccctcctggccttgtcttgcatccacaagtactgggcttgccctgcagtaccatgaagacagggctaccaaacattctttccttctccagtagcaaaagcagacctgatcagatatcagtctccttgtcttgatccaagtccatgtgaggagtcaacgaaatctcaaaatgaatggtttgattataagaagtttgtcaatgttgacttctcagttgaaaagcccatgcttattaatgaccaagctaactgctcaaatgcagttctttttggctt

SEQ ID NO: 31308 - DNA, 398 bp, Glycine max
  Clone ID: LIB3138-057-Q1-N1-C3
cttaaatttgttgatagttcaatttataggtgagtgcacttgtagttggtatatgtatgctcacctggttggcttgtctgtttctgttgctgtacatcatgtatacatttttttttccaactttttatcacctccttttaagtttgtggcttctctatttcaaaaaacaaagggtgatagaaagacaaaaataatggctggaaattttgaattacatgcgagtgttttgaattatgtagccttcaatggtaaatttagcgatgctaatgaaatcacttaaaataatggccggaaatactataccatcttgggaatattaactgctaagtgggcgtgcacatttatcgcagctcgctaaaatcacgagcagcgctgccatttggctaatctgtatgtgt

SEQ ID NO: 31309 - DNA, 352 bp, Glycine max
  Clone ID: LIB3138-057-Q1-N1-C4
gaaacatatgatttcttttgggctgattttgctgattggtacattgaggctagtaaagagcgtctttaccagtctggagctggaggcaagtctgttgcttcagtggcacaggctgttctattatatacttttgagaacatactcaaagtgctgcatcctttcatgccatttgtaactgaggagctgtggcaggcactcccttatcgaaagcatgctcttattgtatcgccttggccagagactcaactttcaaggaacacctgctctgttaaaaagtttgaaaatttccaggctttggttagagccatcaggaatgctcgggcagaatattctgttgagcctgcaaagcgga

SEQ ID NO: 31310 - DNA, 331 bp, Glycine max
  Clone ID: LIB3138-057-Q1-N1-C5
cttctttccacttcaaacttgtgacccagaaaaaagaccctttccatgctcctccttttcttcctcctccactggctgcacctcgctgccgtgtctctgcctagcgtgaaattggcctcatttcccatctgggtcctgtgaattgcgattggaaccgcgttttccccgcttctgggcttggctcagaagtagtcagaatgatgtctgtcacaggcaaaagcattgattttgctggcaaaaacttggtctcttgtggctgctcttccaatgcttcttcgtttgataggtacactgtgaggaactatgccaagctgaatagtaataattctaa

SEQ ID NO: 31311 - DNA, 338 bp, Glycine max
  Clone ID: LIB3138-057-Q1-N1-C7
aaaaaaaaaaaaaaaaaaaaaaaaaaaaaaaaaaaaaaaaaagggaaaaaaaaaaaaaaaaaaaaaaaaaaaaaaaaaaaaaaaaaaaaaaaaaaaaaaaaaaaaaaaaaaaaaaaaaaaaaaaaagaaaaaaaaaaaaaaaaaaaaaaaaaaaaaaaaaaaaaaaaaaaaaaaaaaaaaaaaatggggggggggccccacaaaataagtactcgccccccggaaaaaaaaatcgggacggggtcctggggggctccaaattttataaaaaagggggcttaataaacccgggaaaaaaagggggtaaggcttttttcggggaaaaaaggtttctgaaa

SEQ ID NO: 31312 - DNA, 402 bp, Glycine max
  Clone ID: LIB3138-057-Q1-N1-C8
ctcgagccgaatcggctcgagcggctcgagcggctcgagtcaattttgaggcttttccccacaagctggtgcagtttggagagattcaggaaaaagttgtattgaaattttcacaagaggaatttcttacagcttggtcaactcaggtgcgtcctgcaacaactctgttggctgatgggtgtccatatttgtatgcaatggtgcatgatagttcagtgtctacaataccaggtgattttgtcattggtgtcaagttgacaaccataaacaatatgtgtgcatatgggctcaatcctggtatttcaggttctcgtcttttgggcaccattcctcagtccatttcacagcaaactgtttggaatcaaatggcaacagtgagaacaccattttgatttgattcta

SEQ ID NO: 31313 - DNA, 378 bp, Glycine max
  Clone ID: LIB3138-057-Q1-N1-C9
cgcccgattcaatcgacttcaagccatcaacgacaatcaaccaaaccaagagactctccataaaccgtcaaaatggttctcgcagttgaccttctcaacccttccccggccgctgaggcccgcaagcacaagctcaagaccctcgtgcccgctccccgctccttcttcatggacgtcaagtgccccggatgcttcaccatcaccaccgtcttctcgcacgccaacacagtcgtcgtctgccagggctgctcgcaggtcctgtgccagcccactggtggcaaggcgcgattgaccgagggctgctctttccgaaggaagtaaacgtttcgtcggagtgatgacagctgggattgatgggttacgatgacgactatcatg

SEQ ID NO: 31314 - DNA, 377 bp, Glycine max
  Clone ID: LIB3138-057-Q1-N1-D1
ctccaagcaaggtccacaaagctgttgatgcatgcaagaatgttcttagaggtctgcatagcaacaaaattactgagagggagttggacagggctaaacggacccttcttatgagacatgaagctgaaattaagtcaaatgcctactggttaggattattagctcatttacaagcttcttctgttccaaggaaggacatatcatgtatcaaggacctaacatttctatatgaagttgctactattgaggatatatatcttgcatatgaacagttgaaagtggatgagaattctctatattcatgcattggaattgctggtgctcagactgcacaagatatagcagctcctttagaagaggaagtagcaaatgatgtt

SEQ ID NO: 31315 - DNA, 321 bp, Glycine max
  Clone ID: LIB3138-057-Q1-N1-D10
cgatccttgaaacaccttgcggatgaaatgagtggtccattatctccaatgtcacttcctgcaccaaagcaactcaaattcactcctggagttgttaattggtcaggcagggagtcagctacatttttagatgaagcacgaaaggtatgtctgctagattctatttctctgatgatgataatgtttgttttccaattaagttttaatgggtttataaccagatgatacccattggagagttgtcaacgaagaggctagcagctataggacaagccggaaaactttggaagtggaagaaaagtcatcatcaatggctgctac

SEQ ID NO: 31316 - DNA, 332 bp, Glycine max
  Clone ID: LIB3138-057-Q1-N1-D2
aagaaaggctgtttaatggtcaagattgtgatgtctgggaatgcagcagtcaaaaggagtgattgggcctcattggtacaagtgtttttaacaaacagcaacagtacagagcattttgatgcatgtaagtggacaaaatcagaaccacattcctgggaattgatcttcccaatagaggtatgtggtcctaataatggttttgaaatgtggagttctgagtgggcaaatcaaacttcatggcatttgagtttccttattgacaatcccaaacagtctacagtttttgatattctcttgggaatctctcaagattttgaaattgctggtaatac

SEQ ID NO: 31317 - DNA, 346 bp, Glycine max
  Clone ID: LIB3138-057-Q1-N1-D4
aagtaagtaaatccacattcacaaacaaaacactctattactttttgtttcctcacttcccttgttctcacaaagtcacaatggaccccctctctctcttctgcaccggagccctcctcgccggcggcctctactggttcgtgtgcgttctgggccccgccgagcagaagggcaaacgcgccaccgatctttccggcggctccatctccgccgagaaagtccaagacaactacaaacagtactggtccttcttccgccgcccaaaagagatcgagaccgccgacaaagtccccgacttcgtcgacaccttctacaatctagtcacagacatctacgagtgggggtg

SEQ ID NO: 31318 - DNA, 407 bp, Glycine max
  Clone ID: LIB3138-057-Q1-N1-D7
aaaaaataaatataacactaagatccttataagtttccctcgatcggcgaaaatatgtctggtttccttagcaacctctttggtttcaacggaaacaacaatggcactgaggatgcctttaaaaactcaggaggaggaggacaagacttcaaggacgcggagttcaacactggtgtgcaagttgccaaggggagacacgctccttgcagtggtaacagtgggactaaaagtgcttttaacaactctggttcgggaaaacaggatttcggaaatgctatgtttaacactggtgctaggtactactaatttatataagaccttcctcttggaagggctgggcttccaaaacatacatattaatcataggtatggggaataaaaatcacaagtgctcatttgtgggtcat

SEQ ID NO: 31319 - DNA, 399 bp, Glycine max
  Clone ID: LIB3138-057-Q1-N1-D9
gggcgcgccagttctgatatttacaccatctgctctcaagactgtgaattgtggaatcctgcttgcacaaaagcaatgactatgtcatttaatccaaacccgtgttctgatgcatggagtttggaatttctgaagcgtactggatttcattgcgatatcatttgtgtcactggatggactgccaccccaatgcaggatgttcaggttacaattgattggtttatttcctctcaggaatgtgttcccaggacctattgtgttttaaatccacaaaatccttttgtgttaaataggtggatgggaaaattgactttcccccagggcacttcccgaagtgttaagagaatgcctctttctataaggggaggagctggtgcaaagaatgctattctcatgaat

SEQ ID NO: 31320 - DNA, 366 bp, Glycine max
  Clone ID: LIB3138-057-Q1-N1-E1
agtttcgcaagtcctgattgcaacatagttggtgcaatgcttttggttgatacttatcataccaatcctgaaaatgcagttcgtagtatttttgttgcgcctttcagaggcggaaggcccattcgggtggttacatttccgaataccattgtgcagattgaaccagacatgaattcaaggtttcagcttttgagtaccactaccaatggtgattttgttcaagggaaagatctcgcaatggttaaagttaatgtaacatgtgctgctgttggcttgacatcaagttacactccaacttcattgttggaatcttgtttgcaaaaagacagagggttaattgtggagtattttggaaggatgtcttac

SEQ ID NO: 31321 - DNA, 281 bp, Glycine max
  Clone ID: LIB3138-057-Q1-N1-E10
cttttgtgttaaataggtggatgggaaaattgactttcccccagggcacttcccgaagtgttaagagaatgcctctttctatagggggaggagctggtgcaaagaatgctattctcatgaatatgccaaatgctgttctttcaatgtggagatattttgttggagatctcgtctttgaagtttctaagatgacttctccctacattaaatgtacagtctctttcttcatagcatttggaaatttggctgatgataccatcaattttgaagcttttccccac

SEQ ID NO: 31322 - DNA, 346 bp, Glycine max
  Clone ID: LIB3138-057-Q1-N1-E12
gtggctgtgaagtggttgttaaaagtctcaccttttggggtgctttggtgatttgtttttgttgcattggactggaatctgaagatgggttttcattgttaggtatttgagggtttctgagcattgatttgatttggaagagaaagatgaaggatttctgtgggacacctggcactgttcttgggcttgttcttaagatttcacagttcatttttgctgctgggtctattgcttccatggctaccacaaccagtttctttaatttgactgccttttgttacttgatagcttcaatgggtttacaaatcatttgggagtttgtgcttgctttaatggatttgtatgc

SEQ ID NO: 31323 - DNA, 341 bp, Glycine max
  unsure at all n locations
  Clone ID: LIB3138-057-Q1-N1-E2
cccataatgagtggttgcaaactgttcagtcagagcctgatgtgatctcaatgtcgttcattccaattacgtctctattgaatggagtgccagggagtggattcttgagccatgccataaacctttatttacgatataaaccaccgattgaagagctccaccaattcttggaattccagctgccaaggcagtgggcacctgtattcagtgaccttcctcttggtccacaacggaagcaaaggagttctgcatctttacagtttagcttcatgggcccaaagctttatgttaacaccacacaagttgatgtangtaagaggccagtgactggtctccgtctt

SEQ ID NO: 31324 - DNA, 393 bp, Glycine max
  Clone ID: LIB3138-057-Q1-N1-E4
tcaccgagcaccgcaaccctgacactttaaagaaacttaatgaagccgaaaaggcaaagaaagaactagaacaacaggaatattttgatccaaagttggctgatgaggagagagaaaaaggaaacgaattcttcaagcagcagaagtatcctgaggctgtgaagcattacacagagtctatacgaagaaatccaaaagatcctagggcttatagtaacagagcagcatgctacactaaactgggggcaatgcctgaaggtttaaaggatgcagagaagtgtattgaacttgatccaaccttcgtaaagggttataccaagaaaggtgcagtccagtatttcatgaaggaatacgagaagtctttggagacatatagggaggggttgaaatatg

SEQ ID NO: 31325 - DNA, 339 bp, Glycine max
  Clone ID: LIB3138-057-Q1-N1-E5
cacgcataccctcttttgtggtttgaggaattgggattctaaaacctgccagctgggttgtatttaaaattaaggcttaatttttcttttaagttcttattttttttttaattttggtcctgtaaatttttgttagtccttttaagcttgtattttttttttttcaattttaatctcttaaagcatgaatttacaaacactagaaatgaaaaaatagaaatttaaagggattaaaattggaaaaaaaaaaaaaaaaataaaaaaaaaataaaaaaaaattaaaaaaaaaatataaaatattttaatatataaaataaatatttaaaaataatataaatt

SEQ ID NO: 31326 - DNA, 380 bp, Glycine max
  Clone ID: LIB3138-057-Q1-N1-E6
ttccctggttcgtttcactctcacaatggactccctctctctcttctgcaccggagcccttctcgccggcggcctctactggttcgtctgtgttctgggccccgccgagcagaagggcaaacgcgccaccgatctatccggcggctccatctccgccgagaaagtccaagacaactacaagcagtactggtccttcttccgccgccccaaggagatcgagaccgccgacaaagttcccgacttcgtcgacaccttctacaatctagtcaccgacatctacgagtggggctggggccagtccttccacttctccccctccatccccggtaagtcccaccgcgaggccacgcgcctccacgaggagatggccgtcgatctca

SEQ ID NO: 31327 - DNA, 390 bp, Glycine max
  Clone ID: LIB3138-057-Q1-N1-E7
ttccattcgatgcagaggatgatgaatgctcctgattcaaatgataatattgatttactgttgagcattgatttgttgggtttacaaggagcaggtaaagcttttccaaacaaaattgtttttgatgataagcttgtgttggctaacacacaagaattctttgatggaaattttccagtggattcttggttaccaatttttgtgaattgtctttatcctgtaagtcaattaccttcagaagctgtcgttgtaaatgttacatgtggtagtggacgtggtggtttacccaccactgcttggattagttctgcagttaacaatcgctcctcagatatcaacaaaaagattcgcacagcacttgggaaaggtaagaaaattgtttttcttact

SEQ ID NO: 31328 - DNA, 375 bp, Glycine max
  Clone ID: LIB3138-057-Q1-N1-E8
gaagaagggtgagctaaagtcaattttccttcctttcctttccactagtcacataatcccgctagtggacatggccagactcttcgccttgcacgacgtcgacgtcaccatcatcaccaccgcacataacgccaccgttttccaaaagtccatcgatttagatgcgagtcgcggtcgccccatcagaacgcacgttgtcaacttccccgccgcacaagtgggtctccccgttgggatcgaagccttcaacgtcgatacgcctcgggaaatgacccccagaatctacatgggcctatcccttctcaacaagtcttcgaaaaactcttccatgacttgcaaaccgatttcatcgtcaccgacatgttccacccttgg

SEQ ID NO: 31329 - DNA, 372 bp, Glycine max
  Clone ID: LIB3138-057-Q1-N1-E9
gtttcttctcttcactctgcccgctgcatcaatggcttcagagaagaaactttcgaacccaatgagggagataaaagtgcagaagctcgtcctcaatatctctgttggcgagagtggagatcgtctcaccagagcctccaaggtgttggaacaacttagtggccaaaccccagtgttttccaaagcaaggtacactgttcgttcctttgggattagaagaaatgagaagattgcatgctatgtcactgtcagaggtgacaaggcaatgcaacttttggagagtggtttgaaggtgaaggaatatgaacttctcagaaggaacttcagtgatactggttgcttcggctttggtattcaggagcatattgattt

SEQ ID NO: 31330 - DNA, 325 bp, Glycine max
  Clone ID: LIB3138-057-Q1-N1-F1
caatcctggaatttcaggttctcgttttttgggcaccattcctcagtggatttcacagcaaactgtttggaatcaaatggcaacagtgagaacaccattgaattttgattctagcaagcagagcttttgtcagttttctattgaccttctcggtggaggaatcttagtggacaaaactggagattggatcacacttatacaaaattctccaattagtaacttgttgagagttgctgcttggaagaaaggctgtttaatggtcaagattgtgatgtctgggaatgcagcagtcaaaaggagtgattgggcctcattggtacaagtg

SEQ ID NO: 31331 - DNA, 388 bp, Glycine max
  Clone ID: LIB3138-057-Q1-N1-F10
ctcgagccgcttttccaaacaaaattgtttttgatgataagcttgtgttggctaacacacaagaattctttgatggaaattttccagtggattcttggttaccaatttttgtgaattgtctttatcctgtaagtcaattaccttcagaagctgtcgttgtaaatgttacatgtggtagtggacgtggtggtttacccaccactgcttggattagttctgcagttaacaatcgctcctcagatatcaacaaaaagattcgcacagcacttgggaaaggtaagaaaattgtttttcttactagagttgatccttttccagtagctttactggctgttctttttggcgttaagaatgaaattctgagttctaacgccactaatcctatgct

SEQ ID NO: 31332 - DNA, 378 bp, Glycine max
  Clone ID: LIB3138-057-Q1-N1-F11
ggtggaggaatcttagtggacaaaactggagattggatcacacttatacaaaattctccaattagtaacttgttgagagttgctgcttggaagaaaggctgtttaatggtcaagattgtgatgtctgggaatgcagcagtcaaaaggagtgattgggcctcattggtacaagtgtttttaacaaacagcaacagtacagagcattttgatgcatgtaagtggacaaaatcagaaccacattcctgggaattgatcttcccaatagaagtatgtggtcctaataatggttttgaaatgtggagttctgagtgggcaaatcaaacttcatggcatttgagtttccttattgacaatcccaaacagtctacagtttttgat

SEQ ID NO: 31333 - DNA, 188 bp, Glycine max
  Clone ID: LIB3138-057-Q1-N1-F5
aaatatttcttgctaacaatatttttataagggttactggttagcaacccagtgtgtgatttctcagttcaacaactcttagcaacatgcacaattcttccccgccaggggggtcaaggccttaacaccaccccgggccaacgggttcggcaccacattgttatacatattcttcggcttcttgggct

SEQ ID NO: 31334 - DNA, 337 bp, Glycine max
  Clone ID: LIB3138-057-Q1-N1-F6
cgcaagggcagcaacgcctggcgtgactctcgccgccgcgagtctatcgctaggcgtgcttccatgcctctgggcggtatgcgtgttatcaccaccggtggtgtgactgctgggctcgatgccagcctctacttggtgggttctttggcttcccacgactcggccctggaggtcgctcgtgctatgcagtattcttgggtcaagggtgttacggtcgatgcgatcgatgtttgagctacggctcccgcgcgacaagcgaaggcgtttacgatgaaagggttgaacagtgatcggatcggttatctgaaacatgtcgggaatcttaaggatttaccac

SEQ ID NO: 31335 - DNA, 375 bp, Glycine max
  Clone ID: LIB3138-057-Q1-N1-F7
caccacagtagggtgttcgcttgttcacaagaatgtgtggttctacagtaacaaggctcttgtattttgaacaaattcagaaaatctgcagtgttttaagaataattgctgaaatgtgtcaccgtttaagtcatactattgccttgtgcttgagccttatggtcgtgtgtgttgaatgtatatgcttttatctgcctttatgacactttcatgtgaaagtacgatataataactgctcagctgagtagtgttgttggtattttggggtctgatgtatcataatgcttgacttgactgtctatcgtggctttcatgctgcgagaaataataaattcaagtaactgtttgtccttgtaagtgtagttcttaaggatg

SEQ ID NO: 31336 - DNA, 341 bp, Glycine max
  Clone ID: LIB3138-057-Q1-N1-F9
gtaaattccaggtaattgtccagctccatgacctctccaacacggggatgaaactcattgtgcagcgaaacaactagcttccataatactgaccaaaataaagaatctttgatttataacagaaaggcaactgcagaggtatattgcatgcatagaaatccatgatgtatatctgtgaagattcggattgcacaacaattctgagacaagtagcgccagaaaatacttttgacaaaatagatgttggggcaaatcagctcaagcatgatattggttccttatatattaaaacagcaccagcagccaacccttgaccaagtgaagtaacttcaatatttggc

SEQ ID NO: 31337 - DNA, 269 bp, Glycine max
  Clone ID: LIB3138-057-Q1-N1-G1
ctgatttattttctaattgttgaatcatggcacctaaaatctatctcacgtggcgcaactcgctgtattggacgctacaccctgtttgcgctgtacaacaagcactgtgagtaccagattgcaggtttagtactgacagaggagaaacgccagtgctgacccgacgctttgatcagagggcggagtcgaattggtggcttggactactacaaaatcctgtaatatgcagcactatacgcagatgcagtaatgtacactgcagatgcatc

SEQ ID NO: 31338 - DNA, 340 bp, Glycine max
  Clone ID: LIB3138-057-Q1-N1-G10
ctcgagccgattcggctcgaggttcagggccaattaacctctctcagtttcactagtttggctgtaatttatggggctgggcttgttaccagcctttctccctgtacacttagtgtcttaccactgacccttggttacattggggcatttggctctggcaaaagcagagcacaggttgtaggagattccattgcattctccttaggccttgcaaccacgttagcactgttgggtgtaggagcttcatttgcaggaaaggcttatggacagattggccaaagattacctttggcagcttctggtttggctataattattggtctgaatcttcttgagatca

SEQ ID NO: 31339 - DNA, 356 bp, Glycine max
  Clone ID: LIB3138-057-Q1-N1-G11
gtcctgtatgtgatgagtcaactgctctgaagtttcctgagactaccttaccatatatgcaaccatcggattcaaatttgtggccattgcctcagatggcaatgtctgctattccatcttttccggagaacaatgcggctagtacagtcatgcctctagatgatatttttcgtcatagtggtgaggatcatcgctatattcatgaggctgaagtaatattggaagcaccaaaggaccttaactcttcctttgtttcacctgtgataccgcaacccttcactagtgtgcccatgaatgaaaatgcgacacatgcacctcacggcattactattcctggatttatgaacagtgattac

SEQ ID NO: 31340 - DNA, 327 bp, Glycine max
  Clone ID: LIB3138-057-Q1-N1-G3
actgcttattctttgttctccatctaacccaacgggatctgtctaccccaaagaattacttgaagagatagcccgaattgttgcaaagcaccccaggcttctggttctctctgatgaaatttacgaacacataatttatgcaccagcaactcacacgagctttgcatctttaccaggaatgtgggacagaactcttactgtgaatggattttctaaggcctttgcaatgactggttggcggcttggatatattgctggtccaaaacattttgttgcagcatgtggaaagatccaaagtcagtttacttcaggggccagtagtatagc

SEQ ID NO: 31341 - DNA, 333 bp, Glycine max
  Clone ID: LIB3138-057-Q1-N1-G7
gtgaatcccttatcattggcttcccaacgacatttctcaaaatgggttgataaaccagaatttatttttactcttgtatataaaatcacaagggattatgttgattctatggatgaattgttgcagccattggttgatgaagcaaagttgcttggttacagttgtagagaagaatggatctcagcaatggtaacctctttaaccacatacttggcaaaagaaattttccctagttacattagtcaactagatgaagagagtgttataggaattcagtcatctgctagaatatcatggctacatctcattgatttgacgatagcttttgacaaa

SEQ ID NO: 31342 - DNA, 274 bp, Glycine max
  Clone ID: LIB3138-057-Q1-N1-G8
gtaccactccaccaagagtggtgatgagctgacaagcctcaaggattatgtgaccaggatgaaggaaggtcagagtgacatctactacatcaccggtgaaagcaagaaggctgttgagaactccccattcttggagaagttgaagaagaaagggtatgaggttcttttcatggttgatgccattgatgaatatgctgttggccagctcaaggaatttgagggcaagaagcttgtctctgccacccaagagggtctcaaacttgacgagagtgaa

SEQ ID NO: 31343 - DNA, 305 bp, Glycine max
  Clone ID: LIB3138-057-Q1-N1-G9
cactcctcgaaacaaatctacttttgctattccacttctctcatcacccctttcatctttgatatgaatttcttagctctatcaaacaaaggaagaaaaaaacagccacaactgagattactggagatggtgatcacagtttttctcctcgtgttagccattccttcacctcttaaaacagcagaatcactaaatttcaacataacaaacttcgcaaactccgagagtgcaaaaaacatgttatacgtgggtgacggcgctgtgaacaagaacgggtccatagagctcaacatagtggactatga

SEQ ID NO: 31344 - DNA, 201 bp, Glycine max
  Clone ID: LIB3138-057-Q1-N1-H7
cttctttcattattattattcataccctcctagttatgtttttttcacagtctttctacgatttgtttgagaaccctgcaatattgggtttgtgctcagttattggaatgttttttagtcctctgggggtaacatttttcttcggggtcatcgttggatggttggggaaaccgaaatgggcgaggttggggaaagaaaaat

SEQ ID NO: 31345 - DNA, 262 bp, Glycine max
  Clone ID: LIB3138-057-Q1-N1-H8
aaaaaaaaaaataaaaaaaaaaaaaaaaaaaaaaaaaaaaaaggaaaaaaaaaaaaaaaaaaaaaaaaaaaaaaaaaaaaaaaaaaaaaaaaaaaaaaaaaaaaaaaaaaaaaaaagggggcggcccccaattagggacctcgtcaccccggaatttaattcgggcccggtccttgggggggtccaatttttccttatagggggccgtttaaaacttgggggaaataagggcaatagttgttccttgggaaaaattgttttc

SEQ ID NO: 31346 - DNA, 227 bp, Glycine max
  Clone ID: LIB3138-057-Q1-N1-H9
gaaaaaaaaaaataaaagagagaaaagaaaaaaattagggaagggactaaataactaatagaaaactaaaaaaaaaaaattattataaaatataaaaggatctaagatataaaaaatagggggcgccccatgttaggtgcctgagagacacggtattaaatactggaccggggcctgcggggtttacgttttaccttatagaggaggagtttaaggttggggacatt

SEQ ID NO: 31347 - DNA, 413 bp, Glycine max
  Clone ID: LIB3138-065-Q1-N1-A11
ggaaattctgtcttctagtgcaagtgatttcagagctgcaatggtgagtaaaaatagcaagcctcaagctactgcaatgcatgtgggagctatagaaattatcattgatagtttcgcaagtcctgattgcaacatagttggtgcaatgcttttggttgatacttatcataccaatcctgaaaatgcagttcgtagtatttttgttgcgcctttcagaggcggaaggcccattcgggtggttacatttccgaataccattgtgcagattgaaccagacatgaattcaaggtttcagcttttgagtaccactaccaatggtgattttgttcaaaggaaagatctcgcaatggttaaagttaatgtagcatgtgctgcttgtggcttgacatcaaattacactccaactccatttt

SEQ ID NO: 31348 - DNA, 403 bp, Glycine max
  Clone ID: LIB3138-065-Q1-N1-A12
ctcattagatatagctatgaaaaattactgcgccaggctaaagctccaagtatgtttttacaatccttcaaaaattttgtttctttgtgtgtgtatggtgatgataacttaattagtgttcatgaatatgtcaagccttactttagtggttctaaattgaaaagctttctagctagtcataacatcaccattactgatggtattgacaaaactagtgcaactttgcaatttagaaagttagcagattgtgattttctcaagagaaactttaagcagatgtctaatgttttgtgggtggctcctgaggacaaagcgagtttatggtcacaacttcattatgtttcgtgtaataatctggaaatgcaagaagcttatcttgtcaatctcgtaaatgtgttacgag

SEQ ID NO: 31349 - DNA, 407 bp, Glycine max
  Clone ID: LIB3138-065-Q1-N1-A2
aacacacaagaattctttgatggaaattttccagtggattcttggttaccaatttttgtgaattgtctttatcctgtaagtcaattaccttcaaaagccggcggtggaaaaggtaccttgtgtaaggggccgtggtggttaaccaacaattgttggaattagtcttgcagttaccattggttcttaaatattaaacaaaaagattcgcacagcacttgggaaaggtaagaaaattgtttttcttactagagttgatccttttccagtagctttactggctgttctttttggcgttaagaatgaaattctgagttctaacgccactaatcctatgctgacgcgacttcttgagaactgtaagagtctcaaatatctggttgatgagtgtccttttgcatttgtgaact

SEQ ID NO: 31350 - DNA, 406 bp, Glycine max
  Clone ID: LIB3138-065-Q1-N1-A3
cgccaactaacctcacagaccgtcaacatgggtaaacgcggactcggaaagcaccagaagcgcctcagcgcgccatcgcactggctcttggacaagctgtccggtgcttatgcccctaaagcatcgcccggtcctcacaagctccgcgactccctgcctctcatcatcttcctccgcaaccgcttgaagtatgccctcaacgcccgtgaggtcaactccatcctcatgcagcgcctcgtcaaggtcgatgccaaggtccgcaccgacagcaccttccccactggcctcatggacgtcatctccatcgagaagaccggcgagaactttcgtctgatctacgacaccaagggacgctttaccgtccaccgcatcaccgatgaggaggcacaatacaagcttggaaaag

SEQ ID NO: 31351 - DNA, 392 bp, Glycine max
  unsure at all n locations
  Clone ID: LIB3138-065-Q1-N1-A4
gttgtattgaaattttcacaagaggaatttcttacagcttggtcaactcaggtgcgtcctgcaacaactctgttggctgatgggtgtccatatttgtatgcaatggtgcatgatagttcagtgtctacaataccaggtgattttgtcattggtgtcaagttgacaaccataaacaatatgtgtgcatatgggctcaatcctggtatttcaggttctcgtcttttgggcaccattcctcagtccatttcacagcaaactgtttggaatcaaatggcaacagtgagaacaccattgaattntgattctagcangcagagcttttgtcagttttctatttgaccttctcgtggaggaatcttagtggacaaaactggagatnggatcacacttat

SEQ ID NO: 31352 - DNA, 325 bp, Glycine max
  Clone ID: LIB3138-065-Q1-N1-A5
tgaaattttcacaagaggaatttcttacagcttggtcaactgaggtgcgtcctgcaacaactctgttggctgatgggtgtccatatttgtatgcaatggtgcatgatagttcagtgtctacaataccaggtgattttgtcattggtgtcaagttgacaaccataaacaatatgtgtgcatatgggctcaatcctggtatttcaggttctcgtcttttgggcaccattcctcagtccatttcacagcaaactgtttggaatcaaatggcaacagtgagaacaccattgaattttgattctaacaagcaaagcttttgtcagttttc

SEQ ID NO: 31353 - DNA, 217 bp, Glycine max
  Clone ID: LIB3138-065-Q1-N1-A6
tggcaagttagaggttcaatacttccatgaccatgctaccttaacaacagctgttgcactgaagcaatcccctgtcattgatgtttctgccactgttggtaccccaaccattgctttgggtgctgaggcaggctatgacacttcatctggtggttttacaaaatacactgctggaattagtgtcacgagacctgattcttctgcttcagtaatcctt

SEQ ID NO: 31354 - DNA, 278 bp, Glycine max
  Clone ID: LIB3138-065-Q1-N1-A7
ggcattgaatgtcccaaggatgagaaacttcctcgtcgcaaaatttttgacaaacctaagacgcgctgcttcactattctccctatggagtttaatcttgtggtccgtcaaaagtttttaaattttgtgaggttcattatgaagaaaagggacaaacttagttgtcaagttggaatcaacccatactccatggaatggactggtttggccaatagattactgagtaagggcaatgatattctgtgttgcgattatgctagttttgatggtttgattac

SEQ ID NO: 31355 - DNA, 398 bp, Glycine max
  unsure at all n locations
  Clone ID: LIB3138-065-Q1-N1-A8
ctcgagccgaatcggctcgaggtgttacgagaattgtatttgcacagtccagaggaagctcgccaattgagaaggaaagttctctctcgtattgaatggctgcaaaaagctgatgtgcctaccatagcacagattgaagagttccattcgatgcagaggatgatgaatgctcctgattcaaatgataatattgatttactgttgagcattgatttgttgggtttacaaggagcaggtaaagcttttcaaacaaaattgttttgatgataagcttgtgttgctaacacacaaaaattctttgaggaaaatttccagtggattcttgttaccaattttgtgaattgtcttattctgtaagtcaattaccttcagaagctgtcngtgtaaatgttacatgt

SEQ ID NO: 31356 - DNA, 198 bp, Glycine max
  Clone ID: LIB3138-065-Q1-N1-A9
gtaaacttgttcttaggagcatattgatttatttctagttaatgttatcttctagtgagcaattatctttcctgtgaagtggagtacaatttacatttctgaatagaggaaataccttgtttgtcctcttattcctgtgattacaatgttttatttgcaaatatccattcagatactttcatgttgtcacaatagttc

SEQ ID NO: 31357 - DNA, 410 bp, Glycine max
  Clone ID: LIB3138-065-Q1-N1-B1
agaaaaggctgatatatacagctatggaattgtagtccttgagattataagtggtcaaaagagtattgattccaaggtcattgttgttgatgatggtgaggatgaataccttcttcgacaagcttggaagttatatgtgagaggcatgcacttggagttagtggacaaaagcttagaccctaatagttatgatgcagaagaagtgaagaaaatcataggcattgctttgatgtgcactcaatcatcagctgcaatgaggccatccatgtctgaagtagtagtcctactcagtggcaatcacttacttgagcatatgagaccttctatgcctctctttattcagttgacgaatttaaggccccacagagatatctctgcttcaactggttcctctacgactaatgctacta

SEQ ID NO: 31358 - DNA, 403 bp, Glycine max
  Clone ID: LIB3138-065-Q1-N1-B11
ctaaaccgtccaactttaaccagaagatttctccctgaaccaggaagcaaagaatatgaggagctttcaaccaattatcaaaaggcttacctgagaacaattacaagaaagattgaggcccttgtggacctttcagtgatagagatattgtcaagacatgcttctgatgagatctaccttgggaagagggacagtgacgattggactgatgaccaaaaggcaattcaagcctttgaaaagtttggaaccaagctgaaggaaattgaggccaaaatcaattcgaggaacaaagattcaagccttagaaaccgtaatggaccggttcagatgccttatactgtgcttcttcctaccagtgaagaaggccttactttcagaagaattcccaacagcatctctatct

SEQ ID NO: 31359 - DNA, 412 bp, Glycine max
  Clone ID: LIB3138-065-Q1-N1-B12
caggtgatggtgtcaacgatgctcctgcattaaagaaagcagacattggaattgctgttgctgacgctacagatgctgctagaagtgcttcggacattgtcctcactgaacctggtctgagtgtcattattagtgcagtgctcaccagcagggcaattttccaaaggatgaagaattatactatctatgctgtgtcaatcaccattcgtatagtgtttggtttcatgtttattgcattgatttggaaatttgattttgcacccttcatggtgttgattattgccatactaaacgatggtaccatcatgacaatatccaaggatcgagtgaaaccatctccaatgccagacagctggaagctgagggagatatttgccactggtgttgtgctaggagcttacatggcactaat

SEQ ID NO: 31360 - DNA, 397 bp, Glycine max
  unsure at all n locations
  Clone ID: LIB3138-065-Q1-N1-B2
gagaacatgtgacacatatatctgcagctccttcaacaacaaagatattgccagaggactatgttcagagagtgaagcatgttcatgaatctggtggttatgggtctagagggtatgcatatgactggaagagagaggaagcaaataaaaaccttctgcgaacccatacaactgctgtttcctccaggatgctttaccaattagcacagaaaccatttgcccccaaaaaatatttctctatagatcgtgtattcagaaatgaagcagttgatcggacacatcttgctgagttccaccaaatagaaggccttgtatgtgatcgaggactcactctctgtgacttaatangaatcctacatgatttcttctcacgcttangcatgaccaagctgaagtt

SEQ ID NO: 31361 - DNA, 138 bp, Glycine max
  unsure at all n locations
  Clone ID: LIB3138-065-Q1-N1-B3
tgctaaatcaaattttctcccactgcttctcgtcatatctccgggcggnactagacaaaactaatcacacacccccatcttaccacaaaaatttacttattttttcttgcatcacctcttctcgaatgcatgacacat

SEQ ID NO: 31362 - DNA, 367 bp, Glycine max
  Clone ID: LIB3138-065-Q1-N1-B4
cctgcaacaactctgttggctgatgggtgtccatatttgtatgcaatggtgcatgatagttcagtgtctacaataccaggtgattttgtcattggtgtcaagttgacaaccataaacaatatgtgtgcatatgggctcaatcctggtatttcaggttctcgtcttttgggcaccattcctcagtccatttcacagcaaactgtttggaatcaaatggcaacagtgagaacaccattgaattttgattctagcaagcagagcttttgtcagttttctattgaccttctcggtggaggaatcttagtggacaaaactggagattggatcacacttatacaaaattctccaattagtaacttattgagag

SEQ ID NO: 31363 - DNA, 405 bp, Glycine max
  Clone ID: LIB3138-065-Q1-N1-B5
gcttttaattataatgttttttagaattaaataaaattttagttctccaaaacttgaaccaaattcaatttaattcttaggaaaaaaatttcttaacatttcatgatcaaaatttacaaaatgctagtgtatttaaccattgaggccgaaaattataatctgtaataaatgttaagggggatcgttacgtaacattataaattattaagttttactcgtctggaacatcattatctctaataatacatgcgatttaaacaaaaataaaataaaacataaatcagtaatttatgttataattataatttaatgaaaccatagtgcatccttttatgtttactgttttttttcttccctgcaaagtgtaaagtgaggactgaggagggatgagttcgtcctctccac

SEQ ID NO: 31364 - DNA, 128 bp, Glycine max
  Clone ID: LIB3138-065-Q1-N1-B6
agctaatctagcttaaacaattagacggtataaattgatgctgtctgcagaattagatggtcttgctgaacaagccttatatttggttggtgatatggaggaagctactgcgaaagctacgacacata

SEQ ID NO: 31365 - DNA, 167 bp, Glycine max
  Clone ID: LIB3138-065-Q1-N1-B7
gatcttatgactgactatcgcgaaatccatgcttggacatatgcatggactatgtctgttaatagatactggagatgaggagcatggaggaatgtatggctgaagcgaactggtttgtattggcatatcatacatgacagttgatgtactagcgcctcaatgtatga

SEQ ID NO: 31366 - DNA, 353 bp, Glycine max
  Clone ID: LIB3138-065-Q1-N1-B8
caattttgaggcttttccccacaagctggtgcagtttggagagattcaggaaaaagttgtattgaaattttcacaagaggaatttcttacagcttggtcaactcaggtgcgtcctgcaacaactctgttggctgatgggtgtccatatttgtatgcaatggtgcatgatagttcagtgtctacaataccaggtgattttgtcattggtgtcaagttgacaaccataaacaatatgtgtgcatatgggctcaatcctggtatttcaagttctcgtcttttgggcaccattcctcagtccatttcacagcaaactgtttggaatcaaatggcaacagtgagaacaccattgaatt

SEQ ID NO: 31367 - DNA, 394 bp, Glycine max
  Clone ID: LIB3138-065-Q1-N1-B9
aaacgggtggtgcctctcttccatctccccagccaaaacctgtctcaggaaggccacattacgcccttccgtcttcgcaacccttaacactccttcttctccttcctcttcatcttccttcccctctctcattcaagacaggcctgtttttgctgcccctgcccccatcatcaccccaactgtgagagaggatatggcaaaggaatacgagaaagctattgaagaacttcagaaattgttgagggagaagagtgaactcaaagcgacagctgctgaaaaagtggagcagataacagcttctctagggacatcatcatctgatggcatcccatcatcagaagcctcagacaggatcaaagctggtttcattcccttcaagaaggagaaatacgac

SEQ ID NO: 31368 - DNA, 411 bp, Glycine max
  Clone ID: LIB3138-065-Q1-N1-C1
gtcaagccttactttagtggttctaaattgaaaagctttctagctagtcataacatcaccattactgatggtattgacaaaactagtgcaactttgcaatttagaaagttagcagattgtgattttctcaagagaaactttaagcagatgtctaatgttttgtgggtggctcctgaggacaaggcgagtttatggtcacaacttcattatgtttcgtgtaataatctggaaatgcaagaagcttatcttgtcaatctcgtaaatgtgttacgagaattgtatttgcacagtccagaggaagctcgccaattgagaaggaaagctctctctcgtattgaatggctgcaaaaagctgatgtgcctaccatagcacagattgaagagttccattcgatgcagaggatgatgaat

SEQ ID NO: 31369 - DNA, 412 bp, Glycine max
  Clone ID: LIB3138-065-Q1-N1-C10
gagaaggacccatagaagaagaaataccctggtggtgctttggatcctttgggatactctaaggaccctaaaacattccatgaatacaaagtcaaagaacttaagaatggacgtcttgctttgttggcttttgtgggattctgtgttcaacaatcagcttatcccggcactggacctttggagaacttggctgctcacttggctgacccatggcacaacaacattggaaacatcattattccacaatcgattttgccttgaaaaaaaaaaatcaaatatttgtttcaatagctacctgtataattccatgtaacattttgtaacgaatcgggttgctacgttggtatctctgtgttgtaattaaacttcgaattcaaactcatactctggcaactcgttggtatgacagaaa

SEQ ID NO: 31370 - DNA, 395 bp, Glycine max
  Clone ID: LIB3138-065-Q1-N1-C11
ctccagccgcttgtggaggccgaaaggtgtcactcccaaatgcagcttggcacctattgtgccccggctttctgagctcattggtatccaggttgtcaaggctgaagacagtattggtccggcggtcgaaaagttggtggcttctcttccagatggatgtgttcttcttctacaaaatgtgaggctatacatggtggaagaaaagaatgatcccgagcgtgcaaaaaagcttgcctctctggccgatctgaaagtgaatgatgcattagatactgctcacacggcacatgcgtcaacataaggtgtaactaaatacctgcagacatatggtgctggtttacttttgcagaaggaacttgattaccttgttggggcggtataaacccccaaaacgc

SEQ ID NO: 31371 - DNA, 403 bp, Glycine max
  Clone ID: LIB3138-065-Q1-N1-C12
ctttcggaaagacccacggtgctgctccttcggagaacactggcccagaccccaactctgaggatcttgcaacacaaggatttggctggatgaacaagcacggtcgcggtaacggacctgacaccatcaccagtggtctcgaggtcacctggactggcacacccaccaagtggagtaacaagtaccttgagtacctctacaagtacgagtgggagctcgagaagagccctgctggtgccaaccagtgggtcgctaagaccgatgacaagatcatccccgacgcctacgaccagggcaagaagcacaagccaaggatgctcaccaccgacttgtcgatgcgcatggatcccgcctacgaaaagatcactcgtcgttggttggaccacccagaggagcttcacga

SEQ ID NO: 31372 - DNA, 403 bp, Glycine max
  Clone ID: LIB3138-065-Q1-N1-C2
gattctttggcccttgccaaaaagccagagatttttggatttagttgggagagaaggatcattccaagggctcttgttgtccagtatttagtcgctaaaggcttgaggaaaaagagtgccagcatgattgtcccatttgctgtttctgataaggagtttcttgaaaagtatgtgatgcgatttaaggaggaagaagcggaactattaaagctgtaccagggaaaaatgagtggtcatggaaataaggaggatggtgcagctcctttaaccgtagtgtaatttaaaaaatatctaggtccatatttaatttattccatgttagtggaaataatgtcaagtgaaggctaactttgagtgattgatatgtttttcagacgtttagctgggaaatatatcatataac

SEQ ID NO: 31373 - DNA, 382 bp, Glycine max
  Clone ID: LIB3138-065-Q1-N1-C3
cgaaacatggcaagagtggtggcactccaacagaaccaactgtctggctctaccttagcttcctctctttctgacttcagtggaaccagacttcaaactcaacttcagttcaagagaaagcaatgccatccaaaagggtctttctacgtctccgcatcgagcaccaagaaaatcctaataatgggaggcaccaggtttattggtgtgtttttgtctaggctccttgtcaaagagggtcaccaggtgactttattcacaagaggtaaagcgcctgtcactcaacagttgccaggtgaatcagacagtgattatgctgatttttcttccaagatcttgcatttgaaaggagacagggaggacttcgactttgtaaaatccagtc

SEQ ID NO: 31374 - DNA, 399 bp, Glycine max
  unsure at all n locations
  Clone ID: LIB3138-065-Q1-N1-C4
tgtcaatctcgtaaatgtgttacgagaattgtatttgcacaggccagaggaagctcgccaattgagaaggaaagctctctctcgtattgaatggctgcaaaaagctgatgtgcctaccatagcacagattgaagagttccattcgatgcagaggatgatgaatgctcctgattcaaatgataatattgatttactgttgagcattgatttgttgggtttacaaggagcaagtaaagcttttccaaacaaaattgtttttgatgataagcttgtgttggctaacacacaagaattctttgatggaaattttccagtggattcttggttacccaattttgtgaattgtctntatcctgtaagtcaattcccttcagaagctgtcngtgaaatgttacatgt

SEQ ID NO: 31375 - DNA, 398 bp, Glycine max
  Clone ID: LIB3138-065-Q1-N1-C5
gtggacatttcctattcctggaagacagcattgacctggtgacaatcatcaaaggcacttcatactaccgccgtggcaagtatcatgactatgcatcagattttatacctccaacacttgatgaggccaaaaacataatagaatcaaacagtttgtttaaccttattgcaagtgctgtaatgctctcaactttggaggatgggacgcttgtaaaaggccttgctggaattccttcagaggggcctgttttgtttgttgggtaccacatgctactcggattagaaaaaattcccctggtttctcgaatttttttggaaaggaatatccttcttcgaggggtagcacatcccatgatgtttatgagatctaaaaatggaaggttaccagatttatcttct

SEQ ID NO: 31376 - DNA, 400 bp, Glycine max
  Clone ID: LIB3138-065-Q1-N1-C7
ctcgagccgctttagccgtggtgatgaaaaattgatgcgtgaaaggacgcacctgctgttggcttgttgttcaaggatggcaatttgtaagaaagatgtttggagagttgaatgtggaatcccttctggatttccgctcacagttatttgcaatagcatttttaatgagatgctcattagatatagctatgaaaaattactgcgccaggctaaagctccaagtatgtttttacaatccttcaaaaattttgtttctttgtgtgtgtatggtgatgataacttaattagtgttcatgaatatgtcaagccttactttagtggttctaaattgaaaagctttctagctagtcataacatcaccattactgatggtattgacaaaactagtgcaactttgcat

SEQ ID NO: 31377 - DNA, 403 bp, Glycine max
  Clone ID: LIB3138-065-Q1-N1-C8
gaaaaaactactttacaaaatccttctcttcaagatcagatgctggatccagaatactcgtaagctcaacaagctcaacattcagcttcaaagtcaccagctgccattttatcagattctgagagtggagatgccaagttaaatacttcatcaaaggttactgatcatgagacgaacaaaacacttgctgagcaccttgattccaacaaaacaaagggaagaaaaccggttgaccgatcctcatgtggttccaacacggcctctagcagcgatgtggaaactgatgcactatataagggtgagaaagggaaggatgagcctgaaatacctgatgctaaccaattagccattgagtgtagtaatcgacgtagaagcgttagcaaccttactgattcttggaaga

SEQ ID NO: 31378 - DNA, 402 bp, Glycine max
  Clone ID: LIB3138-065-Q1-N1-C9
tggcttccctgaacctccttccccaccctccacttttctcttgtttccttcacagaccacactgcaacacccatcttcttctcacaccaaaaccttctcaacgaaggccttctcttgtggtcaaatctactgtgggtgtggctgacccttctccatcttcttcttcctacgctggggatacctctgattccatctcttctttgaagctcaatctgctgagtgctgtttctgggctaaatagaggccttgctgcaagcgaagacgatcttcgaaaggcagatgatgctgctaaagaacttgaagctgctggaagacttgtggatctctcgcttggtcttgacaatttgcaaggaagatggaaactcatttatagcagcgcattttcgtctcgaacccttggtg

SEQ ID NO: 31379 - DNA, 401 bp, Glycine max
  unsure at all n locations
  Clone ID: LIB3138-065-Q1-N1-D1
attgatttactgttgagcattgatttgttgggtttacaaggagcaggtaaagcttttccaaacaaaattgtttttgatgataagcttgtgttggctaacacacaagaattctttgatggaaattttccagtggattcttggttaccaatttttgtgaattgtctttatcctgtaagtcaattaccttcagaagctgtcgttgtaaatgttacatgtggtagtggacgtggtggtttacccaccactgcttggattagttctgcagttaacaatcgctcctcagatatcaacaaaaagattcgcacagcacttgggaaatgtaagaaaattgtttttcttactagagttgatccttttccagtagctttactggctgttctttntgcgttaagaatgaaatt

SEQ ID NO: 31380 - DNA, 411 bp, Glycine max
  Clone ID: LIB3138-065-Q1-N1-D10
caatttgtaagaaagatgtttggagagttgaatgtggaatcccttctggatttccgctcacagttatttgcaatagcatttttaatgagatgctcattagatatagctatgaaaaattactgcgccaggctaaagctccaagtatgtttttacaatccttcaaaaattttgtttctttgtgtgtgtatggtgatgataacttaattagtgttcatgaatatgtcaagccttactttagtggttctaaattgaaaagctttctagctagtcataacatcaccattactgatggtattgacaaaactagtgcaactttgcaatttacaaagttagcagattgtgattttctcaagagaaactttaagcagatgtctaatgttttgtgggtggctcctgaggacaaggcgagtt

SEQ ID NO: 31381 - DNA, 395 bp, Glycine max
  unsure at all n locations
  Clone ID: LIB3138-065-Q1-N1-D11
ttaggtgtgagtgtgagtgtgcggtgctcaatcggcaccgcttcaggcaacacccaaaccgattatcccgccaaattccaacggtcatctttctcaactgccaacttcctccccgacaacgcttcttcagatttagcagtttcaatttcgagtagtagcagcaggagaaggctaatacgcatagccacgttgccatgtcttcttcccctcataagttgcctcccagccaacgccatgcagccaggttcaaaggaatatcttctcattaaagaagaggtgaagaaagtcttgtccaanggaaaagctgctggcgtgcttcgattggtattccatgatgccggaacctttgacatcgatgacagtacangtggtatgaatggntctatagtctatga

SEQ ID NO: 31382 - DNA, 412 bp, Glycine max
  Clone ID: LIB3138-065-Q1-N1-D12
cttggcaccaagctttccattctcatccctgctattccagctgccatcgttgctgagtgctttggctttggaagaccttggatttttatattaagcttacttggacttacaccacttgctgaacgtgtgagcttcattacagaacaagttgccttttacactggtcccacagttggaggacttctgaatgctacatgtgggaatgttactgagctcataatagcaatatttgcccttagcagtaacaaaattgccgtggtcaagtattctctgttgggttctattctttcaaaccttcttctggttcttgggacctctctattatgtggtggcattgcaaacgttggagtggaacaaaaatatgatagaagacaagcagatgtgaactcacttatgctgttgttgggattgt

SEQ ID NO: 31383 - DNA, 408 bp, Glycine max
  Clone ID: LIB3138-065-Q1-N1-D2
caacatgaacaatccaactcttataatcttcttccttgttattgtgggcgtcttcttcgcggcgtcggcggacggcggcgacgatgagccgctgatcatgcaggtggtggagggcagcggcgtccggttgggagcagagcaccactttttggacttcaagcgcaggttcgggaaggcgtacgcttcccaggaggagcacaattacaggttcgaggtgttcaaggctaacatgcgccgcgctcgccgccatcagagcctggacccttcggcggcacacggcgttacgcggttctctgatctcacggcgtcggagttccggaataaggttttgggtctgagaggtgtgaagttgccttccaacgcaaacaaggctccaattctccccaccgataatcttcccagtgattt

SEQ ID NO: 31384 - DNA, 195 bp, Glycine max
  Clone ID: LIB3138-065-Q1-N1-D3
attggagtggcatacattgctatgaggattgttaccttgctcatcaacgccttgctattgttgaccctacttcgggggatcaacctttgtacaacgaagacaaaactgttattgtcactgtaaatggggagatatacaatcacaagcaattgaggcagaaactgagttcccatcaatttcgaactggtagtgatt

SEQ ID NO: 31385 - DNA, 407 bp, Glycine max
  Clone ID: LIB3138-065-Q1-N1-D4
ttgcaacttggttctaccacctctctctcccaaactctctttgttgtgctgcttcagcgtctggtagcaaagatggcgacattgactgcttcaagtaacttagtctctagaaattctcatgtccaccatggaccaacaactgcttcatatgagtctaaagcagtagcaatgggacttagatctctgaagcagacaaatactcataatggactaagaattttgaacccggtggatgagctacttaacagaaccccaattaaaaccaatgcagtgcaagctatgaggaagggacctcaaggcaagaatgccaggcctaaaggcatgatcacatgtggcatgactttcataattataggaaccgaggtggctccatggtgcaaaactggtgggttgggagatgttcttgg

SEQ ID NO: 31386 - DNA, 404 bp, Glycine max
  unsure at all n locations
  Clone ID: LIB3138-065-Q1-N1-D5
aaagatttgttggagggaaatttttcctttgatattaaatctcgctctagattggaaaaagtttcctctacaaaagcacaatttgttagtggaaaaaccttcaaatatgatataattggtgctggttcacattcttcagaagattttcctgaaaaggaagatcaagaaaaacccaaaaagattgatgccagattgagacaaagaatagatcctcaatacaatgaggttcaggctcagatggaaacaaatttgtttaaattgtctcttgatgatgttgaaactcctaaaggttccatgttggatctgaaaatttctcaatctaaaattgcacttcccaagaacacaggttgaggaaccattctgcgtaatgatctattggcanatttttgacagagggcaatttt

SEQ ID NO: 31387 - DNA, 258 bp, Glycine max
  Clone ID: LIB3138-065-Q1-N1-D6
gtcattgtctgcctacccgaattttacacagggactgtgagtggcgtttatcattacacaattaaataaagtacataattacgtgatctttgtgtttctatatcattcgatcagagatgaaccaaaagaaacatctttgcttaatatgagtctaaagcagaagcaatgggacttaaatctctgaagcagacaaatactcataatggactaaagaattttgaacccggggggatgagctacttaacaaaaaccccgggg

SEQ ID NO: 31388 - DNA, 333 bp, Glycine max
  Clone ID: LIB3138-065-Q1-N1-D7
ctcgagccgctcgagccgaatcggctcgagataaccctcaggctcaaacacatcattaacaaaaattccaatcactttgaatcctctctctctttctctcttgttctccttgaaactaaccatctcttgaatctgaagttacccaagacttgcctttcaagtgtgttcagtttcatgtattggtcttatattggtgtatttaattttgggatgacatagatcttgccttgggaacagtaaaagaaagcagaaaaagcatgtttgcatctctacaggtgaaatctgaggtgtggattgttcttttttgagttaaaattccaatatagggagtta

SEQ ID NO: 31389 - DNA, 400 bp, Glycine max
  Clone ID: LIB3138-065-Q1-N1-D8
caagaattctttgatggaaattttccagtggattcttggttgccaatttttgtgaattgtctttatcctgtaagtcaattaccttcagaagctgtcgttgtaaatgttacatgtggtagtggacgtggtggtttacccaccactgcttggattagttctgcagttaacaatcgctcctcagatatcaacaaaaggattcgcacagcacttgggaaaggtaagaaaattgtttttcttactagagttgatccttttccagtagctttactggctgttctttttggcgttaaaaatgaaattctgagttctaacgccactaatcctatgctgacgcgacttcttgagaactgtaagagtctcaaatatctggttgatgagtgtccttttgcatttgtgaact

SEQ ID NO: 31390 - DNA, 415 bp, Glycine max
  Clone ID: LIB3138-065-Q1-N1-D9
cggcggtttcctagaggccatcgtccgcggccaccgcgccggcctcctcaccaccgccgattacaacaacctctgccaatgcgaaaccctcgacgacatcaagatgcacctctccgccaccgagtacggtccttacctccaaaacgagccttctccattgcataccacaacgattgtggagaagtgtactcttaagctggttgatgattacaagaacatgttatgccaagccacggaacccttgtcaacctttttagagtatatcacatatggtcacatgatagacaatgttgttttgattgttactggcaccttgcatgagagagatgttcaagaattactagaaaaatgccatccactcggcatgtttgacagtatggctactctggcttgtgctcaaaatatgcgggagctt

SEQ ID NO: 31391 - DNA, 347 bp, Glycine max
  Clone ID: LIB3138-065-Q1-N1-E1
atttactgttgagcattgatttgttgggtttacaaggagcaggtaaagcttttccaaacaaaattgtttttgatgataagcttgtgttggctaacacacaagaattctttgatggaaattttccagtggattcttggttaccaatttttgtgaattgtctttatcctgtaagtcaattaccttcagaagctgtcgttgtaaatgttacatgtggtagtggacgtggtggtttacccaccactgcttggattagttctgcagttaacaatcgctcctcagatatcaacaaaaggattcgcacagcacttgggaaaggtaagaaaattgtttttcttactagagttgat

SEQ ID NO: 31392 - DNA, 300 bp, Glycine max
  Clone ID: LIB3138-065-Q1-N1-E10
cttgttttttgcaaattcgcaacccacacagcaagggaaggtgcgagtgagtgagtatggcgtctccattatcagctcaattggttcaatgtcagaactcacttccacctcttcagggtaattttagccaagatgtgtctaaggttcaaaggtcgcgtgtggtatgttacggtaccagatcaccgcttggttattatggtaaagcattgacatcaagatcacataacgccctgaggttttctgtcacgcaacaatctgaagcacgggcaattggatataggaaaatgacatgtgtcaatg

SEQ ID NO: 31393 - DNA, 410 bp, Glycine max
  Clone ID: LIB3138-065-Q1-N1-E11
tgataatattgatttactgttgagcattgatttgttgggtttacaaggagcaggtaaagcttttccaaacaaaattgtttttgatgataagcttgtgttggctaacacacaagaattctttgatggaaattttccagtggattcttggttaccaatttttgtgaattgtctttatcctgtaagtcaattaccttcagaagctgtcgttgtaaatgttacatgtggtagtggacgtggtggtttacccaccactgcttggattagttctgcagttaacaatcgctcctcagatatcaacaaaaggattcgcacagcacttgggaaaggtaagaaaattgtttttcttactagagttgatccttttccagtagctttactggctgttctttttggcgttaagaatgaaattc

SEQ ID NO: 31394 - DNA, 399 bp, Glycine max
  Clone ID: LIB3138-065-Q1-N1-E12
tcaccattactgatggtattgacaaaactagtgcaactttgcaatttagaaagttagcagattgtgattttctcaagagaaactttaagcagatgtctaatgttttgtgggtggctcctgaggacaaggcgagtttatggtcacaacttcattatgtttcgtgtaataatctggaaatgcaagaagcttatcttgtcaatctcgtaaatgtgttacgagaattgtatttgcacagtccagaggaagctcgccaattgagaaggaaagctctctctcgtattgaatggctgcaaaaagctgatgtgcctaccatagcacagattgaagagttccattcgatgcagaggatgatgaatgctcctgattcaaatgataatattgatttactgttgagcattg

SEQ ID NO: 31395 - DNA, 406 bp, Glycine max
  Clone ID: LIB3138-065-Q1-N1-E2
cttcaattctctctctccatttctcatcctcatcatcttattatacctcttccatctccataacatccacttgtgaaaaaaacccattaatatatatcacacacacatgtatctctgagctccaatccaatccaagaccacaccttgtcgcgtcggacgaaccttggtgtctgtcttttttttttttttttgtttcattagtttctccgaagagatgcggaagggcagaggaggaggagcctcggcggcggcggcggcggcggtgaacggatccgttttaaaggagcctcggtaccggggcgtgcggaagagaccgtgggggagattcgcggcggagatcagagacccgttgaaaaaagccagggtttggttgggaaccttcgattctgccgaggatgctgcacgt

SEQ ID NO: 31396 - DNA, 374 bp, Glycine max
  Clone ID: LIB3138-065-Q1-N1-E3
cacaacttcattatgtttcgtgtaataatctggaaatgcaagaagcttatcttgtcaatctcgtaaatgtgttacgagaattgtatttgcacagtccagaggaagctcgccaattgagaaggaaagctctctctcgtattgaatggctgcaaaaagctgatgtgcctaccatagcacagattgaagagttccattcgatgcagaggatgatgaatgctcctgattcaaatgataatattgatttactgttgagcattgatttgttgggtttacaaggagcaggtaaagcttttccaaacaaaattgtttttgatgataagcttgtgttggctaacacacaagaattctttgatggaaattttccagtggattct

SEQ ID NO: 31397 - DNA, 312 bp, Glycine max
  Clone ID: LIB3138-065-Q1-N1-E4
gtgcatatggattcaatcctggtgtgcaaggggcttgaattttgggcaccattgctcaggccatttgacagcaaactgttaggaatcaaatggcaacagtgagaacaccattgaattttgattctaaccagcatagcttttgtcagttatctatcgaccttctcggcggaggaatattaatggacaaaactggagattggatcacacttatacaaaatactgcaattcactactagatgagagttgctgcttgaaagaaaggctagttaatggtcaaaatagagatgtctgggaatgcaacattgaaaagga

SEQ ID NO: 31398 - DNA, 404 bp, Glycine max
  Clone ID: LIB3138-065-Q1-N1-E5
gctcattagatatagctatgaaaaattactgcgccaggctaaagctccaagtatgtttttacaatccttcaaaaattttgtttctttgtgtgtgtatggtgatgataacttaattagtgttcatgaatatgtcaagccttactttagtggttctaaattgaaaagctttctagctagtcataacatcaccattactgatggtattgacaaaactagtgcaactttgcaatttagaaaagtagcagattgtgattttctcaaaagaaactttaagcagatgtctaatgttttgtgggtggctcctgaagacaaggcgagtttatggtcacaacttcattatgtttcgtgtaataatctggaaatgcaagaagcttatcttgtcaatctcgtaaatgtgttacgag

SEQ ID NO: 31399 - DNA, 393 bp, Glycine max
  unsure at all n locations
  Clone ID: LIB3138-065-Q1-N1-E6
attctcatgaatatgccaaatgctgttctttcaatgtggagatattttgttggagatctcgtctttgaagtttctaagatgacttctccctacattaaatgtacagtctctttcttcatagcatttggaaatttggctgatgataccatcaattttgaggcttttccccacaagctggtgcagtttggagagattcangaaaaagttgtattgaaattttcacaagaggaatttcttacagcttggtcaactcaagtgcgtactgcaacaactctgttggctgatgggtgtccatatttgtatgcaatggtgcatgatagttcagtgtctacaataccaggtgattttgtcattggtgtcaagttgacaaccataaacaatatgtgtgcatat

SEQ ID NO: 31400 - DNA, 382 bp, Glycine max
  Clone ID: LIB3138-065-Q1-N1-E7
taagttttctgatgtgttggcattcagtgggccagcacctgagaggatcaatggaaggttggccatgattgggtttgtggctgcaatggcagtggaagtagccaaagggcaaggtgtgttagaacaaatatccaatggtggcatcccatggttcttggggacaagtgtggtccttacccttgcttccttgattccactcttccaaggtgtcagcgtggagtctaagtccaaagggttcatgtcctcagatgcagaactgtggaatgggagatttgctatgttgggtttgattgctctggcttttactgagtatgttaagggtagtactttggtataattcagtcatgaaggcacaccacaatggacttaatcttctttgtga

SEQ ID NO: 31401 - DNA, 402 bp, Glycine max
  Clone ID: LIB3138-065-Q1-N1-E8
gttaaataggtggatgggaaaattgactttcccccagggcacttcccgaagtgttaagagaatgcctctttctatagggggaggagctggtgcaaagaatgctattctcatgaatatgccaaatgctgttctttcaatgtggagatattttgttggagatctcgtctttgaagtttctaagatgacttctccctacattaaatgtacagtctctttcttcatagcatttggaaatttggctgatgataccatcaattttgaggcttttccccacaagctggtgcagtttggagagattcaggaaaaagttgtattgaaattttcacaagaggaatttcttacagcttggtcaactcaagtgcgtcctgcaacaactctgttggctgatgggtgtccatattt

SEQ ID NO: 31402 - DNA, 412 bp, Glycine max
  Clone ID: LIB3138-065-Q1-N1-E9
gcctagacctccttaccttgatggttcagcacctggtgactttggattcgaccctcttcgtcttggtgaagtaccagagaatcttgagaggttcaaagagtcagaactcattcactgcagatgggccatgcttgctgttccagggattttggttccagaggcattgggcttaggcaactgggtaaaggctcaggaatgggcagcagttcctgggggccaagcaacctacctaggcaatccagttccatggggcaccctacccaccattctggccattgaattccttgctatttcctttgtggagcaccaaaggagcatggagaaggacccagagaagaagaaataccctggtggtgcttttgatcctttgggatactctaaggaccctaaaacattccatgaatacaaagtc

SEQ ID NO: 31403 - DNA, 380 bp, Glycine max
  Clone ID: LIB3138-065-Q1-N1-F1
aaaaaatggttgttgacttaatagaaaaaaataaaaaaagaacacaggcaaagcattaagagagaggaagaatgcaaatggcaattttgttaagaggaggagcacttggagattctagctttcgtttgtgttcattaacatcaacttcttctttgcatgtctcccaaaatgttgccatacccaccttatcatcatcaccaatactacccttgattgcaagtaaatttaaaacggccagcagaaacagaattacctgctctgccgttcaagaatcatcttctagcacaagagctgctactgtctaaacaaatgaggaggtgaaggaaggaccaaaagccgcagcatcatgaaagaaacctcctgctaaagctccagctaag

SEQ ID NO: 31404 - DNA, 409 bp, Glycine max
  Clone ID: LIB3138-065-Q1-N1-F10
cccaaagcactagtaatgatcatggcaccgttgggttagctgttggtcctcctcaatcatcgacatcagggttccatgctggcagctcttctgctataaatccttttgatgattggtcccacaacagggacaagggggctgatgaattcttttcggaagaagaaatccgcttcagaagtcacgagatgctagagaatgaagatatgcagcagttgcttcgcctcttcagcatgggaggtcatggctccatgagtgctgaggatggcttttcattcccatcattcatgccatctcccagtataccgaactatgatgaggatcgctctcgcccaggcagagctgttgtgggatggctgaagatcaaggcagcaatgacgtggggcttctttatcaggaagatagccgctga

SEQ ID NO: 31405 - DNA, 412 bp, Glycine max
  Clone ID: LIB3138-065-Q1-N1-F11
tgcaatgaaaatgaaacagagagtgaagagctcaatgatatttggaccgaggatgaaagaaggcaattggaagatgcactaaggttggagtcgacagacttgaacaatgagagtgatgaggtgatcattgggcatcgtcacagctgttatgaagaaagagaaattcctattgaagatggaaattgtaacaaaagtggagaaaataagcaagaaaagaaaggatggtttggtggatggaggaaaaaggattctaaacctgaagcatcaaagaagattgctccaccgagaagttctctctgcgtagaagaaaaagtgagtgatttattgggggattctccttcaagaaatcagagtaagccaggaagacattctgttgagatagctgtgaggggtgatgagtcacggaggagaa

SEQ ID NO: 31406 - DNA, 396 bp, Glycine max
  Clone ID: LIB3138-065-Q1-N1-F12
gtgctttatctgtttttggttttattgcttgttgctttgtctggtttaataataccgcttatcctagtgagttttacgggcccactgggccagaagcttctcaagctcaagcatttacttttctagttagagaccaacgtcttggggctaatgtaggatctgctcaaggacctacaggtttaggtaaatatctaatgcgttccccgacaggagaagttatttttgggggagaaactatgcgtttttgggatttgcgtgctccttggttagaacctctaaagggtccgaatggtttagacttgagtagactgaaaaaagatatacagccttggcaagaacgccgttctgcggaatatatgactcatgctcctttaggttccttaaattccgtgggtg

SEQ ID NO: 31407 - DNA, 402 bp, Glycine max
  Clone ID: LIB3138-065-Q1-N1-F2
tgatgggtgtccatatttgtatgcaatggtgcatgatagttcagtggctacaataccaggtgattttgtcattggtgtcaagttgacaaccataaacaatatgtgtgcatatgggctcaatcctggtatttcaggttctcgtcttttgggcaccattcctcagtccatttcacagcaaactgtttggaatcaaatggcaacagtgagaacaccattgaattttgattctagcaagcagagcttttgtcagttttctattgaccttctcggtggaggaatcttagtggacaaaactggagattggatcacacttatacaaaattctccaattagtaacttgttgagagttgctgcttggaagaaaggctgtttaatggtcaagattgtgatgtctgtgaatgc

SEQ ID NO: 31408 - DNA, 397 bp, Glycine max
  Clone ID: LIB3138-065-Q1-N1-F3
aacaaagtgaaacctaatgaacgaacttgtggtatcataataagtggttattgcaaggaaggcaatatgacagaagccttgaggtttctatacagaatgaaggagcttggtgtgcatccaaatccagtagttttcaactctcttatcaaaggatatctagacgctacagacacaaatggagtagatgaggcactgacattgatggaagaatttgggatcaaaccagatgtagtaacctttagcaccatcatgaatgcatggagttcagcagggcttatggacaattgtgaagagatattcaacgacatggtgaaggccggtatagaacctgacatccacgcatatagcatccttgcaaaggctatgtgcgtgcgggacagccacgaaaagccgagtc

SEQ ID NO: 31409 - DNA, 400 bp, Glycine max
  Clone ID: LIB3138-065-Q1-N1-F4
gcttgcctcatgggaaacagtgaggaagagaaatctgttaaaactggaagtccttcttcttcacctgcaacaactgagcagaccaaccaacctaatattcacgtctatcctgattgggctgccatgcagtattatgggccaagagtcaacattccaccatacttcaactcagctgtggcttctggtcatgctccacacccatacatgtgggggccgccacagcctatgatgcaaccttatgggccaccttatgcagcattttattcgcatggaggggtttatactcaccctgcagttgctattgggccacactcacatggtcaaggagttccatcttcacctgctgctgggactccttcaagcgtaaaatcaccaaccaaattctctggaaatactaatc

SEQ ID NO: 31410 - DNA, 406 bp, Glycine max
  Clone ID: LIB3138-065-Q1-N1-F5
ggatggctggctacactttgtgtgactggtatgacagctattggagtaaggaaagcagtgaagacagagttgatagatgctgagcctatggagaagccctctccattttcttccattgaattgtgggcatggactgggattttccttatatcttttgttgcttcattagtttacccaacagcactggggacacgagccagaacgtatcttccattcttgcttgcttccacggtgttaggctacatgattggttctggattgccatcaagcgtgaagaaggtcctccacccaataattttctgtgcggcatctgcagaagtaacagcagttgtttttgggtttctttccaagtcagggcttgatcctgttctaggatattaccttacaaactcatcatctgatcctg

SEQ ID NO: 31411 - DNA, 65 bp, Glycine max
  Clone ID: LIB3138-065-Q1-N1-F6
gtatgactgtacatgttacatacatcattattttactcctccaatgtagttcaatttataatggt

SEQ ID NO: 31412 - DNA, 404 bp, Glycine max
  Clone ID: LIB3138-065-Q1-N1-F7
aaatgtgttacgagaattgtatttgcacagtccagaggaagcgcgccaattgagaaggaaagctctctctcgtattgaatggctgcaaaaagctgatgtgcctaccatagcacagattgaagagttccattcgatgcagaggatgatgaatgctcctgattcaaatgataatattgatttactgttgagcattgatttgttgggtttacaaggagcaggtaaagcttttccaaacaaaattgtttttgatgataagcttgtgttggctaacacacaagaattctttgatggaaattttccagtggattcttggttaccaatttttgtgaattgtctttatcctgtaagtcaattaccttcagaagctgtcgttgtaaatgttacatgtggtagtggacgtggtg

SEQ ID NO: 31413 - DNA, 394 bp, Glycine max
  Clone ID: LIB3138-065-Q1-N1-F8
ttgaccttctcggtggaggaatcttagtggacaaaactggagattggatcacacttatacaaaattctccaattagtaacttgttgagagttgctgcttggaagaaaggctgtttaatggtcaagattgtgatgtctgggaatgcagcagtcaaaaggagtgattgggcctcattggtacaagtgtttttaacaaacagcaacagtacagagcattttgatgcatgtaagtggacaaaatcagaaccacattcctgggaattgatcttcccaatagaggtatgtggtcctaataatggttttgaaatgtggagttctgagtgggcaaatcaaacttcatggcatttgagtttccttattgacaatcccaaacagtctacagtttttgatattct

SEQ ID NO: 31414 - DNA, 408 bp, Glycine max
  Clone ID: LIB3138-065-Q1-N1-F9
gaatggtaacaatagctggtggtgtgagtctttcaagccctagcagggtatttgctaatgctaagggaatagactcagcacaaaaggcccaggccgtgaggtttccagctctgtcgaggcccattcaaaagtggcctggtttggtgaagacccggcccgttcgggcgacgccggagaagatatcggagaaggtagaggagagcataaagagcgcggaggaggcgtgctcgggaggcggcggtgacgcggaatgcgcggcggcctgggacgaggtggaggagctgagcgcggcggcgagccacgccagggagaagcagaagcagtctgacccgctcgaaaattactgcaaggacaatccagagactgatgagtgccgcacctatgataattgatgactgaactcagtca

SEQ ID NO: 31415 - DNA, 389 bp, Glycine max
  Clone ID: LIB3138-065-Q1-N1-G1
cacagttggtattcctgagaatacaggtatatcattggcctgtgctgtgaatagttcttttagggggcgcgccagttctgatatttacaccatctgctctcaagactgtgaattgtggaatcctgcttgcacaaaagcaatgactatgtcatttaatccaaacccgtgttctgatgcatggagtttggaatttctgaagcgtactggatttcattgcgatatcatttgtgtcactggatggactgccaccccaatgcaggatgttcaggttacaattgattggtttatttcctctcaagaatgtgttcccaggacctattgtgttttaaatccacaaaatccttttgtgttaaataggtggatgggaaaattgactttcccccagggca

SEQ ID NO: 31416 - DNA, 414 bp, Glycine max
  Clone ID: LIB3138-065-Q1-N1-G10
ttcaggaaaaagttgtattgaaattttcacaagaggaatgtgttacagcttggtcaactcaggtgcgtcctgcaacaactctgttggctgatgggtgtccatatttgtatgcaatggtgcatgatagttcagtgtctacaataccaggtgattttgtcattggtgtcaagttgacaaccataaacaatatgtgtgcatatgggctcaatcctggtatttcaggttctcgtcttttgggcaccattcctcagtccatttcacagcaaactgtttggaatcaaatggcaacagtgagaacaccattgaattttgattctagcaagcagagcttttgtcagttttctattgaccttctcggtggaagaatcttagtggacaaaactggagattggatcacacttatacaaaattctc

SEQ ID NO: 31417 - DNA, 414 bp, Glycine max
  Clone ID: LIB3138-065-Q1-N1-G12
attttgttggagatctcgtctttgaagtttctaagatgacttgtccctacattaaatgtacagtctctttcttcatagcatttggaaatttggctgatgataccatcaattttgaggcttttccccacaagctggtgcagtttggagagattcaggaaaaagttgtattgaaattttcacaagaggaatttcttacagcttggtcaactcaggtgcgtcctgcaacaactctgttggctgatgggtgtccatatttgtatgcaatggtgcatgatagttcagtgtctacaataccaggtgattttgtcattggtgtcaagttgacaaccataaacaatatgtgtgcatatgggctcaatcctggtatttcaggttctcgtcttttgggcaccattcctcagtccatttcacagc

SEQ ID NO: 31418 - DNA, 404 bp, Glycine max
  Clone ID: LIB3138-065-Q1-N1-G2
gagaaactttaatcagatgtctaatgttttgtgggtggctcctgaggacaaggcgagtttatggtcacaacttcattatgtttcgtgtaataatctggaaatgcaagaagcttatcttgtcaatctcgtaaatgtgttacgagaattgtatttgcacagtccagaggaagctcgccaattgagaaggaaagctctctctcgtattgaatggctgcaaaaagctgatgtgcctaccatagcacagattgaagagttccattcgatgcagaggatgatgaatgctcctgattcaaatgataatattgatttactgttgagcattgatttgttgggtttacaaggagcaggtaaagcttttccaaacaaaattgtttttgatgataagcttgtgttggctaacacac

SEQ ID NO: 31419 - DNA, 417 bp, Glycine max
  Clone ID: LIB3138-065-Q1-N1-G3
aaaaaaaaaaatttatttttaaaaaaaaaaaaaaaaaaaaaagggatggttttataaaaaaaaaaaacaaaaaaaaaaaaaaattaaaaaaatatattaaccaaaaataattaaaaacatttctttaaatttttttactaaacaaaaatttttgtattccctcaccctcttttcttttgcttaatttatatttgttttttcatcctcaaaattataaatttcctcgcattttttattaaccctttattttgttttattcattaatttggtttcatgctctaaattttaagctttggaaaacttttttttttgaaaccactctttgaaaattttttattaacacaaaatattttttttttataagattatttttttataatttaaattttttcccccattttaagttatttttttttt

SEQ ID NO: 31420 - DNA, 400 bp, Glycine max
  Clone ID: LIB3138-065-Q1-N1-G4
gttcccaggacctattgtgttttaaatccacaaaatccttttgtgttgaataggtggatgggaaaattgactttcccccagggcacttcccgaagtgttaagagaatgcctctttctatagggggaggagctggtgcaaagaatgctattctcatgaatatgccaaatgctgttctttcaatgtggagatattttgttggagatctcgtctttgaagtttctaagatgacttctccctacattaaatgtacagtctctttcttcatagcatttggaaatttggctgatgataccatcaattttgaggcttttccccacaagctggtgcagtttggagagattcaagaaaaagttgtattgaaattttcacaagaggaatttcttacagcttggtcaactc

SEQ ID NO: 31421 - DNA, 405 bp, Glycine max
  Clone ID: LIB3138-065-Q1-N1-G7
aaacgatggaagatgacgcagcgattgaggtgaggaaccatgtttccccagaaccagagccagagtcggaggaggattccagttgttgttgcccaatctgcttgggaccattccttcaactttcctacctcgacaaatgttttcgtatgccctcaccctattttctgttgctcaattttctgtgttttttaatcctaaagtttataaatttgttgcatatgctatagaccctttattgggtttcattcatgaattgggttgcatgctctaatttgtagtcttgggaaacctttttgtttgaaagtaactctcggtaattatatatcaacacaagatttgttttattagaggatcattacttgaaagttcagattttagcaacaattaaaagtaattgtactatat

SEQ ID NO: 31422 - DNA, 403 bp, Glycine max
  Clone ID: LIB3138-065-Q1-N1-G8
attgaagttaaaagccttagccttccctacaactccaaacacaaagacatcatcatccatggctgcctccgtctccactgtcggagctgtcaacagagctcttttgaacctgaatggttctggagctggagcttcagctcccagttcagccttctttgggaccagcttgaagaaggttattgcctcaagggtccccaacagcaaggtttccggtggaagcttcaagattgttgctgtagaagagaagaaagagattgaagagacccagcagaccgacaaggacagatggaagggtcttgcctatgatatctcagacgaccaacaagacatcacaagaggaaagggtttggttgactcccttttccaagctccacaggatgctggaactcactatgcagtcatg

SEQ ID NO: 31423 - DNA, 376 bp, Glycine max
  Clone ID: LIB3138-065-Q1-N1-G9
atttcattgccttcttatgcttatgttgtgtctgctttcactgctttttctggacatcaatgatctgaatgatttctggtgttggaacagacgatagttcacttgtagcacaacctggtactttctaagaggtgataagaaaatgcaattgtaccatcatccatttgatttggactcccagaaggtgagacttgcgttggaagagaaaggcattgattatacatctcaccatgccaatcccataactggcaagaacttggattcttcattcttcaacatgaatcccggaggaagactccctgttttccaaaatgggtctcacatgctttacaagactattgatataatccagtacataaaaagaattgctgtgttc

SEQ ID NO: 31424 - DNA, 411 bp, Glycine max
  Clone ID: LIB3138-065-Q1-N1-H1
gggtctcggagtgtttgggtttgtttatcttaaacaccacaaacacagaacagaggtgtagagaagaaagctaaaaaatatggcggcagagtcatcactgagggtggcgactcccactctttgcaacctcaatgggtctcagagacgaccaaccaccaccactctctctccgcttcgcttcatgggttttcgtcctcgaccctcctctcactctctcacctcctcttccctttcacacttctttgggagcacaagaattcactccaattcttcttcttcttattcttccatttcacgccaacatgctccgagaagaaacttctctgttttcgccatgtctgctgatgacgcaaagcgcagtgttccattgaaggattatcgcaacatcggtatcatggctcacatagatgc

SEQ ID NO: 31425 - DNA, 168 bp, Glycine max; identical to SEQ ID NO: 29971
  Clone ID: LIB3138-065-Q1-N1-H10

SEQ ID NO: 31426 - DNA, 147 bp, Glycine max
  Clone ID: LIB3138-065-Q1-N1-H11
acaaattgcacataaagctggcgaattatctgtatttttgggtgtaccacttttttactgatgagaattgaacttaattagaaattaaattgcacaaaaagcttcagaattgtcctatttattttgtgtaccttttgaaatattttg

SEQ ID NO: 31427 - DNA, 400 bp, Glycine max
  unsure at all n locations
  Clone ID: LIB3138-065-Q1-N1-H12
ccactcttcatcatgccactccctctccttcttcctctgagcccgttcacatcacccaaaactgcgttcgaagaatgaaagaactggaaggtagtgaatcatcaacagatggaaaaatgcttcgtttgagtgtggaaactggtggatgttctggattccagtatgtttttaatctagataacagaatcaactcagatgacaaagtttttgagagagaangagttaaattggtcgttgacaacatatcatacgattttgtaaaaggggcgactgttgattatgttgaggagctaatccgttcagcttttgtggtgactgaaaaccccagtgcagttggtggttgcagntgtaaaagttccttcatggtgaaacagtagtgattttcttagtccttgcccct

SEQ ID NO: 31428 - DNA, 405 bp, Glycine max
  Clone ID: LIB3138-065-Q1-N1-H2
agagaatccgatgcgaagagaagagaaaaattaacatggaggggaaggagcaggatgtgtcgctgggagcgaacaagttcccggagagacagccgattgggacggcggcgcagagccaagacgacggcaaggactaccaggagccggcgccggcgccactggttgacccgacggagtttacgtcatggtccttttacagagcagggatagcagagtttgtggccacttttctgtttctatacatcactgtcttaaccgtcatgggagtcgccggggctaagtctaagtgcagtaccgttgggattcaaggaatcgcttgggccttcggtggcatgatcttcgccctcgtttactgcaccgctggcatctcaaggggacacataaacccggcggtgacatttgggc

SEQ ID NO: 31429 - DNA, 405 bp, Glycine max
  Clone ID: LIB3138-065-Q1-N1-H3
ataaaaatataaataatataaatataaaaagaacaaacacaaattttatgtgattagtcgcggtatttaaaataaaaaatgaaagtagacaaataaaaaaggaaaggagatgtttgaataaaaataattccccttcaagttcttattttttgagaagacaggacaatatgaatgttttattatgctctatcaacacattaaaaagattatatgatatatctgctgtggaagtaggtcaacatttctattggcaaatagggagtttccaagtacatgcccaagtacttattacttcttgggttgtaattgctctcttattggtttcagccattctaattattcgaaatctgcaaaccattcccgctttcggtcagaatttctttgaatatgttcttgaattcattc

SEQ ID NO: 31430 - DNA, 352 bp, Glycine max
  Clone ID: LIB3138-065-Q1-N1-H8
ggggaattgaatatatataataagaaaaaggcggaaaaaaaggggaataaaaaccaaaaaaaaacaaaaaaccaaaaaaaaaaaacaacagaaatataaaaatcactcaaaaccttacatcgtttttcccaaaaaactcaaacctctcactcgtttcccatcttttcaacaaaagtcgcagcctttccatcaaaaccagctcttatcgatgcagactcttcacaaacactttctttcgcagaactcaaattactaactgttaaggtcactcacggcctccttcgtctcggagtgaccaaaaacgacatagttctcttcctcgctcccaacgacatccgctacatcgtctgct

SEQ ID NO: 31431 - DNA, 414 bp, Glycine max
  Clone ID: LIB3138-065-Q1-N1-H9
ctcgagccgcataacacaaagcacaaagcaaagctcatccttgagttaaaaaatggcagcagcttcttccatggctctctcatccccatccttggctggcaaggccgtgaagctgggcccatcagccccagaagtgggaagggtgagcatgaggaagaccgtcaccaagcaggtctcctcaggaagcccatggtacggcccagaccgagtcaagtacttgggcccattctctggcgagcccccgtcctacctaaccggtgagttcccaggcgactacggctgggacactgctgggctttccgcagacccagaaaccttcgccaagaaccgtgaactcgaagtgatccactccaagtgggccatgctcggagccttgggctgcgtcttcccggagttgctgtcccgcaacggggt

SEQ ID NO: 31432 - DNA, 415 bp, Glycine max
  Clone ID: LIB3138-066-Q1-N1-A1
gacctattgtgttttaaatccacaaaatccttttgtgttaaataggtggatgggaaaattgactttcccccagggcacttcccgaagtgttaagagaatgcctctttctatagggggaggagctggtgcaaagaatgctattctcatgaatatgccaaatgctgttctttcaatgtggagatattttgttggagatctcgtctttgaagtttctaagatgacttctccctacattaaatgtacagtctctttcttcatagcatttggaaatttggctgatgataccatcaattttgaggcttttccccacaagctggtgcagtttggagagattcaggaaaaagttgtattgaaattttcacaagaggaatttcttacagcttggtcaactcaggtgcgttctgcaacaactctg

SEQ ID NO: 31433 - DNA, 363 bp, Glycine max
  Clone ID: LIB3138-066-Q1-N1-A10
ctggaaagcaaccacagcaccacacaaagttaacatgaatagagtaacattgggggcggggggctataggcagttaagttataaagccccctacggtgcagtggatattccaagaccaagaggtgaagctaccttgagctgcagtctgttacattttcttttggtagccagggcctgttgcatatttcccccctcgattataatgattgtgtatagcttgtgcaatttgtttgttcttactccttttcaacattgcatttttatcggctcaatgtgctatgtctccacatgaagagcagaaatggatatatataagattgccgggttaaaatgtacccaaaaacaagtctgcggaggttggtt

SEQ ID NO: 31434 - DNA, 395 bp, Glycine max
  unsure at all n locations
  Clone ID: LIB3138-066-Q1-N1-A11
gtgaaaccgatcgcctctctaaatccttctaatgcaagacaaaagtacccttcagagccgcgcaaatcatcttcaatgcgattatccggcgaaagagaccatggcctagaacttgaacaattccccaagaagaagtaacgtctcctgaaagccttacttagccggggccaggctaagaaggatgacatgctattcacatacttggacgagttctgatactttacaacctatagaaagcaagggaaacaagtcaattttgcttgctagttcgataggttgcactttgtcatntaaaatgaacgtttatacggtaattttctttcatctgtattttaaattaaggtaactaagcacacaaaattatgatgtgtgataatgtaatagntcaagcttta

SEQ ID NO: 31435 - DNA, 398 bp, Glycine max
  unsure at all n locations
  Clone ID: LIB3138-066-Q1-N1-A12
gccttggctggaatgttccctcacaatgcctccaatcataagagtacggatttagatggcaaatttttgccagataattcatcagttttgcaagacttggaggataatgcgagtgctgctgctcttcaagattctattctagcctcagcaactgctcctgttgcaagtcctagttatcatgaaagttcagctggagatacttcaaaaatcagttggttgaatgaagctgttggtcaaaaacaacctgattttcctgagagtgcaacgctcttgatgccatctcatagcacttctataacaataaatcttcagaccatgcctgtggcggctaagcgtgaaaatagcaacaaagctgcattgcatgactctgnagtatgtctagcaatgggatttaatat

SEQ ID NO: 31436 - DNA, 412 bp, Glycine max
  Clone ID: LIB3138-066-Q1-N1-A2
atcaaatggcaacagtgagaacaccattgaattttgattctagcaagcagagcttttgtcagttttctattgaccttctcggtggaggaatcttagtggacaaaactggagattggatcacacttatacaaaattctccaattagtaacttgttgagagttgctgcttggaagaaaggctgtttaatggtcaagattgtgatgtctgggaatgcagcagtcaaaaggagtgattgggcctcattggtacaagtgtttttaacaaacagcaacagtacagagcattttgatgcatgtaagtggacaaaatcagaaccacattcctgggaattgatcttcccaatagaggtatgtggtcctaataatggttttgaaatgtggagttctgagtgggcaaatcaaacttcatggca

SEQ ID NO: 31437 - DNA, 414 bp, Glycine max
  Clone ID: LIB3138-066-Q1-N1-A3
attttctcaagagaaactttaagcagatgtctaatgttttgtgggtggctcctgaggacaaggcgagtttatggtcacaacttcattatgtttcgtgtaataatctggaaatgcaagaagcttatcttgtcaatctcgtaaatgtgttacgagaattgtatttgcacagtccagaggaagctcgccaattgagaaggaaagctctctctcgtattgaatggctgcaaaaagctgatgtgcctaccatagcacagattgaagagttccattcgatgcagaggatgatgaatgctcctgattcaaatgataatattgatttactgttgagcattgatttgttgggtttacaaggagcaggtaaagcttttccaaacaaaatttgttttgatgataagcttgtgtttgctaacacac

SEQ ID NO: 31438 - DNA, 404 bp, Glycine max
  Clone ID: LIB3138-066-Q1-N1-A4
gtactgatgtatctgagaaaaggatagttggagtcttccatgggctccttcatctcacactccataagcaaactgagcgcaagaacgttagcaacttgcgtagacccttggccctacctcagaagtttactaaagtatttgagcgtcatcctggtattttttatatttccaagaggagtgatacccaaacagttgttcttaaggaggcctataatggtcaagaacctgtgcagaatcatgcccttgtacaaattagagaggaattcgcaagcctgctgaagaaagggctattggataggagtaagggtgtatacaaaaaaagcagacacactaatttggtggagggttttagaaaggaggtttgcattgctaaaaaactaaccagcttagttctcaggatgaat

SEQ ID NO: 31439 - DNA, 402 bp, Glycine max
  Clone ID: LIB3138-066-Q1-N1-A5
tccattggttcttcatctgcatgcacacacttgcataggggtggaaaccaagaattttggaagggtatcatcaacaagaagttctggaaatggagatcaccaatgtcagcgagtatgaagctattgcaaagcagaagttgccaaagatggtgtttgactactacacatctggtgcagaggaccagtggactctgcaggagaacagaaatgccttatgcagaatttagtttcggccacgtattcttattgatgtgagcaagatacacatcacaactactgtcctgggcttcaaaatatccatgccaatcatgcttgccccaacagccatgcataaaatggcttatcctgagggagaatatgcatcagcaaaagctagatttgctgctggaacaatcatgactt

SEQ ID NO: 31440 - DNA, 397 bp, Glycine max
  Clone ID: LIB3138-066-Q1-N1-A6
atacaaaggttgctgtaggagataagattgcagtagtgctaagtgctaacacctgcagtgaacaatggcctctgcatcagcatctctgctcaagtcttcacttgttcttgacaagtctgagtgggtgaagggacaaacccttcgccaaccttctgcatcagttgtgagatgcaaccccaccaccccatcaggcctcaccatcagagctggttcctatgctgatgagctcgttaagaccgcgaaaacagtggcttcaccagggaggggtattttggccatggatgagtccaatgctacctgtgggaagcgtttggcttcaattgggctagagaacactgaagctaaccgccaggcataccgtacccttctcgtgacagttcaggccttggtcagtaca

SEQ ID NO: 31441 - DNA, 387 bp, Glycine max
  Clone ID: LIB3138-066-Q1-N1-A9
ctcgagccgaatcggctcgagcagccatggccacccacgcggctctagcttctacaaggatccccactaacaccaagttcccatccaaggcttcacactctttcccaacccaatgcgcctcaaagagacttgaggtgacagaattctctgggctaagatccacttcatgtgtgacatatgctaacgatgctagagaatcttccttttttgatcttgtagcttcccaactcactcccaagaccaatggatcatcaactcctgtgaggggagagacagtggccaagttgaaggtggcaatcaatggtttcggacgcattggtagaaacttccttcgctgctggcacggccgaaaagactcaccccttgaggtcgttgttgtcaacgaca

SEQ ID NO: 31442 - DNA, 375 bp, Glycine max
  Clone ID: LIB3138-066-Q1-N1-B1
ggagaattagagttgccacctgggttcagatttcaccccactgatggagaatcggtgaatcactacttgtgtaggaagtgcgctggtcaaccaatcgcgggtcccgtcatcaaagagggcgatttgtacaagtttgatccatggcagcttccaaaaattggtttttaccgcgagaaagaatggtacttcttttctcctctggaccggaaatacccgaacggttcactgtcgaaccgcgccgtccgaagcggctattggaaagccaccggcgctgattaaccgatcgggaaaccgaaagcgcttgggatcaagaaagctctggttttttacgccggaaaagcgcccaaaggtgtgaaaaccaattgattatgcacg

SEQ ID NO: 31443 - DNA, 371 bp, Glycine max
  Clone ID: LIB3138-066-Q1-N1-B10
caataccaggtgattttgtcattggtgtcaagttgacaactataaacaatatgtgtgcatatgggctcaatccaggcatttcaggctctcgtcttttgggcaccattcctcagtccatttcacagcaaactgtctggaatcaaatggcaacagtgagaacaccattgaattttgattctagcaagcagagcttttgtcagttttctattgaccttctcggtggaggaatcttagtggacaaaactggagattggatcacacttatacaaaattctccaattagtaactagtagagagttgctgcttggaagaaaggctgattaatggtcaagattgtgatgtctgggaatgcagcagtcaaaaggagtgat

SEQ ID NO: 31444 - DNA, 396 bp, Glycine max
  Clone ID: LIB3138-066-Q1-N1-B11
gggctgcgatgatgaggcatgtggacaacatagtagttctaaacggaggaaggatagtggaggaggggacccatgattcattggtggcaaaaaatggtctgtatgtccgattgatgcaacctcattttggtaaggctttgcgccagcatcggcttgtttagattgggagtatataatgtgagtagttgcaactaatgttgcttcatgagaattgtttcatatattacttgagttgaatgactggtgattgctgcacctggtggaattttccaatgtcaggtggaggcttgcatgtagcaagaatgggagtattggatcagcactcggcattggttggcataagaagagggtactgtggcaagggtagtgtaggaattaatgataggaatttggaat

SEQ ID NO: 31445 - DNA, 375 bp, Glycine max
  Clone ID: LIB3138-066-Q1-N1-B12
gaggaagcggatttctggtgttggtgttgacggcattgggaagaagcttgtgaactcaaaagatggacctccaacctttgagcagcccaagatgactctggagaagctcttgacgtatggctacatgcttgtccaagaacaagagaatgtcaagagagtccaattggctgacaagtacttgaacgaggctgcacttggaaatgctaacgaggatgctattaacaggggaactttcttacaatcttgaattggaggcaaagcaaacttggcaaagtaatatttttagtcctgaaagttgtgctgatccaagtgctagaagttgtgatgggactcgcgtgtaacattcttagaattctcaaagtcttaggtgcaaag

SEQ ID NO: 31446 - DNA, 261 bp, Glycine max
  Clone ID: LIB3138-066-Q1-N1-B2
caagtatatgattcttcatatgcgccggtttactaaaaagaatggttttgttgaaaagaatcctacgttagtcaactttcctgtgaagaacctggagttgaaggattacattcccttgccaacaccaaaagaaaatgagaaattgcgaactaaatatgatttgattgctaatgttgttcatgatggcaaacctggtgaaggattctatagggtatttgtgcaacgcaaatcagaagaactatggtaccagatgcaggattt

SEQ ID NO: 31447 - DNA, 392 bp, Glycine max
  Clone ID: LIB3138-066-Q1-N1-B3
agaaaatgggtggtagttgatagaagaacaaaaactcagagctggggttgattccctcgaccggaattgggcactcgacttaatatctagaatctgcacagcattctaatacaaccgtgacaacccgtctttccgacacaatcctctgcatcaagtgccctgtgacaccctctgcagactcttacatgagaacagcttgaccctcacaacccaaaatcaaactcattgatctccctctagtggagccaccaccactggagctagctctcaactaccctgaacactacatatggaccttaaaggaaagccatagaccccatgtcaaaaccatcatgcaaaacattttatcacacccaggtgttggttcagtccacgatatcattgctatgtct

SEQ ID NO: 31448 - DNA, 412 bp, Glycine max
  Clone ID: LIB3138-066-Q1-N1-B4
attttgattctagcaagcagagcttttgtcagttttctattgaccttgtcggtggaggaatcttagtggacaaaactggagattggatcacacttatacaaaattctccaattagtaacttgttgagagttgctgcttggaagaaaggctgtttaatggtcaagattgtgatgtctgggaatgcagcagtcaaaaggagtgattgggcctcattggtacaagtgtttttaacaaacagcaacagtacagagcattttgatgcatgtaagtggacaaaatcagaaccacattcctgggaattgatcttcccaatagaggtatgtggtcctaataatggttttgaaatttggagttctgagtgggcaaatcaaacttcatggcatttgagtttccttattgacaatcccaaaca

SEQ ID NO: 31449 - DNA, 398 bp, Glycine max
  Clone ID: LIB3138-066-Q1-N1-B5
ggatgagaaacttcctcgtcgcaaaatttttgacaaacctaagacgcgctgcttcactattctccctatggagtttaatcttgtggtccgtcaaaagtttttaaattttgtgaggttcattatgaagaaaagggacaaacttagttgtcaagttggaatcaacccatactccatggaatggactggtttggccaatagattactgagtaagggcaatgatattctgtgttgcgattatgctagttttgatggtttgattaccaagcaagttatgagcaagatggcagaaatgataaacagtctttgtggtggtgatgaaaaattgatgcgtgaaaagacgcacctgctgttggcttgttgttcaaggatggcaatttgtaagaaagatgtttggagag

SEQ ID NO: 31450 - DNA, 401 bp, Glycine max
  Clone ID: LIB3138-066-Q1-N1-B7
ggaatcccttctggatttccgctcacagttatttgcaatagcatttttaatgagatgctcattagatatagctatgaaaaattactgcgccaggctaaagctccaagtatgtttttacaatccttcaaaaattttgtttctttgtgtgtgtatggtgatgataacttaattagtgttcatgaatatgtcaagccttactttagtggttctaaattgaaaagctttctagctagtcataacatcaccattactgatggtattgacaaaactagtgcaactttgcaatttagaaagttagcagattgtgattttctcaagaaaaactttaagcagatgtctaatgttttgtgggtggctcctgaggacaaggcgaagttatggtcacaacttcattatgtttc

SEQ ID NO: 31451 - DNA, 362 bp, Glycine max
  Clone ID: LIB3138-066-Q1-N1-B8
atcgccgtgaaacgattgttattattattttcttgttctgcaggttttaatcggtgttttttttatgcctaaaagtcacttgcggaaattaggttaggttcgagcggcactttgccattgttgatggagcggtccgggagcctaaacagcagtcagcatgttatagaaatagctgggagcgccgatgcttccacatcgtctgcatcacatcatgatagacattttaatggcacaaatgtgacgcaccatgaagaaagaattagcggtgcaaggatgcctctttctcagccttcagtttcagcaactagtgtatctaatgggtcaaatagtcgaaactcatcgttcataagacgaggggatac

SEQ ID NO: 31452 - DNA, 394 bp, Glycine max
  Clone ID: LIB3138-066-Q1-N1-B9
gttggcgtgcccggtgaacatcagcgtattcttcgcgagcctcacgtatttcggcttctcaagcactggctgaaggctggagaacccgatcccttttacaacccggtcaatgattatgtgattctacctactgcttttgaaatggagaggcataaagagaaaggtgtagaagtagcatcccttaaagaggaatgggaaattatttccaaagtccaagatgaccaaagcagcacagcagataaagtgtgttccatatcaatttcacaagaaagagccaatcaatcttattctgaggctcatgctactgtcattgttcacccagacagtgagggtaaacaacacgttcaactgaatgctttggctagttcagttgatgcctcatgaataacattct

SEQ ID NO: 31453 - DNA, 413 bp, Glycine max
  Clone ID: LIB3138-066-Q1-N1-C1
cgaaaaccaagacaactctgtccgagaaatcaagcccaagaataggagaatcatgggtgctggaggccctgatgatgaggacaacaacaggtggccaccgtggctgaagcctctgctaaaagaaagtttctttgttcaatgcaagcttcacgctgattcgcacaagagcgagtgcaacatgtactgcttggattgtatgaacggtgctctctgctctctctgcctcgcttaccataaagatcatcgtgctattcagataaggaggtcctcataccatgatgtgattagggtgaatgagattcagaaggtgttggacatcacaggggtccaaacctacattatcaacagcgcgagggttgttttcttgaatgagaggccgcatccaaggcctggtaaaggtgtcaccaacactt

SEQ ID NO: 31454 - DNA, 394 bp, Glycine max
  unsure at all n locations
  Clone ID: LIB3138-066-Q1-N1-C10
gttggctaacacacaagaattctttgatggaaattttccagtggattcttggttaccaatttttgagaattgtctttatcctgtaagtcaattaccttcagaagctgtcgtcgtaaatagcacatgtggtagtggacgtggtggtttacccaccactgcttggattagttctgcagctaacaatcgctcctcagatatcaacaaaaggattcgcacatcacttgggaaaggtaagaaaattgtttttcttactagagttgatccttntccagtagctctactggctgttctttttggcgttaagtatgaaattctgagttctaacgccactaatcctatgctgacgcgacttcttgagaactgcaagagtctcaaatatctggttgatgagtgt

SEQ ID NO: 31455 - DNA, 377 bp, Glycine max
  Clone ID: LIB3138-066-Q1-N1-C11
ccgaagaagccgttttcgcatgcctgcaactccacccagtaacaaaggaagaatctctaccctcttcgctttcactcctcgccaagttttgttaagcaaccaaacaatgaagcacaccactgacaatggaacccccatctcggaacacaaagttcttcttcaccaatccattgcccgttacttggaacgcagtggcttctccaaaactctgaaaaaatttctctccgaagcgcatatcgagaaaaacgatttggagggatcaccagttgatctggaagaaatgtgtctcaagtatttagaaatatgtggcaaagatgggaagtcaaatattaatgatcaaaatgagcaagttgcaagtgggcacagcataaacaaaa

SEQ ID NO: 31456 - DNA, 345 bp, Glycine max
  Clone ID: LIB3138-066-Q1-N1-C12
gttttgaaaactctcttgtaaatctctcaagatttcgaaagagcaggtgatactctaatgccaactttttctgtcccacaagctactgcctcatcttctgaaaacgcggaatgcgctgcatgagctggaattagagctgtctttcgatagagagctagtgttattgaatgtacgaaacatggcatgaccattttggtgagtatgctattcctatgggaaaataacaacacctcttgtaactgtcataatagagcgtgaagtgtgctctattcataaaagaaaataagtttataagttgccataacttatttaggatttgtggcgtgcgccaattaatgagctttt

SEQ ID NO: 31457 - DNA, 415 bp, Glycine max
  Clone ID: LIB3138-066-Q1-N1-C2
tgggactcggtccgctttcacagatcgtcaatatgtttcctggcggggtgggtggcctcggcgaattcatgaagcaagatggtgtagaggaagctggtgggaaaagcatgaagggcatgatgtgtataatggattcaatgacgcagaaagagttggacagtgaaggaccacccaaaatgttcccagaagagggtaccaggatagcaagaatagccagaggatgcgggaagaccccagaagacatcaacgatttcatcaaccaatacagaaccatgtcaaaaacacttaagaacataactggtaacaaaggcctgatgggcatgctgagcggcatgggcggtggcggtggagcaccaggcgggcagccaggtggaggcatgatgaacccacaaatgatgagtcaactttctaaagg

SEQ ID NO: 31458 - DNA, 392 bp, Glycine max
  Clone ID: LIB3138-066-Q1-N1-C3
caagctaatagttgaacttgagaaaagtgttcctacattggggggggttgaatgtcccaaggatgagaaacttcctcgtcgcaaaatttttgacaaacctaagacgcgctgcttcactattctccctatggagtttaatcttgtggtccgtcaaaagtttttaaattttgtgaggttcattatgaagaaaagggacaagcttagttgtcaagttggaatcaacccatactccatggaatggactggtttggccaatagattactgagtaagggcaacgatattctgtgttgcgattatgctagttttgatggtttgattaccaagcaagttatgagcaagatggcagaaatgataaacagtctttgtggtggtgatgaaaaattgatgcgtg

SEQ ID NO: 31459 - DNA, 409 bp, Glycine max
  Clone ID: LIB3138-066-Q1-N1-C4
ctgggaatgcagcagtcaaaaggagtgattgggcctcattggtgcaggtgtttttaacaaacagcaacagtacagagcattttgatgcatgtaagtggacaaaatcagaaccacattcctgggaattgatcttcccaatagaggtatgtggtcctaataatggttttgaaatgtggagttctgagtgggcaaatcaaacttcatggcatttgagtttccttattgacaatcccaaacagtctacagtttttgatattctcttgggaatctctcaagattttgaaattgctggtaatactcttatgccagctttttctgttccacaggctactgccagatcttctgaaaatgcggaatcctctgcatgatctggaatttgtgttttctttcgcttgttcgtttgtttaat

SEQ ID NO: 31460 - DNA, 401 bp, Glycine max
  Clone ID: LIB3138-066-Q1-N1-C5
cacgcggctctagcttctacaaggatccccactaacaccaagttcccatccaaggcttcacactctttcccaacccaatgcgcctcaaagagacttgaggtgacagaattctctgggctaagatccacttcatgtgtgacatatgctaacgatgctagagaatcttccttttttgatcttgtagcttcccaactcactcccaagaccaatggatcatcaactcctgtgaggggagagacagtggccaagttgaaggtggcaatcaatggtttcggacgcattggtagaaacttccttcgctgctggcacggccgaaaagactcaccccttgaggtcgttgttgtcaacgacagtggtggtgtcaagaatgcttcgcacctgcttaaatatgattccatgct

SEQ ID NO: 31461 - DNA, 194 bp, Glycine max
  Clone ID: LIB3138-066-Q1-N1-C6
ggtgatgataacttaattagtgttcatgaatatgtcaagcctgactttagtggttctaaattgaaaagctttctagctagtcataacatcaccattactgatggtattgacaaaactagtgcaactttgcaatttagaaagttagcagattgtgattttctcaagagaaactttaagcaaatgtctaatgtttt

SEQ ID NO: 31462 - DNA, 265 bp, Glycine max
  unsure at all n locations
  Clone ID: LIB3138-066-Q1-N1-C7
gagaaaatgataaacaattgcatgcattacagtgctagaatggaagggatggaatgggagaagtgacaatagtgacattgcaaatttcattctcttcaattcttttccattccttaaatggcaatagatagtgtttgtttataagtttaaagaccatctttccttctgggatttgacaattttaagtaatacttgtactcttatttttcattttgtaaatgttacattggataatcaaacttcattcaatgattgaatgttgntt

SEQ ID NO: 31463 - DNA, 373 bp, Glycine max
  Clone ID: LIB3138-066-Q1-N1-C8
ccttgatgtggtggatttggtcttaattatgtccgtaaaccctggctttggtggccagagttttattgagagtcaagtaaagaaaatttctgacttgagaagagtgtgcgcggaaaagggagtgaatccatggattgaagtagatggtggagttggtccagcaaatgcttacaaggtgattgaggctggagccaatgctctggttgcaggctctgctgtgtttggagctaaagattatgccgaagctataagaggaatcaaaaccagcaaaagacctgaagcagttgctgtgtgaaatgcccatgtggttcaatattcaccgtatgctccaacacagtactcatgaattagtggcctatcgagcaccattatg

SEQ ID NO: 31464 - DNA, 382 bp, Glycine max
  Clone ID: LIB3138-066-Q1-N1-C9
cgattgcaagtgatccacgacacactgttcgcttcacaaaagcttcgaatccaattcctcagtaacatctgcaagaagtcttctccttcaccatgccaccaaagcctttagactatgggtcaataaatgaaaacgtgaagaagagtcaatatgctgtcagaggtgaattataccttcgagcttctgagcttcagaaagagggcaaaaagattatatttactaatgttggcaacccacatgcattgtgacagaaaccactgagcttccctcgtcaggttgttgctttgtgccaagctccattcctacttgatgatcctaatagtggactgctattccctgctgatgcaattgcaagagctaaacactatctttcattgacctc

SEQ ID NO: 31465 - DNA, 371 bp, Glycine max
  Clone ID: LIB3138-066-Q1-N1-D1
aaaaaaaaaaatttttttttaatataataaaaaacaaaaatagagagggaaaaataaaaataaaaaaaaaacaaaaaataacatttcaaaaataaattataaaaaggggcgcccccctccttttaacctcgtcaccccgggatttatttccggaccgtaccctccaggcttcccacctttccttataatgattcgtattacaccttcccgtaaccatggtcataactgtttcctgtttaaaattgttaccccctcccatttccccacatcttcctacccgaaaccataaagtgtaaaccctgggttccctaatgattgacctaactcacattatttcctttgccctaactgcccgttttccaatcagaaaa

SEQ ID NO: 31466 - DNA, 398 bp, Glycine max
  Clone ID: LIB3138-066-Q1-N1-D10
gtacaatactatgggatccaaagaggtggcatcgccccactctagaacctatcaggcaacttgactcggtcaaggaaagttcgagggttagcacattgattgagcaggtggttgaagatgaaagtcaaatggagggcttaatgcacaactgctcgagagttatggtctggcagattgatcttgaatcatcttattcatcctatcctcagaaatggattgcaaagaacaacctagatgccattgttcatcttacacttgtgtagaaatcctcagatgcagaagtggagagcagtaaattttcatcctgattggaagattataaagaataggaagtcgcctgctaatgctgttatttatctttacatgctccagtgcctacttcgatattccatttaacg

SEQ ID NO: 31467 - DNA, 385 bp, Glycine max
  Clone ID: LIB3138-066-Q1-N1-D11
caattttgaggcttttccccacaagctggtgcagtttggagagattcaggaaaaagttgtattgaaattttcacaagaggaatttcttacagcttggtcaactcaagtgcgtcctgcaacaactctgttggctgatgggtgtccatatttgtatgcaatggtgcatgatagttcagtgtctacaataccaggtgattttgtcattggtgtcaagttgacaaccataaacaatatgtgtgcatatgggctcaatcctggtatttcaggttctcgtcttttgggcaccattcctcagtccatttcacagcaaactgtttggaatcaaatggcaacagtgagaacaccattgaattttgattctagcaagcagagcttttgtcagttt

SEQ ID NO: 31468 - DNA, 378 bp, Glycine max
  Clone ID: LIB3138-066-Q1-N1-D12
cacagacctacctagcgtgatgacttgtgcaaattatctcaagctgcctccgtactcatcaaaagaaaggatgaaagagaagctcttgtatgccataacagagggtcaaggatctttccacctttcataattgcactctcttaactggtccataattgaagaattatgaagatgtaattattagggtaattgatagttatgtagataagggagctagtggcttgctggcagtggtctaaatgagtttattgcagaggtggtcacacgagtcactcagctatgaagcttctatcttcactgactacaaaaaattgttgggggtgtgtacatagcacgctgatagtttacgtgattgacttgtatcagctgtacagacac

SEQ ID NO: 31469 - DNA, 413 bp, Glycine max
  Clone ID: LIB3138-066-Q1-N1-D2
agcttttgtcagttttctattgaccttctcggtggaggaatcttaggggacaaaactggagattggatcacacttatacaaaattctccaattagtaacttgttgagagttgctgcttggaagaaaggctgtttaatggtcaagattgtgatgtctgggaatgcagcagtcaaaaggagtgattgggcctcattggtacaagtgtttttaacaaacagcaacagtacagagcattttgatgcatgtaagtggacaaaatcagaaccacattcctgggaattgatcttcccaatagaggtatgtggtcctaataatggttttgaaatgtggagttctgagtgggcaaatcaaacttcatggcatttgagtttccttattgacaatcccaaacagtctacagtttttgatattct

SEQ ID NO: 31470 - DNA, 399 bp, Glycine max
  Clone ID: LIB3138-066-Q1-N1-D3
gagctggggtttaactttgcttattgcaatgccttgaaattagtaatgaacttcatagtgtcttcgaatcacaaagggatttttttccggacattcacacctgatcattttgaaaatatggagtggcttaatgggggaacttgtaagagaacgacaccaattaaaggtgagatggaaatgaaatatttgagaaagatgctccgtgacgttgagttagatgaggttggaaaggcagctactgaagcttaaaaaaatggggtgagtttaaagcttgtggatgttgctccattttcactattgagacctgatgggcatcctagtccatacaggcaatttcacccatttgaaaaagaccaaaatgcttctaaagttcagaatgattgtttgcatttgtgctta

SEQ ID NO: 31471 - DNA, 380 bp, Glycine max
  Clone ID: LIB3138-066-Q1-N1-D4
tttcagattgcctgattaccgacatatataacgttatggatgagtctggatatgcccaacagtactttgtgtcaaattattttgaccccaatgttgatattaaaaacgctattcggaggtttacttttccttacttgagaagatgtgcgttgttgtggaagatactctattcttctatcccagcaccattctgtgatgaggaaaatatattggatagatcatggaatgccccaaaggacataatggactgggccaatattgagatatttgaggtcgctaaaattcaagagctcgagaaaatgttcaaaattccctctcttgatatggttctcaaggatgaactttcaagatctacagtctctatttggtgccatcatttt

SEQ ID NO: 31472 - DNA, 377 bp, Glycine max
  unsure at all n locations
  Clone ID: LIB3138-066-Q1-N1-D5
caatcattctaacggataggatagaaaagagcaaaactgtttgagtctgagagaacttgaaacaacaatggcttcactttccctctctctctccacaccaacaacaccaacctcactctccttcacatcatcctccatcttcttctcttcacaccaattccacacacacaataattctttcaaatccaacagctttcccgttttaccctccaaaaaacccctctccatttcctgcaaggcctcccctcctcttcccgtcctcaacttctccggcgagagggtcggcgagtccttcctcgacctccgctccgnccctcccgacaccgnccgagccgtcgtccaccgcgccgtcgtcaccgacctccagaacaagcgcc

SEQ ID NO: 31473 - DNA, 409 bp, Glycine max
  Clone ID: LIB3138-066-Q1-N1-D6
cacaacagggcattgggccaaatctctgaaagactgaccgtggaggtttctgatgtaaagaatgtcattatctggggcaatcactcatcaacccagtatcctgatgttaatcatgcaactgttgcaacctcagctggggagaagcccgtccgtgagcttatagctgatgatgcctggttgaatggggaattcattactactgttcaacaacgtggcgctgcaattatcaaagctagaaagctttcaagtgcactatcagctgctagtgctgcttgtgaccatattagagactgggttcttggaactcctcagggcacttgggtatcaatgggagtatattctgatggttcctacaatgttccagctggacttatatattcattccccgtcacttgtgccaatggggaat

SEQ ID NO: 31474 - DNA, 404 bp, Glycine max
  Clone ID: LIB3138-066-Q1-N1-D7
aaaaggaagatcaagaaaaacccaaaaagattgatgccagattgagacaaagaatagatcctcaatacaatgaggttcaagctcagatggaaacaaatttgtttaaattgtctcttgatgatgttgaaactcctaaaggttccatgttggatctgaaaatttctcaatctaaaattgcactttccaagaacacagttggaggaaccattctgcgtagtgatctattggcaaattttttgacaagaggcaatttagagcaagtgttgatttgcagcgcactcatcatattagaggaatgattaaaatggtggccacagttggtattcctgagaatacaggtatatcattggcctgtgctatgaatagttcttttagggggcgcgccagttctgatatttacacca

SEQ ID NO: 31475 - DNA, 410 bp, Glycine max
  Clone ID: LIB3138-066-Q1-N1-D8
gaaaaattgatgcgtgaaaggacgcacctgctgttggcttgttgttcaaggatggcaatttgtaagaaagatgtttggagagttgaatgtggaatcccttctggatttccgctcacagttatttgcaatagcatttttaatgagatgctcattagatatagctatgaaaaattactgcgccaggctaaagctccaagtatgtttttacaatccttcaaaaattttgtttctttgtgtgtgtatggtgatgataacttaattagtgttcatgaatatgtcaagccttactttagtggttctaaattgaaaagctttctagctagtcataacatcaccattactgatggtattgacaaaactagtgcaactttgcaatttagaaagttagcagattgtgattttctcaagag

SEQ ID NO: 31476 - DNA, 325 bp, Glycine max
  Clone ID: LIB3138-066-Q1-N1-D9
tcaaacttcatggcatttgagtttccttattgacaatcccaaacagtctacagtttttgatattctcttgggaatctctcaagattttgaaattgctggtaatactcttatgccagctttttctgttccacaggctactgccagatcttctgaaaatgcggaatcctctgcatgatctggaatttgtgttttctttcgcttgttcgtttgtttaattcaataaaggaaattaggcatgaccctcttgttgagtatgctctgcctatttgaaaatttccacacctcttttaattgtcgtaatgatgtgtgaagtgtgtgttatttt

SEQ ID NO: 31477 - DNA, 395 bp, Glycine max
  Clone ID: LIB3138-066-Q1-N1-E1
agaacaagtagttgagaactaagaaggagaagcaaatggctggctcggtgatctcttccccagctgttaccactgtcaaccgtgccggtgccggcatggttgctccattcactggcctcaagtccatggctggcttccccaccagaaagaccaacaatgacattacctccattgctagcaacggtggaagagtgcaatgcatgcaggtgtggccaccagttggcaagaagaagtttgagactctttcctacctgccagaccttgatgatgcacaattggcaaaggaagtagaataccttcttaggaagggatggattccttgcttggaattcgagttggagcacggtttcgtgtaccgtgagcacaacaggtcaccaggatactacgatggacgc

SEQ ID NO: 31478 - DNA, 409 bp, Glycine max
  unsure at all n locations
  Clone ID: LIB3138-066-Q1-N1-E11
acggctcttcttttttcagcaccttaccttattccaatccaatagcaaggaatcaccaaaaatagtgtcatttcatggcttgcaacgaatgcggtcaatcttttgcttctttccacgccattcattgcttgcctgtgtctncctaccattttcaaacacgctttagttagtccttttctcaatgtttcgtcaccaagaagttaccttgtgaagaaaaagcatgtgaaatttagcanacacatcagtgctgctgctgttgcaacaacaacaacaactgaggaaattcaagagtacaagcttccatcatgggctaagtttgaaatagggagggctgctgtctattggaaaaccatgaatggcctccctccttcttcaagagaaaagctaaaacttttctataatccagctg

SEQ ID NO: 31479 - DNA, 383 bp, Glycine max
  Clone ID: LIB3138-066-Q1-N1-E12
gcagcagtcaaaaggagtgatagggcctcattggtacaagtgtttttaacaaacagcaacagtgcagagcattttgatgcatgtaagtggacaaaatcagaaccacattcctgggaattgatcttcccaatagaggtatgtggtcctaataatggttttgaaatgtggagttctgagtgggcaaatcaaacttcatggcatttgagtttccttattgacaatcccaaacagtctacagtttttgatattctctagagaatctctcaagattttgaaattgctggtaatactcttatgccagctttttctgttccacaggctactgccagatcttctgaaaatgcggaatcctctgcatgatctggaaatttgtgtttctttcg

SEQ ID NO: 31480 - DNA, 333 bp, Glycine max
  Clone ID: LIB3138-066-Q1-N1-E2
gagcacagcccttcaacagtattacgtgcattttcttcagaggaagtgttctattgggtcatttaacttgttgggccatactgcaccagcacaggcagcaagtttacttctagtaggcccctttatggactactggttgactggcaaacgagttgatgcctacggctatggtttgacatccacgttgttcatcattctgtcttgcactatcgcagtaaggacaaacctcagccagttcatctgcattggtagggtcacggctgtaacgttccaagtccttggtcacatgaagactattctgggcctgatcttaagaatcattttctttggaaa

SEQ ID NO: 31481 - DNA, 307 bp, Glycine max
  unsure at all n locations
  Clone ID: LIB3138-066-Q1-N1-E3
agctngaagaaagttattgcctcaagggtccccaacagcaaggtttgcggtggaagcttcaagattgttgctgtggaagagaagaaagagattgttgagacccagcagaccgacaaggacagatggaagggtcttgcctatgatatctcagacgaccaacaagacatcacaagaggaaagggtttggttgactaccttttgcaagctccacaggatgctggaactcactatgcagtcatgaactcctacgagtacctcagcactggacttctccagtacttggacaacaaaaaggatggattctaca

SEQ ID NO: 31482 - DNA, 403 bp, Glycine max
  Clone ID: LIB3138-066-Q1-N1-E5
ctggtgcagtttggagagattcaggaaaaagttgtattgaaagtttcacaagaggaatttcttacagcttggtcaactcaggtgcgtcctgcaacaactctgttggctgatgggtgtccatatttgtatgcaatggtgcatgatagttcagtgtctacaataccaggtgattttgtcattggtgtcaagttgacaaccataaacaatatgtgtgcatatgggctcaatcctggtatttcaggttctcgtcttttgggcaccattcctcagtccatttcacagcaaactgtttggaatcaaatggcaacagtgagaacaccattgaattttgattctagcaagcagagcttttgtcagttttctattgaccttctcggtggaagaatcttagtggacaaaactg

SEQ ID NO: 31483 - DNA, 410 bp, Glycine max
  Clone ID: LIB3138-066-Q1-N1-E6
ggtgtggttgtgccttataatgtgacatttgaccattctcaagctgctaaacaagtatatgagaggttccaagcttgtttgggcacaatcctgacatctgggttgcctcaagccaatttgtcacctgctcagcttgaagaccttcctcttttctctattggtcatagcaatggggcacttcttcaagtactcacaggaagcttattttctgagaaaatacctaaggctaatgccataatcgcatacaacaacaggccagcaacggaggcagtcccttactttgaacagttgggtcctgcagtcagccaaatgatgccagttgtggaggcaactcctttttactcgatagctagaaatgcatcaggagatgtgtggaagatgatgttggatgctgttagatcaactctaca

SEQ ID NO: 31484 - DNA, 344 bp, Glycine max
  Clone ID: LIB3138-066-Q1-N1-E8
ggaggaagcttgaacaagcccagagcgatgaatgcgagtttgatggccctgaagagtgcaggggttgaaggtgtaatggtggatgcttggtggggtttggtggagaaagaagggcctttgaagtacaactgggaaccctatgctgaacttgtgcagatgctgcaaatgcatggcttgaagcttcaagttgttatgtctttccatcagtgtgggggaaatgttggagacaattgcagcattcctctaccaccatgggtgttggaagaaatcagcaagaaccctgagctggtttacacaaacagatcaaggaggaagaatcctgagtacatctccttgggctgtga

SEQ ID NO: 31485 - DNA, 317 bp, Glycine max
  Clone ID: LIB3138-066-Q1-N1-E9
agagaagtgagatacactaagttatcctcataaatacactctaattaggtggcaagataagtgtctaaccttagtaacattgccacatattgtgttcattttggaattgtgccactaaaattctattcaattcatctatggctgcctcttcttatgctatgcaatcaatcctggcaaaccctttgatccgcatttccagcgggtctaaggtgaaccaatttggcgttcctgctttgcacatgagaaggaatgttggcctgagagttatgtccatggctaaggaagaacaaccaagtgagcctgcaaccccagttaca

SEQ ID NO: 31486 - DNA, 410 bp, Glycine max
  Clone ID: LIB3138-066-Q1-N1-F1
gtttggaatcaaatggcaacagtgagaacaccattgaattttgattctagcaagcagagcttttgtcagttttctattgaccttctcggtggaggaatcttagtggacaaaactggagattggatcacacttatacaaaattctccaattagtaacttattgagagttgctgcttggaagaaaggctgtttaatggtcaagattgtgatgtctgggaatgcagcagtcaaaaggagtgattgggcctcattggtacaagtgtttttaacaaacagcaacagtacagagcattttgatgcatgtaagtggacaaaatcagaaccacattcctgggaattgatcttcccaatagaggtatgtggtcctaataatggttttgaaatgtggagttctgagtgggcaaatcaaac

SEQ ID NO: 31487 - DNA, 335 bp, Glycine max
  unsure at all n locations
  Clone ID: LIB3138-066-Q1-N1-F10
ttatcaaccttactcgaatcaatggccctcccaaacctcattcccttttattaaaaataccgggacaaggccaatttttaaaggggtacaaatagcttggctttaaatcctcctttatcggctgttggttacccgggtatctctatcacaactactcttattccttgagttagtgccttttatgtgagtcgtaggtcaccttctcttggtttttaaccctaccactcaatggagtncagcagtaactaaaacctacccacatcgtctcttgcatagtgtggaagagcttncaccagtggatttgtttgtgacaacagcagatcctgaacttgaac

SEQ ID NO: 31488 - DNA, 371 bp, Glycine max
  unsure at all n locations
  Clone ID: LIB3138-066-Q1-N1-F11
gagcaggtaaagcttttccaaacaaaattgtttttgatgataagcttgtgttggctaacacacaagaattctttgatggaaattttccagtggattcttggttaccaatttttgtgaattgtctttatcctgtaagtcaattaccttcagaagctgtcgttgtaaatgttacatgtggtagtggacgtggtggtttacccaccactgcttagattagttctgcagttaacaatcgctcctcagatatcaacanatagattcgcacagcacttgggaaaggtaagaaaattgttntcttactagagttgatccttttncagtagctttactggctgttctttttaggcgtaagaatgaaattctgagttcta

SEQ ID NO: 31489 - DNA, 354 bp, Glycine max
  unsure at all n locations
  Clone ID: LIB3138-066-Q1-N1-F12
gagacccgttatagcggttccagctactgctgcgctcgtatgcagagcgtactcgcgaaagtcactgaccccaatcggacttcttgcagcgttcgtgacagcagttgtacacgcgttacatccgtggagagtattctttgctcttcttgcagtcttcttcttggctggcagtaccgcaacgaaggtcaagcatgatatcaaagtgaaattgacacagtcagcgacaggtgcatctggtggagaaggcactcgcaaccatgttcaagttattgcgaactccggcgtagcctcggtgctaatattactacacctctggcagctaanggaaagatgggagatatggtgaccagggtc

SEQ ID NO: 31490 - DNA, 388 bp, Glycine max
  Clone ID: LIB3138-066-Q1-N1-F2
ttggtgtggaggttcatccgttggattttttcacgaactgtggaaagattcgcttctattgttgggatactgctgggcaagagaagtttggtggcctcagagatggatattatatccatgggcaatgtgcgattatcatgtttgatgttactgcccgtctaacatacaaaaatgtccctacctggcaccgtgatctttgccgggtctgtgaaaacatcccaattgttctttgcggtaacaaggttgatgtcaagaataggcaagtgaaggcaaagcaggttactttccacaggaagaagaatttgcagtactatgagatatctgctaagagcaactacaattttgaaaagccatttttgtacttggccaggaaacttgcaggcgatgc

SEQ ID NO: 31491 - DNA, 383 bp, Glycine max
  Clone ID: LIB3138-066-Q1-N1-F3
cggctcgagcggctcgagatttcatcaaacttagccaattgttgttgcatctaaagatcagtagctagcaaccatgtggtctgcggtaacagatcccattagaactttttttgcaaattttgtcccccatttcatccacaaagactttcatgaagcagtggccagaatgaccataattgacgctttcctcttcattattgtgcactccgttgataagttggggatatggccacgcttgcctgttttcttagggctattgtacctagcgtttcgccgccaccttcatcaggaatacaacctcttcaacgttggaacaacgccggtgggggttaggttcaaccattctgattttccatacagaacagctgatggaaaatataatg

SEQ ID NO: 31492 - DNA, 358 bp, Glycine max
  Clone ID: LIB3138-066-Q1-N1-F5
ggagcataagctatgtgtgaagatgctttccatacactatttgtttttcttatttctatataattaattatgccctcttatccctccattccttgattctctctctcacaaatggaagcaaaattggttgcacagtgcaatagtccaacactaactttagctcactggaaactaaaacaaccttgtgtggttggagtgctggcaaggcctgctgatgacatttcaagagaagcaagaaaaactaatcatgtgtacaaagatggcttgtttgatcgcatagccataaactatttatcaaaatgcgttcaagaggcaacaggactcaaaaatagtaagagtggttatgagagcctggtag

SEQ ID NO: 31493 - DNA, 407 bp, Glycine max
  Clone ID: LIB3138-066-Q1-N1-F6
ctgctgtgttcactcccactctcaaccttgccatttcatccagcacatactgttgtagaagaagaacatcatctaccacaagaagagttgttacagtgagagctagctccacagagaaggatgaatccaaggacaaagatgcttcagcattcaacccttttgggtttgtcactgacaacccttctagccgaaatgccattcaactgcctgaaaaccctgctgaggatggcaacgttggccaaatgctatatggtcagcaaatggcagaagaggaacaattgtcttccttcatggggccccaacgcaatcttttagctaccgagttgttatgtctcagttgtcggatgccgggttccactgctttgcaccagactggataggatttggtttcagtgacaaaccacaac

SEQ ID NO: 31494 - DNA, 409 bp, Glycine max
  Clone ID: LIB3138-066-Q1-N1-F7
tcaggatattccagatgctcggacctatcttctgactttgagggaaataagagtcaagaaaggtcttacagatgatcttggtgcagaggctctgatgatagatgcattggacaaaattgaaaaggatttaaaaaaacctttactgagaaatgataagaaaggaatggaccttctcttggcagagtttgataagattaataagaaaattggaattcgaaaggaagatctaccaaagtatgaagaggagctagaacttaaagtagccaaagcacaactggaggagctgaagaaagatgctctcgaggcaatggaaactcaaaagaaaagggaggaattcaaggatgagcctgaatcggtcgatgtcaaaactttggacatcagaaacttcctttaaaatgtcttcaggatg

SEQ ID NO: 31495 - DNA, 395 bp, Glycine max
  Clone ID: LIB3138-066-Q1-N1-F9
caagttatgagcaagatggcagaaatgataaacagtctttgtggtggtgatgaaaaattgatgcgtgaaaggacgcacctgctgttggcttgttgttcaaggatggcaatttgtaagaaagatgtttggagagttgaatgtggaatcccttctggatttccgctcacagttatttgcaatagcatttttaatgagatgctcattagatatagctatgaaaaattactgcgccaggctaaagctccaagtatgtttttacaatccttcaaaaattttgtttctttgtgtgtgtatggtgatgataacttaattagtgttcatgaatatgtcaagccttactttagtggttctaaattgaaaagctttctagctagtcataacatcaccattactga

SEQ ID NO: 31496 - DNA, 365 bp, Glycine max
  Clone ID: LIB3138-066-Q1-N1-G1
ctataaaaatatattatttttaaagataaaagatgaaaacaaagtgtgattaaaagataaaacaaaaacatatttgaacctaatttttataataactactgtcaacattatatttcaaatgatttctaaacgaatgacgactgtaaaaatgtttagtctggagaatcatgaaattaaactcatttatttttcattaaaaaaactcatttatttttttagatcgatttttaattcaagaccacgtcacaatatcttagttgcggtcctgcggatttttgttaaatggcgcagggagtattttctggtcaacatatatagtaatagggataattgttagcaagttagcattttaaaattttaacgat

SEQ ID NO: 31497 - DNA, 275 bp, Glycine max
  Clone ID: LIB3138-066-Q1-N1-G10
cagtttttgatattctcttgggaatctctcaagattttgaaattgcgggtgatactcttatgccagctttttctgttccacatgctactgccagatcttctgaaaatgcggaatcctctgcatgatctggaatttgtgttttctttcgcttgttcgcttgtttaattcaataaaggaaattaggcatgaccctcttagtgagtatgctctgcctatttgaaaatttccacacctcttttaattgctcgaatgatgtgtgaaaggtgtgttatttt

SEQ ID NO: 31498 - DNA, 390 bp, Glycine max
  Clone ID: LIB3138-066-Q1-N1-G12
ggagattggatcacacttatacaaaattctccaattagtaagtggtggagagttgctgcttggaagaaaggctgtttaatggtcaagatcgtgatgtctgggaatgcagcagtcaaaaggagtgattgggcctcattggtacaagtgtttttaacaaacagcaacagttcagagcattttgatgcatgtaagtggacaaaatcagaaccacattcctgggaattgatcttcccaatagaggtatgtgagcctaataatggttttgaaatgtggagttctgagtgggcaaatcaaacttcatggcatttgagtttccttattgacaatcccaaacagtctacagcttttgatattctctagggaatctctcaagattctgaaattgctggt

SEQ ID NO: 31499 - DNA, 418 bp, Glycine max
  Clone ID: LIB3138-066-Q1-N1-G2
cacagattgaagagttccattcgatgcagaggatgatgaatgctccggattcaaatgataatattgatttactgttgagcattgatttgttgggtttacaaggagcaggtaaagcttttccaaacaaaattgtttttgatgataagcttgtgttggctaacacacaagaattctttgatggaaattttccagtggattcttggttaccaatttttgtgaattgtctttatcctgtaagtcaattaccttcagaagctgtcgttgtaaatgttacatgtggtagtggacgtggtggtttacccaccactgcttggattagatctgcaattaacaatcgctcctcagatatcaacaaaaggattcgcacagcacttgggaaaggtaagaaaattgtttttcttactaaagttgatccttt

SEQ ID NO: 31500 - DNA, 394 bp, Glycine max
  Clone ID: LIB3138-066-Q1-N1-G7
aaccccttctcgcattgtctccgaagcacaccaaattaaaacggcacgcacccgcgacgacacaccgtatcaccaaacgacaacaacaaccacgcgcgtttcgcacctcacgaactcggagaagcaaacgcagcgtcgtcgattcgtcactcgcaactcgggcacgcgcggcgatggcgtcggtccacagcaccgtcgctccccgtaccttcctgccgtcaattcccaagccgagagctcctcttcacgccgcaaagttcgtcgccggcggcgcgcacaactttcggagactgtcgcgcaacctcattctctccggaaacaaacgcgcggtggcggcgaactcggctgcggaggagttcgacgtgatatcggtgcagagcgacgacatcaccga

SEQ ID NO: 31501 - DNA, 411 bp, Glycine max
  Clone ID: LIB3138-066-Q1-N1-G8
ctcaggtgcgtcctgcaacaactctgttggctgatgggtgtggatatttgtatgcaatggtgcatgatagttcagtgtctacaataccaggtgattttgtcattggtgtcaagttgacaaccataaacaatatgtgtgcatatgggctcaatcctggtatttcaggttctcgtcttttgggcaccattcctcagtccatttcacagcaaactgtttggaatcaaatggcaacagtgagaacaccattgaattttgattctagcaagcagagcttttgtcagttttctattgaccttctcggtggaggaatcttagtggacaaaactggagattggatcacacttatacaaaattctccaattagtaacttgttgagagttgctgcttggaagaaaggcttgttaatggtca

SEQ ID NO: 31502 - DNA, 398 bp, Glycine max
  Clone ID: LIB3138-066-Q1-N1-G9
ctcgagccgaatcggctcgagggtggaggaatcttagtggacaaaactggagattggatcacacttatacaaaattctccaattagtaacttgttgagagttgctgcttggaagaaaggctgtttaatggtcaagattgtgatgtctgggaatgcagcagtcaaaaggagtgattgggcctcattggtacaagtgtttttaacaaacagcaacagtacagagcattttgatgcatgtaagtggacaaaatcagaaccacattcctgggaattgatcttcccaatagaggtatgtggtcctaataatggttttgaaatgtggagttctgagtgggcaaatcaaacttcatggcatttgagtttccttattgacaatcccaaacagtctacagtttttga

SEQ ID NO: 31503 - DNA, 373 bp, Glycine max
  Clone ID: LIB3138-066-Q1-N1-H1
ctcgagccgctttttggcgttaagaatgaaattctgagttctgacgcggctaatcctatgctgacgcgacttcttgagaactgtaagagtctcaaatatctggttgatgagtgtccttttgcatttgtgaactagtatgtagtattttattcacttaaataaagcgcattactatgtgcaatgagtgtgtttaaatgttagatacagtacaattactgcacgtaattacaaaagacgagagctactattcacgccgcaaagttcgtcgacggcggcgcgcacaactttcggagactgtcgcgcaatctcattctctccggaaacaaacgcactgtggcgggggactcggctgcttaggagttcgacgtgatat

SEQ ID NO: 31504 - DNA, 276 bp, Glycine max
  Clone ID: LIB3138-066-Q1-N1-H10
ggtcaagattgtgatgtctgggaatgcagcagtcaaaatgagtgattgggcctcattggtacaagtgtttttaacaaacaacaacagttcaaaccattttgatgcatgtaagtggacaaaatcagaaccacattcctgggaattgatcttcccaatagaggtatgtggtcctaataatggttttgaaatgaggagttctgagtgggcaaatcaaacttcatgggatttgagtttccttattgacaatgccaaacagtctacagtttttgatattct

SEQ ID NO: 31505 - DNA, 124 bp, Glycine max
  Clone ID: LIB3138-066-Q1-N1-H11
gtgcatatgggctcaatcctggtatttcaagttctcgtcttgggggcaccattcctcagtccatttcacaacaaactgtttggaatcaaatggccacaggggggacaccattggattttgattc

SEQ ID NO: 31506 - DNA, 353 bp, Glycine max
  Clone ID: LIB3138-066-Q1-N1-H2
gtttcgtgtaataatctggaaatgcaagaagcttatcttgtcgatgggggaaatgtgttaccagaattgtatttgcacaatccaaaggaagctcgcccattgagaaggaaagctctctctcgtattgaatggctgcaaaaagctgatgtgcctaccatagcacaaattgagagagttccattccatgccgaagatgatgaatgctcctgaatcaaatgataatattgagttactggtgagcattgatttggtgggtttacacagagcaggtaaagcttttccaaacaaaattgtatttgatgataagcttgtgttggctaacacacaaagaattcttttgatggaaaattttc

SEQ ID NO: 31507 - DNA, 191 bp, Glycine max
  Clone ID: LIB3138-066-Q1-N1-H3
tctggatttccgctcacagttatttgcaataacatttttaatgggatgctcattagatatagctatgaaaaattactgggccaggctaaagctccaagtatggttttaccatccttcaaaaattttggttctttggggggggatggggaagataacctaattaggggtcattaatattgcaagccttactt

SEQ ID NO: 31508 - DNA, 409 bp, Glycine max
  Clone ID: LIB3138-066-Q1-N1-H5
cgcaacagagagtagaaaagatggcgcggttgatcacagtggtgtggtgcgcggtggcggtgctactgtgcgccgcggcgggcgcgtcgtgggtggaggaggcggcgaacccgatacgaatggtggcgggggtggaggcggaggtggttcgggtgatagggcagtgccggcgcgcgctgaagtttgctaggttcatgagcaggttcgggaagagttaccgaagcgaggaagagatgagggagaggtacgagatattctcgcaaaacctcaggttcatccgctcccacaacaagaaccgcttgccctacactctctctgttaatcattttgctgattggacttgggaggagttcaaaagacacagactaggcgctgcccaaaattgctctgccactcttaacggcaacca

SEQ ID NO: 31509 - DNA, 238 bp, Glycine max
  Clone ID: LIB3138-066-Q1-N1-H7
gaaaattgtttttcttactagagttgatccttttccagtagctttactggctgttctttttggcgttaagaatgaaattctgagttctaacgccactaatcctatgctgacgcgacttcttgagaactgtaagagtctcaaatatctggttgatgagtgtccttttgcatttgtgaactagtatgtagtattttattcacttaaataaagcgcattactatgtgcaatgagtgtgttt

SEQ ID NO: 31510 - DNA, 405 bp, Glycine max
  Clone ID: LIB3138-003-Q1-N1-A1
cactgaaagaaattatgtcagaaagcaagatgtcagcattgagtatgatgcatgtacaattccaaatgattgtggttcattggttgttgccaaggttggaaatcacaaacaaattgttggtttccatgttgctggaagcagaggaagactgggatatgcttcattgataccatatgttgagccagttgtgcaagctcaaagtgctgaagtttactttgacttcttccctgtggaggttgatagtcaagagggagttgctcacattggtgaactgaaatctggtgtctatgttccactgcctacaaaaactaatttggtggaaactcctaaagaatggcaactggatctaccttgtgacaaaattcctagtgtcttgactacaactgatgagagattggtaggcac

SEQ ID NO: 31511 - DNA, 386 bp, Glycine max
  Clone ID: LIB3138-003-Q1-N1-A10
ttacactccaactccattgttggaatctggtttgcaaaaagacagagggttaattgtggagtattttggaaggatgtcttacgttgctcataacgttaatcagccccaagagaaagatttgttggagggaaatttttcctttgatattaaatctcgctctagattggaaaaagtttcctctacaaaagcacaatttgttagtggaaaaaccttcaaatatgatataattggtgctggttcacattcttcagaagattttcctgaaaaggaagatcaagaaaaacccacaaagattgatgccagattgagacacagaatagatcctcaatacaatgatgttcaagctcagatggaaaccaatttggttaaattgtctcttgatgatg

SEQ ID NO: 31512 - DNA, 257 bp, Glycine max
  Clone ID: LIB3138-003-Q1-N1-A11
ccaatgtgcagctttctggtatgtattacacggaagagaatgcgggtgtgcccatcatcgtcaccggtaacgatttctccacactctatgcgcctctcatccgtgatgggcgtatggagaatgtctactgggcaccaacaagtggatgaccgcattggtgtatgcactggaattgttcgtaccgattcaattgctgaacaggacgttgtcaagattgttgacaccttccctgggcaatccattgatttgtttggtgc

SEQ ID NO: 31513 - DNA, 400 bp, Glycine max
  unsure at all n locations
  Clone ID: LIB3138-003-Q1-N1-A12
ctcgagccgctcgagccgcttagtggacaaaactggagattggatcacacttatacaaaattctccaattagtaacttgttgagagttgctgcttggaagaaaggctgtttaatggtcaaaattgtgatgtctgggaatgcagcagtcaaaaggagtgattgggcctcattggtacaagtgtttttaacaaacagcaacagtacagagcattttgatgcatgtaagtggacaaaatcagaaccacattcctgggaattgatcttcccaatagaggtatgtggtcctaataatggttttgaaatgtggagttctgagtgggcaaatcaaacttgatggcattngactttccttattgacaatcccaaacagtctacaagttttgatattctcttgggaatc

SEQ ID NO: 31514 - DNA, 409 bp, Glycine max
  Clone ID: LIB3138-003-Q1-N1-A2
ctagtcccaaagagctaacaagagattcaagaccggcatggcgaatgaagaggaacagaaaaaccacctcttcggcatcaaagatctcggtcacaagactctccttcagagtgatgcactctatcagtatatacttgaaaccagtgtctatccaagagagcacgagtgcttgaaagagatacgcaagatgactgcaaaacacccactgaacatcatggcaacaccagcagacgaaggacaacttctgagcatgcttgttaagctcacgaattcaaagaacgccttggaaattggtgtattcactggttactctctgctctccactgccctggctcttccccctgatggaaagatcttggctttggatgtgaatcgcgaatactatgagttaggattgccaataattcaa

SEQ ID NO: 31515 - DNA, 410 bp, Glycine max
  Clone ID: LIB3138-003-Q1-N1-A3
atttccgaataccattgtgcagattgaaccagacatgaattcaagggttcagcttttgagtaccactaccaatggtgattttgttcaagggaaagatctcgcaatggttaaagttaatgtagcatgtgctgctgttggcttgacatcaagttacactccaactccattgttggaatctggtttgcaaaaagacagagggttaattgtggagtattttggaaggatgtcttacgttgctcataacgttaatcagccccaagagaaagatttgttggagggaaatttttcctttgatattaaatctcgctctagattggaaaaagtttcctctacaaaagcacaatttgttagtggaaaaaccttcaaatatgatataattggtgctggttcacattcttcagaagattttc

SEQ ID NO: 31516 - DNA, 404 bp, Glycine max
  Clone ID: LIB3138-003-Q1-N1-A4
ctcattgggtgggttacaaaatgtgagcggcatcaattttctggtcaaagagggtccaaaagtcaatgcaaagttcgagctgaagccgccaccatatccactgaatggtttggagccggtgatgagccagcagacacttgagtttcactgggggaagcaccacaagacttatgtggaaaatctgaaaaaacaagttgttgggacagagcttgatgggaagtcactagaagagattattgtcacatcatacaataagggtgacattcttccagctttcaacaatgcagcacaggtatggaaccatgacttcttctgggagtgcatgaaaccaggtggaggtggaaagccatccggggagcttctagaactgattgaaagagactttggttcatttgtaaaattcc

SEQ ID NO: 31517 - DNA, 404 bp, Glycine max
  Clone ID: LIB3138-003-Q1-N1-A5
ctcacatctctggtgaaagctctctgggcaatgagttgaggagatccgtcagcgagaagcttcatcacgttgatgaggccgatgctgccaagcaaggtagggttctaaagtatatacaaactgagaagcgacggaggaggagccaccgtgcagaagaccccataagaaccttgatgttcttaggctctatgaatcacacgtgacatatgatattattaatgaggtatttgggcctatagccttggtgttgaaattaattaaccccctttgactaattgggggtgaaaaatcaaaaccgaaattcatttcaattgtcacatatatgttaatacagcagtgatgtaaatatgtcatggaccttcatatctatagctagaagtatcccttacttcagattgtttata

SEQ ID NO: 31518 - DNA, 400 bp, Glycine max
  Clone ID: LIB3138-003-Q1-N1-A6
ggaaattctgtcttctagtgcaagtgatttcagagctgcggaggtgagtaaaaatagcaagcctcaagctactgcaatgcatgtgggagctatagaaattatcattgatagtttcgcaagtcctgattgcaacatagttggtgcaatgcttttggttgatacttatcataccaatcctgaaaatgcagttcgtagtatttttgttgcgcctttcagaggcggaaggcccattcgggtggttacatttccgaataccattgtgcagattgaaccagacatgaattcaaggtttcagcttttgagtaccactaccaatggtgattttgttcaagggaaagatctcgcaatggttaaagttaatgtagcatgtgctgctgttggcttgacatcaagttacact

SEQ ID NO: 31519 - DNA, 402 bp, Glycine max
  Clone ID: LIB3138-003-Q1-N1-A7
gatgaaaatgattcttatctgtctgatgtccacatcctgaatactgatactctaatgtggagtaaactgtgtacgtcaggccaattgttgccacctcgagctggtcattctacagtttcttttggcatgaacttgtttgtttttgggggctttacggatgctcacaacctatacaacgacctgtatatgctcaacattgagacttgtgtgtggacgaaggtggcaactacacctaatggtccttctgctagattttctgtagctggtgactgtttagacccatatatgagtggtgttcttgtgtttgttggtggttgcaatagaaatctggaagccctggatgatatgtattacctatacacagggattgcacgggaaaatgaacagcgaacagagaagtta

SEQ ID NO: 31520 - DNA, 378 bp, Glycine max
  Clone ID: LIB3138-003-Q1-N1-A8
ctcgccgttccctgacatcaacaagggtctcgaggccgacaccacgtcttccgactgggagccagccagatccaggccgacctgaaagacgtgcgattcgcctttaagcgactttccggctggcccaagctcatcgaccacggtgtcgctgatgttgtcattgccggcaagggtatctcgctcgacgtcgagatccaagcgatcaccaaccgacgagaccgagtcttcaaggtcaaccacgtcaaggtcgagctcgacaccctcagctggcgaatccacgacagcaagcacgacttgctgtacaagttcctcaaggccaccgccaccggtgtcatcaaaaaggctatcattgccggtatctcggccggtatccgaact

SEQ ID NO: 31521 - DNA, 404 bp, Glycine max
  Clone ID: LIB3138-003-Q1-N1-B1
caacaaccatggttgcaatggcagcagcaacagcatcctccggagtggattttctcaaagcctcgttcaccctcgcgtctctgccccttccaactatgtgtctttgacaccaaacaagtgctgtcaagttcaagtggcaggagaaggcatgtggggggttctggagttaggtgcatggcggtgggagaagctgcaaccactgagactaagaagagaagtggatatgagcttcaaacactcactaactggttgctgaagcaagagcaagctggggtgattgatgcagaactcactattgtgctgtctagcatttccatggcgtgcaaacagattgcttctttggtgcaaagagccaacatttccaacctcactggggttcaaggagctgtcaatgttcatgggga

SEQ ID NO: 31522 - DNA, 398 bp, Glycine max
  Clone ID: LIB3138-003-Q1-N1-B10
gtcctgcaacaactctgttggctgatgggtgtccatatttgtatgcaatggtgcatgatagttcagtgtctacaataccaggtgattttgtcattggtgtcaagttgacaaccataaacaatatgtgtgcatatgggctcaatcctggtatttcaggttctcgtcttttgggcaccattcctcagtccatttcacagcaaactgtttggaatcaaatggcaacagtgagaacaccattgaattttgattctagcaagcagagcttttgtcagttttctattgaccttctcggtggaggaatcttagtggacaaaactggagattggatcacacttatacaaaattctccaattagtaacttgttgagagttgctgcttggaagaaaggctgtttaatg

SEQ ID NO: 31523 - DNA, 276 bp, Glycine max
  Clone ID: LIB3138-003-Q1-N1-B11
gaaaaattgatgcgtgaaaggacgttcctgctgtcggcttgttgatcaaggatggcacttcgtaagaaagatgtttggagagttgaatgtggaatcccttctggatttgcgctcacagctatttgcgataacattcctaatgagatgctcattaaatatagctatcacacattactgcgccaggcttaagctccacatttgtttttacaatccttcaaaaattgtgtttctatgagtgtgtatggtgatgataacttaattattgttcataaatat

SEQ ID NO: 31524 - DNA, 392 bp, Glycine max
  unsure at all n locations
  Clone ID: LIB3138-003-Q1-N1-B12
gttgcatcaccgcaagtccacaacatggctgccactgccgctgcaggcatagcttccttgttttcttcttctattaacagtgtcaaatgtcttcgttcctccaagaactgctccattatagacccccttataaccacagtgccctcaaaccgtggcatgtttgtgtcacacttggtggaacctttgtccattgggggtgccattaattcgcacaagttgtgggggcctagaatttctgctgctgttgcacaagaagaggctgttgttgtggctgatgatgaggtagatgatggtgctggtttagttgaagaagagaaagtggaggagaatgaaggagaagtagttgcagaacaagactctgattcctctgccaccaagctntattttgggaa

SEQ ID NO: 31525 - DNA, 408 bp, Glycine max
  Clone ID: LIB3138-003-Q1-N1-B2
ctcgagccgattcggctcgagctggcagagcccgtagtgtacgggccagaattttgcctgctctaccgttcgcacggctgggtccgtctccaggtcgtacatgatgtccgatacgccgggtcccgagtaggacatgagcagcatcttgccgagggtccatccttgaatccatcctagcgccaccatggagaaggcaactgaaaatgagagggttcggtcaagccacacatacatctggatgctcagtaggggcaagattagcaggagtgacgagcacgataatgtcagaaaatgcgacgggttgctcagcaccgaaggcaggttagcgatcgcacttagcctcatgaccttgcctatgcgcgcatggttcttcaacaagattgctgagaccagtgtcgagacaacacc

SEQ ID NO: 31526 - DNA, 409 bp, Glycine max
  Clone ID: LIB3138-003-Q1-N1-B3
gaaagatctcgctatggttaaagttaatgtagcatgtgctggggtgggcttgacatcaagttacactccaactccattgttggaatctggtttgcaaaaagacagagggttaattgtggagtattttggaaggatgtcttacgttgctcataacgttaatcagccccaagagaaagatttgttggagggaaatttttcctttgatattaaatctcgctctagattggaaaaagtttcctctacaaaagcacaatttgttagtggaaaaaccttcaaatatgatataattggtgctggttcacattcttcagaagattttcctgtaaaggaagatcaagaaaaacccaaaaagattgatgccagattgagacaaagaatagatcctcaatacaatgaggttcaggctcag

SEQ ID NO: 31527 - DNA, 405 bp, Glycine max
  Clone ID: LIB3138-003-Q1-N1-B4
gacaaaatcagaaccacattcctgggaattgatcttcccaatggaggtatgtggtcctaataatggttttgaaatgtggagttctgagtgggcaaatcaaacttcatggcatttgagtttccttattgacaatcccaaacagtctacagtttttgatattctcttgggaatctctcaagattttgaaattgctggtaatactcttatgccagctttttctgttccacaggctactgccagatcttctgaaaatgcggaatcctctgcatgatctggaatttgtgttttctttcgcttgttcgtttgtttaattcaataaaggaaattaggcatgaccctcttgttgagtatgctctgcctatttgaaaatttccacacctcttttaattgtcgtaatgatgtgtg

SEQ ID NO: 31528 - DNA, 399 bp, Glycine max
  Clone ID: LIB3138-003-Q1-N1-B5
gcggtaaaaccaacagttgcattaagggctattcttgttggaggcatagcagcatttgctaaaatagcaggtgctatgaaagctgcaggtggtgcaaaaatgggcgcagctgcagctgccatgacagcagcagcaactgcagctgtggcagggtccaaacaagagcaaacagatgcttctcaacagtctccaaaataattatctgtattttttcttccagttttacactgtgtgttggtaagtttctgtagcctagttgaatattccaagtggaagaaagaggccatatgtgaattatagtcttgacacatggtgataacctcttcaaagtctttgtaataagattacactaaatttatacagttcctgaagttttagatggagctatggttggatttc

SEQ ID NO: 31529 - DNA, 401 bp, Glycine max
  Clone ID: LIB3138-003-Q1-N1-B6
gggagaaggggctggagttttgcttttagaagaactggagcaggctaagaaaagaggtgcaaccatatatgctgaattccttggtggaagtttcacctgtgatgcatatcatgtgactgagccgcgtcctgatggggctggtgttattctttgcattgaaaaggcattagctcagtctggagtatcaaaagaggatgtgaattacataaatgcacatgccacatccacaccagctggagatcttaaggagtaccaagctctaatgcattgttttggtcaaaaccccaagttacgagtgaattctacaaaatctatgattggtcatctactaagggcagctggcgctgtggaagctgtggccacaatacaggcaattaggacagggtgggttcatcccaata

SEQ ID NO: 31530 - DNA, 295 bp, Glycine max
  Clone ID: LIB3138-003-Q1-N1-B9
attcgctgatggttgataccttactgttgtatttgcctataactatgtttcttggttatgtgaatattctgggaattaaccatttatgaattggagctttcaaatttgacatgctttttatgatgtcaaatgtcttaaaatgggaagaattcctttccattcaactacacatcttttcttttgctcttatcgtgtaataccccatatttattattttttattttcaattatttaactggttacatgcatcctatctgcctattccgcttcgtcgatacaagtggggtcatgttgg

SEQ ID NO: 31531 - DNA, 392 bp, Glycine max
  Clone ID: LIB3138-003-Q1-N1-C10
attttgttggagatctcgtctttgaagtttctaagatgacttctccctacattaaatgtacagtctctttcttcatagcatttggaaatttggctgatgataccatcaattttgaggcttttccccacaagctggtgcagtttggagagattcaggaaaaagttgtattgaaattttcacaagaggaatttcttacagcttggtcaactcaggtgcgtcctgcaacaactctgttggctgatgggtgtccatatttgtatgcaatggtgcatgatagttcagtgtctacaataccaggtgattttgtcattggtgtcaagttgacaaccataaacaatatgtgtgcatatgggctcaatcctggtatttcaagttctcgtcttttggcacca

SEQ ID NO: 31532 - DNA, 396 bp, Glycine max
  Clone ID: LIB3138-003-Q1-N1-C11
caaatggcaacagtgagaacaccattgaattttgattctagcaagcagagcttttgtcagttttctattgaccttctcggtggaggaatcttagtggacaaaactggagattggatcacacttatacaaaattctccaattagtaacttattgagagttgctgcttggaagaaaggctgtttaatggtcaagattgtgatgtctgggaatgcagcaatcaaaaggagtgattgggcctcattggtacaagtgtttttaacaaacagcaacagtacagagcattttgatgcatgtaagtggacaaaatcagaaccacattgctgggaattgatcttcccaatagaggtatgtggtcctaataatggttttgaaatgtggaggtctgagtgggcaaat

SEQ ID NO: 31533 - DNA, 251 bp, Glycine max
  Clone ID: LIB3138-003-Q1-N1-C12
attgtcttgtcttttcgggtagtggctgtagaggaaacactcctgttttgtgcgcatattgatattggaatagtctttctctgaaccccatttttgcaaaaaggaagaaagagaaagagagagagagagagagagaagagatatacactgccaagaagaagaacatgaaaattcagtgcgatgtgtgtgagaaagccccggcaaccgtgatttgctgcgcagatgaagcagctttgtgtgccaaatgtgac

SEQ ID NO: 31534 - DNA, 406 bp, Glycine max
  Clone ID: LIB3138-003-Q1-N1-C2
attcaagaaaaagttgtattgaaattttcacaagaggaatttggtacagcttggtcaactcaagtgcgtcctgcaacaactctgttggctgatgggtgtccatatttgtatgcaatggtgcatgatagttcagtgtctacaataccaggtgattttgtcattggtgtcaagttgacaaccataaacaatatgtgtgcatatgggctcaatcctggtatttcaggttctcgtcttttgggcaccattcctcagtccatttcacagcaaactgtttggaatcaaatggcaacagtgagaacaccattgaattttgattctagcaagcagagcttttgtcagttttctattgaccttctcggtggaggaatcttagtggacaaaactggagattggatcacacttatac

SEQ ID NO: 31535 - DNA, 409 bp, Glycine max
  Clone ID: LIB3138-003-Q1-N1-C3
aaaactagtgcatctttgcaatttagaaagttagcagattgggattttctcaagagaaactttaagcagatgtctaatgttttgtgggtggctcctgaggacaaggcgagtttatggtcacaacttcattatgtttcgtgtaataatctggaaatgcaagaagcttatcttgtcaacctcgtaaatgtgttacgagaattgtatttgcacagtccagaggaagctcgccaattgagaaggaaagctctctctcgtattgaatggctgcaaaaagctgatgtgcctaccatagcacagattgaagagttccattcgatgcagaggatgatgaatgctcctgattcaaatgataatattgatttactgttgagcattgatttgttgggtttacaaggagcaggtaaagctt

SEQ ID NO: 31536 - DNA, 408 bp, Glycine max
  Clone ID: LIB3138-003-Q1-N1-C4
gtgctgtgctctgaggggccatagtttgggaccctttgaaccgtaatctccacccaaacccattttcccgggaaattgccttggaaaagaaagagcgaagaggaaaatgcagaatcacaggctgaagcagcagcagcagcagcaacaacaagctcttatgcagcaagctcttctccaacaacagtctctctaccaccctggcctccttgctcctcctcagattgaaccatatccaagtggaaatttgcctcctggttttgatccaagtacttgccgcagtgtgtatgttgggaacatccatacacaggtaactgagccgcttttgcaagaagttttctcgggtactggcccagttgaaggttgtaagcttatcagaaaggataagtcatcctatggattcattcatta

SEQ ID NO: 31537 - DNA, 394 bp, Glycine max
  Clone ID: LIB3138-003-Q1-N1-C7
ctcgagccttttcgtagtgatctattggcaaatttttgagcagagggcaattttagagcaagtgttgatttgcagcgcactcatcgtattagaggaatgattaaaatggtggccacagttggtattcctgagaatacaggtatatcattggcctgtgctatgaatagttcttttagggggcgcgccagttctgatatttacaccatctgctctcaagactgtgaattgtggaatcctgcttgcacaaaagcaatgactatgtcatttaatccaaacccgtgttctgatgcatggagtttggaatttctgaagcgtactggatttcattgcgatatcatttgtgtcactggatggactgccaccccaatgcaggatgttcaggttacaattgatt

SEQ ID NO: 31538 - DNA, 396 bp, Glycine max
  Clone ID: LIB3138-003-Q1-N1-C8
aaaagcggtctcatgaagccctccaagtcccactccagagatccggttccgcagccggacgccgcctccaacttcagcgctccggcggcgccctccgccaatgtcgtcgtgaatctcgtctccttgacccccctcacgctctcctccagcggctccgtcgagccggtgcctccattccgcgacgctcccgtcgcgtaacggcataacctcttcctccagaagctccacgtgtgctgctacatcctcgacttcttcgacacactgaataacgttagggagaatgaaatcaagcgccatgcgctcatggacctcgcggacttcatacaatccggctccggcacgataagcgagaactgccaagaacagatgatcagaatgatctccgtcaacattttt

SEQ ID NO: 31539 - DNA, 380 bp, Glycine max
  Clone ID: LIB3138-003-Q1-N1-C9
gccagattgagacaaagaatagatcctcaatacaatgaggttcaggctcagatggaaacaaatttgtttaaattgtctcttgatgatgttgaaactcctaaaggttccatgttggatctgaaaatttctcaatctaaaattgcacttcccaagaacacagttggaggaaccattctgcgtagtgatctattggcaaattttttgacagagggcaattttagagcaagtgttgatttgcagcgcactcatcgtattagaggaatgattaaaatggtggccacagttggtattcctgaaaatacaagtatatcattggcctgtgctatgaatagttcttttagggggcgcgccagttctgatatttacaccatctgctctca

SEQ ID NO: 31540 - DNA, 408 bp, Glycine max
  Clone ID: LIB3138-003-Q1-N1-D1
gtccaccccattttttgtcttctcattctcatcactaacacagaagtgtgtgttgtagatttctcagcttgcaacatggcttccatcatcatgtcatttgctccagcaactggttgagtctttgccgccacagcggcaaatggtgctggtggaagcaaagaagagaagggtcttcttgattggatccttggagggttgcagaaggaagaccagctgctagagactgatccaatcctcaagaaagcggaagagaagaatggaggcaccaccagcaacactggccgcatcaagaactctgcggcagtgccacaaaagaagaaatgtggctttggaggcctctctgcgaagaactgaaggagcatgtgatctattacctcatattcgtgtcacctgtgttttttttctcaa

SEQ ID NO: 31541 - DNA, 396 bp, Glycine max
  Clone ID: LIB3138-003-Q1-N1-D10
caagagaaagatttgttggagggaaatttttcctttgatattaaatctcgctctagattggaaaaagtttcctctacaaaagcacaatttgttagtggaaaaaccttcaaatatgatataattggtgctggttcacattcttcagaagattttcctgaaaaggaagatcaagaaaaacccaaaaagattgatgccagattgagacaaagaatagatcctcaatacaatgaggttcaggctcagatggaaacaaatttgtttaaattgtctcttgatgatgttgaaactcctaaaggttccatgttggatctgaaaatttctcaatctaaaattgcactttccaagaacacagttggaggaaccattctgcgtagtgatctattggcaaattttttg

SEQ ID NO: 31542 - DNA, 392 bp, Glycine max
  Clone ID: LIB3138-003-Q1-N1-D12
gttctagctagcaacgccatggccattgaagtgttactgggcactgatgacgggtctctggttttctctcccaactctttctccgtggcccctggggaaaagatcgtgttcaagaacaacgcaggtttcccccacaacgttgtgttcgacgaggacgagattcctagcggcgtggatgcagggaaaatctccatgagcgaagaagaccttctcaatgcggctggtgagacttacagcgttactttggatgccaagggaacctacagtttctactgttcggctcaccaaagagctggtatggtgggaaaagtcaccgttaattaattatattattgctcctacgtctaagttctcatatgctttgtttcctagaaaagcctaattcatctttc

SEQ ID NO: 31543 - DNA, 406 bp, Glycine max
  Clone ID: LIB3138-003-Q1-N1-D2
ctgagaatacaggtatatcattggcctgtgctatgaatagttgttttagggggcgcgccagttctgatatttacaccatctgctctcaagactgtgaattgtggaatcctgcttgcacaaaagcaatgactatgtcatttaatccaaacccgtgttctgatgcatggagtttggaatttctgaagcgtactggatttcattgcgatatcatttgtgtcactggatggactgccaccccaatgcaagatgttcaggttacaattgattggtttatttcctctcaggaatgtgttcccaggacctattgtgttttaaatccacaaaatccttttgtgttaaataggtggatgggaaaattgactttcccccagggcacttcccgaagtgttaagagaatgcctctttc

SEQ ID NO: 31544 - DNA, 393 bp, Glycine max
  Clone ID: LIB3138-003-Q1-N1-D3
gctctttgaatgtttgtatatatagttaaatcaaaagacctaagaggttgtagtagttctgcagacaatgtttaagcaagaactgctgttttcctcatgagagcttgaggaaaaaagagctattaaagtttttggaaagagcactttgattggattgtttctaactttctttgctggactttgcttctctatgttctcaccagcattcaacatagcaacaaatgaccaatggaatacgttgagaaaaggggttccccatttgacagtttatactgccttcttctatttttcagtctcttgttttgttattgccatgattctaaacatcaccttcctctaccaccctgtcctaaacctacccaagtcatcatttaaggcttatttgacggactc

SEQ ID NO: 31545 - DNA, 406 bp, Glycine max
  Clone ID: LIB3138-003-Q1-N1-D5
gtcacaacttcattatgtttcgtgtaataatctggaaatgcaggaagcttatcttgtcaatctcgtaaatgtgttacgagaattgtatttgcacagtccagaggaagctcgccaattgagaaggaaagctctctctcgtattgaatggctgcaaaaagctgatgtgcctaccatagcacagattgaagagttccattcgatgcagaggatgatgaatgctcctgattcaaatgataatattgatttactgttgagcattgatttgttgggtttacaaggagcaggtaaagcttttccaaacaaaattgtttttgatgataagcttgtgttggctaacacacaagaattctttgatggaaattttccagtggattcttggttaccaatttttgtgaattgtctttat

SEQ ID NO: 31546 - DNA, 406 bp, Glycine max
  Clone ID: LIB3138-003-Q1-N1-D7
gaaaaattgatgcgtgaaagagacgcacctgctgttggcggggtgttcaaggatggcaatttgtaagaaagatgtttggagagttgaatgtggaatcccttctggatttccgctcacagttatttgcaatagcatttttaatgagatgctcattagatatagctatgaaaaattactgcgccaggctaaagctccaagtatgtttttacaatccttcaaaaattttgtttctttgtgtgtgtatggtgatgataacttaattagtgttcatgaatatgtcaagccttactttagtggttctaaattgaaaagctttctagctagtcataacatcaccattactgatggtattgacaaaactagtgcaactttgcaatttagaaagttagcagattgtgattttctc

SEQ ID NO: 31547 - DNA, 397 bp, Glycine max
  Clone ID: LIB3138-003-Q1-N1-D8
gcatttggtaatttggctgatgataccatcaattttgaagctttttcccacaagctggtgcagtttggagagattcaggaaaaagttgtattgaaattttcacaagaagaatttcttacagcttggtcaactcaagtgcgtcctgcaacaactctgttggctgatgggtgtccatatttgtatgcaatggtgcatgatagttcagtgtctacaataccaggtgattttgtcattggtgtcaagttgacaaccataaacaatatgtgtgcatatgggctcaatcctggtatttcaggttctcgtcttttgggcaccattcctcagtccatttcacagcaaactgtttggaatcaaatggcaacagtgagaacaccattgaattttgattctagcaagc

SEQ ID NO: 31548 - DNA, 399 bp, Glycine max
  unsure at all n locations
  Clone ID: LIB3138-003-Q1-N1-D9
gtggacaaaactggagattggatcacacttatacaaaattctccaattagtaacttgttgagagttgctgcttggaagaaaggctgtttaatggtcaagattgtgatgtctgggaatgcagcagtcaaaaggagtgattgggcctcattggtacaagtgtttttaacaaacagcaacagtacagagcattttgatgcatgtaagtggacaaaatcagaaccacattcctgggaattgatcttcccaataaaagtatgtggtcctaataatggttttgaaatgtggagttctgagtgggcaaatcaaacttcatggcatttgagtttccttattgacaatcccaaatagtctacagnttttgatattctcttgggaatctctcaagattttgaaattgct

SEQ ID NO: 31549 - DNA, 407 bp, Glycine max
  Clone ID: LIB3138-003-Q1-N1-E1
acaaaattctgttcagtttcacccactaaaccaccactactggtaagatctccttcaaaacacaaccaaaatcttaactttcttggaacctttttaattgtttcttctttaaaaatcaatttcctttaaagctttaactttaatattagagttctttctctttcattcatccttggtaatggcttgtgcattgcaagcaaccttagcagccaacacctatgccttttcttccaggagattctccttgaagcaccaaaagaacagtaagagaaggttttctttgttcactgttagagctgattctgatgactctgactgcaatgaggaagagtgtgccccggataaggaagtaaggaaggtcagtgtggaatggttagctggggagaagacaaaagtagtgggcacat

SEQ ID NO: 31550 - DNA, 400 bp, Glycine max
  Clone ID: LIB3138-003-Q1-N1-E10
tatatttttaaaaatatccgttactaatcctttgtgtattttggtgtttctaatcatccattcattttttattaatcccttatttatgttatttatgttaatatatatatgctaattcatacaaatgatattgaaaatttaatttaaaaagggttggtcttttacgcccgcttcaagacaggatgactaatcaaccaaccttgggaaaaacaacaaaatacacaaaggattagtaacgtatatttttaaaaatatccaaaagaacatttatatttatgtataatagaaaaagaatactaattggggctttccgttggtagaaaaaataaggcagtactccccagaattccgatccagagtatacttccatccaccgattaaataaatagtatcagaaacg

SEQ ID NO: 31551 - DNA, 397 bp, Glycine max
  Clone ID: LIB3138-003-Q1-N1-E12
aagaggttttagttttttagcttatgcacaccaactaactcctcctaacttctttctctggggttcttctccatttcattggctttcaaagtcaccaacacaattctcccttcaaagtttcaatggctgtttcaaccagcttctcgggtgtaaagttggaggctttgttgctgaaatgtggttcctccaatgctgccaccaccaccactcatatatcatgttttggcaaaaacagaaagacacttgttcagagtcagagaggggctattcgttgtgaggcttcttctgcttctgatgttgtggctgatgccaccaagaaagctgctagtgtctctgctcttgagcagcttaagacctctgcagctgataggtatacaaaggaaaggagcagcatcat

SEQ ID NO: 31552 - DNA, 402 bp, Glycine max
  Clone ID: LIB3138-003-Q1-N1-E2
cacactacgtaatcattggctctcccctcatgccctgtaacggcgttaaaaaccctaccgagcaactttgtctaaatctcaactactagcacataacgatcgtcacggtcaacatcaaagcgctggccgacgtgctcgaacaaaccataaacgacgtcgaccatcttgtggactatgctcagcatatactaaaatgctctcacctccttttactggcctacttatgtgcgaatcaggctattctgctcgtgtctcattctgcattactacatctgcggcctcgctcctgcacccgggcaccgagccgtctcgtgactctcatcaacaccaaataattcccgagccttccttgcccctgctgccgtgtctcgcttgatctgcctcactccatcgatgtgatat

SEQ ID NO: 31553 - DNA, 407 bp, Glycine max
  Clone ID: LIB3138-003-Q1-N1-E3
cccaaatgttgatgatatgtcaggatcagtttgtcttgatgtgatcaatcaaacctggagtcccatgtttgatcttgtcaatgtgtttgaggtgtttctaccacaacttcttctgtatcccaatccatcagaccccttgaacggagaagctgcagctttaatgatgcgtgatcgagccacttatgaacaaagggttaaagagtactgtgagaagtatgctaaacctgaagacataggagctgccacagaagagaactccagtgatgaagagctaagtgaagatgaatatgattctagtgatgaacaggttgctggtaaggcagacccctagccttgcatgcattttcctgttcttctcattctatcttaacttgtgcatgatgttctagtcatgttaatttacctca

SEQ ID NO: 31554 - DNA, 403 bp, Glycine max
  Clone ID: LIB3138-003-Q1-N1-E4
atgctaaatcacgaattgggatgccaaagctggagggcacatgtgagactttggttgatacatttgtattcttagacaagaacaaggatggatatgtcagcaaaaatgagatggtccaagctataaacgaaactacatcaggggagcgttcttctggaagaatagccatgaaaagatttgaagaaatggattgggataaaaatggaatggttaacttcaaggagtttctatttgcttttacacgttgggttggaattgatgaagttgacgatgaggaaaatgacgaggcttaaatcatttcatctaaatatctgactgcctcttcagccaaggcaaaagggtttttctggttttcccttgcaataaaggccaagttgctgcacgttgaattttaaagaaactg

SEQ ID NO: 31555 - DNA, 394 bp, Glycine max
  Clone ID: LIB3138-003-Q1-N1-E5
ctcgagccgaatcggctcgagatctggtttgcaaaaagacagagggttaattgtggagtattttggaaggatgtcttacgttgctcataacgttaatcagccccaagagaaagatttgttggagggaaatttttcctttgatattaaatctcgctctagattggaaaaagtttcctctacaaaagcacaatttgttagtggaaaaaccttcaaatatgatataattggtgctggttcacattcttcagaagattttcctgaaaaggaagatcaagaaaaacccaaaaagattgatgccagattgagacaaagaatagatcctcaatacaatgaggttcaagctcagatggaaacaaatttgtttaaattgtctcttgatgatgttgaaactcct

SEQ ID NO: 31556 - DNA, 400 bp, Glycine max
  Clone ID: LIB3138-003-Q1-N1-E6
ggacgctattgtgagtggttgttgggggctgtggaaatagaagccgttaccgcagtctcgacggcgtcgtattcgctccaattcgggttcggcggatgcggccggcggaggcggttaccggtttccggtgaagcaagcggtgaccgccgcctccctcgccctcaccggcgacacaatcgctcagctcagccaccgttggaggaaagcaaaggagggcggtggcagtgtttctcaagatgaattgtggagatacctttcagaccatgattggctgcgtgctctgcgaatgacttcatatggattccttttatatggtcctggttcttatgcctggtaccagtgccttgaccactgtctccccaaaccaacagtccagaacctagtgttaaaggttgtacta

SEQ ID NO: 31557 - DNA, 406 bp, Glycine max
  Clone ID: LIB3138-003-Q1-N1-E7
tggaaatgcatttagcttatcttgtcaatctcgtaaatgggttacgagaattgtatttgcacagtccagaggaagctcgccaattgagaaggaaagctctctctcgtattgaatggctgcaaaaagctgatgtgcctaccatagcacagattgaagagttccattcgatgcagaggatgatgaatgctcctgattcaaatgataatattgatttactgttgagcattgatttgttgggtttacaaggagcaggtaaagcttttccaaacaaaattgtttttgatgataagcttgtgttggctaacacacaagaattctttgatggaaattttccagtggattcttggttaccaatttttgtgaattgtctttatcctgtaagtcaattaccttcagaagctgtcgt

SEQ ID NO: 31558 - DNA, 401 bp, Glycine max
  Clone ID: LIB3138-003-Q1-N1-E8
ctcgcggcttctttctccaagattaagtttcagtagtaaggagtaaagaaaaggttgacattaacatcgtggtcattggccatgtcgactctgggaagtcaaccaccaccggtcaccttatctacaagctcggaggtattgacaagcgtgtcatcgagagattcgagaaggaagctgctgagatgaataagaggtctttcaagtatgcctgggtgcttgacaagctcaaggctgagcgtgaaagaagaatcaccattgatattgctctgtggaagtttgagaccacaaagtactactgcacagtcattgatgcccctggacatagggatttcatcaagaacatgattactggaacatcccaagctgactgtgctgttcttattattgattccaccactggt

SEQ ID NO: 31559 - DNA, 340 bp, Glycine max
  Clone ID: LIB3138-003-Q1-N1-E9
caagctagttatctgataattacaataatgggttccctccctcacgtagtagaggattgcatgggcttcctccaactctatagcgacggttccattttccgttccaacggcatagaattcaaagtttcacccattcaagacaactccataacctataaggattatctctttgacaaaagattcaacctttctcttcgcttctacaagccccaacaacaacacatagcactcagcaataagaaggtccctattgtgattttccttcacggtggaggcttttgcttcggttcgcgcacctggccccatattcacaactgttgcatgcgcctcgcgtcggggc

SEQ ID NO: 31560 - DNA, 386 bp, Glycine max
  Clone ID: LIB3138-003-Q1-N1-F1
cccaaaaatcatatcttccactccacaacctcaaacttctgtggctctctctcttttactattctcaatatcccacaaacccttttctctattccatctaaagatccattatttctgcaatttcaatatatgggtcttcattaatccactaagattctgcatcaatcatcattgccattgaagttcctgttccgaaggagttaatttcaggaccgccagaagatgttgcccgacactgtgtaactcgggtttcgtatcaacagcttccaacagtggcgtcagtgtgcaaactctacaaatcggagattcacgcgccggagttccatcgtcaacggcgtatgcacaaagcacacccagaatgtcatagcgatagttcaagcacacgt

SEQ ID NO: 31561 - DNA, 398 bp, Glycine max
  Clone ID: LIB3138-003-Q1-N1-F10
ttctgctgtgccaagaaagcagtaatctccatgagcttctattgaattgatactttgatcaagatggatgggaaaaactctcttcaaataactagaagtggtattggtgcttatgatgatgatggacatgccaaaaggactgggaatttgcagagtgctgtagctcatatcattactgctgttattggttctggtgttctttctcttgcatggagcacttcccaattaggatggattggagggccattttccttgctttgttgtgcaattgtcacctatatttcttcattcctcctgtctgattgctacagaactcctgatcctgtcactgggaaaagaaactactcttacatggatgctggtagagtttatcttggttataaaaggacatgtgtagc

SEQ ID NO: 31562 - DNA, 397 bp, Glycine max
  Clone ID: LIB3138-003-Q1-N1-F11
catttgcatgcaagaatcacttgcactcttgcaccatgtagtacttacaaggatgagcagttatcaaacttaacacttagctatataacattaagtttttgacatatagagatatataacttatgcttctaacattcatcacatgtgtcacaaacataacgtgtcacatgcagatttatcttgtaaatggatgcagcatccagtattggaagcaaaggctcttctgaaagaagccctccaagcagaagttggattgccagtcgacagaaatattcctctcattggtttcattggtaggcttgaagagcaaaaaggttctgatattcttgcagaaaccattccccaatttatcaagcaaaatgttcaagtggtagccctaagaacaagaaaaaaacaa

SEQ ID NO: 31563 - DNA, 400 bp, Glycine max
  Clone ID: LIB3138-003-Q1-N1-F12
tgtgtatggtgatgataacttaattagtgttcatgaatatgtcaagccttactttagtggttctaaattgaaaagctttctagctagtcataacatcaccattactgatggtattgacaaaactagtgcaactttgcaatttagaaagttagcagattgtgattttctcaagagaaactttaagcagatgtctaatgttttgtgggtggctcctgaggacaaggcgagtttatggtcacaacttcattatgtttcgtgtaataatctggaaatgcaagaagcttatcttgtcaatctcgtaaatgtgttacgagaattgtatttgcacagtccagaggaagctcgccaattgagaaggaaagctctctctcgtattgaatggctgcaaaaagctgatgtg

SEQ ID NO: 31564 - DNA, 402 bp, Glycine max
  Clone ID: LIB3138-003-Q1-N1-F2
tttggaaatttggctgatgataccatcaattttgaggcttttgcccacaagctggtgcagtttggagagattcaggaaaaagttgtattgaaattttcacaagaggaatttcttacagcttggtcaactcaagtgcgtcctgcaacaactctgttggctgatgggtgtccatatttgtatgcaatggtgcatgatagttcagtgtctacaataccaggtgattttgtcattggtgtcaagttgacaaccataaacaatatgtgtgcatatgggctcaatcctggtatttcaggttctcgtcttttgggcaccattcctcagtccatttcacagcaaactgtttggaatcaaatggcaacagtgagaacaccattgaattttgattctagcaagcagagcttt

SEQ ID NO: 31565 - DNA, 403 bp, Glycine max
  Clone ID: LIB3138-003-Q1-N1-F3
attttacaaaatcaatgatgtgccctgatatatggtgtggcaagctatacaccgaatttgatttatgagccacttttttcttgtcaaattcgaatagcatacacaattacacaggaagttgcccattcttttcaatttgagttttaatttccttctcttatttacctttaaatttaagccttgttaatgatgatatgtaggcaagaattcttttatttggtttgggcgaaaaccaaaggtgatcatcacagagcctgagttaatcaaagatgtacttaataagatgcatgatttcccaaagcctgacacgagtccgcttgtcaagttacttgctactggtcttttaaaccatgagggagaaaaatggaacaagcacagaagaataattagccctgcattcaat

SEQ ID NO: 31566 - DNA, 400 bp, Glycine max
  Clone ID: LIB3138-003-Q1-N1-F4
catttgtgtcactggatggactgccaccccaatgcaggatgtggaggttacaattgattggtttatttcctctcaagaatgtgttcccaggacctattgtgttttaaatccacaaaatccttttgtgttaaataggtggatgggaaaattgactttcccccagggcacttcccgaagtgttaagagaatgcctctttctatagggggaggagctggtgcaaagaatgctattctcatgaatatgccaaatgctgttctttcaatgtggagatattttgttggagatctcgtctttgaagtttctaagatgacttctccctacattaaatgtacagtctctttcttcatagcatttggaaatttggctgatgataccatcaattttgaggcttttccccac

SEQ ID NO: 31567 - DNA, 404 bp, Glycine max
  Clone ID: LIB3138-003-Q1-N1-F5
ccaatcttcaaattccatgttttttaggtatgaaactttattgccttcctttttatttttcgttttaactttttataatctttcaattatccttttttttccctctctcgagattatatgcaatgtttgccttgctatggattctccaatatttcagaaatctaactatctaactgtaaaatatgcttttgcatcccttttttccgtctttgggtttattaggcttcgattattttcatgtgaattaacttcataagaactatttcgtccataaaagaagagaaagttgtaagagcaaacaagttcactggagaacccaaaggcgtcgattttgggttagcgtatgcaaattttactttggctgcagaaagaaatggttttgcttaaaagtctatttgtagtaa

SEQ ID NO: 31568 - DNA, 400 bp, Glycine max
  Clone ID: LIB3138-003-Q1-N1-F6
gttggctgatgggtgtccatatttgtatgcaatggtgcatgagagttcagtgtctacaataccaggtgattttgtcattggtgtcaagttgacaaccataaacaatatgtgtgcatatgggctcaatcctggtatttcaggttctcgtcttttgggcaccattcctcagtccatttcacagcaaactgtttggaatcaaatggcaacagtgagaacaccattgaattttgattctagcaagcagagcttttgtcagttttctattgaccttctcggtggaggaatcttagtggacaaaactggagattggatcacacttatacaaaattctccaattagtaacttgttgagagttgctgcttggaagaaaggctgtttaatggtcaagattgtgatgtct

SEQ ID NO: 31569 - DNA, 391 bp, Glycine max
  Clone ID: LIB3138-003-Q1-N1-F7
ctcgagccgcttctcaccctatcttaaaatcttctgtgcagcgagaaaaaaacggaccgtgccctcagtctcttttttccatcatcacttcattaaacattattcactctctttctctgtctctagtttttacaacatggctactgcggtaactgctgcagtgtcctttccagccaccaagtccacttctctttcaagcagaacctctatcactgccccagatagaattgtcttcaagaaggtttcgttgcaatacagagatgtttcaaccagtggaagggtagtttcaatcagagcacaagtgaccacagaggcacctgctaaggttgaaaaggaatcaaagaaacatgaggaaggtgtgatcgtgaacaagttcaaacccaagaaccca

SEQ ID NO: 31570 - DNA, 313 bp, Glycine max
  Clone ID: LIB3138-003-Q1-N1-F8
gtttggtggttttctccaaattgcctaagttttctgacaggtacacactcactatagcaagcgcagatccaaaatcaatttctgcaaatgatcaagtacatttcaccaaaagtgtcactcagtggttcactaaggacggagtcttagttgagggcctgttctggaaggatgttgaagctttgatagttcaatatactaaagaaccaaagaagagcaagtaatatggagacatgaactttggttttgtggaaaactttttggatgagaaaacatatatttggatatggtttataattctatacttaagacattt

SEQ ID NO: 31571 - DNA, 400 bp, Glycine max
  Clone ID: LIB3138-003-Q1-N1-F9
ggagcaacgcctacacctgttactgtcccagctgctcctgctggtgctgcagctcctgctcctatatcttcaggctctgctgtgccagagtctgatatatatgggcaggcagcatctaatcttgttgctggaagtaacttggagggaaccattcagcaaatccttgacatgggtggaggaagctgggacagggatactgttgttcgcgctcttcgtgctgcttataacaaccctgagagagctgttgaatatttgtattccggcataccagagcaagctgaagctccacctgttacccgagagcctgcaagtgctcaacctgcaaatcctacagctgctgctccacaagcagcacaaccagcatctgttccttctagtggacctaatgccaatcctttag

SEQ ID NO: 31572 - DNA, 396 bp, Glycine max
  Clone ID: LIB3138-003-Q1-N1-G10
gtcattggtgtcaagttgacaaccataaacaatatgtgtgcatatgggctcaatcctggtatttcaggttctcgtcttttgggcaccattcctcagtccatttcacagcaaactgtttggaatcaaatggcaacagtgagaacaccattgaattttgattctagcaagcagagcttttgtcagttttctattgaccttctcggtggaggaatcttagtggacaaaactggagattggatcacacttatacaaaattctccaattagtaacttattgagagttgctgcttggaagaaaggctgtttaatggtcaagattgtgatgtctgggaatgcagcagtcaaaaggagtgattgggcctcattggtacaagtgtttttaacaaacagcaacagt

SEQ ID NO: 31573 - DNA, 405 bp, Glycine max
  Clone ID: LIB3138-003-Q1-N1-G11
gaagatgtgccttaacaacaacaacaacaacaaattggaaaacgaaacaacaatggatggtttggtgactttcctagaccagacaataacaacactggcctactttttgggtttcaacaaccaaatagaagcaacgggaatttgggtgagaacactaacttagttcccaaacaacctcctcctcctttatcattaaactcaaaccactcccaaagacaagcacaacagcaccaacaacagccaccaccactttttccaaagccagcaaatgtaacttttgcagctgctcctatgcatttgttgaacaatgcacaacttgctagccctggcagaaagagagggttgattggagttgctgagcattcgatgaatgttggaatggttggtttagccacagctaatgtc

SEQ ID NO: 31574 - DNA, 400 bp, Glycine max
  Clone ID: LIB3138-003-Q1-N1-G12
gtgagaacaccattgaattttgattctagcaagcagagcttttgtcagttttctattgaccttctcggtggaggaatcttagtggacaaaactggagattggatcacacttatacaaaattctccaattagtaacttgttgagagttgctgcttggaagaaaggctgtttaatggtcaagattgtgatgtctgggaatgcagcagtcaaaaggagtgattgggcctcattggtacaagtgtttttaacaaacagcaacagtacagagcattttgatgcatgtaagtggacaaaatcagaaccacattcctgggaattgatcttcccaatagaggtatgtggtcctaataatggttttgaaatgtggagttctgagtgggcaaatcaaacttcatggcatt

SEQ ID NO: 31575 - DNA, 402 bp, Glycine max
  Clone ID: LIB3138-003-Q1-N1-G2
aagaaaactgctgaatcattcatagacatggtcaccgtcactggtgcagcagttcctattccctcattcactggcctcaatgcaagcgcatgctatgagagtgccgccgcagttaaagtctcaactccccaagccacatggttctgctgcatacaagcttccatcaaagacgttggaatcactgctgaggccatcgctgcgagcgcagatctaactagcaacgccatagccattgaattgtcactgagcactgaagactgatctctggttatctctcccaactctttctccaaggcccatgaggaaaagatcgtgttctataacaacgcaggtttacgccacaacgttgagttccacaaagactagattcctaccgacgcaagatgcacggaaaatctgcat

SEQ ID NO: 31576 - DNA, 361 bp, Glycine max
  Clone ID: LIB3138-003-Q1-N1-G3
ttcggagctaccttgaacttacttcttgacaaggtcttcttggaaagctggactgaactgaaaggagccatcttggaagggggtgtagcattcaacaaggttcattccatgcactcatttgagtacccagcagttgatcctaggttcaatgatgttttcaacaaagctatgttcaaccttactactatagtcatgaagagggttcttgagttttacgaaaggtttaagaacattaataggcttgtggatgttggtggtggtcttgggatcaatctcaatctaatcacttctaaatatccacatgttcaaggtgttaattttgacttgccacatgtcatagagcatgctcctacataccccg

SEQ ID NO: 31577 - DNA, 401 bp, Glycine max
  Clone ID: LIB3138-003-Q1-N1-G5
agaaactgtattaaccgtttctgctctgctttgttctgcctgcgactaataatgggcactacatctaccaccatcaaattgcttccactttctcctttgccaaaaccaaccacttcatcttcatggctttcttgcaaaccaatttcccatccctttccaaattctcgtccgcgaggtaatgtcgcagtctcggtttcctacaacccccaaggcaacttcgacctctctttatttgacgatgatgatgaaactaaagctgcacctcctctgcccccaactgaaggccgatttgaagttgtcattgacaatgacgttattagtcggcttgacttgtctccttttcaagctgcaacaggcatgaaatcccctttatctgtaaaaccaaaagaatttcttgaccg

SEQ ID NO: 31578 - DNA, 394 bp, Glycine max
  Clone ID: LIB3138-003-Q1-N1-G6
ggcttttccccacaagctggtgcagtttggagagattcaggagaaagttgtattgaaattttcacaagaagaatttcttacagcttggtcaactcaagtgcgtcctgcaacaactctgttggctgatgggtgtccatatttgtatgcaatggtgcatgatagttcaatgtctacaataccaggtgattttgtcattggtgtcaagttgacaaccataaacaatatgtgtgcatatgggctcaatcctggtatttcaggttctcgtcttttgggcaccattcctcagtccatttcacagcaaactgtttggaatcaaatggcaacagtgagaacaccattgaattttgattctagcaagcagagcttttgtcagttttctattgaccttctcggt

SEQ ID NO: 31579 - DNA, 397 bp, Glycine max
  Clone ID: LIB3138-003-Q1-N1-G8
ctcgagccgtccaaaccttcattttgtagtgggtggggagttgtcatttctctgccgttccatggatcgggaaggaggatccaacggcggatcttgctactactccgttctcggtattcgtagggacgcctccttctctgatattcgcactgcctaccgcaaactcgctatggtaaagtagtatacgccaccgtttcattcttttcctcttttttatttatttatttatactaattaattcctgatttttcgaaaaaaaaaaataaaattgggccgggctgagaagaggtggcacccggacaagtgggctcagaatcctgcaaccgctggcgaagccaagcggcggtttcagcaaatccaagaagcctactcagcagttctctccgatcagtctaaa

SEQ ID NO: 31580 - DNA, 399 bp, Glycine max
  unsure at all n locations
  Clone ID: LIB3138-003-Q1-N1-G9
aaacttgttgttcacattaccaagaacttcatgaccctgcccaacatcaaggttcctctcattcttggtatctggggaggcaagggacaaggaaaatctttccaatgtgagcttgtctttgccaagatgggaatcaaccccatcatgatgagtgctggagagttggaaagtggaaatgcaggagagccagcaaaactgatcaggcagagataccgtgaagccgcagacttgatcaagaagggaaagatgtgtgctctcttcatcaacgatcttgatgcangagctggtcgtcttggtggaaccacccaatacactgtcaacaaccagatggtgaatgccaccctcatgaacattgctgataaccccaccaatgtgcagcttcctggtatgtataacaag

SEQ ID NO: 31581 - DNA, 405 bp, Glycine max
  Clone ID: LIB3138-003-Q1-N1-H1
caagaacacagttggaggaaccattctgcgtagtgatctattggcaaattttttgacagagggcaattttagagcaagtgttgatttgcagcgcactcatcgtattagaggaatgattaaaatggtggccacagttggtattcctgagaatacaggtatatcattggcctgtgctatgaatagttcttttagggggcgcgccagttctgatatttacaccatctgctctcaagactgtgaattgtggaatcctgcttgcacaaaagcaatgactatgtcatttaatccaaacccgtgttctgatgcatggagtttggaatttctgaagcgtactggatttcattgcgatatcatttgtgtcactggatggactgccaccccaatgcaagatgttcaggttacaat

SEQ ID NO: 31582 - DNA, 392 bp, Glycine max
  Clone ID: LIB3138-003-Q1-N1-H11
gggatatctatcttcattttcgtcgtcgttcatttttttattggtgtttttctgtgttccattcgcttcttctctcagaaaagctcgccaatcgatcttgctctcttctacgcttttcgaattccttccattccattatggacgcagattagattcacgttcacattcacttctcttcgtttgcttcaaccactctgctctgctctgctctactctgagatccgatcgcattttcattcagaaaggaaactcgtgtgactgatttatgcgctaattgcaattgcactgcgagcgtccctgtgccgaatcggaagatgggattagtgtttaccaaattgttttcctctcttttcggtaacaaggaagctcgaatcctcgttcttggcctcgac

SEQ ID NO: 31583 - DNA, 375 bp, Glycine max
  Clone ID: LIB3138-003-Q1-N1-H12
ctcgagccgaaaaaaaaaaaaaaattttaaaaaaaaaaaaacgggcaaaaaaaaaggcgggggttggaaaaacaaaaaaaaaacaacaccaaaaaaccaaaaaacaaaaaaaaaaaacaagggggccccccccccctagtgagcccgcccccccggaaataaattccggcccgggccctgcaggcgtcccacctttccctatagggggccgtattaaaccctgccgaaaacacggccatagctgttccctggggaaaattgttatcccctcacaattccccccaacaaacaaccccgaaacataaagtggaaaacctggggggcctaatgagggacctaacccccattaattgcctggccctcaccccccccttt

SEQ ID NO: 31584 - DNA, 404 bp, Glycine max
  Clone ID: LIB3138-003-Q1-N1-H2
acttatacaaaattctccaattagtaacttgttgagagttgctgcttggaagaaaggctgtttaatggtcaagattgtgatgtctgggaatgcagcagtcaaaaggagtgattgggcctcattggtacaagtgtttttaacaaacagcaacagtacagagcattttgatgcatgtaagtggacaaaatcagaaccacattcctgggaattgatcttcccaatagaggtatgtggtcctaataatggttttgaaatgtggagttctgagtgggcaaatcaaacttcatggcatttgagtttccttattgacaatcccaaacagtctacagtttttgatattctcttgggaatctctcaagattttgaaattgctggtaatactcttatgccagctttttctgttc

SEQ ID NO: 31585 - DNA, 402 bp, Glycine max
  Clone ID: LIB3138-003-Q1-N1-H3
gtctgaatagtaataatcgacagcaaaaatgaaatatttggaggaatggaccaaaacaatgatctagttttatggctgtttaagaatgttatatctcactaaccaaactcaagtcaaagctaattttaacaggcccagattttagaaattagaccaagttgttttaaggatgacattgggacttggttgatacttcggtcatcccaacccatttcgatgcacatattcttcttaacaaatatatattagtagtaatacttcttaacataacattttaaacaatattatattatatttatgaatttaattggaatgcactatagtgtaaaggttttttatgctgtcatcaatcacaaattgtcacctatgataagtttgttgacttatataataactacttta

SEQ ID NO: 31586 - DNA, 407 bp, Glycine max
  Clone ID: LIB3138-003-Q1-N1-H4
aaaaaaaaaaaattaaaaaaaaaaaaaaaaaaaaaaaaaaaaaggaaaaaaaaaaaaaaaaaaaaaaaaaaaaaaaaaaaaaaaaaaaaaaaaaaaaaaaaaaaaaaaaaaaaaaaaaaaaaaaaaaaaaaaaaaagggggcgcccccccctttttaaccccttccccccggaatttatttccgacccgttccctgagggctccccaatttccccttttggaagcccttttaaacctgggcgaaaaaatggcaataccttttccctgggaaaaatttttttcccctaaaatttccccaaaaattccaacccgaaaccttaaagtttaaaccctgggggccctaataaggaacctacctccctttatttgcgttgccctcactcccccttttcaataggaaaaacctt

SEQ ID NO: 31587 - DNA, 403 bp, Glycine max
  Clone ID: LIB3138-003-Q1-N1-H5
ttgcctcaagggtccccaacagcaataaccttctttgggaccagcttgaagaaagttattgcctcaagggtccccaacagcaaggtttccggtggaagcttcaagattgttgctgtagaagagaagaaagagattgaagagacccagcagaccgacaaggacagatggaagggtcttgcctatgatatctcagacgaccaacaagacatcacaagaggaaagggtttggttgactcccttttccaagctccacaggatgctggaactcactatgcagtcatgagctcctacgagtacctcagcactggacttcgccagtacttggacaacaaaatggatggattctacattgctccagcttttatggacaagcttgttgttcacatctccaagaacttcatga

SEQ ID NO: 31588 - DNA, 401 bp, Glycine max
  Clone ID: LIB3138-003-Q1-N1-H6
ggtttaccaaatattgcaatatgtggaattgtatcagagagaaaacaggctcaaacccatgcctattatactctgtggtgactggaatggaagcaagcgtgggcatgtttacaagttcctaaggtcacaggggtttgtatcatcatatgacattgctaatcaatacagtgacagttatgcagattctcacaagtgggttagtcaccgaaatcataggggaaatatctgtggtgttgacttcatttggctttgcaatcccaaccaagcacgtaaacctttaaagacaagttgggctgaagctgtatttagtatactaaaattccagttacgaaaagcatcgttatctgaagatgatgcatttgcctttctgaagggtgacaactatgctgattctgtgacat

SEQ ID NO: 31589 - DNA, 405 bp, Glycine max
  Clone ID: LIB3138-003-Q1-N1-H7
ctcgagccgaatcggctcgagttggatcacacttatacaaaagtctccaattagtaacttattgagagttgctgcttggaagaaaggctgtttaatggtcaagattgtgatgtctgggaatgcagcagtcaaaaggagtgattgggcctcattggtacaagtgtttttaacaaacagcaacagtacagagcattttgatgcatgtaagtggacaaaatcagaaccacattcctgggaattgatcttcccaatagaggtatgtggtcctaataatggttttgaaatgtggagttctgagtgggcaaatcaaacttcatggcatttgagtttccttattgacaatcccaaacagtctacagtttttgatattctcttgggaatctctcaagattttgaaattgctgg

SEQ ID NO: 31590 - DNA, 400 bp, Glycine max
  Clone ID: LIB3138-003-Q1-N1-H8
gccagacacacataatggtttatattggtgtttgttcccggaggggttctctaacgggtatgagtgttaaggctcttggaattgtcataaagttaacactgtctgggatgaatcagctaatttaccctcagacttgggcattcactctagttgtacttgtttgtgttcttacccaaatgaattatttaaataaggcactggatacttttaatacggcagtggtatctcctatatattatgttatgttcacaacatttaccattgtggctagtgttattatgtttaaggactgggatagacaaagtccaacacaagttatcacagaaatatgtgggtttgtgaccattctatcaggaacttttcttcttcacaaaactaaagatatggctgatggtttaca

SEQ ID NO: 31591 - DNA, 396 bp, Glycine max
  Clone ID: LIB3138-003-Q1-N1-H9
aatggctctgacttctgggcttttattgagaacttcttcccggggtctaccaccaccagaaacccacactttcattaggaccatgccttcttctgctgacttgcgcaccattaccgatagctgatgcaccgactctcattcatctaagccatcccgtaaaattcgtggtatcatgaaaccccgcatagtctccctcaagatcgaacacctcgtctgcacttcctagatggtttgaacccaagtcctcaaacggatttggtcttacattaacgacaacaatattgacgaccctacacacaagatgactataaattgcgatgagaagctgaagaacgtgtttgcagggaaagatcaagacgacatgctacagattgctcgctcgattatcccttactt

SEQ ID NO: 31592 - DNA, 321 bp, Glycine max
  Clone ID: LIB3138-004-Q1-N1-A1
catgcatgctccccagttgcaaaaatgggagacagaaacaagtcaagtttttgttaaggcaaggactacacctaacatttcaaaaaatgagggattaaaaggagacaattttgtagggattaaaagtgaacatttccctatttataagaactaaaaacatatgtaactcaactttttatcaaaatgagaggggatgttatttctatggcaaaagtttatttttatataaatttttaccattttaattgaattaatgtaaaaaaagttgttgcatgcaaaaatatcatggggaaagaaacattcttttccactatgtttttt

SEQ ID NO: 31593 - DNA, 325 bp, Glycine max
  Clone ID: LIB3138-004-Q1-N1-A10
ctggtgcaaagaatgctattctcatgaatatgccaaatgctggtctttcaatgtggagatattttgttggagatctcgtctttgaagtttctaagatgacttctccctacattaaatgtacagtctctttcttcatagcatttggaaatttggctgatgataccatcaattttgaggcttttccccacaagctggtgcagtttggagagattcaggaaaaagttgtattgaaattttcacaagaggaatttcttacagcttggtcaactcaggtgcgtcctgcaacaactctgttggctgatgggtgtccatatttgtatgcaat

SEQ ID NO: 31594 - DNA, 319 bp, Glycine max
  Clone ID: LIB3138-004-Q1-N1-A11
cgacttcttccttttttgagttttcaccaggagtgttcttggagtagttataggatcctttgatcgatatggctcaattgctatcctcttcttgctccttgactgtctgctctagaaataaaccttacttaaaaccctttgacaaatgttcaacaccgttttctatgaaagttgcttgcaataattccaaacctccatttccaaggctggatttgcaaaaaccgaagcctaaaaaagattctctaatagtacatgcttctgcagtttcaactagccagggaaccccagttcaaactaactcttacgacccttttaaaca

SEQ ID NO: 31595 - DNA, 346 bp, Glycine max
  Clone ID: LIB3138-004-Q1-N1-A12
ggataaggaatgtattcccccagaccagcagcgattgatgggggaggctaacagctggaagatggcataaccctttcagactacaacattcagaaagaatctacccttcacttggtgctgcgtcttcgtggtgggatgcaaattttcgtgaaaactcttactggaaagactatcacattggaggttgagccttctgactccatcgaaaatgttaaagctaaaattcaagacaaggaaggtatttctccagaccagcagcggttgatctttgcaggcaaacagcttgaagatggcagaaccctttcagactacaacattcagaaagaatctacccttcacttggtgc

SEQ ID NO: 31596 - DNA, 340 bp, Glycine max
  Clone ID: LIB3138-004-Q1-N1-A2
tgccacacaaccacacttggctaacaccaccaacttggcagaacatttggctgcatctctgcatggaaatgcaacaaagctagcgccaccaagtcaggtttcctttcaacaacacagctgcactagtactcctacactatctacccctttcatttttccacaaaaatagatgaaaatgtacatgaagggaaaattaattagagtggtatgcatgtatgaaaattagattacagatgttaattaattaaagaagagtgtaaagttcgttaggttactcttttcaaaaaagatggaacatattttcttttctgataatagaatatatcagccttagaatctg

SEQ ID NO: 31597 - DNA, 239 bp, Glycine max
  Clone ID: LIB3138-004-Q1-N1-A3
gttatacacctctttttttttctcgcgtcaatctgggggggatgaacttatcctgcgatctcataaatcttatcgacaatagtgtgtgctcagtccaaatgatgctcgcctattgaaatggtaagctatttctagtattgaatggctacaaaaagctgatgtgcctaccatattcacaaattgaagagattcattcgtcgcaaaggatgatgaatgctccttgttcaaatgataatttt

SEQ ID NO: 31598 - DNA, 385 bp, Glycine max
  Clone ID: LIB3138-004-Q1-N1-A4
aagcaaccagcatgctgaatgatgtttattcgtacttagtttccagaatattgaattacttcccatataagtgactacaacgggatgggatggacatatacagatatcaaaaagccaccacaggcagcaaatgagtctccgactatagctgagataatgtagtatcactttcttcaatctcatcaaattccactggtttcccacaaacaagcttcctgtaaatcaaatatcaaattataaggacatttatacattcatatattaagaatcaacaacttagaaataaaacaatacaatacagctatttcaaaataaaaacagcaaattctctaacaaaataaaacaaataatttataaaaacaatggattagatgcaactagatga

SEQ ID NO: 31599 - DNA, 377 bp, Glycine max
  Clone ID: LIB3138-004-Q1-N1-A5
caaaaatggcgtctttgcagcaccccacagcttccctccaatccaaacacgtcctaatcccccgaaacactcttacccagaaacccatcctcaacctctcctccctcccgggcaccaccttcacccccctcaagctcaaattcttcagcggcggcgccgtccgccgctccaccggcgcctcgggagccagaatgtcagccaccgcagcctccagctacgcggctgccctggccgacgtggctgccgcgaacaacacgctcgacgcgacaaccgcggacatcgagaaaatcgacgagatattctcggaggcgcaggtgtcggactacttcgccaaccccacctttgccgtggagaagaagcggaagctgatagatgag

SEQ ID NO: 31600 - DNA, 385 bp, Glycine max
  Clone ID: LIB3138-004-Q1-N1-A6
ggcggaggtggttcgggtgatagggcagtgccggcgcgcgctgaagtttgctaggttcatgagcaggttcgggaagagttaccgaagcgaggaagagatgagggagaggtacgagatattctcgcaaaacctcaggttcatccgctcccacaacaagaaccgcttgccctacactctctctgttaatcattttgctgattggacttgggaggagttcaaaagacacagactaggcgctgcccaaaattgctctgccactcttaacggcaaccacaagctcactgatgctgttcttcctcccacgaaagactggaggaaagaaggaatagtgagtgatgttaaagatcaaagcagctgcggatcatgctggacattcagcacaact

SEQ ID NO: 31601 - DNA, 320 bp, Glycine max
  Clone ID: LIB3138-004-Q1-N1-A7
ttgaattgtatttgtgtttcagagtttggaattggtgtttctgagggaattcgcgcacccttccatgaatcctttctctactgtggcttcaaattttcggatcctctcacccaagtacacacttttagtccatgaccctaggaaattgtgccatagttttatgattaaatttactgttactgtgtggtttttttgttcacttaggcaatgaatatgatggggctttacgactttgcttactggttttcctggctcatctgggaggcagttgtcacgatcctatcgtccctccttataatttcttttgattgcattattat

SEQ ID NO: 31602 - DNA, 354 bp, Glycine max
  Clone ID: LIB3138-004-Q1-N1-A8
ctcgagccgtggagttctgagtgggcaaatcaaacttcatgggatttgagtttccttattgacaatcccaaacagtctacagtttttgatattctcttgggaatctctcaagattttgaaattgctggtaatactcttatgccagctttttctgttccacaggctactgccagatcttctgaaaatgcggaatcctctgcatgatctggaatttgtgttttctttcgcttgttcgtttgtttaattcaataaaggaaattaggcatgaccctcttgttgagtatgctctgcctatttgaaaatttccacacctcttttaatttgtcgaatgatgtgtgaaatgtgtgttatttt

SEQ ID NO: 31603 - DNA, 334 bp, Glycine max
  Clone ID: LIB3138-004-Q1-N1-A9
attggtacaagtgtttttaacaaacagcaacagtacagagcagtttgatgcatgtaagtggacaaaatcagaaccacattcctgggaattgatcttcccaatagaggtatgtggtcctaataatggttttgaaatgtggagttctgagtgggcaaatcaaacttcatggcatttgagtttccttattgacaatcccaaacagtctacagtttttgatattctcttgggaatctctcaagattttgaaattgctggtaatactcttatgccagctttttctgttctacaggctactgccagatcttctgaaaatgcggaatcctctgcatgatct

SEQ ID NO: 31604 - DNA, 364 bp, Glycine max
  Clone ID: LIB3138-004-Q1-N1-B1
gagggcccaaaatctagggttttctgttcttctctggggatctgaagacatgcagtccaagtctgaaactgcaaatcgactgagatcagatcctcattcctttcaacctggcagtgtttattctgagccttggtggcgtggtattgggtacaatcctgtggcccagacaatggctggggcaaatgcatccaattcatcgtctcttgaatgccctaatggtgattctgaatccaatgaagaaggtcagtctttgtccaatagcgggatgaatgaggaagatgatgatgccactaaggattcacagcctgctgctcctaatggaacaggaaattatgggcaagaacagcaagggatgcagcatact

SEQ ID NO: 31605 - DNA, 232 bp, Glycine max
  Clone ID: LIB3138-004-Q1-N1-B10
caatttttgtgtattgctttatcctgtaagtaattacggggagagcttcgttggaatgttacatgtggtgtggacgtggtggtttacccaccactgcttggattagttctgcagttaacaatcgctcctcagatatcaacaaaatgattctcacagcacttgggaaaggtaagaaaattgtttttcttactaaaagttatcctttttcaatatctttactggctgttctttt

SEQ ID NO: 31606 - DNA, 370 bp, Glycine max
  Clone ID: LIB3138-004-Q1-N1-B11
gggtggtgctgtatttcttctcatttcaatcattggcctatatctctgtaaaacaaacaaggtagctactgtaaaaccttgggccacaggattaagcggacagcttcagaacgcatttgtaacaggtgtgccaaagctaaagagatcagagcttgaagcagcatgtgaagattttagtaatgtaattggtacttcatccattggtacagtgtacaaagggactttatctagtggtgttgaaatagctgtggcatctgttgcagcgacatcatccaaagattggtcaaagactttagaagcccaatttaagaacaagatagattcattatcaaaagtgaaccacaagaattttgtaaatcttcttggacat

SEQ ID NO: 31607 - DNA, 387 bp, Glycine max
  Clone ID: LIB3138-004-Q1-N1-B12
agattcccttttctcttttaattcaaaaccctaattttcttttgtccaccctccagcgtcgccgtttctcaacaagtcttaccctaatcgtcaaccattcaccaataacgattcaaaaacccaaactttgtgtgaagtagttcattccccattactcactcgcttgttttgaattttatttgttgcttcgtttcccactatgaaagaaggtaaatcagttaaactcaaccatcaacaaccgcaccagaacggtcacctctcgccttcaaaattcgccaaattgtttgatccagaagcatcctgtgacaaggatcaattgggagacgtattgcattggattagacaagtgctcggccttgcgtgtggattcctttggggtttcatacc

SEQ ID NO: 31608 - DNA, 324 bp, Glycine max
  Clone ID: LIB3138-004-Q1-N1-B3
gctgctctggctatatcgaagtcttatccaatagtgaccatcgtggctgcacaaaatgctcatgctgcatcgaaaggtccagatcataatcgtgcaacaaatgccatcagccagactggcttctcaacacaagatgctgaaccttgcaatgatgccaaccaccactatttgatccttccctcaaactgtataactgacgacggtacgccctgaattgcatgctgacacaaccttcgaggatgagtgtgttacgtctattgatgcagaaattcacaaaggtgtagagctctaagaacagcttgatattgatgttcttgtcatgga

SEQ ID NO: 31609 - DNA, 291 bp, Glycine max
  Clone ID: LIB3138-004-Q1-N1-B4
atcgagataactagaaacagtgtgatgaaaatgaaggtccttggtttcttcgttgctacaattttggtagcatggcaatgccatgcgtacgatatgttccctctccgaatgaacactggctatggtgcccgtactccggaggtgaaatgcgcaagttggaggcttgctgtggaagcacacaacatctttggctttgagaccattcctgaagagtgcgttgaagcaacaaaggaatacatccatggcgaacaatatagatcagactccaaaacagttaaccaacaagcttac

SEQ ID NO: 31610 - DNA, 383 bp, Glycine max
  Clone ID: LIB3138-004-Q1-N1-B6
caactttgcaatttataaagttagcagattgtgattttctcaagagaaactttaagcagatgtctaatgttttgtgggtggctcctgaggacaaggcgagtttatggtcacaacttcattatgtttcgtgtaataatctggaaatgcaagaagcttatcttgtcaatctcgtaaatgtgttacgagaattgtatttgcacagtccagaggaagctcgccaattgagaaggaaagctctctctcgtattgaatggctgcaaaaagctgatgtgcctaccatagcacagattgaagagttccattcaatgcagaggatgatgaatgctcctgattcaaatgataatattgatttactgttgagcattgattttgttgggtttaca

SEQ ID NO: 31611 - DNA, 332 bp, Glycine max
  Clone ID: LIB3138-004-Q1-N1-B7
ctcgagccgtatcggctcgagcaccattcaagctttcaaaagacaaaatagaattacagtttgaatggtgctcgagccgttacggcccgtgctcgtgccgattgctgggcacacgttcgcgtgctggcgtcgaacaggcgaaggaggggagggtcgtaaatgtctcatcaagacgtcataaattatcatatcctgaagggattagatttgataaaatcaatgataaatcagggtataacagtttgtctgcatatgggcagtcaaagcttgctaatgtgttgcataccaatgagctcgcaagacggcttaaggaggagggcacaaacattact

SEQ ID NO: 31612 - DNA, 300 bp, Glycine max
  Clone ID: LIB3138-004-Q1-N1-B8
gtgattattattccaaaatgaccccaccccacacttagtgttatgataacttggaaccttttgcacgcaagaataagctgtacacacgcaagaatagcgctattattatttcttcattttttgttgttgtgggtcaaagaagtagcacctggaagccctgaatattcagcctgtgatatggggtacctcaattcagttttgtcctcttcaagccaggttcatgctgcagaagattcacctgtcagtggagggggcctcagtcagaatggaaaattcagctatgggtatgctagcttccct

SEQ ID NO: 31613 - DNA, 379 bp, Glycine max
  Clone ID: LIB3138-004-Q1-N1-B9
ggaggagaataaaatagtcgttcgagatggcccgtacgaagcaaactgctcgtaagtccacaggaggaaaggctcctaggaagcagcttgcaaccaaggctgcacgtaagtctgcaccaactactggtggtgtgaagaagccacatcgttaccgtcctggtaccgttgctcttcgtgagattaggaaataccagaagagtaccgagcttttgatcaggaagctccccttccagaggctggttcgtgaaattgctcaggacttcaagactgatctgcgtttccagagccacgccgtgcttgcattgcaagaagctgctgaggcataccttgttgggctctttgaggacactaacctgtgtgccattcacgctaaacgggt

SEQ ID NO: 31614 - DNA, 381 bp, Glycine max
  Clone ID: LIB3138-004-Q1-N1-C1
caaaagcctctcttcaaattcagcaactcctcttctctccctccttctatttactataccggggccacaactgaagcagagtcaactccagtttctggagatgataattttgcaaaatgctacgtatgtagtttggaagtcagtgaattgagacataggaactgtgcaaatcttgattgtaatttgctttttctatgctgcggacaatgtgcagaggatctaagaggttgttgttgtttgacgtgcactactgctcctcggcttagacctgttttaaatggaatgcagagatacaaaaaatggcactactatcgggatatggattttcaagggaaaatgaaaatttcagcttgaatgcccttgtcaaccaatggaaaaagc

SEQ ID NO: 31615 - DNA, 374 bp, Glycine max
  Clone ID: LIB3138-004-Q1-N1-C10
ctcttcttcttactctcttacgttaattcttcgttgtctatgagggcattggatatgattgatgttgttcccaggacgaggatggaagaagaaaatatagcaatacaagaagcagcttccgctgggttaaagagcatggagcatctcattcgtctcctttctccttcttcttctctttacaacaaccttaataatctcaatctcaaccacctcgactgctccgaaatcaccggcttcactgtcttcaagttcaaacaagtcatcaaccttcttaaccgcaccggccacgcccgctttcttctgtttccaccccaagcccaatcccaaacccaaactaattctcaaccacaaccttagatccaacaacaagggtt

SEQ ID NO: 31616 - DNA, 360 bp, Glycine max
  Clone ID: LIB3138-004-Q1-N1-C11
aatcagaagcatcaccaccaccaccatcatctcatgagttgggatttgcacattcctcaccttcagtactttcaccatcaccaacaacaagagaagaaggaggatctgaaggacattccaaaagggtgtttggccatcttggtagggcaaggggaggagcaacagaggtttgtgatccctgtgatgtacatgaaccacccattgttcatgcagttgctgaaaaaagctgaagaggaatacgggttcgaccagaaagggcccatcaccattccttgccacgtggagcacttccgctctgttcaaagcttgattgaataggacaaattcctccaccattgtcatcaccaccatgcttggtgc

SEQ ID NO: 31617 - DNA, 386 bp, Glycine max
  Clone ID: LIB3138-004-Q1-N1-C12
cttaaaagagcctttgctttttctttaggcctttccgaatgaagtacttgtttcattttctctcgaagcaagaaaaatgttcatcgagagtttcaaggttgagagtcctaacgtgaagtacacagagactgagattcagtccgtgtacaactatgaaaccactgaacttgttcacgagaacaagaatggcacttatcagtgggttgtcaagcccaaaactgtcaaatatgaatttaaaaccaacacccatgtccctaaactaggggtaatgcttgtggggtggggtggaaacaatggctcaaccctcaccggtggtgttattgctaaccgagagggtttttcatgggcaacaaaggacaagattcaacaagccaattactttgggt

SEQ ID NO: 31618 - DNA, 378 bp, Glycine max
  Clone ID: LIB3138-004-Q1-N1-C2
ggattctgcttacatcaacttcagaggtatatggggatcctcttgtgcatccccaacctgaaagttattggggcaatgttaaccctattggagttcgtagttgctatgatgaggggaaacgggtggctgagacattgatgtttgattaccataggcagcatggaattgaaatacgcattgcaagaatctttaacacatatggaccacgcatgaatattgatgatgggcgtgttgtcagcaacttcattgctcaagcactgcggggggaaccattgacagtccaatgtccgggaacacaaactcgaagtttctgttatgtctctgacctggttgatggccttatccgtctcatggaaagatcaaacaccggaccaatca

SEQ ID NO: 31619 - DNA, 381 bp, Glycine max
  Clone ID: LIB3138-004-Q1-N1-C3
ctcgagccgttgaaaagctttctagctagtcataacatcaccattactgatggtattgacaaaactagtgcaactttgcaatttagaaagttagcagattgtgattttctcaagagaaactttaagcagatgtctaatgttttgtgggtggctcctgaggacaaggcgagtttatggtcacaacttcattatgtttcgtgtaataatctggaaatgcaagaagcttatcttgtcaatctcgtaaatgtgttacgagaattgtatttgcacagtccagaggaagctcgccaattgagaaggaaagctctctctcgtattgaatggctgcaaaaagctgatgtgcctaccatagcacagattgaagagttccattcgatgcag

SEQ ID NO: 31620 - DNA, 390 bp, Glycine max
  Clone ID: LIB3138-004-Q1-N1-C6
taaaagccttagccttccctacaactccaaacacaaagacatcatcatccatggctgcctccgtctccactgtcggagctgtcaacagagctcttttgaacctgaatggttctggagctggagcttcagctcccagttcagccttctttgggaccagcttgaagaaggttattgcctcaagggtccccaacagcaaggtttccggtggaagcttcaagattgttgctgtagaagagaagaaagagattgaagagacccagcagaccgacaaggacagatggaagggtcttgcctatgatatctcagacgaccaacaagacatcacaagaggaaagggtttggttgactcccttttccaagctccacaggatgctggaactcactatgcag

SEQ ID NO: 31621 - DNA, 379 bp, Glycine max
  Clone ID: LIB3138-004-Q1-N1-C7
gcgacttaaatagataattaacttgatttattaaaatatactttttaactaaatgtaattttaagatcattattctaaatttaaaatgttatattttccaacaattatctctgttcttgaagtattggctgttactgtacctgttttattaacagtagcttttgtaactatagctgagagaaaaacaatggctagcatgcaaagaagactgggacctaatgcagtgggttgatatggtctacttcaagcatttgctgatgctcttaaacttttattaaaagagtatgtttctcctacacaagccaatatagtattatttttcctgggtccgattataactttaatcttttcattattaggatatgctgtaataccttat

SEQ ID NO: 31622 - DNA, 378 bp, Glycine max
  Clone ID: LIB3138-004-Q1-N1-C8
aaactttcgaaagattttatccaattgaaattttaaaaatgactgggataaacttaagaattcaattattgaaattgaataagtaaacaatttaattggattggtcgaatggtatcaaaaaaatggagtactaactcccatttcttatttattattgaattaaccgatcaacttgctttgttatcgaacatttctttttgatttcaaaaattttccggaaaaaatttgaatctatttttatatgcgaatcaatcctactacttctggtcctgaggtttctgcgcttgaaaaaaaaaatctgggacgtatcgcccaaataattggtccggtactagatgtagcttttcccccaggtaagatgcctaatatttacaacgc

SEQ ID NO: 31623 - DNA, 378 bp, Glycine max
  Clone ID: LIB3138-004-Q1-N1-C9
gaatttgactggaactgctagatatgctagtatgaatactcatcttggaattggtatgctctcaatgtatctcttcatcaaacttcctttccattgtatttattgttaattgattctgaagtttggtattgccttttcattctttaatagagcaaagccgtagggacgacttagaatcacttggatttgttcttatgtattttttgagaggaaggtagttatccttgctcctatgttgttttgtctttctttatcacctacttctaatttaattttttacttggtatttctacagtctcccatggcagggattgaaagcaggtactaagaagcagaagtatgagagaatcagtgagaagaaagtttctacttctattg

SEQ ID NO: 31624 - DNA, 383 bp, Glycine max
  Clone ID: LIB3138-004-Q1-N1-D1
tgccaccctcatgaacattgctgataaccccaccaatgtgcagcttcctggtatgtataacaaggaagagaatccccgtgtgcccatcatcgtcaccggtaacgatttctccacactctatgcgcctctcatccgtgatgggcgtatggagaagttctactgggcaccaacaagggatgaccgcattggtgtctgcactggaatttttcgcaccgattcaattcctgaacaggacgttgtcaagattgttgacaccttccctggccaatccattgatttctttggtgcactgagggccagagtatatgatgacgaagtgaggaagtggatttctggtgttggtgttgacggcattgggaagaagcttgtgaactcaaaagatg

SEQ ID NO: 31625 - DNA, 381 bp, Glycine max
  Clone ID: LIB3138-004-Q1-N1-D10
gaaattttcacaagaggaatttcttacagcttggtcaactcaggtgcgtcctgcaacaactctgttggctgatgggtgtccatatttgtatgcaatggtgcatgatagttcagtgtctacaataccaggtgattttgtcattggtgtcaagttgacaaccataaacaatatgtgtgcatatgggctcaatcctggtatttcaggttctcgtcttttgggcaccattcctcagtccatttcacagcaaactgtttggaatcaaatggcaacagtgagaacaccattgaattttgattctagcaagcagagcttttgtcagttttctattgaccttctcggtggaagaatcttagtggacaaaacttgaaattggatcacact

SEQ ID NO: 31626 - DNA, 383 bp, Glycine max
  Clone ID: LIB3138-004-Q1-N1-D11
tgcaaggcattggcaccagccacaatttccagaatttcaccagtgatcttagcctggcgctccctattgtacacaatggacaagttcttcttcaactcaatagcattatctgtaggtattgtttacttattataatgatgggtggtggttgcccttttcattttctaatgtggttatctaagacacttgtgcaatttttacgcttctgttgaaacttgaatgaaatgcgcaggctttgtgcaataggaaaaatgcgatcaaatctgaagcggacacttttttttttgttatgttatttttttttttccttctgaattatgtattgtaatgaatcaataatagatctattatataaagattcaaaaagttatctctgttgattt

SEQ ID NO: 31627 - DNA, 300 bp, Glycine max
  Clone ID: LIB3138-004-Q1-N1-D12
ctaataccaaattcatttaataataccatcaatataaaaagggaggacccacaaacaaatagacaagatagactacattcaactaaaaaattatattgacccttttactaatatgcattccttacccttcgttcaactcatgtgcacttctgcaacatctctgttatctgttgcgtgtccatatttttttgcaatgcctcatcataattctctttcttcaccactctctcatttcttcctccccgtcatttttacatccatatcccatatttcctcattttggctcattccttgtttttt

SEQ ID NO: 31628 - DNA, 385 bp, Glycine max
  Clone ID: LIB3138-004-Q1-N1-D2
ctcccttttcttctctcatcctggttttctgtaggctgtttcctattcttacctccttgagaaatagaaatgggtgcaaagaaatggtttaagataatagtcaaattgaagaaatcgaagaaagataaatccaaagaagaaaagaccactgatgaaaattcaaatgaatactccaacgggaagcagagtactcgtgaagagtcaagtagcaatgccaatgaaggtttaatgatggaccggactgttccttcaaggttgatggatgacattgcagctactcggattcaaaatgcatttcgttcatttatggcaagaagaacattacaccatctaaggggagcagagaaattcgaagctttaattcaagatcacctggccagagagc

SEQ ID NO: 31629 - DNA, 322 bp, Glycine max
  Clone ID: LIB3138-004-Q1-N1-D3
gttcccaggacctattgtgttttaaatccacaaaatccttttgtgttaaataggtggatgggaaaattgactttcccccagggcacttcccgaagtgttaagagaatgcctctttctatagggggaggagctggtgcaaagaatgctattctcatgaatatgccaaatgctgttctttcaatgtggagatattttgttggagatctcgtctttgaagtttctaagatgacttctccctacattaaatgtacagtctctttcttcatagcatttggaaatttggctgatgataccatcaattttgaggcttttcctgaatctc

SEQ ID NO: 31630 - DNA, 387 bp, Glycine max
  Clone ID: LIB3138-004-Q1-N1-D4
tggatggccaccttgaatgttccccctcttcctccttcaccgagagacgatgccatacaactttacgctgctttcaaaggatttggatgcgatactagcgttgtgatcaatatacttgctcatcgagatgctacccagcgtgcctacatccaacaagaatacaaagcaatgtattctggggatcttctcaaacgcttatcttcagagctttctggcaagttggagactgcactactgctttggatgcacgaccctgccggacgtgatgcaatcatccttaggcagtctctaaccctgcccaaaaatcttgaagctgccactcaacttatatgttctcgaactccatcccagcttcattatttaagacagatttatcattctaaattt

SEQ ID NO: 31631 - DNA, 382 bp, Glycine max
  Clone ID: LIB3138-004-Q1-N1-D6
ccaaaaccctaggtagagagctcttcctcactctcattcgcaatggccgcagcagcacgtcctctcgtcaccgtgcaggccctcgacagtgacatggccaccgacgcctccgccaccgtccctatccctgacgtcatgaagtcctccatccgcccggacatcgtcaacttcgtacactccaacatctccaagaacagccgacaaccctatgcagtcagccgccgcgctggccaccagacttccgccgagtcctggggaaccggtcgtgccgtctcccgtatcccccgtgttcccggcggcggaacccatcgcgccggccagggagccttcggaaacatgtgtcgtggaggacgcatgtttgccccgaccaagatctggcgcc

SEQ ID NO: 31632 - DNA, 349 bp, Glycine max
  Clone ID: LIB3138-004-Q1-N1-D7
cgaaggtggtctcacttgactcgattgcaagtgatccacgacacactgttcgcttcacaaaagcttcgaatccaattcctcagtaacatctgcaagaagtcttctccttcaccatgccaccaaagcctttagactatgggtcaataaatgaaaacgtgaagaagagtcaatatgctgtcagaggtgaattataccttcgagcttctgagcttcagaaagagggcaaaaagattatatttactaatgttggcaacccacatgcattgggacagaaaccactgagcttccctcgtcaggttgttgctttgtgccaagctccattcctacttgatgatcctaatgttggact

SEQ ID NO: 31633 - DNA, 382 bp, Glycine max
  Clone ID: LIB3138-004-Q1-N1-D8
cggcttgctgctattggggagttgggaaaagcatgtcctggtggaacgttgcgggttgtccctctgtttgaaactgtgaaagacctgagaggagctggttcagttatccggaaacttttatcaatagactggtaccatgaacacatcattaagaaccataatggacatcaagaggttatggttggatattctgattctggtaaagatgctggtcgctttactgctgcttgggaactttacaaagctcaggaggatgttgtagctgcttgcaatgattatggaataaaggttactctattccatggtcgtggaggcagtattggtcgtggtggtggcccaacatatctggctattcagtcccaaccccctggctctgtgatgg

SEQ ID NO: 31634 - DNA, 354 bp, Glycine max
  Clone ID: LIB3138-004-Q1-N1-D9
gattggggggacaggaattgatgtgcgcagtaaatcaagaacaatatcaaagcctgttgaacatccctctgagctccctaaatggaactatgatggatctagcactggacaggcaccgggtgatgatagtgaagtaatcctatatcctcaagcaattttcaaagatcctttccgtggtggtaacaatattttggtcatttgcgattcttacaccccacaaggtgagcctatccctacaaacaagagacacagagctgctgaaattttcagtaacccaaaggtccaagcagaagttccatggtatggaatagaacaagagtacaccttacttcaaacaaatgtgaaatggccatt

SEQ ID NO: 31635 - DNA, 384 bp, Glycine max
  Clone ID: LIB3138-004-Q1-N1-E1
atttaattaagcaacttacttccttcccaaacctccttgaactgatgagaaggctcattgctcagcttgtctttaaatctcgaagtgcaattgtccaagaaattgcttgaagatttcataaagaaaatctacatagaaaaactagaaatggccaaaagaacaagtgcaatgaatttagcattcattttaatattattgtgtgccccaattagcatgtttatatgtatgggagaatgggagccaacttggagcacaagagctgcagaagaagctgaggctgtggcagccataccatgttcaggacatggaagagcctacttagatggtcttattcttaaagggcatgaacatgtacatgtttgtgagtgcaattcatgcaatggt

SEQ ID NO: 31636 - DNA, 374 bp, Glycine max
  Clone ID: LIB3138-004-Q1-N1-E10
gctcttcaaacatgggaaaacagagcacaccccaattctctgccctcaactgcatcgatctctccaaccccgacatcaaccaatccgtcaacttactcaaagaggcatgtttggattccggttttttctacgttgtcaatcatggaataagccaggaattcatggacgaggtttttgcgcagagcaagaagttcttctctcttcctcacaacgagaagatgaagactctcaggaatgaacaacacaggggatacacccctgttcttgatgagttgcttgatcctgaaaaccaagtacatggagattacaaagaggggtattatattggagttgaaaaaggtgaagatgatccacaatcgaagaaacctttttat

SEQ ID NO: 31637 - DNA, 357 bp, Glycine max
  Clone ID: LIB3138-004-Q1-N1-E11
agattgtgattttctcaagagaaactttaagcagatgtctaatgttttgtgggtggctcctgaggacaaggcgagtttatggtcacaacttcattatgtttcgtgtaataatctggaaatgcaagaagcttatcttgtcaatctcgtaaatgtgttacgagaattgtatttgcacagtccagaggaagctcgccaattgagaaggaaagctctctctcgtattgaatggctgcaaaaagctgatgtgcctaccatagcacagattgaagagttccattcgatgcagaggatgatgaatgctcctgattcaaatgataatattgatttactggtgaacattgatttggtgggtttaca

SEQ ID NO: 31638 - DNA, 383 bp, Glycine max
  Clone ID: LIB3138-004-Q1-N1-E12
gctcgatgatgtgagtagtggtgctgcacttagcagagcctcaagtgctagcttgggactctctttctccttcactggctttactatgcctcctgaagaaattgctgactccaagcccttcagtgatgatgatatccgtaagtacatgacaatttaattaccatacacttaatttgtataagactgatactcaaagacagttctataaatcatacacctcattatactagtattttttataattaacaagtgtcaaatgattttttaatatgttttattattataattagagtttcacagtcagagattcaccttgacatttaatcaagaccttgaacattattgagataaaacttcaattctaaacaaataattaacaacac

SEQ ID NO: 31639 - DNA, 387 bp, Glycine max
  Clone ID: LIB3138-004-Q1-N1-E2
ctggtatttcaggttctcgtcttttgggcaccattcctcagtccatttcacagcaaactgtttggaatcaaatggcaacagtgagaacaccattgaattttgattctagcaagcagagcttttgtcagttttctattgaccttctcggtggaggaatcttagtggacaaaactggagattggatcacacttatacaaaattctccaattagtaacttgttgagagttgctgcttggaagaaaggctgtttaatggtcaagattgtgatgtctgggaatgcagcagtcaaaaggagtgattgggcctcattggtacaagtgtttttaacaaacagcaacagtacagagcattttgatgcatgtaagtggacaaaatcagaaccacatt

SEQ ID NO: 31640 - DNA, 388 bp, Glycine max
  Clone ID: LIB3138-004-Q1-N1-E3
gaaaatttctcaatctaaaattgcacttcccaagaacacagttggaggaaccattctgcgtagtgatctattggcaaattttttgacagagggcaattttagagcaagtgttgatttgcagcgcactcatcgtattagaggaatgattaaaatggtggccacagttggtattcctgagaatacaggtatatcattggcctgtgctatgaatagttcttttagggggcgcgccagttctgatatttacaccatctgctctcaagactgtgaattgtggaatcctgcttgcacaaaagcaatgactatgtcatttaatccaaacccgtgttctgatgcatggagtttggaatttctgaagcgtactggatttcattgcgatatcatttgg

SEQ ID NO: 31641 - DNA, 386 bp, Glycine max
  Clone ID: LIB3138-004-Q1-N1-E6
ggccacagttggtattcctgagaatacaggtatatcattggcctgtgctatgaatagttcttttagggggcgcgccagttctgatatttacaccatctgctctcaagactgtgaattgtggaatcctgcttgcacaaaagcaatgactatgtcatttaatccaaacccgtgttctgatgcatggagtttggaatttctgaagcgtactggatttcattgcgatatcatttgtgtcactggatggactgccaccccaatgcaggatgttcaggttacaattgattggtttatttcctctcaggaatgtgttcccaggacctattgtgttttaaatccacaaaatccttttgtgttaaataggtggatgggaaaattgactttccccc

SEQ ID NO: 31642 - DNA, 186 bp, Glycine max
  Clone ID: LIB3138-004-Q1-N1-E7
aaaaaaaattttttttaaaaaaaaaaaaaaaaataaaaatggacgatttatataaataaataattttaaaaaacacaccatttattaaaatttacaccatttttttcttaaaaatttaaaattttgaatacttttttttaaacttctattaacttataaatttattttaaaaaacgtttgtccccc

SEQ ID NO: 31643 - DNA, 382 bp, Glycine max
  Clone ID: LIB3138-004-Q1-N1-E9
tgaagatgtcacagtcaagggtaagattgtgggggtgaacaaaggtggagtggtggctgagttggaagggcttagagggtttgttccattgtctcaaatatcaacgaactcaaatgtagaagagcttcttgataaggagcttcctcttaagtttgtggaggtggatgaggaacaatctagacttgtcctcagcaaccgcaaggccgtagctggcaaccaggcacagctaggaattggatcagtggtcactggctctgttcaaagcctgaagccatatggtgctttcattgacattggtggaattaatggcctccttcacgttagtcagatcagtcatgaccgtgtaactgatatttcaactgtgcttcaacctggtgacata

SEQ ID NO: 31644 - DNA, 370 bp, Glycine max
  Clone ID: LIB3138-004-Q1-N1-F10
caacaacttttttttctgatgggtgtccatatttgtatgcaggggtgcatgatagttcagtgtctacaataccaggtgattttgtcattggtgtcaagttgacaatcataaacaatatgtgtgcatatgggctcaatcctggtatttcaggttctcgtcttttgggcaccattcctcagtccatttcacagcaaactgtttggaatcaaatggcaacagtgagaacaccattgaattttgattctagcaagcagagcttttgtcagttttctattgaccttcttggtggaggaatcttagtggacaaaactggagattggatcacacttatacaaaattcttcaattaataacttattgagagttgctgc

SEQ ID NO: 31645 - DNA, 384 bp, Glycine max
  Clone ID: LIB3138-004-Q1-N1-F11
cacagttggtattcctgagaatacaggtatatcattggcctgtgctatgaatagttcttttagggggcgcgccagttctgatatttacaccatctgctctcaagactgtgaattgtggaatcctgcttgcacaaaagcaatgactatgtcatttaatccaaacccgtgttctgatgcatggagtttggaatttctgaagcgtactggatttcattgcgatatcatttgtgtcactggatggactgccaccccaatgcaagatgttcaggttacaattgattggtttatttcctctcaggaatgtgttcccaggacctattgtgttttaaatccacaaaatccttttgtgttaaataggtggatgggaaaattgactttccccca

SEQ ID NO: 31646 - DNA, 387 bp, Glycine max
  Clone ID: LIB3138-004-Q1-N1-F12
gagagctcggatattgaaacaaattatggttctaagataagtgttaaggctacagcaggaccagttcttggacctccatggcaacgtccagagaatgggtatattgttacatccccacaaggccaattgtctctctactacgaaccccactgtgtatataatcaaagtttcactgagaaggaaagggcagatattgtgataacaccagtcataaagcagcttttgcccaattttaccttggtttcgggacaagaagatgcagtgaaacttgcaaagctgcttcaagccaagttcattgtgccaatgaaaaatggagacctagatagcaaagggcttcttgcaagcttaattagtggtgaaggaacagtggaatcatttaaggaactt

SEQ ID NO: 31647 - DNA, 386 bp, Glycine max
  unsure at all n locations
  Clone ID: LIB3138-004-Q1-N1-F2
atacagttcactctcagtctttgccttgcatccattgtacctgagagtacaggcactttctaagaacatacccgaggcgatcaagaaagagattgaaaaggcaaagcagcaactagatgggaaggatgttgattatgaggctacaatggctactaaactctcaattgctaagaaagtttttgctcaagagaaagatttgatacttaattcaagttcctttaaggagttcttttctgagaatgagggttggttgaaaccctatgctgctttctgtttcctgcgggacttctttgaaacatcagatcgcactcaatggggtcattntgctcattactcagaagataagctagagaaacttgtattcaaggacagcctgcattatgaga

SEQ ID NO: 31648 - DNA, 388 bp, Glycine max
  Clone ID: LIB3138-004-Q1-N1-F3
caaaattaataacccaaaaaatacaaaaacaactttgcaatttcgtaggagatgctcaggagcagcacgctaacacagagtgttacagtcacctgtgttcgtcacagtcacagacaatggttccaatcaattcccgtaaattatagattctttgacgctgctcggaactctctatcatcacccaactccgcgatcttcaaatggaaaagaaaggccaattataaccgtcatagttctggaatggggaccttcaccactcgcgcgttggcgcagccgcttcagaacgccgacgaactcatcgactccgtcgagacatttatcttcgattgtgacggagttatatggaaaggtgataaattaatagacggagtgcctgaaacgcttgaca

SEQ ID NO: 31649 - DNA, 390 bp, Glycine max
  Clone ID: LIB3138-004-Q1-N1-F6
tgataacttaattagtgttcatgaatatgtcaagccttactttagtggttctaaattgaaaagctttctagctagtcataacatcaccattactgatggtattgacaaaactagtgcaactttgcaatttagaaagttagcagattgtgattttctcaagagaaactttaagcagatgtctaatgttttgtgggtggctcctgaggacaaggcgagtttatggtcacaacttcattatgtttcgtgtaataatctggaaatgcaagaagcttatcttgtcaatctcgtaaatgtgttacgagaattgtatttgcacagtccagaggaagctcgccaattgagaaggaaagctctctctcgtattgaatggctgcaaaaagctgatgtgcc

SEQ ID NO: 31650 - DNA, 381 bp, Glycine max
  Clone ID: LIB3138-004-Q1-N1-F7
gatattctttgggcatctctacacaagttccttgagcctattctgatgcattggcctggaaaaagattgagggaaaaggctattatttctgcattggagcatatacattacgaagatgagaatactcgatatatttgcataggtcctgtaaataaggtgttaaatatgctttgctgttgggtggaagatccaaattctgaggccttcaagttgcatcttcccaggatttatgattatctatggattgcagaagatggcatgaaaatgcagggctacaatggaagtcaactatgggacactgcttttgctgtccaagcaattattgcatctaacctcattgaagaatttggtccaactataaaaaaagctcatacctatatt

SEQ ID NO: 31651 - DNA, 383 bp, Glycine max
  Clone ID: LIB3138-004-Q1-N1-F8
gttttggaaatggctacaaccaaacctccttggtttcagtatgaaggggttgctgccatgttcaagattggtaatagcaaggaactcccaaccatccctgatcatctctcaaatgaaggaaaagattttgttaggaaatgtcttcagcgtaacccacatgatcgtccttcagccagtgaattgttggaccacccctttgtaaaaaatgctgcacctttggaaagacctattccggctcctgaagctttggaccctgtttctgggattacacagggagcaaaagctctggctattggacaaggaaagaatctttctagcttggattcagatagactttctgttcattcttctagatttttgaaaactaatcctcatgaaagtga

SEQ ID NO: 31652 - DNA, 332 bp, Glycine max
  Clone ID: LIB3138-004-Q1-N1-F9
atgataacttaattagtgttcatgaatatgtcaagccttactttagtggttctaaattgaaaagctttctagctagtcataacatcaccattactgatggtattgacaaaactagtgcaactttgcaatttagaaagttagcagattgtgattttctcaagagaaactttaagcagatgtctaatgttttgtgggtggctcctgaagacaaggcgagtttatggtcacaacttcattatgtttcgtgtaataatctggaaatgcaagaagcttatcttgtcaatctcgtaaatgtgttacgagaattgtatttgcacagtccagaggaagct

SEQ ID NO: 31653 - DNA, 399 bp, Glycine max
  unsure at all n locations
  Clone ID: LIB3138-004-Q1-N1-G1
ggacgatgatnntttcctccttttatgtgatggggagttntntggggggaaatttaaaaaaaaaaaagtcccaccccacaccaaaaaaaaaaaaaaaaaaaaaaaaacaaaaaaggggggcggcctacaacctaaagaaggtcgaccccccgggtatcctaggcccccccccaccagccgaacacccattatacattaacagggggtaattatataattgggggggggcccccccccttggggccccccccccccggtttttttttccgcccccgcccccggggggccccccttttccctttgggggggggtataagggcggggggcaaaagggggccccccccccccccgggggaaatggtttcccccccccacttccccccaaatttccggcggggg

SEQ ID NO: 31654 - DNA, 308 bp, Glycine max
  Clone ID: LIB3138-004-Q1-N1-G10
gcatctccttctcaaactagtagtattattcttccattcataatgggtgttttcacattcgaggatgaaatcaactcccctgtggctcctgctactctttacaaggccctagttacagatgccgacaacgtcatcccaaaggctcttgattccttcaagagtgttgaaaacgttgagggaaatggtggcccaagaaccatcaagaagatcactttccttgaggatggagaaaccaagtttgtgctgcacaaaatagaaagcattgatgaagcgaacttgggatacagctacagcgtggttgggggtgc

SEQ ID NO: 31655 - DNA, 381 bp, Glycine max
  Clone ID: LIB3138-004-Q1-N1-G11
cagctctatccggaaccatggtgagcacctccttcatgaggaagcaacctatgacgaccaagagcctaaagacattccccaacgctctttttggtctgaaaggtggacgaggtggtcgtgtaacttgcatggcctcgtacaaggtgaagctcataaccccagaaggagaagtggagtttgaatgcccagatgatgttttcattgttgacaaggctgaggaagaaggcattgaacttccctactcgtgcagggctggttcttgcgtttcatgtgttgggaaaattgtgaaaggtgacgtggaccagtcagatggtagcttccttgatgatgaacaaatagaaagtggatgggttctcacctgtgttgctctacctaggtcag

SEQ ID NO: 31656 - DNA, 370 bp, Glycine max
  Clone ID: LIB3138-004-Q1-N1-G2
gagctggcgagatctctgagagcgtcgtcgagggcgaaacggcaacgacggatcctcacatgcaccggtccctcaagggccgacagatttccatgatcgctatcgcaggtaccatcggtaccggtctcttccttggctccggacgtgctctcgccaacggtggtcccgtcggcgccctcatcggttacaccgtcgttggtatcctcgtcggatgcatgatgtactcgctcggagagatgatggtctacgatcccagcgccggcggcttcatcgagttctctgcacgttacgtcgaccctgccgttggattcgcagtcggatggcagttctggttccagactgccatcaccgccccggtcgaagttgtcgc

SEQ ID NO: 31657 - DNA, 390 bp, Glycine max
  Clone ID: LIB3138-004-Q1-N1-G3
aacgaaacatggcaagagtggtggcactccaacagaaccaactatctgtctctaccttagcttcctctctttctgacttcagtggaaccagacttcaaactcaacttcagttcaagagaaagcaatgccatccaaaagggtctttctacgtctccgcatcgagcaccaagaaaatcctaataatgggaggcaccaggtttattggtgtgtttttgtctaggctccttgtcaaagagggtcaccaggtgactttattcacaagaggtaaagcgcctgtcactcaacagttgccaggtgaatcagacagtgattatgctgatttttcttccaagatcttgcatttgaaaagagacaggaaagacttcgactttgtaaaatccagtctctcag

SEQ ID NO: 31658 - DNA, 218 bp, Glycine max
  Clone ID: LIB3138-004-Q1-N1-G4
ttatgccagctttttctgttccacaggctactgccagatcttctgaaaatgcggaatcctctgcatgatctggaatttgtgttttctttcgcttgttcgtttgtttaattcaataaaggaaattaggcatgaccctcttgttgagtatgctctgcctatttgaaaatttccacacctcttttaattgtcgtaatgatgtgtgaagtgtgtgttatttt

SEQ ID NO: 31659 - DNA, 391 bp, Glycine max
  Clone ID: LIB3138-004-Q1-N1-G6
tggctcctgaggacaaggcgagtttatggtcacaacttcattatgtttcgtgtaataatctggaaatgcaagaagcttatcttgtcaatctcgtaaatgtgttacgagaattgtatttgcacagtccagaggaagctcgccaattgagaaggaaagctctctctcgtattgaatggctgcaaaaagctgatgtgcctaccatagcacagattgaagagttccattcgatgcagaggatgatgaatgctcctgattcaaatgataatattgatttactgttgagcattgatttgttgggtttacaaggagcaagtaaagcttttccaaacaaaattgtttttgatgataagcttgtgttggctaacacacaagaattctttgatggaaattt

SEQ ID NO: 31660 - DNA, 378 bp, Glycine max
  unsure at all n locations
  Clone ID: LIB3138-004-Q1-N1-G7
tgccacnctcatgtacatttctgataaccccaccaatgngcagctgccatgtatgtacaacaaggaagagaacccccgtgttcccatcattgtcaccggtaacgatttctcaacactctatgcacctctcatccgtgatgggcgtatggagaagttctactgggcaccaacaagggaagaccgcattggtgtttgcaccggaattttccgcactgatggtattcctgaacaggacattgtcaagcttgttgacaccttccctggccaatccattgatttctttggtgcactgagggccagagtatatgatgatgaagtgaggaagtggatttctggtgttggtgttgacagtggtgggaagaaacttgtgaactcaaa

SEQ ID NO: 31661 - DNA, 383 bp, Glycine max
  Clone ID: LIB3138-004-Q1-N1-G8
ggaaaaagttgtattgaaattttcacaagaggaatttcttacagcttggtcaactcaggtgcgtcctgcaacaactctgttggctgatgggtgtccatatttgtatgcaatggtgcatgatagttcagtgtctacaataccaggtgattttgtcattggtgtcaagttgacaaccataaacaatatgtgtgcatatgggctcaatcctggtatttcaggttctcgtcttttgggcaccattcctcagtccatttcacagcaaactgtttggaatcaaatggcaacagtgagaacaccattgaattttgattctagcaagcagagcttttgtcagttttctattgaccttctcggtggaagaatcttagtggacaaaactggag

SEQ ID NO: 31662 - DNA, 318 bp, Glycine max
  Clone ID: LIB3138-004-Q1-N1-G9
gataacttaattagtgttcatgaatatgtcaagccttactttagtggttctaaattgaaaagctttctagctagtcataacatcaccattactgatggtattgacaaaactagtgcaactttgcaatttagaaagttagcagattgtgattttctcaagagaaactttaagcagatgtctaatgttttgtgggtggctcctgaggacaaggcgagtttatggtcacaacttcattatgtttcgtgtaataatctggaaatgcaagaagcttatcttgtcaatctcgtaaatgtgttacgagaattgtatttgcacagt

SEQ ID NO: 31663 - DNA, 335 bp, Glycine max
  Clone ID: LIB3138-004-Q1-N1-H1
gcattttgatgcatgtaagtggacaaaatcagaaccacattcctgggaattgatcttcccaatagaggtatgtggtcctaataatggttttgaaatgtggagttctgagtgggcaaatcaaacttcatggcatttgagtttccttattgacaatcccaaacagtctacagtttttgatattctcttgggaatctctcaagattttgaaattgctggtaatactcttatgccagctttttctgttccacaggctactgccagatcttctgaaaatgcggaatcctctgcatgatctggaatttgtgttttctttcgcttgttcgtttgtttaattc

SEQ ID NO: 31664 - DNA, 332 bp, Glycine max
  unsure at all n locations
  Clone ID: LIB3138-004-Q1-N1-H10
ctctgntcttgcgtttgcgttgcttggaagacgctctcgctacactacagcctcatctttataatggttggatgattagtgatgggtggacagttctattggtgatgactgggagctcacttgctgatctaacgagggtcagacagtggtcttagttagacaaactgtcaatggcaagagtgcaacaggcaataccattcttggaaggaaggccttcaagtcaagggctagctcctctgctggatccacctgatgttaaacggctaccaaccgattttaccaccggccaaatggtcaatgttttcacaacccacgaattatttaatttgcct

SEQ ID NO: 31665 - DNA, 335 bp, Glycine max
  Clone ID: LIB3138-004-Q1-N1-H12
gtagctttggtcccttgtttttgttgtgctatggcgcctgatgctgccgccgtcaacggcaaaaagagaagacgctatcttcctcataacaaggcagcgaagaagaatggttcgtaccctctgcggtcagccgtgcaaggttgtttcatcacttgcgatggcggcagagaacaccaagcctctcgtgaagctctcaatattctcgattccttttatgaagagcctgttgatggggaacattcaagtgtaaaggagttacccagcaaacctttaaataaaaaaatcacgtttgcagattctgactcttctagtagcgatgatgatgatgatgatta

SEQ ID NO: 31666 - DNA, 388 bp, Glycine max
  Clone ID: LIB3138-004-Q1-N1-H3
ccttccttcagtattaattaattaattaattcctatgtgaaggggacatggtttggtatctctaattatttacctgttcccataattacttttttttttcctactgactagtgactgctccaagttttaggggatgaacatgcatggccctatgttcatggaaagaattgaagcccaagttaccttctcatgagtccaaggttttttgggggtctctcaccacattcttgtttttggaagttgttggtccacccgacttgacttcttgtctgcgtttttttctattgcgagggtttatggtttgtttttggtcagtggcttttcttgtttgagtttgagttattcaacgtgggtaataatgtattctggtattttcaatctcattatg

SEQ ID NO: 31667 - DNA, 395 bp, Glycine max
  Clone ID: LIB3138-004-Q1-N1-H4
ggccacccatcaattccacccccacaattccttcttcttcttggttccacaacactaaacgccgtcgttttcatgactccataattcaccagaagcagaacaagaagcagcagcagcagcagcagcagcgcgagttcacatgggattgggaacaaccgcggcgagaagcagaagaagaatcgtcatcgaagaaggttctataagaacaacacacaccgtcaccgccaccaacgccgatgccgatggagctggagctaggttcaacaactatccagcgatccttcaacacgcgctacacgcgccacgcgcgcgactcgctcgacgaattgcctgacagcttcaccatcaccgacccctccatccctggccaccccatcgtcttcgccagcccgggc

SEQ ID NO: 31668 - DNA, 315 bp, Glycine max
  Clone ID: LIB3138-004-Q1-N1-H5
gggacaggcacatcgtcttcaaccagtaatagttcattgcacttaatagaaaaagaccggagacgtcgaatcgagggtcctatacaggtacttcgggggcaccacagtgaaatactcagttgttgtgttaactcagatcttgggatagttgtttcctgctcccattcatcagatgttctcttgcactctataagaaggggacgtttaattagaaggctcgatggtgtggaggcccatactgtttgcctttcctctgaaggggttgtaatgacctggaatgaatcacagcatactttcagtacttttacactcaat

SEQ ID NO: 31669 - DNA, 392 bp, Glycine max
  Clone ID: LIB3138-004-Q1-N1-H6
agccgatgcagcaaaacaatcttttgcaggtgattcttgcagtgatcacttagcccttctcaaagcttttgaaggatggaaggaggcaaagcgaagtgggaacgaaaaacaatttggttgggataatttcctatcccttgcaaccttgcggttgattgacgatatgagaatgcagtttctcaatttattatctgacatcggatttgttgacaagtccaggggtgctactgcttacaaccagtatagtcatgatttggagatggtttgtgcaattctttgtgctgggctctaccctaacgttgtgcagtgcaaaagaagaggaaaacggacagcattctacactaaagaagtagggaaggttgacatccatccggcttctgttaatgctgggg

SEQ ID NO: 31670 - DNA, 274 bp, Glycine max
  Clone ID: LIB3138-004-Q1-N1-H7
ctcactaggagctcttctccattggttcttcatctgcatgcacacacttgcatagttttggaaaccaagaatttttgaagggtagcatcaacaagaagttctggaaatggagatcaccaatgtcagcgagtatgaagctattgcaaagcagaagttgccaaagatggtgtttgactactacgcatctggtgcagaggaccagtggactctgcaagagaacagaaatgccttttccagaattttgtttcggccacgtattcttattgatgtgagc

SEQ ID NO: 31671 - DNA, 108 bp, Glycine max
  Clone ID: LIB3138-004-Q1-N1-H8
aacatcaccattactgatggtttggacaaacctagtgcaactgggcaatttagaaagttagcagatggtgattttctcaagagaaactttaagcagatgtctaatgtt

SEQ ID NO: 31672 - DNA, 267 bp, Glycine max
  Clone ID: LIB3138-004-Q1-N1-H9
gtaccgcccgtcggatcgcggaatgtcgccggtgacgaccgaggatttcggcgacgagtgtgatcagtcaccgtcggggagcggatacgtctcggaggcgtctccgtggtggcggagaacgccggcggtggcgccgtcggcgcggcggtcgaggctagggcacacgaagagcgcgtcgggttcgggcatggcgctttgcctgagtcccctagttcgggcgagtccaaaccggaggtggaacaacaagggattgccgccggagatggc

SEQ ID NO: 31673 - DNA, 369 bp, Glycine max
  Clone ID: LIB3138-005-Q1-N1-A1
gcaaggagtaggaggttgagtgcgggcgagggtaacttaccaacccgaaggagttgttgagtttggtacatgggcggagaagtgttgacgatggcggacgtcacggccaacttgcaagcagcaaccaccgcatccaccccttacgcgcttcccaccaatctccctctcctctccgcttttctctccttcgctctcgctcagatcctcaagatcttcacctcctggtataaggagaagagatgggattctaaaaggttgcttgattcgggtggaatgccttcgtcacattctgcaacggtctcggctctggctgttgctatatgtctccaagaaggggcaaggtcacccgcctttgctattgagtggtct

SEQ ID NO: 31674 - DNA, 410 bp, Glycine max
  Clone ID: LIB3138-005-Q1-N1-A11
gagggtgaggacactactaacattgtctctcgcaggttggcccggactgttctcattggtgctgctgctgttggctctaaggttgcacctgctgatgctgcctatggagaagctgccaatgtgtttggaaagccaaagacaaacactgacttccttccatacaatggggatggattcaaactctcaattccctcaaagtggaacccaagcaaagaggttgagtacccaggtcaggttcttagatatgaggacaattttgactcaaccagcaatgttgctgtcatggtcactgcaactgacaagaagtccatcactgactatggttcacctgaggagttcctatctcaggtggattacttgcttggaaaacaagccttctttggccaaactgatgctgagggtggttttga

SEQ ID NO: 31675 - DNA, 411 bp, Glycine max
  Clone ID: LIB3138-005-Q1-N1-A12
ctcaagcagggcgaaatcaggatcgtccaagccagtatgcgcggcagtatcttgtccaacattctgctcgtgctcggatgctgcttccttgctgctggcctcacccagcacgaaagccgtttcaacgagaccgtcgcatctaccatgtcttccctcatggccgtcgcatccgcctcgctcatcgtccctgctaccctctacgcagttatgcacggcgacaacaaaaaggacaacctcgagactgacaagaacattcttgttctctcccacggcactgccatcatcctgctcattctctacatcctatacctctacttccagctctactcgcaccacagcctttttgccgacgtcgagaaccaagaaggtggcgataacgaggaggaggcccagatcctgtcgcccgtcgct

SEQ ID NO: 31676 - DNA, 419 bp, Glycine max
  Clone ID: LIB3138-005-Q1-N1-A5
gtaaaaatagcaagtctcaagctactgcaatgcatgtgggagctggagaaattatcattgatagtttcgcaagtcctgattgcaacatagttggtgcaatgcttttggttgatacttatcataccaatcctgaaaatgcagttcgtagtatttttgttgcgcctttcagaggcggaaggcccattcgggtggttacatttccgaataccattgtgcagattgaaccagacatgaattcaaggtttcagcttttgagtaccactaccaatggtgattttgttcaagggaaagatctcgcaatggttaaagttaatgtagcatgtgctgctgttggcttgacatcaagttacactccaactccattgttggaatctggtttgcaaaaagacagagggttaattgtggagtattttggaagg

SEQ ID NO: 31677 - DNA, 303 bp, Glycine max
  Clone ID: LIB3138-005-Q1-N1-A7
tggagagttgaatgtggaatcccttctggatttccgctcacaggtatttgcaatagcatttttaatgagatgctcattagatatagctatgaaaaattactgcgccaggctaaagctccaagtatgtttttacaatccttcaaaaattttgtttctttgtgtgtgtatggtgatgataacttaattagtgttcatgaatatgtcaagccttactttagtggttctaaattgaaaagctttctagctagtcataacatcaccattactgatggtattgacaaaactagtgcaactttgcaattt

SEQ ID NO: 31678 - DNA, 324 bp, Glycine max
  Clone ID: LIB3138-005-Q1-N1-A8
gctgagtgtgatcagaaagcttagacttgtcaccttaaccgcgtcaaggaacaactttgaaggtgcaataacagatgaatggtgccaacataatcttgttatgttagacctatctcacaataaattctctggtacaataccctcttgcttcgaaatgccagcgtacttgttcttgcagggaaacagtcttaccggcacgatacctgaagcattaataagcaactactcccgaccaacggccatagattttagtgacaacaagtttattggaactattccagatagcatatataagctttggtctttaagatttcttttattggc

SEQ ID NO: 31679 - DNA, 394 bp, Glycine max
  Clone ID: LIB3138-005-Q1-N1-A9
aagagaccttccccttcgcgctttcgattcctcctccgatgcgaatagcgaagaaaaagaagaagtaaaggaaaatgaagagggcgttgacaaccggagtggaagtaggattgccgacgaggattatccgagcggccagtttgacttcgaaccggttaccggatggagaagcttcctcgtcaagctcaagatgctagtcgcgttcccttgggagcgtgtccaaaagggcagcgtcctcacaatgaagcttcgtggccagatatctgatcaagtgaagagtaggttctctccaagactttctctgccttaaatttgtgagaattttttgaaagcagcgtatgatcctcgtatttctgggatctatcttcatattgatagtttaaattgggggtgg

SEQ ID NO: 31680 - DNA, 412 bp, Glycine max
  Clone ID: LIB3138-005-Q1-N1-B10
caggtatatcattggcctgtgctatgaatagttcttttagggggcgcgccagttctgatatttacaccatctgctctcaagactgtgaattgtggaatcctgcttgcacaaaagcaatgactatgtcatttaatccaaacccgtgttctgatgcatggagtttggaatttctgaagcgtactggatttcattgcgatatcatttgtgtcactggatggactgccaccccaatgcaggatgttcaggttacaattgattggtttatttcctctcaggaatgtgttcccaggacctattgtgttttaaatccacaaaatccttttgtgttaaataggtggatgggaaaattgactttcccccagggcacttcccgaagtgttaagagaatgcctctttctatagggggaggagc

SEQ ID NO: 31681 - DNA, 349 bp, Glycine max
  Clone ID: LIB3138-005-Q1-N1-B3
cacccatcttcgttttaggtttttcttacccttaaccttagccgctgcaattttaacaaccattttccacaaaaaagcaaaaaaagactcgagctttgtgcgcttcacaccgtttgagcttgccagtttctgcataagggtgaggttttcacctgtgacgtaatatatgcggttaatgagtggctcagattggaactcgggttttggatctgacggtcgaggtgacgccgagatggagacgtacaagtcgtgaagtgaagaatggaaggaaggtggatttcgtgggatgaaaaaggaccgagcaaaagaaggctggattgatattatgggcttgttggacttggctatt

SEQ ID NO: 31682 - DNA, 406 bp, Glycine max
  Clone ID: LIB3138-005-Q1-N1-B4
cccaaaactctctttgttcacaatgggcacagagacctcatcggccatatttcggaacccctgctcttggatcctcacgggaacgaggaaaaggaagagtatttgcgcgaagaggttccggagtggaaggagcagataacgataagagggttggtggtgagtgctgtgttggggagcttgttctgcatcatcacccacaagctaaatctcaccgttgggatcatcccttctcttaatgttgctgctggcttgttggggttcttctttgtgaggacctggactgggttgttgaccaagatgggatttttcaccaagccctttactaggcaagagaacactgttattcagacctgtgttgttgcttgctatggccttgccttcagtggggggtttggttcatccttga

SEQ ID NO: 31683 - DNA, 326 bp, Glycine max
  Clone ID: LIB3138-005-Q1-N1-B7
caaacggatctgcagaaccgacccggaatcttcattatcggggcctccaacgtcggcaaacgcaccctcctatcccattccggaattatttattcagtgctggaactggaatttgatttggctgatgttgagtgtaggattgacctctgttgatgttgatgatgcttttgattcggcttctcaagtgaatgtccatgggtggactatcaacaataagtactacactgctgatgtttctctttggatggctcatcttcacgacgatttttctgctgccaacgtgaccctgtctcgacgaatgactgcactggtgatgggttttgaca

SEQ ID NO: 31684 - DNA, 400 bp, Glycine max
  Clone ID: LIB3138-005-Q1-N1-B8
tttttcttgttagtgaaattgtgttagacctgattaattaaggagatcatttttgtctgtgtccagtctccactccacccgtagtgttcaaacacacatgacaaagacacgaatattacctttttacacaattttcttcctattgtttcatcgtaatcctttcttcaatgcaatttgcttgaaacatgacagttctacagctttacaagggtgaattgtgttgatcatcttttatagaaaaaaggtttcaattattgtcattctttcttgtgatcagttttatggtggttccatatcagagggctccgagttacaaatagaggttgcagagtttttctggaggaatgttcagctcaatggaagcctgatcataatatctgaaaatgttatgggctcaatg

SEQ ID NO: 31685 - DNA, 387 bp, Glycine max
  Clone ID: LIB3138-005-Q1-N1-B9
gttgcaaagcaaaaactactacgaggagctttcctccatacgaatcaaaggaggagagagagagagagagagagaggagacacagacacaaaggaaacggaaaaagcaacacacaaaaaaaaagaggttcagattcgatctcttgttttgttcttccattcatatctgttttattttattttatttttctttctttcggcaattgcatctcatcaagctcgtttttttcttcttaccatcttcatttccgcacttgtttactcctcaattctcttttttttcttcgggatctcaagtgggtttccgttatttctcaatttggacgcatattttttgttttatctcttgaatctgcaagctatattgaagattcgttctaactcttaa

SEQ ID NO: 31686 - DNA, 375 bp, Glycine max
  Clone ID: LIB3138-005-Q1-N1-C1
agaaaaggagagtttagttgaaaaccacaacaatcatgaggctcgggaggaacattacaagggggatgatgcttctagtgctgtggctcatgatactcatgcaactagcactgaaactgagacacttagcttggaaaactctgatgtaaacttagaaatgaatatcactaaacctgaaaatgagacaacttattcagatgaaagtgtcagaaagcaaaatgattcagatttgaaagtttcagaaggtaatgtgatagatggtatatcttcaaatgcaactgctgttcaagagactggaaataacactttgtccaaccctgtggatgatagctcatttctaaataaaacaactgcaacggactctgacagccactt

SEQ ID NO: 31687 - DNA, 419 bp, Glycine max
  Clone ID: LIB3138-005-Q1-N1-C10
cccgcaccgacaggatcgaaccctcacaacatgagagtggatggcacaggaaacacagtactgcatcttcacatagagttttggaagtgttcgatcccgcaccgacaggaggaagcgtgagcctccacagagattcatcaggcgcagggatgatgcaccaagacctggtcagcccggtcaaggacctcgtcctgctggcacagcagcagcacctgtccgaacctaaaagcaagtcctaaggaataagccttgattttatgctggaccaaatttataatataaacttttatttgttgcttaattttgaacatatcagttttgtggagggttattttcttccaatcatcagctttagtcttggatgatatctttttggttataatttggcggcttttatgaaaatggaacttggtatgtga

SEQ ID NO: 31688 - DNA, 418 bp, Glycine max
  Clone ID: LIB3138-005-Q1-N1-C12
gtaaactagccttcacattaacaccacctcgtccatgcactggacccttgacaccaatctcttcagcttctggtgttcacctcattcagttcaatggcaggcacttatgcctccgccaaaggctgtttctactttctcctatggccactgcagatcaacaagggaaagttgaagaatttgaagatgattcaaatactgttgatagtaaaattctcccatattgtagcatagacaaaaaagagaagaaatcaattggtgaacttgagcaggaattcctccaagcactgcaagcattctattatgagggaaaggctatcatgtcaaatgaagagtttgataatctcaaggaagaactcatgtgggaaggaagcagcgttgtcatgctaagttctgatgagcaaaaattcctggaagcttc

SEQ ID NO: 31689 - DNA, 411 bp, Glycine max
  Clone ID: LIB3138-005-Q1-N1-C2
ggagattggatcacacttatacaaaattctccaattagtaactgggtgagagttgctgcttggaagaaaggctgtttaatggtcaagattgtgatgtctgggaatgcagcagtcaaaaggagtgattgggcctcattggtacaagtttttttaacaaacagcaacagtacagagcattttgatgcatgtaagtggacaaaatcagaaccacattcctgggaattgatcttcccaatagaggtatgtggtcctaataatggttttgaaatgtggagttctgagtgggcaaatcaaacttcatggcatttgagtttccttattgacaatcccaaacagtctacagtttttgatattctcttgggaatctctcaagattttgaaattgctggtaatactcttatgccagctttt

SEQ ID NO: 31690 - DNA, 410 bp, Glycine max
  Clone ID: LIB3138-005-Q1-N1-C4
ctctctctctctctctcttctctctctctctttcttcctttcttggatacttattaattcatcttttttatctttctttctttctttccccttttgtatttctgggttcgatattgttatcggttatttgtgcactgcttccgccggggctattcaggaatcatggctagggttttggctcagtctgttaatgtccctggtctagtggctgagcataggcatggtcagcaaaagggatcaggaaaattaaaaagatcgaccaaaatgatgagtgctttacggacaaatggattaagaatgtcaggtttctcagggcttcgtactttcaatcctttggatactatgttgagacctggcatagattttcattctaaggtatccattgcaacgtcttcgcggcaagcaagagc

SEQ ID NO: 31691 - DNA, 399 bp, Glycine max
  Clone ID: LIB3138-005-Q1-N1-C7
ctttaacatgtcatctaagaaacctgcgtactggaatctatggggaaacaatccaattaatcaaaacgcacaacgaagatcgtatgaatacgattttgcacttctcgacaaatataatttgtttctttattctaagcggttattctattcttggtaatcaagaacttgttcttattaactctttggttcgagaatttatatataatttaagtgacacaataaaagctttttctattcttctattaactgatttatgtataggattccattcaacccatggttgggaactagtgattggtttcgtctataaagattttggatttgctcaaaatgatcaaattatatctggtcttggttccacttttccaatcattttagatacaattttaaaatattgga

SEQ ID NO: 31692 - DNA, 395 bp, Glycine max
  Clone ID: LIB3138-005-Q1-N1-C8
aaatgataatattgatttactgttgagcattgatttgttgggtttacaaggagcaggtaaagcttttccaaacaaaattgtttttgatgataagcttgtgttggctaacacacaagaattctttgatggaaattttccagtggattcttggttaccaatttttgtgaattgtctttatcctgtaagtcaattaccttcagaagctgtcgttgtaaatgttacatgtggtagtggacgtggtggtttacccaccactgcttggattagttctgcagttaacaatcgctcctcagatatcaacaaaaggattcgcacagcacttgggaaaagtaagaaaatttgttttcttactagagttgatccttttccagtagctttactggcttgtctttttg

SEQ ID NO: 31693 - DNA, 382 bp, Glycine max
  Clone ID: LIB3138-005-Q1-N1-C9
gaagagaacccccgtgttcccatcattgtcaccggtaacgatgtctcaacactctatgcacctctcatccgtgatgggcgtatggagaagttctactgggcaccaacaagggaagaccgcattggtgtttgcaccggaattttccgcactgatggtattcctgaacaggacattgtcaagcttgttgacaccttccctggccaatccattgatttctttggtgcactgagggccagagtatatgatgatgaagtgaggaagtggatttctggtgttggtgttgacagtgttgggaagaagcttgtgaactcaaaagatggacctccaacctttgagcagcccaagatgactctggagaagctcttgctgtatggtaacatgc

SEQ ID NO: 31694 - DNA, 408 bp, Glycine max
  Clone ID: LIB3138-005-Q1-N1-D1
gcagcttcctggtttgtataacaaggaagagaatccccgtgtgcgcatcatcgtcaccggtaacgatttctccacactctatgcgcctctcatccgtgatgggcgtatggagaagttctactgggcaccaacaagggatgaccgcattggtgtctgcactggaatttttcgcaccgattcaattcctgaacaggacgttgtcaagattgttgacaccttccctggccaatccattgatttctttggtgcactgagggccagagtatatgatgacgaagtgaggaagtggatttctggtgttggtgttgacggcattgggaagaagcttgtgaactcaaaagatggacctccaacctttgagcagcccaagatgactctggagaagctcttgacgtatggtaacatgct

SEQ ID NO: 31695 - DNA, 420 bp, Glycine max
  Clone ID: LIB3138-005-Q1-N1-D10
aatcaatcaaacaaacctcagtaccaagaaccctatgccttgacaaaccctaacgttgatttaaatcgtttgttcgcacttcaatctccaagtcataaatacactcttctctccccattcactcgcattggcttttggtagttgaagtctttcattgttgtcaaattcagatcaggactactcaggcaagtgatagcagctctgggcttcgagggctagaatcctccgaagaattcaagagaagagggaaacaattgagagaaaagcataatcctaacagaaaggaatctacggcactaatggcagacaaagctaagggaatggccagctcagcgcatcacacgaaatcctttagtccatctgcagtttagtttgttcccggtggggcaattcacacgctacccatgaatcccattttga

SEQ ID NO: 31696 - DNA, 414 bp, Glycine max
  Clone ID: LIB3138-005-Q1-N1-D11
cttatacaaaattctccaattagtaacttgttgagagttgctgcttggaagaaaggctgtttaatggtcaagattgtgatgtctgggaatgcagcagtcaaaaggagtgattgggcctcattggtacaagtgtttttaacaaacagcaacagtacagagcattttgatgcatgtaagtggacaaaatcagaaccacattcctgggaattgatcttcccaatagaggtatgtggtcctaataatggttttgaaatgtggagttctgagtgggcaaatcaaacttcatggcatttgagtttccttattgacaatcccaaacagtctacagtttttgatattctcttgggaatctctcaagattttgaaattgctggtaatactcttatgccagctttttctgttccacaggctact

SEQ ID NO: 31697 - DNA, 418 bp, Glycine max
  Clone ID: LIB3138-005-Q1-N1-D12
attggttcaagggaacttgctgcttatgctcttgtgttcactggtctcatacgctttgccaatggaattctgttaggaatggcgagtgcgttgtcaacactttgcggacaagcatacggtgcaaaagaatatgtcatgatgggagtgcatcttcaaagatcatggatagttatgtccataacttcactctttcttcttccggtgttcatcttcacgaggccgattttgatgctcttaggccaagatgagaatatagcagaagtggcaggaaatatttctctttggtcaattcctatgatatttgcttttattgcctctttcacttgccagaatttcctgcaatctcaaagcaaaaataccatcatttctttcttggcagcattctcaatagttattcatttgttcctctcttggctat

SEQ ID NO: 31698 - DNA, 394 bp, Glycine max
  Clone ID: LIB3138-005-Q1-N1-D2
cccatatgcacacatatgggctcaatcctggtatttcaggttctgggcttttgggcaccattcctcagtccatttcacagcaaactgtttggaatcaaatggcaacagtgagaacaccattgaattttgattctagcaagcagagcttttgtcagttttctattgaccttctcggtggaggaatcttagtggacaaaactggagattggatcacacttatacaaaattctccaattagtaacttgttgagagttgctgcttggaagaaaggctgtttaatggtcaagattgtgatgtctgggaatgcagcagtcaaaaggagtgattgggcctcattggtacaagtgtttttaacaaacagcaacagtacagagcattttgatgcatgtaagtg

SEQ ID NO: 31699 - DNA, 412 bp, Glycine max
  Clone ID: LIB3138-005-Q1-N1-D4
tgaaaaggaagatcatgaaaaacccaaaaagattgatgccagatggagacaaagaatagatcctcaatacaatgaggttcaggctcagatggaaacaaatttgtttaaattgtctcttgatgatgttgaaactcctaaaggttccatgttggatctgaaaatttctcaatctaaaattgcacttcccaagaacacagttggaggaaccattctgcgtagtgatctattggcaaattttttgacagagggcaattttagagcaagtgttgatttgcagcgcactcatcgtattagaggaatgattaaaatggtggccacagttggtattcctgagaatacaggtatatcattggcctgtgctatgaatagttcttttagggggcgcgccagttctgatatttacaccatctgc

SEQ ID NO: 31700 - DNA, 97 bp, Glycine max
  Clone ID: LIB3138-005-Q1-N1-D6
tgctgctgttgctctatattactgtttaaagacaaggcttttgagcccttttccaattgagtgatcttagcttaaatacaaattaattttttcaatt

SEQ ID NO: 31701 - DNA, 371 bp, Glycine max
  Clone ID: LIB3138-005-Q1-N1-D7
caaggagcaggtaaagcttttccaaacaaaattgtttttgatgataagcttgtgttggctaacacacaagaattctttgatggaaattttccagtggattcttggttaccaatttttgtgaattgtctttatcctgtaagtcaattaccttcagaagctgtcgttgtaaatgttacatgtggtagtggacgtggtggtttacccaccactgcttggattagttctgcagttaacaatcgctcctcagatatcaacaaaaggattcgcacagcacttgggaaaggtaagaaaattgtttttcttactagagttgatccttttccagtagctttactggctgttctttttggcgttaaaaatgaaattctgag

SEQ ID NO: 31702 - DNA, 349 bp, Glycine max
  Clone ID: LIB3138-005-Q1-N1-D9
gtgtttcctgagtctgaacggaatcccacttaaaagtcgttcgccttcctcttcgcagctgttatatagtactattttcatttcatatgtttatgcacctctatatatacatagacacatgtaaatggttgcaaaggaagataagataggtaccagctatcacatagtttatttaatccgttatatgccacctgatatataggcatattagctagttaggtaggtatagtagtttaagttaattcaaccatggaagacagggatcactgttgttccaacaattcaacgatgatcacaacaacaaagaaaagaacgggtagaagaagtccaacatcggataagctcaaga

SEQ ID NO: 31703 - DNA, 378 bp, Glycine max
  Clone ID: LIB3138-005-Q1-N1-E1
gaagctggaacaagtatatggagcgagaaataacaatggtaataggggcgagttgggtagggaagagagtccagactcagaatcacaaggttggggtcccaataagcttcagaaagtgaacccttccaatcctatggatcaatccactgcagaagccacaatgagaaaagctcgtgtctcagttcgtgcccgatcagaagctcccatgattagtgatgggtgccaatggagaaaatatggacaaaaaatggctaaggggaatccatgccctcgagcatactacagatgcactatggcagttggttgcccagttcgcaaacaagttcaacgttgtgctgatgatagaacaattttggtgacaacatatgaaggcacaca

SEQ ID NO: 31704 - DNA, 417 bp, Glycine max
  Clone ID: LIB3138-005-Q1-N1-E10
tgcatgatagttcagtgtctacaataccaggtgattttgtcagtggtgtcaagttgacaaccataaacaatatgtgtgcatatgggctcaatcctggtatttcaggttctcgtcttttgggcaccattcctcagtccatttcacagcaaactgtttggaatcaaatggcaacagtgagaacaccattgaattttgattctagcaagcagagcttttgtcagttttctattgaccttctcggtggaggaatcttagtggacaaaactggagattggatcacacttatacaaaattctccaattagtaacttattgagagttgctgcttggaagaaaggctgtttaatggtcaagattgtgatgtctgggaatgcagcagtcaaaaggagtgattgggcctcattggtacaagtgtttt

SEQ ID NO: 31705 - DNA, 421 bp, Glycine max
  Clone ID: LIB3138-005-Q1-N1-E11
cttgcaattgaagttgaagtcttgcccttctctcttcaactgcaaacacaagacatcatcatccatggctgcctccgtctccactgtcggagctgtcaacagagctcttttgaacctgaatgggtctggacctggggtttcagctcccagttcatccttctttgggagcagcttgaagaaggttattggctcaagggtccccaacacaaagatttcctctggaagcttcaagattgttgctgtagaagagaagaaagagattgaagagacccagcagaccgacaaggacagatggaagggtcttgcctatgatatctcagacgaccaacaggacatcacaagaggaaagggtttggttgactcccttttccaagctccacaggatgctggaactcactatgctgtcatgagctcctacgag

SEQ ID NO: 31706 - DNA, 423 bp, Glycine max
  Clone ID: LIB3138-005-Q1-N1-E12
tcgaaaccctaagcactcgctcgggttcgtgtagtgccaaaggctagggctcattttccagatctattcagtttttctctcctctcttttccgatccaccgttggagatcgaagatggtgtccgacgccagcaagaagaaggccgcacagaagaaggccgccgccgccgccaagagaggtggcaaagctgccgccgctgccgttatggccgccacctcttccaaagccgccgacaaggtcgccaacggaatcgccgatattcagatttcggatcggacctgcaccggcgtcctctgttcgcatcctctctccagagatattcgaatagagtctctatccgtcacattccatggacatgatctcattgttgattctgaattggagctgaattatggaaggcgttatggcttactcggattaaat

SEQ ID NO: 31707 - DNA, 411 bp, Glycine max
  Clone ID: LIB3138-005-Q1-N1-E2
ctttaaaggctttaatggggcctccgggatttacagagaaacttgataacaacaagctaaagactttagctgatgctgaagatgggtgtgatatatttaatgacctgaaagataggtttttaagttttaaaaagaataaatacctgaaaaatattgaacattttgaaaatcttgcaaaggttcaaacaccaaagttcatggttattgcttgtgcagattctagggtatgcccttctaatgttttgggatttcaaccaggagaagcattcatgattcgcaatgttgctaatttggttcctatctttgagagtggacccacagaaacgaatgcggctcttgaatttgcggtgaactcccttctggttgagaacatcttagtcattggccacagctgctgtggtggtatacgtg

SEQ ID NO: 31708 - DNA, 408 bp, Glycine max
  Clone ID: LIB3138-005-Q1-N1-E3
atggtattgacaaaactagtgcaactttgcaatttagaaagttaggagattgtgattttctcaagagaaactttaagcagatgtctaatgttttgtgggtggctcctgaggataaggcgagtttatggtcacaacttcattatgtttcgtgtaataatctggaaatgcaagaagcttatcttgtcaatctcgtaaatgtgttacgagaattgtatttgcacagtccagaggaagctcgccaattgagaaggaaagctctctctcgtattgaatggctgcaaaaagctgatgtgcctaccatagcacagattgaagagttccattcgatgcagaggatgatgaatgctcctgattcaaatgataatattgatctacttgtgagcattgatttggtgggtttacaaggag

SEQ ID NO: 31709 - DNA, 424 bp, Glycine max
  Clone ID: LIB3138-005-Q1-N1-E5
cttcctcctcgccgtcgaagacgtcttttccatcaccggccgtgggaccgtcgccactggccgtgtagagcgtggcaccatcaaagtaggggaaactgttgaccttgtaggtttgagagaaacaaggaacacaaccgtcacaggtgtagaaatgttccagaagattctagacgaagccctggctggagacaacgtggggctgttgcttagaggggttcagaagactgacattcagaggggaatggtgttggctaaaccaggcacgattacgccgcacaccaagttctcagcgattgtttatgttttgaagaaagaagaaggtggtaggcattcacctttctttgcagggtataggcctcagttttacatgaggaccaccgatgtgactgggaaggttacgtctatcatgaatgataaggatgag

SEQ ID NO: 31710 - DNA, 422 bp, Glycine max
  Clone ID: LIB3138-005-Q1-N1-E6
ccagcttttatggacaaacttgttgttcacattaccaagaactggatgaccctgcccaacatcaaggttcctctcattcttggtatctggggaggcaagggacaaggaaaatctttccaatgtgagcttgtctttgccaagatgggaatcaaccccatcatgatgagtgctggagagttggaaagtggaaatgcaggagagccagcaaaactgatcaggcagagataccgtgaagccgcagacttgatcaagaagggaaagatgtgtgctctcttcatcaacgatcttgatgcaggagctggtcgtcttggtggaaccacccaatacactgtcaacaaccagatggtgaatgccaccctcatgaacattgctgataaccccaccaatgtgcagcttcctggtatgtataacaaggaagagaa

SEQ ID NO: 31711 - DNA, 405 bp, Glycine max
  Clone ID: LIB3138-005-Q1-N1-E7
tttcaagggtagtctcacaggagtaaggattggaactgtgaccgaggccacaaaagtatggggggttttccaaggtcttggtgacatagccttcgcctattcatattctcaaattctcattgaaattcaggacaccataaaatctccaccatcggaagcaaagacaatgaagaagtctgctaagataagtattggagtaaccacaacattttatatgctttgtggtttcatgggctatgctgcttttggagattcagcacctgggaacctgctcacaggatttggtttttttaacccatattggctcatagatattgctaatgctgctatcgtaattcaccttgtgggagcataccaagtttatgcccagcccctctttgcctttgtcgagaaatgggcttcaaa

SEQ ID NO: 31712 - DNA, 361 bp, Glycine max
  Clone ID: LIB3138-005-Q1-N1-E8
gcaaatctccaggatttgatttctatgaatgtcgatgggaaggtgcaaaatggtcaaaacaatctgattgaagatggtttcttgctaactttcaaggttttacatttttgggggattaaaagttgtttttcttggaccaaaaacaaaacaagccaagtgaaagagagaagaaaagtcaaagacaatgtcagggatcattcacaagattgaggagacccttcatgtgggaggccacaagaaggaggaggagcacaagggtgagcagcaccatggtggagaatacaaaggggagcatcatggtgaacacagtactgaatacaaaggagagcatcatgttggtgagcacaagccggagcaccat

SEQ ID NO: 31713 - DNA, 409 bp, Glycine max
  Clone ID: LIB3138-005-Q1-N1-E9
agcgcacgaaggaaccatcttctcttcgttttcctttttttcggaatcacacccaaatcccttccttccttcttcgctattgtcttctctttcaggtgagctaaacactagcatagtagcatgcatcattgtcataaacttgttgaaactgaagtcaaaacttgatcttgtgtgcgataaggtgatggacctctttatttacaaggtgcaccttccagtaaagcaggagtaggataattgttgaacatagatgaaaaggtgattgttatgtctggactgattgaaggacttcctgatgctgttgcaatcaggtgccttgcatgggttcccttctacctccatccaaagttagagcttgtctctcgtgcttggcgagcagttgtccgtggccctgaactatttaaagctc

SEQ ID NO: 31714 - DNA, 381 bp, Glycine max
  Clone ID: LIB3138-005-Q1-N1-F1
ctatcctatcgtatctaagaaagaaagaaagaaaaccctagctgagcttttcaactttcaagatgcaaatcttcgttaagacactcactggtaagacaatcacccttgaggtggagagttcagataccatagataatgtaaagtccaagattcaagacaaggaagggatcccaccagaccagcaacgtctcatttttgctggcaagcagcttgaggatggacgtacacttgctgattacaacatccaaaaggagtccactcttcacttggtgctccggctccgtggtggaatgcaaatctttgttaagacattgaccggaaagacaatcacccttgaggtcgagagctctgacaccattgacaatgttaaggctaagattc

SEQ ID NO: 31715 - DNA, 419 bp, Glycine max
  Clone ID: LIB3138-005-Q1-N1-F10
ttttagagcaagtgttgatttgcagcgcactcatcgtattagaggaatgattaaaatggtggccacagttggtattcctgagaatacaggtatatcattggcctgtgctatgaatagttcttttagggggcgcgccagttctgatatttacaccatctgctctcaagactgtgaattgtggaatcctgcttgcacaaaagcaatgactatgtcatttaatccaaacccgtgttctgatgcatggagtttggaatttctgaagcgtactggatttcattgcgatatcatttgtgtcactggatggactgccaccccaatgcaggatgttcaggttacaattgattggtttatttcctctcaggaatgtgttcccaggacctattgtgttttaaatccacaaaatccttttgtgttaaata

SEQ ID NO: 31716 - DNA, 421 bp, Glycine max
  Clone ID: LIB3138-005-Q1-N1-F11
gagatattttgttggagatctcgtctttgaagtttctaagatgacttctccctacattaaatgtacagtctctttcttcatagcatttggaaatttggctgatgataccatcaattttgaggcttttccccacaagctggtgcagtttggagagattcaggaaaaagttgtattgaaattttcacaagaggaatttcttacagcttggtcaactcaggtgcgtcctgcaacaactctgttggctgatgggtgtccatatttgtatgcaatggtgcatgatagttcagtgtctacaataccaggtgattttgtcattggtgtcaagttgacaaccataaacaatatgtgtgcatatgggctcaatcctggtatttcaggttctcgtcttttgggcaccattcctcagtccatttcacagcaa

SEQ ID NO: 31717 - DNA, 419 bp, Glycine max
  Clone ID: LIB3138-005-Q1-N1-F12
actcaacctcttcctcttctctctctctctatccgctggtgtgattcttcagctgtagctgcaaggtctcaaggaagcttataaaaagagagcacatctgttttattcagttccgatggcagggttaaattttgaagccacacatactgacaaccgtgatattctgaagatatttgcagctgaaggtgttgagttccttttatcttgtgaagggaaggtacccgtgtcagaatgcaatgggaaaattatctgcctatttttcactgcaaactggtgcagaccttgcagagctttcgttccccgtcttgttgaactttatgaaacactgagaaagaggcgaataaatctagagattatcttcatctcctttgaccgtgatgaggatggatttaaagaacacttcaagaatatgccatggc

SEQ ID NO: 31718 - DNA, 416 bp, Glycine max
  Clone ID: LIB3138-005-Q1-N1-F2
gtaacttattgagagttgctgcttggaagaaaggctgtttaatggtcaagattgtgatgtctgggaatgcagcagtcaaaaggagtgattgggcctcattggtacaagtgtttttaacaaacagcaacagtacagagcattttgatgcatgtaagtggacaaaatcagaaccacattcctgggaattgatcttcccaatagaggtatgtggtcctaataatggttttgaaatgtggagttctgagtgggcaaatcaaacttcatggcatttgagtttccttattgacaatcccaaacagtctacagtttttgatattctcttgggaatctctcaagattttgaaattgcttgtaatactcttatgccagctttttctgttccacaagctactgccagatcttctgaaaatgcggaa

SEQ ID NO: 31719 - DNA, 381 bp, Glycine max
  Clone ID: LIB3138-005-Q1-N1-F3
tgaaactcctaaaggtttcatgttggatctgaaaatatctcaatgtacaattgcactttccaagaacacagttggaggaaccattctgcgtattgatctattggcaaattttgtgacagagggcaattttagagcaagtgttgatttgcagcgcactcatcgtattagaggaacgattaaaatggtcgccacagttggtattcctgagaatacaggtatatcattggcctgtgctatgaatagatcttttagggggcgcgccagttctgatatttacaccatctgctctcaagactgagaattgtggaatcctgcttgcacaaaaacaatgactatgtcatttaatccaaacccgcgttctgatgcatggagtttggaatt

SEQ ID NO: 31720 - DNA, 418 bp, Glycine max
  Clone ID: LIB3138-005-Q1-N1-F4
agaacaatggcagattagggtgctatttctctatggagaggaagcactgctaatgttatccgttatttccccacccaggctttgaactttgcatttaaggattacttcaagaggcttttcaactttaagaaggatagagatggctactggaaatggtttgctggcaacttggcctctggtggtgctgctggtgcatcatcccttttgtttgtttactctcttgactatgcccgtacccgtcttgccaatgatgcaaaggctgcaaaaaagggtggagagagacaattcaatggtctcgttgatgtctacaggaagacattggcatctgatggtgttgccgggctctaccgtggtttcaacatctcatgtgttggaatcatcgtgtatcgtggtctgtactttggattgtatgattctg

SEQ ID NO: 31721 - DNA, 419 bp, Glycine max
  Clone ID: LIB3138-005-Q1-N1-F5
aacaaagaaaaaaaaaaacccttagccaacacaaccatcatggcgacctctgctattcagcaatcagcattcactggtcaaactgctctgaagcagctcaatgagttcgtccgcaagaccggtggcgccggcaaaggtcgcactaacatgcgccgcaccgtcaagagtgctcctcagagcatttggtatggccctgaccgtcccaagtacttgggtccattctcggagcagattccatcatacctgaccggagaattccctggtgactacggatgggacactgctggattatcagctgacccggaaaccttcgccaggaaccgggagctggaggtgattcacagcagatgggcaatgcttggtgcccttggctgcaccttcccagagatccttgagaagaatggtgtcaaattcggcga

SEQ ID NO: 31722 - DNA, 402 bp, Glycine max
  Clone ID: LIB3138-005-Q1-N1-F7
aactgattgaagtgataacagcatcatgtctttcagaaaatggggctcatgtgaatagtaaatcaatagatcgtggcctagttaagtatcagagtgggacaaagccagagatactatcaaacatatgtgacttgctatgcttttgtatcttacaccacccatacaggataaagtgcaactttcttcctaataaagtaattgataaaattttgttactgacacggagaagagagaaatacctcgttgttggcgctgttcgatttgttcgtactattctatcacgtcatgatgagcatctggtagatcattttgttagaagtgacctttttaaaccaatagtagacgcctttgttgctaatggtaatcgctacaatctgctccattctgttgttcttggacttt

SEQ ID NO: 31723 - DNA, 193 bp, Glycine max
  Clone ID: LIB3138-005-Q1-N1-F8
ggaatgcaaagtttatgaatagaggagagctcctccaatgggtctccattttaaaatgtaggtgatttttcaaacagtctatttgaggagagattctcaaagtttatatttatttgcagccaataataagttttggcgtgtctgaatgaatatcacccatatattgattgatattgaatttttgaattcttgt

SEQ ID NO: 31724 - DNA, 184 bp, Glycine max
  Clone ID: LIB3138-005-Q1-N1-F9
gcatgatctggattttgtgttttctttcgcttgttcgtttgtgtaattcaataaaggaaattaggcatgaccctcttgttgagtatgctctgcctatttgaaaatttccacacctcttttaattgtcgtaatgatgtgtgaagtgtgtgttatttttaaaaaaaaaaaaaaaataaaaatttaa

SEQ ID NO: 31725 - DNA, 423 bp, Glycine max
  Clone ID: LIB3138-005-Q1-N1-G10
tttctatccaaattctccaccagccatggcagtttcttcagcggcagcttcctccaaactcatactattcccccatgcatcatcatcctcttcccttaattccacacccttccgctcctccaccaccaacacccacaaactaacccctctctcctcctccttcctccaccccaccaccgtcctccgccgcaccccttcttccaccaccaccccgcgtcgcaccttcaccgtccgcgccgcccgcggcaaattcgagcgcaagaagccccacgtgaacatcggcaccatcggccacgtcgaccacggcaagaccacccttaccgccgccctgaccatggctcttgccgccctaggcaacagcgcccccaaaaaatacgacgagatcgacgccgccccggaggaacgcgcccgaggcatcaccat

SEQ ID NO: 31726 - DNA, 399 bp, Glycine max
  Clone ID: LIB3138-005-Q1-N1-G11
cagggacagcgttactggtactactacatcatcgacggctacgacgtctcgcacgaccccgccaaggatcacaccaccgagcccacaactggccgcaagcttaacatcatcgatatcccggctgccaaatcgacctcaaagacaactacatccagctcagaccgcaaatcacgccgcgtctcgaccgcttccattcccaagggccgcggccttagcccagagcgtatcgtcgcaccaaagccacaacgcccacacgagacgcgccaggttatcaacactcagtacgacaagacaacacttgaggacctcaaccgccgcttcgccaagcagcaaatcgcagagtcgtccgacgaatcagactacgactctgacgaaggctccgatgttccctcgctcact

SEQ ID NO: 31727 - DNA, 412 bp, Glycine max
  Clone ID: LIB3138-005-Q1-N1-G12
gttcacggtgtcaaatctaccaagctctatgttcctcctcgtgttcttcatagctcttgtctctcatacacatggaagcaagatcgaccaccatagaagcaacaaacatgttcccctcttcatttttggcgattctttcttagatgctggcaacaacaactacatcaacacaacaacccttgatcaagcaaatttcttgccatatggagaaacatacttcaagttcccaacggggagattctctgatggacggttaatatcagatttcatagctgaatacgcaaaccttccattggttccaccatatttacaacctggcaatagcaattactacggtggagtgaattttgcatctggtggagctggtgctcttgttgaaacttttcaagggtcggtaatacccttcaaaaca

SEQ ID NO: 31728 - DNA, 401 bp, Glycine max
  Clone ID: LIB3138-005-Q1-N1-G2
atctgagaaaggtgctcctcagccaacccaaaaggttagcgaggaggagaaagctcccaaagttgaaactgctcctgctaaagagaagcccaaagcacctcctgccattctgaagtctcccaccgagccccagcttcctcctaaagaaagagaaagacgagttcctatgacaaggcttcggaaacgagttgctacacggctgaaagattcccaaaacacgtttgctatgctgacaaccttcaatgaagttgatatgactaatttgatgaagctccgttctgattataaggatgcttttgttgaaaagcatggagtcaaattggggcttatgtctggctttgtgaaagcttgtgttaatgcactccaacatcaaccgattgtaatgcagtcattgatggtga

SEQ ID NO: 31729 - DNA, 404 bp, Glycine max
  Clone ID: LIB3138-005-Q1-N1-G3
atctgctctctcatacattcaactagctgctgtttcaacaagtggggagttatcagggtactctatggtggactttgatattctgtaattgatttgatggaatcttccaaccaattcaatgaatcatttaggcaaggtcttacagctggatatgtctttgctgcaacttttgtcatagtactttatatgtcctcttgtctccctgcacaacttatcaagaacaggaagaatagaacgggtggatttaagaaagcaacacagaagcgtaagttgccgcttcaggagttgaaacaagaaaaaaacaaaaagaaacgaaagagagcaagacagatagacagagatcttcctgtggagttgctagagagaagaataaagatcaatgacattggatggttgacatgtaa

SEQ ID NO: 31730 - DNA, 329 bp, Glycine max
  unsure at all n locations
  Clone ID: LIB3138-005-Q1-N1-G5
gaagcgacgaangtgataataatcggtgccggaacttctggtatggccaccgccggttgctgtaacgaagcaatcaataccttacataatgctcgagagagaagactgtttcgcttcgctgtggcagaaatacacctacgatcgtctccaccttcatttgaggaagcaagtttgcgagttaccgcacttaccgtttcccaagtcttaccctcactacgtgcctcggaagcagttcatagactacttgggaaactacgttaaccactttgagatcaagcctctgtaccagcgtgcagtggagttggtggagtatgatggatggaaaggga

SEQ ID NO: 31731 - DNA, 338 bp, Glycine max
  Clone ID: LIB3138-005-Q1-N1-G6
gaacgaatcagggctcctccggctgacttttcccggcggaggagttccggtaattactgtaattattattactacaacaacaacaacaaccatgtcgccacttccaggtcgtgccggaagcctgttagccgacccgaccaaaggaaacgggctgctcccggttctgcccagccggtggtggcggaggccgcggcggcggtgttgaagagaccgagccgtgatgattcaagggtggccaggagccaaagtttggagatgactaccattctacgtaggggccagtcgcttgattcggctgtgaagagcgaggtgtacgccggatctgcgttcgcggtgtc

SEQ ID NO: 31732 - DNA, 288 bp, Glycine max
  unsure at all n locations
  Clone ID: LIB3138-005-Q1-N1-G7
tgaggtttctcgtggtttgaataattttcctcttctatttgggttgatgcgagttgttagtagccttttgcaaaaccctcacatccaaattgaaccatatctacaccagttgatgccatctgttgtgacttgccttgttgctaaaaggttgggcactaggttggcagacaaccactgggaacttagagactttacggctcatctggttgcctcaatatgtaaaacgtttggacatgtttatagtaatctccagtctcggttgacaaaacatngctgaatgcattcttg

SEQ ID NO: 31733 - DNA, 360 bp, Glycine max
  unsure at all n locations
  Clone ID: LIB3138-005-Q1-N1-G8
gctcctcaaatattaacaaaaggattcccaccacacttggggaagggaaaaaaaatggttttcttacctaaagtgaacccttttccagtaccttaccggcttgtctttttggccgttaaaatgaaaatcttaagtcttaccccccttaatctatgctgacgccacttcttgagaactgtgagagtctcaaatatctgggtgatgagagtgcttttgcatttgtgaactcgtatgtagtattttattcacttaaataaagcgcattactatgtgcaatgagtgtgtttaaattttttanaaaaaaaataaaaaaanaaataataaatataaaaatnanatttatttattttttttttattt

SEQ ID NO: 31734 - DNA, 414 bp, Glycine max
  Clone ID: LIB3138-005-Q1-N1-G9
gcaattgaagttaaaagccttagccttccctacaactccaaacacaaagacatcatcatccatggctgcctccgtctccactgtcggagctgtcaacagagctcttttgaacctgaatggttctggagctggagcttcagctcccagttcagccttctttgggaccagcttgaagaaggttattgcctcaagggtccccaacagcaaggtttccggtggaagcttcaagattgttgctgtagaagagaagaaagagattgaagagacccagcagaccgacaaggacagatggaaaggtcttgcctatgatatctcagacgaccaacaagacatcacaagaggaaagggtttggttgactcccttttccaagctccacaggatgctggaactcactatgcagtcatgagcttcta

SEQ ID NO: 31735 - DNA, 417 bp, Glycine max
  Clone ID: LIB3138-005-Q1-N1-H1
gtgttttaaatccacaaaatccttttgtgttaaataggtggatggggaaattgactttcccgcagggcacttcccgaagtgttaagagaatgcctctttctatagggggaggagctggtgcaaagaatgctattctcatgaatatgccaaatgctgttctttcaatgtggagatattttgttggagatctcgtctttgaagtttctaagatgacttctccctacattaaatgtacagtctctttcttcatagcatttggaaatttggctgatgataccatcaattttgaggcttttccccacaagctggtgcagtttggagagattcacgaaaaagttgtattgaaattttcacaagaggaatttcttacagcttggtcaactcatgtgcgtcctgcaacaactctgttggctgatg

SEQ ID NO: 31736 - DNA, 340 bp, Glycine max
  Clone ID: LIB3138-005-Q1-N1-H10
gttggtgcaatgcttttggttgatacttatcataccaatcctgaaaatgcagttcgtagtatttttgttgcgcctttcagaggcggaaggcccattcgggtggttacatttccgaataccattgtgcagattgaaccagacatgaattcaaggtttcagcttttgagtaccactaccaatggtgattttgttcaagggaaagatctcgcaatggttaaagttaatgtagcatgtgctgctgttggcttgacatcaagttacactccaactccattgttggaatctggtttgcaaaaagacagagggttaattgtggagtattttggaaagatgtcttacg

SEQ ID NO: 31737 - DNA, 185 bp, Glycine max
  unsure at all n locations
  Clone ID: LIB3138-005-Q1-N1-H11
gttcagtgtctacaataccaggtgattttgtcattggtgtcgagttgacaaccataaacaatatgtgtgcatatgggctcaatcctggtatttcaggttctcgtcttttgggcaccattcctcagtccatttcacagcanactgtttgaatcaaatggcaacagtgagaacaccattgaattttg

SEQ ID NO: 31738 - DNA, 310 bp, Glycine max
  Clone ID: LIB3138-005-Q1-N1-H12
gccatgtttaaaaggttgaagaggaagcgccgaaagatgagagaaagatctaagtaggtgcttgaacaaggagtggagatgatgtgcttttccatctgctaccagcttcatgacattttatgctgtcatggctcttatgatgatcttgaggtctagtggcgaggggagcttccatcttgactttagtttagctttactggtctaaagattgctgttttagtgtgggttaagttatgatattgagagttttgtgttatctaattatgtactggtacgttttgtatactttttggtttatcttaataggctt

SEQ ID NO: 31739 - DNA, 413 bp, Glycine max
  Clone ID: LIB3138-005-Q1-N1-H2
gagcatttcgatgcatgtcagtggacaaaatcagaaccacattggtgggaattgatcttcccaagagaggtatgtgcccctaataatggatatgaaatgtggagttctgagtgggcaaatcaaacttcatggcattcgagtctccttattgacaatcccaaacagtctacagtgtctgatattctctggggaatctctcaagattttgaaactgctggtaatactctgatgccagctttttctgttacacaggctactgccagatcttatgaaaatgcggaatcctctgcatgatctggaattagagttaactttcactcgttcgtttgattaattcaataaaggaaattaggcatgaccctcttgttgaggatgctctgcctattcgaaaatttccacacctattttaatag

SEQ ID NO: 31740 - DNA, 418 bp, Glycine max
  Clone ID: LIB3138-005-Q1-N1-H3
ctcgagccgattcggctcgagcggttcaacagttcgagggtctgaacaacatgggcaacggaaatatgcttgttatggaaaagggttttggtggaaggtatagcttactgatgcatcatggagaagaggaactaagacggtttggattcacggatgaaatgctgattgatcaggagtggcataaatttgcaaagcctgctgatctgaattacgattgtccaatggtgaattccttctttccccacctcagtgacagtgaagaaacatgcaagtacgattacgaacaaggagggtgatcaacaatttataccaacttcatagtcaatgcataggctacaactacaaagaatattttttagttaaataacgataatgaggagtacgttcttgtaactaattagtagaaaaagttgtaccc

SEQ ID NO: 31741 - DNA, 350 bp, Glycine max
  Clone ID: LIB3138-005-Q1-N1-H4
cgacaacaacagggtcgtgaacccatagctattcgggcgagccgggcgcgacaacagcactggcatcctaaattcgacaccttcagaaatccaccctccaagacagaatggccgaccagagcgctgcttggccgattgctgatgctgcactgagccaggaaattctcgacctgctccagcaagccagccatgcccgccagctcaagaagggagccaacgaggctaccaagactctgaaccgtggtatcagcgagatcatcattctcgcggccgacactacccctctggctatcctgctccatcttccacttctttgcgaggacaagaacactccatacgtgtatgttcca

SEQ ID NO: 31742 - DNA, 425 bp, Glycine max
  Clone ID: LIB3138-005-Q1-N1-H5
agatggcattgcgaggattgagtgcggtggcggtgacggcgtcggtacgccctcccggtgctcgattcaaagtaaacagcggcacatcaaggattccctcttccggatgcagaatctcggtgcggtgtaaagctgtcggagaaagccgacaaggttccttggaggaaaccgttgtttatgagggtatttatggcccctggaccattgacgactccgatgttcgagaggtaattttgtacagatcaggattggtaacagctgctgcatcatttgtggtcgctggttctgctgccttttttcccgatactctgaagcagaatgttgatttattgtatgtccttgggtctggtgggttgggtttattcgtgctcttgattcacatatatgtgtctgagatcaagcgcgccctacaagcactatggggg

SEQ ID NO: 31743 - DNA, 415 bp, Glycine max
  Clone ID: LIB3138-005-Q1-N1-H7
catgaacgtacgtggattcgggatggtgagacaaccacgcacgctaccatttattggcatttaatttgtcatagttcacttgctccacggtgatattgttattgcatcggttaatgagaattgttttatatccccaaagggtaatactaatactcctttcatttcaaattgatggacgttttaaccttaaaaaaaatgcatattcattgttgcttttggttttaataaaacttttattttaaatttaaatcttaataaatatgattttctcggtcctttatatgaaaattaaataattaatttatcaagatcaataaaaatacactttaatgacactacaccttcaccataaactttatttttattcttaaaaatacacttttaattgtacgtagttattaacatttaatgacac

SEQ ID NO: 31744 - DNA, 407 bp, Glycine max
  Clone ID: LIB3138-005-Q1-N1-H9
ctttcaatgtggagatattttgttggagatctcgtctttgaaggttctaagatgacttctccctacattaaatgtacagtctctttcttcatagcatttggaaatttggctgatgataccatcaattttgaggcttttccccacaagctggtgcagtttggagagattcaggaaaaagttgtattgaaattttcacaagaggaatttcttacagcttggtcaactcaggtgcgtcctgcaacaactctgttggctgatgggtgtccatatttgtatgcaatggtgcatgatagttcagtgtctacaataccaggtgattttgtcattggtgtcaagttgacaacccataacaatatgtgtgcatatgggctcaaatcctgtattcaagttctcgtcttttggcacca

SEQ ID NO: 31745 - DNA, 366 bp, Glycine max
  Clone ID: LIB3138-006-Q1-N1-A1
cttcatttcatttcatatcttatctgaatttacaaggaactcagcgaacatggaagcatgctttctctcccacaattcctttaccaaaaccaccgatcaactcatccccacaataagaaacgggtctctaccacaccataagcgatcttctcaacatcttcagtgtagaaaagctagaattccacttcccatatcatgctgccacatgtcatcaccatcacccgttggtgatgatgacaaacctaccctaagtagtgattggcgatctttccgtgcaaaattggtggcaggagaacaattaacaaggcatgttgaggaggtgaatgatctagacactgttggggatcattcttcactgatcaccat

SEQ ID NO: 31746 - DNA, 336 bp, Glycine max
  Clone ID: LIB3138-006-Q1-N1-A11
gattatctctatagggattcagatgtggagtcaatgtctgatggtcacaataataagacagcttacgggtataatgatgtctttgatgaaccctcgatgggttgggctcggtatgctcataccatgagaatatgggtttataactctggtttcttttatataaggcctactcttccttcaattgagctcttggatcgtgttgcaactcggctttccaatgacccaaaatcatgggatcaggcagtttttaatgaggagctctttttcccttcacatcctggttatgatggacttcacgctgcaaaaaggacgatggatatgtacctttttatgaac

SEQ ID NO: 31747 - DNA, 315 bp, Glycine max
  Clone ID: LIB3138-006-Q1-N1-A12
cttaccttataacataattgggcaggcatcctccgcattgtggagcaattagggtttcatcctccgcattgtgaagcaatcgagcgcaggcatcaattgggaaattagggtttcattttcttcttcttcgtttttcttattactcaagcaattcgttctctcgaacatggaaccggaagggcaaaagggtacggtgaacccgtcggcaatgttagcttctctgcttagtaggagagccaaacttcacgaagatcttcgcagcattgaaaagcaggtgtatgatatggagacaagttacttacaggatcctggaca

SEQ ID NO: 31748 - DNA, 355 bp, Glycine max
  Clone ID: LIB3138-006-Q1-N1-A2
ctcttcttcttcttcttccgctcgcgccttctgtctcaatctggaggcaccagaaatggcaacaatagttagccaccaccaccgcctattctccgccgccacgcgcttcaattccactggcagagactcgcggcggcaaaggagcggcgcaaactcggtccggtgcgctgacgtaagcacggtcacgagcgagaatcagcgagtgacggtgagtaacaggagcgattcgctggagatatgccgcgtgctgaacggaatgtggcagaccagcggcggatggggccgaatcgaccgagacgacgccgtcgaggctatgcttcgctacgccgacgccggcctaactaccttcgacatg

SEQ ID NO: 31749 - DNA, 331 bp, Glycine max
  Clone ID: LIB3138-006-Q1-N1-A3
caaagctatcgattttattgatgaagctggttcacgagtccggcggcaacatgcacagttacctgaagaagcaagagaacttgacaaggaggtgaggcagattattaaggagaaagaagaagctgttcgcaaccaagactttgaaaaggctggagagctacgtgatagagagattgatcttaaagcacagatctcaacacttgtagagaaaggcaatgagatgagcaaggcagagactgaggcaagggatgaaagtcctattgtgactgaagctgacatacagtatattgtctcatcctggactggtattcctgttgagaaagtctcaaca

SEQ ID NO: 31750 - DNA, 345 bp, Glycine max
  Clone ID: LIB3138-006-Q1-N1-A5
ggtattgaacctgtttttttacccaccactgcttggattaggtgtgcagcttacaatcgctcctcagatatcaacaaaaggattctcacagcacttgggaaaggtaagaaaattgtttttcttactagagttgatccttttccagtagctttactggctgttctttttggcgttaagaatgaaattctgagttctaacgccactaatcctatgctgacgcgacttcttgagaactgtaagagtctcaaatatctggttgatgagtgtccttttgcatttgtgaactagtatgtagtattctattcacttaaataaagcgcattactatgtgcaatgagtgtgttt

SEQ ID NO: 31751 - DNA, 116 bp, Glycine max
  Clone ID: LIB3138-006-Q1-N1-A7
gtttaattcaattaaggaaattaggcatgaccctcttgttgaggatgctctgcctatttgaaaatttccacacctcttttaattgtcgtaatgatgtgtgaagtgtgtgttatttt

SEQ ID NO: 31752 - DNA, 370 bp, Glycine max
  Clone ID: LIB3138-006-Q1-N1-A8
caaccacctctctctcccaaaatctcagagtgtgctgcttcagggtctggtatcaaagatggcaacattgactgcttcaagtaacttagtctctagaaattctcatgtccatcatggaccaacaactgcttcatatgagtctaaagcagtagcaatgggacttagatctctaaagcagacaaatactcatagtggacttagaatttttaacccggtggatgagctacttaacagaaccccaattaaaaccaatgcaatgcaagctatgaggaagggacctcaaggcaagaatgcctggcctaaaagtataatcacatgtggcatgactttcataaatataggaacggaggtggctccatggtgcaaaact

SEQ ID NO: 31753 - DNA, 374 bp, Glycine max
  Clone ID: LIB3138-006-Q1-N1-B10
gccatttgggagttaggttctgcacgctctgcttccagcgagtgttctttcttcgtttcaacaccttaatttgcacacgctgcttcttcagcttgagaaatggcacaagaaacctttctattcacatctgaatctgtaaacgagggtcaccccgacaagctgtgcgaccagatctctgatgcagtgctcgatgcgtgccttgaacaggaccctgacagcaaggttgcctgtgagacatgcaccaagaccaacatggtcatggtctttggagagatcacaaccaaggccaacgtagactatgagaagattgtccgtgacacatgccgcgaaattggattcatctctgatgatgttggtcttgatgctgacaaatg

SEQ ID NO: 31754 - DNA, 264 bp, Glycine max
  Clone ID: LIB3138-006-Q1-N1-B11
ggctaaagctacttttgtgtttttaccattcttcaaaaagagtggttctttgtgtgtgtatggcgatgataactacactcgtgttcatgaatatgtcaagccttactttaaaccttcttaattgcaaagctatctagctactcataacatcaccactactgatgctatcgacaaaactagtgcaactttgcaacttacaaagttcacaaaccttgcttttctgatgacaaactttcaagcaccgtctactgctttgtgggtggc

SEQ ID NO: 31755 - DNA, 330 bp, Glycine max
  Clone ID: LIB3138-006-Q1-N1-B12
cattcctcagtccatttcacagcaaactgtttggaatcaaatggcaacagtgagaacaccattgaattttgattctagcaagcagagcttttgtcagttttctattgaccttctcggtggaggaatcttagtggacaaaactggagattggatcacacttatacaaaattctccaattagtaacttgttgagagttgctgcttggaagaaaggctgtttaatggtcaagattgtgatgtctgggaatgcaacagtcaaaaggagtgattgggcctcattggtacaagtgtttttaacaaacagcaacagtacagagcattttgatgcatg

SEQ ID NO: 31756 - DNA, 374 bp, Glycine max
  Clone ID: LIB3138-006-Q1-N1-B2
ttttccctctcccattcctactcccaaatcacaattcctcttcggtgttttctttttctctgagtctcagccatatccatcatctttctctctccgccgcatgcggcggtgacgtttgatacccttcttcttatacagatccgccgccccttcttcctcccaacgccgctttctgcttgggaccccggttatgacgattccttgggcaacaacaaacgcatattgaagaatttggggtttcacgattttacccctcgaaataaaaagtatcagtagcgtctacgcttgacaaccctacgatgatgagtcagcatccccgtaggaagctgccacgtggcaacccaagaaagggcaagcacgctgaagttgacaag

SEQ ID NO: 31757 - DNA, 311 bp, Glycine max
  Clone ID: LIB3138-006-Q1-N1-B3
gcttctccacattctttatactattaacctgcaaaggaacatcagggaaaacccaaaaagatggatgccccatatacacaaacaatctatcctcaatacaatgaggttcaggctcatattgcaacaaatttgataaaattgcctcttgactatttttaaactactaaaggttccatgttggacctgaaaatttctcaatctaaaatagcactctccaacaacacagttggtggaaccattctccatagtgatctattgacaaatttttttacaaagcgcctttttttaacaacccttcatttatgaggcac

SEQ ID NO: 31758 - DNA, 382 bp, Glycine max
  Clone ID: LIB3138-006-Q1-N1-B4
ataaaatggacaacactttcagtgttgtaccctcaaaaattgcgcggatggataacaacgatagtgctcttccctttcaatttgctaaaaccaaatgtaattgtagtgctattccgtcacaaggttctattcctgagagcaatcatggtgattgtttgggtgacaatgttgaaagggccctggaacagcttctatcacgcatggacaggatagaagaaatctgtcttggctttcaagagaaaatggtaatgcccatgagcagcattgaggcaagacttcagcaagtcgagcagcaactggatactctgactaagaaatttcagacttctgcttttccatcttgtcctagaatttctgctcttgatgcttcttgtattgaatc

SEQ ID NO: 31759 - DNA, 356 bp, Glycine max
  Clone ID: LIB3138-006-Q1-N1-B6
gttttgaaatgtggttttctgagtgggcaaatcaaacttcatggggtttgagtttccttattgacaatcccaaacagtctacagtttttgatattctcttgggaatctctcaagattttgaaattgctggtaatactcttatgccagctttttctgttccacaggctactgccagatcttctgaaaatgcggaatcctctgcatgatctggaatttgtgttttctttcgcttgttcgtttgtttaattcaataaaggaaattaggcatgaccctcttgttgagtatgctctgcctatttaaaaatttccacacctcttttaattgtcgtaatgatgtgtgaagtgtgtgttatttt

SEQ ID NO: 31760 - DNA, 329 bp, Glycine max
  Clone ID: LIB3138-006-Q1-N1-B7
caagattccttctcttgggttagggacttggcaaactgggggggggtttgtaactgaaggtctcaccacaaccattcaagttggatacaggcatattgactgtgctagtgcgtataagaatcaagcagagattggttctgctcttaagaagctttttgatgatggtgtggtgaagcgtgaggacttatggatcacttccaaactctggtgttcagatcatgcaccagaagatgtgccaaaagcattggataaaacattacacgaattgcaactcgactatcttgacctctatctgatccactggccagtccgcatgaaaagtggaacat

SEQ ID NO: 31761 - DNA, 323 bp, Glycine max
  Clone ID: LIB3138-006-Q1-N1-B8
caaaggttgctgtaggagataagattgcagtagtgctaagtgctaacacctgcagtgaacaatggcctctgcatcagcatctctgctcaagtcttcacttgttcttgacaagtctgagtgggtgaagggacaaacccttcgccaaccttctgcatcagttgtgagatgcaaccccaccaccccatcaggcctcaccatcagagctggttcctatgctgatgagctcgttaagaccgcgaaaacagtggcttcaccagggaggggtattttggccatggatgagtccaatgctacctgtgggaagcgtttggcttcaattgggc

SEQ ID NO: 31762 - DNA, 366 bp, Glycine max
  Clone ID: LIB3138-006-Q1-N1-B9
gtcgttgtaaatgttacatgtggtagtggacgtggtggtttagccaccactgcttggattagttctgcagttaacaatcgctcctcagatatcaacaaaaggattcgcacagcacttgggaaaggtaagaaaattgtttttcttactagagttgatccttttccagtagctttactggctgttctttttggcgttaagaatgaaattctgagttctaacgccactaatcctatgctgacgcgacttcttgagaactgtaagagtctcaaatatctggttgatgagtgtccttttgcatttgtgaactagtatgtagtattttattcacttaaataaagcgcattactatgtgcaatgagtgtgttt

SEQ ID NO: 31763 - DNA, 312 bp, Glycine max
  Clone ID: LIB3138-006-Q1-N1-C1
cagctttttagctagcaaatacattctgcacactctttacggtacgcgactatacctatatctggataaaatgtccatcaatcgtgctttcatcaagaaatgggtcccgaccgagacctggcctatctttggcatcgttggcatcgcctgcggcggtgcgggctactatctttggaagctagccatgggccctgaggttgtgtgggaccgaaagggtgactggaggccgtgggacaaggtcaagcacgaccagaacctcaaattcctctcatacaaccctgaattctgggcacaacgcaagaaggaggcgtt

SEQ ID NO: 31764 - DNA, 380 bp, Glycine max
  Clone ID: LIB3138-006-Q1-N1-C10
tttcagtttttcactgataattacagaatatcactttacttttgctttgtttcctgaattaagaatttgtaaaggaaatgataaaattaacaaaacatcaaatgaccttaaaactaggtagcacttggttaattgtaaatgtaaatgtaacaactgaaaatgaaaagtaaaaaccaagccaaataccacaaaatttaatgaatatgtgacttctgtgtgttcaataaattattgaatcatttcaccatttgaataatgtgtgttgatcaaacaggcacttccacttgtaagcactttttggggcgtggttctgtttggggagtacagaaaatcatcaagaagaacatatatactgctagggagtattgttgttatgttta

SEQ ID NO: 31765 - DNA, 212 bp, Glycine max
  Clone ID: LIB3138-006-Q1-N1-C12
gttgaaaagagcaatctgatgatgtcagtcaagaacaatattgtgggagacggcgggatctggtagatatggtgcaatgtcaccgcatccaagtaggcgtccgtcatttactatagggcctcggccaaagtacgctctcacgatttcagaaaggtttctcttgggacctctggtttcactgagcacatggccactgccctgggatcctcttt

SEQ ID NO: 31766 - DNA, 377 bp, Glycine max
  Clone ID: LIB3138-006-Q1-N1-C2
tttattatgaagaatttggacaaacttagttgtcaagttggaatggacccatactccatggaatggactggtttggccaatagattactgagtaagggcaatgatattctgtgttgcgattatactaatgatgatggttcgattaccaagcaagttatgagcaagatggcagaaatgataaacagtctttgtggaggtgatgaaaaattgatgcgtgaaaggacgcacctgctgttggcttgttgttcaaggatggcaatttgtaagaaagatgtttggagagttgaatgtggaatcccttctggatttccgctcacagttatttgcaatagcatttttaatgagatgctcattaaatatagctatgaaaaattact

SEQ ID NO: 31767 - DNA, 377 bp, Glycine max
  Clone ID: LIB3138-006-Q1-N1-C3
ctcgagccgattcttttcgaggttgaatgtggaatcccttctggaggtccgctcacagttatttgcaatagcatttttaatgagatgctcattagatatagctatgaaaaattactgcgccaggctaaagctccaagtatgtttttacaatccttcaaaaattttgtttctttgtgtgtgtatggtgatgataacttaattagtgttcatgaatatgtcaagccttactttagtggttctaaattgaaaagctttctagctagtcataacatcaccattactgatggtattgacaaaactagtgcaactttgcaatttagaaagttagcagattgtgattttctcaagagaaactttaagcagatgtctaatgtttt

SEQ ID NO: 31768 - DNA, 386 bp, Glycine max
  Clone ID: LIB3138-006-Q1-N1-C4
gtatattccacggttctttcacttactggtagatctcgtgaggagggaacacacctctggagaagttcaacatgccctgagtaatatgttccgttcatctgttggccaaattataatggattgagttttagttttggcatactttggttttggacgttgctgaatatcaatcagcattttccttataagctaaagaacgagccattacatggtcatatcttgatttactcaccattgttgtgtagtgttactcttggttttttgtgattgtatgtgctattaatgtaaatgataaatttatttcaagcagaatactaaagtaccacagatagatagcgaagaaactaagttaggcagccgctggcagtctacgacttggcctaact

SEQ ID NO: 31769 - DNA, 334 bp, Glycine max
  Clone ID: LIB3138-006-Q1-N1-C7
ggttggcttctggtgaaaccgggaatgtggattactatgctgtgattggtgtccgacgaggatgttcccggtcggagttggagagggcacacttgttgctttccttgcggcacaagcctgataaggcaactgggttcatcgaaaggtgcgagcttgcggatgagcgtgatgttgagtctgttaaagagagggtgaagatgtcgtcgttgttgttatatagattggttcagaagggttacactaatgtcatgggtaacattatggatgaggaagctgctgagaagcaaagaaagaaggctgctttgcaagcttttcaagcacagaaagagaaagc

SEQ ID NO: 31770 - DNA, 348 bp, Glycine max
  Clone ID: LIB3138-006-Q1-N1-C9
ggtcaagattgtgatgtctgggaatgcagcagtcaaaaggagggattgggcctcattggtacaagtgtttttaacaaacagcaacagtacagagcattttgatgcatgtaagtggacaaaatcagaaccacattcctgggaattgatcttcccaatagaggtatgtggtcctaataatggttttgaaatgtggagttctgagtgggcaaatcaaacttcatggcatttgagtttccttattgacaatcccaaacagtctacagtttttgatattctcttgggaatctctcaagattttgaaattgctggtaatactcttatgccagctttttctgttccacaggctac

SEQ ID NO: 31771 - DNA, 392 bp, Glycine max
  Clone ID: LIB3138-006-Q1-N1-D1
gatttatgagtattcgattgagaagatctggaaggactggacatggacagagaaataccccgactggcaagaactccgcagctacttcgcctatgtcgaagagaaactccagatcaagaaagacaccgctttcgactctcgagttgtcggcgctcaattcaacttgaagacacacaaatgggacgtcaaaacccaagacggccgcaccgcacacgcaaagtacctcatcaatgccattggctttgctgcaaagcgctacttccccgactggcagggcctggactcgttcaagggcgagatgtaccattcatcattctggccggagggcggcgtttccacgaagggcaagaaggttgctgttattggaactgggtcgactggtatccagatcg

SEQ ID NO: 31772 - DNA, 333 bp, Glycine max
  unsure at all n locations
  Clone ID: LIB3138-006-Q1-N1-D10
agttatgataattatccctattgtactatgacatttgatccagggaaaattggtgtcaatttttgttcgtgctanaaccaagttactcacaccattccaaggtataagttagttctaaaaatggaacagaatggggagaagactaacttccatttctgggatgcaacatgtatcaaaatctttaacaaaacggccgatcaatgttgccaagagttgattgcaagtggcgatgagatcaaggttttccctccctatttttgatgaattatttgggaaagacttgggctatcaaagttttagtaccatgcacgatgctcaaaaagggcctacaat

SEQ ID NO: 31773 - DNA, 320 bp, Glycine max
  unsure at all n locations
  Clone ID: LIB3138-006-Q1-N1-D11
aatttccacacctcttttaattgtcgtaatgatgtgtgaagtgtgtgttattttaaaaaaaaaaaaaaaaaaaaaaaaaaaaaaaaaaaaaaaaaaaaaaaaaaaaaaaaaaaaaaaaaaaaaaaaaaaaaaaaaaaaaaaaaaaagaaactaaaagaaaaaaaaaaaaaaaaaaaannaaaaaaaaaaaaaaaaaaagaaaaacaaataaacataaaattttaaaaaaaagaaaataagaagggggccgcaaatttttgcccccttccaccccgaaaaaaaaaaagagtcccgccctcaaaggcctacaaaaattttcc

SEQ ID NO: 31774 - DNA, 328 bp, Glycine max
  Clone ID: LIB3138-006-Q1-N1-D12
cagctgcctacaatcaatccttgttttgcggatcgttggctatggggctataccagtttcgattgggtcgctccttgctttagctatactttctgctttaactcttcggtttcatacttgcaagccttgttacccaggtagcggttggggacgtcaactctggccagcgcgttacccgggactcggcgactgttgggtgcttgtagaggcgggcgaaagcctatatattgaagcggtgctccggtactgcgcctttacctgcgcttgacgcctgaagtcctgctcacttccatgagcgggcgccaattcggggtctgtggattgatgg

SEQ ID NO: 31775 - DNA, 384 bp, Glycine max
  Clone ID: LIB3138-006-Q1-N1-D2
gtggtgttggtgaagaataatcaggggtttggcttcaatggaggaggtggtggtggtggaagagatgatggtgccactgctaggattttgggaaaccttgctttagctattggattgacttacctttctatgactgggcaacttggttggattttggatgctattgtgtccatttggctcgttgcagtgttaataccaatagtaggtcttggtgctttcctctggtgggcagggcgagatataatgcaaggcacttgtccaaattgtggaaatgattttcaggttttcaaatcctctctgaatgatgatttgcagctgtgccctttttgtggtcaacctttttctgttgttggcaatgagtttgtgaaggactctgtcaagttt

SEQ ID NO: 31776 - DNA, 280 bp, Glycine max
  Clone ID: LIB3138-006-Q1-N1-D4
ggcagaaagcaagctcatcctagagttttaaaaatggcagcagccgtgtccatggctctctgttccccatccttggctggcaaggccgtgaagctgggcccatcagcccccgaagtcgggagggtcagcatgaggaagaccgtcaccaagcaggcctcctccggaagcccatggtacggcccagaccgcgtcaagtacttgggcccattctctggcgagcccccgtcctacctcactggcgagttcccaggtgacttccggctgggacactgctgggctt

SEQ ID NO: 31777 - DNA, 348 bp, Glycine max
  Clone ID: LIB3138-006-Q1-N1-D5
cttagttgtcaagttttaatcaacccatactccatggaatggactggtttggccaatagattactgagtaagggcaatgatattctgtgttgcgattatgctagttttgatggtttgattaccaagcaagttatgagcaagatggcagaaatgataaacagtctttgtggtggtgatgaaaaattgatgcgtgaaaggacgcacctgctgttggcttgttgttcaaggatggcaatttgtaagaaagatgttttgagagttgaatgtggaatcccttctggattttcgctcacagttatttgcaatagcatttttaatgagatgctcattagatatagctatgaaaaa

SEQ ID NO: 31778 - DNA, 386 bp, Glycine max
  Clone ID: LIB3138-006-Q1-N1-D6
catttgtgtcactggttggactgccaccccaatgcaggatgttcagggttacaattgattgggttatttcctctcaggaatgtgttcccaggacctattgtgttttaaatccacaaaatccttttgtgttaaataggtggatgggaaaattgactttcccccagggcacttcccgaagtgttaagagaatgcctctttctatagggggaggagctggtgcaaagaatgctattctcatgaatatgccaaatgctgttctttcaatgtggagatattttgttggagatctcgtctttgaagtttctaagatgacttctccctacattaaatgtacagtcttttttcttatagcatttggaaatttggctgatgataccatcaaattt

SEQ ID NO: 31779 - DNA, 298 bp, Glycine max
  Clone ID: LIB3138-006-Q1-N1-D7
agagaaacttatacatgaaagagagagaaagagtggttgagggcgtccattgaaggtatggagagagaggtcttctgaattgctgctgcttcgtgtctgtttatttcctcgcgaggattgaattccggaacagctaacagaaacggaggtttccatcctgcgatgtgatatatgagagatctgtgaggaaattgaactggaaaaaaaaaacggcgacttcctaggtatccatcatgggaaatttgcagaacggaaaaggagataatagttgtggctgctccaccaacgatgctagaaa

SEQ ID NO: 31780 - DNA, 384 bp, Glycine max
  Clone ID: LIB3138-006-Q1-N1-D8
gccttctggaggggttgttactgggataggtcctgtgcatgggagactgtgtatgtttgtggcgaatgatcccactgttaagggaggtacttattatcccattactgttaagaagcacctcagggcacaggagattgctgctcagtgcaaattgccctgcatatatcttgtcgacagtggaggagcttttcttcccaagcaagccgaagtgtttccggacagagagaactttggcagaatattctacaatcaggctgtaatgtctgctcaaggaattcctcaaattgcattggtgttggggtcttgcactgctggtggcgcttatattcctgctatggctgatgaaagtgtgatggtcaagggaaatggtaccatttttttagc

SEQ ID NO: 31781 - DNA, 243 bp, Glycine max
  Clone ID: LIB3138-006-Q1-N1-D9
ctctagccgactgatgtctaatgttatgtgggtggctcctgcggacaatgcaagtttatggtcacaactatattatgtttaatgtaataatctggaaatgcaaaaaccttattttgtcaatctcagaaatgtgttactagaattgacttttcacaatgcatatgaagctcgccaattgagaacgaaagctctctctcgcattgaatggctgtaaaaagctaatgtgcctaccatagcacaaat

SEQ ID NO: 31782 - DNA, 393 bp, Glycine max
  Clone ID: LIB3138-006-Q1-N1-E1
catcacttactggaagccttgttgtgagtaagagaaaaggcttcgtgcaccgagcacaccaacttgatacctctgattctttctttgcttagaattccacagaatatggagactgttcttttcaatcactccccacctttggaattcaaggtgcgtagaaatagtgccaagtatatggttaaatcatcactaaaataatcttaataatgggacttgaaatttaattactgtatccctctctacctgtttatgtaattttgtggagtatgtaccctttattttatttttatttatttgatatcatgttcgacccccactttgatggtttgagaagatatctacaaaccacaatgtcatgagaggaattgacatgttatttattatattatatat

SEQ ID NO: 31783 - DNA, 337 bp, Glycine max
  unsure at all n locations
  Clone ID: LIB3138-006-Q1-N1-E10
gtcttgcaattgaagttgaagtcttgcccttctctcttcaacggcaaacacaagacatcatcatccatggctggctccggcttcactggcggagctggcaacaaagcttttttgaacctgaatgggtctggacctgggggttcagctcccagttcatccttctttgggagcagcttgaagaaggttattggctcaagggtccccaacacaaagatttcctctggaagcttcaagattgttgctgtngaagagaagaaagagattgaagagacccagcagaccgacaaggacagatggaagggtcttgcctatgatatctcagacgaccaacaggaca

SEQ ID NO: 31784 - DNA, 265 bp, Glycine max
  Clone ID: LIB3138-006-Q1-N1-E12
ctctagccgttctagccgcaaaactggagattggatcacacttatacacacttctccaattagtaactggttgacagctgctgcttggaagaaacgctgatcaatggtcaagattgccatgtctgggaatgcaccagtcaaaaagagtgattgggcctcattggtgcaagcgtttttaacaaacagcttcagtacagagcattttgatgcatgttagtggacaaaatcataaccacattcctgggaattgatcttaccaatagag

SEQ ID NO: 31785 - DNA, 390 bp, Glycine max
  Clone ID: LIB3138-006-Q1-N1-E2
atggactgccaccccaatgcaggatgttcaggttacaattgattgggttatttcctctcaggaatgtgttcccaggacctattgtgttttaaatccacaaaatccttttgtgttaaataggtggatgggaaaattgactttcccccagggcacttcccgaagtgttaagagaatgcctctttctatagggggaggagctggtgcaaagaatgctattctcatgaatatgccaaatgctgttctttcaatgtggagatattttgttggagatctcgtctttgaagtttctaagatgacttctccctacattaaatgtacagtctctttcttcatagcatttggaaatttggctgatgataccatcaattttgaggcttttccccacaagct

SEQ ID NO: 31786 - DNA, 307 bp, Glycine max
  Clone ID: LIB3138-006-Q1-N1-E3
agaaaccaaatttcatttgtcaactacgcacttaacaaacaaagggcgtattatcaccaaggcgcgggcaacccacaacacaaaccatcatatggacatcaacagctactaccacacttacaccgctaggcccaacaaatctaaaaatgtgctcttcaacaacaaccctccacaccgccgtcaaggtctattgcgaggtgcaaaaacatcgcactctgtccctatacaactgccccactcatagatacatatgcgataccatttatcggctgaccactgataacaaattgccccaactactgctgta

SEQ ID NO: 31787 - DNA, 336 bp, Glycine max
  Clone ID: LIB3138-006-Q1-N1-E5
ttttgatgcatgttagtggacaaaatcagaaccacattcctgggaggtgatcttcccaatagaggtatgtggtcctaataatggttttgaaatgtggagttctgagtgggcaaatcaaacttcatggcatttgagtttccttattgacaatcccaaacagtctacagtttttgatattctcttgggaatctctcaagattttgaaattgctggtaatactcttatgccagctttttctgttccacaggctactgccagatcttctgaaaatgcggaatcctctgcatgatctggaatttgtgttttctttcgcttgttcgtttgtttaattcaata

SEQ ID NO: 31788 - DNA, 381 bp, Glycine max
  Clone ID: LIB3138-006-Q1-N1-E6
agaattctcagatttgctgggcgagagatgcagcagccaggacccggcatggcacctcccaccatgggccagcagccgcagcaacagtaccagcagcagcctccgccgcagcagcaacaaccctacgtcatgatgccgccgcagcatcaggcgccgcagcctatgtgggccccatccgcccagcctccgctgccgcagcagcctgctagcgccgacgaggtccgaaccctctggatcggggatctgcagtactggatggacgagaactatctctacacctgctttgctcataccggcgaggtttcgtcagttaaagtgattcggaacaagcaaactagtcaatctgaaggttatgggtttattgagtttaatagtcgtgct

SEQ ID NO: 31789 - DNA, 386 bp, Glycine max
  Clone ID: LIB3138-006-Q1-N1-E7
aaatggcaacagtgagaacaccattgaattttgattctagcaggcagagcttttgtcagttttctattgaccttctcggtggaggaatcttagtggacaaaactggagattggatcacacttatacaaaattctccaattagtaacttgttgagagttgctgcttggaagaaaggctgtttaatggtcaagattgtgatgtctgggaatgcagcagtcaaaaggagtgattgggcctcattggtacaagtgtttttaacaaacagcaacagtacagagcattttgatgcatgtaagtggacaaaatcagaaccacattcctgggaattgatcttcccaatagaggtatgtggtcctaataatggttttgaaatgtggagttctgag

SEQ ID NO: 31790 - DNA, 314 bp, Glycine max
  Clone ID: LIB3138-006-Q1-N1-E8
aacttattgagagttgctgcttggaagaaaggctgtttaatgggcaagattgtgatgtctgggaatgcaacaatcaaaaagagtgattgggccttattggtacaagtgtttttaacaaacagcaacagtacagagcattttgatgcatgtaagtggacaaaatcagaaccacattcctgggaattgatcttcccaatagaagtatgtggtcctaataatggttttgaaatgtggagttctgagtgggcaaatcaaacttcatggcatttgagtttccttattgacaatcccaaacagtctacagtttttgatat

SEQ ID NO: 31791 - DNA, 380 bp, Glycine max
  Clone ID: LIB3138-006-Q1-N1-E9
attttgtttttagcagcatcttgaatttcaaaatgcctaaagggagaagattgaagtccctgtctactgattgtaatagaccgtatccttacccatccaactccaaaaacattgagctgcataaacctatgaatttgttggaatcggctgatgaaatgaaagaatgggaggaagctagatgtcctatttgcatggaaccccctcacaatggtgttcttttgaaatgttcttcctatgagaagggttgtcttccttacatgtgcaataccagttaccgccactccaactgccttgaccagttttgtaagtcctttgcttctcatctctcatcagaagtactgcaagaaattcctgtcacaggcagagtctcacatagtaga

SEQ ID NO: 31792 - DNA, 375 bp, Glycine max
  Clone ID: LIB3138-006-Q1-N1-F1
gttccgcgagtgcgatctcattcacgggaggtgggccatgctcgcgactctcggagctctcactgttgagtggctcactggtgttacatggcaagacgccggaaaggtggagctagtggaaggttcatcatacctagggcaaccacttccattctcaatcaccacactgatctggatcgaggttctcgtaattggctacatagagttccagaggaacgcagagctggacccagaaaagaggctgtacccaggtggcagttacttcgacccactgggcctggcctcagatccagagaagaaagccacccttcaattggcggagatcaagcacgcccgtctcgccatggtgggcttcttgggctttgcagtccaagc

SEQ ID NO: 31793 - DNA, 387 bp, Glycine max
  Clone ID: LIB3138-006-Q1-N1-F10
ctgctttctcagttttttctatgtgactctgtttccatagggcgggttttctatcattgcttattacccttttgcagatttactttatcaatgtcataaaacttttacatgtttcatcttttttttgcagtactagattgcattgttttctttctcgttttccgggaaagtgatcacatagtaggtgaataccaaagctcacaccactcttcaggcaatgaagccacctttaaatgatgacaaagaattattcttatggatcatgcaattgctttctgtatgaagaagaggtgtaagctttttatccaaaactgaaactgggttctttcacttctcatgaaaaaaacggagtcctggccttctgcattttcttttttttttcctttt

SEQ ID NO: 31794 - DNA, 388 bp, Glycine max
  unsure at all n locations
  Clone ID: LIB3138-006-Q1-N1-F2
tccatctctctcatccatcatgggagcagtgattctcccagatctcggcaccgagattttgattcccgtctgcgccatcattggaatagcgttcgccctcttccagtgggtcctcgtctctaaggtcaagctctccgctgccagagacgcttcctccaacgccggcggcggcaaaaatggctacaacgattacctcatcgaagaagaggaaggcctcaacgaccacaacgtcgtcctcaaatgcgccgaaatccaaaacgccatttccgaaggagcaacctctttccttttcactgagtataagtacgtgggaaatcttcatggtggctnttgccattttgatattcctcttccttggctctgtggaaagattcagcacaagctacca

SEQ ID NO: 31795 - DNA, 146 bp, Glycine max
  Clone ID: LIB3138-006-Q1-N1-F3
ctcataagtattatttctcatggatgcgagaagaataccctaaggggggaccactattatgctggagctcttcaccatccaaatactatcattgcgttctcttatacctacaaacttcaagcctaaataacacacactaacgcttc

SEQ ID NO: 31796 - DNA, 377 bp, Glycine max
  Clone ID: LIB3138-006-Q1-N1-F4
agagcatctagctcaaatagcatggcttccaatctgattagagtgagcacaagcttggttctagtagttttagtagctctcacagttcaaattttctacatttcacccatagatccagttttgctggatataaaacctgctccttcaaccaaagacaatcaattacagaatatcattaagcttggagaaggacttttgaaggaaccagaagatgttgttgtagataaagaagggactctctatacagctactcgagatggttggattaaaagattgcgcaggaataatggaaaatgggagaattggaagcatatagatagtcatactttgctaggaatcgcaacagcaaaagaaggtggtctcattgtttgtgatac

SEQ ID NO: 31797 - DNA, 296 bp, Glycine max
  Clone ID: LIB3138-006-Q1-N1-F7
ctcctcctcttcgccgccgtggccaccgccgcgatggcggtggccgcgtccgacgccgacgacatcctgatccgtcaggtggtgccagatgttggcgaagccgaagaggaggacaacctgctgaacgccgagcaccacttcgcgagcttcaaggccaagttcgccaagacctacgccaccaaggaggagcacgatcatcgcttcggcgtcttcaagtccaacctccgcagagccaggctgcacgccaagctcgacccctccgccgtccacggcgtcaccaaattctccgatctaac

SEQ ID NO: 31798 - DNA, 310 bp, Glycine max
  Clone ID: LIB3138-006-Q1-N1-F8
ggatcttggaagtgggaaggagtcaaatccgtttattcatggggctggacatgttgatcctaatagggcacttaaccctggtttggtttatgatttggactctaatgactatttggcgttcttgtgttctgttgggtatgatgctaatcagattgcggttttcactaaagagcctgctgttgaaagtgtttgagaagggaaagtggggaggactgggaagttggctagtcccggtgacttgaattacccttctttctcggtgaagttgggtggggaaggtgatttggattaatatagaccggttgttacc

SEQ ID NO: 31799 - DNA, 385 bp, Glycine max
  Clone ID: LIB3138-006-Q1-N1-F9
tgggaatgcagcagtcaaaaggagtgattgggcctcattggtggaagtgtttttaacaaacagcaacagtacagagcattttgatgcatgtaagtggacaaaatcagaaccacattcctgggaattgatcttcccaatagaggtatgtggtcctaataatggttttgaaatgtggagttctgagtgggcaaatcaaacttcatggcatttgagtttccttattgacaatcccaaacagtctacagtttttgatattctcttgggaatctctcaagattttgaaattgctgggaatactcttatgccagctttttctgttccacaggctactgccagatcttctgaaaatgcggaatcctctgcatgatctggaatttgtgttttc

SEQ ID NO: 31800 - DNA, 389 bp, Glycine max
  Clone ID: LIB3138-006-Q1-N1-G1
ttggtgctggttcacattcttcagaagattttcctgaaaaggaagagcaagaaaaacccaaaaagattgatgccagattgagacaaagaatagatcctcaatacaatgaggttcaggctcagatggaaacaaatttgtttaaattgtctcttgatgatgttgaaactcctaaaggttccatgttggatctgaaaatttctcaatctaaaattgcacttcccaagaacacagttggaggaaccattctgcgtagtgatctattggcaaattttttgacagagggcaattttagagcaagtgttgatttgcagcgcacttatcgtattagagggatgattaaaatggtggccacagttggtattcctgagaatacaggtatatcattggcc

SEQ ID NO: 31801 - DNA, 390 bp, Glycine max
  Clone ID: LIB3138-006-Q1-N1-G10
tggaaatgcaagaagcttatcttgtcaatctcgtaaatgtgtgacgagaattgtatttgcacagtccagaggaagctcgtcaattgagaaggaaagctctctctcgtattgaatggctgcaaaaagctgatgtgcctaccatagcacagattgaagagttccattcgatgcagaggatgatgaatgctcctgattcaaatgataatattgatttactgttgagcattgatttgttgggtttacaaggagcaggtaaagcttttccaaacaaaattgtttttgatgataagcttgtgttggctaacacacaagaattctttgatggaaattttccagtggattcttggttaccaatttttgtgaattgtctttatcctgtaagtcaattac

SEQ ID NO: 31802 - DNA, 378 bp, Glycine max
  Clone ID: LIB3138-006-Q1-N1-G11
cgataatccttattttcgattgggttacaacagcttgggtgctgtggcaactatcaaccatcttcacttccaggcttattatttggctctgcccttcccaattgagaaggcccccactaagagaattgcaagtgtcaatggtggggtgaagatatctgaactgttgaagtatccggttagaggctttgtctttgagggcggcgaaatgctggaagatctatccaacgttgtttcagatgcatgtatatgtcttcagaacaacaacatacctttcaatgttcttatctctgactgtggaaagcaagcgtatctgttaccacagtgttatgcatagaaacgagctcttggagaagtgaatgctgagcttcttgacaccca

SEQ ID NO: 31803 - DNA, 365 bp, Glycine max
  Clone ID: LIB3138-006-Q1-N1-G12
tcaaactccaacaaactacaactaccacttccaaatctccaatggaccaaccaccaacaatcaacatgtctgactccatgcgcaagggcctcggcgagcaagcctccgagaagatcacccccgactcccagaagtccaccaccgagaaggccagcgagagcctcaccggagctggtgaccgcattgccggcgccgtccagcctgagggccagaagtccactggacagaagctcggtgacgcgacccgctccggcggcgacgagggccagggcgtcatgaagcaagcccaggatgctctcggcaacgctggccagagcatctccgacaccctctccggcgccactggccagaagaagaaagcactc

SEQ ID NO: 31804 - DNA, 391 bp, Glycine max
  Clone ID: LIB3138-006-Q1-N1-G2
atttgcaatagcatttttaatgagatgctcattagatatagctatgaaaaattactgcgccaggctaaagctccaagtatgtttttacaatccttcaaaaattttgtttctttgtgtgtgtatggtgatgataacttaattagtgttcatgaatatgtcaagccttactttagtggttctaaattgaaaagctttctagctagtcataacatcaccattactgatggtattgacaaaactagtgcaactttgcaatttagaaagttagcagattgtgattttctcaagagaaactttaagcagatgtctaatgttttgtgggtggctcctgaggacaaggcgagtttatggtcacaacttcattatgtttcgtgtaataatcttgaaatgc

SEQ ID NO: 31805 - DNA, 390 bp, Glycine max
  Clone ID: LIB3138-006-Q1-N1-G3
ggaaatgcaagaagcttatcttgtcaatctcgtaaatgtgttacgagaattgtatttgcacagtccagaggaagctcgccaattgagaaggaaagctctctctcgtattgaatggctgcaaaaagctgatgtgcctaccatagcacagattgaagagttccattcgatgcagaggatgatgaatgctcctgattcaaatgataatattgatttactgttgagcattgatttgttgggtttacaaggagcaggtaaagcttttccaaacaaaattgtttttgatgataagcttgtgttggctaacacacaagaattctttgatggaaattttccagtggattcttggttaccaatttttgtgaattgtctttatcctgtaagtcaattacc

SEQ ID NO: 31806 - DNA, 393 bp, Glycine max
  unsure at all n locations
  Clone ID: LIB3138-006-Q1-N1-G5
gcgcgttgacaacacaagagaagatacgaagctctctcaatcttgtgttctgattaacactaacaaataacaatgacggatgctgctgaagacgctacacgccgccgtaatgcggtggccgagtaccgcaagaagcttcttcaacacaaggaattggagtccagagtacgatccgtccgaaagagtntgcgtgcttaaaaaaagagttcaacaaaacttgagatgatctgaagtctcttcaaagcgtaagacagatcattggcgaagttcttaggcctctcgacaatgaacgcttgattgttaaagcaagcaacggacctaggtatgtggttggctgccgcagtaaagtagataaagaaaaactgactgctggtacgagagtcgttcttgata

SEQ ID NO: 31807 - DNA, 279 bp, Glycine max
  Clone ID: LIB3138-006-Q1-N1-G6
tgacgaagccattatttttctgcatacgcttctgaatcaaactgagggcatgattaacactaggaggatgacaatatacggatgctgcatattactctacactccatcgtaatgcgggtgcctattacccaagaaagtttcttgaacacagggaatacaagttcagaaatctcacccagctccacagaatttgccaaccttatagagaacaattcacaaaactaaaaaagatctgacctttcttaaactcgtttgacatatcataagggaatttattaa

SEQ ID NO: 31808 - DNA, 326 bp, Glycine max
  Clone ID: LIB3138-006-Q1-N1-G7
gattcccttgtccaaggatcaactaccagatggacatctatcgcttttttattgcatttatatcttattattttgtgcatcgtgaatatgtgatttttaagatactcctctcacaattgcagtgttcagttttttgtttttggattaatatgtaacattttgacttcatattgatgctactattgcttacctacctgtgcatggcaataccctctattcatgctcttatgtgcatcctattgcaggctaaaagacgacgtggtcgaaccccaacaccagggaagtatctagggctgagaactattcgtgctcaacggcgttcttca

SEQ ID NO: 31809 - DNA, 383 bp, Glycine max
  Clone ID: LIB3138-006-Q1-N1-G8
ggcgccgccatttgcttcttctgcttcctcttcctctctgtgggtctctttgcaacaagccaccctcatcccccacaatcacccatttcggcaacaccaaaccatcgaagagtttctcggttcgtgcctcctcctctagggattctgttgtgactttgcttgattacggtgcgggcaatgttcggagtgtcaggaatgcaatcagattcctcgggtttgagatcaaagatgtgcaaactccgcaagatattctgaatgcaagtaggttagtttttcctggggttggagcatttgcggctgccatggaggtgttaagccaaacttggaatggatgaagcactatgttcatatattgacaaggatcgtccatttttggcatttgt

SEQ ID NO: 31810 - DNA, 340 bp, Glycine max
  Clone ID: LIB3138-006-Q1-N1-G9
ctgctctgctagggtttcatcttcttccatcacctccgtcgcagtgaaaccaggcttcatctgaatccgattccccttcgccccttctcctccttcactttcaccttctccgaatcctctaccaattattatgatgaactccatcttcgtctctcacaaccttcgcgtctttggtcccggcttgaatcccttcgcaccttattgcatcgccaatcacaccctttcctctcgctaaataccaattcccctctccgattttcggggttactttacttggtcgttttgcttttttctttgtggtcgtttttgctttaattgctgagaaagatagaaacatgct

SEQ ID NO: 31811 - DNA, 391 bp, Glycine max
  Clone ID: LIB3138-006-Q1-N1-H10
tgaaattttcacaagaggaatttcttacagcttggtcaactcaggtgcgtcctgcaacaactctgttggctgatgggtgtccatatttgtatgcaatggtgcatgatagttcagtgtctacaataccaggtgattttgtcattggtgtcaagttgacaaccataaacaatatgtgtgcatatgggctcaatcctggtatttcaggttctcgtcttttgggcaccattcctcagtccatttcacagcaaactgtttggaatcaaatggcaacagtgagaacaccattgaattttgattctagcaagcagagcttttgtcagttttctattgaccttctcggtggaagaatcttagtggacaaaactggagattggatcacacttatacaaaa

SEQ ID NO: 31812 - DNA, 358 bp, Glycine max
  Clone ID: LIB3138-006-Q1-N1-H12
ctagtttcttacatgcctctactatactgcttcaccttctgctctagaaaattcagtgctgaaacatggcttcggctactctctctgtagccaaaccagcccttcaggcaaatgggaaaggcttctctgaattctctggcctccgaagctcatcaggcttccttcccttttctagaaaatcttcagaggatttccattctgtcattgccttccagacctatgcagttggaagcagtggaggatacaagaagggtgtgacagaagcaaaactgaaagttgccataaacgggtttggaaggattggaaggaacttcttgaggtgctggcacggtcgcaaagacttccctcttgatgtcat

SEQ ID NO: 31813 - DNA, 383 bp, Glycine max
  Clone ID: LIB3138-006-Q1-N1-H3
tggaattgtgccactaaaattctattcatctatggctgcctcatcttatgctatgcaatcaatccttgcaaaccctatgatccgcatttccagcgggtctagggagaaccattttggtgttcctgcttatcacatgagaaggaatgttggcctgagagttaggtccatggctgaggaagagcaaccaagtcagcctgcgaccccagttacaccaccaccagcagaacccaaaccacagccagtctctactccttcaccaaaggtgagcaccaagttttctgatgtgttggcgttcagtgggccagcacctgagaggatcaatggaaggttggccatgattgggtttgtgggtgcaatggcagtggaagtagccaaagggcaag

SEQ ID NO: 31814 - DNA, 365 bp, Glycine max
  Clone ID: LIB3138-006-Q1-N1-H4
ctacattaaatgtacattctctttcttcatagcatttggaaatttggctgatgacaccatcaattttgaggcttttccccacaagctggtgcagtttggagagattcaggaaaaagttgtgttgaaattttcacaagaggaatttcttacagcttggtcaactcaggtgcgtcccgcaacgactctgttggctgatgggtgcccatatttgtatgctatggtgcatgatagttcagtgtctacaataccaggtgattttgtcattggtgttaacgtgacaaccataaacaatatgtgtgcatatgggctcaatcctggtatttcaagttctcgtcttttgggcaccattcctcagtccatttcac

SEQ ID NO: 31815 - DNA, 329 bp, Glycine max
  Clone ID: LIB3138-006-Q1-N1-H5
gtttgtgaaattctattcaaagattttgagaatgtctagctgtgggtgtggaagcagctgcaactgtggcagcaactgcagttgcaacaagtactcttttgactacgttgagaagatcacaaatgagactctagttttgggtgttgggccggtgaaggcccaattcgagggtgctgaaatgggtgttgcagctgagaacggtggctgcaactgtggatcaaactgcacttgcgacccatgcagctgcaagtgagatcaacatgcataaccttcaagcagagatagctgtaatacatgtatcaataaataataagtatgtgttgtgtttg

SEQ ID NO: 31816 - DNA, 388 bp, Glycine max
  Clone ID: LIB3138-006-Q1-N1-H7
gaaattttggtggcagaccctgtgagaaatattaaagacgggcgactttcaaaatataccatggagccacaattagaatcccctttgggaagaaaagattctacaggaagtgccgattcttctaagccttcaaagcatgtcattgagacagctgcgccctttgaatctgtcaaagatgctgtgtccaagtttggaggaagaattgattggaaatctcgtcgaacccagagtctggtggaggagagaagcaagctcgtagaagactttagaaaggaagaaactgcagaggaattggaaaacactaagaagcttatagaagaactcaaaactagcttagaaaagatagaaaaagatgagcttcaagcaaaagaagaggcttgacgtgtga

SEQ ID NO: 31817 - DNA, 153 bp, Glycine max
  Clone ID: LIB3138-006-Q1-N1-H8
gaaaatttcctttctcactgttcactctgtttcctcaaacgtggaattttcaaaaccagaggtgtgcagccttcatttatttactaattggtgttgagggcataacatctttctggatccttaagatttttagccaacttttgtattttttat

SEQ ID NO: 31818 - DNA, 293 bp, Glycine max
  Clone ID: LIB3138-006-Q1-N1-H9
agcctctgcgctttctcttcaatgccggttccctctactacggggcgtttttgcctgatgaaggtgcttacgacaaggagcgacccggagttacatggccgaagcagttgaatgctccacttgaggtcgtggatcctgagattgctgatattattgagcttgagaaagctaggcaatggaaggggctagaattgataccgtcagagaatttcacctttgtgtctgtgatgcaagcggttggatcggttatgaccaacaaaatacagtgagggggtacccttggtgcaagatat

SEQ ID NO: 31819 - DNA, 104 bp, Glycine max
  Clone ID: LIB3138-007-Q1-N1-A1
atgcgaacaaatgccaattcatttgtattctgcgaacaaatgtgagttgtattttaggggctttgaatctcaacaacgattttaattcaatatagttttctttc

SEQ ID NO: 31820 - DNA, 330 bp, Glycine max
  Clone ID: LIB3138-007-Q1-N1-A10
agctgattgatgtgatacacgagtacatgctaagcggggcaccacctgttcctcaacctagtgccacataggcttctgaagagaaccccataaatgaagaggccgtgacacaggtcaattcaccaaatcccgagtccttacctgcaggagagggtattacagatcaagaagttgatggaattgtggaagaacaagaagtcattcttgcaaaccctgcatgagttgaagttttaagggaggttcaaccaaagtgtttaaagggatgaagtgcttcaaaaggccagacacaaggggttcagaaattcttaatccagaagacataagggtttc

SEQ ID NO: 31821 - DNA, 373 bp, Glycine max
  Clone ID: LIB3138-007-Q1-N1-A11
atagattggatccaaccaaactgcactttttagttatggctaagaaaatgtgcataatccggcgaattacttctgaaaattacttctgaattaatgaaattttttcaataatttaagaaaaaatatttaagaactatagcatttcgcgatttattggtaatccactttgattctttattaaccaataattttggactattaccatggtttaagtgaatagtttggagtctagacgcagtgtaatactctttttaccactatgttaatacagaaatgaaatgggttcgataaaaatattagattttttttttcgatttagaaacacttattgtcgattaaaatggctttgaatccttttttacttaccggcaag

SEQ ID NO: 31822 - DNA, 304 bp, Glycine max
  Clone ID: LIB3138-007-Q1-N1-A12
gcagttggtgcaatagcacctgaaattctaggcaagggtggtctgatccctcaggagacagcactcccatggttcagaaccggtgtgttcccacctgcaggaacctacaactactgggcagactcctacacactgttcgtgtttgagatggcactgatgggatttgcagagcacagaagattccaagactgggccaaaccaggctctattggcaaacaatactttctaggactagataagggtcttggagttttgtggagccaccttacccaagaggtccctttcttcaaccccctttggcttt

SEQ ID NO: 31823 - DNA, 342 bp, Glycine max
  Clone ID: LIB3138-007-Q1-N1-A4
cgaagagacaaagaaaaggcacacacaccagccgtggaaatgggtgaatgattgagaaaccaaatcaaaccacgccagcttcaaaacgctgcgtttcactcccgtcctcgcgtcgctcccaaaccctaatcctatccgcggcattcctctggtcgccgtcgacaccgtcccggtcgcgccaaccgccgcaacccgaagaaaccgaatcgatctgagagaaagtgcgatctcggaggtgggagccaaacgaaacgatgccgtctcacgcggatctggagcgacagatcgagcagctgatggactgcaagcctctgtcggagtcggaggtgaaagcgctgtgcg

SEQ ID NO: 31824 - DNA, 194 bp, Glycine max
  Clone ID: LIB3138-007-Q1-N1-A5
ctcaatgtagttattcctttctattcttaaaaatcgatgaacgcaatggagttattcctttctattcttaaaaatagaaaggaataactacattgagttcattgatatctagggcaaatcgatgaactcaatgtagttattcctttctattcttaacaatccttcaagtcataaaattattttttattccaaac

SEQ ID NO: 31825 - DNA, 259 bp, Glycine max
  Clone ID: LIB3138-007-Q1-N1-A7
gccgatcgaaacataaataaaaccttgctcttttttgacgcggtagctcattttcttctgcgggctcttctctctgttcctcactcactcgcatttattcaccatgactaagcaacaagctaattggtctccatacgataacaacggaggatcatgtgttgcaattgctggagcagattactgcgtcatcgccgcggatacgaggatgtccaccggttacaaaatccctcactcgcgattactccaaaatctccccact

SEQ ID NO: 31826 - DNA, 386 bp, Glycine max
  Clone ID: LIB3138-007-Q1-N1-A8
caattttgaggcttttccccacaagctggtgcagtggggagagattcatgaaaaagttgtattgaaattttcacaagaggaatttcttacagcttggtcaactcaggtgcgtcctgcaacaactctgttggctgatgggtgtccatatttgtatgcaatggtgcatgatagttcagtgtctacaataccaggtgattttgtcattggtgtcaagttgacaaccataaacaatatgtgtgcatatgggctcaatcctggtatttcaggttctcgtcttttgggcaccattcctcagtccatttcacaacaaacttgttggaatcaaatggcaacagtgagaacaccattgaattttgattctagcaagcagagcttttgtcagtttt

SEQ ID NO: 31827 - DNA, 372 bp, Glycine max
  Clone ID: LIB3138-007-Q1-N1-A9
aaagccttagcctttcctacaactccaaacacaaaggcatcagcatccatggctgcctccgtctccactgtcggagctgtcaacagagctcttttgaacctgaatggttctggagctggagcttcagctcccagttcagccttctttgggaccagcttgaagaaggttattgcctcaagggtccccaacagcaaggtttccggtggaagcttcaagattgttgctgtagaagagaagaaagagattgaagagacccagcagaccgaacaggacagatggaagggtcttgcctatgatatctcagacgaccaacaagacatcacaagaggaaaggggttgggttgactcccttttccaagctccacaggatgc

SEQ ID NO: 31828 - DNA, 138 bp, Glycine max
  Clone ID: LIB3138-007-Q1-N1-B10
tttggtctctctttagaaccaaacaactttaatacagggcaattgacctttcaaggggtgcatacagatcacgaaaacaaaaatcctttgtgtaactatataaaccactggacaaaaaaataggttgtgcttaaaaat

SEQ ID NO: 31829 - DNA, 239 bp, Glycine max
  Clone ID: LIB3138-007-Q1-N1-B11
ctcgattccttctctcatcgtattaaatgaatgattgaaatggtggccacagatggtggtgcggacaatacatgaatatcattggcctgtgctatgaatagttcttttaaggggcgcgccagttctgatatttacaccatctagctctcaagactgtgatattgtggaatcctgcttgcacaaaagcaaatgactatgtcatttaaatccaaaccccgtgttttagatccatggagttt

SEQ ID NO: 31830 - DNA, 370 bp, Glycine max
  Clone ID: LIB3138-007-Q1-N1-B12
caaaagatggacctccaacctttgagcagcccaagatgactgtggagaagctcttgacggttggtaacatgcttgtccaagaacaagagaatgtcaagagagtccaattggctgacaagtacttgaacgaggctgcacttggaaatgctaacgaggatgctattaacaggggaactttcttccaatcttgaattggaggcaaagcaaacttggcaagtaaatatttctgttcctgaaggttgtgctgatccaagtgctataagttgtgatgggacttgcgtggtacattcttagaattcttaattgttttaggggccaagagaagaagcccaagttgagaatgaatttactatattttttatattgggac

SEQ ID NO: 31831 - DNA, 377 bp, Glycine max
  Clone ID: LIB3138-007-Q1-N1-B2
acaaaattctccaattagtaacttgttgagagttgctgcttggaagaaaggctgtttaatggtcaagattgtgatgtctgggaatgcagcagtcaaaaggagtgattgggcctcattggtacaagtgtttttaacaaacagcaacagtacagagcattttgatgcatgtaagtggacaaaatcagaaccacattcctgggaattgatcttcccaatagaggtatgtggtcctaataatggttttgaaatgtggagttcttagtgggcaaatcaaactttatggcatttgagtttccttattgacaatcccaaacagtctacaatttttgatattctcttgggaatcttttaagattttgaaaattgcttggtaatac

SEQ ID NO: 31832 - DNA, 387 bp, Glycine max
  Clone ID: LIB3138-007-Q1-N1-B4
gaaattcatttggtgggaaaatccaagaagagggtggaatttggagccagggaagatggggtatttcaatgcaccacgaagaaaccatctctttgttccggggccggttaacatcccggaccagatcattcgggccatgaacagaaacaatgaggactaccgttctccagcaattccagctatgaccaaaacactgcttgaggatgtcaagaagattttcaagaccataactggaatcccatttcttaatcctacaactggtactggtgcttgggagagtgttcttacaaacacactgtcttctggggatcgaaatggatcttttctgattgggcaattcagcttgttttggattgattagtaacatcgcctgaaattcaatgtatt

SEQ ID NO: 31833 - DNA, 395 bp, Glycine max
  Clone ID: LIB3138-007-Q1-N1-B5
ccgtaagcacctttgcgtccggggaaacgccggtggcatgcatcaccacaggatcctgttcgacaagtaccatccgggcttctttggtaaggtgggaatgaggtactttcataagcttcgcaataaattctactcccccatcgtcaacgtcgaaaagctatggtctctcataccccaagacgcgaaggaaaaagccctaaaatcgaaggacactggccctctaatcgacgtcacacagcacgggtacttcaaggtcctcggaaaaagggttctgccccaaaatcagcctttttgtgttaaagcccagcttattttcaagatcgccgagaagaagattaaagaagccggtggcgctgttcttctcaccgcttatggttaaaaactgttttttaatt

SEQ ID NO: 31834 - DNA, 339 bp, Glycine max
  Clone ID: LIB3138-007-Q1-N1-B6
tgaagatcgaggaattggacgatggagagtgtatatggacgaggaagagaagtgtgagaggcagattgtgagcgtttattcgaaaagagcgttggttggagctggtgctcggatcctgttctaccccacactcttgtataatgtgcttcgtaacaagattgaagctgagttcaggtggtgggatcaaattgacgagtttttgttactgggcgctgtttcgttccccaaagacgttcctcacttgaagaagcttggtgtgggtggtgtgattactcttaatgagccctacgaaaccttggtgccatcgttgttgtatcatgctcacgggattgatcattt

SEQ ID NO: 31835 - DNA, 329 bp, Glycine max
  Clone ID: LIB3138-007-Q1-N1-B7
ctcgagccgttctcatcctcctctgtctctctctctgcaccagggccatggatccttacaagctccggccatccagcgccttcaattctcccttctggactacaaattctggtgctcctgtttggaacaacaactcctctttaaccgttggagctagaggtccaattctgcttgaggattatcatcttgtggagaagcttgcaaactttgacagggaacgtatcccagaacgtgttgtccatgccaggggagctagtgcaaagggtttctttgaggtcacacatgacattttttacctgacatgtgcagattttcttctagcccctgga

SEQ ID NO: 31836 - DNA, 281 bp, Glycine max
  Clone ID: LIB3138-007-Q1-N1-B9
atgataagcttgtgttggctaacgagacaggaattctttgatggaaaggtggcagtggattcttggttaccaatttttgtgaattgtctttatcctgtaagtcaattaccttcagaagctgtcgttgtaaatgttacatgtggtagtggacgtggtggtttacccaccactgcttggattagttctgcagttaacaatcgttctttagatatcaacaaaaggatttgtacagcacttgtgaaaggtaagaaaaatgtttttcttactatagttgatccttt

SEQ ID NO: 31837 - DNA, 305 bp, Glycine max
  Clone ID: LIB3138-007-Q1-N1-C3
ctgggatttgctgtggagttgttggagaagccgccgagactggtgctcctatcgaacccacctcacgcccttccgcacgccggagtttggaccttttgcccttgaaatacatagctgctgacgtgtcagtcccgccgctggagaacagccggaagcgccagaggctggataggcgcgcttctccggcaagggagtgcgataacgcggttcatagttccaaatcgaaggtagttgaggttgttccgaattattcttcgaagagtccaacgttggactccacaagtccaacagttgtcgaggagtat

SEQ ID NO: 31838 - DNA, 140 bp, Glycine max
  Clone ID: LIB3138-007-Q1-N1-C4
cgaatagattattctaagtctttgggaatagtgctgcaatggcttcaagtcaggaggaggtgacccttttgggagctactggaagcccatttgtgtgcagggttcatattgccctcaagttgaaagggagtttcaaatac

SEQ ID NO: 31839 - DNA, 267 bp, Glycine max
  Clone ID: LIB3138-007-Q1-N1-C6
ggggtacctccctgagaatttcgggtccacgccggcccggtggctcacgtttgcccacaacagcgctgtcgggctcgctccctaagagcgtgggctacgcgccgaacctcaccgaggttctcttcttgaagaaccagttcgaagggtgtctgcccttcgaaatcggttacctcaagaaggccgtagtgtttgatataagtgaaaatctcttgaccggtcccatcccgctctccttcggatgcctgaagaaaattcaatttctcaatt

SEQ ID NO: 31840 - DNA, 360 bp, Glycine max
  unsure at all n locations
  Clone ID: LIB3138-007-Q1-N1-C7
tggaaatgcattatagcttatcttgtcaatctcgtaggtgtgtggcgagaattgtatttgcacagtccagaggaagctcgccaattgagaaggaaagctctctctcgtattgaatggctgcaaaaagctgatgtgcctaccatagcacagattgaagagttccattcgatgcagaggatgatgaatgctcctgattcaaatgataatattgatttactgttgagcattgatttgttgggtttacaaggagcaggttaagcttttccaaacaaaattgtntttgatgattagcttgtgttggctaacacacaagaattctttgatggaaattttccagtggattctttgttaccaattttt

SEQ ID NO: 31841 - DNA, 405 bp, Glycine max
  Clone ID: LIB3138-007-Q1-N1-C8
gtttgtttcagatctaaatgagaagacaagggcaatgttaaagggaattgaagaagatgcagattcctttgctaaacgtgcagagatgtattacaagaagcgaccagaacttgtgagcatggttgaggatttctacagggcacaccgctccctagctgagcgctatgatcaagtcaagcctgatactactggaattggacacctcattactggggggtcacctttcgcttcagcaaagtatcagttggagaagttgatgactttttcagataacggatatgatacctattctgagcattgtgatgtgtacgagtctgaagaatctgaagttgatgatcctgaacaagaggaggaggaagaagaagggaccaagtttcttgataaaagcacaaaaaaggagcaagt

SEQ ID NO: 31842 - DNA, 299 bp, Glycine max
  Clone ID: LIB3138-007-Q1-N1-C9
agactatctttatataataatataaataagaataaaggaatggaaaaaaaaaaaggaatctatataaatataaaaataatatatataaggtacaaatagtaaatcgaggtacccattttatgataaactttccttccatttttgttcctctagtaggcctagtatttccggcaattgcaatggcttctttatttctttatgttcaaaaaaacaagattttttagatacagaaaacaaagtaaaaatttggggttttttattccccaattataatacttaaatttaaaaaggagaagtaa

SEQ ID NO: 31843 - DNA, 142 bp, Glycine max
  unsure at all n locations
  Clone ID: LIB3138-007-Q1-N1-D2
ctcgagccgntttataattttttaaaaaacaataaaaaaaaaagatagggtatatattaataaaatataataaaaaaaaaaaaaaaataaaataaaaaaaaaaaaaataaattttattataaataaaatataataaattaaa

SEQ ID NO: 31844 - DNA, 409 bp, Glycine max
  Clone ID: LIB3138-007-Q1-N1-D3
cggctcgagggccaggttgaaggcggtttgaaaattgcgaagggctctctctctctctctgcctccactcaatttagccaacttttcagatattttcactgctcaacttaagactaagcatgagcagcagcagcagcagcagcagattgtttgagaatgggtgaagtgccggctgtgatgcaggcgacgcagggggaacagagcaacaatgcctccgctgttcattgggagcgctttctgcctcggatggtgcttcgggtcttgcttgtcgaagctgatgattctactcgacagatcattgctgcacttctccgaaaatgcggttacaagatgttgcattttgtgatggcttaaaagcatgggagacattgaagaacaaaacatttgacttagaacttatattaacaag

SEQ ID NO: 31845 - DNA, 347 bp, Glycine max
  Clone ID: LIB3138-007-Q1-N1-D7
ctcttcttcaattcatatcatatcaattagatttagagctagggataaaattgttttcacataccatggacaacaacaatgacttttggaaattcagtgaccagttgaggcttgaatctggtttggccaatctgtctctgaatgattattccatttggagcaacagctacagctccaagaggcctgatcagaggaggaactttgatgtcaagggcagtgatttcaacaacaacaacaactcatcaaaggcttttgatgatgatttcaatgatgggtggaagatcaccaatttcaatggaccccttttttttatggcttacaacaacaacaacaacacttttgaagtt

SEQ ID NO: 31846 - DNA, 333 bp, Glycine max
  Clone ID: LIB3138-007-Q1-N1-D8
caccattactgatggtattgacaaaactagtgcaacggtgcaatttataaagttggcagattgtgattttctcaagagaaactttaagcagatgtctaatgttttgtgggtggctcctgaggacaaggcgagtttatggtcacaacttcattatgtttcgtgtaataatctggaaatgcaagaagcttatcttgtcaatctcgtaaatgtgttacgagaattgtatttgcacagttcagaggaagctcgccaatagagaaagaaagctctctcttgtattgaatggctgcaaaaaagctgttgtgcctatcatatcacagattgaagagtttc

SEQ ID NO: 31847 - DNA, 351 bp, Glycine max
  Clone ID: LIB3138-007-Q1-N1-D9
aagtgtacaaaattagaaccacattcctgggaattgagcttgggaatataggtatgtgggcctaataatggttttgaaatgtggagttctgagtgggcaaatcaaacttcatggcatttgagtttccttattgacaatcccaaacagtctacagtttttgatattctcttgggaattcttcaagattttgaaattgctggtaatactcttatgccagctttttctgttccacaggctactgccagatcttctgaaaatgcggaatcctttgcatgatctggaatttgtgttttctttcgcttgttcgcttgtttaaatcaattaaggaaaattatgcattacccttttgtt

SEQ ID NO: 31848 - DNA, 303 bp, Glycine max
  Clone ID: LIB3138-007-Q1-N1-E1
gaagaagatggctttaggttttcctgctcttccgatgacatacgtgggtcacgttctggcagttgttgccagcgtcttggtcgtggtctgggttcgcaatttcaggggtggcttggcttgggattctgataacaagtccctcatcttcaacattcatccaattcttattgttattggcttactagttcatgggggtgaagctattataagttacaaagctttttccctaagaaggaagtgaagaaattgatcacccttgtttccatgccatgcattaatacttggaatagttggaattatact

SEQ ID NO: 31849 - DNA, 284 bp, Glycine max
  Clone ID: LIB3138-007-Q1-N1-E10
gccattcattttgaacaacaaagagtgattaatcaagtccgacaacgggttttacaacaagccttacagggagctctaggaactctaaagagttgcttgaacaacgagttacatttacgtactgtcagtgctaatattggcatgtttgggacgatgaaagaaaaaataactgattagtctttctattataaaatagagtataggcattatttttttcttctaaaaaaataaaattaagaaattttcatggtaaccattcgtgcagatgaaattagtaaaattat

SEQ ID NO: 31850 - DNA, 297 bp, Glycine max
  Clone ID: LIB3138-007-Q1-N1-E11
cttgaatgttttggaggaatctttctcggcaaagatgattacgatagttacgtgcaagagattgtggacagaggtcatggacctaaaacttatgatatccatgtagaagatgttagggatctgatatttgcatttgatattgatgatccagtttctctatacgaagatcatcaaaatgtacggttttggcaatgcgaaggattgctgtatttactacccagagacctttagaaattgtgtttggaacgcatgatcaatggtgtgcttatatgggctctgcataaaaggttttttttt

SEQ ID NO: 31851 - DNA, 405 bp, Glycine max
  Clone ID: LIB3138-007-Q1-N1-E12
gctcctgattcaaatgataatattgatttactgttgggcattgatttgttgggtttacaaggagcacgttaagcttttccaaacaaaattgtttttgatgataagcttgtgttggctaacacacaagaattctttgatggaaattttccagtggattcttggttaccaatttttgagaattgtctttatcctgtaagtcaattaccttcagaagctgtcgttgtaaatgttacatgtggtagtggacgtggtggtttacccaccactgcttggaataatttctgcaagtaacaatcgcttcctcagatatttaacaataaggaattcgcactttcacttttcgaaaaggtaatgaaaattgttttttttttacctagagtttgattcttttttcaattaacttta

SEQ ID NO: 31852 - DNA, 260 bp, Glycine max
  unsure at all n locations
  Clone ID: LIB3138-007-Q1-N1-E2
gtttccgagtttttcatgtcaataaaataaaaaggaaaagctggagaggagaaagaagcttcaatgcttttgttgactcanagcattcaaatgttccttcgatcgtagaaaacactctgcaatggcggttactgttcctgtccccagccattcctcaactctctgctttttttctttctctaactcacaagtgttgttgtttcggaggagaggttattaaggcggcatcatggggagtagggctaggcaggggaggagat

SEQ ID NO: 31853 - DNA, 342 bp, Glycine max
  Clone ID: LIB3138-007-Q1-N1-E3
attgagacaaagaatagatcctcaatacaatgaggttcaggctcagatggaaacaaatttgtttaaattgtctcttgatgatgttgaaactcctaaaggttccatgttggatctgaaaatttctcaatctaaaattgcacttcccaagaacacagttggaggaaccattctgcgtagtgatctattggcaaattttttgacagagggcaattttagagcaagtgttgatttgcagcgcactcattcgtttagaggaatgattaaaatggtggccacagttggtattcctgagaatacaggtatatcattggcctgtgctatgaatagttcttttagggggcg

SEQ ID NO: 31854 - DNA, 309 bp, Glycine max
  Clone ID: LIB3138-007-Q1-N1-E4
agacaaggagggtatcccaccagaccaacagaggctcatttggggtggcaaacagcttgaagatggccgaaccttggctgattacaacatccaaaaagaatctaccctccacttggtgctccgtctgcgcggtggtatgcaaatctttgtgaagacccttactgggaagaccattactttggaggtagagagctcagacacaattgacaatgtgaaggcaaagatccaagacaaggagggtattccttcagaccatcaaaggttgatttttgctggaaagcagcttgaagatggacgtacactggcaga

SEQ ID NO: 31855 - DNA, 251 bp, Glycine max
  Clone ID: LIB3138-007-Q1-N1-E5
aatgaggttcaggctcagatggaaacaaatttgtttaaattggctcttgatgatgttgaaactcctaaaggttccatgttggatctgaaaatttctcaatctaaaattgcacttcccaagaacacagttggaggaaccattctgcgtagtgatctattggcaaattttttgacagagggcaattttagagcaagtgttgatttgcagcgcactcatcgtattagaggaatgattaaaatggggggcccagt

SEQ ID NO: 31856 - DNA, 303 bp, Glycine max
  Clone ID: LIB3138-007-Q1-N1-E6
atgctctcaattttatgatgagaaatcttgaggtgattcgaggtgcatgtttcacattaattggggggtgggggaaaaattaggattaataaatgtcatctagcttacatggcatacatgtttactgttacctaagttttggcagcatcctgatttaatttcattaggatgaatattgagaatgtcatattgttccctgttatagcaaactatctatctttttgcattcttttaagaaaacttttatcatgattggtttgtgaccattgtttaagatgtaatttgatttgattcattttgatt

SEQ ID NO: 31857 - DNA, 270 bp, Glycine max
  Clone ID: LIB3138-007-Q1-N1-E7
gccaaatagtccttagaggaaagaggaggttccgccggtggagaaggtataggaggagccggccccggatatgaatgaaatcaaggcactgccaccaccagagaattatatcccacctcctccgcctgagccagagcctaagccgcagccacaggttacggaggatttggtgaatctgagagacgatgcagttactgcagatgatcagggaaataaattggctttggcactctttgctggtgcacctgctaataatgtaaatggatcatg

SEQ ID NO: 31858 - DNA, 228 bp, Glycine max
  Clone ID: LIB3138-007-Q1-N1-E8
gaaagaagaacttttgccagcattggatgaattgctgagagatgaggacgatgcagctgtgtctacaccttatactgctgcagttttggagtaccgggttgttattcatgatccattggaagcatctgtcgacgaaaagaagtggcataatgtaaatggtcacgccattgtggatgctcaacatccagtcagggcaaatgtggctgtgaagaaagagctttatacttc

SEQ ID NO: 31859 - DNA, 287 bp, Glycine max
  Clone ID: LIB3138-007-Q1-N1-E9
gtagcagggacagatacaactgcagccacatcagtttgggctgtgactgccctcataaaaaaccctagagtaatgaagaaagttcaagaagaaattagaaatgtgggaggcacaaaagatttcttagatgaagatgatgttcaaaaactttcctatttcaaggcaatgataaaggagacatttagattgtacccaccagccacactacttgtaccaagagaatcaaatgaagagtgcattatacatggctatcgaattccagctaagacaatattatacgtgaatgc

SEQ ID NO: 31860 - DNA, 375 bp, Glycine max
  Clone ID: LIB3138-007-Q1-N1-F1
ctaagatccaggacaaggagggtatccccccagaccagcagaggctgagcttcgccggcaagcagctcgaggacggacgtacccttgctgactacaacatccagaaggagtcaactctccacttggtgttgcgtcttcgtgttggtatgcagatcttcgtcaagacccttacgggtaagactattaccctcgaggtggagagctccgacaccattgacaatgtgaaggcgaagatccaggacaaggaaggaatcccaccggaccagcagaggcttatttttgctggcaaacagctagaggatggaaagacccttgctgactacaacatccaaaaagagtcaactctgcacttggtgttgcgtcttcgtggggggt

SEQ ID NO: 31861 - DNA, 399 bp, Glycine max
  Clone ID: LIB3138-007-Q1-N1-F10
gtctttatcctgtaagtcaattaccttcagaagctggcgttgtaaatgttacatgtggtagtggacgtggtggtttacccaccactgcttggattagttctgcagttaacaatcgctcctcagatatcaacaaaaagattcgcacagcacttgggaaaggtaagaaaattgtttttcttactagagttgatcctttttcagtagctttactggctgttctttttggcgttaagaatgaaattctgagttctaacgccactaatcctatgctgacgcgacttcttgagaactgtaagagtcttaaatatctggttgatgagtgttcttttgcatttgtgaactagtatgtagtattttattcacttaaataaagcgcattactttttgcaatgagtgtgt

SEQ ID NO: 31862 - DNA, 147 bp, Glycine max
  Clone ID: LIB3138-007-Q1-N1-F11
cttcattttttttttcccccacaccccatgaaatatgggccaatgttactcttcagtgtgggggtcactgttccaattatccccttatccaatctcgcatcaacgatatgggctctctatttttagtcttttgctgtattcaaactt

SEQ ID NO: 31863 - DNA, 280 bp, Glycine max
  unsure at all n locations
  Clone ID: LIB3138-007-Q1-N1-F2
ttctctctctaccattgccatggatccctacaagcaccggccatccagcgccttcaattctcccttctggactacaaattctggtgctcctatttggaacaacaactcctctntaaccgttggagctagaggtccaattctgctggaggattatcatcttgtggagaagcttgcanattttgatagggaacgtatcccagaacgtgttgtccatgccaggggcgcttgtgcaaaggggtttctttgaggtcacccatgacnattctcacctgacatgtgc

SEQ ID NO: 31864 - DNA, 423 bp, Glycine max
  Clone ID: LIB3138-007-Q1-N1-F3
gttctgaatattggtgcgtttgatttgatggtgttgcagctggtagtccttgggatagaaatgggatcgcatggggtacgaaaatttcatgctgtgcaagaagccaaaaggtgtggcggatgtagatggagatgcaagtgggatttcgcgcaccaacaaggggattgggagctggaaggcttggttcaacaaaatcctcaacctcaagaattctacccaactgattcgattaatcgaataaaaaaactcttggggaattgaacaatgatgccttttggggtgaaatgaatgccccttattttataaggaatatggatttttcttgggatgggttttttttttcggaagtccccaaaaacccctttttttggaaattttttttaaaatttttagttttttaggttttttgatttttttgggaaa

SEQ ID NO: 31865 - DNA, 308 bp, Glycine max
  unsure at all n locations
  Clone ID: LIB3138-007-Q1-N1-F4
tgcaattgaagttaaaagccttagccttccctacaactccaaggacaaagacatcatcatccatggctgcctccgtctccactgtcggagctgtcaacagagctcttttgaacctgaatggttctggagctggagcttcagctcccagttcagccttctttgggaccagcttgaagaaggttattgcctcaagggtccccaacagcaaggtttccggtggaagcttcaagattgttgctgttgaaagagaagaaagagattggagagacccagcataccgacaaggacagatggaanggtcttgccta

SEQ ID NO: 31866 - DNA, 372 bp, Glycine max
  Clone ID: LIB3138-007-Q1-N1-F5
cgaaaacagtggcttcaccagggaggggtattttggccatgggtgagtccaatgctacctgtgggaagcgtttggcttcaattgggctagagaacactgaagctaaccgccaggcataccgtaccctccttgtgacagttccaggacttggtcagtacatctctggtgccattctctttgaggaaactctctaccaatccacaactgatggcaggaagattgtcgacgtgctcctcgagcaaaacattgttcccggtattaaagtcgacaagggtttggtaccccttgctggttccaacgactagtcatggtgccaaggtcttgatggtcttgcctctcgctcggctgcatactaccagcaaggggcccgtt

SEQ ID NO: 31867 - DNA, 366 bp, Glycine max
  Clone ID: LIB3138-007-Q1-N1-F6
gcacattccagttgaagctcgccaattgagaaggaaagctcggtctcggattgaatggctgcaaaaagctgatgtgcctaccatagcacatattgaagagttccattcgatgcagaggatgatgaatgctcctgattcaaatgataatattgatttactggtgagcattgatttgttgggtttacaaggagcaggttaagcttttccaaacaaaattgtttttgatgataagcctgtgttggctaacacacaagaattctttgatggaaattttccagtggattcttggttaccaaattttgtgaattgtcttttttctgtaagtcaattaccttcataagctgtcgttgttaaatgtaacatgtt

SEQ ID NO: 31868 - DNA, 269 bp, Glycine max
  Clone ID: LIB3138-007-Q1-N1-F7
tttctctttttccctttcactttctctctcttcaaaccctaagggcctttttccgatgccggacttccacgactccctcttcaccacgccgccgccgcagccgtcccgccccgtccccgtccgcgaggactgctggtccgaggaggcctccgccacgctcgtcgacgcctggggccgccgctacctcgagctcaaccgcggcaacctccgccagaaggactggcaggacgtcgtcgacgccgtcaacgcgctccaccgtcacacttaaa

SEQ ID NO: 31869 - DNA, 342 bp, Glycine max
  Clone ID: LIB3138-007-Q1-N1-F8
ctagacttgtgcttgaagatggttcaatttggaaagcaaaatcgtttggtgcttcggggactcaagttggcgaagttgttttcaatacatcattgacagggtatcaagaaattttgacagatcctagttatgctggccagtttgtgctcatgacaaatccacatattgggaacactggcataaattttgatgatgaggaatcaatacagtgtttccttgctggtcttgtaattagaagtttgagtatcaatacctctaacttgagatgtaagaaagatctgggggattacttggccgaaaggaattatatgggaatttatgatgttgatactcgtgcaatta

SEQ ID NO: 31870 - DNA, 357 bp, Glycine max
  Clone ID: LIB3138-007-Q1-N1-F9
aaaagcaatgactatgtcatttaatccaaacccgtgggctgatgcatggagtttggaatttctgaagcgtactggatttcattgcgatatcatttgtgtcactggatggactgccaccccaatgcaggatgttcaggttacaattgattggtttatttcctctcaggaatgtgttcccaggacctattgtgttttaaatccacaaaatccttttgtgttaaataggtggatgggaaaattgactttcccccaaggcactttcccgagtgttaagagaatgcctctttctttagggggaggagcttgtgcaaagaatgctatttctattaattatgcacatgctgttctttcaatgtg

SEQ ID NO: 31871 - DNA, 235 bp, Glycine max
  Clone ID: LIB3138-007-Q1-N1-G1
attacaggttctttttttttgggcaccattcctcataccattggacaggatactgtttggaatgagatggcaacagttagaacaccattgaattttgattctagcaagcagagcttttgtcagtattctattgaccttcttggtggatgtatctttgtggtcaaaactggtgattggatcatacttatacaaaattttccaaattagaaacttgttgagaagttgttgtttggaa

SEQ ID NO: 31872 - DNA, 386 bp, Glycine max
  Clone ID: LIB3138-007-Q1-N1-G11
gtttttatggtttgattaccaagcaagttatgagcgagatgggggaaatgataaacaggcgttgtggtggtgatgaaaaattgatgcgtgaaaggacgcacctgctgttggcttgttgttcaaggatggcaatttgtaagaaagatgtttggagagttgaatgtggaatcccttctggatttccgctcacagttatttgcaattgcatttttaatgagatgctcattagatataacttatgaaaaattactgcgccaggctaaagcttcaagtatgtttttacaatcccttaaaaattttgtttctttgggtgtgtattgtgatgataacttaattaggggttatgaatatgtcaagccttaactttagttgtttttaaattgaaa

SEQ ID NO: 31873 - DNA, 388 bp, Glycine max
  Clone ID: LIB3138-007-Q1-N1-G4
gtcgttcctcctctgccccagtacaactccaccaccaacttggggttggtggggatcaccgacaacgccttgaccgttggacccgaacccgggtccaaggtggtcggaaagatcgaggggttgtacgcgggcaccttacaatcggagttcaatttattgattgttgtgaattttgccttgaccgaaggaaagtataatggcagtaccatcaccgtggtggggcggaaccgtctcttccttaagattagggagatgcctgtgattggaggaagtggggtttttaaaattagcactgggtattgttaaaccagcactctttatgttgatgctgataggtctaccatttggtacaacatttattttttacaatactgatcaaattgtggtt

SEQ ID NO: 31874 - DNA, 132 bp, Glycine max
  Clone ID: LIB3138-007-Q1-N1-G5
cctcaaccatatttcgttcttcttatgaatatacccaaaacagttgctgcacacatgggtacagtggccggcaatctcatatttaaaccccctaacattcatcacccatagcagaaactttctgcccaccgc

SEQ ID NO: 31875 - DNA, 222 bp, Glycine max
  Clone ID: LIB3138-007-Q1-N1-G7
ggaggttgttattttccgtaagtaatttgtttgttgggttggggttgataaaacagcagcagggggaaatggtaaatagagaagaacaaggcgagggtgctggctccttcttggaattggaagctcctattccagagacccaaaaagaaatcccaatttcagatggcatcgcattcaacaatcagagcgcgatttttcaagccatcgaggttgtggaacgag

SEQ ID NO: 31876 - DNA, 268 bp, Glycine max
  Clone ID: LIB3138-007-Q1-N1-G9
ctcgagccgattctgctcgagagaaaactgcttcaatggatggtgggcaagttggttttcacaactcaaaaatggttcgaactgtgagagttgagaagcggataaatgagattgttaacaggctaaacaagacaaaagtggaaaggaaacctgatttgaaaggtgagcgagaagcattctgtgcagctgatagagctgagaggaaacaacaactgagagaaaaaaaacgccgtgaggaattggaaaggcttgaaaaggagaaacaaaa

SEQ ID NO: 31877 - DNA, 290 bp, Glycine max
  Clone ID: LIB3138-007-Q1-N1-H1
gtcttgcaattgaagttgaagtcttgcccttctctcttcaactccaaacacaagacatcatcatccatggctgcctccgtctccactgtcggagctgtcaacagagctcttttgaacctgaatgggtctggacctggggtttcagctcccagttcatccttctttgggagcagcttgaagaaggttattggctcaagggtccccaacacaaagatttcctctggaagcttcaagattgttgctgtagaagagaagaaagagattgaagagacccaacagaccgacaagga

SEQ ID NO: 31878 - DNA, 185 bp, Glycine max
  Clone ID: LIB3138-007-Q1-N1-H10
aagggtcatggataatctttccaatgcgagcttgtttttgcctagatgggaatcaaccccatcatgattagtgctggagagttggaaagtggaaatgcattatagccagcaaaactgatcaggcagagataccgttaagccgcagacttgatcatgaagggaaagatgtgtgctctctttatcaa

SEQ ID NO: 31879 - DNA, 259 bp, Glycine max
  Clone ID: LIB3138-007-Q1-N1-H7
attttgtcattgtgtgtcaagttgacaaccataaacaatatgtgtgcatatgggctcaatcctggtatttcaggttctcgtcttttgggcaccattcctcagtccatttcacagcaaactgtttggaatcaaatggcaacagtgagaacaccattgaattttgattctatgcaagcagagcttttgtcaggtttttattgaccttctcggtggaggaatcttagtggacaaaactggagaattggtcacacttatacaa

SEQ ID NO: 31880 - DNA, 315 bp, Glycine max
  Clone ID: LIB3138-007-Q1-N1-H8
tgcaattcactctgtacaattcttcgttcgttctctgcagatatatcctttttgagcttcaatggcggacgctgaaaccttcgctttccaggctgagattaaccagcttctaagtcttatcattcaacacattctacagcaacaaggagatttttttgcgtgaactcatcagcattgcttctgatgctttggataagattcgattcgagagcttaaccgacatgagcaagcttgatgctcactctaaagctctcattcgttttgtgcctgacaaggataacaagactcttttcattattgacagcggtattggaa

SEQ ID NO: 31881 - DNA, 303 bp, Glycine max
  Clone ID: LIB3138-008-Q1-N1-A1
cagatggaaacatatttgtttaaattgtctcttgatgatgtagaaactcctaaaggttccatgtgggatctgaaaatttctcaatctaaaattgcacttcccaagaacacagttggaggaaccattctgcgtagtgatctattggcaaattttttgacagagggcaattttagagcatgtgttgatttgcagcgcactcatcgtattagaggaatgattaaaatggtggccacaggtggtattcctgagaatacaggtatatcattggcctgtgctatgaatagttcttttagggggcccgcc

SEQ ID NO: 31882 - DNA, 401 bp, Glycine max
  Clone ID: LIB3138-008-Q1-N1-A10
agattccccaccatacgaattaacgatggcgtcttcaatcgagcggctcctagaaagtggtcgtcccttccttcgcggtgatctggagtccatcgacaagaacttacctcggctggttggcgtcctgcaaagtgtgggtgccggggagtgctggcacaaacacggcagcttccttcaccacctcgtcgacatatttcgcattctcaagctctggaaagcccctcactctgtctgcctctgtggcctcttccactcagcctactccaattcttacgttaacctcgccatcttcgacccttcaaccggtcgagaagtggttcgtgcactcgttggcgaggaaactgaaagtctgattcacttgttctgcatagttcccaggcagcctctcatccacgacgatc

SEQ ID NO: 31883 - DNA, 165 bp, Glycine max
  Clone ID: LIB3138-008-Q1-N1-A11
gaaattctgagttttaacgccactaatcctatgctgacgcgacgtgttgataactgtaagagtctcaaatatctggttgatgagtgtccttttgcatttgtgaactagtatgtagtattttattcacttaaataaagcgcattactatgtgcaatgagtgtgttt

SEQ ID NO: 31884 - DNA, 375 bp, Glycine max
  Clone ID: LIB3138-008-Q1-N1-A12
atcaaaaccacatttttttgaattgatcttcccaataaacgtctggggtcttaataatggtgttggaatgtcaagatctgattgggcaaatcaaacttcatggcatttgagtttccttattgacaatcccaaacagtctacagtttttgatattctcttgtgaatctctcaagattttgaaattgctggtaatactcttatgccagctttttctgttccacaagctactgccatattttttgaatatgcgaaattctctcattgatctcgaatttagttttctttgcttgtcccgtcgtcaattaaaaaatgaaattattcatgatcctctttttgctattctctgcctatttgaaaattccacactcttttaat

SEQ ID NO: 31885 - DNA, 377 bp, Glycine max
  Clone ID: LIB3138-008-Q1-N1-A2
ggaaagctctctttcgttttgaatggctgcataaagctgatgggcggaccttaacacagagtgaggagttccattctatgcataggatgatgaatgctcctgattcaaatgataatattgacttactgttgagcattgatttgttgggtttacaaggagcaggtcaagcttttccaaacaaaattgtttttgatgataaacttgtgttggctaacacacaagaattctttgatggaaattttccagtggattcttggttaccaatttttgtgaattgtctttatcctgtaagtgaattacctttataagctttcgttgtcaatgttacatgtggtaggggacctggtggtttacccaccactgttggattagttctg

SEQ ID NO: 31886 - DNA, 311 bp, Glycine max
  Clone ID: LIB3138-008-Q1-N1-A5
gttatcctatttctctcttttatatggtcatatattaagtggggcctacccttctgacgagagatgctcttgcgtcaccgattgatacacccttcttcgttcctcactcaccagccacagattctctcttctctattcaaaaaacggcttgtttgtatacaagccttcccggtctcagcctctacatcccaaaacatcaaaacaactggttgtgctccttgtatggcttctttctcagtttgtataaaagctacatattcaacacaatctgtatcgacaaatgagccaagtgtatctgttgattggctttt

SEQ ID NO: 31887 - DNA, 334 bp, Glycine max
  Clone ID: LIB3138-008-Q1-N1-A6
tgaaatctggctctattcaagagtaagggagaaaagtgtgaagggatcctccactttgttcctcaaacttctttctttgccattgattgaactgtgtttttgaacatggcatcatggtaatgcgtttctcacgcttctctgcttattgtttcttgtttttcttccctctctaatccacccttcaatgccatttccaccctttccgagaaaacgggaaaccaaagtttggatttgttcaaaattcttaattttctggtttttgaacggtatgaacattgttggttttaaggggagctgattttcttacgttatttgatgtgatctcgtgcttagt

SEQ ID NO: 31888 - DNA, 371 bp, Glycine max
  Clone ID: LIB3138-008-Q1-N1-A7
ctcgagcctaatttgctcgaggtttatttcctctcaagaaagggttcccaggacctattgtgttttaaatccacaaaatccttttgtgttaaataggtggatgggaaaattgactttcccccagggcacttcccgaagtgttaagagaatgcctctttctatagggggaggagctggtgcaaagaatgctattctcatgaatatgccaaatgctgttctttcaatgtggagatattttgttggagatctcgtctttgaagtttctaagatgacttctccctacattaaatgtacagtctctttttttatagcattaggaaatttggctgatgataccatcaattttgaagctttttcccacaagctggtgc

SEQ ID NO: 31889 - DNA, 328 bp, Glycine max
  Clone ID: LIB3138-008-Q1-N1-A8
gcaagtctttgtcttgttcatcgtgcaagattaatgggacagggtgttattgataaagaggattggcctgctcccaaagctctttttgacatctatcttaataacctgaggattattgctgaatatctcctaaaaattgatcccaaatcatatggtgcaaaatagggactgggttgctttctatgatgagtgtgcctctgttttatatcaagagattgattacaccaaggaagctgcttatgcataactatatgcaagtaactcttaaaacttggattatgtgaaagtcccgacaatcatcttggtttataccaccccacaatattct

SEQ ID NO: 31890 - DNA, 163 bp, Glycine max
  Clone ID: LIB3138-008-Q1-N1-B1
gaagtatctgatttttcttacctggcaattgcttcacactcatgcaggcttctccaagctgtgaggctggtcacattctctgctccctaaaaaagctttttactgtacaactgtgggatgtctgataatgcatcagactcctagagagattgttcctgcttgt

SEQ ID NO: 31891 - DNA, 343 bp, Glycine max
  Clone ID: LIB3138-008-Q1-N1-B10
ctcgaaccaaatttgctcttgaaaaaaaaaaaaaaaaaaaactcgcgaaatttaaaaaaaaaaaaaaaaaaaaaaaaaaaaaaaaaaaaaaaaaaaaaaaaaaaaaaaaaaaaaaaaaaaaaaaaaaaaaaaaaaaaaaaaaaaaaaaaaaaaaaaaaaaaaaaaaaaaaaaaaaaaaaaaaaaaaaaaaattggggcccccccccccaaaaaaacctcccccccccaaaaaaaaattcccccccaacctttaagcgcaaacaatttttctttatatggaccctataaaaatcttgccaaaaaaactcaaaaacttattccttttaaaaaaattttccccccc

SEQ ID NO: 31892 - DNA, 398 bp, Glycine max
  unsure at all n locations
  Clone ID: LIB3138-008-Q1-N1-B11
cacnatacaacttttacaacctgcgacagttaaagttgctgccgcccttgttcggcttctcgcatataacaataaaaatttcttacagaccgggttaattgttggtggttgggataaatatgaaggtggacaaatttatggagttcctctgggtggaacaatagtacagcaaccttttgctatcggaggatctgggtccagttacttgtatggtttctttgaccaagcctggaaagagggaatgaccaaggatgaagccgaggatttagtaaaaaaggcagtttcactggctattgctcgtgatggtgcaagtggtggggtggtgcgaacagtcataataaactcagaaggagtgaccaggaatttctaccctggcgaccaacttccattatggcatg

SEQ ID NO: 31893 - DNA, 393 bp, Glycine max
  unsure at all n locations
  Clone ID: LIB3138-008-Q1-N1-B12
ctcgagccgctcgttcggctcgagcttctctcagtctctctccggcccactcttgaaaaaaatccccaaaattttgttctctgaacaaaatctcgccgtttcggttcctattctctttctcccaaccaatctctttctctctcatcggttgcgtttccttcgcacgaaatcgctggatttccgctatttctacctcgatcgctcgatctggagcgagacgaagaagaagaagaacccctttccttgataattgggaacacacacagaaacaccgaaactgtgccctaaaaagcaaaacccctctcacttcttccccgatggcggattggaagaagagatctgcgacgccgagcctgatctanggttttcgaatctagggttttgaggaagaag

SEQ ID NO: 31894 - DNA, 358 bp, Glycine max
  Clone ID: LIB3138-008-Q1-N1-B2
tacgtatgttgttttcttcattttccaattgcatgttatctcggatggctcaattcaattggtggcctttccctcttccccttaatctgtgaggaaaagggatttatgggttctctttatttcagttcaatttttccttttagtgttaaaaatactacctttattattattattattattgcgtggagattgattcatgtaatttgctagaacggttgaagatgacaattcgtggaccacgtatggtttgatattaaatctcctttaatttatttggtggacttatttcctgcatgtttctgcacccaattctattaacaattcttggtcatgtgagttaggttaattgttatgtgat

SEQ ID NO: 31895 - DNA, 335 bp, Glycine max
  unsure at all n locations
  Clone ID: LIB3138-008-Q1-N1-B3
ttctaanatgacttctttctacatcaaatgtacagnctctttgtggaatcatttgaaaaggaggctgctcactccatccatttttaagcttttccccacaagctggtgcatcttggagagattcaagaaaaagtcgtattgaaattttcacaataggaatttctcacagctcgatcaactcaggtgcatcctagcaacatctctgtttgctgatgggagcccatatattgtatgcaatggtgcatgataattcagcgtctacaattccatgtgattttgtcattgatgtcaagttgacaaccataaacaatatgtgtgcatatgggctcaatcct

SEQ ID NO: 31896 - DNA, 405 bp, Glycine max
  Clone ID: LIB3138-008-Q1-N1-B7
ggtcaagattgttatgtctgggaatgcagcattcaaaaggaagaattgttcctcattggtacaagtgtttttaacaaacagcaacagtacagagcattttgatgcatgtaagtggacaaaatcagaaccacattcctgggaattgatcttcccaatagaggtatgtggtcctaataatggttttgaaatgtggagttctgagtgggcaaatcaaacttcatggcatttgagtttccttattgacaatcccaaacagtctacagtttttgatattctctagggaatctctcaagattttgaaattgctggtaatacttttatgccaactttttctgttccacaggctactgccagatcttttgaaaatgcggaattctttgcatgatctggaattttggttttctt

SEQ ID NO: 31897 - DNA, 332 bp, Glycine max
  Clone ID: LIB3138-008-Q1-N1-B8
gctcaatcttgttttttcaggttctcgtctttcttccaccaaggctcatttcatttcacagcaaactcttttgaatcaaatggcaccagtgtgaacaccattgaattttgattctagcaagcagagcttttgtcagttttctattgaccttctcggtggaggaatcttactggacaaaactggagattggttcacacttatacaaaattcttcaattaataacttagtgagagttgctgcttggaagataggctgtttaatggtcaagattgtgatgtctggtaatgcaacattcaaaaggagtgattggtccttatttgtccagttttttt

SEQ ID NO: 31898 - DNA, 398 bp, Glycine max
  Clone ID: LIB3138-008-Q1-N1-B9
tcccaagaacacatttggttgaaccattctgcgtagtgatctggtggcaaattttttgacagagggcaattttagagcaagtgttgatttgcagcgcactcatcgtattagaggaatgattaaaatggtggccacagttggtattcctgagaatacaggtatatcattggcctgtgctatgaatagttcttttagggggcgcgccagttctgatatttacaccatctgctctcaagactgtgaattgtggaatcctgcttgcacaaaagcaatgactatgtcatttaatccaaacccgtgttctgatgcatggagtttggaatttctgaagcgtactggatttcattgcgatatcatttgtgtcactggatggactgccaccccaatgcaagatgttc

SEQ ID NO: 31899 - DNA, 233 bp, Glycine max
  Clone ID: LIB3138-008-Q1-N1-C1
cactaatcctatgctgtcgcgacttcttgagaactgtaagaggctgaggtatctggttgatgagtgtccttttgcatttgtgaactagtatgtagtattttattcacttaaataaagcgcattactatgtgcaatgagtgtgtttaaatataaaaaaaaaaaaaaaatagaaaaaaaaaatacaaaaatttacaacaccaattcaaacattctaaaatcatatgtatctttta

SEQ ID NO: 31900 - DNA, 386 bp, Glycine max
  Clone ID: LIB3138-008-Q1-N1-C10
cgatgccatggcttatcgcgctttcctccaggttttggatgcctttgaatactgccactctattggaatctaccaccgggacctcaagccagagaacgtactagtcactgaccaaggaatgacttgcaaacttgccgactttggacttgccactaccgaccacgtcacctctgactttggatgcggctcgactttctacatgtctccagaatgccagacatcggcacccaaggcctactcatgctacgcctcagcgcccaacgatgtttggagtctgggagtcatgcttgtcaacctcacatgcggacgcaacccatggaagcgagcttctttcgaggacagcacctttcgcgccttcatgaatgaccccaagtttttgaagacca

SEQ ID NO: 31901 - DNA, 369 bp, Glycine max
  Clone ID: LIB3138-008-Q1-N1-C11
catgtctcctacctactgaagtcgaacccctatttttcctctccctaatggcttatcaagttcttcttcaacaagcactgtttgcccccaagctaagtttcccttcttcttctcgtaacgtggcgttaatttctagggttccttccaccccaatttcatggcgttgcactcccctcattgctaaacctagtttcgtagtgagagctgacaccaacctcgatggcggtggtgaagccaccgaggatgttccttcggataatgctgaaaaagtttcggaaggcgaagcagaacaagtttcggattctgaagctccgaaatcgcctagaaaaccccgagtcaaactcggagacattatggggatattgaatc

SEQ ID NO: 31902 - DNA, 287 bp, Glycine max
  Clone ID: LIB3138-008-Q1-N1-C3
aaaatctggatcccatttacttgaagtcgaatcatactcctgggctgactgattctgcacgtgggacaaactctacactgggtgtgcattccagtttgttgccttactcccatgctgggacaacctttacacatggaatgttattgactatcccgaggaagaagacaggaattcttgaagatgttcggtctagtggttggttggatgccatgaaatcatgttcaccttcagccaggaagataacaaaggatgttggccatcgttttgcatcatatgattctgaaact

SEQ ID NO: 31903 - DNA, 355 bp, Glycine max
  Clone ID: LIB3138-008-Q1-N1-C4
gcataaaagtctacttttccatttccaaggcttttggttaggaacctgttgtagctaaaaaggtcacatgctcccttcaagctgatcttaaggacttggctcacaagtgtgttgatgctaccaaaattgcaagattcgcccttgccacctctgccctcgttgtctctggggcaagtgctgaaggtgttccaaagaggctaaccttcgacgaaatccagagcaagacctacttggaagtgaaggggacaggaacagcaaaccagtgcccaacaattgatggtggattggactcatttgccttcaagccggggaaatacaatgccaagaagttgtgccttgagccaacttcattcac

SEQ ID NO: 31904 - DNA, 271 bp, Glycine max
  Clone ID: LIB3138-008-Q1-N1-C7
gtgtgatatttgttgagtgtcttctacaatttgtgtccatgagaaaaaattctctggattgtaggcctttgctttctcctcgtggtgatgaaaatggaagtgagacaacagcatctcctcttgtgtcagctactaaatggactctcaagactttgatcttgatgatctttgttctatgggcagctttcatcttttttctccctgcaaagcctgtgaatgagtcgttctcaaaatggaatgatctcaaccgtgacactccttttggagtcac

SEQ ID NO: 31905 - DNA, 399 bp, Glycine max
  Clone ID: LIB3138-008-Q1-N1-C9
attttgttggagatctcgtctttgaagtttctaagatgacttcgccctacattaaatgtacagtctctttcttcataacatttggaaatttggctgatgataccatcaattttgaggcttttccccacaagctggtgcagtttggagagattcaggaaaaagttgtattgaaattttcacaagaggaatttcttacagcttggtcaactcatgtgcgtcctgcaacaactctgttggctgatgggtgtccatatttgtatgcaatggtgcatgatagttcagtgtctacaataccaggtgattttgtcattggtgtcaagttgacaaccataaacaatatgtgtgcatatgggctcaatcctggtatttcacgttctcgtcttttgggcaccattcctc

SEQ ID NO: 31906 - DNA, 271 bp, Glycine max
  Clone ID: LIB3138-008-Q1-N1-D1
caagcttttcacatgtttatcggctcccccgcattccttacccgcggagactattcttgggtcggggtgcctgacatggatcccattcccaattccaatgtcaacaagcgtcgtgcaaacaacgaccagttcgacttaaatgactccgcattcagccacctcctcaattccatcatggatcctaaccatttccaacaccaatccaaaccaatccaattcgacttctccccgaccaagagagctcgccgtgacctcctcgttctcgaagaca

SEQ ID NO: 31907 - DNA, 402 bp, Glycine max
  Clone ID: LIB3138-008-Q1-N1-D12
ctcgagccgcttgtttttcacatcagcaagaacttcatgacccgtgccaacatcaaggttcctctcattcttggtatctggggaggcaaaggtcaaggaaaatccttccaatgcgagcttgtctttgccaagatgggaatcaaccctatcatgatgagtgctggagagttggaaagtggaaatgcaggagagccagcaaaactgatcagacagagataccgtgaagccgcagacatgatcaagaagggaaagatgtgtgctctcttcatcaacgatcttgatgcacgagctggtcgtcttggtggaactacacaatacactgtcaacaaccagatggtgaatgccaccctcatgaacattgctgataaccccaccaatgtgcaccttcctggtatgtacaac

SEQ ID NO: 31908 - DNA, 414 bp, Glycine max
  Clone ID: LIB3138-008-Q1-N1-D2
aggatattcacatgctttgtctcagtccaatccattgtctaggtagtgctcttgagggggggaggtggagtatggtgtgatgtggatgtggtggaattctcgtattttggtgcaccagagccagtttcaaaagagcagctgttcacagagatcgtagatgacttgcgtgggggcgatccatgcattggttcaagatctcaagtggcatgccaagagacatatggtactttgggtgccatcgtgaaaagccaaactgtcattctgcaagttggttttctcacaaatcgttatgttgcattcgacctatattatccgaaccaaaagatgtttcatcgtcttccaccgactttggtgcctgggtgttattcttgttgcattagaaagagcaacttcatttataatcagataaccttt

SEQ ID NO: 31909 - DNA, 274 bp, Glycine max
  Clone ID: LIB3138-008-Q1-N1-D3
aagagcttcgcttctcatatgtaaacggacggacacctatctggaggccccattaagtgggtaggccattcaaacggaattttcgcaagaaaacaagttccggccaccatggcagtttggattaggggaaagtttactttcatgtaaggtcgaagaagaccatcacactgagcaaggatttatggcaggtatacgtgtcacttatcaaccggttgttctggaatcgaaccgaaacccatgccttgaaatagaagaaggcccaccaaggatgaat

SEQ ID NO: 31910 - DNA, 281 bp, Glycine max
  Clone ID: LIB3138-008-Q1-N1-D5
aaaaaaatttattttttttaaaataaaaaaacattttaagaaaagatttatttaaaaaaaaaagaaaccaatcatatctttattttctaaatatataattaaccactcaataaataataaattaataaataatgtgccccccccctctttataaccccttccccccctaatttatttcaaccctttcccttatacaatccctatttcccctatataaattcctttttaaaccctcccttaaaacttctttttacctttatacctcattaaaattttttttc

SEQ ID NO: 31911 - DNA, 341 bp, Glycine max
  Clone ID: LIB3138-008-Q1-N1-D9
caaatgccaacatttacaacaccattgcattttgattctaacgtgcggagcttttgtcagttttctattgaccttctcggtggaggaatcttaatggacaaaactggatattggatcacacttatacaaaattcttcaattactaacttgttgagagttgctgcttggaataaaggctgtttaatgatcaagattgtgatgtctgggaatgcatcagtcaaaaggagagattgggcctcatttgtacaagtgtctttaacaaacagcaacagttcagagcattttgatgcatgtacgttgacaaaatcataaccacattccttggaattgatcttcccaat

SEQ ID NO: 31912 - DNA, 365 bp, Glycine max
  unsure at all n locations
  Clone ID: LIB3138-008-Q1-N1-E1
cttcttgaaccacctctccgtcttcattgaaggttatggtcctgctggatatgcattattcggtgccggttatgctggattggagatccttgcaattcctgccattcctttaaccatgtcagctggacttctatttggatctgttgtcggcactatcatagtctctatcagcggaacagtggcagccagtgttgcttttctaattgcaagatattttgctcgtgagcgaattgtaaaactagtggaaggaaataagaagtttgttgctatngacaaaagcaattggagaaaatgggttcaaggttgtgaccctgctttgtttggaccccctctgttgccattttctttgggggaattatttattt

SEQ ID NO: 31913 - DNA, 393 bp, Glycine max
  Clone ID: LIB3138-008-Q1-N1-E10
ctcaatcctggtttttcaggttctcgtcttttgggcaccattcgtcagttcatttcacagcgaactgtttggaatcaaatggcaacagtgagaacaccattgaattttgattctagcaagcagagcttttgtcagttttctattgaccttctcggtggaggaatcttagtggacaaaactggagattggatcacacttatacaaaattctccaattagtaacttattgagagttgctgcttggaagaaaggctgtttaatggtcaagattgtgatgtctgggaatgcagcagtcaaaaggagtgattgggcctcattggtacaagtgtttttaacaaacagcaacagtacagagcattttgatgcatgtaagtggacaaaatcagaaccacat

SEQ ID NO: 31914 - DNA, 396 bp, Glycine max
  Clone ID: LIB3138-008-Q1-N1-E11
ttgaaaccctaatttttgcccccttacacgttttttgtcttctgggttctcccatctttgtttcgagaagcatttgacgaagagaagagacagtgaatcgcggtttcaattcaacccacttcatctcaggtgtttgaagttgagataaaaatgagcggaacagagaaagcaggatcaggaaccaccaaaacccccgccgatttcctcaaatccattcgtgggaggtcggttgtcgtcaagctcaattctggtgttgattacagaggtatacttgcttgtctagatggctatatgaatattgcaatggagcagacagaagagtacgtcaatggacaactgaagaacaagtatggtgacgctttcatccgagggaataatgttctatacatcaatacc

SEQ ID NO: 31915 - DNA, 404 bp, Glycine max
  Clone ID: LIB3138-008-Q1-N1-E12
gctgatgataccattaattttgaggcttttccccacaagctggggcagtttggagagattcaggaaaaagttgtattgaaattttcacaagaggaatttcttacagcttggtcaactcaggtgcgtcctgcaacaactctgttggctgatgggtgtccatatttgtatgcaatggtgcatgatagttcagtgtctacaataccaggtgattttgtcattggtgtcaagttgacaaccataaacaatatgtgtgcatatgggctcaattctggtatttcaggttctcgtcttttgggcaccattcctcagtccatttcacagcaaactgtttggaatcaaatggcaacagtgagaacaccattgaattttgattctagcaagcagagcttttgtcagttttctat

SEQ ID NO: 31916 - DNA, 323 bp, Glycine max
  Clone ID: LIB3138-008-Q1-N1-E4
ctctatccgctttccttttcatataaaataatcaacatctttcccaaagatctatttgtgaggtaggacagcccacctccttatttttctgccatttctattggtgactaactagacagctacatattatcttcaaccaaatcccgttcattcaagcatgagtcatttctctgcccctcacttatctattcactcccaactccaataccatcatcttttttatggcacaatcacactctctatttttctcctttcaatccctcacattcttaccttttttcctctccccattttttactacaacccggatttcttttctcctt

SEQ ID NO: 31917 - DNA, 213 bp, Glycine max
  Clone ID: LIB3138-008-Q1-N1-E5
caaacggcatctgtgagaacaccattgaattttgattctagcgggcaaatcttttgtcaggtttctattgaccttctcggtggaggaatcttagtggacaaaactggagattggatcacacttatacaaaattctccaattagtaacttgttgagagttgctgcttggaagaaaggctgtttaatggtcaagattgtgatgtctgggaatgca

SEQ ID NO: 31918 - DNA, 336 bp, Glycine max
  Clone ID: LIB3138-008-Q1-N1-E8
ctcacttaacctgttacaggatggaaaaaccttaccaaaaggggctgtttttatctgacctgatggattattcccctcactttaccgtgaagtgataagaagggcacctcacgagttcaagattgcttgtttagaggatatcaaaagacttttcccatctgactataatccattctacgctggatttggcaattgagatacagatgaacttagttacagaaagattggagtcccgaacggcaaattatttattatcaaccctaaaggtgaggtagctattagtcaccgtattggcgcaaagtcatatacgtcattacataccctcgtcaatgacat

SEQ ID NO: 31919 - DNA, 382 bp, Glycine max
  Clone ID: LIB3138-008-Q1-N1-E9
tgcaaattgttgattggtttgtgcagaggggttgccgagacatgtgactatgccttgcccttacagcagccacttctagctgccaagttcacattgcagcttatcttctgccacacgtacctcagcaggtccttgcagctcttagtgttgaaattcttaacgctgctggtgagcgcagcggtggatctcttgatggtgtagcatttcttctccaatctgacttcttaagtgatcctgcagctacttatgctgttgcagatattattgctaaatcagaagatgaagctgttgcacctgagttgaagacttttcttaaagagcattggtcagaaagagcttacaaggagggattaaagttagggcaagagcattacatgaacct

SEQ ID NO: 31920 - DNA, 358 bp, Glycine max
  Clone ID: LIB3138-008-Q1-N1-F10
atggttttgaaatttggagttctgagtgggcaaatcaaacttcgtgcatttgagtttccttattgacaatcccaaacagtctacagtttttgatattctcttgggaatctctcaagattttgaaattgctggtaatactcttatgccagctttttctgttccacaggctactgccagatcttctgaaaatgcggaatcctctgcatgatctggaatttgtgttttctttcgcttgttcgtttgtttaattcaataaaggaaattaggcatgaccctcttgttgagtatgctctgcctatttgaaaatttccacacctcttttaattgtcgtaatgatgtgtgaagtgtgtgttatttt

SEQ ID NO: 31921 - DNA, 398 bp, Glycine max
  Clone ID: LIB3138-008-Q1-N1-F11
ctctttctttgattcatattctgccataacagcacacgatagcgtgaccacaacaacacttgaagttagttacttgtactttctctgaaactttgattgtgtcaaaatgacgcaacagaatgtggtagtgtctgatactaaatcaggagtttccttaacggttttctcaacaacacaaaagccaccggcggcgccaggagggtacattttcattccaaggaggagggttttgaagaaccttgaaatcaatggaggccaaagaatcaatgcatgggttgagtccatgagagccttctctccaacccatcataaatccacaccttctttgtctcaggagcataactcttggattcttcaccatccatcagcattagacatgtttgaccaaatcattgacg

SEQ ID NO: 31922 - DNA, 323 bp, Glycine max
  Clone ID: LIB3138-008-Q1-N1-F2
ctcgagccgaatctgctctagcgatcgccagtcactcctttggtaggcgagcatgatcattgcgaaggccgacaggcgttccatctacgagaacctcttcaaggaaggtgtcctcgtcgccaagaaggatttcaacgccccgaaacaccaagacctcgacgtcaagaacttgttcgtcatcaaagcttgccaatctttgacttcgaaaggtttcttgaccactcacttctcgtggcaatactactactacgtccttacccccgaaggtattgactacctccgagagttccttcaccttcccgctgagatcgtccccgctactt

SEQ ID NO: 31923 - DNA, 330 bp, Glycine max
  Clone ID: LIB3138-008-Q1-N1-F4
gcagccgcgccttcatttctccgcatggccaatgagttggggttggctttttcggcggcgggtttacaagctccagagcggtgtgaacaagctcgcggatctggttggggtcacgcttggtcccaaaggaagaaatgttgttctcgagagcaagtatggctcgccgaaaatcgttaacgacggtgtcactgtcgctaaagaggttgagttggaggatcccgttgagaatattggtgccaagttggtgagacaagcggctgccaagacaaacgacttggctggtgatggaaccacgacctcggttgttcttgctcaaggtcttatagcgga

SEQ ID NO: 31924 - DNA, 400 bp, Glycine max
  Clone ID: LIB3138-008-Q1-N1-F5
ttatttttctgtttaaatcacatacatattacttctaatcttagaccttatataaatgggggagggtccctcccataatgtttctttatatttaacatacaaagttctctttctttatttctaatatttgattgtataaatatctttattgttaacctccctgtatttttcttctctcaattactttcccttttttataccatacttattttttaatttatcgaaatcttactttctttttttttatatttctcttttctttatcttttacttttctttatttaattttatatttatatcctattctttcttatatttctcttttttacataaattatttatgtcttcttttattttttaattcctttactatccctttatattttttttatccttttcc

SEQ ID NO: 31925 - DNA, 421 bp, Glycine max
  Clone ID: LIB3138-008-Q1-N1-F8
ctcgagccgattctgctcgaggataacttaattagtgttcatgaatatgtcaagccttactttagtggttctaaattgaaaagctttctagctagtcataacatcaccattactgatggtattgacaaaactagtgcaactttgcaatttagaaagttagcagattgtgattttctcaagagaaactttaagcagatgtctaatgttttgtgggtggctcctgaggacaaggcgagtttatggtcacaacttcattatgtttcgtgtaataatctggaaatgcaagaagcttatcttgtcaatctcgtaaatgtgttacgagaattgtatttgcacagtccagatgaagctcgccaattgagaaggaaagctctctctcgtattgaatggctgcaaaaagctgatgtgcctaccatagcac

SEQ ID NO: 31926 - DNA, 321 bp, Glycine max
  Clone ID: LIB3138-008-Q1-N1-F9
caaacatcaacaattcatagatattacatctacctaattacatggggaagacaaggatatagggagctatacatatgccaggccaacaaacacgccaatgggttcttgccaacccgccggtcaacgaccccgtcatcgagggcaaggacgcgacctttgagctcaagaccgtcgacctcccaagcccaagcgctgaccaggtcctcatcaagatcctctacttatcaaatgacccaccgcaaagaggatggattcaaaaggatatggaccccgagcgcctctacgttccgccagtaaacgaaggcgacatcatgcgttcct

SEQ ID NO: 31927 - DNA, 346 bp, Glycine max
  Clone ID: LIB3138-008-Q1-N1-G1
gtcagaggtgaattattccttcgagcttctgagcttcagaaagaggggaaaatgattatagtgagtaatgtcggccacccacatgcattgggacagaaaccactgagcttccctcgtcaggttgttgctttgtgccaagctccattcctacttgatgatcctaatgttggactgctattccctgctgatgcaattgcaagagctaaacactatctttcattgacctcgggcggtttaagcgcttatagtgactcccgcggccttccatgagtgaggaaagaagtggctgagttcatactcaagcgtgatggttatccaactgatccaaaactcatatatctcactg

SEQ ID NO: 31928 - DNA, 106 bp, Glycine max
  Clone ID: LIB3138-008-Q1-N1-G11
cctaaacaaacacttgtataaaatccctaaatacacaaactcccccccttttttaaaacacccggggcccctaccatacaaatttccaccatttcattcacaaaca

SEQ ID NO: 31929 - DNA, 406 bp, Glycine max
  Clone ID: LIB3138-008-Q1-N1-G12
ccatctctcacgactttaggcttttccgctttgccctcccctgggacgacctactcatgggtttgccagttgggaagcacatattcctatgtgccaccgttgacgagaaactatgcatgcgagcctacactccaacaagcagcgttcacgaagtgggatacttcgacctcgtcgttaaggtttacttcaaaggggtgcaccctaagttccccaacggtgggatcatgtctcaacacttggactctctccccattggttctgtcttggacgtgaaaggcccacttggccacattgaatacactggcagaggaaacttcctcgttcatgggaaaccaaggtttgccacgaggctagccatgttggctggtggcacaagaatcacacccatttaccaagtggttcaagc

SEQ ID NO: 31930 - DNA, 375 bp, Glycine max
  Clone ID: LIB3138-008-Q1-N1-G5
ccccaattgcttttatgatcaacatcctttgttgtgtggatggaaaattcttgcgtgaatggacgcacccactgttgacttgttctttaaggatagcaatttataaaaaatatgtttgcaaagtttaatgtggaatcccttctgaacttccattcacagttatttccaatagcatgtttaatgagatgctacttaaatatagctatgaaaaattactgcgccaggctcaaactacaagtatgtttttacaatccttcaaaaaattcgtttcttcgagtgtgtatggtgatgatatcttaattagtgctcatgaatttatcaagcctcactttaatggttctatattgaaaaactctttagcttgtcataacatca

SEQ ID NO: 31931 - DNA, 383 bp, Glycine max
  Clone ID: LIB3138-008-Q1-N1-G7
aaaagtagtatttttagtcctactgctacaacaccagcagggagggttttttactcctgtgtctatgaatgttcctgtgcctaacttgtcgagtccaccagccattgcatcagtcatgcctggttcaaattctgttcagagttccttggagattagtagtcctgtggatgcttcatcttttgttaatcagtctagcactatgaaggaggaagagattaatagtttccctggtcaaagaccatctccatcgtttccctgatgttacactcgtaaggaacatcagcagaaacagcgtatcaaatcaagcaacaaatagcatacctcttgcttctggcaatatggtttccagcaatgggcccccttggttcaatgccttctgcacc

SEQ ID NO: 31932 - DNA, 320 bp, Glycine max
  unsure at all n locations
  Clone ID: LIB3138-008-Q1-N1-G8
gacaaaactagttcaactttgcaatttagaaagttagcagaagaggattttctcaagagaaactttaancanatgtctaatgttttgtgggtggctcctgaggacaaggcgagtttatggtcacaacttcattatgtttcgtgtaataatctggaaatgcaagaagcttatcttgtcaatctcgtaaatgtgttacgagaattgtatttgcacagtccagaggaagctcgccaattgagaaggaaagctctctctcgtattgaatggctgcaaaaagctgatgtgcctaccatagcacagattgaagagttccattcgat

SEQ ID NO: 31933 - DNA, 358 bp, Glycine max
  Clone ID: LIB3138-008-Q1-N1-G9
aagctctctctcttattgaatggctgcaaaaagctgatgtgcctgcatggtacaaattgaagagttccattcaatgcacaggatgatgaatgctcctgattcaaatgataatattgatttactgttgagcattgatttgttgggtttacaaggagcaggtaaagcttttccaaacaaaattgtttttgatgataagcttgtgttggctaacacacaagaattctttgatggaaattttccagaggattcttggttaccaatttttgagaattggctttatcctgtaagtcaattaccttcagaagctgtcgttgtaaatgttacatgtggtagtggacgtggtggtttacccaccact

SEQ ID NO: 31934 - DNA, 395 bp, Glycine max
  Clone ID: LIB3138-008-Q1-N1-H1
caatttttctctcaaccggcccaatttagcataagcccagcatggccgccgcaacagcaggaggcacctcgtccttcatggggacgcgcctcctggaggcccactccggggcggggcgggtgcaggcccggttcgggtttggcaagaagaaagccgccgccccgaagaaagtttccagggggtcgggctctagctccgataggcccctgtggtatccgggcgccaaggcgcccgagtacctggatgggagccttgtcggagactacggattcgacccatttgggctagggaagcccgccgagtacctgcagttcgagttggactcgctggaccaaaaccttgcgaagaacgtggctggggacatcattgggaccaggaccgagcttgcggacgtg

SEQ ID NO: 31935 - DNA, 318 bp, Glycine max
  Clone ID: LIB3138-008-Q1-N1-H10
ctccaacaaatttttgtaacactgtgctaggatcattaactctgccagatttatatacccggcagctgcggacaaaacatcaaggaaagttttatgaatccactaccttaactgaacacgatctcacgcaactgacctaaccgctgactcttacaacacacaaaataacactggatatactcctatagcaatgattctacccaaacatggagctggctacaattgcacctgcactctaaataaagacacaaaacagactgactctgcaaacttttcacctatagagtgaatgcactaattattaatggcatctacaac

SEQ ID NO: 31936 - DNA, 396 bp, Glycine max
  Clone ID: LIB3138-008-Q1-N1-H11
gcaatgccggcgctcgctgaagtttgctaggttcatgagcaggggcgggaagagttaccgaagcgaggaagagatgagggagaggtacgagatattctcgcaaaacctcaggttcatccgctcccacaacaagaaccgcttgccctacactctctctgttaatcattttgctgattggacttgggaggagttcaaaagacacagactaggcgctgcccaaaattgctctgccactcttaacggcaaccacaagctcactgatgctgttcttcctcccacgaaagactggaggaaagaaggaatagtgagtgatgttaaagatcaaagcagctgcggatcatgctggacattcagcacaactggggctttaaaaacagcctatgcacaagcatttgg

SEQ ID NO: 31937 - DNA, 404 bp, Glycine max
  Clone ID: LIB3138-008-Q1-N1-H12
ctgtgtcactggaaaaggctcagaaattggtgatttccttacggggcatccaggagtgaactgtataaggttcctttttaaatgatgctgtgatagcatgctttactggtggtgatactggcatttcaatttcaaagaaggcaggcatgattcctctgcaaatggagttaggaggaaaagatgcctgcattgtacttgaggatgctgacctggatttggttgctgcaaacattataaagggaggcttttcatacagtggtcagaggtgcactgctgttaaggttgtcctggtaatggagtccgttgccgatgctttggttgagaaggtgaaggctaaggtggcaaaactaactgttggaccaccagaggatgactgtgatatcaccccggttgtgtcagaatca

SEQ ID NO: 31938 - DNA, 346 bp, Glycine max
  Clone ID: LIB3138-008-Q1-N1-H2
gtttttacaatccttcaaaaattttgtttctttgtgtgtgtatggtgaggataacttaattagtgttcatgaatatgtcaagccttactttagtggttctaaattgaaaagctttctagctagtcataacatcaccattactgatggtattgacaaaactagtgcaactttgcaatttagaaagttagcagattgtgattttctcaagagaaactttaagcagatgtctaatgttctgtgggtggctcctgaggacaaggcgagtttatggtcacaacttcattatgtttcgcgtaataatctggaaatgcaagaagcttatcttgtcaatctcgtaaatgtgtta

SEQ ID NO: 31939 - DNA, 340 bp, Glycine max
  Clone ID: LIB3138-008-Q1-N1-H7
cataatttgagattatcatgatctagacaatcttcacatgacgcataattaagttgtggggacctttttgttaattggaatattcagttccatgctgtctaaatactaatcttagaccatgaacatgtggtagtcttgtaccatgtaataatttctcctctcctacagagtattctcacaggcttctagtgtttttggactagtttcatggtgtgaaaatcaattatttttcattgtgtagttacttctactttttcgtggcatcaccatgattttgtaaggtagaatttatttttgtgtattatccaaacacactattcattaagtggaattggcttta

SEQ ID NO: 31940 - DNA, 328 bp, Glycine max
  Clone ID: LIB3138-008-Q1-N1-H9
gttcttcaaaattttggaaaagttttctggtggcgatggaacggggatggtcagattcgcctcggggacgtgatttaccgtaacattccttttgaagtcaccattgaaggtcgtgtccctaaaaaagcctcttggggttggtggcatactcttcttctggccgaatcccacactttatgccatggtgctcctcacccaattatgctagttagcgggtatatttgatggcaatctatatgtgtacatacaatactgggatacaaatacatacttcgaaggattgaatcatggcgtgagaatgaccatgacttgctatagcatttaacac

SEQ ID NO: 31941 - DNA, 397 bp, Glycine max
  Clone ID: LIB3138-009-Q1-N1-A10
gggaaatgttataagctacaaaagagccttcatctattcgatcatgtcgccacacataaatggctgtttgggttacaggattccatttcatctgatgatgaatatcgttcttcccgcaacatacccatcagcttgttcaggcgatacaggaacttcattgatcgtggtggagccgacaatctaaaagagttcatcactgccggggtaaatgcatatgcactatgatgcaccgatgaaggattaaggaaagaacttatggatatgaagaactctgcgatcgaaattgatgtaatgcaaagttatggtggaagcacaagcttaaaatctaagataatctcagaggaggttgatgaatgcattttctggttaaacattatattcatcaccatcttgtgta

SEQ ID NO: 31942 - DNA, 392 bp, Glycine max
  Clone ID: LIB3138-009-Q1-N1-A12
aatattattttttttgttcctgaagacaaggcaaatatcgcggcacaaattcattatgttgggggtaataatctacaaatgcacgaagcttatcttgtcaatcatcatcaatgtgtcacgagaattgtttttgctcatcccatacaaatctcgccaattgaaaaggaaagctctatctcgctttgaatggctgcaaaaagctgatgtgcctaccatatcacaaattgaaaagttccattcaatgcaaaagatgaagaatgctcctgattcaaatgataaccttgatttactgttgatcattgatttgcctggatttacaacgagcatgtgaagcttttccaaacaaaattgattttaatgataagcttgcgttgccttacacacacaaattt

SEQ ID NO: 31943 - DNA, 386 bp, Glycine max
  Clone ID: LIB3138-009-Q1-N1-A2
attgattccagttccaatggccttgggcaccagcgccttgatcggaaggaaggttcttgtctcacccccaacccccaaaacaaccaaatcatctactccgctacaattccttttcaagagaagcatcttaaatgctcacaattcacaagctgctctagctgcccttatcttttcctccgcgagcctctctgtgaccccacaagcccttgccgctgataacgtcacccctccccctgtaattgaagcccaacagagccaattaaacccctccaactcatcctcccctttctcacagaacctcctcctcacagctccaaagccacaagccttctccgacctccccgaaggcaccaactggcgctacaacgagttcttgaacgccgtca

SEQ ID NO: 31944 - DNA, 397 bp, Glycine max
  Clone ID: LIB3138-009-Q1-N1-A4
gttctctcatttctcgtcttcactgagaaaaatccttcttcgtgcatgctcctcgtttctatctaaaggggcgaaagagtagattataagggggtaagtgagaaagagagtaaaaacaaaattaaaacatgactatggaagagggcagggtcgagaacgaggactacacacaagatggtactgtcaacattaaagggaaacctattcttagatccaaaagtggtggttggaaagcttgctcctttgttgttgtatatgaggtattcgaaagaatggcttattatgggatatcatcaaatttgatcctttatcttacaacaaagcttcaccaaggcacagtatcctctgcaaacaatgtcaccaattgggttggcaccatttggatgacacccatatt

SEQ ID NO: 31945 - DNA, 396 bp, Glycine max
  Clone ID: LIB3138-009-Q1-N1-A6
ctcatgttgttcttgttcctaacaaagtagcattaaaaaccatggcatcttcaccggacaccagcaaaaccataaagctgatgcgttacaacagctacctccgcagactcaacagcttcaaactccttaagacatccttcatcctcctcctcctcctctacaccctctccacccaccacctcctcctctcctccgccttccacggccccgcatgggagaatcaggtccgccactccgccctcccccgccgcccccacggcatgtcggtgctggtcaccggcgcggcgggcttcgttggctcccactgctccctctccctgaagaagcgcggcgacggcgtcctcgggctcgacaacttcaactcctactacgacccctccctaaaacgcgcacgcc

SEQ ID NO: 31946 - DNA, 191 bp, Glycine max
  Clone ID: LIB3138-009-Q1-N1-A7
ctaacaatatgcttgttcctaacacttgggacaatgaaagggatgggtttttcttcgtggagcagatccttcttaaagctcttgcctggctgcactttcctgcgtaaacactgcagatttaaactctttacgccactaattcctattcctcctccacttcttgagaactgccacacactaaattatcttgt

SEQ ID NO: 31947 - DNA, 332 bp, Glycine max
  Clone ID: LIB3138-009-Q1-N1-A8
gtggaaagccaggacctcacaaaattcacggtattggggctggttttgtgcccaggaatttggatcaagatgtgcttgatgaagttatagcgatgtcaagtgatgaagcagttgaaactgcaaagcatttagcactccaggaaggcttgctggtgggaattacttcacgagctgcatctgcagctgctttgaaagatggaaagaggcctgagaatgcatgaaagcttattggggttggcttcccaagctatggtgaaagatatttgtcaactattcttttccaatcaatacgggaagaacgcgagaaatatgcaacctgatccatgaattga

SEQ ID NO: 31948 - DNA, 393 bp, Glycine max
  Clone ID: LIB3138-009-Q1-N1-A9
attgaagttaaaatccttagccttccctacaactccagggacaaagacatcatcatgcatggctgcctccgtctccactgtcggagctgtcaacagagctcttttgaacctgaatggttctggagctggagcttcagctcccagttcagccttctttgggaccagcttgaagaaggttattgcctcaagggtccccaacagcaaggtttccggtggaagcttcaagattgttgctgtagaagagaagaaagagattgaagagacccagcagaccgacaaggacagatggaagggtcttgcctatgatatctcagacgaccaacaagacatcacaagaagaaagggtttggttgactcccttttccaagctccacaggatgctggaactcacta

SEQ ID NO: 31949 - DNA, 398 bp, Glycine max
  Clone ID: LIB3138-009-Q1-N1-B1
caagactgtgaattgtggaatcctgcttgcacaaaagcaatgactatgtcatttaatccaaacccgtgttctgatgcatggagtttggaatttctgaagcgtactggatttcattgcgatatcatttgtgtcactggatggactgccaccccaatgcaggatgttcaggttacaattgattggtttatttcctctcaggaatgtgttcccaggacctattgtgttttaaatccacaaaatccttttgtgttaaataggtggatgggaaaattgactttcccccagggcacttcccgaagtgttaagagaatgcctctttctatagggggaggagctggtgcaaagaatgctattctcatgaatatgccaaatgctgttctttcaatgtggagatattt

SEQ ID NO: 31950 - DNA, 393 bp, Glycine max
  Clone ID: LIB3138-009-Q1-N1-B10
tcaagattgttatgtctgggaatgcagcagtcaaaaggcgtgattgtgcctcattggtacaagtgtttttaacaaacagcaacagtacagagcattttgatgcatgtaagtggacaaaatcagaaccacattcctgggaattgatcttcccaatagaggtatgtggtcctaataatggttttgaaatgtggagttctgagtgggcaaatcaaacttcatggcatttgagtttccttattgacaatcccaaacagtctacagtttttgatattctcttgggaatctctcaagattttgaaattgctggtaatactcttatgccagctttttctgttccacaagctactgccagatcttctgaaaatgcggaatcctctgcatgatctggaattt

SEQ ID NO: 31951 - DNA, 368 bp, Glycine max
  Clone ID: LIB3138-009-Q1-N1-B11
ctcaaaccttatcttctcgagcggctcgagcggctcggcgcctattgctcatcactccttgctcttatccctactcctcttcgccgccgtggccaccgccgcgatggcggtggccgcgtccgacaccgacgacatcctgatccgtcaggtggtgccagatgttggcgaacccgaagatgaggacaacctgctgaacgcccagcaccactttccgagcttcaaagccaagttcgccaagacctacaccaccaaggaggagcacgatcatcgctttcgcgttttcaagtccaacctccgcagagccaggctgcaccccaagctcgacccctccgacgtccacggcgtcaccaaaatctccgatctaaact

SEQ ID NO: 31952 - DNA, 355 bp, Glycine max
  Clone ID: LIB3138-009-Q1-N1-B12
gcttatctttttatgctgctccactaaaaccaaaagtccggccggttcaaacgttcccatctcgccaccgtgaacaccccacacataaacacactccaagcgcacgttagcaacctacgctgtcttcgccaccgcgcgatcgccgtcgatggagtctctcttctactcgatcaacgtccacgaccttctttctgcgcaggatctctcggaccctaactcccctctctcggcgcccgatctccgtctcctgatccaacacctggagtcccactccctccaaatccgctttcaagtgcagtcctacctcgtctcgcaccgcgaggattttatgcgcctcttttccctttgcaaccac

SEQ ID NO: 31953 - DNA, 342 bp, Glycine max
  Clone ID: LIB3138-009-Q1-N1-B2
ctgatgcatggagtttggaatttctgaagcgtactggatttcattgcgatatcatttgtgtcactggatggactgccaccccaatgcaggatgttcaggttacaattgattggtttatttcctctcaggaatgtgttcccaggacctattgtgttttaaatccacaaaatccttttgtgttaaataggtggatgggaaaattgactttcccccagggcacttgccgaagtgttaagagaatgcctctttctatagggggaggagctggtgcaaagaatgctattctcatgaatatgccaaatgctgatctttcaatgtggagatattttgtggagatctcgt

SEQ ID NO: 31954 - DNA, 304 bp, Glycine max
  Clone ID: LIB3138-009-Q1-N1-B3
ggcattcgagtttccttattgacaatcccaaacagtctacagattttgatattctctggggaatctctcaagattttgaaattgctggtaatactcttatgccagctttttctgttccacaggctactgccagatcttctgaaaatgcggaatcctctgcatgatctggaatttgtgttttctttcgcttgttcgatcgtttaattcaataaaggaaattaggcatgaccctcttgttgagtatgctctgcctatttgaaaatctccacacctcttataattgtcgtaatgatgtgtgaagtgt

SEQ ID NO: 31955 - DNA, 84 bp, Glycine max
  Clone ID: LIB3138-009-Q1-N1-B4
gagcaatacgagatccctatggccacctcaaacggagtgctttttcattacttgcagacaccaatctactgctagggctacact

SEQ ID NO: 31956 - DNA, 392 bp, Glycine max
  Clone ID: LIB3138-009-Q1-N1-B5
aatgtggaatcccttctggatttccgctcacagttatttgcagtagcatttttaatgagatgctcattagatatagctatgaaaaattactgcgccaggctaaagctccaagtatgtttttacaatccttcaaaaattttgtttctttgtgtgtgtatggtgatgataacttaattagtgttcatgaatatgtcaagccttactttagtggttctaaattgaaaagctttctagctagtcataacatcaccattactgatggtattgacaaaactagtgcaactttgcaatttagaaagttagcagattgtgattttctcaagagaaactttaagcagatgtctaatgttttgtgggtggctcctgaggacaaggcgagtttatggtcacaa

SEQ ID NO: 31957 - DNA, 189 bp, Glycine max
  Clone ID: LIB3138-009-Q1-N1-B6
aacttaattagtgttcatgaatatgtcaagccttactttagtggttctaaattgaaaagctttctagctagtcataacatcaccattactgatggtattgacaaaactagtgcaactttgcaatttagaaagttagcagattgtgattttctcaagagaaactttaagcagatgtctaatgttttgtgg

SEQ ID NO: 31958 - DNA, 242 bp, Glycine max
  Clone ID: LIB3138-009-Q1-N1-B7
ctctaacctctcttccaaagatctttctttcagcactttggtggacaataaaaaaacagtgccttgggccgttttttgctgatcgtgccccatattgtagacaaacctatggcggccacttaagcataaagggctttgaaaagcgactttacttgcactcacgttgagaagctttctcttgattcatatgttccgcgcctatatcaaagatgcctgaatgtaaaagagaaaccagtgtttga

SEQ ID NO: 31959 - DNA, 401 bp, Glycine max
  Clone ID: LIB3138-009-Q1-N1-B9
gttttgtgtttgtttcctgaggacaaggcgagtttatgggcacaacttcattatgtttcgtgtaataatctggaaatgcaagaagcttatcttgtcaatctcgtaaatgtgttacgagaattgtatttgcacagtccagaggaagctcgccaattgagaaggaaagctctctctcgtattgaatggctgcaaaaagctgatgtgcctaccatagcacagattgaagagttccattcgatgcagaagatgatgaatgctcctgattcaaatgataatattgatttactgttgagcattgatttgttgggtttacaaggagcaggtaaagcttttccaaacaaaattgtttttgatgataaacttgtgttggctaacacacaaaaattctttgatggaaattt

SEQ ID NO: 31960 - DNA, 395 bp, Glycine max
  Clone ID: LIB3138-009-Q1-N1-C1
gaatttgttaatgagtggccttaggatccttgttaaggaattataataaaaggtaaaagagcggtccagtgcccaaatgggatgtagggagggttgatatatgaagccttaccaggcatgcgaagaggctattttcaagtttgaacttgtgacctctatgtcacaaaggcaggaaccttacagttatacataatctcaccgtctaatttaaaaagtattgaatgaaaaagtagaagcatttaatatcttgtaaatctataaagccatcattattttcttctttaagctatcaggaggatttgtttattaaatgatattgttaatagagagtattattaaatgcttcttcaacaatgccctaagagcattggttaacaacacctttcattttttgc

SEQ ID NO: 31961 - DNA, 371 bp, Glycine max
  Clone ID: LIB3138-009-Q1-N1-C12
gaatggttctattgtgttgatgaggaggattcctttggcgcggtttctttaagtgcggcacttaatggtgttgaaggtttggactatatggaaagaattcctcttgccacatctgagggatttcctcatgtgctttcacgcaaaaatggtgaaaaaggcaaaaggagatttgtctctggggatggtgaaaagatgacactgatttcgggaaccagtgttgaagaggcttacaacaagctaatagttgaacttgagaaaagtgttcctacattggttggcattgaatgtcccaatgatgataaactttcttctctcatatattttgacaaacctaaaacgcgctgctttactattctccctatgggagttaa

SEQ ID NO: 31962 - DNA, 86 bp, Glycine max
  Clone ID: LIB3138-009-Q1-N1-C2
agaaaatcctcacccatttcttcgtagccaaacactctgaaattgtcagttatgtcgtggcaagcgtatgtggatgatcacctact

SEQ ID NO: 31963 - DNA, 395 bp, Glycine max
  Clone ID: LIB3138-009-Q1-N1-C3
cctcgagtcacagggtccaaattgagcgtcgcagtctttgcaggtctggctcgcgccggttgcatggtgtatgatatgggactagccaccaccccggcttgtttcatgagcactttgttgcctccatttgcctatgatgcttcaatgatgatgacagcttctcacttgccatacaccagaaatggtctgaaattttttacaaagagaggtggactgacttcaacagaggtggaggaaatatgtgaaaaagctgctcgtaaatatgcaaataggatggccaaggtgtctactttgcttaatgttcttccaacaaaagttgattttatgagcacctactcaatgcacctacgagaaatcatcaaggagagaatcaatcatcctttgcattatgacac

SEQ ID NO: 31964 - DNA, 403 bp, Glycine max
  Clone ID: LIB3138-009-Q1-N1-C4
caaaaagacagagggttaattgtggagtattttggaaggatgtcttacgttgctcataacgttaatcagccccaagagaaagatttgttggagggaaatttttcctttgatattaaatctcgctctagattggaaaaagtttcctctacaaaagcacaatttgttagtggaaaaaccttcaaatatgatataattggtgctggttcacattcttcagaagattttcctgaaaaggaagatcaagaaaaacccaaaaagattgatgccagattgagacaaagaatagatcctcaatacaatgaggttcacgctcagatggaaacaaatttgcttaaattgtctcttgatgatgttgaaactcctaaaggtttcatgttggatcttaaaatttctcaatctaaaa

SEQ ID NO: 31965 - DNA, 223 bp, Glycine max
  Clone ID: LIB3138-009-Q1-N1-C6
acatattacaacttcttcttcttcttccattgaccattgttgttgttgttgcttttgttcgttctcgccatgccaatgttgtcttcgagaggcttcattgcttatctcgtatctgctttctcttgtgctgatctgtctgcgctttttctcaccaaccacatccatcatgatgataacaagccaattactttgttagcctctcgagtgtctgaaactcttaaag

SEQ ID NO: 31966 - DNA, 261 bp, Glycine max
  Clone ID: LIB3138-009-Q1-N1-C8
ctgcttgttatcttttacttgaaaccctgttcgtagtggggggaaatgctttcttctccgagcacacccactagattcctttgattctttctttgcttagaattccacagtatatggggactgttcttttcaattactccccacctttgggattcaagggtttgatcatggtggcagaagactcattgcttgggcacgcggacatatggaggtacatgtcatgctttacggactccggggaccttaaagctgttatagagc

SEQ ID NO: 31967 - DNA, 397 bp, Glycine max
  unsure at all n locations
  Clone ID: LIB3138-009-Q1-N1-D1
agcaaaaagaaagaatcccatgcgaggagaaagatggaggggaaggagcaggatgtgtcgttgggagcgaacaagttccccgagagacagccgattgggacggcggcgcaaagccaagacgacggcaaggactaccaggagccggcgccggcgccgctggttgacccgacggagtttacgtcatggtcgttttacagagcaaggatagcaaagtttgtggccacttttctgtttctctacatcaccgtcttaaccgttatgggagtcgccggggctaagtctaagtgtagtaccgttgggattcaaggaatcgcttgggccttcggtggcatgatcttcgccctcgtttactgcaccgctggcatctcagggggacacantaaacccgcggtgacat

SEQ ID NO: 31968 - DNA, 392 bp, Glycine max
  Clone ID: LIB3138-009-Q1-N1-D12
tgcagtgcttactatcagggcaattttccaaaggatgacgagttattctatctatgctgtgtcaatcaccattcgtatagtgtttggtttcatgtttattgcattgatttggaaatttgattttgcacccttcatggtgttgattattgccatactaaacgatggtaccatcatgacaatatccaaggatcgagtgaaaccatctccaatgccagacagctggaagctgagggagatatttgccactggtgttgtgctatgagcttacatggcactaatgacagtagtatttttctggctcatgaaagataccgacttcttctcggacaagttcggtgtgaggtctataaagaacagcccctgagaaatgatggcagccctgtacctacaag

SEQ ID NO: 31969 - DNA, 392 bp, Glycine max
  Clone ID: LIB3138-009-Q1-N1-D5
gccctcgccggttttaacgtggggctgttgctgagaggggttcaaaagacggacatccagagagggatggtgttggcgaagcctggcacgattacgccgcacaccaagttctcagcgattgtgtatgttttgaagaacgaagaaggtgggagacattcacctttctttgcagggtatatgcctcagttttacatgaggaccaccgatgtgactgggaaggttacggctatcaccaacgatagtgatgaagagtcgcagatggtgatgcccggtgaccgagttaagatggtggtggagctcattgtgcctgtggcttgcgaacaggaaatgaggttcgctattaaggaaggaggcaagaccgttggtgcaggtgttatccaatccatcattga

SEQ ID NO: 31970 - DNA, 358 bp, Glycine max
  Clone ID: LIB3138-009-Q1-N1-D6
cacaagctggtgcagtttggagagattcaggaaaaagttgtattgaaattttcacaagaggaatttcttacagcttggtcaactcaggtgcgtcctgcaacaactctgttggctgatgggtgtccatatttgtatgcaatggtgcatgatagttcagtgtctacaataccaggtgattttgtcattggtgtcaagttgacaaccataaacaatatgtgtgcatatgggctcaatcctggtatttcaggttctcgtcttttgggcaccattcctcagtccatttcacagcaaactgtttggaatcaaattgcaacagtgagaacaccatttgaattttgattctagcaagcagagcttt

SEQ ID NO: 31971 - DNA, 382 bp, Glycine max
  Clone ID: LIB3138-009-Q1-N1-D7
tgaatgttgaattccttctggatgaccgctcacagaggtgtgcagtagcatttataatgagatgctcatcagatatagctatgaaaaattactgcgccaggcaaaagctccaagtatgtgtttacaatcctgcaaaaattttgttgctttgtgtgagtatggtgattatcactgtaattagcgttcatgaatatgacaagccttactttaaaggttctaaaatgaaaagctatctagctagttataacatcaccattgctgatggtattgacaaaactagttcaactttataatttagaaagttatcacattgttattttctcaaaagaaactttaagcagttgtttaatgtattgtgcatcgctcctgaggacaaggctag

SEQ ID NO: 31972 - DNA, 396 bp, Glycine max
  Clone ID: LIB3138-009-Q1-N1-E1
caaacacaaagacatcatcatccatggctgcctccgtctccactgtcggagctgtcaacagagctcttttgaacctgaatggttctggagctggagcttcagctcccagttcagccttctttgggaccagcttgaagaaggttattgcctcaagggtccccaacagcaaggtttccggtggaagcttcaagattgttgctgtagaagagaagaaagagattgaagagacccagcagaccgacaaggacagatggaagggtcttgcctatgatatctcagacgaccaacaagacatcacaagaggaaagggtttggttgactcccttttccaagctccacaggatgctggaactcactatgcagtcatgagctcctacgagtacctcagcactggac

SEQ ID NO: 31973 - DNA, 172 bp, Glycine max
  unsure at all n locations
  Clone ID: LIB3138-009-Q1-N1-E10
ttcactttttattgtcttcaattcagtaaaccacaccgcgtccgattgcagagtcgcggcggctccanaacctacaatcccaaccggcgaacaagatctgcgttgactgttcccagaaaaaccctcaatgggcctcggattcctacggcgtctccatgtgccttgagtgctc

SEQ ID NO: 31974 - DNA, 388 bp, Glycine max
  Clone ID: LIB3138-009-Q1-N1-E12
ggacttcttcagttcttggacaacaaaatggatggatggccattgctccagcttttatggacaagcttgttgttcacatctccaagaacttcatgaccctgcccaacatcaaggttcctctcattcttggtatctggggaggcaagggacaaggaaaatctttccaatgtgagcttgtctttgccaagatgggaatcaaccccatcatgatgagtgctggaaagttggaaagtggaaatgcatgagagccagcaaaactgatcatgcagagataccgtgaagctgttgacatgatcaagaagggaaagatgtgcgctctcttcatcaacgatcttgatgcacgagctgggtctcttggttgaaccacacaatacactgtgaacaacca

SEQ ID NO: 31975 - DNA, 372 bp, Glycine max
  Clone ID: LIB3138-009-Q1-N1-E2
caccattactgatggtattgacaaaactagtgcaactttgcaatttagaaagttagcagattgtgattttctcaagagaaactttaagcagatgtctaatgttttgtgggtggctcctgaggacaaggcgagtttatggtcacaacttcattatgtttcgtgtaataatctggaaatgcaagaagcttatcttgtcaatctcgtaaatgtgttacgagaattgtatttgcacagtccagaggaagctcgccaattgagaaggaaagctctctctcgtattgaatggctgcaaaaagctgatgtgcctaccatagcacagattgaagagttccattcgatgcagaggatgatgaatgctcctgattcaaatga

SEQ ID NO: 31976 - DNA, 384 bp, Glycine max
  Clone ID: LIB3138-009-Q1-N1-E3
gaaacaatggccaatgtttcaattccactcccacgaaacggtttgtccaaacccaattactcgacaaaacgcccatgtttcaccccttcagcttcaacactcagaatttcttgctctggagtggctgagtttgatggatctcatcagaaaaaaggaggtttgtttaatttcaatggaatcaagggcgtggcttgtggtattcttgcagcttgtgctgttacttctgctgcatttcctgttactgctgctactcagaggcttcccccattgtcaactgagcccaatcgctgtgagcgtgcatttgttggcaacacaattggtcaggcaaatggtgtatatgataaaccattagatctccggcaatgtgatttcacaaatgagaaa

SEQ ID NO: 31977 - DNA, 379 bp, Glycine max
  Clone ID: LIB3138-009-Q1-N1-E4
cacccattggaagcccacttttgaggccaagatcaccacaacacatgaatgggcgaatgtctccctctcctatatctagccctcggactgcttctggtgcatccacgcctcttaatggtggtagcggtgccattccatttagtaatcacttagtttacattcaagagggtcttggaaacttgccaaaatcttcaaatggtgtctacgttagtggccctgctcatcatgacttgaatgttgacatttttcgaggaatgcaacagacatctcacattacatcagaactggttccaagtgaaagtgatgttctggggaagcagtttgcacggactcctcataatgagccgtatgatgttcaatcagtcttggctgaccgtgt

SEQ ID NO: 31978 - DNA, 394 bp, Glycine max
  Clone ID: LIB3138-009-Q1-N1-E5
aatttctccaacgctatcgagccaaacccaaacgttaactcagacgaagcaccaacagaagaagaagaaacaaaaccgaacctctctaaactctccaacgtcgccacccgattcatcgcatttcgcaggctgcaatggcgacgttcgaactgtaccgcaggtcgacgattggaatgtgcctgacggagacgctggacgagatggttcagaacggcactctaagccccgagctcgcgattcaggttctggtccagttcgataagtccatgactgaggctctggaaacgcaagttaagagtaaggtctccatcaagggacatctccatacatatagattttgtgacaatgtttggaccttcatcttacaagatgctttgttcaagagcgaagacag

SEQ ID NO: 31979 - DNA, 396 bp, Glycine max
  Clone ID: LIB3138-009-Q1-N1-E6
ttgcaatttagaaagttagcagattgtgattttctcaagagaaactttaagcagatgtctaatgttttgtgggtggctcctgaggacaaggcgagtttatggtcacaacttcattatgtttcgtgtaataatctggaaatgcaagaagcttatcttgtcaatctcgtaaatgtgttacgagaattgtatttgcacagtccagaggaagctcgccaattgagaaggaaagctctctctcgtattgaatggctgcaaaaagctgatgtgcctaccatagcacagattgaagagttccattcgatgcaaaagatgatgaatgctcctgattcaaatgataatatttgattactgctgagcattgatttgttgggtttacaaggagcaggtaaagctttt

SEQ ID NO: 31980 - DNA, 392 bp, Glycine max
  Clone ID: LIB3138-009-Q1-N1-E7
tctggatctctttttctctgcgatggagtttcgcgtttccgtcatttggagccttctcctcattgtctctttcttctctcctcaaatcaagggtgaggcttctggttccgtcttcttcgtcgatagctccagtaatcaattcattcgcgccagatcatccaactatgagcaaccttcactgttgctagaagaagctggtgctgttgtgtcagtcctgcttggttatgctcctccttccacccttccagctggcagctcatccaagttgaatgatgttctgattcctaacccattcaagatgcctccagctgtgtttttgctggaagtgaatggaatcaatggtcttggaaatcttgtccaggataatccaatgttcagcaattcattttggg

SEQ ID NO: 31981 - DNA, 296 bp, Glycine max
  unsure at all n locations
  Clone ID: LIB3138-009-Q1-N1-E8
gtggtatctagttttgtgatactacatacacccaaagcggaataattttctagcaagccgagcttttgtcanttttctattgaccttctcggtggaggaatcttagtggacaaaactggagattggatcacacttatacaaaattctccaattagtaacttgttgagagttgctgcttggaagaaaggctgtttaatggtcaagattgtgatgtctgggaatgcaacagtcaaaaggagtgattgggcctcattggtacaagtgtttttaacaaacagcaacagttcagagcattt

SEQ ID NO: 31982 - DNA, 379 bp, Glycine max
  Clone ID: LIB3138-009-Q1-N1-F1
tccggtcgcaccctcctcccttcctccgtctccgatttccgaccggcattcgacgtcctcgatgccgaccgcgacggcaaaatcagccgcgacgacctccgcgccttctacgccggagtcggcggcggaggagatgacgtgatcggggcaatgatgacagtggctgacaccaataaggacgggttcgtggagtacgaggagttcgagcgcgtggtctcggcggagagaaagcccgtggggtactgtggggccatggaggacgtgttcagggtcatggacaaggacggcgacggcaagctcagccaccatgatctgaagacttacatggcctgcgctggttttccggccaccgacaacgacatcaacgccatgatccgat

SEQ ID NO: 31983 - DNA, 398 bp, Glycine max
  Clone ID: LIB3138-009-Q1-N1-F10
aatggccttagccgcatcccccaccactttctctctccggcctccgccaccccttcctcctcctccaccgccacctccgcctccccctccccctcgcgcgtgcagctcacctcctccctccgcgcccgcccgctgcgccgcctgggcttcgccgcggcggacccgctgctcgcggcgagtgtagcagcgcgcgtggcggcggtgagaggaggaggaaagggcgcgaggggggtggtgtcgatggcgaacaagaacgtgggggacctgaacccggcggacctgaaggggaagaaggtcttctgtagggccgacctcaacgttccgctcgacgacaaccagaacatcaccgactacaccagaatccgcgccgtcattcccaccatcaaacatctcattca

SEQ ID NO: 31984 - DNA, 403 bp, Glycine max
  unsure at all n locations
  Clone ID: LIB3138-009-Q1-N1-F2
agcaaactgtttggaatcaaatggcaacagtgagaacaccattgaattttgattctagcaagcagagcttttgtcagttttctattgaccttctcggtggaggaatcttagtggacaaaactggagattggatcacacttatacaaaattctccaattagtaacttgttgagagttgctgcttggaagaaaggctgtttaatggtcaagattgtgatgtctgggaatgcagcagtcaaaaggagtgattgggcctcattggtacaagtgtttttaacaaacagcaacagtacagagcattttgatgcatgtaagtggacaaaatcagaaccacattcctgggaattgatcttnccaatagaggtatgtgggcctaataatggttttgaaatgtggagttcttg

SEQ ID NO: 31985 - DNA, 398 bp, Glycine max
  Clone ID: LIB3138-009-Q1-N1-F3
ggaaatttggctgatgataccatcaattttgaggcttttccccagaagctggtgcagtttggagagattcaggaaaaagttgtattgaaattttcacaagaggaatttcttacagcttggtcaactcaggtgcgtcctgcaacaactctgttggctgatgggtgtccatatttgtatgcaatggtgcatgatagttcagtgtctacaataccaggtgattttgtcattggtgtcaagttgacaaccataaacaatatgtgtgcatatgggctcaatcctggtatttcaggttctcgtcttttgggcaccattcctcagtccatttcacagcaaactgtttggaaatcaaatggcacagtgagaacaccattgaattttgattctagcaagcagagctt

SEQ ID NO: 31986 - DNA, 237 bp, Glycine max
  Clone ID: LIB3138-009-Q1-N1-F4
ttattttactgatcgtctttcatacagaatgtctgtaatcttaaacctaaaaaaatggttgagcttacggttcataatgtttctttagaaagaacaaataaggtagtctttctttatttttaggattggattggggaaatagttttattgtaaaccttcttgttttttttagtattgatagcttgcctttagtgaaaccaaaaaaatatatgaatttattgaaatgtactttgattt

SEQ ID NO: 31987 - DNA, 384 bp, Glycine max
  Clone ID: LIB3138-009-Q1-N1-F5
aggagaaggaggttaagaaaaagaagaccattaatgagggatctcacgagtggtcattggtgaacaagcaaaaacctatttggatgaggaaacctgaagagattacgaaagaagaatatgctgctttctacaagagtcttaccaatgattgggaagagcatttggctgttaagcacttttctgttgagggtcagctggagtttaaggctgtcctctttatccccatgagggcaccttttgatctctttgacaccaggaagaagcctaacaacatcaaacttgttgtgcgccgtgtcttcatcatggacaactgtgaggagttgatgcctgaatatcttagctttgttaagggtattgtggattcttaggatctttcttttaaca

SEQ ID NO: 31988 - DNA, 362 bp, Glycine max
  Clone ID: LIB3138-009-Q1-N1-F6
tgaccttctctgttgaggaatcttagtggacaaaactggagattggatcacacttatacaaaattctccaattagtaacttgttgagagttgctgcttggaagaaaggctgtttaatggtcaagattgtgatgtctgggaatgcagcagtcaaaaggagtgattgggcctcattggtacaagtgtttgtaacaaacagcaacagtacagagcattttgatgcatgtcagtggacaaaatcagaaccacattcctgggaattgatctttccaatagaagtatgtggtcctaataatggttttgaaatgtggagttctgagtgggcacatcaaacttggtggcgatttgagttttcttattgac

SEQ ID NO: 31989 - DNA, 339 bp, Glycine max
  Clone ID: LIB3138-009-Q1-N1-F9
tgaagcctgttgcaccgaaatcatctcccagaccgtcgggggggtcgacctaaaagcgcgccccttcaagtactggttacaccccatgggtgacgaggaggagatcgaggaggaggaacacaccgctgatgctctgatcatcgcgaccggcgcaaaggctaggaggttagatcttaagggcgaggacaagtactggggtaacggtgtatccgcatgcgccggatgcgatggttccctccccatgttccgcgagcagccactggtcgttatcggaggtggtgactaggcagtcgaggaggccttgtacctcaccaaaaatgcgagcaaggttactgtgct

SEQ ID NO: 31990 - DNA, 308 bp, Glycine max
  Clone ID: LIB3138-009-Q1-N1-G1
gcaattttagagcatgtgttgatttgcagcgcactcatcgttttggaggaatgattaaaatggtggccacagttggtattcctgagaatacaggtatatcattggcctgtgctatgaatagttcttttagggggcgcgccagttctgatatttacaccatctgctctcaagactgtgaattgtggaatcctgcttgccaaaagcaatgactatgtcatttaatccaaacccgtgttctgatgcatggagtttggaatttctgaagcgtactggatttcattgcgatatcatttgtgtcactggatgga

SEQ ID NO: 31991 - DNA, 388 bp, Glycine max
  Clone ID: LIB3138-009-Q1-N1-G12
cgaaaattttatttgcacagtccacaggaagctcgccccgtgagatggaaagctctgtctggcattgaatggctgcaaaaagctgatgtgcctaccatagcacagattgaagagttccattcgatgcagaggatgatgaatgctcctgattcaaatgataatattgatttactgttgagcattgatttgttgggtttacaaggagcaggtaaagcttttccaaacaaaattgtttttgatgataagcttgtgttggctaacacacaagaattctttgatggaaattttccagtggattcttggttaccaatttttgtgaattgtctttatcctgtaagtcaattaccttcagaagctggcgttgttaatgttacatgtggtagtggac

SEQ ID NO: 31992 - DNA, 376 bp, Glycine max
  Clone ID: LIB3138-009-Q1-N1-G2
gttttcttaaaatttcttccttgccactgccagtgtgtcaccaccatggccaccgtcacaacccaagcctccgccgcgattttccggccatgtgcctcgaaatcgaggtttctgaccggctcttccggtaaactcaaccgggaagtgactatgaggccaatggggtgccctccttctgcctctttcaaggttgaagccaagaagggagagtggttacctggcttggcctccccaacttacctcaatggcactcttcctggtgacaatggatttgaccctctgggactagctgaggacccagagaacttgaggtggtacgttcaagccgagcttgtgaatggacgttgggccattgtgggtgttgcaggaatgctac

SEQ ID NO: 31993 - DNA, 281 bp, Glycine max
  Clone ID: LIB3138-009-Q1-N1-G3
aaaaaaaaaaaattataaaaaaaaaaaaaaaaaaaaaaaaaaaagggaggaaaaaaaaaaaaaaaaaaaaaaaaaaaaaaaaaaaaaaaaaaaaaaaaaaaaaaaaaaaaaaaaaaaaaaaaaaaaaaaaaggggggggccccccctttttggcctcttccccccggaatttaattccggcccggtccctgggggggtcccagttttccttttagggaggctttttaaactttggcttaataatggccatagctgttccctttgtaaaattgttttccctt

SEQ ID NO: 31994 - DNA, 403 bp, Glycine max
  Clone ID: LIB3138-009-Q1-N1-G4
cgccaattgagaaggaaagctctctctcgtattgaatggctgcaaaaagctgatgtgcctaccatagcacagattgaagagttccattcgatgcagaggatgatgaatgctcctgattcaaatgataatattgatttactgttgagcattgatttgttgggtttacaaggagcaggtaaagcttttccaaacaaaattgtttttgatgataagcttgtgttggctaacacacaagaattctttgatggaaattttccagtggattcttggttaccaatttttgtgaattgtctttatcctgtaagtcaattaccttcagaagctgtcgttgtaaatgttacatgtggtagtggacggtggggtttacccaccactgcttggattagttctgcagttaacaatc

SEQ ID NO: 31995 - DNA, 366 bp, Glycine max
  Clone ID: LIB3138-009-Q1-N1-G6
acaagctgcagctaccttcatgcaacccaccaaggttggcatagcctctcgcaacctcaaatctacacaatgcatttctaaggcttttggcttggaacctgctgcagctaaactcacttgctcccttcagcctgatctcaaagaatttgctcaaaaatgtgtcgacgctaccaaaattgcaggattcgcccttgccacctctgctctcgttgtttctggagcaagtgcagaaggtgttccaaaaaggctaaccttcgacgaaatccagagcaagacatacttggaagtgaagggaactggaactgctaaccagtgcccaaccattgaaggtggagtggactcattcgccttaagccagggaaatac

SEQ ID NO: 31996 - DNA, 304 bp, Glycine max
  Clone ID: LIB3138-009-Q1-N1-G7
gagtttccttatttacaatcccaaacagtctacagtttgtgatgttctcttgggaatctctcaagattttgaaattgctggtaatactcttatgccagctttttctgttccacaggctactgccagatcttctgaaaatgcggaatcctctgcatgatctggaatttgtgttttctttcgcttgttcgtttgtttaattcaataaaggaaattaggcatgaccctcttgttgagtatgctctgcctatttgaaaatttccacacctcttttaattgtcgtaatgatgtgtgaagtgtgtgttat

SEQ ID NO: 31997 - DNA, 387 bp, Glycine max
  Clone ID: LIB3138-009-Q1-N1-G8
gtgctcttcacctttcactccacggaatcaaaagcaagtgctaagaagttccgtgttcctattctcaaacctgtagcaccaaacccaagttgtcatccaagttttataatactacatatattattattatacgatacataacaatagtattaatattgttgtgattgtgtgtgatttttggtgtcgtccttttttcttatattaaggtggtacggagcttatatgtgttgattcaattcgtcgacaagaaaccttagtttgatatttgattggttctgtggagagttttcctttggtgtggttggtttgtgctgtttttggttgggaataggaatggctaatgaaggaaagaaaagcaataacttttattcgatcttgggcttgagc

SEQ ID NO: 31998 - DNA, 366 bp, Glycine max
  Clone ID: LIB3138-009-Q1-N1-G9
attttccgtactgatggtattcctgaacaggacattgtgaggcttgttgacaccttccctggccaatccattgatttctttggtgcactgagggccagagtatatgatgatgaagtgaggaagtggatttctggtgttggtgttgacagtgttgggaagaagcttgtgaactcaaaagatggacctccaacctttgagcagcccaagatgactctggagaagctcttgctgtatggtaacatgcttgtccaagaacaagagaatgtcaagagagtccaattggctgacaagtacttgaacgaagctgctcttggaaatgctaacgaggatgctattcagaagggaaactttcttcagtcttgaatt

SEQ ID NO: 31999 - DNA, 388 bp, Glycine max
  Clone ID: LIB3138-009-Q1-N1-H10
agtatctatctaaagtaaataatcatggcacgggagaacgctcttgttattggtggtgtgattggggatgttctcaacccttttacaagctccgtttctttgactgtttcaatcaataatagggcgattagcaatggcttggaactcaggccctctcaagttgttaatcgccctagggttactgttggtggtgaagacctaaggaccttctacactctggttatggtggatgcagatgcacctagccctagcaaccctgtcttgagggaataccttcactggatggtgacagatattccagctaccacaaatgcaagctttgggagagaggttgtgttttatgagagcccgaacccttcagtagggattcatcgaatcgtgttcgtat

SEQ ID NO: 32000 - DNA, 338 bp, Glycine max
  Clone ID: LIB3138-009-Q1-N1-H12
gtggaatcttatgtgaaaggaaaagaaaaaaagatcttggcgtcaaaccctaatcctagaaatgggtacctcgtcagaggtttgcaagtggagtttccctaccaaccatatggatctcagtttgcgtttatggctagagtgatttccacccttaatctagttcataaagaaggccattgtcacgcgttgcttaagtctacaagccgtactggtaagtccctttcacttctttgatcctctctctctaggcaacaccacttaaatctcaacatgaccatgttaagcccgcgtcggaagcaaccaccgatcctttggctataatggcgaatttgttcccg

SEQ ID NO: 32001 - DNA, 405 bp, Glycine max
  Clone ID: LIB3138-009-Q1-N1-H2
atctaagtgagatacacagtcgttaggtagcaagcataagtgtctaacgttagaaacatatctgctacatatcgtgtgcattttggaattgtgccactaaaattctattcatctatggctgcctcatcttatgctatgcaatcaatccttgcaaaccctatgatccgcatttccagcgggtctagggagaaccattttggtgttcctgcttatcacatgagaaggaatgttggcctgagagttaggtccatggctgaggaagagcaaccaagtcagcctgcgaccccagttacaccaccaccagcagaacccaaaccacagccagtctctactccttcaccaaaggtgagcaccaagttttctgatgtgttggcgttcagtgggccagcacctgagaggatcaat

SEQ ID NO: 32002 - DNA, 155 bp, Glycine max
  Clone ID: LIB3138-009-Q1-N1-H6
ctttgtcactaaaactcatgaatatgattactgacaaaggaattgagaaaaacagccctgggtttttcttgtgaagcaagaattctcatcatataactcgagacctgacttcgccgcgtactctactgctctttcttgagccgtcttcaatcttg

SEQ ID NO: 32003 - DNA, 352 bp, Glycine max
  Clone ID: LIB3138-009-Q1-N1-H8
ggagctggtgcaaagaatgctattctcatgaatatgccaaatgctgttctttcaatgtggagatattttgttggagatctcgtctttgaagtttctaagatgacttctccctacattaaatgtacagtctctttcttcatagcatttggaaatttggctgatgataccatcaattttgaggcttttccccacaagctggtgcagtttggagagattcaggaaaaagttgtattgaaattttcacaagaggaatttcttacagcttggtcaactcaggtgcgtcctgcaacaactctgttggctgatgggtgtccatatttgtatgcaatggtgcatgatagttcaatgtcta

SEQ ID NO: 32004 - DNA, 395 bp, Glycine max
  Clone ID: LIB3138-009-Q1-N1-H9
ggatcacacttatacaaaattctccaattagtaacttggggagagttgctgcttggaagaaaggctgtttaatggtcaagattgtgatgtctgggaatgcagcagtcaaaaggagtgattgggcctcattggtacaagtgtttttaacaaacagcaacagtacagagcattttgatgcatgtaagtggacaaaatcagaaccacattcctgggaattgatcttcccaatagaagtatgtggtcctaataatggttttgaaatgtggagttctgagtgggcaaatcaaacttcatggcatttgagtttccttattgacaatcccaaacagtctacagtttttgatattctcttgggaatctctcaaaattttgaaattgctggtaatactcttatg

SEQ ID NO: 32005 - DNA, 366 bp, Glycine max
  Clone ID: LIB3138-010-Q1-N1-A1
ggattctggaaatataccaatatagtatgccgtactggtacgcacgtgtgacatcgtatgctgcaaaccgctgaagttacttccacttttattaccgtgcgagaaatagcattatcctaagcgaaactacgcggtgctttccatgcatacccagatgagttgtaagtatggatttcaagtatctgctggctggtatgtgtgtttgggcttggtttggatcaataacttttgcaacttctaatgattggaggttgatgaggattggtctaaaaagaggactttagaccttcattgtcttaaagcttggagaaataaagaggctgggcatcacagggatttagggggggttatagaaactgttgtgat

SEQ ID NO: 32006 - DNA, 394 bp, Glycine max
  Clone ID: LIB3138-010-Q1-N1-A10
agagggttaggggacttcataggtggagacttgataaagtttgagcttggacgttggctttcagatgttgaagagcacaaagcacttgcaatataccctcctcatgaaggaggctatgagggccgctacttgtcgcgtctcaaacgccaagggtactatttcctcgaccttacggctcgtggccttggtgatcctgaaaccaccctcaccaagattcaccctgtttgccctcctcatgttggcaagcagccaatagcaaggtggtatttcccaccagaagttgattacagattagaagcgttgccaccaaatgccaaaggattggtagtgtggataattgaagccaaggttctctctaaggcagaactgcagttcctagctttgctgccaacac

SEQ ID NO: 32007 - DNA, 397 bp, Glycine max
  Clone ID: LIB3138-010-Q1-N1-A11
attggtgtcaagttgacaaccataaacaatatgtgtgcatatgggctcaatcctggtatttcaggttctcgtcttttgggcaccattcctcagtccatttcacagcaaactgtttggaatcaaatggcaacagtgagaacaccattgaattttgattctagcaagcagagcttttgtcagttttctattgaccttctcggtggaggaatcttagtggacaaaactggagattggatcacacttatacaaaattctccaattagtaacttattgagagttgctgcttggaagaaaggctgtttaatggtcaagattgtgatgtctgggaatgcagcagtcaaaaggagtgattgggcctcattggtacaagtgtttttaacaaacagcaacagtacag

SEQ ID NO: 32008 - DNA, 397 bp, Glycine max
  Clone ID: LIB3138-010-Q1-N1-A12
gctagtttagttatctactcttttctgcatgtttgttctctcaacgactcctccgcgaaagagtattattcaatattttggttgggttgaatcccggggttgaagcgttgcagacatcacggctattctaagagtgtctcgctccctcattcatgtccgatctgtacgacggaggacgggtagttgcgtaactgccgttaacccttcgccgcacggtgggcgtggtgctttgccttctgaaggtggtagcccttcagacttgctcttcctcgctggtggtggtttcttctagtttcttcactcttttcattacttttagcctgcatagttttaaataagaaaaaaaaaacagcgactttgtgactagttaagatcaccgtttcttcttcttcttctt

SEQ ID NO: 32009 - DNA, 412 bp, Glycine max
  Clone ID: LIB3138-010-Q1-N1-A2
ggatagtccaaagtctacaataccaggtgattttgtcattggtgtcaaggggacaaccatgaacaatctgtgtgcatatgggctcaatcctggtattacaggttctcgacttttgggcaccattccttactccatgttacagcaaactgcctggaatcaaatggcggcagtgagaacaccattggatttcgattctagcaagcagagcttttgtcagttttctattgaccttatcggcggaagaatcttagaggacaaaactggagattggatcacactcatacaaaattctccaattagtaactcgttgagagatgccgcttggaagaaaggctgtttaatggtctagattgtgatgtctgggaatgcagcagtcaaaacgagtgattgagcctcattggtacaagtgttt

SEQ ID NO: 32010 - DNA, 350 bp, Glycine max
  Clone ID: LIB3138-010-Q1-N1-A3
gtttgtttaattcaataaaggaaattaggcatgaccctcttgtggagtgtgctctgcctatttgaaaatttccacacctcttttaattgtcgtaatgatgtgtgaagtgtgtgttattttaaaaaaaaaaaaaaaaaaaaaaaaaaaaaaaaaaaaaaaaaaaaaaaaaaaaaaaaaaaaaataaaaaaaaaagaaatgtgaaaaagagcatttattcaaatcaataactttattcacattttgatgatgcggaggtggaccatgtttgctatagaaaagtggttttcaaaccttctgagacataaagctttttgaatcaagatggctgttcttaacgtggattaatggg

SEQ ID NO: 32011 - DNA, 413 bp, Glycine max
  Clone ID: LIB3138-010-Q1-N1-A4
ctcgagccgaatcggctcgagaattttgattctatcaagcagagctttggtcagttttctattgaccttctcggcggaggaatcttattggacaaaactggagattggatcacacttatacaaaattctccaattagtaacttgttgagagttgctgcttggaagaaaggctgtttaatggtcaagattgtgatgtctgggaatgcagcagtcaaaaggagtgattgggcctcattggtacaagtgtttttaacaaacagcaacagtacagagcattttgatgcatgttagtggacaaaatcagaaccacattcctgggaattgatcttcccaatagaggtatgtggtcctaataatggttttgaaatgtggagttctgagtgggcaaatcaaacttcatggcatttgagttt

SEQ ID NO: 32012 - DNA, 364 bp, Glycine max
  Clone ID: LIB3138-010-Q1-N1-A6
aagtgatgaagtcccaagacttgcctgattgatgcgtcgcacagatattgtcgtacatttgtactcctgaagacatagtcaggctctccctcgtttccaaggccttttattctgcagctgattacgacactgtgtgggatcgttttataccctctgatttctcctctaccatttctccactttcttcctctaactctaagaaggatctctatttcactctctccgaccgtcccaccatcatcgaccagggtagaaagagctttcaattggaaaagcgaactgcgaagaagtgctacatgctttccgctagggatatttctattacatgggctccaacgcagggagaggcttctcaatattggga

SEQ ID NO: 32013 - DNA, 408 bp, Glycine max
  Clone ID: LIB3138-010-Q1-N1-A7
aaaaaattaaatttttaaacaaaaaaaaaacaataaaaaataaagggataatacaaaaaattgaaaaaaaaaaaaaaataaaaaaactataacaaaaaaaaacaaaaaaaaatattatataaaaaaaaaacaaaaataaaataaaaaaaatttgtgctgcccccctctttttatctccccttcccccaatttttttttttaccctctcccaaaagtcaccatatttttctttttaagcgttctatttaaatctttcctaaaattatccaattttttattctttttgaaaagttttttcttttacaaaattcccaccactaaaaatctttatattaaattttttaccactcgggtccattattattaacctacttacaataaattgcttgcccttccttcccctttttt

SEQ ID NO: 32014 - DNA, 226 bp, Glycine max
  Clone ID: LIB3138-010-Q1-N1-A8
ctcagatggaaacaaatttgtttaaattgtctcttgatgatgtggaaactcctaaaggttgcatgttggatctgaaaatttctcaatctaaaattgcacttcccaagaacacagttggaggaaccattctgcgtagtgatctattggcaaattttttgacagagggcaattttagagcaagtgttgatttgcagcgcactcatcgtattagaagaatgattaaaat

SEQ ID NO: 32015 - DNA, 399 bp, Glycine max
  Clone ID: LIB3138-010-Q1-N1-A9
gttctagctagtcataacatcaccattactgatggtattgacagaactagtgcaactttgcaatttataaagttagcatattgtgattttctcaagagaaactttaagcagatgtctaatgttttgtgggtggctcctgaggacaaggcgagtttatggtcacaacttcattatgttacgcgtaataatctggaaatgcaagaagcttatcttgacaatctcgtaaatgtgttacgagaattgtatttgcacactccagaggaagctcgacaattgagaaggaaagctctctctcctattgaatggctgcaaaaagctgatgtgcctaccatagcacagattgaagagtttcattcgatgcagaggatgatgaatgctcctgattcaaatgataatatt

SEQ ID NO: 32016 - DNA, 396 bp, Glycine max
  Clone ID: LIB3138-010-Q1-N1-B10
tgctattctcatgaatatgccaaatgctgttctttcaatgtggggatattttgttggagatctcgtctttgaagtttctaagatgacttctccctacattaaatgtacagtctctttcttcatagcatttggaaatttggctgatgataccatcaattttgaggcttttccccacaagctggtgcagtttggagagattcacgaaaaagttgtattgaaattttcacaagaggaatttcttacagcttggtcaactcaggtgcgtcctgcaacaactctgttggctgatgggtgtccatatttgtatgcaatggtgcatgatagttcagtgtctacaataccaggtgattttgtcattggtgtcaagttgacaaccataaacaatatgtgtgcata

SEQ ID NO: 32017 - DNA, 388 bp, Glycine max
  Clone ID: LIB3138-010-Q1-N1-B11
gtgctcttcacctttcactccacgaaatcaaaaggagagtgctaagaagctccgtgtctctattctcaaacatgtagcaccaaacccaagttggcatccaagttttataacactaatactgcatataatattattataatatacataacaacagttattgatattgttgtgattgtgtgtgattttggtgtcgtccctttttcttatgtttaaggttgtacggagtttatgtgttgattcaattcgtcgataagaaaccttagtttgatattttgattggttctgtggagagtttttttttctttggtgtggtttttggtttgtgctgtttttggttgggaataacaatggccgatgaaggaaacaaaagcaataacttctattcgat

SEQ ID NO: 32018 - DNA, 398 bp, Glycine max
  Clone ID: LIB3138-010-Q1-N1-B12
cagaaaacgaagattcctgcggaatccgcgtcaccggcatgcaggtctcctacgacgtgcagcaaccgccgctcttcctcgacttcaacctcaacgtctctcccggatcccgctgcctcctcgtcggtgccaatggatccggaaagacgactttgctgaagattctggcggggaagcacatggttggaggaagagacgttgtgcgcgtcttgagtggttccgcttttcacgacactcagctcgtttgtagcggagatctcgcttatttgggcggatcttggagcaaaaacgttggctccgctggagaaattccgctccaaggagacttctctgctgaacatatgatctttggagttgagggtgctgatccagaaaggagagataagttaattgagctg

SEQ ID NO: 32019 - DNA, 414 bp, Glycine max
  Clone ID: LIB3138-010-Q1-N1-B2
ctaagttgtttctctctctagccctagggtttcgttctctactaccgtggtttcatcagatcgctgccgtttctggcgtcattccgataattcggcggcatgaagctaacagtgaagactttgaaagggagccatttcgaaatcagggttcaaccctccgatactgttatggctgtcaagaagaatattgaagatgtacaaggaaaagataattacccatgtggacagcaattgttgattcacaatggcaaggttttgaaagatgaaactacattagtagagaataaagtctctgaagatggctttcttgctgttatgcttagtaagagtaaaacatcaggttctgctgcagcttcatctgttcagcctgccagtaatcctcctacgactgtatcaacgtcaaattccacccct

SEQ ID NO: 32020 - DNA, 414 bp, Glycine max
  Clone ID: LIB3138-010-Q1-N1-B3
ggtttctcgtctgacaattgagttgactggaggagttacatgtagctgagcgcaaggcatagaaattgctcttaacgtaatgtatatcagaaacctgctgtagtgcgcgtagtaattcaaaatttgtggtaaagcaaatggcgaaagttttctgtgattttcggttccttctcttggttgccgctggcgtcttcatctatatccagatgaggcttttcgcaactcaatcagaatatgctgatcgcctagctgcagctattgaagctgaaaaccattgtacaagtcaaacgcgatcactgattgatcagattagcttgcaacaaggacgaattgtggccctagaagaagagcggaaacgccgagaccaagaatgtggacaaatgaagtcttttgtacaagatcttgaaagaaaag

SEQ ID NO: 32021 - DNA, 378 bp, Glycine max
  Clone ID: LIB3138-010-Q1-N1-B4
ctgcttccttaatcaactcgttgacttgctcttcgcctgcacccactcagcactgtttcgccttcacccgcaccaccgccaccgctaccgccacgtcactgagacaattcaacagccaccgtccgcccccactcaccacgaggatctcctcgtcgccttccaccgttgtctgcaaagctgtctccgttaagccccaaaccgaaaccgaaggtctcaacattgctgacgatgtcacacagctcatagggaaaacgccgatggtttacctcaacaatatcgtgaagggttctgtggccaatattgctgcgaagcttgagattatggagccctgttgtagtgtcaaggacaggattggttttagtatgataaatgatgctg

SEQ ID NO: 32022 - DNA, 410 bp, Glycine max
  Clone ID: LIB3138-010-Q1-N1-B5
gaaaacctcgtttattagcagtagcttgggtgttcttaatgggcgtcctttgggcctctggaaaggctcctgaccctgtccgtcatatgatagagggactttgagaatttaagcgatcaattatcaacgattgaaggaagagttgagaaatgagtcaaatgtcatctggaattgttggtgttggttatattggcaccaactatatggtcccattattactaccaccaccattttcttccttgtgttttaacacctttatcaaacacaagggattggtgttggatagtaatcataaaggaaggagaagaggacatgggattgtggcatctagcaacgttgcttcaccttccatatgggatgattggaaacctgtcaaagccccttccactccttccctcagtgacattctt

SEQ ID NO: 32023 - DNA, 409 bp, Glycine max
  Clone ID: LIB3138-010-Q1-N1-B7
gattgagaggtccacaaaccttgactggtacaagggtcctacggtgctagatgcacttgaccagatctctgagcccaagaggccttctgacaagcccctcaggctaccccttcaggatgtgtacaagattggaggaattggaactgtgcctgtgggacgggttgagactggtgtcttgaagcctggaatggtggtgacttttgcaccaactggactgacaaccgaagttaagtctgtggaaatgcaccatgaagctctcacagaggctcttcccggtgataatgttggattcaatgttaagaatgttgctgttaaggatctcaagcgtggttatgttgcctcgaactcaaaggatgatcctgccaaggaggctgctaacttcactgcccaggttatcatcatgaaccat

SEQ ID NO: 32024 - DNA, 398 bp, Glycine max
  Clone ID: LIB3138-010-Q1-N1-B9
atcaatggcctttcttcagggtcacccttgacttggttgagatggtgttcgccaagggagaccccgggattgcatccctatttgacaaactcctagtatcagaagagctgcgtccatttggagagaatttaagatctaaattcgaagaaacaaagaggtttctcctccaggttgctgggcacaaggatattcttgaaggagacccctacttgaagcaaagacttcgtcttcgtgactcatacatcacaaccctcaatgtgttgcaagcctacacattgaagcggatccgtgatcctgactaccatgtgaagttgaggccacacttgtcaaaggactacatggaatcaagcaagccagcagcagagcttgttaaacttaaccccaaaagcgagtatgct

SEQ ID NO: 32025 - DNA, 104 bp, Glycine max
  Clone ID: LIB3138-010-Q1-N1-C1
ccatgacaccagtctgactttacatctttcaaactctgactatgaatgggtggcttcacattggtgagtgccgttatctgaccctaggcatatgtactttctcc

SEQ ID NO: 32026 - DNA, 330 bp, Glycine max
  Clone ID: LIB3138-010-Q1-N1-C10
agaaaaaaaagaattttagaccaagagcaaatatcaataaaaagggggtggtttaaaaaacacggatataacaaaaaataaaacacaaaaggggcgggttcagatttgtgatcttgccgacccggaaataaattctggacgggcgcctgcaggcagtactcttttttcctatatggaagtgaattaaagatgggcctttcaaaatcacaaatgactcctgtgtgaatttgaaatccggtcaaaatttcttatatcatctaatctacaataataaattgtgaattctggggatccttttgagcgacctaactaaaattagttgagtgcctc

SEQ ID NO: 32027 - DNA, 397 bp, Glycine max
  Clone ID: LIB3138-010-Q1-N1-C11
ctgctatttcattatgatggccgaactactgaatgggatgagttggaatggtcaaagcaggctattcatgtgagtgttcacaaacagaccaaatggtggtatgccaagcggtttctgcatcctgacattgtggcaccatatgactatatattcatatgggatgaagacctgggtgttgagcattttaatgcagaagagtacataaaacttgtgaggaagcatggcttggagatttcacagcctggcttggagcctaatagagggttgacatggcaaatgacaaaaagaagaggtgatcaggaagttcacaaagtgacagaggagaaaccaggatggtgttctgaccctcatttgcctccttgtgcagcgtttgttgagattatggctccagtgttct

SEQ ID NO: 32028 - DNA, 101 bp, Glycine max
  Clone ID: LIB3138-010-Q1-N1-C2
aaaaaaaaaattatatcaattttatctgtttcaaaaactactagggacagggtgtaaaaaaaggggagaaactcgttccaaatcggctctagcttccacat

SEQ ID NO: 32029 - DNA, 415 bp, Glycine max
  Clone ID: LIB3138-010-Q1-N1-C3
ctcgagccgttttgatgcatgtaagtggacaaaatcagaaccacattcctgggaattgatcttcccaatagaggtatgtggtcctaataatggttttgaaatgtggagttctgagtgggcaaatcaaacttcatggcatttgagtttccttattgacaatcccaaacagtctacagtttttgatattctcttgggaatctctcaagattttgaaattgctggtaatactcttatgccagctttttctgttccacaggctactgccagatcttctgaaaatgcggaatcctctgcatgatctggaatttgtgttttctttcgcttgttcgtttgtttaattcaataaaggaaattaggcatgaccctcttgttgagtatgctctgcctatttgaaaatttccacacctcttttaat

SEQ ID NO: 32030 - DNA, 397 bp, Glycine max
  Clone ID: LIB3138-010-Q1-N1-C4
agattactgagtaagggcaatgatattctgtgttgcgattatgctagttgtgatggtttgattaccaagcaagttatgagcaagatggcagaaatgataaacagtctttgtggtggtgatgaaaaattgatgcgtgaaaggacgcacctgctgttggcttgttgttcaaggatggcaatttgtaagaaagatgtttggagagttgaatgtggaatcccttctggatttccgctcacagttatttgcaatagcatttttaatgagatgctcattagatatagctatgaaaaattactgcgccaggctaaagctccaagtatgtttttacaatccttcaaaaattttgtttctttgtgtgtgtatggcgatgataacttaattagtgttcatgaatatg

SEQ ID NO: 32031 - DNA, 187 bp, Glycine max
  Clone ID: LIB3138-010-Q1-N1-C5
taaaaaaaaaaaaaaaaaaaaaaaaaaaaagggaaaaaaaaaaaaaaaaaaaaaaaaaaaaaaaaaaaaaaaaaaaaaaaaaaaaaaaaaaaaaaaaaaaaataaaaaaaaaaaaaaaaaaaaaaaaaaaaaaaaaatataaaaaaaaataaaaaaaaaaaaaaaaatattaggttttgggtgtttc

SEQ ID NO: 32032 - DNA, 221 bp, Glycine max
  Clone ID: LIB3138-010-Q1-N1-C6
ctcttatgccagctttttctgttccacaggctactgccagatcggctgaaaatgcggaatcctctgcatgatctggaatttgtgttttctttcgcttggtcgtttgtttaattcaataaaggaaattaggcatgaccctcttgttgagtatgctctgcctatttgaaaatttccacacctcttttaattgtcgtaatgatgtgtgaagtgtgtgttatttt

SEQ ID NO: 32033 - DNA, 394 bp, Glycine max
  Clone ID: LIB3138-010-Q1-N1-C7
caagaacacagttggaggaaccattctgcgtagtgatctattggcaaattttttgacagagggcaattttagagcaagtgttgatttgcagcgcactcatcgtattagaggaatgattaaaatggtggccacagttggtattcctgagaatacaggtatatcattggcctgtgctatgaatagttcttttagggggcgcgccagttctgatatttacaccatctgctctcaagactgtgaattgtggaatcctgcttgcacaaaagcaatgactatgtcatttaatccaaacccgtgttctgatgcatggagtttggaatttctgaagcgtactggatttcattgcgatatacattgtgtcactggatggactgccaccccaatgcatgatgtt

SEQ ID NO: 32034 - DNA, 89 bp, Glycine max
  Clone ID: LIB3138-010-Q1-N1-C8
atcgatatattgtcattaagattgacactgatccaagagtcgacaagtaatcgggctgtttttatttaagcttgactcgcttagtttcc

SEQ ID NO: 32035 - DNA, 399 bp, Glycine max
  Clone ID: LIB3138-010-Q1-N1-C9
gggccacgaggcgcaccgacgacgaggtgatgtcaatgttcgaggagtggctggtgaaacacgacaaggtgtacaacgcgctcggtgagaaggagaagaggtttcaaatcttcaagaacaatctgcgctttatcgatgaacgaaactctctgaaccgaacctacaagttgggactcaacgtgttcgctgatctcaccaatgcggagtacagagccatgtacctgcgaacctgggacgacggtccgaggttggacttggatacgccgccaagaaaccactacgtgccacgtgttggagataccatacccaaatccgttgattggaggaaggaaggtgctgttaccccagtcaaaaaccaaggagctacttgtaatagctgttgggcattcacagcagttg

SEQ ID NO: 32036 - DNA, 413 bp, Glycine max
  Clone ID: LIB3138-010-Q1-N1-D1
aaaataataagcagtggccctcctctttacatctgatctgatggatatggaaatgaagtctttcattgttagtgctcttattctagttttgttccttcatcttcggttgcttcctgggactgcagctcgaccacttgagataaggaagttagaaagcactagccagagaatgtgggcaatgcttcattcagggccaagctctggtgggaaaggccataaatctgagactggggaagccccaattccaggacagcttaaacaatctgttccaagccctggagttggacactaattaacacatgatgctgatcctcgagtcattttgttctatcactagctaggagtaattatcattaataacatgtaactggatagtagaatgctatgctcttttgtttgataaaactcatgtg

SEQ ID NO: 32037 - DNA, 394 bp, Glycine max
  Clone ID: LIB3138-010-Q1-N1-D10
ctcgagccgtccgattttctccctggaaaaatggcagcctctggcggcggccagataactctctcgtcaaccgtgcagttacatggagtggcctgtagtaggaattggaagctagtgaagttctgtaatggggaagtcatgggacgtaagcttgtgttaaaaagtgcttatggtggcagcactaaggatgttaggcaccaccaacaacaacaacatatatgcatgtctctcacagctgacgtttctactgaatccaagttgagagacctagatatggaaagaaggaacccaacgacagtgttggcagttatactaggtggaggagctggaacccgtctcttccctctcactaagcgacgagccaaacctgctgttcctattggaggtgcataca

SEQ ID NO: 32038 - DNA, 394 bp, Glycine max
  Clone ID: LIB3138-010-Q1-N1-D11
aaactaacgaagcaaagatgtcgtccatgctgcgcttccctttctcgtttcctcagccccgaaggcctcaattccctcgcccattcaccgcattcgccgccgccgttgccggagcctccgccgccgtcgtggccgtctcctcctccgaccgctcctttctccggaatgctctgaattccttcttctcttctgacctatcaatgcctctctggggttcactgagtttggccgacagtggggtttccgtggttgagtcaaaaaccggaacttcgttcccttcggttttagacagttctcagaaactctgcggaattggcttgcggaaaaaaagcattttgggattgaagaacattgatgtatacgcatttggtgtttatgctgatgatgaggacat

SEQ ID NO: 32039 - DNA, 396 bp, Glycine max
  Clone ID: LIB3138-010-Q1-N1-D12
gcggtcaggttctcttgagtgaaaaggcagtagctaaccctgcagatatggaaaacttattgtctaagtgtgctgcacaactcttggatctcctaaaccgtgttgaagatgctgatattgaagacattgtagaagtgctctgcaattttcccacagttgaagttgaagatacggggaaacttgagtcaaggaaggtagttgctgctagtatgctaggaaagagcttacaagctggggatgttgttttcgagagggtgtttaatgctgtctattcagctttgcgcggcgttgtgcttggtggaagtgggatccgtgggaggaaattagcagaaatggctctcatgaaagttggggctggtattctgactgataaggtagtggaaactgctggtgttt

SEQ ID NO: 32040 - DNA, 376 bp, Glycine max
  Clone ID: LIB3138-010-Q1-N1-D2
gatatttacaccatctgctctcaagactgtgaattgtggaatcctgctggcacaaaagcaatgactatgtcatttaatccaaacccgtgttctgatgcatggagtttggaatttctgaagcgtactggatttcattgcgatatcatttgtgtcactggatggactgccaccccaatgcaggatgttcaggttacaattgattggtttatttcctctcaggaatgtgttcccaggacctattgtgttttaaattcacaaaatactttttgtgttaaataggtggatgggaaaattgacttttccccaaggcacttcccgaagtgttaagagaatgcctctttctatagggggaggagcctgtgcaaagaatgctatt

SEQ ID NO: 32041 - DNA, 330 bp, Glycine max
  Clone ID: LIB3138-010-Q1-N1-D3
gctagtgcaagtgaaatagttgcttctgcacttcatgataattgtagagctgttcttgttggaaaacgcacatatggcaagggtctaatccaatctgtatttgagcttgatgatggatctggtgtggttatcactgttgggaagtatgtaacaccaaatcacaaggacataaacggcaatggaatagagcctgacttccagaaacttccagcatgggatgatatcagccgacatcttaaaaaatgcagtatgtcacaacagggataaagcagtctctttggtattccgatgcaatctattgctttggacttatcatttaattgaaacttt

SEQ ID NO: 32042 - DNA, 243 bp, Glycine max
  Clone ID: LIB3138-010-Q1-N1-D4
ggtatttacgtttgatgatatggataagataaggaggacggagaaggaaggtcctgtcaagtcagtattttgggctttgtttggggctatctatctttgttttggtatgccagaagtgtatcgtgttctttttgaagtcttcggaatggatccagatgccgaagattgccaacccaaattgcgtagacaacttgaagatgtggattttgtatctgctgagtttgaaggcaagctaacctggca

SEQ ID NO: 32043 - DNA, 395 bp, Glycine max
  Clone ID: LIB3138-010-Q1-N1-D5
ttttctttggcgttatcttttcatggcttagttaagaaattagattactcaaagcatctacctggtctaatggggagagattaatggcatcaattacctgcttaattttgttgcattttttcatcatgaatctaggttgtagttgcacaaatgtctagtgactgaaatggtacttgtcatgaatccaggttgtagttgtatatttttattgtcttgttgccgcgttgcattttatgtcccacgtagggattggatatgcaatggctttgctatgaatttattaatcaaatttgtcatactatacaattaacaaattgaattggtcttttgcagctctgccccatatgtctgaccaattcaaaagacatggccttcagatgtggacatcagacatg

SEQ ID NO: 32044 - DNA, 147 bp, Glycine max
  unsure at all n locations
  Clone ID: LIB3138-010-Q1-N1-D6
cttgcaacttcgttaaatttcaaccacctctctcttccaaaatcgcanaatgtgctgcttcagtgtctggtatcaaaaatggcaacattgactgcttcaagtaacttagtctctagaaattctcatgtccatcatggaccaacaact

SEQ ID NO: 32045 - DNA, 396 bp, Glycine max
  Clone ID: LIB3138-010-Q1-N1-D9
gaaagattctttgggattcaggagcttctttttgatgtttgtgaccgctcttgttggagtcacagcaaatcagaatgcatactttaaaggtttattttatgcatcctctactgcagctaccgctatgagtaatctgataccagcattaacgtttgtaattgcggcaattgcgggatttgagaaagttgacataagcttaagaagcacggccaagatattagggacagtttgttgcgtcgctggagccttaaccatggctttggtcaaaggacagaagctgttacacacagagttccttccttctatacatcttactggcagtgaaggtgacgattggctgctgggttgtctattgctcttagcaagcagtgttttctggtcttgttggatgatcct

SEQ ID NO: 32046 - DNA, 400 bp, Glycine max
  Clone ID: LIB3138-010-Q1-N1-E1
ctccacctcctaaaagtagtatagttagtcctactgctacaacaccaggggggaattttgctgctgctgtttctatgaatgttcctgtgcctaacttgtcgagtccaccagccattgcatcagtcatgcctggttcaaattctgttcagagttccttggagattagtagtcctgtggatgcttcatcttttgttaatcagtctagcactatgaaggaggaagagattaatagtttccctggtcaaagaccatctccatcgctttctgatgttacactcgtaaggaacatcatcagaaacagcgtatcaaatcaagcaacaaatagcatacctcttgcttctggcaatattggttccagcaatgggtcccttggttcaatgccttctgcaccttgaataac

SEQ ID NO: 32047 - DNA, 189 bp, Glycine max
  Clone ID: LIB3138-010-Q1-N1-E11
ctcgagccgcagtcttggaagaatctgaagagttacaaggcattgattttggggactcagaagaagttagcttttagctgtttttagttttttttattatattgggaaaggggcagaggagaatgaacatattttgtcttgaacaatttaacttttgagataatattatgttaatgttttgtccagctt

SEQ ID NO: 32048 - DNA, 396 bp, Glycine max
  Clone ID: LIB3138-010-Q1-N1-E12
ctctctctctctacaatggcctcagccgcagcccccacaacttgctctctcctccactccaccaccccggcctcctcctcctccgccacctccgcctccccctcgcgcgtgcagctctcctcctccctccgctcgcgcccgctcgcgcgccgccttggcttcgccgcagcggacccgctgctcgcggcgaatgtcgcagcgcgcgtcgcagcggtgagaggaggaaagggcgcgaggggggtggtgtcgatggcgaagaagagcgtgggggagctgagcgcggcggacctgaaggggaagaaggtcttcgtcagggccgacctcaacgtcccgctcgacgacaaccagaacatcaccgacgacaccagaattcgcgccgccattcccaccatcaaa

SEQ ID NO: 32049 - DNA, 251 bp, Glycine max
  Clone ID: LIB3138-010-Q1-N1-E2
acacaaccaaaggtgctgatcatcttgcatttcatcattttccttctggggaacacaatcagaatcttacatctaaacttccacacctcaatttctctgatgttactaccaccgtgtctgataatgtttctaaagcccaagcccattctttttctttaactggaaacacatgccaagatgtttataaagaatctccccccaaatctaaatctatacctacacagggcgacatcctgactgatatttaggac

SEQ ID NO: 32050 - DNA, 413 bp, Glycine max
  Clone ID: LIB3138-010-Q1-N1-E3
caacagtacagagcattttgatgcatgtaagtggacaaaatcagaaccgggttcctgggaatggagcttcccaatagaggtttgtggtcctaataatggttttgaaatgtggtgttctgagtgggcaaatcaaacttcatggcatttgagtttccttattgacaatcccaaacagtctacagtttttgatattctcttgggaatctctcaagattttgaaattgctggtaatactcttatgccagctttttctgttccacaggctactgccagatcttctgaaaatgcggaatcctctgcatgatctggaatatgagttttctttcgcttgttcgttcggttaattcaatgaaggaaattattcatgaccctcttgttgagtatgctctgcctatttgaaaatttccacacct

SEQ ID NO: 32051 - DNA, 413 bp, Glycine max
  Clone ID: LIB3138-010-Q1-N1-E4
cacgcgcgtagacaagctgcatgcgaaagttgagttcttgcaagagttggggttttcgtacgaggaggctgtcagggcttgtgctaggttacccgcaatttttgggtatgacgtggagaacaatttatggccaaagtttgtgtatcttgtcaaggaaatggagagggatttggaggacttgaagaggttccctcagtactttgggttcagtttgaaggagaggattgtgccaaggcacttgcatttgaaaaaaaggggtgttaggattcccttgaatagaatgttgatgtgggctgatcaaaagttctacgccaagtggaagtgattagtcaactcacatatttgctcataaccttatatgattcaacaagatattatcttctttttaattgtctaatccaaatagactgtta

SEQ ID NO: 32052 - DNA, 408 bp, Glycine max
  Clone ID: LIB3138-010-Q1-N1-E5
gctgtcacgacgacattggctgggagcactgcggctctgacgacgttgttcagcaagcggttattggctggccactggaacgtgattgacgtgtgtaacggcctgcttggcgggttcgctgccattacatcgggctgtgccgttgtggaaccgtgggccgcgattgtgtgtgggtttgtggcggcgtgggttttgattgggcttaataagcttgccgcgaaggtagagtacgatgatccgttggaggcggcgcagcttcacggcgggtgcggagcgtggggggttttcttcacgggattgtttgcgaagaaagagtacgtggaggagatttacggtggtggaaggccgttcggggcttttatgggtggcggagggaggctgctggcggcgcaggtgattcagatattg

SEQ ID NO: 32053 - DNA, 407 bp, Glycine max
  Clone ID: LIB3138-010-Q1-N1-E6
ctttgtgtgtgtatggtgatgataacttaattagtgttcatgagtatgtcaagccttactttagtggttctaaattgaaaagctttctagctagtcataacatcaccattactgatggtattgacaaaactagtgcaactttgcaatttagaaagttagcagattgtgattttctcaagagaaactttaagcagatgtctaatgttttgtgggtggctcctgaggacaaggcgagtttatggtcacaacttcattatgtgtcgtgtcataatctggaaatgcaagaagcttatcttgtcaatctcgcaaatgtgttacgagaattgtattcgcacaatccagaggaagctcgccaattgagaaggaaagctctctctcgtattgaatggctgcaaaaagctgatgtg

SEQ ID NO: 32054 - DNA, 408 bp, Glycine max
  Clone ID: LIB3138-010-Q1-N1-E8
tgatgatgaagcgtcggttccttttggttctcttggttctctgtgtcacagtggagcagagtaagctactccaccacgtagaagccgatggtgggtttgtaaaaacaagaggagtgcagcttatgctgaatgggagtccctactatgctaatggctttaatgcctattggcttatgtaccttgcctctgatccttcccagagaaacaaaatctcatcggtatttcaacaggcttcaaatcatggactcaacattgccagaacttgggccttcagtgatggtggatatcaacccctacaatactctcctggatcctacaatgaccaaatgtttcagggcttggatttcgcaatagccgaagcaagaaaatatgggatcaagatggtgttcgagttggtgaataactatg

SEQ ID NO: 32055 - DNA, 409 bp, Glycine max
  Clone ID: LIB3138-010-Q1-N1-F1
gcaactaactccaaaaaacctcactgtatggccatcaatctcagcaccagtgcttctcttcactccaagccttcttttctgacccataaacacaacaacctcatcaaaatctaccatccttcttcctctttactcacaacatgtgctcaaacacaagggactgacactggagttacacaggaagatgcttctgctggtaatggatctttatcttcttctcgtgcacagctggatcttttggagcaacttacatctacaagctcacctaatagtggttatgaaagtgatggaagcaaacttacaatccgagagcagctcgagcagttgtttggagaaagggatgatgatttcaccatacccctaggtaaaaacttgaagaaagtgagtgcgaagttcttgaccatctcac

SEQ ID NO: 32056 - DNA, 399 bp, Glycine max
  Clone ID: LIB3138-010-Q1-N1-F10
caggttcagcccctgacgacgccgtttctcctcgggcagctccggtgggcccgaacgcggccgaagtcaccgccggtggcgctgaagagggcggaggagcggtcggagtggtgggcggtggacggcgaagtgcacgagatcggcgatctcgtgccgctacgtgagcgcttcgtgattccccgagagaacatccccaacaagcgccgcaagcagctcagagaacagttcatgcgccgaacgcgcctcgttcttaaggaatccgagcatgatccttggtgcaaaaagtatatggagctgtataatgaactaagagaaaactgggagaggctttattgggatgagggttacactaaaaagcttgctcaggatcatgcaaactatgagtctgctgaagatgat

SEQ ID NO: 32057 - DNA, 394 bp, Glycine max
  Clone ID: LIB3138-010-Q1-N1-F11
aattggtgctggttcacattcttcagaagattttcctgaaaaggaagatcaagaaaaacccaaaaagattgatgccagattgagacaaagaatagatcctcaatacaatgaggttcaggctcagatggaaacaaatttgtttaaattgtctcttgatgatgttgaaactcctaaaggttccatgttggatctgaaaatttctcaatctaaaattgcacttcccaagaacacagttggaggaaccattctgcgtagtgatctattggcaaattttttgacagagggcaattttagagcaagtgttgatttgcagcgcactcatcgtattagaggaatgattaaaatggtggccacagttggtattcctgagaatacaggtatatcattggcctgt

SEQ ID NO: 32058 - DNA, 397 bp, Glycine max
  Clone ID: LIB3138-010-Q1-N1-F12
gctgttctgagtacctgcaatcgaatggagatatatgttcttgccctgtcccaacatcgtggtgtcaaagaagtcatggaatggatgtcaaaaacaagttctgtccctgtttcagagcttagccagcaccggtttttactttacaacaatgatgccacacagcatctttttgaagtatcagcaggtcttgactctcttgttttgggggaaggtcaaatcctttctcaggttaagcaagttgttaaagttggacaaggagttaacggctttgggagaaatatcagtgggctattcaagcatgcaattactgtcgggaaaagggttagaactgagactaatattgcttctggggcagtttctgtgagctcagctgccgttgagttggcctatatgaagt

SEQ ID NO: 32059 - DNA, 339 bp, Glycine max
  Clone ID: LIB3138-010-Q1-N1-F3
aaaaaaaaaaaaaaaaaaattaaaaaaaaaaaaaaaaaaaaaaaggaaagagggaaaaaaaaaaaaaagaaaaaaaaaaaaaaaaaaaaaaaaaaaaaaaaaaaaaaaaaaaaaaaaaaaaaaaaaaaaaaaaaaaacggggcgcccccctcttttttacttctcccccccggtatttattcccgacccggaccctggaggttcccaactttcccttttaatgaatcgtttaaaacctgggcttttctatggaaataatttttcctttttaaaaatttttttccctccaaatttccccaaaaaatacgacccgaaaacttaattttaaaaccctggggg

SEQ ID NO: 32060 - DNA, 413 bp, Glycine max
  Clone ID: LIB3138-010-Q1-N1-F4
gtaagggcaatgatattctgtgttgcgattatgctagttttgatggtttgattaccaagcaagttatgagcaagatggcagaaatgataaacagtctttgtggtggtgatgaaaaattgatgcgtgaaaggacgcacctgctgttggcttgttgttcaaggatggcaatttgtaagaaagatgtttggagagttgaatgtggaatcccttctggatttccgctcacagttatttgcaatagcatttttaatgagatgctcattagatatagctatgaaaaattactgcgccaggctaaagctccaagtatgtttttacaatccttcaaaaattttgtttctttgtgtgtgtatggtgatgataacttaattagtgttcatgaatatgtcaagccttactttagtggttctaaa

SEQ ID NO: 32061 - DNA, 408 bp, Glycine max
  Clone ID: LIB3138-010-Q1-N1-F5
ctcgagccgttattattcactaaccggccagaagttgtttgtggggcaaactcgaggccgggatcgcacgtcagtggacgaggcattcaaatacataagggagatcatcaaatgggacgatgagaaggatgaagatgtatatgaaatcaacccagaagagtcattttacagtacagaaatgagttcttctccattcatcagacaagaatgaattcccaaccttggatagcccttctttgagactaaatggtcttttatatgtggatagagtgtcgcagctccaaagaatttgtaggagcatagcatttgttgaaggacagggaggtcagttggctgggctgtgttgtggagtatgttgttttattttgttcttttaggatcttcctgaaacaggttcagaatgatttt

SEQ ID NO: 32062 - DNA, 340 bp, Glycine max
  Clone ID: LIB3138-010-Q1-N1-F6
gaaaaacactcatcatgatggggtcagttgcattaaatggcaaaagcaatgataagcctcttcacgttgccatgctcccatggctggccatgggtcacatatacccttacttcgaagtcgccaagattcttgctcaaaagggtcactttgttaccttcataaacagccccaaaaacattgaccgcatgcccaaaaccccgaaacacttagaaccattcatcaaactcgtgaagctacccttgccaaaaatagagcatctcccagaaggcgcagagagcacaatggacattccgtccaaaaaaaactgtttccttaagaaagcttacgagggcctacaata

SEQ ID NO: 32063 - DNA, 407 bp, Glycine max
  Clone ID: LIB3138-010-Q1-N1-F7
tccaaacccaaacccacttacctcttcacttctttttcttctgggtcttcttcttcttcttcctttttctcttccaccacgccaccgcgatccaccatgctgcaccacgaccctcttgtctctgacgtctacgccaccgccatttccggcgtcgttgccctgtccttcctcagattgttccaagaaactgcaaaacgagacctcttcgaccagaaattaaataggaaacttgtacatataagtattgggctgatattcatgctctgctggccgctattcagtactgaaacttgggcatctttctttgctgctctcattccgggaatcaatatatttcggatgcttgttattggacttggaatattgaaagatgaggccacagtgaaatcaatgagcagatttggaga

SEQ ID NO: 32064 - DNA, 348 bp, Glycine max
  Clone ID: LIB3138-010-Q1-N1-F8
gcattgaattcaaaaactaagttcatttcttgtgctttgctttattcctcaaaaccaaacatgtcgaacacatgcggcaactgtgactgcgctgacaagactaactgcaccaagggaaacagctatggtgttatagtagagactgagaagagctacatcgagactgttgacatggatgttccagcagctgagcatgatgggaagtgcaagtgtggcactaactgcacttgcacggactgcacttgtggccattaaggaatatgtatgaaaatgtaattgccatgtgtttggcaatacaaatctccaaataatgtaatcttcgtatgaataaatgtgtgctgttatcct

SEQ ID NO: 32065 - DNA, 395 bp, Glycine max
  Clone ID: LIB3138-010-Q1-N1-F9
gctttacaagatgggacaacagtcttcgttggagggaagactaacagggcaaagatggaatttccagaggagatgagccgcttacttgataaggtccctgaaatagttgaatcaaatctacctaagcatgctgatagcattagtggttagcttatggcttttgacaaatcaagataggtaaagaagacacttcaattggatgatagcaacttatatggattatgattcaatttggatacacttatccattagcacctatagaagagataaaaaaaaaattaaatgaatcaaacttctcaaataaattaaaatcaccttatgcatctcaaattctttggaagttttttcatttaacttttgcaaaagctgagatgtataacttggttttaacttaa

SEQ ID NO: 32066 - DNA, 406 bp, Glycine max
  Clone ID: LIB3138-010-Q1-N1-G10
aaggaagaagaaaaatgagaaaggaggaaagcataatactgatggggatagtgatgaaagtgcaaatccaaaggtattttcaaggaagaagaaaaatgacaaaggaggaaagcctaagattgatgatgatagtgatgaaagtccaaatccaaaggtcttttcaaggaagaaaaatgagaaaggaggaaagctcaacaggtcaacaccaacaaagtctacatccaaagagaaaactgtaaaagtcactaaatgaaaaggcaagaagaaagagatgtcaagccctagtgataatcagttacgtgatgcgatatgtaaaattcttaaagaagttgacttcaatacggttagatgttggaaacttgaaatataatttacataattcagtgactagttgaattttatgttt

SEQ ID NO: 32067 - DNA, 398 bp, Glycine max
  Clone ID: LIB3138-010-Q1-N1-G11
ctcgagccgaatcggctcgagcagacctcctcgtattgagattataaatgaccaaccgggaatgccacttgttgtttatgtgtctcgcgaaagaaggccatcccttcctcacaaattcaaaggaggagccctcaacgcattgctcagagtctcaggtttaatcagtaatggaccttatgttctagcagtggattgtgatatgtatagcaatgatccaacctctgccaaacaagccatgtgcttctttcttgatcctgaaacgtccaaatatattgcatttgttcaattccctcaaatgtttcacaaccttagcaaaaaagacatctatgataatcaatctagaactgcttttaagactatgtggcaaggcatggatggactaagaggtccaggtcttt

SEQ ID NO: 32068 - DNA, 389 bp, Glycine max
  Clone ID: LIB3138-010-Q1-N1-G12
ctcgactaatattctgtcattcagaccagcttcctatactatggtataggaccaaacgtgaaagcgaaaaaaaagattcttaagaaatataactaagcctctcttgaataatcaaaacgaatgttgaatccaaatcaatttgatatagaaaaaagacttaaaaaggaggattcgcaatgcgagatctaaaaacatatgtttccgtggcaccagaagcaagctctctatggctcggcgcgttcgcgggtctcttgatagagaccaaccgatatttttccagaggcatagatcttcccttgttttacattctaggcattgacaccgaaaggggtgaagaagattatacagccaattaaacattaaatatatgcaatgaatgtctaataaat

SEQ ID NO: 32069 - DNA, 163 bp, Glycine max
  Clone ID: LIB3138-010-Q1-N1-G2
caacaactctgttggctgttgggtctccatatttgtattcaatggtgcgtgattgtccagggactacaattccatgtgattttgtcattgttgttaatttacaaccataaaaaatttttgagcataaggcctgaatcctctttttacaggtaaacgcttttta

SEQ ID NO: 32070 - DNA, 248 bp, Glycine max
  Clone ID: LIB3138-010-Q1-N1-G3
gctactggccccttggaatgaacgccgacagttactttttctatgtacggtgtataacctggggaaacaggtctacttatttaataagagttttagtgtgaaatttcaatcaaacattgttagtagtgctagcatggaagcaaacaagattgatgcttattttaattgacttaacagtggagacacggattggatacctactgacctgcacgaaagtttgaggaacaactgaatgatgtattgccctt

SEQ ID NO: 32071 - DNA, 407 bp, Glycine max
  Clone ID: LIB3138-010-Q1-N1-G5
gttcttttagggggcgcgccagttctgatatttacaccatctggtctcaagactgtgaattgtggaatcctgcttgcacaaaagcaatgactatgtcatttaatccaaacccgtgttctgatgcatggagtttggaatttctgaagcgtactggatttcattgcgatatcatttgtgtcactggatggactgccaccccaatgcaggatgttcaggttacaattgattggtttatttcctctcaggaatgtgttcccaggacctattgtgttttaaatccacaaaatccttttgtgttaaataggtggatgggaaaattgactttcccccagggcatttcccgaagtgttaagagaatgcctctttctatagggggaggagctggtgcaaagaatgctattctcatg

SEQ ID NO: 32072 - DNA, 388 bp, Glycine max
  unsure at all n locations
  Clone ID: LIB3138-010-Q1-N1-G6
caatanangtatgtggtcctaataatggttttaaaatggggaggtcttagtgggcaaatcaaacttcatggcatttgagtttccttattgacaatcccaaacagtctacagtttttgatattctcttgggaatctctcaagattttgaaattgctggtaatactcttatgccacctttttttgttccacaggctactgccagatcttttgaaaatgcggaatcctctgcatgacctggaattggtgttttctttcgctggtccgtttgtttaatccaataaaggaaattgggcttgaccctcttgttgagtatgctctgcctatttgaaaatttccacacctcttttaattgtcgtaatgatgtgtgaagagtgtggtatttttcncc

SEQ ID NO: 32073 - DNA, 411 bp, Glycine max
  Clone ID: LIB3138-010-Q1-N1-G7
cagccaataacttcggactccgtctctaacaaccaccgcaccgcgcatcggcgcgatgccggaaataacggcctccggcatcgcctctttcggcaagaatctttgcgcagaaatatcgaacacgtcggcgcggaaacctacttggtttctcgtctcgccttcacgcttcttcgctatctcgggattgggtaccgtcggattacacaattacttgccctaggatgttatgccatgctacttatgcccgggtttttacaagttgcatattactatttcttcacaagcaaagcaaagcgaagcattgtttatggagatcagcctagaaacaggttggatctgtatctacctgccaatattggtgaacctaagccaggtttgatatctgtaactgggggagcatggattattggg

SEQ ID NO: 32074 - DNA, 407 bp, Glycine max
  unsure at all n locations
  Clone ID: LIB3138-010-Q1-N1-G8
gtttgatgttgcgttgagatggcttaacacggtccctaccctggcatgattgttggtctctttcagtgcctcancctcagtttggtactttcaactagttgattggatgggatttgctttctcttttggttccttggctggtttggtttcctcttctgactttgctaccccaaataaagaaattcaatggctggggtctgtcttcactggcatcatcttctgtgttattgtttatagattgactgctattttgagttctctgttgttcaagggatatgacaaattgagtagtgcacagaaaattgaatggaataaccggggattctcaacatttcatgctctgtttgcatcgtttatgtcattttacctcttggtgttatcagatattttcaacaaggattcacatg

SEQ ID NO: 32075 - DNA, 398 bp, Glycine max
  Clone ID: LIB3138-010-Q1-N1-G9
ggagctggagcttcagctcccagttcagccttctttgggaccagcttgaagaaggttattgcctcaagggtccccaacagcaaggtttccggtggaagcttcaagattgttgctgtagaagagaagaaagagattgaagagacccagcagaccgacaaggacagatggaagggtcttgcctatgatatctcagacgaccaacaagacatcacaagaggaaagggtttggttgactcccttttccaagctccacaggatgctggaactcactatgcagtcatgagctcctacgagtacctcagcactggacttcgccagtacttggacaacaaaatggatggattctacattgctccagcttttatggacaagcttgttgttcacatctccaagaactt

SEQ ID NO: 32076 - DNA, 372 bp, Glycine max
  Clone ID: LIB3138-010-Q1-N1-H10
atcgtgcttaccatcatcatatatgggttgaagaccgatcccggcaggtgccgcaagatgaaggagcgtctcgttggggtttttgaggaaaccaccactggtgttaagaggctatatcatatgcaggcgaatgggactctactcttccctgctattaatgtcaatgactctgttaccaagagcaagtttgacaacttgtacgggtgccgtcactctcttcctgatggtctgatgagggctactgatgtgatgattgctggaaaggtggctgttgtggctggatatggagatgttggcaaaggttgtgctgctgcattgaaacaagctggtgctcgtgtcattgtgactgagattgaccacatttgtgccctt

SEQ ID NO: 32077 - DNA, 399 bp, Glycine max
  Clone ID: LIB3138-010-Q1-N1-H11
ctcgagccgaatagtctctagggtacaattgattgctttatttggtctgaggaatgtgttaccaggacctattgtgttgtaaatgctcaaaatcctcttgtgttaaataggtggatgggaaaattgactatacgccagggcacttcaccaagtgataagacaatgcctttttctatagcgggaggagctggtgcaaaaaatgctattcttatgaatatgccaaacgctggtcttttaatgtggagatattctgttggagatctcgtgttttaagaacctaagatgactcatccctacattaaattgacaacactctttcttcatagcatatcggaaatatggttgatgataccatcaaatttgaggcttgtccccacacatctggtgcagtcaggagag

SEQ ID NO: 32078 - DNA, 239 bp, Glycine max
  Clone ID: LIB3138-010-Q1-N1-H12
attggatcacacttatacaaaattctccaattagtcacttgttgggagttgctgcttgtaagaaaggctgtttaattgtcaagattgtgatgtctgggtatgctccactcaaaaggagtgattgtgcctcattggtacaagtgtttttaacaaacatcaaccgtccagagcattgtcatgcatgtgactggacaaaatcacaaccacattcctgggatttgatcttacctatagaggga

SEQ ID NO: 32079 - DNA, 327 bp, Glycine max
  Clone ID: LIB3138-010-Q1-N1-H5
gtcaattaactatgaagcctaccctactattatccctttccttgctgcctctctttgctttgcgggctctttcagaagatgttgaacacaacgtggacataggtggcaaccccattatcccaggtggcgcatattacattatgccatcaacttgaggcgctgccggcggtggattgaaactaggccggacacgaaactcaaactggccagttactgttttgcaagattactcaaaaatctttcgtggcacaccaggcaaattcagcgtacctgggataagccctggtatcatcttttcaggtactccactcgaactcgagttcgcag

SEQ ID NO: 32080 - DNA, 255 bp, Glycine max
  Clone ID: LIB3138-010-Q1-N1-H7
atgatcacaagtttctaaaacatgatctccatcgatcatataggtgtgcatctctataaataccacttattttagcgatatgctgcacacacatatagattttgatagaaatgtaaattaatggccttcgtcggtgcttacaaaatgacgtcttcatttggtgctctcttggcaatacttttactactcatgtcctttattatgctggcaactgcagccaaaccactcgggcgaaaattactacaacaaggttat

SEQ ID NO: 32081 - DNA, 399 bp, Glycine max
  Clone ID: LIB3138-010-Q1-N1-H9
tacgagaagaaagtttacgttttgcccaagcaccttgatgagaaggtggctgcacttcaccttggcaaacttggagctaagctcaccaagcttagcccggcccaggctgattacatcaatgtgcctgttgagggtccatacaagcctgctcattacaagtactaagtaattgagattatcaacggaaagtgagggaaagacaaaatcggttttatgaatcggattgattgtttaattttccttttttttgaatttttgttgttagacttttcagatttgaggtagaagaagtttagctttttttatttttaatttccgtagaatttctgttccagtgggtgggacgggtaaggaggaagacatactgttggtttctgtgatatgaaaccaatttgggtt

SEQ ID NO: 32082 - DNA, 296 bp, Glycine max
  Clone ID: LIB3138-027-Q1-N1-A1
gttgtatttgcttctcctgaaggttgggcgaataacaaaaatgttgggttttccggcacatcattatggattggattaatgtttctcgcgggtattcttaattctctgatggcttgaagctctatttattcttgatcaaaaactaattgacccctcccccagaattctttccgattgtccggcacattaaaaaaggaatggattagttcctaaaaataaagaaaactctcacacattataaggaggggccatatattatttaagataaaagatatcgcatatctatctgggtatat

SEQ ID NO: 32083 - DNA, 354 bp, Glycine max
  Clone ID: LIB3138-027-Q1-N1-A10
gctggtgcaaagaatgctattctcatgaatatgccaaatgctgttctttcaatgtggagatattttgttggagatctcgtctttgaagtttctaagatgacttctccctacattaaatgtacagtctctttcttcatagcatttggaaatttggctgatgataccatcaattttgaggcttttccccacaagctggtgcagtttggagagattcaggaaaaagttgtattgaaattttcacaagaggaatttcttacagcttggtcaactcaggtgcgtcctgcaacaactctgttggctgatgggtgtccatatttgtatgcaatggtgcatgatagttcagtgtctacaata

SEQ ID NO: 32084 - DNA, 380 bp, Glycine max
  Clone ID: LIB3138-027-Q1-N1-A12
ctcactgtcttgtctctccagagaactgtatagagagagatggcagctgcaacatctggtgctgtgttaaatgggttgggatcttccttcttgagtggaggaaacaggagccaaacccttctggccactgctattggaggcaaagttggtgctgctgctgttactgttagtcctagaagactcattgtggtagctgctgctgcaccaaagaagtcatggctccctggtgtcagaggtggtggcaacctcgtcgacccagaatggcttgatggatcgctaccaggtgactatggctttgacccactaggccttgggaaggacccagcattcctcaaatggtacagagaagctgagctgattcatgggagatgggcaatggc

SEQ ID NO: 32085 - DNA, 379 bp, Glycine max
  Clone ID: LIB3138-027-Q1-N1-A2
cccgaagtgttaagagaatgcctctttctatagggggaggagctggtgcaaagaatgctattctcatgaatatgccaaatgctgttctttcaatgtggagatattttgttggagatctcgtctttgaagtttctaagatgacttctccctacattaaatgtacagtctctttcttcatagcatttggaaatttggctgatgataccatcaattttgaggcttttccccacaagctggtgcagtttggagagattcaggaaaaagttgtattgaaattttcacaagaggaatttcttacagcttggtcaactcaggtgcgtcctgcaacaactctgttggctgatgggtgtccatatttgtatgcaatggtgcatgatag

SEQ ID NO: 32086 - DNA, 377 bp, Glycine max
  unsure at all n locations
  Clone ID: LIB3138-027-Q1-N1-A3
ctcgagccgaatcggctcgaggttcccaggacctattgtgttttaaatccacaaaatccttttgtgttaaataggtggatgggaaaattgactttcccccagggcacttcccgaagtgttaagagaatgcctctttctatagggggaggagctggtgcaaagaatgctattctcatgaatatgccaaatgctgttctttcaatgtggagatattttgttggaggtctcgtctttgaaggttctaagatgacttctccctacattaaatgtacagtctctttcttcatagcatttggaaatttggctgatgataccatcaattttgaggcttttccccacaagctggtgcagtttggagagattcangaaaaagttgt

SEQ ID NO: 32087 - DNA, 344 bp, Glycine max
  Clone ID: LIB3138-027-Q1-N1-A4
gtcgggaaaaggggcaaagggattgataacaggtaaaacctcagctgcagccaaagacaaagacaaagacaagaagaaacccgtttctcgttcttctagagctggtcttcagtttcctgttggacgaattcaccgtcttttgaagtcaagggtgagtgccaatggaagagttggggccacagctgctgtgtattctgctgctatactggagtatctaactgcagaggtgttggagttggctggtaatgcaagcaaggatctgaaggtgaagcgtattacccctagacatttacagcttgctatacgtggagatgaagaacttgacaccctcattaaaggaacaa

SEQ ID NO: 32088 - DNA, 273 bp, Glycine max
  Clone ID: LIB3138-027-Q1-N1-A5
ggcttgcaattgaagttgaagtcttgcccttctctcttcaactccaaacacaagacatcatcatccatgggtgcctccgtctccactgtgggagctgtcaacagagctcttttgaacctgaatgggtctggacccggggtttcagctcccagatcatccttctttgggagcagcttgaaaaaagttattggctcaagggtccccaacacaaagatttcctctggaagcttcaagattgttgctgttgaagagaagaaagagattggagagacc

SEQ ID NO: 32089 - DNA, 377 bp, Glycine max
  Clone ID: LIB3138-027-Q1-N1-A6
gcgaggtttactactgctggatctcttgggaaagcagttttagatcgatcagaatcatccatttcaaataattccgatgatgaggctcaccagtactggcgttgtcagcttcctgatgatatcacccctgacttcaaggtcatgggagaggacgaatcccaaggtcttaacaacctctctttagcaggcttatctataaatgatgataatgaatcctcaatggttccttcttctaagggaagtagatatatactaaatgagcagctggaactgtctccacagcaccttaatggcaatacttttgctgataaattaaggttttccaattcaacctacagggaggagccatcttcaggaagcattttgaactcatcagc

SEQ ID NO: 32090 - DNA, 326 bp, Glycine max
  Clone ID: LIB3138-027-Q1-N1-A7
aattgagtgtgtttaaatgtatcaataaaaaaaacaaaggaggaacaaacaaaaaaatacataaaaaaaaaaaaacaaagataaagctaaacaaaaactgaaatagacaagcaatactaaagatatcaacccctgacttaaaagtcatggaaaaaagacaaatacgggggggccccccaacttgtgtttagcacgccccatgatataaatcatgaccctgaaccctgggtgttcccatttttccttgtggggggggtatttactaaatgagcaactggagctgtcttctctcccccgtgataaattttcttccgctcaaaatttaa

SEQ ID NO: 32091 - DNA, 214 bp, Glycine max
  Clone ID: LIB3138-027-Q1-N1-A8
atttgcttgcactcgatataaagcagaatttccaatttttgataaggttgatgtcaatggaccatttacaactccagtgtaccagtttctgaaatcgagtgctggaggctttttgggtgatcttataaaagggaattttgagaaattcttggttgacaaaaatgggtaagttattgaaagatacccaccaacaacgtctccttttcaaattgag

SEQ ID NO: 32092 - DNA, 327 bp, Glycine max
  Clone ID: LIB3138-027-Q1-N1-A9
gccatatctggtggccccatttacatcagtgacacagttgggaaccacaactttgagctgcttaagaccttggccttgccagatgggtccatcctcagatgtgagcactatgcactcccaaccagggactgtctctttgctgaccctctccatgatggcaaaacaatgctcaagatatggaacctcaacaagtacactggagttcttggggtgtttaactgccaaggaggaagttggttccgtgagattaggtccaacaaatgtgctgctgagttttctcatagggtatcaaccaagaccaatatcaaagacattgaatgggatagt

SEQ ID NO: 32093 - DNA, 349 bp, Glycine max
  Clone ID: LIB3138-027-Q1-N1-B1
tatttttcttcctcagtagtgtcatttacgcttctcttctctgcagcaactatgcctaaccctaaggtcttcttcgacatgaccatcggcggtcaatctgctggccgcatcgtgatggagctctacgccgacgtcactccccgcaccgccgagaacttccgcgcgctttgcaccggcgagaagggcgtagggcggagcggcaagcccctccactacaagggctcgtccttccaccgcgtgatcccgagtttcatgtgtcagggtggcgacttcaccgccggaaacggaaccggcggcgagtcgatttatggcgccaagttcgccgacgagaacttcgtgaagaagcaca

SEQ ID NO: 32094 - DNA, 350 bp, Glycine max
  Clone ID: LIB3138-027-Q1-N1-B10
gacacattacaacgtgttagcataaccattaaaaacgtggatgggttttccatactatggacatgtttatataaggcctcattttgccctgctttcattgcaaccaaatgcacttattgttatgataataattcttcttattgttccttaccttctctcattcaagacaggcctgtctatgctgcccctgcccccatcatcaccccaactgtgatacaggatatgacataggaatacgatcaagctattgaagatctccagatactgacgagggattttagtgaactcattgccacaactgctgagaaagtggagcaaataacagcttctctgggaacatcataatgcga

SEQ ID NO: 32095 - DNA, 299 bp, Glycine max
  Clone ID: LIB3138-027-Q1-N1-B11
ccgatctctttctttcaatcacaagcactccactaccactggctttcgattacgggtactgctcgggcctattccataaccgctgctaactccccttacttcctaggcttgcacaagcgcgcagatgatccctatcacgagactgataatcctgacggcgctattcaactctctttgcatcaaaacaccactgctctcgacttgattcaagattgtgttcaccacaacggaatcactgctgcgttcgggacaccactcagcattgctaggattgctacttaccaacctctccatggatt

SEQ ID NO: 32096 - DNA, 164 bp, Glycine max
  Clone ID: LIB3138-027-Q1-N1-B12
ccacactatttctttgaatcacacaccctccactcccagtgcgtcctattacgtgaagggtcgtaccaattccatcaccgtttttacatttcattacttgctaagatgccacatgattgctgatcatccgtatctctagagtgatattcctgataaaacaatta

SEQ ID NO: 32097 - DNA, 384 bp, Glycine max; identical to SEQ ID NO: 29829
  Clone ID: LIB3138-027-Q1-N1-B2

SEQ ID NO: 32098 - DNA, 366 bp, Glycine max
  Clone ID: LIB3138-027-Q1-N1-B4
gtgttacgagaattgtatttgcacagtccagaggaagctcgccaattgagaaggaaagctctctctcgtattgaatggctgcaaaaagctgatgtgcctaccatagcacagattgaagagttccattcgatgcagaggatgatgaatgctcctgattcaaatgataatattgatttactgttgagcattgatttgttgggtttacaaggagcaggtaaagcttttccaaacaaaattgtttttgatgataagcttgtgttggctaacacacaagaattctttgatggaaattttccagtggattcttggttaccaatttttgtgaattgtctttatcctgtaagtcaattaccttcagaagctgtc

SEQ ID NO: 32099 - DNA, 377 bp, Glycine max
  Clone ID: LIB3138-027-Q1-N1-B5
agcaagcagagcttttgtcagttttctattgaccttctcggtggaggaatcttagtggacaaaactggagattggatcacacttatacaaaattctccaattagtaacttgttgagagttgctgcttggaagaaaggctgtttaatggtcaagattgtgatgtctgggaatgcagcagtcaaaaggagtgattgggcctcattggtacaagtgtttttaacaaacagcaacagtacagagcattttgatgcatgtaagtggacaaaatcagaaccacattcctgggaattgatcttcccaatagaggtatgtggtcctaataatggttttgaaatgtggagttctgagtgggcaaatcaaacttcatggcatttgag

SEQ ID NO: 32100 - DNA, 325 bp, Glycine max
  Clone ID: LIB3138-027-Q1-N1-B6
gaatatagatgcagatgcaaaagtgcccatacaagacattgctagttaccaggtggttttctctagtgagaggaagatagttggttttcaacctttgagtcgtgttgctgtcaatcattgggctgctaatcctttagcaagggagctatatagagggaaaaaactttctccaagcctcattgaaccaggtctcaaggtgccccttcctgaaaaagttatcgttgtagagttattaatgtcgataaatccagatgcatattttgctctagccaggcgattccggtgatccttttcttggggtaattgtaagactagaagctagtca

SEQ ID NO: 32101 - DNA, 380 bp, Glycine max
  Clone ID: LIB3138-027-Q1-N1-B8
gtacgcagcaacagtcggcggtttatgccgtcccaggctgatgaagaggcgcatcagttgtcgtatctgcaaaagcacttggctaacattgtgtctcttctagcagagcctgtggagggagaaggcgatgagtccctggtttgttaatttactgtatgctacctatgggttgttgctgattttgactgcaatccattatttcttatattcccaataccagactttgcatatgggatcgattcttgtaattcatatgatatgatgctttggtgaggtcaaatactaacctgaaagtgattgagtgtcatggaaagtaattttccattgtttgctgtattcttttttgtgtccaacggttgctcctagcttctgttaaatga

SEQ ID NO: 32102 - DNA, 367 bp, Glycine max
  Clone ID: LIB3138-027-Q1-N1-B9
tgcacaatgtcgacctcttccattaacgggtggtgcctctcttccatctccccagccaaaacctctctcaagaaggccacattaggcccttctgtcttcgcaaccgttagcactccttcttctccttcttcttcttcttcttcttccttcccttctctcattcaagacaggcctgtctttgctgcccctgcccccatcatcaccccaactgtgagagaggatatggcaaaggaatacgagcaagctattgaagaactccagaaattgttgagggagaagagtgaactcaaagccacagctgctgagaaagtggagcagataacagcttctctgggaacatcatcatctgatggcatcccatcatcag

SEQ ID NO: 32103 - DNA, 357 bp, Glycine max
  Clone ID: LIB3138-027-Q1-N1-C1
ttttgtcattggtgtcaagttgacaaccataaacaatatgtgtgcatatgggctcaatcctggtatttcaggttctcgtcttttgggcaccattcctcagtccatttcacagcaaactgtttggaatcaaatggcaacagtgagaacaccattgaattttgattctagcaagcagagcttttgtcagttttctattgaccttctcggtggaggaatcttagtggacaaaactggagattggatcacacttatacaaaattctccaattagtaacttgttgagagttgctgcttggaagaaaggctgtttaatggtcaagattgtgatgtctgggaatgcagcagtcaaaaggagtga

SEQ ID NO: 32104 - DNA, 342 bp, Glycine max
  Clone ID: LIB3138-027-Q1-N1-C10
caaacctctctccgtatcactccaagttataggtcacattgtcacaatgtggtcaccaattgttctactgttgtgccttattcctcctgtgttcttgctattcttcttccaataccgtagaaccttcaagaactcaaaccttccaccaggtcctagaggccttcccataatagggaatctccatcagctagatagctcgaatcttcatcttcagctatggaaactctcaaagaagtatggccctatattttcccttcaactaggtttaaggcccgccatagtgatttcctcatccaaagtggccaaagaggcacttaaaacccatgacgttgagtttagtgg

SEQ ID NO: 32105 - DNA, 150 bp, Glycine max
  Clone ID: LIB3138-027-Q1-N1-C11
ctgacacgtttgaatatactactaccattatgcgtccgaagggaattgctctagagctggcgcaaatatatattactagacaaatagattttgagcaagtgaaggtgaaatgctaaataattcccgcaataaacatcaccatgctatgtt

SEQ ID NO: 32106 - DNA, 368 bp, Glycine max
  unsure at all n locations
  Clone ID: LIB3138-027-Q1-N1-C12
attaactatatatatgtcaagcattctatctaattgctgataaaaaaaaaaaaaagcattctatctaataacgtattgcctcaacatatttgacgagaaaattgtgtagatagatttggaactaatatctttaattcataaaaaaaatgaacaataccttttaaagtcatcaaacgaaggcgaagaaggaatgaaggagcacgacaatgacgtcatcaccaatgccgtttcggggagcgggttccggcgcacgcgctcgcatgcggagccggactggagcgtgacggaatcgctgattctggtgaacgaggtcncggcggtggaggcggactgctccgtcgcgctctccttgtaccagcagtggaaca

SEQ ID NO: 32107 - DNA, 295 bp, Glycine max
  Clone ID: LIB3138-027-Q1-N1-C2
aaaaaaaaataatgtatagtaagacacacataaacaatatatgggcggtataaactaaatagtggcgtttcaaaaatctaaaataaaagaaaaaccattcctaaaaaacattaaaaaaaaaactaaaaaaaaaaggggcggccccccccttttacacctttcaccccggattttatttcgggcccgttccctgaggggtacccagttttccctttggggaggcattttaaagctcggcgaaacaaagggcataactgttccccggggaaaattgtttcccgtccaaatttccccc

SEQ ID NO: 32108 - DNA, 243 bp, Glycine max
  Clone ID: LIB3138-027-Q1-N1-C5
gctccaagtatgtttttacaatccttcaaaaattttgtttctttgtgtgtgtatggggatgataacttaattagtgttcatgaatatgtcaagccctactttagtgggtctaaaatgaaaagctttctagctagtcataacatcaccattactgatggtattgacaaaactagtgccactttgcaatttataaaggtagcagattgtgattttctcaaaagaaacttttaacagatgtcttat

SEQ ID NO: 32109 - DNA, 358 bp, Glycine max
  Clone ID: LIB3138-027-Q1-N1-C6
agcgcataagcctgcattcaaagcatttgatatacaggcattgattaacaagattaataagtccatagtggctccactgccaacaaaatattctagctcgtttcgagggcttggtaaaagtatgccgcggaaaaatccaaagctgaggcccaaagcttcaaaactgcttgggcacccacatcttcaaccctatgttcttaaaggccatctcaaaattaacaggcccagaccaaacacattggccggtcactggcccgaatcccactacatgaagaaaactagatttttggtgccagaagatgatccttgttccatctataaggataagcgacattctttcaccaatgatcggactcta

SEQ ID NO: 32110 - DNA, 360 bp, Glycine max
  Clone ID: LIB3138-027-Q1-N1-C7
ggcacataaaccggcattgaacgctcatactgtgcctgcggtgagttactcaatgaataagatcatatgggctccactgtcaacaaaatattgtctctcattcataagtatcgcccatagattgcctgagataaattcagatattacgcccaactcttttgagctgcttgggcacccacatcttcaaccttatgttcttaaggtccatctcaaaattaacagccccagacgaagcacattgccagttcactggccagaatccaactacatgaagaaaactagatttttggtgccagaagatgatcctgtttccatctatatggataagcgacattctttcaccaatgatcggtctctaaa

SEQ ID NO: 32111 - DNA, 374 bp, Glycine max
  Clone ID: LIB3138-027-Q1-N1-C8
gagaactggtggtgcaactgcaatgcaaggcatcggcggttggattaatgaatcagttccatttgaatacgtaactagccagatattcccctgtataatcctctaattactaactaccaccaccaccaccactctcccacttgaaaattcatgtcttcctcttcccttcacgcgctcctcatcattctcttcctaagttccggacacgcgctcaaggtccccttccgagtcaacgatgttctccccgttctcccccacggaatcttctggccgctcctcaacaaccttcacagcgccgtcgacttgctccctttcttcgtcggcgacgtcccttccgataacgattccgttcaatggagagccgcatgctttta

SEQ ID NO: 32112 - DNA, 244 bp, Glycine max
  Clone ID: LIB3138-027-Q1-N1-C9
agatgttgtcctggtatctgctggtaggaccccattcactggcgaacttgggttggacaagataggagttgaaactgacaagattggacggattttggtaaatgaaagatttgccacaaatgtctctggtgtttatgcaattggagatgtaattgcaggcccaatgttggcacacaaggcggaagaagatggtgttgcttgtgttgagtacatagctggtaaggttgggcatgtggattatgac

SEQ ID NO: 32113 - DNA, 380 bp, Glycine max
  Clone ID: LIB3138-027-Q1-N1-D1
ctcgagccgctctagctagtcataacatcaccattactggtgggattggcaaaactagtgcaactttgcaatttataaaggtcgcagattgtgattttctcaagagaaactttaagcagatgtctaatgttttgtgggtggctcctgaggacaccgcgagtttatggtcacaacttcattatgtttcgtgtaataatctggaaatgcaagaagcttatcttgtcaatctcgtaaatgtgttacgagaattgtatttgcacagtccagaggaagctcgccaattgagaaggaaagctctctctcgtattgaatggctgcaaaaagctgatgtgcctaccatagcacagattgaagagttccattcgatgcatatgatgatg

SEQ ID NO: 32114 - DNA, 308 bp, Glycine max
  Clone ID: LIB3138-027-Q1-N1-D10
aatttttgacaaacctaagacgcgctgcttcactattctccctatggagtttaatcttgtggtccgtcaaaagtttttaaattttgtgaggttcattatgaagaaaagggacaaacttagttgtcaagttggaatcaacccatactccatggaatggactggtttggccaatagattactgagtaagggcaatgatattctgtgttgcgattatgctagttttgatggtttgattaccaagcaagttatgagcaagatggcagaaatgataaacagtctttgtggtggtgatgaaaaattgatgcgtg

SEQ ID NO: 32115 - DNA, 381 bp, Glycine max
  Clone ID: LIB3138-027-Q1-N1-D12
aaaagccttagccttccctacaactccaaacacaaagacatcatcatccatggctgcctccgtctccactgtcggagctgtcaacagagctcttttgaacctgaatggttctggagctggagcttcagctcccagttcagccttctttgggaccagcttgaagaaggttattgcctcaagggtccccaacagcaaggtttccggtggaagcttcaagattgttgctgtagaagagaagaaagagattgaagagacccagcagaccgacaaggacagatggaagggtcttgcctatgatatctcagacgaccaacaagacatcacaagaggaaagggtttggttgactcccttttccaagctccacaggatgctggaactca

SEQ ID NO: 32116 - DNA, 377 bp, Glycine max
  Clone ID: LIB3138-027-Q1-N1-D2
gcaccacattcacctgaggcttccaaagcaatggcttcccttgcagcatccactgctgctgcttcccttggcatgtcagaaatgcttggaaaccccatcaacttcagtggtgccacaaggccagctccatctgcttctagtcctgcctccttcaagactgtggctcttttctccaaaaagaaggctacaccaacacctccaaaaaaagctgctgctgctgctcctgccaatgatgagcttgccaagtggtatggtcctgacagaaggatcttcttgcctgagggtctcttggaccgatccgaaatcccagagtacttgaccggagaagtccctggagactatggttatgacccatttggtcttagcaagaagccaga

SEQ ID NO: 32117 - DNA, 352 bp, Glycine max
  Clone ID: LIB3138-027-Q1-N1-D4
cgttgctcataacgttaatcagccccaagagaaagatttgttggagggaaatttttcctttgatattaaatctcgctctagattggaaaaagtttcctctacaaaagcacaatttgttagtggaaaaaccttcaaatatgatataattggtgctggttcacattcttcagaagattttcctgaaaaggaagatcaagaaaaacccaaaaagattgatgccagattgagacaaagaatagatcctcaatacaatgaggttcaggctcagatggaaacaaatttgtttaaattgtctcttgatgatgttgaaactcctaaaggttccatgttggatctgaaaatttctcaatct

SEQ ID NO: 32118 - DNA, 381 bp, Glycine max
  Clone ID: LIB3138-027-Q1-N1-D5
cttagttgtcaagttggaatcaacccatactccatggaatggactggtttggccaatagattactgagtaagggcaatgatattctgtgttgcgattatgctagttttgatggtttgattaccaagcaagttatgagcaagatggcagaaatgataaacagtctttgtggtggtgatgaaaaattgatgcgtgaaaggacgcacctgctgttggcttgttgttcaaggatggcaatttgtaagaaagatgtttggagagttgaatgtggaatcccttctggatttccgctcacagttatttgcaatagcatttttaatgagatgctcattagatatagctatgaaaaattactgcgccaggctaaagctccaagtatgttt

SEQ ID NO: 32119 - DNA, 371 bp, Glycine max
  Clone ID: LIB3138-027-Q1-N1-D6
aaagcctcacgccctccggcccacagaccctcagcctcctcatggtccccaccaactccgccttctcagagatcccctccaccgccccccaaaaccaggtcgacgaagacttctacctgcacctcaatctccctcccgagctcgacctcccgctccccgctacaactcaaatctaccaccagccgccaaactcatacctcatcccgcgatgggacctaggccccgactccggcgctttcacgcgcatcgagttcccgcctatcggctacgatgtcagccaggaagatctggatacctttgaaactatcctcgcacaatgcactgctttcatggagcgcgcgcaacctcctctgcctcgcaggccgagtcag

SEQ ID NO: 32120 - DNA, 382 bp, Glycine max
  Clone ID: LIB3138-027-Q1-N1-D7
gaaaggctgtttaatggtcaagattgtgatgtctgggaatgcagcagtcaaaaggagtgattgggcctcattggtacaagtgtttttaacaaacagcaacagtacagagcattttgatgcatgtaagtggacaaaatcagaaccacattcctgggaattgatcttcccaatagaggtatgtggtcctaataatggttttgaaatgtggagttctgagtgggcaaatcaaacttcatggcatttgagtttccttattgacaatcccaaacagtctacagtttttgatattctcttgggaatctctcaagattttgaaattgctggtaatactcttatgccagcattttctgttccacaggctactgccagatcttctgaaaat

SEQ ID NO: 32121 - DNA, 384 bp, Glycine max
  Clone ID: LIB3138-027-Q1-N1-D8
ctcgagccgaatcggctcgagcggctcgagcagcaaactgtttggaatcaaatggcaacagtgagaacaccattgaattttgattctagcaagcagagcttttgtcagttttctattgaccttctcggtggaggaatcttagtggacaaaactggagattggatcacacttatacaaaattctccaattagtaacttgttgagagttgctgcttggaagaaaggctgtttaatggtcaagattgtgatgtctgggaatgcagcagtcaaaaggagtgattgggcctcattggtacaagtgtttttaacaaacagcaacagtacagagcattttgatgcatgtaagtggacaaaatcagaaccacattcctgggaattgatcttc

SEQ ID NO: 32122 - DNA, 97 bp, Glycine max
  Clone ID: LIB3138-027-Q1-N1-D9
ctaaaaaatttttttttactaaaaaatcaaaccacaaacagacggggtaacaaatagcaagggagaagcactccttgctaccattaaaaaataaact

SEQ ID NO: 32123 - DNA, 188 bp, Glycine max
  Clone ID: LIB3138-027-Q1-N1-E10
cctttattgaactttatgggagctacttctgactgttctatgctacattctgcaaagcagtgtctggaatttgggtcccttggtgcttctgcctgtcttttattattatgcatgcgaggagtctttcgaggatttaaagacaactgaactccttgatattccactgtggcaggagatggaacccacat

SEQ ID NO: 32124 - DNA, 121 bp, Glycine max
  Clone ID: LIB3138-027-Q1-N1-E11
tgaaaccaaaaccttgagaaaactgaacattgccgagagtggcggaagaaatcgccggagagaaccgcttctggtgtcccccgaagaaaaagcttcaaaaacctcgtggaggcttaacggc

SEQ ID NO: 32125 - DNA, 339 bp, Glycine max
  Clone ID: LIB3138-027-Q1-N1-E12
agaatctcgtttcggggatacactgatcgggcgcagagacggagagggacccttgatgaggaacaacagtactaactctcttcgcaaatcacgggtcctaaccgcaggtgcaattggcgtccttgatggatgcgtgttcgctttcttgttcgcccaatggcttcttcgtttctgactctgctgccactaatcatcatctccctctcgcgggatctaagacccaggaaaattcagctggatgggaatccacggatcggatcaacatgttgaaatcacgagtttgtggcggtatcagagaaaaatgctgagcttaaaaaacaggtgagggaattgactgaa

SEQ ID NO: 32126 - DNA, 382 bp, Glycine max
  Clone ID: LIB3138-027-Q1-N1-E2
gaacaagttggcaaagttagcaatggttgcagctgctgttggggtgctaacacttgggtcagttcatgatgcatcagctgccaagactggtggtagaattggtggccaggccttcaagtcagcagctccacgctccgcaccaagaatcaacaattccaggaccaacatctatatcaatcctcgagtggcacctccgcttgttggtggctatggctatggttatggtggctggggatggtctccattttcattctttgcaccaggtcccagtgtagctgtaggcgttggaggtggatttgacactattcttctgtttatgtttcttggagctgctgctgcagttgtgaggagattctttgggtcaagaaatgaagatgatgac

SEQ ID NO: 32127 - DNA, 384 bp, Glycine max
  Clone ID: LIB3138-027-Q1-N1-E3
tgcaaagcttgctgatttggggctggcaaaggacggaccaacacgtgagaaaagtcatgcctccaccagggtaatgggaacctatggatatgcagctcctgaatatctagccacaggtaatctgagtgctaagagtgatgtcttcagttttggagtagtcctgctggaaatgttatctggcaggagggctgtggacaagaatagaccatcaggacaacacaatttggtggaatgggccaaaccatacttatccaacaaacgcaaacttttgcgtgtgttggataatcgtcttgaaggccaatatgaattagatgaggcatgtaaggtagctaccctctctctgcgatgcgctgcaatagaatcaaagttgagaccaaccatgga

SEQ ID NO: 32128 - DNA, 356 bp, Glycine max
  Clone ID: LIB3138-027-Q1-N1-E4
ctctattacaataaaaacactcaaaagaggagaaaaaaagaagaaaagaatggtaacaatagctggtggtgtgagtctttcaagccctatcagggtatttgctaatgctaagggaatagactcagcacaaaaggcccaagccgtgaagtttccagctctgtcgaggcccattcaaaagtggcctggtttggtgaagacccggtccgttcgggcgacgccggaaaagatatcggagaaggtagaggagagcataaagagcgcggaggatgcgtgctcgggaggcggctgtgactcggaatgcgcggcggcctgtgacgaggtggaggagctgaacgcggcgtctagccacgccaggg

SEQ ID NO: 32129 - DNA, 306 bp, Glycine max
  Clone ID: LIB3138-027-Q1-N1-E5
ttctaatcgaggttgatcatccacaagatgtgcctgacccatgcgtggatataaacgggggctggagagatgaatcggccacacccgatccaatgcttaaatagtgctgtccatatactaccagcacgcatcgcgcaatccgttaggaaagaataccagccatagacaaaacttatgtggccagtcattctgaacactcagcacggctgctcgacatcggagaatatattcaagatcagggacgtacccatgcttcacactcatgatgcaggctggttgggtctccaattcacggggtgctcgtgg

SEQ ID NO: 32130 - DNA, 164 bp, Glycine max
  Clone ID: LIB3138-027-Q1-N1-E6
aaccaaagttccaaaccctaaacgctacgaatttaattttctgggtttctctttttcaatcggggctttctccggcggcgcgtgggaatgtcttttgcgcgcgattcctaatttcccgcttacctattcttctctcgacccccattgtagaattcacccccgag

SEQ ID NO: 32131 - DNA, 276 bp, Glycine max
  Clone ID: LIB3138-027-Q1-N1-E7
ggagaaatggggctgacattcacgaagcttttcaaccggcttttcgcgaagaaggaaatgcgaattctgatgggtgggcttgatgctgctggtaagaccactatcctctacaagctcaagctcggagagatcgttactacaattcctaccattgggttcaatgttgagactgtggaatacaagaacattagcttcactgtttgggatgttggtggccacgacaagattcgtcccttgtggaggcactacttccagaacactcatggtcttattttt

SEQ ID NO: 32132 - DNA, 368 bp, Glycine max
  Clone ID: LIB3138-027-Q1-N1-E8
ttttgtcattggtgtcaagttgacaaccataaacaatatgtgtgcatatgggctcaatcctggtatttcatgttctcgccttttgggcaccattcctcaatccatttcacagcaaactgtttggaatcaaatggcaccactgagaacaccattgaattctgattctagccagcagagctcttgtcagttttctattgaccttctcggtggaggaatcttaacggacaaaactggagattggatcacacttatacaaaatcctccaattagtaacttgttgagagctgctgcttgaaagacaggctggttaatggtcaagattgtgatgtctgggaatgcagcaatcaaaaagagtgattgggcctcat

SEQ ID NO: 32133 - DNA, 376 bp, Glycine max
  Clone ID: LIB3138-027-Q1-N1-E9
tttcacaagaggaatttcttacagcttggtcaactcaggtgcgtcctgcaacaactctgttggctgatgggtgtccatatttgtatgcaatggtgcatgatagttcagtgtctacaataccaggtgattttgtcattggtgtcaagttgacaaccataaacaatatgtgtgcatatgggctcaatcctggtatttcaggttctcgtcttttgggcaccattcctcagtccatttcacagcaaactgtttggaatcaaatggcaacagtgagaacaccattgaattttgattctagcaagcagagcttttgtcagttttctattgaccttctcggtggaggaatcttagtggacaaaactggagattggatcacact

SEQ ID NO: 32134 - DNA, 357 bp, Glycine max
  Clone ID: LIB3138-027-Q1-N1-F1
ctagaaggaagactgatgataccttcaaattgctccatacaattctctttggaaggagagggaaggcagttgagatcaagagtaatatattaaggttttctggtttcgtgtggcgtgacaatgaggaaaagcaaatgattaaagtaaaagaaaaacttgacaagtgtaataaagagaagttactggaattctgtgatgtgcttgacataacaattaacaaggcaacatcgaggaaggaagatattattgctaagcttatagattttttagttgcccctcatgcaaccacaactgtgttacttgcagaaaaagagaagcccagtaagggaacaaagcgcaagcgtgttgtaaaatggg

SEQ ID NO: 32135 - DNA, 356 bp, Glycine max
  Clone ID: LIB3138-027-Q1-N1-F10
atgatattgtctcgggaacacatcatgaatatgaaattgctggtaaggctcttctgccagctccctctgtgacacatgctactggcaaaccttattaaaatgcggattcctttgcgtgaactgtaatatgggaactctttcgcttgaacggtcgcttgattaaataaaagcaactaaacgtgaccgtcttgtcgagaatactctgactatatgataattctcacaactatctcaattgtcggaacgatgcgtgatatgggtctattgtcaaattttttgacagagggcaattttagagcaagtgttgatttgcagcgcactcatcgtattagaggaatgattaaaatggtggccac

SEQ ID NO: 32136 - DNA, 374 bp, Glycine max
  Clone ID: LIB3138-027-Q1-N1-F11
gggggatacgaaataactatagtggatgcattggatgggcgtgaagtgattgatattatacctccaggaccggaacttcttgtttcagaaggtgaatctatcaaacttgatcagccattaacaagtaatccaaatgtgggtggatttggtcagggggatgcggaaatagtacttcaagatccgttacgtgtccaaggtctcttgttcttcttcgcatctattattttagcacaaatctttttagttcttaagaagaaacaatttgagaaggttcaattgtccgaaatgaatttctagtcccgcatatttatcaacatattaaactcataaaaataactcaatttttttgttgataatctatgtaattctattca

SEQ ID NO: 32137 - DNA, 300 bp, Glycine max
  Clone ID: LIB3138-027-Q1-N1-F12
attgtcattatcttaccactttcaattgcatattcactgtgagaaatgataagggctagcccatcaaacactaaaccagttgacgaattcagagtttatgatgcccggggaaatgctgttaatctcgccgcttacagaggaaaggtccttctgcttgaagcggtgactgacaatgcggattggctaattcaaactagacagagcttaatcaattgattgataaatacagagggaaaggacttagaactctggcatatacagtcaatcagggtggggctgaagagccaggatctaatgaac

SEQ ID NO: 32138 - DNA, 351 bp, Glycine max
  Clone ID: LIB3138-027-Q1-N1-F3
gaagaaaggctgtttaatggtcaagattgtgatgtctgggaatgcagcagtcaaaaggagtgattgggcctcattggtacaagtgtttttaacaaacagcaacagtacagagcattttgatgcatgtaagtggacaaaatcagaaccacattcctgggaattgatcttcccaatagaggtatgtggtcctaataatggttttgaaatgtggagttctgagtgggcaaatcaaacttcatggcatttgagtttccttattgacaatcccaaacagtctacagtttttgatattctcttgggaatctctcaagattttgaaattgctggtaatactcttatgccagctttttc

SEQ ID NO: 32139 - DNA, 378 bp, Glycine max
  Clone ID: LIB3138-027-Q1-N1-F6
cctgaggacaaggcgagtttatggtcacaacttcattatgtttcgtgtaataatctggaaatgcaagaagcttatcttgtcaatctcgtaaatgtgttacgagaattgtatttgcacagtccagaggaagctcgccaattgagaaggaaagctctctctcgtattgaatggctgcaaaaagctgatgtgcctaccatagcacagattgaagagttccattcgatgcagaggatgatgaatgctcctgattcaaatgataatattgatttactgttgagcattgatttgttgggtttacaaggagcaggtaaagcttttccaaacaaaattgtttttgatgataagcttgtgttggctaacacacaagaattctttgat

SEQ ID NO: 32140 - DNA, 207 bp, Glycine max
  Clone ID: LIB3138-027-Q1-N1-F7
atggtattgacaaaactagtgcaactttgcaatttataaagttagcagattgtgattttctcaagagaaactttaagcagatgtctaatgttttgtggggggctcctgatgacaaagcgagtttatggtcacaacttcattatgtttcgtgttataatctggaaatgcaagaagcttatcttgtcaatctcgtaaatgtgttacgag

SEQ ID NO: 32141 - DNA, 385 bp, Glycine max
  unsure at all n locations
  Clone ID: LIB3138-027-Q1-N1-F8
aactcctcttcattcagagttgtggccagtggtggcaagaagatcaagactgacaagccttatggaattaatggtggcatggctttgagggaaggagttgatgcatctggcaggaaaggaaagggaaagggcgtttaccagtttgtagacaaatacggtgctaatgtcgatggttacagtcctatctacgacaccaaggactggtctccaaccggtgatgtctacgctggcggtacgactggcttggctatctgggctgtgactctacttggtcttcttgctggtggtgcacttcttgtctacaacacatgtgctttggcgcaataaactttgcaaatcgatgttntaagctcaaacttagtccatgtaactatctataaatgaa

SEQ ID NO: 32142 - DNA, 379 bp, Glycine max
  Clone ID: LIB3138-027-Q1-N1-F9
atataattggtgctggttcacattcttcagaagattttcctgaaaaggaagatcaagaaaaacccaaaaagattgatgccagattgagacaaagaatagatcctcaatacaatgaggttcaggctcagatggaaacaaatttgtttaaattgtctcttgatgatgttgaaactcctaaaggttccatgttggatctgaaaatttctcaatctaaaattgcacttcccaagaacacagttggaggaaccattctgcgtagtgatctattggcaaattttttgacagagggcaattttagagcaagtgttgatttgcagcgcactcatcgtattagaggaatgattaaaatggtggccacagttggtattcctgagaatac

SEQ ID NO: 32143 - DNA, 343 bp, Glycine max
  Clone ID: LIB3138-027-Q1-N1-G1
ttctgcatgtttgttctctcaacgactcctccgcgaaagagtattattcaatattttgggtgggttgaatcccggagttgaagcgttgcagacatcacggctattctaagagtggctcgctccctcattcatgtgcgatctgtacgacggaggacgggtagttgcgtaactgtcgctaacccttcgccgcacggtgggcgtggtgctttgccttctgaaggtggtagcccttaagacttgctcttgctcgctggtggtggtttcttctagattcttcactctttacattactcttagcctgcataggtttaaataagaaaaaaaaaacagcgactttgtgact

SEQ ID NO: 32144 - DNA, 291 bp, Glycine max
  Clone ID: LIB3138-027-Q1-N1-G10
gaaaaaactactgtacaaaatcatactcctctagatcagatgctggttccagaatactcggaagcttttcctgctcaacatgccgcttcaaagacaccaggtgccatattatcttattctgaaagcggctatgccgaggtacatacttgatcaacggtgactgatcatgtcacgaacaaaacaatttctgagcaccttgattccaacaaatcaaagggtagatatccggttgaccgttcctcatgtggctccaacacggcctataactgggatgtggaaactgatgcgcta

SEQ ID NO: 32145 - DNA, 376 bp, Glycine max
  Clone ID: LIB3138-027-Q1-N1-G11
gaacagagtgagctctttcttgctgtctctaatattttgaaggaaaataaaagcatgtcgaaggatgcttttaagttcctgaccagttatctggcaactttttcgggagatgactcacatgttttgagtgaagccaaggaggaggctgcacgtgcaattgtggaatttgtgttttcacctgacgtatttcacagtgatttactagacttgcctgctgttacacaactggagaaggatgccaaatatgctctgttatatcagcttcttaagatttttcttacccagaggctgaatgcatacttagactatcatgctgccaattccaccttgttgaaaagttatggccttgtgcattaagaatgcattgccaaaatga

SEQ ID NO: 32146 - DNA, 256 bp, Glycine max
  Clone ID: LIB3138-027-Q1-N1-G12
gaacttttggattcttagctgccaccctcatatgatatttcttgaaaccttgtgttaaaaattgtgtccttttgaacttcaataaaaatttgatttttttttcttagtttcatacccacatacccattggtggatttgaactagttttacttgcctcatggcccttcatataagcagcggttggtttactgggatgtgtaactcaagagttcacaaaataagaactgttgcttcaaaaggttctgctactcttaat

SEQ ID NO: 32147 - DNA, 381 bp, Glycine max
  Clone ID: LIB3138-027-Q1-N1-G4
tttctattgaccttctcggtggaggaatcttagtggacaaaactggagattggatcacacttatacaaaattctccaattagtaacttgttgagagttgctgcttggaagaaaggctgtttaatggtcaagattgtgatgtctgggaatgcagcagtcaaaaggagtgattgggcctcattggtacaagtgtttttaacaaacagcaacagtacagagcattttgatgcatgtaagtggacaaaatcagaaccacattcctgggaattgatcttcccaatagaggtatgtggtcctaataatggttttgaaatgtggagttctgagtgggcaaatcaaacttcatggcatttgagtttccttattgacaatcccaaacagt

SEQ ID NO: 32148 - DNA, 376 bp, Glycine max
  Clone ID: LIB3138-027-Q1-N1-G5
ccacccacgcggctctagcttctacaaggatccccactaacaccaagttcccatccaaggcttcacactctttcccaacccaatgcgcctcaaagagacttgaggtgacagaattctctgggctaagatccacttcatgtgtgacatatgctaacgatgctagagaatcttccttttttgatcttgtagcttcccaactcactcccaagaccaatggatcatcaactcctgtgaggggagagacagtggccaagttgaaggtggcaatcaatggtttcggacgcattggtagaaacttccttcgctgctggcacggccgaaaagactcaccccttgaggtcgttgttgtcaacgacagtggtggtgtcaagaatgc

SEQ ID NO: 32149 - DNA, 376 bp, Glycine max
  Clone ID: LIB3138-027-Q1-N1-G6
ttgcaatttagaaagttagcagattgtgattttctcaagagaaactttaagcagatgtctaatgttttgtgggtggctcctgaggacaaggcgagtttatggtcacaacttcattatgtttcgtgtaataatctggaaatgcaagaagcttatcttgtcaatctcgtaaatgtgttacgagaattgtatttgcacagtccataggaagctcgccaattgagaaggaaagctctctctcgtattgaatggctgcaaaaagctgatgtgcctaccatagcacagattgaagagttccattcgatgcagaggatgatgaatgctcctgattcaaatgataatattgatttactgttgagcattgatttgttgggtttac

SEQ ID NO: 32150 - DNA, 375 bp, Glycine max
  Clone ID: LIB3138-027-Q1-N1-G7
cttatctttctctcttctctctccccgcccaaaccctaactccctaccctattccgctttctctcatccatcatgaaaggaggaaagtccaagaccgaatctaagagagccgatgccaaacttgctgtgaataagaagggcgccgccaccaagactaggaaacccgccggaaaggggaaggcagcgaaagatcctaacaagccaaagaggcctccaagtgctttcttcggtttcatggaggaattcaggaaggtgttcaacaaggaacatcccgacaacaaagcagtgtctgctgtgggcaaagctgctggagcaaaatggaagacgatgtctgatgctgaaaaagcaccctatgtggcatagtctgagaaaagg

SEQ ID NO: 32151 - DNA, 374 bp, Glycine max
  Clone ID: LIB3138-027-Q1-N1-G8
ttgagacaaagaatagatcctcaatacaatgaggttcaggctcagatggaaacaaatttgtttaaattgtctcttgatgatgttgaaactcctaaaggttccatgttggatctgaaaatttctcaatctaaaattgcacttcccaagaacacagttggaggaaccattctgcgtagtgatctattggcaaattttttgacagagggcaattttagagcaagtgttgatttgcagcgcactcatcgtattagaggaatgattaaaatggtggccacagctggtattcctgagaatacaggtatatcattggcctgtgctatgaatagttcttttagggggcgcgccagttctgatatttacaccatctgctctca

SEQ ID NO: 32152 - DNA, 335 bp, Glycine max
  Clone ID: LIB3138-027-Q1-N1-G9
gaaaaaactactctacaaaatcctcctcttcaagatcagatgctggatccagaatactcggaagctcaacaagctcaacattcagcttcaaagtcaccagctgccattttatcagattctgagagtggagatgccaagttaaatacttcatcaaaggttactgatcatgagacgaacaaaacaatttctgagcaccttgattccaacaaaacaaagggaagaaaaccggttgaccgttcctcatgtggttccaacacggcctctagcagcgatgtggaaactgatgcactagagaagggtgagaaaaggaaggaagagcctgaaatacctgatgc

SEQ ID NO: 32153 - DNA, 375 bp, Glycine max
  Clone ID: LIB3138-027-Q1-N1-H10
gattcggaacattctgcaatttttcagtctatccaggggttgccaaagggtgcacttaggaaaatccttttaactggatcaggaggtgctttcagagaatggcctgctgaaaagatgaaagatattaagcttgctgatgcattaaagcatcccatatggagtttggggagaaaaataactattgactctgctacccttttcaataagggtctagaagtaattgaagcacattacttgtttggagcaagctatgacgatattgagattgttattcatcctcaatctatcatacattccttggttgaaacgcaggattcatctgttattgcacagttggggatacctgacatgcgcttaccgctcctttatacatta

SEQ ID NO: 32154 - DNA, 370 bp, Glycine max
  Clone ID: LIB3138-027-Q1-N1-H11
cacgtgtaggaggtgcagtggtagtgggaggcattcatagaattgggaccttgacctccactgtcaccgtgagaagaagaagtaaagcagtgactactgcaatgcgagcggtggttcagcgcgtggcctctgcctccgtcgaggtcgaaggccgcatcgtctccgagattggccccggccttctcgtcctcgtcggaatccacgactccgattccgacgccgacgccgattacatatgccgaaaggtcttgaacatgaggctgttcccaaatgaaaatacgggcaaagcgtgggaccacagtgtgatgcaaaaaaattatcaagtcttattggtgagtcagtttacgttgtatggattcctgaaggtaac

SEQ ID NO: 32155 - DNA, 355 bp, Glycine max
  Clone ID: LIB3138-027-Q1-N1-H12
cgaagaaagagtgtatcaaaaaaaacatcaaccaacgacatcctcgtcttcatcttcttcttcgtcttcttctttggtcagcttccctaacgttaacgtggtcggcgtgtatcccaaaacaaaacgatggacttcaccacttttgcaaattgcatatcctcttctcatgcaattccttcaatacacacttatcgccttcaaccctctcctttttctctccacctcccattttcggtacgtaattacgtcttgttcttcttcttattccgatttgtatctctctgtcatctctgtgtgaactctcgtgggtctatatatatataatatatgatatatatatatagtatatatatat

SEQ ID NO: 32156 - DNA, 385 bp, Glycine max
  Clone ID: LIB3138-027-Q1-N1-H2
cttatggcgaaccctgccatcaaacgcggcgacaacgagtgggtcgacaaaatctacaaactcatggacgaagtcgacgactacattcccatcccccagcgccagaccgacctcccattcctcctcgccgtcgaagacgttttctccatcaccggccgtgggaccgtcgccaccggccgcgtagagcgtggcaccgtcaaagtaggggaaactgttgaccttgtaggattgagagagacaagaaacacaacggtcacaggtgtggaaatgttccagaagattctagacgaagccctcgccggggacaacgtggggctgttgctgagaggggttcaaaagacggacatccagagagggatggtgttggcgaagcctggcacgatta

SEQ ID NO: 32157 - DNA, 380 bp, Glycine max
  Clone ID: LIB3138-027-Q1-N1-H4
atttgttgggtttacaaggagcaggtaaagcttttccaaacaaaattgtttttgatgataagcttgtgttggctaacacacaagaattctttgatggaaattttccagtggattcttggttaccaatttttgtgaattgtctttatcctgtaagtcaattaccttcagaagctgtcgttgtaaatgttacatgtggtagtggacgtggtggtttacccaccactgcttggattagttctgcagttaacaatcgctcctcatatatcaacaaaaggattcgcacagcacttgggaaaggtaagaaaattgtttttcttactagagttgatccttttccagtagctttactggctgttctttttggcgttaagaatgaaatt

SEQ ID NO: 32158 - DNA, 382 bp, Glycine max
  Clone ID: LIB3138-027-Q1-N1-H5
caaatattgaagtgtccaatgcgtaccaacaataccctttagtttactctctctaaaaaaacaaacaattctctatcctctacactctagtctctcgctgtttgttctctacttaactcacatctctaagctgtgtgcgtgaaccagcggatagcaaggatgagtaaacaagacatgatgaaaagtcagaattgccttctcaaggtcaatatccactgcgatggctgtgaacagaaagtaaagaaaatcctgcagaaaattgatggggtgtattctgtgaacatagatgcggagcgagggaaggtgatggtgtcagggcatgtagatccagctaaactgataaaaaagctgaagaggtcagggaagcatgccgaactttggg

SEQ ID NO: 32159 - DNA, 274 bp, Glycine max
  Clone ID: LIB3138-027-Q1-N1-H6
tttttgtggagattccatgttccttgctgctctgctgtgttctctgtctttgttttcttaaaaaaaaaacttgttgcaaggtttcctgatttagttatttcaaactcttcatttcgattctgtcaatgagaatcctgatgaaagacaaatgaccggacagaattttagtatattgtatatttctttcacgtgttgggattattcatatgctcattgcccacgtcatcgacgcttacttatgccgagatgtctagtactttacgctggtcccaaa

SEQ ID NO: 32160 - DNA, 355 bp, Glycine max
  Clone ID: LIB3138-027-Q1-N1-H7
gtcactgccgccttcgccttttctggtaccgaacttgtgggtttggctgctgccgagacaaagaaccctctgaagtccctgcccggtgctgtccgtcaggtcttctggcgaatcaccctattctatgtgctcggtctccttttcgttggtctgctcattgactctactgatcctcgtctgcttggttctggtgccctcatcgatgtcacggcttctcccttcgtcttggtcggcgagtatgccggtctcaagggcttcgatagtttcatgaacgtcgtgattcttgtctcggtcgtctccatcggcgtttccggtgtctatggtggctctcgtacgcttactgcgctcgctgagc

SEQ ID NO: 32161 - DNA, 383 bp, Glycine max
  Clone ID: LIB3138-027-Q1-N1-H8
tgggaatgcagcagtcaaaaggagtgattgggcctcattggtacaagtgtttttaacaaacagcaacagtacagagcattttgatgcatgtaagtggacaaaatcagaaccacattcctgggaattgatcttcccaatagaggtatgtggtcctaataatggttttgaaatgtggagttctgagtgggcaaatcaaacttcatggcatttgagtttccttattgacaatcccaaacagtctacagtttttgatattctcttgggaatctctcaagattttgaaattgctggtaatactcttatgccagctttttctgttccacaggctactgccagatcttctgaaaatgcggaatcctctgcatgatctggaatttgtgttt

SEQ ID NO: 32162 - DNA, 368 bp, Glycine max
  Clone ID: LIB3138-027-Q1-N1-H9
cttgaagagaagatgttgcttaaccttcacaaaaagaagtggactgatggtttgacactcaggcattttgattcacattctaaaactaatgaacagactgttcaggagatgctaagtttagcagccaagtacaacaaggcagtgcaggaggaagatgaactgccaccagaaaaacttgcaattgcaaatgtggggaggcaagatgctaagaagcaccttgaagagcatgtttccaatttgatgtcatcaaacattgttcagactttgggaatgatgcttgacacggttgttttctagagttagctagcatcgtccattgtattgttccttactatagttagcaacatttcattaatactcttgacatg

SEQ ID NO: 32163 - DNA, 340 bp, Glycine max
  Clone ID: LIB3138-028-Q1-N1-A1
tagcaaacgatccaaactcttttttcatttgcagcatcaaaatgagtggtagcaacgatggtagcggcagctggagctctaggtttttgaaggtggctagtgcagctgccgctacagccgccgttgccggcggtttatatgccattctttcatcctcaacctctgctagctctgagatggaagtgccgtttggcagcgcacggcgtgagagcaaagaacgtgacgatggtggctccgggtctaatcctcgcgagggtgccaccacggtcagtcggtggaagaaacctgagattggtgggtgaagctgaacgtgatggtcacgcgaccatacaaaaagtct

SEQ ID NO: 32164 - DNA, 399 bp, Glycine max
  Clone ID: LIB3138-028-Q1-N1-A10
tgggtgtccatatttgtatgcaatggtgcatgatagttcagtgtctacaataccaggtgattttgtcattggtgtcaagttgacaaccataaacaatatgtgtgcatatgggctcaatcctggtatttcaggttctcgtcttttgggcaccattcctcagtccatttcacagcaaactgtttggaatcaaatggcaacagtgagaacaccattgaattttgattctagcaagcagagcttttgtcagttttctattgaccttctcggtggaggaatcttagtggacaaaactggagattggatcacacttatacaaaattctccaattagtaacttgttgagagttgctgcttggaagaaaggctgtttaatggtcaagattgtgatgtctgggaatgc

SEQ ID NO: 32165 - DNA, 372 bp, Glycine max
  Clone ID: LIB3138-028-Q1-N1-A11
gaagcacgacgacttcaacactcggcctcacaccgactgccagcgtgtccaaagatgattgatgatcaagatctgggatgctttgccaattttcttggcgtcttcatctttgtactggtcatagcgtatcattgtggcatggctgacccaaagttcgaaggaaactaagaatgtagactgtggtgctttgcaaatggaaatgaatttgatgcaatcaacaactgtagtctgggaatgtgaacgttaagcttactataactttcatagacatcaaaggagcatcacatttcaattttcgctatacttatgcgcgctcccttaagatatggtttgcaggtaaagaactttcgttgatagacttatgaaaacact

SEQ ID NO: 32166 - DNA, 312 bp, Glycine max
  Clone ID: LIB3138-028-Q1-N1-A2
ctcggctacatccccaatgcaccacacttcgacgacaacttcgatgacaccctcgtatctgccatcaaaacctaccaaaagaattacaacctcaacgtcaccggcaagttcgacatcaacactcttaaacaaatcatgacaccccggtgtggcgtccccgacattattatcaacacaaacaaaaccacatcgtttggcatgatctcggactataccttcttcaaagacatgccgcggtggcaagctggaaccacacaactcacctacgcttttttcccggagccaagacttgatgacactttcaaaagcgcg

SEQ ID NO: 32167 - DNA, 107 bp, Glycine max
  Clone ID: LIB3138-028-Q1-N1-A4
gttcagagaatgtacaatgtgcagcatatattgaacaacacagatgaaataaataaatagggcgtcaaatttttagttaaaattaacaatatttatatcctaattat

SEQ ID NO: 32168 - DNA, 217 bp, Glycine max
  Clone ID: LIB3138-028-Q1-N1-A7
atgatactgtgtgactactgtgctcaagttagtctcaggaggggtaacaataacagcagacattttaagcggggattgaacgcactttaatgactgcgatgtgcacctgctcagacctctgaccaaccaccgcaacattctgctttttaaatcaaccataatatacagatattgtccttgcttcatagatccatatgtatcactcttacgattggga

SEQ ID NO: 32169 - DNA, 297 bp, Glycine max
  Clone ID: LIB3138-028-Q1-N1-A8
gatgagcccaacaacaaaaacagcaacaattcgcaacaagaagaagaatttgagatccccttctatgcttatttgcttgcctctgccatcactgcaattgccgctataggttccattttcgaatatgtgaaccaaaggccggtcttcggagtattaagctccgacagcgtgttttatgctcccttgcttggtttctttgtcttcaccggcattccctcctcggcttttctgtggttcaagtctgttcaagctgctaacaaggaagcggaggaacaagacaagaaggatggttattta

SEQ ID NO: 32170 - DNA, 269 bp, Glycine max
  Clone ID: LIB3138-028-Q1-N1-A9
cgcacctgctgttgccttgtcggtcacggatggcaatttgtaggagagatggtaggcgagttgaatgtggaatcccttctggatttacgatcacagttatttgcattagcattattaatgagatgctcattcaatatagctatgaaaaattactgcgccacgctaaagctgcaaatgtgtccttccatgcttcaaaaattttgcctctttgtgcgtgttggcgatgatgacttaattggtgttcatgactgttgtcaagccttacttta

SEQ ID NO: 32171 - DNA, 303 bp, Glycine max
  Clone ID: LIB3138-028-Q1-N1-B1
cgcgctgcttcactattctccctatggagtttaatcttgtggtccgtcaaaagtttttaaattttgtgaggttcattatgaagaaaagggacaaacttagttgtcaagttggaatcaacccatactccatggaatggactggtttggccaatagattactgagtaagggcaatgatattctgtgttgcgattatgctagttttgatggtttgattaccaagcaagttatgagcaagatggcagaaatgataaacagtctttgtggtggtgatgaaaaattgatgcgtgaaaggacgcacctgc

SEQ ID NO: 32172 - DNA, 377 bp, Glycine max
  Clone ID: LIB3138-028-Q1-N1-B10
caatttgtaagaaagatgtttggagagttgaatgtggaatcccttctggatttccgctcacagttatttgcaatagcatttttaatgagatgctcattagatatagctatgaaaaattactgcgccaggctaaagctccaagtatgtttttacaatccttcaaaaattttgtttctttgtgtgtgtatggtgatgataacttaattagtgttcatgaatatgtcaagccttactttagtggttctaaattgaaaagctttctagctagtcataacatcaccattactgatggtattgacaaaactagtgcaactttgcaatttagaaagttagcagattgtgattttctcaagagaaactttaagcagatgtctaat

SEQ ID NO: 32173 - DNA, 351 bp, Glycine max
  Clone ID: LIB3138-028-Q1-N1-B11
gtctaggaaggatagaggagaggttgatcttgtttttggttgattcagtggtaaattctctccaaggtgcacgtgcatctcagcaactgaatcattcatctcagttgataaaagaaaaacttcactgtaacaaagatgtacaaaaggtctaatgaagaaaaggatgtaagtagtaagaaggttagaaattgtgatacagcagaaagcaatattcaaagcgcgattgtcgatggcgaggacacatctgagattccatcattcccattaggaaatttgagtactagttggtgctcactggtttggaaaaccggctgctattaagacagccaacagatacttcttgcttcaaaa

SEQ ID NO: 32174 - DNA, 373 bp, Glycine max
  Clone ID: LIB3138-028-Q1-N1-B12
attgtatttgcacagtccagaggaagctcgccaattgagaaggaaagctctctctcgtattgaatggctgcaaaaagctgatgtgcctaccatagcacagattgaagagttccattcgatgcagaggatgatgaatgctcctgattcaaatgataatattgatttactgttgagcattgatttgttgggtttacaaggagcaggtaaagcttttccaaacaaaattgtttttgatgataagcttgtgttggctaacacacaagaattctttgatggaaattttccagtggattcttggttaccaatttttgtgaattgtctttatcctgtaagtcaattaccttcagaagctgtcgatgtaaatgttacatgt

SEQ ID NO: 32175 - DNA, 408 bp, Glycine max
  Clone ID: LIB3138-028-Q1-N1-B5
cacccggcggcactgatagcatcgtgtccttatccttatccttatcctgggcggcatgagttaccctcagcctcagcgtcagcgacagccagagtcgctgttccaatgccaaatctgagaggcaaagcggttgttggtgttggttccagaatgataaggtgcatggctaaccccagaagagttcaaatggtggccaagcaaattaggagagagctttctcatatgcttctcaccgataaagtcttgcagtatgctgttcttcccgaagcctccttaagagcccgaccgttacctctcttctgtcaccaccatcaccgacgtccaagtctccgccgacttgcaggttgttaaggtgtatgtttctgtttttggagatgaaagaggtaaagaagtcgccattgccggctt

SEQ ID NO: 32176 - DNA, 378 bp, Glycine max
  Clone ID: LIB3138-028-Q1-N1-B6
cacccggcggcactgattgcatcgagtccttatccttatccttatggtgggcggcatgagttaccctcagcctcagcgtcagcgacagccagagtcgctgttccaatgccaaatctgagaggcaaagcggttgttggtgttggctccagaatgataaggtgcatggctaaccccagaagagttcaaatggtggccaagcaaattaggagagagctttctcatatgcttctcaccgataaagtcttgcagtatgctgctcttcccgaagcctacttaggagccgacacgtacctttcttctgtcaccaccatcaccgacgtccaagtctccgccgacttgcaggttgttaaagtgtatggttctgattttggagatgaa

SEQ ID NO: 32177 - DNA, 384 bp, Glycine max
  Clone ID: LIB3138-028-Q1-N1-B9
ctcgagccgaatcggctcgagcggtggaggaatcttagtggacaaaactggagattggatcacacttatacaaaattctccaattagtaacttgttgagagttgctgcttggaagaaaggctgtttaatggtcaagattgtgatgtctgggaatgcagcagtcaaaaggagtgattgggcctcattggtacaagtgtttttaacaaacagcaacagtacagagcattttgatgcatgtaagtggacaaaatcagaaccacattcctgggaattgatcttcccaatagaggtatgtggtcctaataatggttttgaaatgtggagctctgagtgggcaaatcaaacttcatggcatttgagtttccttattgacaatcccaaaca

SEQ ID NO: 32178 - DNA, 364 bp, Glycine max
  Clone ID: LIB3138-028-Q1-N1-C1
ctgatgtgttggcattcagtgggccagcacctgagaggatcaatggaaggttggccatgattgggtttgtggctgcaatggcagtggaagtagccaaagggcaaggtgtgttagaacaaatatccaatggtggcatcccatggttcttggggacaagtgtggtccttacccttgcttccttgattccactcttccaaggtgtcagcgtggagtctaagtccaaagggttcatgtcctcagatgcagaactgtggaatgggagatttgctatgttgggtttgattgctctggcttttactgagtatgttaagggtagtactttggtataattcagtcatgaaggcacaccacaatggacttaatc

SEQ ID NO: 32179 - DNA, 405 bp, Glycine max
  Clone ID: LIB3138-028-Q1-N1-C10
gcatttggaaatttggctgatgataccatcaattttgaggcttttccccacaagctggtgcagtttggagagattcaggaaaaagttgtattgaaattttcacaagaggaatttcttacagcttggtcaactcaggtgcgtcctgcaacaactctgttggctgatgggtgtccatatttgtatgcaatggtgcatgatagttcagtgtctacaataccaggtgattttgtcattggtgtcaagttgacaaccataaacaatatgtgtgcatatgggctcaatcctggtatttcaagttctcgtcttttgggcaccattcctcagtccatttcacagcaaactgtttggaatcaaatggcaacagtgagaacaccattgaattttgattctagcaagcagagcttt

SEQ ID NO: 32180 - DNA, 387 bp, Glycine max
  Clone ID: LIB3138-028-Q1-N1-C11
aaaagatggtggcacccattgctgtttcttctccaaagtccacacttttgcagaaccccatctattttggtgacctaagttcaagttttgttggagggtccttgaagtgtctttgcttcaatctaaaaccgaggccacaaagaagagaattgaccaacttggttgtagcttcagccaccccaagtgttacaaacagcaatgctagtggcaggttttacttcaacttcactggttttcctttcccacttggtccttttctcaacaggcgctctattaggactgaggctgtgaagggttgtatatggctgttcgaacaagagcaggcattaggattcagcagtgtttccacaaacatcagaatgacagttatcaaactaaaatctgggg

SEQ ID NO: 32181 - DNA, 169 bp, Glycine max
  Clone ID: LIB3138-028-Q1-N1-C12
ggactatggagatggccatagctgcactgtttccatagatgacagttttgcacatcctcatgcatttcggcgacctaacttaacgtggcgttgcacgactcatgccctgactaaaattcattctgaaccgcgggactccttgactaccacagaccaactagaaagtggc

SEQ ID NO: 32182 - DNA, 335 bp, Glycine max
  Clone ID: LIB3138-028-Q1-N1-C2
gtgagtggtactattcccgaatagcagcaagcaaggcaaggcgtgtgtccgagcacagcaggagtgaaggagaaaaggacccttgtccgtccagtccttattctcttttctcctacctccctcacgcaaccgccaattcctgaaccctaagctagcgccatggctgtcgtttcgcgaagtgcgacgacctatacgcgccactacttaatacgacacgagtttgataggaaaacgaaaacctgcgttgccaataatagtttgtgttactctgctaagaaggctcctccaccgcataggattgttggtggccgtagagtgattgttgctgcaagccc

SEQ ID NO: 32183 - DNA, 103 bp, Glycine max
  Clone ID: LIB3138-028-Q1-N1-C3
agaatttctgaaaaatatatattaccctcttttacactcctttgaagatgaacgtactttctactttcagctttaatgcattgcttcttttattgtcctgtat

SEQ ID NO: 32184 - DNA, 157 bp, Glycine max
  Clone ID: LIB3138-028-Q1-N1-C4
cttatgatagacgtacataagaaaaagttggcgcattaaaaaaccatgtgtaaacttttttttatgatagacgtacataatgtgtggaagattaagtttgggtgtgaggagatacaatcatttttatgatagaagtacataattttgtgagagtttt

SEQ ID NO: 32185 - DNA, 360 bp, Glycine max
  Clone ID: LIB3138-028-Q1-N1-C5
ctttcttttcctttcaagatggcttacttgaaggttgtcataaacatgttcgacttgctattcgtgcttatcttatcaatgattctggcaacagcaagggtgcccctgaggatatacgaacctcatcacaaagcacatggacgcctccttgctatggatgatccacgtgaccaccattgtcaatttacaccataatcaccgaggagtgaagacccaatatgctgccaaaggcgagtcgaataccacataataatcaaatcagacagcactgggtttcaaggacaaaacttgctgtggagaagaagatatatttgcagacatactactcataaattatactattcaattgctttggaatta

SEQ ID NO: 32186 - DNA, 359 bp, Glycine max
  Clone ID: LIB3138-028-Q1-N1-C7
caaagaatagatcctcaatacaatgaggttcaggctcagatggaaacaaatttgtttaaattgtctcttgatgatgttgaaactcctaaaggttccatgttggatcttaaaatttctcaatctaaaattgcacttcccaaaaacacagttggaggaaccattctgcgtagtgatctattggcaaattttttgacagagggcaattttagagcaagtgttgatttgcagcgcactcatcgtattaaaggaatgattaaaatggtggccacagttggtattcctgagaatacaggtatagcattggcctgtgctatgaatagttcttttagggggcgtgccagttctgatatttacaccat

SEQ ID NO: 32187 - DNA, 375 bp, Glycine max
  Clone ID: LIB3138-028-Q1-N1-C9
ctggtatttcaggttctcgtcttttgggcaccattcctcagtccatttcacagcaaactgtttggaatcaaatggcaacagtgagaacaccattgaattttgattctagcaagcagagcttttgtcagttttctattgaccttctcggtggaggaatcttagtggacaaaactggagattggatcacacttatacaaaattctccaattagtaacttgttgagagttgctgcttggaagaaaggctgtttaatggtcaagattgtgatgtctgggaatgcagcagtcaaaaggagtgattgggcctcattggtacaagtgtttttaacaaacagcaacagtacagagcattttgatgcatgtaagtggacaaaat

SEQ ID NO: 32188 - DNA, 353 bp, Glycine max
  Clone ID: LIB3138-028-Q1-N1-D1
tttcaatccataaagtcccaaaaacactgacagcgagaccaactcaaccacctcttccagttgcagacttgagttccttatgatgggaaccgcatgtttcccaactactaatgttgttctcaaacctcaaaacttatctgggaatttctctaccctctgtgataactttcggtgtctgaggttcctcactccgaaaccgccccacctgcgatcctctcactctaagttgggaaatagagtaaagctgacatctttttcgatgtccaaggcaacccatttgaaggtttcacaagctgcactctcatccacggaagaatcactgtcttcatctccctcggtaataggagaacatg

SEQ ID NO: 32189 - DNA, 288 bp, Glycine max
  Clone ID: LIB3138-028-Q1-N1-D10
cgctcctcagatatcaacaaaaggattcgcacagcacttgggaaaggtaagaaaattgtttttcttactagagttgatccttttccagtagctttactggctgttctttttggcgttaagaatgaaattctgagttctaacgccactaatcctatgctgatgcgacttcttgagaactgtaagagtctcaaatatctggttgatgagtgtccttttgcatttgtgaactagtatgtagtattttattcacttaaataaagcgcattactatgtgcaatgagtgtgttt

SEQ ID NO: 32190 - DNA, 348 bp, Glycine max
  Clone ID: LIB3138-028-Q1-N1-D11
gaaaaagcaaccacttgatcggtctcttaaacttcctaacattcctgctgtcgattccgatcctaggaggcgggatatggctgagcagcagggcgaacaacaccgactgcctcaagttcctgcagtggccgctcatcatcatcggcgtcagcatcatggtcgtgtccctggcggggttcgccggcgcgtgttaccgcaacaccttcctcatgcggctctacctcgtcgtcatgttcctggtcattgccgttctgatcgggttcatcatattcgcctacgttgtcaccgacaaggggtccggtcggagggtgatgaaccgcgcttacttggagtattatcttgaggact

SEQ ID NO: 32191 - DNA, 179 bp, Glycine max
  Clone ID: LIB3138-028-Q1-N1-D2
gtctttgaagtttctaagatgacttctccctacattaaatgtacaggcggtttcttcatagcattgggaaatttggctgatgataccatcaattgtgatgcttttccccacaagctggtgcagtttggagagattcatgaaaaagttgtattgaaattttcacaagaggaatttttaca

SEQ ID NO: 32192 - DNA, 399 bp, Glycine max
  unsure at all n locations
  Clone ID: LIB3138-028-Q1-N1-D4
tgggaattgatcttcccaatagaggtatgtggtcctaataatggttttgaaatgtggagttctgagtgggcaaatcaaacttcatggcatttgagtttccttattgacaatcccaaacagactacagtttttgatattctcttgcgaatctctcaagattttgaaattgctggtaatactcttatgccagctttttctgttccacaggctactgacagatcttctgaaaatgcggaatcctctgcatgatctggaatttgtgttttctttcgctcgttcgcttgtttaattcaataaacgaaattaggcatgaccctcttgttgagtatgctctgcctatttgaaaatttccacacctctnttaattgtcgtaatgatgtgtgaagtgtgtgttatttt

SEQ ID NO: 32193 - DNA, 133 bp, Glycine max
  Clone ID: LIB3138-028-Q1-N1-D5
acggctggacactgctggctttcggcgaccagaaaccttcccagaaccgtggctcgagtgaccacttaggtgggcatgctcgggccttggctgcgtcttcccgaactgttgtcccgcaacggggtcaagtttg

SEQ ID NO: 32194 - DNA, 130 bp, Glycine max
  Clone ID: LIB3138-028-Q1-N1-D6
tttccttcaacacagtcggccaaaatctttcaccaccaacacacagccatggcaggctctcaccttctttcttactccccctcctttccaaaacctatactactctaaccaaaccttatccaaatctttt

SEQ ID NO: 32195 - DNA, 256 bp, Glycine max
  Clone ID: LIB3138-028-Q1-N1-D7
gtttggagagattcaggaaaaagttgtattgaaattttcacaagaggaatttcttacagcttggtcaactcaggtgcgtcctgcaacaactctgttggctgatgggtgtccatatttgtatgcaatggtgcatgatagttcagtgtctacaataccaggtgattttgtcattggtgtcaagttgacaaccataaacaatatgtgtgcatatgggctcaatcctggtatttcaggttctcgtcttttgggcaccatt

SEQ ID NO: 32196 - DNA, 400 bp, Glycine max
  Clone ID: LIB3138-028-Q1-N1-D9
cacgagcaattcccctaaatcaattagacggtcaaaactgaagatggcttccggagatgatacctcagctggcggctatgcgcaatctgtcaattcggctcagcaggcgaagggcccctccgacatcaacgttgggagcggagtagcggactctgctgatggaactggtggcgacatcaatcaaggaggcggggttgccgattcttcaggctcaattggacaggccgagcctggaaacggacgaaacctccagacctactctgcagcagaggctggatcgcatgaagataagggagtcggtcagaagatcaaagatgccttcaagccaaagtagatttcctgactcgacatcgggcaacccgaggcgcctgcgctttgttcttctcacctgtgtatcaca

SEQ ID NO: 32197 - DNA, 368 bp, Glycine max
  Clone ID: LIB3138-028-Q1-N1-E1
cttatctgatgaccatagtattatttttttcatacccctaattgggaatcttgattcatatttttgtgatcaagcctactcttgcacgctaactaacgccatattttcttcttttcttcttatcttattgttgcagactttcgggtcatcattgagcttgctgtagtgaggtgttcaatctgaaatttccttaaccaaattcatggcggaactgatagggcctcgcttgtacagctgctctaattgtaggaaccatgtctcactccatgatgatatcatttccaaggcttttcatggaagaaacggccgagcctttctgttttcccatgcaatgaatattgtcacagggccaaaagaagacagacatc

SEQ ID NO: 32198 - DNA, 374 bp, Glycine max
  Clone ID: LIB3138-028-Q1-N1-E10
ctccttccaatgggatgctgccccctgcatcaaaaccaggccggggaaaatgcacaactgcgtcagtggtgtttgagatggtcaaggatgtggagatagcaatctctagccggaaaggtcgcacaggaactgctgctggtgatgtagctttcccaaagggaaaggagaatttggcatctgttctcaaacggtataagcgtagattatccaataaaccagttggcactactcaagaagggattcgcaagattcccacatcagcaccatacaacttgtagcattttgcattttgtcttcactacgcattaacataagctgtgttccttgggctgttttgatttgtgaagcagttcatgctgtagatcaaaggatta

SEQ ID NO: 32199 - DNA, 409 bp, Glycine max
  Clone ID: LIB3138-028-Q1-N1-E11
ccaccgcaaaaccctaaattcaatttttcgatcttgcccctcgcagccgttgtggaaatggggagcaggagggacgaggcgcccgccataaacagcaccaacgtcttcgccgccctcggaagcctcaagaagaagaagaagaagcccgagaaggaccaccagggcccgtccaagcccaaggacaagaaggacgtcttttgggcccccgcgcctctcacctccaagtcatgggccgatgttgacgacgaagatgacgacgactactacgccaccaccgctcctcccgaatctgtttgggccgcgccgaccgtcactcaaaacgacgccgctgctgctgaggaaagtgagagtgagttggaaggtcttgatgatgcagatgatgatgctgaggatgaacaagaaaatgaaa

SEQ ID NO: 32200 - DNA, 371 bp, Glycine max
  Clone ID: LIB3138-028-Q1-N1-E2
gaaaaacattaaatataaagtgagacatacaaaaatgagtaattgtgaacaattttcacaattatgaaataatgtttgatttgcattaaataaaaagtgagacatacaaaaatgagtatggctagcgcacattcttgagtaaatgtaattgtgaaattaaaaataatgtgttgtttttcacaattttcatattaaataaaaagtgagacatacaaaaatgaatgtggctagcattcttgtgtaaatgtattgagaacatagaaataatgatgattttttctctttctttgaataatttttgggatgcaatatgtttcaattgattgatgaggacaacaagttcatctttgatctaaatcgcttggaaaacg

SEQ ID NO: 32201 - DNA, 350 bp, Glycine max
  unsure at all n locations
  Clone ID: LIB3138-028-Q1-N1-E3
cttttcccttccacacaaatacatcacatcattggcattgctctctctctctctctctctctctcgggcggacacaatttttgatggggatatacctcagcactcccaaaacaaaaaaagcctcttgagaaggggagaacgacaagcttcgctttggtttgtcttccatgcagggctggcgtgcttccatggaagatgctgtaactacctttttcttttgggtcatcttatttcatttgccaccactcgttttgtatgttgccatcaacaagtgccacgttcactgctttggttgtacacaanggaagttattctaaaagagtagtttagtgccagtgctatatgacaac

SEQ ID NO: 32202 - DNA, 336 bp, Glycine max
  Clone ID: LIB3138-028-Q1-N1-E6
gttttgatggtttgattaccaagcaagttatgagcaagatggcagaaatgataaacagtctttgtggtggtgatgaaaaattgatgcgtgaaaagacgcacctgctgttggcttgttgttcaaagatggcaatttgtaagaaagatgtttggagagttgaatgtggaatcccttctggatttccgctcacaggtatttgcaatagcatttttaatgagatgctcattagatatagctatgaaaaattacttgcccaggcttaagcttcaagtatgtttttacaatccttcaaaaattttggttctttgggtgggtatggtgatgataacttaatta

SEQ ID NO: 32203 - DNA, 384 bp, Glycine max
  Clone ID: LIB3138-028-Q1-N1-E7
gcagagcttttgtcagttttctattgaccttctcggtggaggaatcttagtggacaaaactggagattggatcacacttatacaaaattctccaattagtaacttattgagagttgctgcttggaagaaaggctgtttaatggtcaagattgtgatgtctgggaatgcagcagtcaaaaggagtgattgggcctcattggtacaagtgtttttaacaaacagcaacagtacagagcattttgatgcatgtaagtggacaaaatcagaaccacattcctgggaattgatcttcccaatagaggtatgtggtcctaataatggttttgaaatgtggagttcttgatgggcaaatcaaacttcatggcatttgagtttccttattga

SEQ ID NO: 32204 - DNA, 393 bp, Glycine max
  Clone ID: LIB3138-028-Q1-N1-E8
acgtgacacaattcgtctagggacaccgttcgacgagcgtgcaggtaatatcttccctcgaacatcaagttcttacggtttcgagccgccagcatcatttgagcaacgttttgctgcggcacccagcatctctgagcgttagccctgtttttaggtggcctgtttctacatcaggcacagagtgtgcatcggcgtctggggtcgcatcatcatcggcgtttagcatcagaagcttcgagcttcatctgtgacatgtcagcgagcgagcactcgcgtgccatttgatctctcattttctttctttctctgggcgcatctcctatgtttccagcttcactttacccataacttttgcatggcctggccagcaagccttcattagatgggctctgc

SEQ ID NO: 32205 - DNA, 396 bp, Glycine max
  unsure at all n locations
  Clone ID: LIB3138-028-Q1-N1-E9
aaatggcaacagtgagaacaccattgaattttgattctagcaagcagagcttttgtcagttttctattgaccttctcggtggaggaatcttagtggacaaaactggagattggatcacacttatacaaaattctccaattagtaacttattgagagttgctgcttggaagaaaggctgtttaatggtcaagattgtgatgtctgggaatgcagcagtcaaaaggagtgattgggcctcattggtacaagtgtttttaacaaacagcaacagtacagagcattttgatgcatgtaagtggacaaaatcagaaccacattcctgggaattgatcttcccaatagaggtatgtggtcctaataatggttntgaaatgtggagttctgagtgggcaaatc

SEQ ID NO: 32206 - DNA, 399 bp, Glycine max
  Clone ID: LIB3138-028-Q1-N1-F1
cgttaaagaaagtcccattcccactaccgaagcaaattaagaagatgaagcagcagagagtggagtttatgggcatgggcatgggcatgggcatgggcctgggccttcttgtggtgatgatggcatgtgggtcggcgagtggtgcggatgatttggcaaccaagtgttcagcggtgattcagaaggtaataccgtgtttggatttcgcgaaggggaaggaagaaacgccgaaaaagcaatgttgcgacgcagcaacgtccataaaggagagcaacccagagtgcctctgctacatcattgaagagacccacaagggtagcccacaggttaaaagcttgggcattcaagaggccaagctgcttcagctcctttctgtttgtaacgtcaaaaacgccagca

SEQ ID NO: 32207 - DNA, 277 bp, Glycine max
  unsure at all n locations
  Clone ID: LIB3138-028-Q1-N1-F10
gattttgaacaatcaggaaaactgcaagatggacgagaagttgctatcaagcgtctatatgagcacaactacaggcgagtagaacagttcatgaacgaagttcaaatcctcacacgcttgcgccataaaaatctggtgtccctctatggctgcacttcaagtcacagccgtgaactactccttgtgtatgagcatgttccaaatggcactgttgcttgccacctncacggtgagttagcaaggcgcgacactcttncatggcacacaagaatgaaaa

SEQ ID NO: 32208 - DNA, 365 bp, Glycine max
  Clone ID: LIB3138-028-Q1-N1-F12
aagttaagctactttaggttgacaaagttcaagacaaacttgttagatgggaatcttccttcattgtcagaaatatcacttctgataccccacaggatggtgtactccaaggaaatgatgatcagaagagttatggctcacggttcaataatgcacaattctgattggaatgttaatttgatgaagcaaatatctatcagtggactatgtaacaacttaggtggagcaagaattatgcaggggtccatatcaagaatggtattgaaggaaataatatatgaaaagctgatgcaagatactatgtgatagttcatttatcaagttttggaaatatttgctgacttggtctggtgcaatgagaagaa

SEQ ID NO: 32209 - DNA, 81 bp, Glycine max
  Clone ID: LIB3138-028-Q1-N1-F2
tgttgactgggtccgcaacaatgcctgggcctacgccaccaacttggtccccggcaggggagcatgaaaaaaaggatgact

SEQ ID NO: 32210 - DNA, 392 bp, Glycine max
  unsure at all n locations
  Clone ID: LIB3138-028-Q1-N1-F4
ctcgagccgaatcggctcgagatttgcacactccataggaagctccncaattgaaaaggaaagctctctctcgtattgaatggctgcaaaaagctgatgtgcctaccatagcacagattgaagagntccattccatgcanaggatgatgaatgctcctgattcacatgataatattgatttactgttgagcattgatttgttgggtttacaaggagcaggtaaagcttttccaaacaaaattgtttttgatgataagcttgtgttggctaacacacaagaattctttgatggaaattttccagtggattcttggttaccaattattgtgaattgtctttatcctgtaagtcaattaccttcaaaagctgtcgttgtaaatgttacatgtggt

SEQ ID NO: 32211 - DNA, 226 bp, Glycine max
  Clone ID: LIB3138-028-Q1-N1-F6
gtattttggaaggatgtcttacgttgctcataacgttaacacccccaaaaaaaaaattgtggaaggaaaattttcttgatattaaactcctctaaatggaaaaagttcctttcaaaaccaattgtaggggaaaactcaaatgaatatggctgtccatcttaaaatttctgaaggaacagaaacccaagatgaccgatgaacaaatatctaatacaagagtagctca

SEQ ID NO: 32212 - DNA, 321 bp, Glycine max
  Clone ID: LIB3138-028-Q1-N1-F7
tttccgaataccattgtgcagattgaaccagacatgaattcaaggtttcagcttttgagtaccactaccaatggtgattttgttcaagggaaagatctcgcaatggttaaaggtaatgtagcatgtgctgctgttggcttgacatcaagttacactccaactccattgttggaatctggtttgcaaaaagacagagggttaattgtggggtattttggaaggatgtcttacgttgctcataacgttaatcagccccaagagaaagatttgttggagggaaatttttcctttgatattaaatctcgctctagattggaaaaa

SEQ ID NO: 32213 - DNA, 322 bp, Glycine max
  Clone ID: LIB3138-028-Q1-N1-F8
atgggaggatcttgatattggagagcgccttgcatttggttcttatggtgaattttatcgcgcacgactcgaatgggactgaagtagctgaaaagaactttctggaccaagatttatgtggcgatgcactatctcaattcaaattcgaagttcacatcatgttcatggtgcggcattcgaatgtcgagctattcatgggagctattactcgcttcccacatgactctatattgacggaatatctttcatgaggcaccttatataggctattacatcgacccaatcttctactagatgagatgaaactgttgctcatggatat

SEQ ID NO: 32214 - DNA, 368 bp, Glycine max
  Clone ID: LIB3138-028-Q1-N1-F9
gacaaaactagtgcaactttgcaatttagaaagttagcagattgtgattttctcaagagaaactttaagcagatgtctaatgttttgtgggtggctcctgaggacaaggcgagtttatggtcacaacttcattatgtttcgtgtaataatctggaaatgcaagaagcttatcttgtcaatctcgtaaatgtgttacgagaattgtatttgcacagtccagaggaagctcgccaattgagaaggaaagctctctctcgtattgaatggctgcaaaaagctgatgtgcctaccatagcacagattgaagagttccattcgatgcagaggatgatgaatgctcctgattcaaatgataatattgatttact

SEQ ID NO: 32215 - DNA, 368 bp, Glycine max
  Clone ID: LIB3138-028-Q1-N1-G1
ctagttttgagttgaagcatatagctttggggtgttcattgtgtgttgccactctcctctcttgttgtacacttgttccttttggtttgcagaaaggaacatggaagctgtgtgtgctttttctgttggcacacttcacatcccaacagcacatgaaacatcaaactcctttaggaaatccatattcttgagcaaccaagtggcttcaccagtttcattggtttttctcaggggcagttcaaaatccaagcttttaactgccttgtcaccccctccattgacagaatccagtaaccaacctgaggctgagccagaatttgaaagtcatgcagagaaatttgactggtactctcagtggtaccctttga

SEQ ID NO: 32216 - DNA, 355 bp, Glycine max
  Clone ID: LIB3138-028-Q1-N1-G10
tgcaattccactactcataaggcttatattgacgcaaagtgctggcatcttcacctgcaaagcttgtatactatacttgctcatattaccacattagccatggaaacttcttatgacagaatattgctcattgaattccccgaccttctgaagctctctataaatcttgttaataatatatccgcactgatgaaagaggcatgcctcataatttgatattactgccgccacaaaacatttgcctaccacttatgggactgaaatgaagatgactggatatcaggatacttctttactggaggaactatcccttcggcaaatctacttctttatttccacgatgatgttactgtca

SEQ ID NO: 32217 - DNA, 379 bp, Glycine max
  Clone ID: LIB3138-028-Q1-N1-G11
gaccaactttctctgcttctggagacagtggaatgcctgaagtggtagctgatcctcaaggggaagtttccaagatattccaaaatctatgagtatgtgttgttcagcagtgtgccaaaatacgccaacaaggtttaactgcggctacctatgataaatcaatcaaggcaatctaagtgaagggaccagattcaaaggaagaattttttctgcatactgcaacagtgagacggaatgatcgctctgctcaaagggtgcatgaatggacgggggagcacaaattgcattacagtgatattcctgaaaatattgaacctgaagagattcgaccaatgggaaattatgcagtttcaataaccttggcctgatgggtttagtc

SEQ ID NO: 32218 - DNA, 211 bp, Glycine max
  Clone ID: LIB3138-028-Q1-N1-G12
aatttgtagaaagtgcagctgcgaggcagcgaaagagaaagggatttacttctgagatcaaagatggaggacgagaaaatagttggatacgttacggcgttccttaagaagaaaggcttcacgcaaaccgagaagattttccaggaagaatttcaacacaacaagtccaacactttcaatttcgttctggaacccgacattgccaaccacc

SEQ ID NO: 32219 - DNA, 136 bp, Glycine max
  Clone ID: LIB3138-028-Q1-N1-G2
ctcattagatatagctatgaaaaaatactgcgcccggcttaagctcccaggatgtttttaccaaccctccaaaaatttggttctttgtgggtgtgtggggggggtaacctaattagggggcctgaatatgtccagc

SEQ ID NO: 32220 - DNA, 333 bp, Glycine max
  Clone ID: LIB3138-028-Q1-N1-G4
aaagcaatgactatgtcatttaatccacacccgcggtctgacgcatggagtatgtaattactgaagcggactggatttcattgcgatatcatgtgtgtcactggatagactgccaccccaatgcaggatgttcaggctacaattgattggtttatttcctctcacgaatgcgctcccaggacctattgcgtttcaaatccacaagacccttttgcgtcaaataagcggatgggaaaattgactttccgccatggcactttccgaaacgttaagaaaatgtctatttctatagggggaggagctgatgcaaagaatgctatactgatgaatatg

SEQ ID NO: 32221 - DNA, 350 bp, Glycine max
  Clone ID: LIB3138-028-Q1-N1-G6
gggcatagcaaactgaatgggatttgaatgacattaacgacaaaagcagacacctctctgcatgtgatattctttcgagaatctgtcaacaaattgaagatgctgtgtagcctactatgccatgtggaatttgtgcacaggctacaggataatcttattgaacggccctatcacaatgattatcggcataatgcttctcttcttgcttatggaagtggaaagaagaactgctgagactgcgcttaacatatattgaaaaacatgctctggctatgggagacatatcacattcaatggaacacttctcatgcaactagaatatcgtgaatgcttaaatttcaatgtaaatg

SEQ ID NO: 32222 - DNA, 350 bp, Glycine max
  Clone ID: LIB3138-028-Q1-N1-G7
tgatatgatggctaagaaatataagcaaaagctaccaccttctgtcaccactcatagattagaacccctaccaaccaggtgcttgccttttgaaaatgaagcactttatgcaaactggaagaggtttaagtttgaaaaataatgaggaaacaagtggacacaaaaatcatgatatttttcactgacagaagctcaagtgagagaacttgacattgcgtgggggcaatacctgtgtggaagaaaacatcatgagcctcaagagatttggttttgatgcagacattgttctcctgatgagttccatgaagatcactggctattatgtggtcaaaagggtcaaagcataattc

SEQ ID NO: 32223 - DNA, 398 bp, Glycine max
  Clone ID: LIB3138-028-Q1-N1-G8
gctgcttggaagaaaggctgtttaatggtcaagattgtgatgtctgggaatgcagcagtcaaaaggagtgattgggcctcattggtacaagtgtttttaacaaacagcaacagtacagagcattttgatgcatgtaagtggacaaaatcagaaccacattcctgggaattgatcttcccaatagaggtatgtggtcctaataatggttttgaaatgtggagttctgagtgggcaaatcaaacttcatggcatttgagtttccttattgacaatcccaaacagtctacagtttttgatattctcttgggaatctctcaagattttgaaattgctggtaatactcttatgccagctttttctgttccacaggctactgccagatcttctgaaaatgcgga

SEQ ID NO: 32224 - DNA, 342 bp, Glycine max
  Clone ID: LIB3138-028-Q1-N1-G9
tgagtcccttatcaacatcagaaagatttcagcacacatagctgccaatgttgctgctaaggcttatgaacttggcttggccactcgccttcctcaacctaaagatttagtgaagtttgcagagagctgtatgtataccccagcctacagaagctaccgatgaaaagtgataataataaataggcgcttttttctttttcatttatcatgatatcatttcattgtcaattttttaattttttaccttctttatgttcctgttatgttttttgtaagttatttgtattgggtgggttagtaggttaggacggtggttgggagtgagtggtacttggaccaaaa

SEQ ID NO: 32225 - DNA, 327 bp, Glycine max
  Clone ID: LIB3138-028-Q1-N1-H1
gttgaagtcttgcccttctctcttcaactccaaacacaagacatcatcatccatggctgcctccgtctccactgtcggagctgtcaacagagctcttttgaacctgaatgggtctggacctggggtttcagctcccagttcatccttctttgggagcagcttgaagaaggttattggctcaagggtccccaacacaaagatttcctctggaagcttcaagattgttgctgtagaagagaagaaagagattgaagagacccagcagaccgacaaggacagatggaagggtcttgcctatgatatctcagacgaccaacaggacatcac

SEQ ID NO: 32226 - DNA, 334 bp, Glycine max
  Clone ID: LIB3138-028-Q1-N1-H10
caaaggttgctgtaggagataagattgcagtagtgctaagtgctaacacctgcagtgaacaatggcctctgcatcagcatctctgctcaagtcttcacttgttcttgacaagtctgagtgggtgaagggacaaacccttcgccaaccttctgcatcagttgtgagatgcaaccccaccaccccatcaggcctcaccatcagagctggttcctatgctgatgagctcgttaagaccgcgaaaacagtggcttcaccagggaggggtattttggccatggatgagtccaatgctacctgtgggaagcgtttggcttcaattgggctaaagaacact

SEQ ID NO: 32227 - DNA, 381 bp, Glycine max
  Clone ID: LIB3138-028-Q1-N1-H11
ggcattttggttctacaggtttctctctattgtgtatgaccacataataaacccggggcactggaccgaagacatgagagacgaggcactggagcctgctgatctctacaaccgcaacctgagagtggtggatgttggaggtggaactggctttaccactcttggtatagtgaagcatgtggacgccaaaaacgttacaattctcgaccagtcgccacaccagctcgccaaggctaagcaaaaggagcccttgaaagaatgcaagattgttgaaagggatgctgaaaatcttacatttccaactgattatgctgatagatatgtttctgctggaagtattgaatactggccagatccgcagcgtggcattacagaagcata

SEQ ID NO: 32228 - DNA, 266 bp, Glycine max
  unsure at all n locations
  Clone ID: LIB3138-028-Q1-N1-H3
ctcgagccgnnntaattaaataaaaaaaaaaaaaaaaaaaaaaaaaaaaaaaaaaaaaaaaaaaaaaaaaaaaaaaaaaaaaaaaaaaaaaaaaaaaaaaaaaaaaaaaaaaaaaggggggggcccccaatttttaaattttttaacccggaaattaatttcggaccggtactttgaggggtaccaattttttttttattgagtcgttttaaaacttggggtaaaaatgggaataacttttttctttgtaaaattttttttcgttt

SEQ ID NO: 32229 - DNA, 224 bp, Glycine max
  Clone ID: LIB3138-028-Q1-N1-H5
caagacccagcctcattctcgctctcggcgcccaaatccttgacgagaactactctcttggaaaaatactcaccaccgacaacatcggtagtttaacatccaatggtgctcccaacgacgccatcaacgttgttctaacattctcggacgtaaccgttgaggggttttgttgcaatacgtgcgggactcacggatactcagtgggatatggttacttggcttac

SEQ ID NO: 32230 - DNA, 397 bp, Glycine max
  Clone ID: LIB3138-028-Q1-N1-H8
gaggttgcataactgaacaaacaaagcaaccctatgtcgaaggtggtttgtgtcaccggagccagtggcgccattggatcatgggtggccctcctcctcctccagcgtggttatacggtccatgccaccgtccaagacatcaaggatgaaaatgagacgaaacatttggaggaaatggaaggagcaaagagtcgtctccatttttttgaaatggatcttcttgacatcgactccattgccgctgccataaagggttgctccggcgtaatccacctcgcatgtcctaacatcatcggtcatgtcgaagatcctgagaagcagatactggagccggcgataaaaggaacagttaatgtgttgaacgcggccaaagaagcggtggtggagcgcgtggtgg

SEQ ID NO: 32231 - DNA, 374 bp, Glycine max
  Clone ID: LIB3138-028-Q1-N1-H9
tgttgagccagttgtgcaagctcaaagtgctgaagtttactttgacttcttccctgtggaggttgatagtcaagagggagttgctcacattggtgaactgaaatctggtgtctatgttccactgcctacaaaaactaatttggtggaaactcctaacgaatggcaactggatctaccttgtgacaaaattcctagtgtcttgactacaactgatgagagattggtaggcacagaacatgagggatatgatccttttcttggcggaattcaaaaatatgccactcccatgatgcccctagatgaagaaattctttctaaggttgcacaagatatggttgaggaatggttcgattgtgttgatgaagacgattcct

SEQ ID NO: 32232 - DNA, 147 bp, Glycine max
  Clone ID: LIB3138-029-Q1-N1-A1
gagatctacaatcatgaagaactcaggaaacaattgcctaatcacaccatccgtacaggaagtgattgtgatgttattgctcacctgtatgaggagcacggagaaaactttatggacatgcttgatggtatattttcatttgttctg

SEQ ID NO: 32233 - DNA, 380 bp, Glycine max
  Clone ID: LIB3138-029-Q1-N1-A10
ccctaacaacaacccttcgccggagtcgcaacagaatggcagaggttccggcgccggaggcacagctcaacggcggagccccaacaacggcggcgaattcctcggatcccatcggatcgaagcggcagcggcggccgagcgtccgattgggcgacatcggcgaccagccctacgactcccacccccgccgcgccgcagcgaaaacgtggcgcctcgcctttgaccacccccggaactccgccgccgtcaagccctccaagacccgccccctcacgaacctcacccccgccgctgccgagttcggcgaaaccctagagagcgacggcaacgtggacagcgttgtaattggaagctggaaagttaaggactccaagaagcgc

SEQ ID NO: 32234 - DNA, 367 bp, Glycine max
  Clone ID: LIB3138-029-Q1-N1-A11
ctggggatggtgaagagatgacactgattccgggaaccagtgttgaagaggcttacaacaagctaatagttgaacttgagaaaagtgttcctacattggttggcattgaatgtcccaaggatgagaaacttcctcgtcgcaaaatttttgacaaacctaagacgcgctgcttcactattctccctatggagtttaatcttgtggtccgtcaaaagtttttaaattttgtgaggttcattatgaagaaaagggacaaacttagttgtcaagttggaatcaacccatactccatggaatggactggtttggccaatagattactgagtaagggcaatgaatttctgtgttgcgattaatgctagtttga

SEQ ID NO: 32235 - DNA, 402 bp, Glycine max
  Clone ID: LIB3138-029-Q1-N1-A12
ggaaggcccattcgggtggttacatttccgaataccattgtgcagattgaaccagacatgaattcaaggtttcagcttttgagtaccactaccaatggtgattttgttcaagggaaagatctcgcaatggttaaagttaatgtagcatgtgctgctgttggcttgacatcaagttacactccaactccattggtggaatctggtttgtaaaaagacagagggttaattggggagtattttggaaggatgtcttacgttgctcataacgttaattcagccccagaagaaagattggtgggagggaaatttttctttggtattaaatttggttttaaatggaaaaagtttcctctacaaaagcacaatttgttagtggaaaaaccttcaaatatgatataattg

SEQ ID NO: 32236 - DNA, 404 bp, Glycine max
  Clone ID: LIB3138-029-Q1-N1-A5
ctcattagatatagctatgaaaaattactgcgccaggctaaagctccaagtatgtttttacaatccttcaaaaattttgtttctttgtgtgtgtatggtgatgataacttaattagtgttcatgaatatgtcaagccttactttagtggttctaaattgaaaagctttctagctagtcataacatcaccattactgatggtattgacaaaactagtgcaactttgcaatttagaaagttagcagattgtgattttctcaagagaaactttaagcagatgtctaatgttttgtgggtggctcctgaggacaaggcgagtttatggtcacaacttcattatgtttcgtgtaataatctggaaatgcaagaagcttatcttgtcaatctcgtaaatgtgttacgaga

SEQ ID NO: 32237 - DNA, 262 bp, Glycine max
  Clone ID: LIB3138-029-Q1-N1-A9
ctgatgtgctggaggacgagcacataccgcattggtatcaacagggactgaaggtcgatacaagaactctaagatcatgactaatgctcaagcgtgtattgattggcttcagagtgcagaatcagaaaccgaggaagaataatttttcctacattctccggtacttatgtttacttgattgtgtcatgttctttatttccaataaaggttattgtaggccccatgtgttgttgaactactatactgtgcgaatggtgcatgc

SEQ ID NO: 32238 - DNA, 314 bp, Glycine max
  Clone ID: LIB3138-029-Q1-N1-B1
acaagattatgggccacaaaacccggaaaaatattccagtagttatgatgtcatctcatgattctatgggtttagtctttaagtgtttgtcaaagggtgctgttgactttctagttaaacccatacggaagaatgagcttaaaaacctgtggcagcatgtttggagaagatgtcacagttctagtgggagtggcagtgaaagtggcacacaaacccagaagtctgtaaaatcaaagagtcttgagaagtttgataataattctggaagcaatggcgaaaatgataatggaagtataggactgaatattggggat

SEQ ID NO: 32239 - DNA, 357 bp, Glycine max
  Clone ID: LIB3138-029-Q1-N1-B10
cggtgatcaaaactttcctaaaaaattcctcatggtgttcacatttccaactcttctgtccatgaagctccaaccactttcgctgcttcttgtgatgtacttctgtgcatttgctacttcttctgagattgcttcagaagcaaatgctttgttgaaatggaaagccagccttgacaaccacagtcaagcttctctctcttcatggattggcaataatccttgcaattggcttggaattgcatgcgatgtgtccagttctgtttccaacataaatctcacacgtgttggattaagaggtacgcttcaaagtcttaacttctcattacttccaaacatcctcattctgaatatgagtta

SEQ ID NO: 32240 - DNA, 295 bp, Glycine max
  Clone ID: LIB3138-029-Q1-N1-B11
cgtcattggtgacaagttgacgaccatcaacaaaatgtgagcatatggactcaatacgggtattgcagggtctggtctattgcgcaccatacctgactccatttgacaacagactgtttcgaatcaaacggcaccagcgagaacaccaaagaattgtgattctagcatgcagagcttctgacagttctctattgaccttctagacggaggaatcttataggacaaaactgtagattggatcacacttatacaactgtctacaatttataacttattgagagatgctgattggaag

SEQ ID NO: 32241 - DNA, 378 bp, Glycine max
  Clone ID: LIB3138-029-Q1-N1-B12
aggtgaacaaggaagtgaagggcaaagatgaaaactctaaggcagcaccttctgcaaacacaacagggcaaccacaaaagccatcactaaatggggtcacagcagaccctcttggagatgcacgcaacaaggttcaagatgagattctcaaagagtttgctgcaattatggcaagtgggacaatgcgtgctagtgaggctgcagctctagccactaaaagagtcatgcaaagatacggccatactactgctgtgtctcagaattagctacttttcttcatcagaaaacgatttgtgggtctaaaacctctacttactatcactgcaataattgcggtgtttcatatcattggttattatttgaaccgggaaaaacatg

SEQ ID NO: 32242 - DNA, 278 bp, Glycine max
  Clone ID: LIB3138-029-Q1-N1-B3
ccaccactaccttatccatttccactcctcaccaagccacaccatggcctcaaccaacgccctctcttcagcttccattctacgctctcccaaccgccagtctctgaccagaagagcgaaccacaacggaagagtaaattaccgtcaaccgaatagccgtttctccgtcaaagcctccgccaaagagattgcctttgaccagcattcccgctctgctatgcaagccggcattgacaagctcgccgacgccgtcgggttcactcttgggcccaagggga

SEQ ID NO: 32243 - DNA, 260 bp, Glycine max
  Clone ID: LIB3138-029-Q1-N1-B4
attctttctttgcttcggttggcggtgggagatcccaagttaaaataatgtgaagtttttcggtttagattgtgtcataatagtcttgtaagtttattgttttttctgtgttgtagtcgacgcattttttgggctgctgattctagctaaccgataaatttctgtattctaccatttttcttgtaataaatgagttagtcctaggtagaccaaacaaaaaatgaattacatctagtatatataagaaattttccgacttt

SEQ ID NO: 32244 - DNA, 365 bp, Glycine max
  Clone ID: LIB3138-029-Q1-N1-B5
ctcagtccatttcacagcaaactgtttggaatcaaatggcaacagtgagaacaccattgaattttgattctagcaagcagagcttttgtcagttttctattgaccttctcggtggaggaatcttagtggacaaaactggagattggatcacacttatacaaaattctccaattagtaacttgttgagagttgctgcttggaagaaaggctgtttaatggtcaagattgtgatgtctgggaatgcagcagtcaaaaggagtgattgggcctcattggtacaagtgtttttaacaaacagcaacagtacagagcattttgatgcatgtaagtggacaaaatcagaaccacattcctgggaattgatc

SEQ ID NO: 32245 - DNA, 230 bp, Glycine max
  Clone ID: LIB3138-029-Q1-N1-B6
acatgtggttggggacgtggtggtttccccaccactgcttggaggggatctgcccataacaggcggtcctcagatatcaacaaaaggattcgcacagcacttggcaaaggtaagaaaattgtttttcttactagagttgatccttttccacacgctatactggctgttcttttcggcgctaacaatgaaattctgagtgctaacgccgctagtcctatgctgacactact

SEQ ID NO: 32246 - DNA, 365 bp, Glycine max
  Clone ID: LIB3138-029-Q1-N1-B8
cagcaccgaacgtaaggtggtgtcctgtgcatccccatgggtgcttatacatcctgaggaccgaatgcctctcacgcccgcacctacttatatacacatgatggctacaatgtgaacagtctatgctcgatggtacaatgatgacgatggacgacgtctaaatggctcctttaccatgcgcaaaggatctgatcttaggactcatcacggccgtcctagtccctaacccgacgcctgtctgatgactgatcaacctggtttcacagcaagagcgggtcatcgcgctcatttctactgacggatagacaaccagccctttttgaacttttactcgtgcgtttaacagcacacttaccactggtact

SEQ ID NO: 32247 - DNA, 404 bp, Glycine max
  Clone ID: LIB3138-029-Q1-N1-B9
gctggtgcaaagaatgctattctcatgaatatgccaaatgctgttctttcaatgtggagatattttgttggagatctcgtctttgaagtttctaagatgacttctccctacattaaatgtacagtctctttcttcatagcatttggaaatttggctgatgataccatcaattttgaggcttttccccacaagctggtgcagtttggagagattcaggaaaaagttgtattgaaattttcacaagaggaatttcttacagcttggtcaactcaggtgcgtcctgcaacaactctgttggctgatgggtgtccatatttgtatgcaatggtgcatgatagttcagtgtctacaataccaggtgattttgtcattggtgtcaagttgacaaccataaacaatatgtg

SEQ ID NO: 32248 - DNA, 349 bp, Glycine max
  Clone ID: LIB3138-029-Q1-N1-C10
caggttcattacttggccagacagacagacaaaaaaatggtgggataacgtgttgcgctggttgtgggtttggaattggattcattcaaacgagttaacaacatgctcagatcactgccgaagctctcactcctcttttcctcagctaggaatccccattatctggcaagtgttcagcgtttcatatctgtagggagaagagcagcttcaagaggtagtcaagattggagtggcaagcactgttcctatacgatccatgtctacttcaacaatttcatcagcaattacatcataaacggctgcagaagatcaagttcaaagggttaacctactaagaacaactgatgac

SEQ ID NO: 32249 - DNA, 291 bp, Glycine max
  Clone ID: LIB3138-029-Q1-N1-C11
catggcagctatatgagttgtatgcactgcatgcccgagggttatttctaacgtataaggcttgaccctgaacgcgcatgctaaacagttctcacttctaccgatacaagcagtgcgacccggtaatatgaaggtatgtagaatgatgacgattctaaccagtcgcgctagagatgaccgcctatggcaccaggcgggcgagagcataaaaaacgcgcatgaggcgttcgcctatcataccaacagctcacacatcatagtccgcatgtacgaatatgttgatcttatcac

SEQ ID NO: 32250 - DNA, 333 bp, Glycine max
  Clone ID: LIB3138-029-Q1-N1-C12
ctcgagccgtttgtaagaaagatgtttggagagttgaatgtggaatcccttctggatttccgctcacagctatttgcaatagcatttttaatgagatgctcattagatatagctatgaaaaattactgcgccaggctaaagctccaagtatgtttttacaatccttcaaaaattttgtttctttgtgggtggatggtgatgataacttaattagtgttcatgaatatgtcaagccttactttagtggctctaaattgaaaagctttctagctagtcataacatcaccattactgatggtattgacaaaactagtgcaactttgcaatttaaaa

SEQ ID NO: 32251 - DNA, 406 bp, Glycine max
  Clone ID: LIB3138-029-Q1-N1-C4
agagaatcaagaaaattattatacccattaagatgaaaccgtacctacgtgcaatattcctattattccttatccttccttcggcgagatggggcgaggctaaaattgataggaagacgataacaatgttttggggcaaggttaaagatgcgacgataaaaaatttcccgagtcgtgatgagcggaagaaactgagggagtattacgagaaattcagggaattcatggatcgtgtagaacaaaagacgacccctcccccaccgccaatgtaccgtttacaaccaaagtccccttccccaccggcaaacgcaccaccgaagcaaatcaatattaaaggcctgtccgtcgtcaaagattacttatctgactacggctacattgaatcctctgggccatttaacgattc

SEQ ID NO: 32252 - DNA, 291 bp, Glycine max
  Clone ID: LIB3138-029-Q1-N1-C6
cactgctgtgcttttcaggacagtgatggtagaactgtggactaagccactcacaaagccattactgtcccatactccacataatgaaagatgatgcatgacgaaaatgacagatccaggtactgaaagtgcagaatgagacagtatcccacttattgagagagcccaccaatatgaagcagatgttgatggccatgatattcatcgcacagcattatttgcgccttggttaccactacaacacacactgttcatgcgaatgtgagcgtaagcaatgaagatgcattcatg

SEQ ID NO: 32253 - DNA, 387 bp, Glycine max
  Clone ID: LIB3138-029-Q1-N1-C7
gcttccgcagccaccactcagagccagcgagtgatgatcgcttcgccgcagtaatcgccggaaacgaattcgccgtttccctgccgagatctctcaatctccgacgactcagatacctctattaattttcctccggttaggttgttagggtataaatagtacgtagtttttccttatttatggcttcggagaatgtgaagaccggggattccgccgtcaccaccatcgtcaatctcgccgaggaggccaagctcgccagagaaggcgtcgtcaaagctcccagctacgccctcgccagcatctgcaagtcgctcgtcgccggtggcgtcgccggaggagtgtcacgtactgcagttgctcctctggaacgattgaaaattttgctgc

SEQ ID NO: 32254 - DNA, 396 bp, Glycine max
  Clone ID: LIB3138-029-Q1-N1-C8
ctcggtggaggaatcttagtggacacaactggcccattgtacggcactgatacaaaaatatccagggaccaactaaatgagagaggctgattggattgccggctatggaagctcatgatcgaactggatgggaagccagcggatactgacgagagagttccgactgattggtgcaagtagcaccaacaagcaccctgcatgacagagccttttgaagcatgtcagtggacaaaattagaaccacatttctgggaattgatctctccaatagaggaatgtggtcctaacaatgggttcgaaatgtggagttctgagtgggcaaatcaaacttcatggcatttgagttttcttattgacaattccaaacagtctacagtttttgatattctcttggga

SEQ ID NO: 32255 - DNA, 405 bp, Glycine max
  Clone ID: LIB3138-029-Q1-N1-C9
gaaataaatcttgagaaatgcccaagatccatcctacaacgccagtgcattaaatatcttggaccaaaagaaagggaagagtatgaagtaattgttgaaaaagggaagctggtgtacaaacaagatgggaggcttgtggatactgacggaaagtccaaatggatatttgttcttagcaccacaaggtccttgtatgtggggcgcaagcagaaaggtgcatttcaacactctagctttctagctggggctgctacaacagctgcaggaagattagtggctcaacaaggtgtacttgaggctatttggccatatagtggtcactatcaccctacagaagagaactttaaagaattcataagctttcttgacgagcacaatgtggatctttctaatgtcaagaaatgt

SEQ ID NO: 32256 - DNA, 404 bp, Glycine max
  unsure at all n locations
  Clone ID: LIB3138-029-Q1-N1-D1
agttgacaaccataaacaatatgtgtgcatatgggctcaatcctggtatttcaggttctcgtcttttgggcaccattcctcagtccatttcacagcaaactgtttggaatcaaatggcaacagtgagaacaccattgaattttgattctagcaagcagagcttttgtcagttttctattgaccttctcggtggaggaatcttagtggacaaaactggagattggatcacacttatacaaaattctccaattagtaacttgttgagagttgctgcttggaagaaaggctgtttaatggtcaagattgtgatgtctgggaatgcagcagtcaaaaggagtgattgggcctcattggtacaagtgtttttaacaaacagncacagtacagagcattttgatgcatgt

SEQ ID NO: 32257 - DNA, 366 bp, Glycine max
  Clone ID: LIB3138-029-Q1-N1-D10
gagaaagagaaccgtttgagaattttagagacgttaacggacttctaatccacaattcgccggaatttgggaaccggggtcgcgtccggagcctctcggcttagttagttagggtttctttttctctttcttctcttccattcggtttcgaattctcgcgattcgcgatgggggaacgacgctgaggttgaatttcaaggttctggtttttcgtcgtcgctgtggagtgaagaattctgtgttgctggtgatgtttacgccgccgagggtttggtcgggttggtccctgactccgaacaagagcggggttcggggaggaaccgggtcgggttcggaattgggtccgaattccggagaatgagcgag

SEQ ID NO: 32258 - DNA, 305 bp, Glycine max
  Clone ID: LIB3138-029-Q1-N1-D11
gtttctatccctcactaggagctcttctccattggttcttcatctgcatgcacacacttgcataattttggaaaccaaaaatttttgaaggggaacattaacaaaaaggttttgaaatggagatcaccaatgtcagcgagtatgaagctattgcaaagcagaagttgccaaagatggtgtttgactactacgcatctggtgcagaggaccagtggactctgcaggagaacagaaatgccttttccagaattttgtttcggccacgtattcttattgatgtgagccagatagacattacaactact

SEQ ID NO: 32259 - DNA, 312 bp, Glycine max
  Clone ID: LIB3138-029-Q1-N1-D12
caattacctacagaggctggggatggctatgtcacacgaggtagtggacgatgatgagctcgcgccggctaacacacaagaattctttgatggaaattttccagaggattcttggataccaatttttgagaattggctatatgctgtaagacaattacctttactagctgtcattcttaatgatacatgtgactgggtgacgtggtggttacccacacacgagattgtatatattctaacgccactacattctatgctgacgcgactacttgaggactgtcacagtcttaaatatatggtagatgagtgttc

SEQ ID NO: 32260 - DNA, 399 bp, Glycine max
  Clone ID: LIB3138-029-Q1-N1-D3
atggcttccaatctgattagagtgagcacaagcttggttctagtagttttagtagctctcacagttcaaattttctacatttcacccatagatccagttttgctggatataaaacctgctccttcaaccaaagacaatcaattacagaatatcattaagcttggagaaggacttttgaaggaaccagaagatgttgttgtagataaagaagggactctctatacagctactcgagatggttggattaaaagattgcgcaggaataatggaaaatgggagaattggaagcatatagatagtcatactttgctaggaatcgcaacagcaaaagaaggtggtctcattgtttgtgatacttccaagggtttgctcaaggttacagaagaagatggttttagt

SEQ ID NO: 32261 - DNA, 378 bp, Glycine max
  Clone ID: LIB3138-029-Q1-N1-D4
gcatggggacagagttgatcatgatgttttggctgaaatggatgtgctgtataggtgcatcaaagaagctttgagactccatcctcctctaatcatgctgatgagaagctcacacactgattttagtgtcacaacacgagaggggaaagagtatgacattcccaagggtcatataattgccacatcacctgcttttgcaaacaggctaggtcatgttttcaaagaccctgataggtatgatcccgatcgatttgctgtggggagggaagaggacaaggtggcaggtgcattctcatacatttcatttggagggggcagacatggatgccttggggagccatttgcatatctgcagattaaagccatatggactcatct

SEQ ID NO: 32262 - DNA, 329 bp, Glycine max
  Clone ID: LIB3138-029-Q1-N1-D5
gacttataaatagataaatagattacccctattgaggtactttttgttttaatgctccttattatttttgattttattatcatttctttttaataccaactcgctctttattattttcagttactaatcctagttatttgatttatatactttttttatagtaaatacatgagatagaatattcaaaatggaatatttctattattttattcttcatccaatgactatacattcattatatttttgtgtaaatagaggaaaaactcgatggaaaaatggtggtttaattctatgttgtttaataggaagttagaatacaggtgtgaatt

SEQ ID NO: 32263 - DNA, 376 bp, Glycine max
  unsure at all n locations
  Clone ID: LIB3138-029-Q1-N1-D6
gggaaatttttcctttgatattaaatctcgctctagattggaaaaagtttcctctacaaaagcacaatttgttagtggaaaaaccttcaaatatgatataattggtgctggttcacattcttcagaagattttcctgaaaaggaagatcaagaaaaacccaaaaagattgatgccagattgagacaaagaatagatcctcaatacaatgaggttcaggctcagatggaaacaaatttgtttaaattgtctcttgatgatgttgaaactcctaaaggttccatgttggatctgaaaatttctcaatctaaaattgcacttcccaagaacacagttggaggaaccattctgcgtagtgatctattggcanattttttg

SEQ ID NO: 32264 - DNA, 404 bp, Glycine max
  Clone ID: LIB3138-029-Q1-N1-D7
cggctcgagctcgagccgaatcggctcgagtctaaattgaaaagctttctagctagtcataacatcaccattactgatggtattgacaaaactagtgcaactttgcaatttagaaagttagcagattgtgattttctcaagagaaactttaagcagatgtctaatgttttgtgggtggctcctgaggacaaggcgagtttatggtcacaacttcattatgtttcgtgtaataatctggaaatgcaagaagcttatcttgtcaatctcgtaaatgtgttacgagaattgtatttgcacagtccagaggaagctcgccaattgagaaggaaagctctctctcgtattgaatggctgcaaaaagctgatgtgcctaccatagcacagattgaagagttccattcgat

SEQ ID NO: 32265 - DNA, 403 bp, Glycine max
  Clone ID: LIB3138-029-Q1-N1-D8
ggctattagcaaacactctcatatttggttgttctagttctcactaccatgtcaacccacattgaaagcctgtgggtgttggccttagcctcaaaatgcattcaagagaacattgcatggtcactcttgatcatcatggtcactctctggctcaccatgaccttcttctactggtctcaccctggtggtcctgcttggggcaaatactactactttaattactggaaaaaaaccacctcaaccaacacaaacatcaaccttaaaatgattatccctggtcctagaggctaccctttcattgggagtatgagtctcatgacatccctcgcacaccaccgtattgctgcggcgggggaagcatgcaacgccaccaggctcatggctttttccatgggtgacacac

SEQ ID NO: 32266 - DNA, 403 bp, Glycine max
  Clone ID: LIB3138-029-Q1-N1-D9
gcagatgtctaatgttgtgtgggtggctcctgaggacaaggcgagtttatggtcacaacttcattatgtttcgtgtaataatctggaaatgcaagaagcttatcttgtcaatctcgtaaatgtgttacgagaattgtatttgcacagtccagaggaagctcgccaattgagaaggaaagctctctctcgtattgaatggctgcaaaaagctgatgtgcctaccatagcacagattgaagagttccattcgatgcagaggatgatgaatgctcctgattcaaatgataatattgatttactgttgagcattgatttgttgggtttacaaggagcaggtaaagcttttccaaacaaaattgtttttgatgataagcttgtgttggctaacacacaagaattcttt

SEQ ID NO: 32267 - DNA, 343 bp, Glycine max
  Clone ID: LIB3138-029-Q1-N1-E10
aagcgtcacaaattcatggatgaagaagaggttctttgtggaaaccttggtgagtgttctgcctcctgagaaggattctgtcccatgcaacttcctccttcgccttctcagaaccgccaacatggttcgtgttgacgccacttatagaggtgagcttgagaaccggatttcgtggcagctagaccaagcttctctcaaagagctcatgataccctccttcagccacacgtgtgggacactcttggatgttgagctagtcctcaggttggttaagaggtttatgagtttggaccgtgatggtgctgctttggttaaggtggccaagttggttgattgctacctc

SEQ ID NO: 32268 - DNA, 373 bp, Glycine max
  Clone ID: LIB3138-029-Q1-N1-E11
gagccggttagaagaggatcctctggtacatcttcaagatttgccaaatctaagacatcttgagtttcttcaagtttatgttggtgagacattgcatttcaaggcaaaagggtttcctagtctgaaggtgttaggccttgatgatttagatggactgaaatcaatgactgtggaggagggagcaatgcctggtcttaaaaagctcatcatccagcgctgtgattcattgaagcaggtaccattaggcattgaacacctaacaaaactaaaatcaatagagttttttgatatgcctgaagaattgattacagcactgcgtccaaatggaggtgaggattattggagagtacaacatgtcccagcagtttatatc

SEQ ID NO: 32269 - DNA, 316 bp, Glycine max
  Clone ID: LIB3138-029-Q1-N1-E12
caatagccatgaagatcgttcggagagacctagtacctaatggacctggcagcgttaagatggtggcagtggattcggatgatctctggtttgcgtataacttgatagctcccggagactctgtcatggccgttactgtcaggaaggttctaagagaagctgctaatggcggacgggaagcagaacgcgtcaagctcaaattggaaattaaagtcgaagagctttctgattatgacaaagaaggttctattttgcgtgttcgtggaaagaacattttggagaatgaatatgtcaagattggagcatttcatacttt

SEQ ID NO: 32270 - DNA, 397 bp, Glycine max
  Clone ID: LIB3138-029-Q1-N1-E4
caaaaagctgatgtgcctaccatagcacagattgaagagttccattcgatgcagaggatgatgaatgctcctgattcaaatgataatattgatttactgttgagcattgatttgttgggtttacaaggagcaggtaaagcttttccaaacaaaattgtttttgatgataagcttgtgttggctaacacacaagaattctttgatggaaattttccagtggattcttggttaccaatttttgtgaattgtctttatcctgtaagtcaattactttcagaagctgtcgttgtaaatgttacatgtggtagtggacacgtgggtttacccaccactgcttggattagttctgcagttaacaatcgctcctcagatatcaacaaaaagattcgcacagcac

SEQ ID NO: 32271 - DNA, 319 bp, Glycine max
  Clone ID: LIB3138-029-Q1-N1-E5
agcagagactgctcattgctttagcactcaccagtttgcctgtttagtcagatatggtgcaagtgctgtgtgtccagattaggcattggagacatgtcattaataggctaagagtaatactactctgaatgtgatgaggcatggaaagatacctacgctgtaaatagagcctgcgcaggagaacaatatgactgctcttaaacagctctttttcaaatccttttcaaaatgggcatgtcactgctaggaagttaccgcggtgcacagatattttaaaagtatatatttttgaacccagatggtgctctttcggttaaag

SEQ ID NO: 32272 - DNA, 390 bp, Glycine max
  Clone ID: LIB3138-029-Q1-N1-E6
gaaaattgactttcccccagggcacttcccgaagtgttaagagaatgcctctttctatagggggaggagctggtgcaaagaatgctattctcatgaatatgccaaatgctgttctttcaatgtggagatattttgttggagatctcgtctttgaagtttctaagatgacttctccctacattaaatgtacagtctctttcttcatagcatttggaaatttggctgatgataccatcaattttgaggcttttccccacaagctggtgcagtttggagagattcaggaaaaagttgtattgaaattttcacaagaggaatttcttacagcttggtcaactcaggtgcgtcctgcaacaactctgttggctgatgggtgtccatatttgtatg

SEQ ID NO: 32273 - DNA, 400 bp, Glycine max
  Clone ID: LIB3138-029-Q1-N1-E7
tgattaccctagtttcaaactcgttatcgtcggcgatggtggcacaggaaagacaacctttgtgaaaaggcatctcaccggagaattcgagaagaaatatgagccaaccatcggtgtggaggttcacccattggattttttcacaaactgtggaaagattcgattttactgctgggatactgctggacaggagaaatttggtggcctcagagatggatactatatccatggacaatgtgctattatcatgtttgatgttactgcccggctaacatacaaaaatgttcccacctggcaccgtgatctttgcagggtctgtgagatcatcccaattgtactttgcggaaacaaggttgatgtcaagaacaggcaagttaatgcaaagcatgttacattccac

SEQ ID NO: 32274 - DNA, 402 bp, Glycine max
  Clone ID: LIB3138-029-Q1-N1-E8
gattcacgccgccgcggacggtaccgcgccgccgggattcgagtccgccgtcgaagagcacgagttcggcgacctccagggaatgcttttcatgttctctgtttgtcatgttataatatatattcaggatcggtcacattttggtactaggattttgaggaattttcgggtgctgcaagcagccaagcatgctatggctccctttgttagatcccagactatgccgcctttaccgtctaggtcgcatccttcgccgtcgtcccgacctgtttcgtcggcaaacaattcttcaccagttagaggtggtggtaacttgggtcgcaatgtgtcagccatatctctcatgtcaggtttaggttcttatgcttctttgtttccaggacagtgcatacctgtcacact

SEQ ID NO: 32275 - DNA, 402 bp, Glycine max
  Clone ID: LIB3138-029-Q1-N1-E9
cggctcgagcggttcgagagaaagggaaatttcactacaggacttttaacctatcactgggtgatttgcagcacctccttagagtagctccggtcattggcatacttcatgacaagaaagcattcaaacctgttctaaatccagctgaagtggaagcagtatttgatgcacctttggaaatgtttctcatggataaaaatcgcaggcaggatgagagggagtggatgggagagaagcactcgttgcatttcttcgactatggcatcgggcataaaaaatatatcatatggggcttaactgctgggatcttgattaggttgcatcagttgtgtaccaacggctgccagctttcgtggagcagaatcctaaattcaagcttccacaggatgtatccaaggatac

SEQ ID NO: 32276 - DNA, 408 bp, Glycine max
  Clone ID: LIB3138-029-Q1-N1-F1
gtgctggttcacattcttaaaagaattttcttgaaagggagaatcagaaaaaccccaaaaagatggatgccgaatggaaacaaaaaataaatcctcattacaatgaggttaaggctcagatggaaacaaatttgttaaaattgtcttttgataatgttgaaactcctaaaggttccatgttggatctgaaaatttctcaatctaaaattgcacttccaaagaacacagttggagggacccattctgcgtagtgatctattggcaaattttttgacagagggcaattttagagcaagtgttgatttgcagcgcactcatcgtattagaggaatgattaaaatggtggccacagttggtattcctgagaatacaggtatatcattggcctgtgctatgaatagttctttt

SEQ ID NO: 32277 - DNA, 392 bp, Glycine max
  Clone ID: LIB3138-029-Q1-N1-F10
agttatattaatgcatgaatccgaatccaccgctttgagagtctgtttcggtcacagcagagcagagagtattaagaagacactgcacagatctgagtggtgactgaaggaatctagcttctttcatttctcatcactattcttaggtctgagggctcattgccattatcatgtcaaggaggccagtaaatccttcgcgtcggttatgtgatgggggaagtataccatttgctgcatctatccggtctaaatctcaaaactctcccctactatctattgggcttgacatctggggtgcaatccttctgattggttattggtacagcaattcaggtggagctagcggtggtattaacgatgtaatgtaacttgaaggtggtgcatcatgctca

SEQ ID NO: 32278 - DNA, 360 bp, Glycine max
  Clone ID: LIB3138-029-Q1-N1-F11
caaagaatagatcctcaatacaatgaggttcaggctcagatggaaacaaatttgtttaaattgtctcttgatgatgttgaaactcctaaaggttccatgttggatctgaaaatttctcaatctaaaattgcacttcccaagaacacagttggaggaaccattctgcgtagtgatctattggcaaattttttgacagaaggcaattttagagcaagtgttgatttgcagcgcactcatcgtattagaggaatgattaaaatggtggccacagttggtattcctgagaatacaggtatatcattggcctgtgctatgaatagttcttttagggggcgcgccagttctgatatttacaccatc

SEQ ID NO: 32279 - DNA, 373 bp, Glycine max
  Clone ID: LIB3138-029-Q1-N1-F12
ctatatgttcctcactcactcgcgtttattcaccatgactaagcgacaagctaattggtctccatacgataacaacggaggatcatgtgttgcaattgctggagcagattactgcgtcatcgacgcggatacgaggatgtccaccggttacaatatgctcactcgcgaatactccaaaatgtaccaactggcggagaagagagatatggcttcttatggttctcaagctgatgtcaaagctttgcagaaggttctgtctgctaggcatctgatttatcagcatggacacatcaaacaaatgagctgccctgcgatggctcagttgctctcaaacactctttattacaaacgcttctttgcttattatgctttc

SEQ ID NO: 32280 - DNA, 141 bp, Glycine max
  Clone ID: LIB3138-029-Q1-N1-F3
ccttgattctctctcttcgggcagaaacatgaatttgggaacgcaaccagtaacggcgtggtattggtgctacagctgcacccgattagtgcacctatgtggtcaaagtaacatcgcctgcccccactgttaaagcggttt

SEQ ID NO: 32281 - DNA, 407 bp, Glycine max
  Clone ID: LIB3138-029-Q1-N1-F4
ctcgagccgaatcggctcgagttgaaaagctttctagctagtcataacatcaccattactgatggtattgacaaaactagtgcaactttgcaatttagaaagttagcagattgtgattttctcaagagaaactttaagcagatgtctaatgttttgtgggtggctcctgaggacaaggcgagtttatggtcacaacttcattatgtttcgtgtaataatctggaaatgcaagaagcttatcttgtcaatctcgtaaatgtgttacgagaattgtatttgcacagtccagaggaagctcgccaattgagaaggaaagctctctctcgtattgaatggctgcaaaaagctgatgtgcctaccatagcacagattgaagagttccattcgatgcagaggatgatgaatgc

SEQ ID NO: 32282 - DNA, 398 bp, Glycine max
  Clone ID: LIB3138-029-Q1-N1-F5
ttgtgttcttatgcatggttttctacaacatggtgcacaaacttcctgtgatgaagtactataaggaacttaaggttgaggcagtcactgcaaatgaagacaatggtcccctgactggacctgtctggaggtcaactgtatggaatattgtgcggagaatcaggtggtacgggtttggcattgtgctcatttatgttgtgactctggcaatatttcctggttacattacagaggatgttcactctcaaattcttaaggattggtatccaattctcctaattgctggctataatgtgtttgatcttgttggcaagtgtctgactgcagtttacctcctacagaatgcaaaagttgccataggtggttgcatagcaagattgttgtttttccctctcttc

SEQ ID NO: 32283 - DNA, 406 bp, Glycine max
  Clone ID: LIB3138-029-Q1-N1-F6
agaaacttgtgatattagggaaggagatagtaaagaaatgtgggggagtgcctcttgcagcaaaagcactaggaggtcttctacgcttcaaaagagaggaaagagagtggctcaaaattaaggaaagcaacctttggagtttgccacacaatataatgcctgccttgagattaagctacttgaacttaccaataaaatttagacaatgttttgcttactgtgcaatatttcccaaagatgaaaaaatagaaaagcaatatttaattgaactttggatagctaatggtttcttttcatctaatgataagttagatgctgaagattgttgactcgttggcaagtgtaccaaatcgtcacaagtagtaaagttctcggaagtccgagtgtcgaatccacagggactttg

SEQ ID NO: 32284 - DNA, 394 bp, Glycine max
  Clone ID: LIB3138-029-Q1-N1-F7
ggagcctaataaatcttgcaacaattctgtatcttaactcaattagggtgcctgccactatagcatatgttttctgagcaatatttggttttcaagtgctctttggcattgtgaagatcaaaaagctagatgaacgggaaaggttgattacagggactgcataagcaactacttgatttatgatggacatgctgctcatgttaatgtcatggttacaagtcaaccttcggggcatcaaaatgactaggagctcagagtaagagctaacatcttggaatatatcaccatgtgctaaatctttatactggcaggcatgctggaggcttctgttctcatttacttccctaaaatgattgagctgaggtagccaattggcgagccacatttttgtcat

SEQ ID NO: 32285 - DNA, 108 bp, Glycine max
  Clone ID: LIB3138-029-Q1-N1-F8
ctatcatgatggagatcacgtcatagaagcttctaatacgactactacctacattaaaggacacagctctcatgtgatcccaccaggaagacgctccctttggcccag

SEQ ID NO: 32286 - DNA, 405 bp, Glycine max
  Clone ID: LIB3138-029-Q1-N1-F9
cttccatcatccaccaaaccttagagctccttcatctccccttaccagaacatcttttgaacacagtcaacatgagtaccagccagtatgacgctccctctggcgatgttgtagacgacgattacaagtcccgcactggacagtccgagattcccgttcagagtgacagcgtagctgtcgaggcaaccgagtacgacaacggcggggattctgacaagcaactcgagaaggatgagaacgaagctattgacaggagcaacatcctggatgagcgcacccgtggtgccaccaagaaggctggcacctacaccgagcctggcgacgaggaggaagttgacaatctgacagcgggaggtaatgatggcacctcttctggtcgccagtaagactatagatacccacgta

SEQ ID NO: 32287 - DNA, 407 bp, Glycine max
  Clone ID: LIB3138-029-Q1-N1-G1
gattaaaatggtggccacagttgggattcctgagaatacaggtatatcattggcctgtgctatgaatagttcttttagggggcgcgccagttctgatatttacaccatctgctctcaagactgtgaattgtggaatcctgcttgcacaaaagcaatgactatgtcatttaatccaaacccgtgttctgatgcatggagtttggaatttctgaagcgtactggatttcattgcgatatcatttgtgtcactggatggactgccaccccaatgcaggatgttcaggttacaattgattggtttatttcctctcaggaatgtgttcccaggacctattgtgttttaaatccacaaaatccttttgtgttaaataggtggatgggaaaattgactttcccccagggcactt

SEQ ID NO: 32288 - DNA, 403 bp, Glycine max
  Clone ID: LIB3138-029-Q1-N1-G10
caagcttagtcaaagtgtctgtgactgtcacacacagtctttaagatctggaagcgcttctcacttgcccacaacaacaattcctctcaatttcaaaattttcagcttcaaaataataaaaccctaagagaggggttgcaagcaaaatgagaagcgcaaagatgtggacggttttgatgtgtctgatggtgagcttcttcgctcgcattgaatcgctgactgtgacggtgaacgacgtcaagtgcgtctactagtacgtgctttacgagggcgacaccgtttcggggaactttgttgtcgtcgaccatgatattttctggaactccgatcaccccggcattgatttcacggagacatctgctgcggggaatacttgccacaatatcaagggaacctctggtga

SEQ ID NO: 32289 - DNA, 358 bp, Glycine max
  Clone ID: LIB3138-029-Q1-N1-G11
atgacttctccctacattaaatgtacagtctctttcttcatagcatttggaaatttggctgatgataccatcaattttgaggcttttccccacaagctggtgcagtttggagagattcaggaaaaagttgtattgaaattttcacaagaggaatttcttacagcttggtcaactcaggtgcgtcctgcaacaactctgttggctgatgggtgtccatatttgtatgcaatggtgcatgatagttcagtgtctacaataccaggtgattttgtcattggtgtcaagttgacaaccataaacaatatgtgtgcatatgggctcaatcctggtatttcaggttctcgtcttttgggcacca

SEQ ID NO: 32290 - DNA, 390 bp, Glycine max
  Clone ID: LIB3138-029-Q1-N1-G3
aaataaaaagatgttcatcagctggattttctgaaaatacaggtgtagtgattggactgtgctgtgggtagctcttttagggggcgcgccagttctgatatttacaccatctgctctcaagactgtgaattgcggaatcctgtttgcacaaaagcaatgactatgtcatttaatacaaacccgtgttctgatgcatggaagttggaatttctgaagcgtactgtatttcattgagatatcatttgcgtcactggatggactgccaccccaatgcaggatgttcaggctacaattgattggcttattttctctcaggaatgtgtttccaggacctattgtgttttaaattcacagaatccttttgtgtttaataggtggatttgaaaattg

SEQ ID NO: 32291 - DNA, 413 bp, Glycine max
  Clone ID: LIB3138-029-Q1-N1-G4
aaaccctaactcccgaccctgttcccctctcgtatccgtcatgaaaggaggaaagtccaagaccgaatctaagagagccgatcccaaacttgctgtgaataagaagggagccgccaccaaggctaggaaacccgccggcaaggggaaggcagcgaaagaccctaacaagccaaagaggcctccaagtgctttcttcgttttcatggaggagttcaggaaggtattcaacaaagaacatcctgaaaacaaagcagtgtctgctgtgggcaaagctgctggagcaaaatggaagaccatgtctgatgctgaaaaagcaccttatgtggcaaagtctgagaaaaggaaagtggagtacgagaagaacatgagagcctataacaagaaacaggcggaaggtcctactggtggggatg

SEQ ID NO: 32292 - DNA, 406 bp, Glycine max
  Clone ID: LIB3138-029-Q1-N1-G5
aaaaaactttcgaaagattttatccaattgaaattttaaaaatgactgggataaacttaagaattcaattattgaaattgaataagtaaacaatttaattggattggtcgaatggtatcaaaaaaatggagtactaactcccatttcttatttattattgaattaaccgatcaacttgctttgttatcgaacatttctttttgatttcaaaaattttccggaaaaaatttgaatctatttttatatgcgaatcaatcctactacttctggtcctgaggtttctgcgcttgaaaaaaaaaatctgggacgtatcgcccaaataattggtccggtactagatgtagcttttcccccaggtaagatgcctaatatttacaacgctctgatagttaagggtcgagatact

SEQ ID NO: 32293 - DNA, 404 bp, Glycine max
  Clone ID: LIB3138-029-Q1-N1-G7
tgaagctgcaaaaatcatatttgcttttatatctaactgggccaagttggctatcacactggtcaaattacaacagtttcaaggtgctgttgatgcagcaaggaaagccaacagctcaaagacatggaaggaagtttgctttgcttgtgttgatgcagaggagtttcgtttggcccaaatttgtggactaaacattattattcaggtggatgacttggaagaagtcagtgaatattaccaaaacagaggttgcttcaatgagctcatatctctcatggagagcggtttacggttagaacgggcacatatgggcatctttactgagttaggagttctgtacgctagataccgccctgagaagcttatggagcatatcaaactattctcaacccgcctcaatattc

SEQ ID NO: 32294 - DNA, 347 bp, Glycine max
  unsure at all n locations
  Clone ID: LIB3138-029-Q1-N1-G8
caccattgaattttgattctagcaagcacagcttttgtcagtgatctattgaccttctgggtggacgaatcttactggacaaaactggagattggatcacacttatacaaaattctccaattaggcactagctgagagttgctgcttggaataaaggctgtttaatggctaagatagtgatgcgcgggaatgcgaccatcgaaaagagggattgggcctcattggtacaggtgattttaacaaacangggcagggcagatcattttgatgcatgtgagtggactgaatctgaaccacattcctgggaatagatcttaccaataaaagtatcaggacctaataatact

SEQ ID NO: 32295 - DNA, 348 bp, Glycine max
  Clone ID: LIB3138-029-Q1-N1-G9
taggagtgtgctgttccaagtcccatagcagcgatgggaatcgatcttaaggctgggggtaagagcaaaaagaccaaaagaacagcaccaaaatccaatgacatctacctcaaattacttgtcaagctttatcggttccttgttcgaaggactggcagcaatttcaatgctgttatactcaagcgcttgttcatgagcaaggttaacaagcctccaatttctttgtcaaggttaattaagtatacaaaggggaaggaggataaaattgctgtaatagtggggactgtaactgatgatatcagagtatatgaagttccagcattgaaaattacagcactcaagtttact

SEQ ID NO: 32296 - DNA, 395 bp, Glycine max
  Clone ID: LIB3138-029-Q1-N1-H10
ctgctttcacttggctggttttcccaaaggcctaatcaactgtgtcactggaaaaggctcagaaattggtgatttccttacaatgcatccaggagtgaactgtataagctttactggtggtgatactggcatttcaatttcaaagaaggcaggcatgattcctctgcaaatggagttaggaggaaaagatgcctgcattgtacttgaggatgctgacctggatttggttgctgcaaacattataaagggaggcttttcatacagtggtcagaggtgcactgctgttaaggttgtcctggtaatggagtccgttgccgatgctttggttgaaaaagtgaaagctaaagtggcaaaactaactgttggaccaccagaagatgactgtgatatcaccc

SEQ ID NO: 32297 - DNA, 270 bp, Glycine max
  Clone ID: LIB3138-029-Q1-N1-H11
gcgaaatatagagagatattggagatggagcccagcaggagggttgtaattttgtgctggctgacggtggctggaagtatccgagtcggagtccgagacgactcgctgtgaaaacatacactaattcatatcattctgctgcaatgaagcggccaaaattagaaccacattcctgggaattgatctttccaatagaggtatgcggtcctaataatggttttgaaatgcggaggatctgccaacgggctatagactacgaaccctacgaca

SEQ ID NO: 32298 - DNA, 409 bp, Glycine max
  Clone ID: LIB3138-029-Q1-N1-H12
ttcttccctaactctctctgcaataacaacaccatcaacaaccccttcaagccggcctaaaccccattacccaaaactttttcttttttctttccttcaacactctctattggatcatcacatattcaatttcattctcttcaaaaattccccttcaaaaaaatttaaaattaaaaaaaagtgctctttttgtgaattttgagccatttgccaccgacagatttcgatcttctccgtgccaaagttgtaatcttttcgaattttggcgaggtgggtcgatctgatttcgctcgaataattgcgggttcgattttgatctgaaaaaggaaaagagaaaaaaagaatgggttatttctgattcaagaatttgtccttttttgaaatggtctatttccatagctcaatctct

SEQ ID NO: 32299 - DNA, 397 bp, Glycine max
  unsure at all n locations
  Clone ID: LIB3138-029-Q1-N1-H3
attggatggagctaggcctcatggataagaatccaacgaagctggaacactttgatgacatgtggaggctcgaatccactgccacactattatctcacttgaagggggatgatggtcgacatgtcttgacattggatcgtacaatattctatccgcaaggtggtggtcaacctgcggatactggctttgtactcattcatggctttgataacaacaaatttctggtttctgatgttcggtccaaagatggaattgtttttcactatggtttctttgagaacctgngcggngaatttgagcctacactcgagaaagggaaggaggtttcactctttgttgatcagcccaggcgaaaactcaactccagattgcattcagcaggacatttgcttgatat

SEQ ID NO: 32300 - DNA, 324 bp, Glycine max
  Clone ID: LIB3138-029-Q1-N1-H5
atctgaatttgattgataataattggagtaggagcccagccgcattgttgtaatttcgggctgtctgacggtggctggaagtatccgagtcggagtccgagtcgactcgctgcgatctcatacactcattccttctctccgacccacaaaatcaaacctattttatttttgttgctttagctttggtgcgttctcttaagaagcggaatcgatcaatcccctaactcattgcttagatctgcaaactggctatggactacgaaccctacgacaggagcggaactgatgatgaccttacaccaacccatcaaaatttgaattttc

SEQ ID NO: 32301 - DNA, 406 bp, Glycine max
  Clone ID: LIB3138-029-Q1-N1-H7
aacaactacttcgactttaccaccaaacaaccaccaactaaacaaatcaatcaagatgtctgacatgggccgacaatctctcggggacaaggctggggcggctttgaagcctgacagccagaagacctacctcgagcaggctaccgacgccgtcaagggcaaggccgactccgccgcatctaccgggcagccggacagtcaaaaatcctggacccagtccgccggtgacgccatctccggcaaccagaacgagaactctggttccatcctcgactctgccaagaacgctctcggcatgaacgacaagaaggcctaatcgaccgacgaccgaccaacgatgatcctcaccgatcgacgatggtagcttgtattctggttccgacgtattgattgaagagagagagag

SEQ ID NO: 32302 - DNA, 368 bp, Glycine max
  Clone ID: LIB3138-029-Q1-N1-H9
caaaattgcattctctatttctcttaccctctcatcattttgatgacgcgcacatcagcacaacacaacaattcactaagctaaaatcacttcatcatggcttcctcgcgtgcttcctctgccattgcagctgttgccatctccacaccaagttcccagaagaatggatcactcttgggaagcacaaaagcttcttttcttactgggaggaaactgaatgtgaacaactttacagcaccagttggagcacgatccatcactacagtttgcgcaggtgctgagcctgataggcctctgtggttcccaggcagcaccccttctccatggctagatggcagaatgccaggagattttggctttgatcctct

SEQ ID NO: 32303 - DNA, 414 bp, Glycine max
  unsure at all n locations
  Clone ID: LIB3138-030-Q1-N1-A1
tgctccttctttgtctattcgtgtatgacattttttgggttttcttctctgaaagattttttggtgcaaatgtcatggtatcggtggcaacacaacaagcatcaaatcctgtgcacaccgttgccaatagtatcggtcttcctgggttgcaactgataactaagaaattagagttgcctgtaaagattgtttttcctagaaatttgttgggtggtgttgttcctggagagaatgcgacagacttcatgatgcttggtttaggagacatggctatcccaggcatgctactggctntagtcctctgctttgattatcgcaagagcagggatacagtaaatctcttagagttacattcctcaaaggggcacaaatacatatggtatgcgctacccgggtatgccattggcctggtaa

SEQ ID NO: 32304 - DNA, 330 bp, Glycine max
  Clone ID: LIB3138-030-Q1-N1-A10
aaggattcccttagtaacggcgagcgaaccgggaaaagcccaccatgaaaatcggtcgccctcggcgtccgaattgtagtctggagaagcgtcctcagtggcggaccgggcccaagtcccctggaagggggcgccagagagggtgagagccccgtcgtgcccggaccctgtcgcaccacgaggcgctgtcggcgagtcgggttgtttgggaatgcagccccaatcgggcggtaaattccgtgcaaggctaaatactggcgagagaccgatagcgaacaagtaccgcgagggaaagatgaaaatgacttttgaaagagaagtaaagagtgc

SEQ ID NO: 32305 - DNA, 335 bp, Glycine max
  Clone ID: LIB3138-030-Q1-N1-A11
gaacatgctaaaaaacagttctttgagtacttacaagggtttattcttcaactagaatcttagtttgaaatgtcttgcatttgtggcagctcccctacaagcgattttttttccctacaggtgaggcagaatctggtttggagagacttcatcaatgtgctgaaaaggaactacagctattcctgaatgctgatggcccatctaaagaattcaatgactttcgcactaaactagctggattgaccaggtatatgttgcagattttaagtattcctcatgctgtctatttatttatttattattgtcttgcgttgcgattgaagtttgactttaaa

SEQ ID NO: 32306 - DNA, 406 bp, Glycine max
  Clone ID: LIB3138-030-Q1-N1-A12
ctcgagccgaatcggctcgaggaaagttagcagattgtgattttctcaagagaaactttaagcagatgtctaatgttttgtgggtggctcctgaggacaaggcgagtttatggtcacaacttcattatgtttcgtgtaacaatctggaaatgcaagaagcttatcttgtcaacctcgtaaatgtgttacgagaattgtatttgcacagtccagaggaagctcgccaattgagaaggaaagctctctctcgtattgaatggctgcaaaaagctgatgtgcctaccatagcacagattgaagagttccattcgatgcagaggatgatgaatgctcctgattcaaatgataatattgatttactgttgagcattgatttgttgggtttacaaggagcaaggtaagcttt

SEQ ID NO: 32307 - DNA, 403 bp, Glycine max
  Clone ID: LIB3138-030-Q1-N1-A3
ggatgaggcagatgatatgctctctcgaggtttcaaggatcagatcgatgatatttttcagctgctgccacctaagatccaggttggggttttctctgccacaatgcctcctgaagccctggaaatcacaaggaagtttatgaacaaacctgtgaggattctagtaaaacgtgatgagcttaccttggaggggatcaagcaattttttgtcaatgtagacaaggaggactggaagctcgagacactatgtgatctttatgaaactttggcaatcacccagagtgttatctttgtgaacaccagacgcaaggtagattggctgacagacaaaatgcggagtcgtgatcacacagtttcagccactcatggagatatggaccaaaacacaagggatatcatcatg

SEQ ID NO: 32308 - DNA, 382 bp, Glycine max
  Clone ID: LIB3138-030-Q1-N1-A8
tttggccatggatgagtccaatgctacctgtgggaagcgtttggcttcaattgggctagagaacactgaagctaaccgccaggcataccgtaccctcctcgtgacagttccaggccttggtcagtacatctctggtgccattctctttgaggaaacactctaccaatccacaactgatggcaggaagattgttgacgtgctgcttgagcaaaacattgttcctggtattaaagtcgacaagggtttggtgccccttgcaggttccaacgacgagtcatggtgccaaggtttggatggtctagcctctcgctcagctgcatactacgagcaaggtgcccgtttcgccaaatggcgtactgttgtgagcatccccaacggtccc

SEQ ID NO: 32309 - DNA, 410 bp, Glycine max
  Clone ID: LIB3138-030-Q1-N1-A9
aaattcaacctctctcatagggtggtgttggctcctatgacaagatgcagagcgttgaactggattccacaggcagcgcttgctgaatactacgctcaaagatcaacaccaggtggatttctcatcagcgaaggcaccttgatctcccccactgctcctgggtttccccatgttcccgggatatattcagatgaacaagtggaggcgtggcgaaacatagtggatgccgtgcatgccaaaggcagcattatcttctgtcaactttggcatgttggccgtgcctctcatccagtgtatcaacctggtggagctccaccaatttcgtccaccagcaagcccatatcggcgaggtggaggattctgcttcccgatgggtcctatggtgtgtacccagagcctcgtgcacttag

SEQ ID NO: 32310 - DNA, 359 bp, Glycine max
  Clone ID: LIB3138-030-Q1-N1-B1
gtcattgtaggttcttatggtgaagtttatcgtgctgattgcaatggcactgaagttgctgtaaagaagtttctggaccaagatttctctggtgatgcgctagctcagttcaaatctgaagttgagatcatgataaggctgcggcatcctaatgtcgtgctcttcatgggagctattactcgctccccacatttctctatcttgacagagtttcttccaagaggcagtttatataggctattgcatcgtcccaatcttcgacttgatgagaagaaacggttgcgcatggctctagatgtggctaagggaatgaattacttgcacacgagccattctcccattgtccaccgagatttaaa

SEQ ID NO: 32311 - DNA, 265 bp, Glycine max
  Clone ID: LIB3138-030-Q1-N1-B10
gagaaagacattcaatacacaggataatgagtgctgatagattggatgcacactagcgctttgcgtgggaccattgaaacaccggctttacagaagaggcgggcatgcttttacataccaagctgtattggatgatcagcttgcgttggctaacacacaagacttctttgatggaaattgtccaggggatcctaggttaccaatctttgtgcatcgtatgtatactgtgagtcaatttgcttcaaaagctgtccatgcaatgtca

SEQ ID NO: 32312 - DNA, 389 bp, Glycine max
  unsure at all n locations
  Clone ID: LIB3138-030-Q1-N1-B11
aacaccagacatatggatctagtacaagttctaactgctggtatctcaataccaaccttacagtcagtgaatatattggctgcggttttggcgtacagtgtcgttgcttctctaatcatcccaggaccatactttttaggagcaccattgaaggataaccgcccacgtgtcaattatagactcaatggcctacgtgtccacatcctcgcgatgatactttacgtcgttggaagcgactatggtctaaatttatacagggctaccattattcacgataactatggagccctcctcacaaccacagntgtttgggctttctttgtctcagcttacctttatgttagagcaacgttcatgatttcaaagatcgaccaaaactatcactcaag

SEQ ID NO: 32313 - DNA, 408 bp, Glycine max
  Clone ID: LIB3138-030-Q1-N1-B2
cttttcgttgtcacactcgaccgtgacttcaatcaatgtatcataacaccttcttctctggtaacaatgagcgtttcgttcatggatctgtccgtgcatcgtcgagctgcagtcgtctcggtcctgatcctacttctcggccttgtctttggtcttgccttggacgccaatgcacacattcccaagccctggaaccgcatatcgagtatcattggttggatctacttcttctgctggagcgtgagtttctaccctcaagtgtttctgaaccatcagagacaaagcgtcgaggggctatctctggactatacagtactgaacatgttgggctttacgtgctactccatcttcaatgttgctttctactacagtaagagtgtgcaacagcaatacatgagacgtcatgac

SEQ ID NO: 32314 - DNA, 406 bp, Glycine max
  Clone ID: LIB3138-030-Q1-N1-B6
atgagctcctacgagtaccttagcactggacttcgccagtacttggacaacaacatggatggattttacattgctccagcttttatggacaaacttgttgttcacattaccaagaacttcatgaccctgcccaacatcaaggttcctctcattcttggtatctggggaggcaagggacaaggaaaatctttccaatgtgagcttgtctttgccaagatgggaatcaaccccatcatgatgagtgctggagagttggaaagtggaaatgcatgagagccagcagaactgatcaagcaaagataccgtgaagccgcagacttgatcaagaagggaaagatgtgtgctctcttcatcaacgatcttgatgcaagagctggtcgtcttgtggaaccacccaatacactgg

SEQ ID NO: 32315 - DNA, 385 bp, Glycine max
  Clone ID: LIB3138-030-Q1-N1-B7
cgctgacggcttagggccctacaccgttgacgccgatggacggattctcaagtgggacggggaagagacatgtttcactatatttgctgccaccaaatccaatatgttgaagtgtagtctcccatttgaaccaaagttggagcacatttgggtgatgccattaggacttggatccgataaaaaaagtggatatcgtaccatcgctgattcctacctacgcctaataattatgttgtctacagtgagattgactcaccaaagaggtatctgcacgtattaggccagccctcttcattcaccgattccattgacatcattgatcattcacacgcgatatactgcactgcttcaacctcaattttccagacaatgcattttatgcttg

SEQ ID NO: 32316 - DNA, 410 bp, Glycine max
  Clone ID: LIB3138-030-Q1-N1-B8
attactgagtaagggcaatgatattctgtgttgcgattatgctagttttgatggtttgattaccaagcaagttatgagcaagatggcagaaatgataaacagtctttgtggtggtgatgaaaaattgatgcgtgaaaggacgcacctgctgttggcttgttgttcaaggatggcaatttgtaagaaagatgtttggagagttgaatgtggaatcccttctggatttccgctcacagttatttgcaatagcatttttaatgagatgctcattagatatagctatgaaaaattactgcgccaggctaaagctccaagtatgtttttacaatccttcaaaaattttgtttctttgtgtgtgtatggtgatgataacttaattagtgttcatgaatatgtcaagccttacttta

SEQ ID NO: 32317 - DNA, 408 bp, Glycine max
  Clone ID: LIB3138-030-Q1-N1-B9
aagagttccattcgatgcagaggatgatgaatgctcctgattcaaatgataatattgatttactgttgagcattgatttgttgggtttacaaggagcaggtaaagcttttccaaacaaaattgtttttgatgataagcttgtgttggctaacacacaagaattctttgatggaaattttccagtggattcttggttaccaatttttgtgaattgtctttatcctgtaagtcaattaccttcagaagctgtcgttgtaaatgttacatgtggtagtggaccgtgtggttacccaccactgcttggattagttctgcagttaacaatcgcttcttaaatatctacaaaaggattcgcacagcacttgggaaaggtaagaaaattgtttttcttactagaagtgatccttt

SEQ ID NO: 32318 - DNA, 283 bp, Glycine max
  Clone ID: LIB3138-030-Q1-N1-C1
ctcaaagaggatggtgttcaacttggccctgcaatactcttctttggatgtaggaatcgtcgaatggattttatttatgaggatgagctaaagaattttgtggaacaaggttctctttcagaattgatagttgcattctctagagagggggctgaaagggaatattttcaacacaagatgagggaacacgctccacattggagtttgatttctcaaagaggtgatctttacgtctgtggtgatgccaacggtatggccacagatgttcatccaattcttcata

SEQ ID NO: 32319 - DNA, 325 bp, Glycine max
  Clone ID: LIB3138-030-Q1-N1-C10
cttttctctctgtggttctttctccatttccattggctttgagaagtcaccaacacaatgctcccttcagagtttcaatggctgtttcaacaagtttccctggtgcaaagttggaggctttgctgctgaaatgtggctcctccaatgctgccactgccactgtcaccaccaccacccatttgtcatgtttttgcaaaaccagaaagacacttgttcagagtcagagagggcctattcgctgtgaggcttcttctgcttctgacgttgcggctgatgccactgagacagctgctagggtctctgctcttgaacagcttaagacctc

SEQ ID NO: 32320 - DNA, 239 bp, Glycine max
  Clone ID: LIB3138-030-Q1-N1-C11
ttctaattctccgccaccaaatttgcgatctttctgtgcctccgaatcatggagaaggaagagaacgaaccccacgttcagaaaagtggcggcgaaagcgaagacgctgaacccatagagctcgttctctttcaagtgcccgagtgttacgtctacataatacctccaagaaagagtgcagcttcttacagggctgatgaatgggatgtcaacaaatgggcatgggaagggatattaaa

SEQ ID NO: 32321 - DNA, 407 bp, Glycine max
  Clone ID: LIB3138-030-Q1-N1-C12
caaatggcaacagtgagaacaccattgaattttgattctagcaagcagagcttttgtcagttttctattgaccttctcggtggaggaatcttagtggacaaaactggagattggatcacacttatacaaaattctccaattagtaacttgttgagagttgctgcttggaagaaaggctgtttaatggtcaagattgtgatgtctgggaatgcagcagtcaaaaggagtgattgggcctcattggtacaagtgtttttaacaaacagcaacagtacagagcattttgatgcatgtaagtggacaaaatcagaaccacattcctgggaattgatcttcccaatagaggtatgtggtcctaataatggttttgaaatgtggagttctgagtgggcaaatcaaacttcatg

SEQ ID NO: 32322 - DNA, 409 bp, Glycine max
  unsure at all n locations
  Clone ID: LIB3138-030-Q1-N1-C2
gaatgataaaaatggtggccacagttggtattcctgaaaatacagggatatcattggcctgtgctatgaatagttcttttagggggcgcgccagttctgatatttacaccatctgctctcaaaactgtgaattgtggaatcctgcttgcacaaaagcaatgactatgtcatttaatccaaacccgtgttctgatgcatggagtttggaatttctgaagcgtactggatttcattgcgatatcatttgtgtcactggatggactgccaccccaatgcaggatgttcacgttacaattgattggtttatntcctctcaagaatgtgttcccaggacctattgtgttttaaatccacaaaatccttttgtgttaaataagtggatgggaaaaatgacttttccccaaggcac

SEQ ID NO: 32323 - DNA, 409 bp, Glycine max
  Clone ID: LIB3138-030-Q1-N1-C3
atttcattgcgatatcatttgtgtcactggatggactgccaccccaatgcaggatgttcaggttacaattgattggtttatttcctctcaggaatgtgttcccaggacctattgtgttttaaatccacaaaatccttttgtgttaaataggtggatgggaaaattgactttcccccagggcacttcccgaagtgttaagagaatgcctctttctatagggggaggagctggtgcaaagaatgctattctcatgaatatgccaaatgctgttctttcaatgtggagatattttgttggagatctcgtctttgaagtttctaagatgacttctccctacattaaatgtacagtctctttcttcatagcatttggaaatttggctgatgataccatcaattttgaggctttt

SEQ ID NO: 32324 - DNA, 99 bp, Glycine max
  Clone ID: LIB3138-030-Q1-N1-C5
ctctcatttctgtggatctaattaaatatccattggtttgtgggggtcaccaacacaggggagaactaaccccacctatagctatttggccgcgaatgc

SEQ ID NO: 32325 - DNA, 406 bp, Glycine max
  Clone ID: LIB3138-030-Q1-N1-C6
gtcggatcttgttaggttaatttgtacttgcaactgacaaactcaacctcagcttaatctttctatatcttatagatggatcgacgtgatacttcaggatttgtcagcgggggtgcattaaacacctttagacaaatctaaccctaactttgtagataaacatctcttttttacccggaggtcaggaaggctgtactgtgaaattcataaataggattagatattcttttggcagtggtttcatcacttccatggatgcgaggttcaagaactttttaggatttgctgctaatcattctgcaaatgcattcaagattttgggcagttcaatgcaaattgaaggaaggggagctgattatcatggtacagataccatcttacgacttgattcccctggttcttcaat

SEQ ID NO: 32326 - DNA, 325 bp, Glycine max
  Clone ID: LIB3138-030-Q1-N1-C7
gccctatgtactggtgagaaggggtactgacagctgacaaagtcaacctaatctaagggtttctatatctaataaatggatcgacctgatacttcacgatatgacaccggaggtgcattaaacaccttgagacaaatctaaccctaactgtgtagataaacatctataacttacccctaggtcacgatggctgtgctgtgaaattcatagacaggactagatattctaccggcagaggctacatcactttcatggatgccaagaccaagagctttttaggaaaggctgctaagcatgcagcagacgcattcagaattgacggcag

SEQ ID NO: 32327 - DNA, 407 bp, Glycine max
  Clone ID: LIB3138-030-Q1-N1-C8
gttgctgctcatcctccgtaacctccgagctctgcaccgaagaacgaagccatggggtaacctaacaattctccattactctttcgatatgcttcactgcatgtttatgttccttttatgttttatttgctttgttcccaaaaattgaacgcacacgaaggaacttgagctcgtgaatttatatatgcttctggtagatctgtttctcatcaaataatctcatcgattcttcccgtgtgaaaactttatattttctacaatgggattatgtatatttatcggtgtagtgtttatgttggttttccccccgttttgtgcaatgtgatttgcttcttcaatggtttttgtttaattttatttggtcgatgatctaaagcttccttgtaaatatcgattatttcattgat

SEQ ID NO: 32328 - DNA, 402 bp, Glycine max
  Clone ID: LIB3138-030-Q1-N1-C9
agaacactaccctgaacatagtaaagaagccagtgctaggatttgttagtgaagcaatggctcaaaccatgttgctcatgtctagtgtctctagcagttattccgtggatttgaagaaagaccttttcctccaattgcagagtcaaagtttaaggcctaagttctctcagctctcattcaacccacttccatcatcaacttcttccttttcttcaccccgtacattcacaactctggccctcttcaaatctaagaccaaagccgctcctgctaagactaaggttacaaagccaaagcaaaaggttgaagatggtatctttggcacttctggaggatttggttttactaagcagaacgagctctttgtgggtcgtgttgctatgcttggttttgcagcatcac

SEQ ID NO: 32329 - DNA, 400 bp, Glycine max
  Clone ID: LIB3138-030-Q1-N1-D10
gtgaggctggagaaggaagcctcctacgatgaaattaaaaatgctatcaaggaggaatcagagggcaagttgaagggaattcttggttacactgaagatgatgtggtctccaccgactttgtgggcgatagcagatcaagtatttttgatgcaaaggctggaattgcattgaataagaactttgtgaagcttgtttcttggtacgacaacgagtggggatacagctcacgtgtcattgacctgcttgtattcgttgccaagaagtctttttaaggtggtgtactgcaaagttgcttgtctacacattatgtgcttgtctagttgcgactgagtgccttgctcgtgcaaacatgagaggtctgaataaatcggtttctgtaccagtggatttaccttgtta

SEQ ID NO: 32330 - DNA, 400 bp, Glycine max
  Clone ID: LIB3138-030-Q1-N1-D11
aaaaaaggaaacgtatagaaaaagcttctccaaagaatttgaaggagaaagattcattcatgttcattttttccttttccccttcgtccccatcaagtttctgattctctcttttcacttcctttctctttcttcattcttctttctcttttcaactattttctttacatttttttctttttctctcgcttttttcgcgttcactttctctactctgttttacgcattttatttattgttttgttagttaattttgcgattcgagtaattggtatgcttgtgttttctagaagacgatattttcacgacgattaagctgcgttttcgccggtgtcgttttaccgcaagatggtgtcgttttcggaaatatgcaaaaagggttgaagttctttcttcagca

SEQ ID NO: 32331 - DNA, 395 bp, Glycine max
  Clone ID: LIB3138-030-Q1-N1-D12
acaataaactcgctactattatcagttcatgatggcctgccatggcttactcgtgtgcattcctctgccattgcagctgatgccatctccacaccaagttcccagaagaatggatcactcttgggaagcacaaaagcttcttttcttagtgggaggaaactgaaggtgaacagttttacagcaccagttggagcacgatccagcactacagtgtgtgcagttgctgagcctgataggcctctgtggttcccaggcagcacccctcctccatggctagatggcagtttgccaggagattttggctttgatcccctaggtcttggatctgatcctgagagcctgagatggaatgtccaagcagagctcgtgcactgcagatgggccatgttgggagc

SEQ ID NO: 32332 - DNA, 411 bp, Glycine max
  Clone ID: LIB3138-030-Q1-N1-D2
aaactgtttggaatcaaatggcaccagtgagaacaccattgaattttgattctagcaagcagagcttttgtcagttttctattgaccttctcggtggaggaatcttagtggacaaaactggaaattggatcacacttatacaaaattctccaattagtaacttgttgagagttgctgtttggaagaaaggctgtttaatggtcaagattgtgatgtctgggaatgcagcagtcaaaaggagtgattgggcctcattggtacaagtgtttttaacaaacagcaacagtacagagcattttgatgcatgtaagtggacaaaatcagaaccacattcctgggaattgatcttcccaatagaggtatgtggtcctaataatggttttgaaatgtggagttctgagtgggcaaatc

SEQ ID NO: 32333 - DNA, 323 bp, Glycine max
  Clone ID: LIB3138-030-Q1-N1-D3
gttggcagcaggaatgtgccatcaatactcaatgttcctcagctaactccctcttccagcactgggagtaaatctcaattgccacagaagcagcagccgcagcagcaaataccaaagcaagcattacaacaggcccagcttttgttctctagtccttacgtgcatccgcaatccaacagtaccacatccaccaccacagttccaagtggttattaccttcaacatcaacaacggcgtggccctgagcagatgcagcgaccgggctcttcccctgccgtaaacaatgtgaaaggcagcagtgccttacctacacagggtctttt

SEQ ID NO: 32334 - DNA, 409 bp, Glycine max
  Clone ID: LIB3138-030-Q1-N1-D4
gacaaaactagtgcaactttgcaatttaaaaagttagcagattgtgattttctcaagagaaactttaagcagatgtctaatgttttgtgggtggctcctgaggacaaggcgagtttatggtcacaacttcattatgtttcgtgtaataatctggaaatgcaagaagcttatcttgtcaatctcgtaaatgtgttacgagaattgtatttgcacagtccagaggaagctcgccaattgagaaggaaagctctctctcgtattgaatggctgcaaaaagctgatgtgcctaccatagcacagattgaagagttccattcgatgcagaggatgatgaatgctcctgattcaaatgataatattgatttactggtgagcattgatttgttgggtttacaaggagcaggtaaag

SEQ ID NO: 32335 - DNA, 407 bp, Glycine max
  Clone ID: LIB3138-030-Q1-N1-D5
gactttcccccagggcacttcccgaagtgttaagagaatgcctctttctatagggggaggagctggtgcaaagaatgctattctcatgaatatgccaaatgctgttctttcaatgtggagatattttgttggagatctcgtctttgaagtttctaagatgacttctccctacattaaatgtacagtctctttcttcatagcatttggaaatttggctgatgataccatcaattttgaggcttttccccacaagctggtgcagtttggagagattcaggaaaaagttgtattgaaattttcacaagaggaatttcttacagcttggtcaactcaggtgcgtcctgcaacaactctgttggctgatgggtgtccatatttgtatgcaatggtgcatgatagttcagtgt

SEQ ID NO: 32336 - DNA, 391 bp, Glycine max
  Clone ID: LIB3138-030-Q1-N1-D6
gataaattaaaaaaaaaaggaagggagaaagccccctctatttctccgaaaggaatgtgaaaatccagccgggccacgaaacgacacctctctgcgcttaaaacgactgcggcccacgatcgcgttcttcagttgaggcatgttattcgctgctcactcctcctcctactcttgttcttcttcttcgtcgtcttggccttcgcatcttcacaatcacatccaatagagacacgttgactttagtggaagaagaagaagaagaagagaatggaacaatcggttttggatgatataatcaatcgcctcctcgaagttcgtacccgaccggggaagcaggttcagctatcggagtccgagatccgtcaactctgcgtagtttccagagagattt

SEQ ID NO: 32337 - DNA, 409 bp, Glycine max
  Clone ID: LIB3138-030-Q1-N1-D8
ttagagcaagtgttgatttgcagcgcactcatcgtattagaggaatgattaaaatggtggccacagttggtattcctgagaatacaggtatatcattggcctgtgctatgaatagttcttttagggggcgcgccagttctgatatttacaccatctgctctcaagactgtgaattgtggaatcctgcttgcacaaaagcaatgactatgtcatttaatccaaacccgtgttctgatgcatggagtttggaatttctgaagcgtactggatttcattgcgatatcatttgtgtcactggatggactgccaccccaatgcaggatgttcaggttacaattgattggtttatttcctctcaggaatgtgttcccaggacctattgtgttttaaatccacaaaatccttttgt

SEQ ID NO: 32338 - DNA, 410 bp, Glycine max
  Clone ID: LIB3138-030-Q1-N1-D9
cagagatagcacgcaccaggagaagccatggctactcaatccccttcacctcagaacctaggtggtgaaattgagcaaacagaaaatgtagatcagcataataggggagaagagcttggtaaacagagttcagacacattggtgtttgtgaactcagagccattgcgtgaggaacaaattcagaatgctgtgaaatttctgtcgcacccgaaagttagaggttctcctgtcatccacagacgatcgtttctggagaagaagggccttacgaaggaggagattgatgaagcctttcggcgtgtgcctgattcacctccaagtgtgcagacagctggcataaatcaagatggacaattgaagccatcatcaaacattcagcagcaaggccaaccacaggctttgcagctgac

SEQ ID NO: 32339 - DNA, 410 bp, Glycine max
  Clone ID: LIB3138-030-Q1-N1-E1
tttctccctagctttgcttatagttcctgtattaatttttctctccctgagattaccaagctctgcaactttgcttctcaacatggagtatcgtctcctacccatttttactttactcaatgttagcttcagcatccaaacaactgtagcatgcatgcttattaatactttatttaaagttatggtttccttttaatataaaagctcgatttctatttagaacgggaattttcttactatagccacaagagttataatatatgggatttattttttataagtggtaaagcattttctggtattaattaattttatcacatattattatcatgaaaagaataaggccaggtgctgcataatctgtttggaatgtattaaaatgttaattacgagatgtttttgtatttgac

SEQ ID NO: 32340 - DNA, 397 bp, Glycine max
  Clone ID: LIB3138-030-Q1-N1-E10
tacaaaggttgctgtacgagataagattgcagtagtgctaagtgctaacacctgcagtgaacaatggcctctgcatcagcatctctgctcaagtcttcacttgttcttgacaagtctgagtgggtgaagggacaaacccttcgccaaccttctgcatcagttgtgagatgcaaccccaccaccccatcaggcctcaccatcagagctggttcctatgctgatgagctcgttaagaccgtgaaaacagtggcttcaccacggaggggtattttggccatggatgagtccaatgctacctgtgggaagcgtttggcttcaattgggctagagaacactgaagctaaccgccaggcataccgtaccctccttgtgacagttccaggccttggtcagtaca

SEQ ID NO: 32341 - DNA, 403 bp, Glycine max
  unsure at all n locations
  Clone ID: LIB3138-030-Q1-N1-E11
tcgttatccttctttttttctccttgaactcgaatattcactatggcagatgaggtggttctgctagatttctggccaagtccatttgggatgagggtcaggattgcacttgctgaaaagggtatcaaatatgagtccaaagaagaggacttgcagaacaagagccctttgctcctcaaaatgaacccggttcacaagaaaatcccggttctcatccacaatggcaaacccatttgtgaatctctcgttgctgttcagtacattgaggaggtctggaatgacagaaatcccttgttgccttctgacccttaccagagagctcaggctagattctgggctgactntgttgacaataagatatttgatcttggaagaaagattggacatcaaagggagaagaaaa

SEQ ID NO: 32342 - DNA, 399 bp, Glycine max
  Clone ID: LIB3138-030-Q1-N1-E2
ctcgagccgaatcggttcgagatgataccatcaattttgaggcttttccccacaagctggggcagtttggagagattcaggaaaaagttgtattgaaattttcacaagaggaatttcttacagcttggtcaactcaagtgcgtcctgcaacaactctgttggctgatgggtgtctatatttgtatgcaatggtgcatgatagttcagtgtctacaataccaggtgattttgtcattggtgtcaagttgacaaccataaacaatatgtgtgcatatgggctcaatcctggtatttcaagttctcgtctattgggcaccattcctcagtccatttcacagcaaactgtttggaatcaaatggcaacagtgagaacaccattgaattttgattctagcaagc

SEQ ID NO: 32343 - DNA, 109 bp, Glycine max
  Clone ID: LIB3138-030-Q1-N1-E4
agaagaccaagttgttgacaactcctacggtgaacaactcgggtccctcaacgttctcttccatggctgccaccactgtcaatggtgccgctgccaacatagctgtttc

SEQ ID NO: 32344 - DNA, 386 bp, Glycine max
  Clone ID: LIB3138-030-Q1-N1-E6
gaagcatctaagtgagatacacagtagttaggtagcaagcataagtgtctaaccttagaaacatatctgctacatatcgtgtgcattttggaattgtgccactaaaattctattcatctatggctgcctcatcttatgctatgcaatcaatccttgcaaaccctatgatccgcatttccagcgggtctagggagaaccattttggtgttcctgcttatcacatgagaaggaatgttggcctgagagttaggtccatggctgaggaagagcaaccaagtcagcctgcgaccccagttacaccaccaccagcagaacccaaaccacagccagtctctactccttcaccaaaggtgagcaccaagttttctgatgtgttggcgttcagt

SEQ ID NO: 32345 - DNA, 257 bp, Glycine max
  Clone ID: LIB3138-030-Q1-N1-E7
gaaacacataagtgagactcacacgcaaaacgatgcatgcattagtgattaaccttagaatcatatatgtttcatatagtgtgcctgcacaaattgacccactaaaataatgttcatctatgtactcattatcttatcctatgcgatcactccttgcacaccctataatccaaagttacagcacttctaggaagatccataatgaagatgctgcttatgacataaaacagagtgaacttcttgaagtgaaggccatg

SEQ ID NO: 32346 - DNA, 409 bp, Glycine max
  Clone ID: LIB3138-030-Q1-N1-E9
gaaagattactgggagcctaaaagggcacttggactactctttgtcatcagcttggcacccagatggacaaatattggccactgggaatcaggacaaaacatgcagattgtgggacataagaaatctttcacagtctatggctgcgttaaagggaagaatgggtgcaataagagccctaagattcacatctgatggacgatttttggccatggctgagcctgcagactttgtccatatttttgactcacattctggttatgaacaaggtcaagagatagatctatttggcgagattgctggcatatcctttagcccggacacagaggctctatttgtgggtattgctgaccgaacctatggtagcttgttagagttcaacagaaaacgtcactataattacctagactc

SEQ ID NO: 32347 - DNA, 413 bp, Glycine max
  Clone ID: LIB3138-030-Q1-N1-F1
caatgatattctgtgttgcgattatgctagttttgatggtttgattaccaagcaagttatgagcaagatggcagaaatgataaacagtctttgtggtggtgatgaaaaattgatgcgtgaaaggacgcacctgctgttggcttgttgttcaaggatggcaatttgtaagaaagatgtttggagagttgaatgtggaatcccttctggatttccgctcacagttatttgcaatagcatttttaatgagatgctcattagatatagctatgaaaaattactgcgccaggctaaagctccaagtatgtttttacaatccttcaaaaattttgtttctttgtgtgtgtatggtgatgataacttaattagtgttcatgaatatgtcaagccttactttagtggttctaaattgaaaa

SEQ ID NO: 32348 - DNA, 396 bp, Glycine max
  Clone ID: LIB3138-030-Q1-N1-F10
gggctcaatcctggtatttcaggttctcgtcttttgggcaccattcctcagtccatttcacagcaaactgtttggaatcaaatggcaacagtgagaacaccattgaattttgattctagcaagcagagcttttgtcagttttctattgaccttctcggtggaggaatcttagtggacaaaactggagattggatcacacttatacaaaattctccaattagtaacttgttgagagttgctgcttggaagaaaggctgtttaatggtcaagattgtgatgtctgggaatgcagcagtcaaaaggagtgattgggcctcattggtacaagtgtttttaacaaacagcaacagtacagagcattttgatgcatgtaagtggacaaaatcagaaccacat

SEQ ID NO: 32349 - DNA, 403 bp, Glycine max
  Clone ID: LIB3138-030-Q1-N1-F11
ttgcaattgaagttaaaagccttagccttccctacaactccaaacacaaagacatcatcatccatggctgcctccgtctccactgtcggagctgtcaacagagctcttttgaacctgaatggttctggagctggagcttcagctcccagttcagccttctttgggaccagcttgaagaaggttattgcctcaagggtccccaacagcaaggtttccggtggaagcttcaagattgttgctgtagaagagaagaaagagattgaagagacccagcagaccgacaaggacagatggaagggtcttgcctatgatatctcagacgaccaacaagacatcacaagaggaaagggtttggttgactcccttttccaagctccacaggatgctggaactcactatgcag

SEQ ID NO: 32350 - DNA, 355 bp, Glycine max
  Clone ID: LIB3138-030-Q1-N1-F12
ctcaggtgcgtcctgcaacaactctgttggctgatgggtgtccatatttgtatgcaatggtgcatgatagttcagtgtctacaataccaggtgattttgtcattggtgtcaagttgacaaccataaacaatatgtgtgcatatgggctcaatcctggtatttcaggttctcgtcttttgggcaccattcctcagtccatttcacagcaaactgtttggaatcaaatggcaacagtgagaacaccattgaattttgattctagcaagcagagcttttgtcagttttctattgaccttctcggtggaggaatcttagtggacaaaactggagattggatcacacttatacaaaattc

SEQ ID NO: 32351 - DNA, 412 bp, Glycine max
  Clone ID: LIB3138-030-Q1-N1-F2
gtcaagccttactttagtggatctaaatagaaaagctttctagctagtcataacatcaccattactgatggtattgacaaaactagtgcaactttgcaatttagaaaggtagcagattgtgattctctcaagagaaactgtaagcagatgtctaatgttgtgtgggtggctcctgaggacaaggcgagtttatggtcacaacttcattatgtttcgtgtaataatctggaaatgcaagaagcttatcttgtcaatctcgtaaatgtgttacgagaatcgtatctgcacagtccataggaagctcgccaattgagaatgaaagctctctctcgtattgaatggctgcaaaaagctgatgtgcctaccatagcacagattgaagagttccattcgatgcacatgatgatgaatg

SEQ ID NO: 32352 - DNA, 312 bp, Glycine max
  Clone ID: LIB3138-030-Q1-N1-F3
ctctaactttcacgacactgtcagcaagttagagtgatccaatgtgggcacaaactcatcatggctgggggccttaacaaaactagggcaactttgcaatatagaaagttcgcagattgtgattcactcacgagaaactgtaagcatatgactaatgtttagtgggaggatcctgaggtcaaggcgagtttatggtcacaacttcgttatgtttcccgtaataatccggaaaagcaagaagcttatattgtcaatttcctaaatgtgttacaagaaatgtttttgcacagtccattagaagctcgtcaattg

SEQ ID NO: 32353 - DNA, 268 bp, Glycine max
  Clone ID: LIB3138-030-Q1-N1-F4
ctcgagccgaatcggctcgaggctaatcgcgacgtgagagatggggatggggtgtacgtgtatgagaacgacaagaagccctgcgggcggaaggttgttcttggtaacgaaaagcacgatcccggtgtggtaaaacactcttgtactttatacattcacacgtcatatccggcttgcaatgcttttgtctctagcctgtacttcctcttttcatcgcttggtgcaatggggaaaatagtggtctatagaaagacatgggtttctttgt

SEQ ID NO: 32354 - DNA, 272 bp, Glycine max
  Clone ID: LIB3138-030-Q1-N1-F6
caaagaggatgttgctcccgacgctgtcaggcacatatgcgttcctgataaaaaggtctactatagcgacatcagtcggggatggcctgtaccgcctcccgcactatagatcagataatccacaacttgcacaatgccaataagcagctcatggtggcatttatctgggtaggatacatacatgcactgatctcactcccgctcggagcgaccgagggctcgatgcgtcgtaagagccagctggatgaggtatgtttgtccaagtgctatgc

SEQ ID NO: 32355 - DNA, 409 bp, Glycine max
  Clone ID: LIB3138-030-Q1-N1-F7
ggttactcaacagatgttgaagcatgctgatttccccggcagcaacaatggaacaggtctcttccaaaccatagttggtttgaagataagagatttatatgagcagctaatagccaccaaggctgagactccagtggctgcaaaagcttaggaattgaattgaacctgccataataatatatatacatatcgaccgagcgacgcagtcaaattgcattagttctcatcaaaatcatcattttctttcttctttcatgttttccacaatttcactgtgtttcatgttattttgtctattgttattaggctgttctgcatcataattaatgaaaaaaacacatatgtatgtatgtatgtacttatccgagaaaaaaaagtgaggctgagattcagttatgttgatacaaga

SEQ ID NO: 32356 - DNA, 408 bp, Glycine max
  Clone ID: LIB3138-030-Q1-N1-F8
gttaacttgagaagtagtacctaggctcactgccttaaccttatcacaatggataataactaactcctactaatacttgtcctttatttgttcttaaaggagaaacaactttccattcacgacacgctcacgccgtcaaaccaacttgagtgcgttccaggaaacacatcccctctccatttcattcacttctctgctctctctttctcccacgaattcccaaacttattttcacgcttccaatttccgtcacgtaaaccatgcatcaccgcctcccaaattagggtttccgacaggcgcgtggaggaatcgatggcgaccgtgaatccgcagcctctgcagttcgaggaccctgctatacccgtcgacgacgatgacgacgacgacgacgacgactgcggtgatgat

SEQ ID NO: 32357 - DNA, 412 bp, Glycine max
  Clone ID: LIB3138-030-Q1-N1-F9
cagattcaggtccttatcaccaagatccaacaacttctcaaccacaacgagttgctatttccttcgattcacgaacccagaaaattaaagaattaaaaaagatatcgagtatcaaaaacggcatctggaaaacatgtctcaataccatggtgatgaaatggagtatgcggcagacgataatgaaatggcagaggtagaagaggatatgtatttccgtggcagagcatttggtgaatcagattcagatgatgacgacgactacgaatatgaccctttggtttgttttgactcataagcaaaaccttgtttgctcattttaactgtgaaaattcaatgttgtgtgtgggctcatgtgtccatgtattatttgcatatgtagttgctgccttctggttttatgggcaactttagc

SEQ ID NO: 32358 - DNA, 414 bp, Glycine max
  Clone ID: LIB3138-030-Q1-N1-G1
tgactctcttcctagctgaagatgctgttatacttggcattgatgatgaaaaatattggccattgatgcctccattgccttcatatgggtatgggagggagcatcctgggcctcgatatggcagtttgattcatggtcaacatcttaaagatgttgtgataacagggcataacggtaccataaatggacagggacaaacatggtggaaaaaatatcgccagaagcgtctcaaccacactagggggccacttgttcagatcatgttttctagtgacattgtgatcaccaatataactttgcgtgactctcctttctggacacttcatccatatgactgcaaaaacattacaataaaaggtgttactatattggctcctgtgtttggagctccaaatactgatggcatagatcctg

SEQ ID NO: 32359 - DNA, 389 bp, Glycine max
  Clone ID: LIB3138-030-Q1-N1-G10
ttgcatcgtccatggctgcaaactctaccgacgtcaaattgttctccaaatggagttacgatgatgtccaaattatggatatctcccttgtggactacattgccgtcaagcagaagcctaaataccagtgttatactcctcactctgctgctcgattcaacaagcagagattccgcaaggctcagtgcccaatcgttgaaagattggtgaactccctcatgaagcacggacgaaacaacggaaagaaactccttgccatcaagatcgttcaacacgccttcgagatcatccacttgttgactgacaagaaccccatccaagttttggtcgaggccatcgccaactctggaccccgagaggattcaaccagaattggatctgccggaact

SEQ ID NO: 32360 - DNA, 337 bp, Glycine max
  Clone ID: LIB3138-030-Q1-N1-G11
gtaatttctgccagcctcaaaaaagacttgctctgcctctgccactctctgagtaggactacactgccatggctgcctcagtctccactgttggagctgtcaacggagctccactgagcttgaacagctctggagctggagcttcagttcccagttcagccttctttggcaccagcttgaagaaggttattgcctcaagggtccctaacgtcaagatttcttctggaagtttcaaaatcgttgccgcggaaaaagagattgatgagaaacaacagacagacaaggacagatggaaaggtcttgcctatgatgtttcagacgaccagcaagacatcac

SEQ ID NO: 32361 - DNA, 173 bp, Glycine max
  Clone ID: LIB3138-030-Q1-N1-G12
ggcaaatttgttgaccgtaggcaatactagagctggcgttgacactctgtgcactcgtcgactctgacgtgggtgtctaatggtggactgagggggctttcctcggaactccagtgtgcgagcgcccctttctaagtttagctcccgtaaggagctcaccattctttatcttc

SEQ ID NO: 32362 - DNA, 412 bp, Glycine max
  unsure at all n locations
  Clone ID: LIB3138-030-Q1-N1-G2
gttaaaagccttagccttccctacaactccaaacacaaagacatcatcatccatggctgcctccgtctccactgtcggagctgtcaacagagctcttttgaacctgaatggttctggagctggagcttcagctcccagttcagccttctttgggaccagcttgaagaaggttattgcctcaagggtccccaacagcaaggtttccgggtggaagcttcaagattgttgctgtagaagagaagaaagagattgaagagacccagcagaccgacaaggacagatggaagggtcttgcctatgatatctcagacgaccaacangacatcacangagggaagggtttggttgactcccttttccaagctccacaggatgctggaactcactatgcagtcatgagctcctacgagta

SEQ ID NO: 32363 - DNA, 367 bp, Glycine max
  Clone ID: LIB3138-030-Q1-N1-G3
gcagagagagacgcagtcatggggcgaagacccgcgaggtgttataggcaaattaagaacaaaccataccccaagtcacggttttgccgtggtgttcctgatcccaagatcaggatttacgatgttggtatgaagaagaagggtgttgatgagtttcctttctgtgtccatctgggtagttgggagaaggaaaacgtttctagtgaggccctggaagctgctcgtattgcttgcaacaagtacatggccaaatttgctggaaaggatgctttccacttgagagtcagggtgcacccattccatgttcttaagatcaacaagatgctttcgtgtgctggagctgattggctccaaactggaatgagag

SEQ ID NO: 32364 - DNA, 290 bp, Glycine max
  Clone ID: LIB3138-030-Q1-N1-G5
ttgcaccgttcattgatataaactttaccaatgccctgctgagcacgagcgcgtacctgcatgcgctatgcacactcttttagccctcgacaccaacactgacataaaggcccagcctagcatccccagtgtgcatctgcgcctcctgcctcggactgaaccgacatacctcgcgcgaggaagacgagtcggacccgttgctcgatgacgcacaaacagtgagatatggcgctgagggggaggatgatgtggcacatccagatgaggaagagctcgaaagagagagggag

SEQ ID NO: 32365 - DNA, 352 bp, Glycine max
  unsure at all n locations
  Clone ID: LIB3138-030-Q1-N1-G7
gcaattgaagttgaagtcttgcccttctctcttcaactccaaacacaagacatcatcatccatggctgcctccgtctccactgtcggagctgtcaacagagctcttttgaacctgaatgggtctggacctggggtttcagctcccagttcatccttctttgggagcagcttgaagaaggttattggctcaagggtccccaacacaaagatttcctctggaagcttcaagattgttgctgtggaagagaagaaagagattgtagagacccagcagaccgacaaggacagatggaagggtcttgcctatgatatctcagacgaccaacaggacatcacangaggaaagggtttg

SEQ ID NO: 32366 - DNA, 394 bp, Glycine max
  Clone ID: LIB3138-030-Q1-N1-G9
gtgttcccaggacctattgtgttttaaatccacaaaatccttttgtgttaaataggtggatgggaaaattgactttcccccagggcacttcccgaagtgttaagagaatgcctctttctatagggggaggagctggtacaaagaatgctattctcatgaatatgccaaatgctgttctttcaatgtggagatattttgttggagatctcgtctttgaagtttctaagatgacttctccctacattaaatgtacagtctctttcttcatagcatttggaaatttggctgatgataccatcaattttgaggcttttccccacaagctggtgcagtttggagagattcaggaaaaagttgtattgaaattttcacaagaggaatttcttacagcttg

SEQ ID NO: 32367 - DNA, 376 bp, Glycine max
  unsure at all n locations
  Clone ID: LIB3138-030-Q1-N1-H1
gtgagaacaccattgaattttgattctagcaagcagagcttttgtcagttttctattgaccttctcggtggaggaatcttagtggacaaaactggagattggatcacacttatacaaaattctccaattagtaacttgttgagagttgctgcttggaagaaaggctgtttaatggtcaagattgtgatgtctgggaatgcagcagtcaaaaggagtgattgggcctcattggtacaagtgtttttaacaaacagcaacagtacagagcattttgatgcatgtaagtggacaaaatcagaaccacattcctgggaattgatcttcccaatagaggtatgtggtcctaataatggttntgaaatgtggaagtttgagt

SEQ ID NO: 32368 - DNA, 116 bp, Glycine max
  Clone ID: LIB3138-030-Q1-N1-H10
tatagttgtaaaagcttattccatataataacaatacatcggcatataggactctctttgtatgaaattccctctatttaggggcacaatcaatgagggaatttcatagaaagaga

SEQ ID NO: 32369 - DNA, 175 bp, Glycine max
  Clone ID: LIB3138-030-Q1-N1-H11
ttgtcattcattattttactacagagcttcaagagagttgaagaagctctctctcttggggctgaaattcaatagtaggagaaaaatcctgtcgaggttatctatttttcttccaaaacggccccgtttcaagatttttccccttgctattttacttgatttctgagttcactat

SEQ ID NO: 32370 - DNA, 392 bp, Glycine max
  unsure at all n locations
  Clone ID: LIB3138-030-Q1-N1-H12
aatggcactcatgatgtgggcttcttccactgccaatgcactcaaactctcttctgtctccagacctcatctcttgcctcctttttctttctccagatgcttatcttccgtcttggatggacttaagtacgctgattcacatgaatgggtcaagcacgaaggctcagtcgccaccattggtatcactgaccatgcccaggaccatcttggagaggttgtgtatgtggagctgccagaaccaggtggcacagtttccaagaagtctggcttcggagccgttgaaagtgttaaagcaacaagtgatataaactctccaatctcggnggagatcgttgaggttaacaaaaagctcacagaaacgcctggccttgtcaactcaagcccatacgaag

SEQ ID NO: 32371 - DNA, 369 bp, Glycine max
  Clone ID: LIB3138-030-Q1-N1-H2
cacacccacagcatgtcttaccgtcaaggcaaaaccgcccttgcgctgactcgcgtctggcacaggacatcatgcgaagaccgcatcctcggtcgtctggcaacgcggatagcgcacgtcttgatcggcaagcacaagccgacgtacgatccgtctgtcgatgcgggagactatgtcatcgtcgagcacgcctcgaaagtgaaattgtccggaaatcaatggcaggacaagacctacttcaagcacacgggttacgcgggatcggagaaattcatccccatctcgcgcttcaaggagaaggacccaggagagatcatccgccgcgctgaatctggaatgttgcccgagaattcgcaccgcaaaacccgc

SEQ ID NO: 32372 - DNA, 407 bp, Glycine max
  Clone ID: LIB3138-030-Q1-N1-H3
gcagggaagaggcccaactaaggctagccgaaatcaaacaagccgcagggatccccgagagttgcaacgacgacgtcgttcaggtaaccaaacgaagcacaggtgaaggcgtatggaaagaactcttcctctatccaacgcccccaattcgtcacatcgtaatcgctgcccttgggattcacttcttccaacaagcgtcgggcgtagacgccgtcgttttgtacagccccaggatcttcgagaaggctgggatcaaagacgacacgcataaacttcttgcaaccgtggccgttggattcgtcaaaaccgttttcatcttggcggctacttttacgttggaccgcgtgggtcgtcgtccgttgttgttgtctagtgtcgggggcatggtgctctttctcctcacgctc

SEQ ID NO: 32373 - DNA, 155 bp, Glycine max
  Clone ID: LIB3138-030-Q1-N1-H6
aatggcactcatgatgtgggcttcttacactgacaacgcactcaaactcatattcgtgtcaccgaacgacaacaacaaccacgcgcgaaatgcacctcacgtaatcttacaagcagactcgacgtaagtgctctgatactacaaactggggcacg

SEQ ID NO: 32374 - DNA, 394 bp, Glycine max
  Clone ID: LIB3138-030-Q1-N1-H7
tgcaaaacgaaaattatacatatccaacaatgacgaccacccgtgttgctctctgccttttatttgcattcctcttctacgcggctgaaggagccaaggttagtttcaataacaagtgcacatacacggtatggccaggaaccctaaccggtgaccaaaagccccaattatcaacaactggtttcgagttgggtccaggagcatccaactctgtggaccttccatctccatggtccggtcggttctgggcccgaacaggatgctccaacaacaacggaaggttcagctgcgccaccgccgattgcgccttcggtcaagtcgcatgcaacggtgccggtgcaatcccgccagctactttggtagaaatcacagttgcagcaaacggagggcaaga

SEQ ID NO: 32375 - DNA, 411 bp, Glycine max
  Clone ID: LIB3138-030-Q1-N1-H8
agttaaaagccttagccttccctacaactccaaacacaaagacatcatcatccatggctgcctccgtctccactgtcggagctgtcaacagagctcttttgaacctgaatggttctggagctggagcttcagctcccagttcagccttctttgggaccagcttgaagaaggttattgcctcaagggtccccaacagcaaggtttccggtggaagcttcaagattgttgctgtagaagagaagaaagagattgaagagacccagcagaccgacaaggacagatggaagggtcttgcctatgatatctcagacgaccaacaagacatcacaagaggaaagggtttggttgactcccttttccaagctccacaggatgctggaactcactatgcagtcatgagctcctacgagt

SEQ ID NO: 32376 - DNA, 325 bp, Glycine max
  Clone ID: LIB3138-031-Q1-N1-A1
gcccagtttacttatttgatgatggctctaccatttcatggataccatgtggaaggaagcttacatgctcctaccctggcatcaaattcttctatggaccagagacttactacggaaatgaggtgtcacttgtagaaatggatggacaatttgacagactagatgaactaatatacgttgagagccacctaagcaacctctctacaaagttctatggagaggttactcaacagatgttgaagcatgctgatttccccggcagcaacaatggaacaggtctcttccaaaccataattggtttgaagataagagatttatatgagca

SEQ ID NO: 32377 - DNA, 386 bp, Glycine max
  Clone ID: LIB3138-031-Q1-N1-A10
caaagaggctggaattgtgctaaattgattggatatggcgaccttggtcgacccacattgtctgctgccgaagaatattctctacactctagatacctgtctaaagcaaattccttgaatctttctgaaattgcagaaatgaaaattgtctatcgtggtggggtagacagtgagggtcatcctgtcatggttgttgtgggggcccactttttacttaagtgccttgatctggagcgatttgtgctctatgtggtgaaggagtttgagccgttaatacagaagcctttttctattgtctacttccactctgctgcatctttgcaggtgcagccagacctgggttggatgagaagattgcaacaaatacttggtcggaagcaccagcg

SEQ ID NO: 32378 - DNA, 348 bp, Glycine max
  Clone ID: LIB3138-031-Q1-N1-A11
cgcttcgttccacccttcacctgaaaagcaaaaaggagtgcaaaccatgggcgatgcaattgatttgactggtgacggaggagtcattaaaaccattgtaagaaaaagcaaagctgatgctgtcggtccaacagaaaatttccctcttgttgatgttcattatgaaggcacacttgctgatactggtgaagtttttgacactacacatgaagataacaccatcttctctttcgagattggaaagggcagtgttatcaaggcttgggaaattgcagtgaaaaccatgaaagttggagaaagtgcaaaaataacttgcaagccagaatatgcatatggtagtgcaagatc

SEQ ID NO: 32379 - DNA, 383 bp, Glycine max
  Clone ID: LIB3138-031-Q1-N1-A12
gtgggagaaaccgggtcacagtccactatttggatatgacttttggtaccaaccacgtcacaataccatgattagcacatcatggggtgctcctagtgcttttacaaaaggttttaacttacagcatctttctgatggattatacgggaggcatctccatgtatatagctggcctgggggcgaactgagacaaacactggaccttggtgattcagggcttttacccttagagataaagttcttgcatgatcctgctaaagatacaggttttgtcgggagtgcattgacaagtaacatgatacgattttttaagacccaagatgaatcatggagccatgaggttgccatatcagtgaaaccactgaaagtgcaaaactggattc

SEQ ID NO: 32380 - DNA, 359 bp, Glycine max
  Clone ID: LIB3138-031-Q1-N1-A3
cttggttaccaatttttgtgaattgtctttatcctgtaagtcaattaccttcagaagctgtcgttgtaaatgttacatgtggtagtggacgtggtggtttacccaccactgcttggattagttctgcagttaacaatcgctcctcagatatcaacaaaaggattcgcacagcacttgggaaaggtaagaaaattgtttttcttactagagttgatccttttccagtagctttactggctgttctttttggcgttaagaatgaaattctgagttctaacgccactaatcctatgctgacgcgacttcttgagaactgtaagagtctcaaatatctgggtgatgagtgtccttttgcattt

SEQ ID NO: 32381 - DNA, 385 bp, Glycine max
  Clone ID: LIB3138-031-Q1-N1-A4
ccccttttgtctgaacaagcaagttttcctcataggctcgcaatcggaaaccctaaccctaaccaattgcgataatctttccccaaaatggcaattgcacgcactggagtctacgtcgacgactatttggagtacgcgagcacattacccgctgaacttcagagactgctcaacactgtccgggaacttgatgatcgatcccaatctatgataacgcagaccaggcagcagacgaagtacactatggggttctcatcacatggctccaagaagggtaatcacagttataataacaattatgggaatgaggacgatgatgcagctattgagaaaatgcggaaagaaatcgaggtgaatcaggatagtgcattgagtctttgtactg

SEQ ID NO: 32382 - DNA, 373 bp, Glycine max
  Clone ID: LIB3138-031-Q1-N1-A5
ggcaaattttttgacagagggcaattttagagcaagtgttgatttgcagcgcactcatcgtattagaggaatgattaaaatggtggccacagttggtattcctgagaatacaggtatatcattggcctgtgctatgaatagttcttttagggggcgcgccagttctgatatttacaccatctgctctcaagactgtgaattgtggaatcctgcttgcacaaaagcaatgactatgtcatttaatccaaacccgtgttctgatgcatggagtttggaatttctgaagcgtactggatttcattgcgatatcattgtgtcactggatggactgccaccccaatgcaggatgttcaggttacaattgattggttta

SEQ ID NO: 32383 - DNA, 391 bp, Glycine max
  Clone ID: LIB3138-031-Q1-N1-A6
gtggaatcccttctggatttccgctcacagttatttgcaatagcatttttaatgagatgctcattagatatagctatgaaaaattactgcgccaggctaaagctccaagtatgtttttacaatccttcaaaaattttgtttctttgtgtgtgtatggtgatgataacttaattagtgttcatgaatatgtcaagccttactttagtggttctaaattgaaaagctttctagctagtcataacatcaccattactgatggtattgacaaaactagtgcaactttgcaatttagaaagttagcagattgtgattttctcaagagaaactttaagcagatgtctaatgttttgtgggtggctcctgaagacaaggcgagtttatggtcacaact

SEQ ID NO: 32384 - DNA, 314 bp, Glycine max
  Clone ID: LIB3138-031-Q1-N1-A7
caattattctttcgcaccttcgaaaatcaattttctgtcttctctgcgtcttcttcctctatcaatcgttttccatggctcgtaccaagcaaaccgctcgcaaatccaccggtggaaaggctcctaggaagcaactcgccaccaaggctgcaaggaaatctgcaccgacaaccggtggagtcaagaagcctcatcgctatcgccctggaactgttgctcttcgtgagatccgaaaataccaaaagagcacagagcttctgatccgcaagctccccttccagcgtcttgttcgtgaaattgcgcaagacttcaag

SEQ ID NO: 32385 - DNA, 368 bp, Glycine max
  Clone ID: LIB3138-031-Q1-N1-A8
tgaacttaatcttaatctgttagctagcttcaaatgcgttattgggtctcacaaaaaggagctagctaggaagtgaatactactattatttacctgccacacacacagaaacaacatagatctagaagcaaaggcaaagaaggatttcaagctcaattgtttagcttaattaatttccttcaagcaaatgatgattcagaagatgtttgactccacccgttctggtatgacaagaagctcctcccatgtagcctccattaatgacaatgatttccttgagctggtgtgggaaaatggtgagattgttgtacgaggaggttcatcatcaaacagatcacgaaagacaaacgaggaaagaatacatgaag

SEQ ID NO: 32386 - DNA, 346 bp, Glycine max
  Clone ID: LIB3138-031-Q1-N1-A9
gcggaaaaaccctcaaatatgatataattggcgctgcatcacattcttcacaagattttgctgcaccggaagatcattataaaccccacatgatcggtgccagattgagacaaagaatatatcctcaatacaacgatgttcacgctcatatcgaaacaaactagattaaattgtctcttgatgatcgctgaactcctaaaggttgcatgtgggatctgaagattcctcaatctaagattgcactttccaagaacacagttggaggaaccattctgcgctatgatctattggcgaatattctgacagatggcaattttagagcaagtgctgattcgcaacgcactca

SEQ ID NO: 32387 - DNA, 343 bp, Glycine max
  Clone ID: LIB3138-031-Q1-N1-B1
gcggtagagagaacggtcttctacagagagagagcggctggaatgtattcagctttgccatatgcacttgcacaggttattattgaacttccccacatcttggttcaggcccttatgtatggaattatcgtatatgccatgatgggattcgattggaccacatcaaagttcttgtggtatcttttcttcatgtacttcactttcttatactacaccttttatggtatgatgaccatggccattacccccaacgcacacgttgctgccatattgtccagtgcattctatgcaatatggagccttttctcaggcttcgttattcccttgtctagaatacctatat

SEQ ID NO: 32388 - DNA, 392 bp, Glycine max
  Clone ID: LIB3138-031-Q1-N1-B10
catcgatgccgtcctcaacccctccaacaccaccattgctggatcaggtgccaccgctggtgccgtcgccttctctggcgcttcatctgcttccaacgctcctttcacctctggccaacccaacccaacccggtctggtgcaccccctggatcgacttcccgtggtgctggtggggcccgtgccttcaacctcaaccaggcttgtgcttggcaagccatgccaaccggttccgtcggcgttggcgccattcttggaaccgctggtggtttcttcttggaagatgcctgatggggaaaacatttgtggataatgggaaaaagagatgagaaggaggcggaagtgtgttcatagtttcaaatttctttgtgatattagtcacgtatagtcacga

SEQ ID NO: 32389 - DNA, 387 bp, Glycine max
  Clone ID: LIB3138-031-Q1-N1-B12
ctcgagccgggctaacacacaagaattctttgatggaaattttccagtggattcttggttaccaatttttgtgaattgtctttatcctgtaagtcaattaccttcagaagctgtcgttgtaaatgttacatgtggtagtggacgtggtggtttacccaccactgcttggattagttctgcagttaacaatcgctcctcagatatcaacaaaaagattcgcacagcacttgggaaaggtaagaaaattgtttttcttactagagttgatccttttccagtagctttactggctgttctttttggcgttaagaatgaaattctgagttctaacgccactaatcctatgctgacgcgacttcttgagaactgtaagagtctcaaatatct

SEQ ID NO: 32390 - DNA, 384 bp, Glycine max
  Clone ID: LIB3138-031-Q1-N1-B2
gtcgctgcaaaagctgaagtggctgcttctatttatgctttggctgatggaagcctcggtgactggtttggaggctttctattttcagctggacagcaggccaatgaagctgttcagggccaattaacctctctcagtttcactagtttggctgtaatttatggggctgggcttgttaccagcctttctccctgtacacttagtgtcttaccactgacccttggttacattggggcatttggctctggcaaaagcagagcacaggttgtaggagattccattgcattctccttaggccttgcaaccacgttagcactgttgggtgtaggagcttcatttgcaggaaaggcttatggacagattggccaagattacctttgcagc

SEQ ID NO: 32391 - DNA, 337 bp, Glycine max
  Clone ID: LIB3138-031-Q1-N1-B3
gagatacactaagttatcctcataaatacactctaattaggtggcaagataagtgtctaaccttagtaacattgccacatattgtgttcattttggaattgtgccactaaaattctattcaattcatctatggctgcctcttcttatgctatgcaatcaatcctggcaaaccctttgatccgcatttccagcgggtctagggtgaaccaatttggcgttcctgctttgcacatgagaaggaatgttggcctgagagttaggtccatggctaaggaagaacaaccaagtgagcctgcaaccccagttacaccgtcaccatcagtagaacccaagccac

SEQ ID NO: 32392 - DNA, 393 bp, Glycine max
  Clone ID: LIB3138-031-Q1-N1-B4
cccaaataccaatccaatcctctcccaactcacaaagccatgtctccaggtcccgttgtcgacgcttcccctgaggttgatgcagagcaacaacttccctccgtcgatgacgccactcagaagaagataccccaaccacaggaggacgatgctccccttgtcgaggacttgaaggatgatgacaaagacgacgacgatgaagacgacgacgacgacgacgaagatgacaaggaagacgatgctcaaggtggtgctgagggttcaaagcagagcagaagtgagaagaagagccgaaaagcaatgttgaagctgggactgaaacctgttactggtgttagtagggtcacaatcaagaaaacaaaaaatattcttttcttcatctcaaaacccgat

SEQ ID NO: 32393 - DNA, 386 bp, Glycine max
  Clone ID: LIB3138-031-Q1-N1-B5
agcgtaagaagaatggcttctcaaagtttgagtttaccaccaacacatattccttacaataggataattgggaagcttgattccaagtttttgttgtggccttcttgtgctcatatcaaacccagaagaatttctacctcaattcgggcaatgggttcctccgcttcttcccactcccagtcacaatatgcagacagcgttgaatctgaagcaggagctgatactattgactataaatctttaaccgatgaagagtggaagaagcggctcacaaatgaacagttctatattactcgtcagaagggaactgaaagagctttcactggggagtactggaatactaaaaccccggggatttaccattgcatatgttgcgacacaccttt

SEQ ID NO: 32394 - DNA, 395 bp, Glycine max
  Clone ID: LIB3138-031-Q1-N1-B6
gaaaaagttgtattgaaattttcacaagaggaatttcttacagcttggtcaactcaggtgcgtcctgcaacaactctgttggctgatgggtgtccatatttgtatgcaatggtgcatgatagttcagtgtctacaataccaggtgattttgtcattggtgtcaagttgacaaccataaacaatatgtgtgcatatgggctcaatcctggtatttcaggttctcgtcttttgggcaccattcctcagtccatttcacagcaaactgtttggaatcaaatggcaacagtgagaacaccattgaattttgattctagcaagcagagcttttgtcagttttctattgaccttctcggtggaggaatcttagtggacaaaactggagattggatcacact

SEQ ID NO: 32395 - DNA, 351 bp, Glycine max
  Clone ID: LIB3138-031-Q1-N1-B7
aggacgcacctgctgttggcttgttgttcaaggatggcaatttgtaagaaagatgtttggagagttgaatgtggaatcccttctggatttccgctcacagttatttgcaatagcatttttaatgagatgctcattagatatagctatgaaaaattactgcgccaggctaaagctccaagtatgtttttacaatccttcaaaaattttgtttctttgtgtgtgtatggtgatgataacttaattagtgttcatgaatatgtcaagccttactttagtggttctaaattgaaaagctttctagctagtcataacatcaccattactgatggtattgacaaaactagtgcaact

SEQ ID NO: 32396 - DNA, 149 bp, Glycine max
  Clone ID: LIB3138-031-Q1-N1-B9
aggacacatcagtgcacctgaagtcaacagacacaagtggggctactcccaaagggttgttgcttcatttttcattctaaaacttgtactgagaaacagaaccatcaattttctctgccttctcattgtgcaataaaattcttaccttg

SEQ ID NO: 32397 - DNA, 344 bp, Glycine max
  Clone ID: LIB3138-031-Q1-N1-C1
gtcttttgggcaccattcctcagtccatttcacagcaaactgtttggaatcaaatggcaacagtgagaacaccattgaattttgattctagcaagcagagcttttgtcagttttctattgaccttctcggtggaggaatcttagtggacaaaactggagattggatcacacttatacaaaattctccaattagtaacttgttgagagttgctgcttggaagaaaggctgtttaatggtcaagattgtgatgtctgggaatgcagcagtcaaaaggagtgattgggcctcattggtacaagtgtttttaacaaacagcaacagtacagagcatttttgatgcatg

SEQ ID NO: 32398 - DNA, 390 bp, Glycine max
  Clone ID: LIB3138-031-Q1-N1-C10
tgggaagggtagtaggcgagtttttcgcggacgaggttgccctcggcgtaagtgccgtcggcgtataagtaggagtagtggcataggcggttctggtcgcaggttgtcgggagggtaaaatcgggaacgcggggtttgcagagagggtgggtgcacggaagaacatagaaggaagaagagagtgatggatcaaacgacgccgttgggggggttttgttgtggcactgaatccacgagagttggctgtcggtgttcaacaccatttgttggggctgcggaggggttcctattgggagagtgaccaccagagccatggagtatttgaacgaggattttatgttatttgaagaagaaaatgaaagggttcttaattttgggtttgtatttaga

SEQ ID NO: 32399 - DNA, 390 bp, Glycine max
  Clone ID: LIB3138-031-Q1-N1-C11
cattaattcacatagtttgtttcttgtcccattaccgatattcaaaagatgggcatccaacatgtgctggttttgccatttcctgctcaagggcatgtcaatcctctgatgctcttgtcaaaaaaactagctgaacatggcttcaaagtcacttttgtcaacacagatttcaaccacaagagagtgttgagtgcaacaaatgaggagggatcagcagtgagattaatctcaatcccagatggtttaggccctgaggatgacagaaataacgtggtcaatttatgttcggaatccttaagcagtaccatgacttctgcccttgagaaggtcataaaggatattgatgcacttgatagtgctagtgagaaaatcacaggtatagtggctgat

SEQ ID NO: 32400 - DNA, 162 bp, Glycine max
  Clone ID: LIB3138-031-Q1-N1-C12
tacatgttaggcagcagcaacaccagcagttgtagtaggtgttgacggaggatgaagtggaagaagactaatttgtctaaaatgtaatgtttttatagtcttggagactatttttgtttatggttacatgtacctttacagcttataaacctttttgctgtg

SEQ ID NO: 32401 - DNA, 330 bp, Glycine max
  Clone ID: LIB3138-031-Q1-N1-C2
gggaaatttgcgttgtttttcgcggtacagctcacacacactgaacggtaagtatggcggacaaggctgttacaatccgaacccgaaagttcatgaccaacaggcttctttccaggaagcagtttgtcgttgatgttcttcattccagggagggcaaatgtttccaaggctgaacttaaggagaagctagctaggatgtatgatgtgaaagaccctaatactgtatttgtcttcaaattccgaacacattttggaggtggcaaatccactggatttggtttgatttatgacacagtggaaaatgctaaaaagtatgagcccaaatacagg

SEQ ID NO: 32402 - DNA, 382 bp, Glycine max
  Clone ID: LIB3138-031-Q1-N1-C3
tgggaattgatcttcccaatagaggtatgtggtcctaataatggttttgaaatgtggagttctgagtgggcaaatcaaacttcatggcatttgagtttccttattgacaatcccaaacagtctacagtttttgatattctcttgggaatctctcaagattttgaaattgctggtaatactcttatgccagctttttctgttccacaggctactgccagatcttctgaaaatgcggaatcctctgcatgatctggaatttgtgttttctttcgcttgttcgtttgtttaattcaataaaggaaattaggcatgaccctcttgttgagtatgctctgcctatttgaaaatttccacacctcttttaattgtcgtaatgatgtgt

SEQ ID NO: 32403 - DNA, 395 bp, Glycine max
  unsure at all n locations
  Clone ID: LIB3138-031-Q1-N1-C4
ggttcacattcttcagaagattttcctgaaaaggaagatcaagaaaaacccaaaaagattgatgccagatttagacaaagaatagatcctcaatacaatgaggttcaggctcagatggaaacaaatttgtttaaattgtctcttgatgatgttgaaactcctaaaggttccatgttggatctgaaaatttctcaatctaaaattgcacttcccaagaacacagttggaggaaccattctgcgtagtgatctattggcaaattttttgacagagggcaattttagagcaagtgttgatttgcagcgcactcatcgtattagaggaatgattaaaatggtggccacagttggtattcctgagaatacaggtatatcatttgcnctgtgctatgaata

SEQ ID NO: 32404 - DNA, 303 bp, Glycine max
  Clone ID: LIB3138-031-Q1-N1-C5
cttcttctgatttgtagagactaacccaagaaagaaccaaccaaaaacaagtgcttcttagagcttggtatagctctctctctctctctctctttgtgcgtgtgtgtgtgagggtacatgcagagcagtgagtttgagacagagaaagaagcagttcaagattgttgttcaattttgcaaaaaactgcccatcaagtacttttggtgctggttttttttttttttttcgaatttgcttcttatccaacccggaagtttcttgaatcattggtgctctctctctctcttctctctattattttc

SEQ ID NO: 32405 - DNA, 169 bp, Glycine max
  Clone ID: LIB3138-031-Q1-N1-C6
gcggaatcctctgcatgatctggaattcgtgttttctttcgcttgtgtggtcggtttaattcaataaaggaaattatgcatgaccctcttgttgagtatgctctgcctatttgaaaatttccacacctttcttaattgtcgtaatgatgtgtaaagtgtgtgttatttt

SEQ ID NO: 32406 - DNA, 242 bp, Glycine max
  Clone ID: LIB3138-031-Q1-N1-C7
cgccttttgagttgaagcgtcgaacttatgtcttcaccttccaacaccatataccattgagcgtgggtgtctgcggtttcactgtctgtgttgttgacagtgcttttttgaacctacatgcgtatgggcctgggggttaaactgccagatgatgcttcttagggagcagcttgatgacagatatctgctcaagaggccgcaacgcagaggttagctttggaagccttaagattgctgctgta

SEQ ID NO: 32407 - DNA, 370 bp, Glycine max
  Clone ID: LIB3138-031-Q1-N1-C8
ctcgagccgctggtatttcaggttctcgtcttttgggcaccattcctcagtccatttcacagcaaactgtttggaatcaaatggcaacagtgagaacaccattgaattttgattctagcaagcagagcttttgtcagttttctattgaccttctcggtggaggaatcttagtggacaaaactggagattggatcacacttatacaaaattctccaattagtaacttgttgagagttgctgcttggaagaaaggctgtttaatggtcaagattgtgatgtctgggaatgcagcagtcaaaaggagtgattgggcctcattggtacaagtgtttttaacaaacagcaacagtacagagcattttgatgcatg

SEQ ID NO: 32408 - DNA, 308 bp, Glycine max
  Clone ID: LIB3138-031-Q1-N1-C9
gaaaaggaagatcaagaaaaacccaaaaagattgatgccagattgagacaaagaatagatcctcaatacaatgaggttcaggctcagatggaaacaaatttgtttaaattgtctcttgatgatgttgaaactcctaaaggttccatgttggatctgaaaatttctcaatctaaaattgcacttcccaagaacacagttggaggaaccattctgcgtagtgatctattggcaaattttttgacagagggcaattttagagcaagtgttgatttgcagcgcactcatcgtattagaggaatgattaaaat

SEQ ID NO: 32409 - DNA, 375 bp, Glycine max
  Clone ID: LIB3138-031-Q1-N1-D1
tccttttctggtgtgcacctctcatcactttttgagccaatattcaaaggtgcctagtagtgtttgagatgtctggtgttcttctttgggtgagttgtggacccaaggagaaccctatctccattgttggtcttggcgggagaggtggcagaagccagaggaggtttggactgtgcaatgggatcagttttgcaagcttttcaccagcagtggcagacccttcaagatcctcagaggagagggtatatgaagtggtgttgaaacaagcagcactggtcaaggagcaggacaagggtacaaagagagcactgaatttggacaaaccaacaattgaaggtgatttaaccaatggggatcttgtgagtgatgcttatg

SEQ ID NO: 32410 - DNA, 385 bp, Glycine max
  Clone ID: LIB3138-031-Q1-N1-D10
tttgaccccagtcatcccttgttttcaaatcaactgcgtaggtacctaatttcagcgattctcctgtggaggttgatggaacaagttgaccttgtacctccaagcataaagcatctgcaattagaccgatttcttaaaaatggttttctattattaatgagagtcatcgctgtaacattctgtgtgacactggctgcatcactagctgcacggcagggaccaacatctatggctgcatttcaagtatgtctgcaggtttggttggcagtgtctcttcttgcggatggtctggctgttgctgggcaggcgattcttgcgggcgcatttgctaataaggacttcgacagggccacagcaactgcatcacgagttctgcagatgggtt

SEQ ID NO: 32411 - DNA, 392 bp, Glycine max
  Clone ID: LIB3138-031-Q1-N1-D11
aaaaagcgcgtaaaagtaaaagagggaaagcaagaggtgcgggaagaagggagaaaggaaaggaaaggaaaagaagaaaacaagaagggtttggtagtttgtttgattatctacgggttgttatcatttccatccatttaattccccacaaccacgctcacctaagtttcaatttcaatcccttttctttttccgttacaaaataattcaaaattccctccctcatttacccttgtttgtgtaaagtagtagcagagtgagactaggtatcatcgatggcagggtacaagggcgatgacgaatacgattacctcttcaagctggttctcatcggcgattccggtgtcggcaagtccaacctgctttcgcgctttacgaagaacgagttcaat

SEQ ID NO: 32412 - DNA, 388 bp, Glycine max
  Clone ID: LIB3138-031-Q1-N1-D12
gattgggcctcattggtacaagtgtttttaacaaacagcaacagtacagagcattttgatgcatgtaagtggacaaaatcagaaccacattcctgggaattgatcttcccaatagaggtatgtggtcctaataatggttttgaaatgtggagttctgagtgggcaaatcaaacttcatggcatttgagtttccttattgacaatcccaaacagtctacagtttttgatattctcttgggaatctctcaagattttgaaattgctggtaatactcttatgccagctttttctgttccacaggctactgccagatcttctgaaaatgcggaatcctctgcatgatctggaatttgtgttttctttcgcttgttcgtttgtttaattcaat

SEQ ID NO: 32413 - DNA, 397 bp, Glycine max
  Clone ID: LIB3138-031-Q1-N1-D2
ctttcattatctgtttctgcgctgaggcaatttggatcgaatttttcatctttaatttgggtcttttgaagcagaagaatggacttctttactagagacataaatgaggactctatgcttagatgtccattcttgaggaacatcaatgagcctactaacttctcattcttttcacctttggctttaccaatgcctgttcgtggagctaaaggtccaatttttgaagatggtcccaattttgatttggcatttaggcttttccacgggagtgatggtgtagtacccttatctgacagatcttttcggccttctgagaagaaagtacaggcagaacctcccaaatcccaattcaatcctttagctgcaaaggcagcaactattagtctgtcatcatttg

SEQ ID NO: 32414 - DNA, 376 bp, Glycine max
  Clone ID: LIB3138-031-Q1-N1-D4
gtgatttcagagctgcaatggtgagtaaaaatagcaagcctcaagctactgcaatgcatgtgggagctatagaaattatcattgatagtttcgcaagtcctgattgcaacatagttggtgcaatgcttttggttgatacttatcataccaatcctgaaaatgcagttcgtagtatttttgttgcgcctttcagaggcggaaggcccattcgggtggttacatttccgaataccattgtgcagattgaaccagacatgaattcaaggtttcagcttttgagtaccactaccaatggtgattttgttcaagggaaagatctcgcaatggttaaagttaatgtagcatgtgctgctgttggcttgacatcaagttacac

SEQ ID NO: 32415 - DNA, 375 bp, Glycine max
  Clone ID: LIB3138-031-Q1-N1-D5
gaggagaggagagaagagaggaagttttggggtttgaatctatagaatagaatcaaaccaaattgaaagaagatcgatcgatcgatcgatggctctggtcggagttgaagtgaagcatgcggcggagggcgcaccggaggagaattgctccgccaagcccaccaagcagggcgagggcctccgccactactattctcacaacatccacgagcatcagctccttctccgtcaaaagacgcataacctcaaccgtcttgaggctcagagaaacgagctcaattccagggtgaggatgctgcgcgaagaattacagcttttgcaggaaccaggctcttatgttggtgaagttgtcaaagtcatgggcaagaacaaagt

SEQ ID NO: 32416 - DNA, 391 bp, Glycine max
  Clone ID: LIB3138-031-Q1-N1-D6
gcctcattggtacaagtgtttttaacaaacagcaacagtacagagcattttgatgcatgtaagtggacaaaatcagaaccacattcctgggaattgatcttcccaatagaggtatgtggtcctaataatggttttgaaatgtggagttctgagtgggcaaatcaaacttcatggcatttgagtttccttattgacaatcccaaacagtctacagtttttgatattctcttgggaatctctcaagattttgaaattgctggtaatactcttatgccagctttttctgttccacaggctactgccagatcttctgaaaatgcggaatcctctgcatgatctggaatttgtgttttctttcgcttgttcgtttgtttaattcaataaaggaaat

SEQ ID NO: 32417 - DNA, 395 bp, Glycine max
  Clone ID: LIB3138-031-Q1-N1-D7
ctcgagccgctctgagagaccctttgggaggaaacgccagaaaacccaaagttttgttcttcctctctttgcaatctctacacagaagatttatggataaaatttgcaaatttggttcactgcagcactgttccgtcgcaaatttcttccaccgacaagtgtttgacttcgtggttccgtcgctttttcaacccttcgatagattcattccttggttacgctttctggctctcaaataacattcaagctaccctctttgtcttgtaattttcttctgaattgaaaaaaaaaagttattgacttggatgttttgcaagcaaggcctccagattgtggctttctgagttctaaatctgctcaagtcttaagacagagagattgcaaagtgatttgag

SEQ ID NO: 32418 - DNA, 334 bp, Glycine max
  Clone ID: LIB3138-031-Q1-N1-D8
aattgaagttgaagtcttgcccttctctcttcaactccaaacacaagacatcatcatccatggctgcctccgtctccactgtcggagctgtcaacagagctcttttgaacctgaatgggtctggacctggggtttcagctcccagttcatccttctttgggagcagcttgaagaaggttattggctcaagggtccccaacacaaagatttcctctggaagcttcaagattgttgctgtagaagagaagaaagagattgaagagacccagcagaccgacaaggacagatggaagggtcttgcctatgatatctcagacgaccaacaggacatcac

SEQ ID NO: 32419 - DNA, 227 bp, Glycine max
  Clone ID: LIB3138-031-Q1-N1-D9
caagatgatcaaagccaagaggtacgtgcagttgagaggagagtgcttttggaaaccttggctagtcagctacctcgggatagcgttcaatattcttcacaattgcaaaggattgaagccagtccaaacggggataccttgttggaacttgtggatgggtctaagctgcttgcaaggattgggatagagtgcgatggaattcgatcaccaatagctaaatggatggg

SEQ ID NO: 32420 - DNA, 368 bp, Glycine max
  Clone ID: LIB3138-031-Q1-N1-E1
caaatggcaacagtgagaacaccattgaattttgattctagcaagcagagcttttgtcagttttctattgaccttctcggtggaggaatcttagtggacaaaactggagattggatcacacttatacaaaattctccaattagtaacttgttgagagttgctgcttggaagaaaggctgtttaatggtcaagattgtgatgtctgggaatgcagcagtcaaaaggaatgattgggcctcattggtacaagtgtttttaacaaacagcaacagtacagagcattttgatgcatgtaagtggacaaaatcagaaccacattcctgggaattgatcttcccaatagagggatgtgggcctaataatgggtt

SEQ ID NO: 32421 - DNA, 242 bp, Glycine max
  Clone ID: LIB3138-031-Q1-N1-E10
aaaaaaaaaaaataaaaaaaaaaaaaaaaaaaaaaaaaaaaaaaaaaaaaaaaaaaaaaaaaaaaaaaaaaaaaaaaaaaaaaaaaaaaaaaaaaaaaaaaaaaaaaaaaaaaaaaaaaaaaaaaaaaaaaaaggggggggcccccccttttgggccttttccccccggaatttatttcgggcccggtccctgggggggacccatttttccttatagggggccgttttaaagctgggggaaa

SEQ ID NO: 32422 - DNA, 387 bp, Glycine max
  Clone ID: LIB3138-031-Q1-N1-E11
cggctcgagatcagaaccacattcctgggaattgatcttcccaatagaggtatgtggtcctaataatggttttgaaatgtggagttctgagtgggcaaatcaaacttcatggcatttgagtttccttattgacaatcccaaacagtctacagtttttgatattctcttgggaatctctcaagattttgaaattgctggtaatactcttatgccagctttttctgttccacaggctactgccagatcttctgaaaatgcggaatcctctgcatgatctggaatttgtgttttcttttgcttgttcgtttgtttaattcaataaaggaaattaggcatgaccctcttgttgagtatgctctgcctatttgaaaatttccacacctcttt

SEQ ID NO: 32423 - DNA, 388 bp, Glycine max
  Clone ID: LIB3138-031-Q1-N1-E12
agctgatgtgcctaccatagcacagattgaagagttccattcgatgcagaggatgatgaatgctcctgattcaaatgataatattgatttactgttgagcattgatttgttgggtttacaaggagcaggtaaagcttttccaaacaaaattgtttttgatgataagcttgtgttggctaacacacaagaattctttgatggaaattttccagtggattcttggttaccaatttttgtgaattgtctttatcctgtaagtcaattaccttcagaagctgtcgttgtaaatgttacatgtggtagtggacgctgggtttacccaccactgcttggattagttctgcagttaacaatcgctcctcagatatcaacaaaaggattcgcacag

SEQ ID NO: 32424 - DNA, 258 bp, Glycine max
  Clone ID: LIB3138-031-Q1-N1-E2
ctctcttcacttatcatcatacttatatattatataacccaataattaaattaaatacatgttagcactttaacattcctttctctaacctcgttcccactctcatattttcccttctgctgatattcagctaaactaagtcaataagatgactcagggaaagatagttgaagctgcagaagctcataaaacacttgaggatttcgatcctccaaagaagcgcaaaaggaacaagtatgcttttgcttgtgctgtgct

SEQ ID NO: 32425 - DNA, 355 bp, Glycine max; identical to SEQ ID NO: 32350
  Clone ID: LIB3138-031-Q1-N1-E3

SEQ ID NO: 32426 - DNA, 236 bp, Glycine max
  Clone ID: LIB3138-031-Q1-N1-E4
gattgggcctcattggtacaagtgtttttaacaaacagcaacagtacaaagcattttgatgcatgtttgtggacaaaatcagaaccacattcctgggaattgatcttcccaattaaagtttgttggccttattatgggtttgaaatggggagttcttaagggggaaaatatacctcatggcctttgagttttcttattgtccattcccaacaggccacagtttttgatattccctt

SEQ ID NO: 32427 - DNA, 281 bp, Glycine max
  Clone ID: LIB3138-031-Q1-N1-E5
ttttggcaaagactaaaagctattataaaattctgagccatggatatctagggaaaacttcatgcaattaggttaactcagacggtctgaccttaagatgaagtggtctcttttagctatgccttctattgtccgacttatgcagttccatagagaagatgtttagttgaatcatttgcctaagctaattgaattattattatttttgttttctttgggattatgctatacaaattactgatctttgaatttagagtttgcgtgcctccccatttatggtt

SEQ ID NO: 32428 - DNA, 384 bp, Glycine max
  Clone ID: LIB3138-031-Q1-N1-E6
aaatcaaatagtaatgtggttcacttttaagttttgccatgtaacctgtgcattctaaaatacttttgcactggttcacttttgatgtctccattaattgtttttcttaatctgacaaatattgcacatttagtaggttgtaaatggtcttctccaaagagaggattgggatacggcaataaagatgccccttggggtagttcctgcaggtacgggaaatggcatggcaaaatctcttcttgattcaattggtgatccttgtgaaagagcttatgccgttcttgccattatacgaggcagttaacgaccgcttgatgtagctaccatcacacaaggggaaaccagatttttcagtatattgatgctcgcatggggtaattactc

SEQ ID NO: 32429 - DNA, 285 bp, Glycine max
  Clone ID: LIB3138-031-Q1-N1-E7
atcaactctttcaaaggggagaacaaaaggaaagggaactgaacgcacaacggattattatagcaatggcctaacataaccaaagccggacaactgaagctggaaggctcctataggttgtacacaacatccttctccagagtgatgctctttaccaatatattgtggagaccaacgtctacccaaaagaacctggatgcatgaaagaactgtgcgagttgtcagctgaacacccatggtacatgatgacaacctgtgcagacgaaaggcaattattgaacatgc

SEQ ID NO: 32430 - DNA, 304 bp, Glycine max
  Clone ID: LIB3138-031-Q1-N1-E8
ggccctgctaactggcaaagctcccaacactcttggatctatgagtaaatcatatgcctcaagttgatcttgaaattgccttaaggtgatccagattatctacatgttttctgtttctgtccgttgttggacttttttgtttaagagtttggtaccttggcttgcatttcaggctctatttatgtcacagtttgataaattaaatcccagaccagttttgcttttaccttgttgattgttaatgttttttcctatgagccatttttgaggatgcagatgcaattacattataatattccatcct

SEQ ID NO: 32431 - DNA, 390 bp, Glycine max
  Clone ID: LIB3138-031-Q1-N1-E9
ataaacatggcttgttcaagtggaacatcttcagggtcattatctctgcttcagaactctggttctgaggaagatttgcaggcgatgatggaagatcagagaaagaggaagagaatgatatcaaaccgcgaatctgcacgccgatctcgcatgaggaagcagaagcacttggacgatcttgtttcccaagtggctcagctcagaaaagagaaccaacatatactcacaagcgtcaacatcaccacgcaacagtacttaagcgttgaggctgagaactcggtgcttagggctcaagtgggtgagttgagtcacaggttggagtctctgaacgagatcgttgacgtgttgaatgccaccaccacttgggcgggttttggagcagcagcatcg

SEQ ID NO: 32432 - DNA, 374 bp, Glycine max
  Clone ID: LIB3138-031-Q1-N1-F1
gtaaactcatactaagccaccacccttcactttccatcaccattcttttcctaaccccaccccccaaccaagacacccccaccttccccaccggctttacctgcgacgccaccgccaaatacatcgtcggcgtaccggcttcacccccttcattacctttcaccgcattccccagatctccgtccccaccgttcttcctcccatggccctcaccttcgagctctggcgcgccaccgggcaccaccttcgtcgcattctcaactccatcttccaaacctcaaacctcaaagcaatagtcttggacttcatgaactacagcgccgcacgtgtcacccacgcgcttcaaatccccacttacttctactacactttcg

SEQ ID NO: 32433 - DNA, 248 bp, Glycine max
  Clone ID: LIB3138-031-Q1-N1-F10
ttataattaggcttttaattataataacaatcaatcaacatgctgcagaagggttggcgaaggggttgaagaagcgaggcttatgagccatggccaatggcgtcttacgggaaccgtcgccgtcaccggtgatgccgtcgacgttcctgtcacaagaggggcacatggtgagtgttgccgaatgcataggcatgtccagaggctgcaccatactcagcgctttaatctcttgaagctccttgtgtgac

SEQ ID NO: 32434 - DNA, 389 bp, Glycine max
  Clone ID: LIB3138-031-Q1-N1-F11
ctcacatggcggcagcaaccacaatttgctacggtccctcctcttatattcttcttggctcaaatttacttagacagggacacttgaaaaacacttcatttgctcatcgtttttctccttcaagatcattcctttgtaacggatttgttcccaggaaacctgttttgggaagaaactcgttctgggtatcaaaaaccatggatgaatccgcgagaacttctgctttcagagatggaaaaggcgatgaaaccatccaagtgtttgaacaagaagctttcatcgatgggtcaaccccgtttcagtccaagtttctgtccccggaggtggaatacaacctcaatcgaatgagcaagtggatagtaactgccctctttggcggtttcattctt

SEQ ID NO: 32435 - DNA, 381 bp, Glycine max
  Clone ID: LIB3138-031-Q1-N1-F12
gaattgtatttgcacagtccagaggaagctcgccaattgagaaggaaagctctctctcgtattgaatggctgcaaaaagctgatgtgcctaccatagcacagattgaagagttccattcgatgcagaggatgatgaatgctcctgattcaaatgataatattgatttactgttgagcattgatttgttgggtttacaaggagcaggtaaagcttttccaaacaaaattgtttttgatgataagcttgtgttggctaacacacaagaattctttgatggaaattttccagtggattcttggttaccaatttttgtgaattgtctttatcctgtaagtcaattaccttcagaagctgtcgttgtaaatgttacatgtggtagt

SEQ ID NO: 32436 - DNA, 271 bp, Glycine max
  Clone ID: LIB3138-031-Q1-N1-F2
ctcgagccgtggttgtcaaatggagggaatttcaaatgaagcatgctcacttgccggtcactggggtctaggaaagctcattgctttatatgatgacaatcacatttccattgatggtgacactgagattgcattcactgagaatgttgatcagcgttttgaagcacttggatggcatgtaatttgggtgaagaatggaaatactggatatgatgaaattcgtgcagccattaaagaagcaaaggctgtcaaagacaaacccactttgatc

SEQ ID NO: 32437 - DNA, 317 bp, Glycine max
  Clone ID: LIB3138-031-Q1-N1-F3
gatgatttatatgtattggtatcaatttgggccgtattgatcctccttcatcatagctgcccaccaagtatttgatgcattgcccaactgatatcctcccccacatccagacttctacccaattccaataccatattagaaagagaacatcaactatcaaatcttaacaaagtattcacgagttatcacccaccccttttcctctttgtctctgcatcgcctcaagatgacctcatccgagacccttgcattcatggagctcgccatacaacaggcaaagttagctttggatgttctttgagtgccccgtggatgtg

SEQ ID NO: 32438 - DNA, 192 bp, Glycine max
  Clone ID: LIB3138-031-Q1-N1-F4
gccctcggaacgcgaccccggtgcttgtatgatacttgcagagcttgctgagaaggctggcttccctccgggcgtcatcaacattgtacatggtgcggctaaaacggttgatttcatcatcgacgaacctcgcatcaaggcgattagcttcgtcggtagcaacaaggctggagagtacatctactcgcgcgc

SEQ ID NO: 32439 - DNA, 390 bp, Glycine max
  Clone ID: LIB3138-031-Q1-N1-F5
gagatattttgttggagatctcgtctttgaagtttctaagatgacttctccctacattaaatgtacagtctctttcttcatagcatttggaaatttggctgatgataccatcaattttgaggcttttccccacaagctggtgcagtttggagagattcaggaaaaagttgtattgaaattttcacaagaggaatttcttacagcttggtcaactcaggtgcgtcctgcaacaactctgttggctgatgggtgtccatatttgtatgcaatggtgcatgatagttcagtgtctacaataccaggtgattttgtcattggtgtcaagttgacaaccataaacaatatgtgtgcatatgggctcaatcctggtatttcaggttctcgtctttt

SEQ ID NO: 32440 - DNA, 393 bp, Glycine max
  Clone ID: LIB3138-031-Q1-N1-F6
ggcggaggtggggcccatggctgaggctgtgacatgcaccccaacagagttgagtccgtgtcttccagcaatcacttccggtgctaaaccttccaatgcttgttgcacgaagctgaagcagcaaaaaccatgcttatgtggctacctcaaaaacgctagcttgaagcagtatgttaactctcctaatgcccgaaaaaccgttgcttcttgtgggattccctttccaacttgttaattaattaagccttcttataattaaagtgtgggatatatatatatatatagataaacagtttaatttatacacactttgatcctacaaagcatcttgacacaagcattcaataggatttcaccactttatcgcaacattttaacatgatgcggtaataa

SEQ ID NO: 32441 - DNA, 125 bp, Glycine max
  Clone ID: LIB3138-031-Q1-N1-F8
ctcgagccggtttaattcaataaaggaaattaggcatgaccctcttgttgagtatgctctgcctatttgaaaatttccacacctcttttaattgtcgtaatgatgtgtgaagtgtgtgttatttt

SEQ ID NO: 32442 - DNA, 384 bp, Glycine max
  Clone ID: LIB3138-031-Q1-N1-G1
cttttccttcttttatgcttaaattatcaccatgaacgactcattaatttcagctgcgcaagtcggtgacatagacttgctctacaaattaattcagatgcaaccatatgtgttggagcaaacagatttcatgccatttgttgatacacctttgcatgttgcagctgctgctggccatgcaagtttcgccactgagatcatgagactcaagccttcatttgcatggaagctgaatccgtgtggccttagccccatgcaccttgctttgcagaacaagcattacagaatggtgtgtcgctttgtggacatcaacaaaaaccttgttagagtcaaaaggagggggggtcttactcctttgcatttgcaactcaaaccgggagaact

SEQ ID NO: 32443 - DNA, 339 bp, Glycine max
  Clone ID: LIB3138-031-Q1-N1-G10
gggtgagtgcgaataaagtgagctggtgcgaccaacgagggttggggtgacccctctttcacgtctcgtacaagctctcatcttctctaagcctttctactctgttctcaagcttgctgctagaatggctttgataagtgcagctgataagaacaacataccgtcggggctattggcgaacgagattttagagtccgtagttgatagggagctggacatcattcaaaaccagtatttaccgtaccctgattattatcagaatccattccatgcatatgatgagggcgatctgacatggctggcggctgcatacgcagaggctgctacattgtcgatagc

SEQ ID NO: 32444 - DNA, 326 bp, Glycine max
  Clone ID: LIB3138-031-Q1-N1-G11
cggctcgagacctaaatggagcagcacagaaattaggaatcaggagcctcataccaatggtcctgttctggatgatgttttgctagcagacccagagattgcctatgccattgaaaatgaaaaggtggttaataagaccataaaaatatacaacattgatcgtgctgcatgtggacgtatagctggtgtcattgcaaagaagtacggtgacactggttttgctggacagttgaatataacatttacaggaagtgctgggcagtcatttgcatgctttctgacacctggaatgaacattcgccttgttggagaggctaatgattatg

SEQ ID NO: 32445 - DNA, 366 bp, Glycine max
  Clone ID: LIB3138-031-Q1-N1-G12
tgttagtccaggtactgttccagtgtaccatggaacaaaacttaaagtgttggataggagggtgaggataacagagctggtgttaaggtgtgtgagccttggtcttggagttgttgcaattgttcttgtggtgactgattcccaagtcaaagagtttttctcctttcagaagaaagctaaatttacagacatgaaggctttagtgttcttggtagttgcgaacggactaactgttggctactccttaattcaagggttgcgctgtgttgtgagtatggttaggggaaatgtacttttcagcaagcccttagcttgtctcattttctctggtgatcaggtgatggcatatttgacggtggctgcagt

SEQ ID NO: 32446 - DNA, 307 bp, Glycine max
  Clone ID: LIB3138-031-Q1-N1-G2
cgctgcttcactattctccctatggagtttaatcttgtggtccgtcaaaagtttttaaattttgtgaggttcattatgaagaaaagggacaaacttagttgtcaagttggaatcaacccatactccatggaatggactggtttggccaatagattactgagtaagggcaatgatattctgtgttgcgattatgctagttttgatggtttgattaccaagcaagttatgagcaagatggcagaaatgataaacagtctttgtggtggtgatgaaaaattgatgcgtgaaaggacgcacctgctgttgg

SEQ ID NO: 32447 - DNA, 396 bp, Glycine max
  Clone ID: LIB3138-031-Q1-N1-G3
actactactacttttaccaccttaacccaacccaaccacattatcaacatgtctgacattggacgacagtcgctcggagacaaggccggagccgccctcaagcccgactcgcagaagacctacctcgagcaggccggcgacgccatcaagggcaaggccgactccgccgccttcaccggacagccggaatcccagaagtcgtacacccagcaggccggtgacgctctctcgggcaaccagaacgagaacaagggctcgctcctcgactctgccaaggacgcccttggtatgaacaacaacaaccgagcttaagtcgatcgttatcggtccggcgccggttggttgatcggagggaaagaggaagaagacattcagtagcctttattactatgagat

SEQ ID NO: 32448 - DNA, 390 bp, Glycine max
  Clone ID: LIB3138-031-Q1-N1-G5
attgactttcccccagggcacttcccgaagtgttaagagaatgcctctttctatagggggaggagctggtgcaaagaatgctattctcatgaatatgccaaatgctgttctttcaatgtggagatattttgttggagatctcgtctttgaagtttctaagatgacttctccctacattaaatgtacagtctctttcttcatagcatttggaaatttggctgatgataccatcaattttgaggcttttccccacaagctggtgcagtttggagagattcaagaaaaagttgtattgaaattttcacaagaggaatttcttacagcttggtcaactcaggtgcgtcctgcaacaactctgttggctgatgggtgtccatatttgtatgcaat

SEQ ID NO: 32449 - DNA, 391 bp, Glycine max
  unsure at all n locations
  Clone ID: LIB3138-031-Q1-N1-G6
ggaaaattgaaatacatctactaagcattagatatatatcccgaaacgatgaaggctattattgttttcttcttactcttggcctctgttttttttccttcccagttcaactcttgctcgacaactactgcagaaaggaggggtgactggatgtacatcgaacccgaatataccttgctatccgccaccaaaacgagcatgtcctatatatattcgtaattgctgacgaaaattatatgtttctggactctaaagtttcactcaaatcgaggggagaagcaattaatgtcatgctgctatatatatatatatatnagttttatttggtgcctcatctttctaacactattcctgtgttaaaactcggtggtgtcacatctttgctttaaaa

SEQ ID NO: 32450 - DNA, 393 bp, Glycine max
  Clone ID: LIB3138-031-Q1-N1-G7
cggctctcctcttttctcctctctttccttttgcacaacgtttcctttcttaacgctgtgcgccttgttaccccatcagtttttgtttcggagtagttctccaagtcgttcttttgcaggcctggcgccaggaagaaacaacagtcgttcactcgtttgtgcattgcatcactcacgttccttacagcagctgttccgggtagtgctggtatagacaaagaggttattggcccatctacgcagcgtagttacaccattgtgtcgaaacatttccctcgacattgaattgcatgccaagtgggcgcgcaccaccaacgctctgggaaagttgacagcaagagctttggaatttggttgtctacggcaacgcacagtcagcgggacatcacagtg

SEQ ID NO: 32451 - DNA, 388 bp, Glycine max
  Clone ID: LIB3138-031-Q1-N1-G8
gttacaattgattggtttatttcctctcaggaatgtgttcccaggacctattgtgttttaaatccacaaaatccttttgtgttaaataggtggatgggaaaattgactttcccccagggcacttcccgaagtgttaagagaatgcctctttctatagggggaggagctggtgcaaagaatgctattctcatgaatatgccaaatgctgttctttcaatgtggagatattttgttggagatctcgtctttgaagtttctaagatgacttctccctacattaaatgtacagtctctttcttcatagcatttggaaatttggctgatgataccatcaattttgaggcttttccccacaagctggtgcagtttggagagattcaggaaaaag

SEQ ID NO: 32452 - DNA, 392 bp, Glycine max
  Clone ID: LIB3138-031-Q1-N1-G9
gatttgttgggtttacaaggagcaggtaaagcttttccaaacaaaattgtttttgatgataagcttgtgttggctaacacacaagaattctttgatggaaattttccagtggattcttggttaccaatttttgtgaattgtctttatcctgtaagtcaattaccttcagaagctgtcgttgtaaatgttacatgtggtagtggacgtggtggtttacccaccactgcttggattagttctgcagttaacaatcgctcctcagatatcaacaaaaggattcgcacagcacttgggaaaggtaagaaaattgtttttcttactagagttgatccttttccagtagctttactggctgttctttttggcgttaagaatgaaattctgagttctaa

SEQ ID NO: 32453 - DNA, 387 bp, Glycine max
  Clone ID: LIB3138-031-Q1-N1-H1
cgacaaccaattcacattactgaaggaaattatgtcagaaagcaagatgtcagcattgaatatgatgcatgtacaattccaaatgattgtggttcattggttgttgccaaggttggaaatcacaaacaaattgttggtttccatgttgctggaagcaaaggaagactgggatatgcttcattgataccatatgttgagccagttgtgcaagctcaaagtgctgaagtttactttgacttcttccctgtggaggttgatagtcaagagggagttgctcacattggtgaactgaaatctggtgtctatgttccactgcctacaaataactaatttggtggaactcctaaggaatggcaactggatctaccttgtgacaaaaattctagt

SEQ ID NO: 32454 - DNA, 276 bp, Glycine max
  Clone ID: LIB3138-031-Q1-N1-H10
ccaacacattgaagaagagaaaggagttttctcacatctggctgatggagtacctcaagctgctcatggctaccctccaggggcataccctgcacctactggggcatacccttcttaccaagggtacccacctgctcatggttaccctccacaaggcggctatcctccagctgggtatccacctgctggctatcctcctgctgctgggggttacccacctgctggttaccctgcacatggatatcctggatcatcgtgctccacatgaatctcatg

SEQ ID NO: 32455 - DNA, 379 bp, Glycine max
  Clone ID: LIB3138-031-Q1-N1-H2
attagattggtggtaatggcagcgtcactacaagcagcagctactttcatgcaacccaccaagttgagcaggagcaacactttgcagcaaaagtctactcagtccatttccaaggcttttggtttggaacctgttggagctaaaaaggtcacatgctcccttcaggctgatcttaaggacttggctcacaagtgtgttgatgctaccaaaattgcaggattcgcccttgccacctctgccctcgttgtctctggggcaagtgctgaaggtgttccaaagaggctaaccttcgacgaaatccagagcaagacctacttggaagtgaaggggacaggaacagcaaaccagtgcccaacaattgatggtggattggactcat

SEQ ID NO: 32456 - DNA, 396 bp, Glycine max
  Clone ID: LIB3138-031-Q1-N1-H3
acctaggcaagcgatgtgggtttgtccaattcgcagacaggagctgtgccgaagaggcacttcgggtgttgaatgggaccctgttgggtggtcaaaatgttcgtctttcatggggccgcagtccttcaaacaaacaggctcaggcagatccaaaccagtggaatggtggtgctggttctggtggtggatactatgggtatgctgcacaaggttatgaaaattatgggtatgctcctgctgctggacaggatcccaacatgtatggcagttatccggggtatcctggttaccaaccacctcagcaacagcaacaaataggatatagttgagaagagaatgttccttttcttctgtaatcttttgtgatacttatcgagttgcgtgtctcttctcgtc

SEQ ID NO: 32457 - DNA, 328 bp, Glycine max
  Clone ID: LIB3138-031-Q1-N1-H4
gtttccaacacaacacaaagactttctcaaacaaaaccagacggttatctagtcttccaatcttccccctattccctgttcctattcctattttatcaatcaataacataaataacacttcttcttgccttttaatatatttttctctcttcccctcttgtttcacctttcaacacttaattagagacgacccactttccttgcagatctttttccagggaaaagtttggatgttttgtggtaagagttagatgttgagtgatagacggaaaggttgaggtggagctggattatatggatagtctttgttgcttcagctctgtcagtc

SEQ ID NO: 32458 - DNA, 317 bp, Glycine max
  Clone ID: LIB3138-031-Q1-N1-H5
ctggtttattcgcagcccttgtgataagcaacaggcgtgtctggttatgatacttacaagctgcctatcaaaagatgagccggagaacagcttgtcatcagatatctcagacagctggtaagggcctcttaaagattactcatctttctgtagctctcatgaatgcatgactctctgtctttgaggacctgatatttaattgggaggcttcatattctcccgcatttatttcccaatgtgcattctgaatattgacttaacaggtaaagaggctcttgatcagatccaactatcatactcagtctttcctttgtcaa

SEQ ID NO: 32459 - DNA, 379 bp, Glycine max
  Clone ID: LIB3138-031-Q1-N1-H6
agaaaagggacaaacttagttgtcaagttggaatcaacccatactccatggaatggactggtttggccaatagattactgagtaagggcaatgatattctgtgttgcgattatgctagttttgatggtttgattaccaagcaagttatgagcaagatggcagaaatgataaacagtctttgtggtggtgatgaaaaattgatgcgtgaaaggacgcacctgctgttggcttgttgttcaaggatggcaatttgtaagaaagaatgtttggagagttgaattgtggaatccccttcttggattttccgctcacagttattttgcaaatagcattttttaaatgagaatgctcattaagatattagctatgaaaaaattac

SEQ ID NO: 32460 - DNA, 359 bp, Glycine max
  Clone ID: LIB3138-031-Q1-N1-H7
cgaatatgtcaagccttactttcatggcactaacttgaaaagccaactaactagatattacatacaccattactgatcgaatcgaaacactagtgcaccttgctattacaaaccatcagattgtattttccatgataaacttagcaacaccaatgatttatggtgatacccggaccaagcacttaaagcaaacttactattgtcacgtacatctgcaatgcacaacttatatacaatcccgcgacaccttactataatcgaactccactatccacactaagctaacgcaacgaaaaggaaagctctctctcatacttaatggatccagatcactgatctgcctaccataacacatattg

SEQ ID NO: 32461 - DNA, 388 bp, Glycine max
  Clone ID: LIB3138-031-Q1-N1-H8
gtcatttaatccaaacccgtgttctgatgcatggagtttggaatttctgaagcgtactggatttcattgcgatatcatttgtgtcactggatggactgccaccccaatgcaggatgttcaggttacaattgattggtttatttcctctcaggaatgtgttcccaggacctattgtgttttaaatccacaaaatccttttgtgttaaataggtggatgggaaaattgactttcccccagggcacttcccgaagtgttaagagaatgcctctttctatagggggaggagctggtgcaaagaatgctattctcatgaatatgccaaatgctgttctttcaatgtggagatattttgttggagatctcgtctttgaagtttctaagatgact

SEQ ID NO: 32462 - DNA, 376 bp, Glycine max
  Clone ID: LIB3138-031-Q1-N1-H9
cctaccgagtcgtgtgagctacctgatctactggagcgttccgagttatatacctcaccagacacttgctagtcagctgcttgatcacccgcgcaacatggacaaccttggtacctcccccaccgacaccgagaagtccatcgaggtcaacgatgcgctcttctgcgagcacggcctcgaagtctgcaagacgtgcgagtttgacggacgagaggacaacgacgcaatgatgggcctcgaccccaagccgcgaggcccgctcgagatgcccgcatactacaagaacaccaaggacggtcagatcatgtgcaaggcgcacgccaactcgaactgcaagtcatgcttcggctggaagaagatgatcgtcaagcttcag

SEQ ID NO: 32463 - DNA, 410 bp, Glycine max
  Clone ID: LIB3138-032-Q1-N1-A10
caagggttgtgaaagcagagaagtgagatacactaagttatcctcataaatacactctaattaggtggcaagataagtgtctaaccttagtaacattgccacatattgtgttcattttggaattgtgccactaaaattctattcaattcatctatggctgcctcttcttatgctatgcaatcaatcctggcaaaccctttgatccgcatttccagcgggtctagggtgaaccaatttggcgttcctgctttgcacatgagaaggaatgttggcctgagagttaggtccatggctaaggaagaacaaccaagtgagcctgcaaccccagttacaccgccaccatcagtagaacccaagccacagccagtctctgctccttcaccaaaggtgagcactaagttttctgatgt

SEQ ID NO: 32464 - DNA, 415 bp, Glycine max
  Clone ID: LIB3138-032-Q1-N1-A11
ctcgagccgaatcggctcgagctcactcagtaaacaatgggcgacttcacggttgcgttaaaccctcccaaaaccttccgcgccgatattctcctatccaccaccaacaaccgcacttccccggcggcgcgtggctttcaaaccgtactcgcgttcaaaccaccgcgcgcttttcgaggaatccgcgcttcggtgatgccaagagagggtcaacaagcgtctctcggagacgcccttgtcaacactccgcgccgaagcgacttcgttgaggccatcagaagaaccgccgcactctccagctgcctctcagaaacgagcctccacgccaccgttcccggcctcgagtccaaaacccgcggcaaagttcgagatatatacgacgctggggattacctcgttttggtgaccactgatc

SEQ ID NO: 32465 - DNA, 163 bp, Glycine max
  unsure at all n locations
  Clone ID: LIB3138-032-Q1-N1-A2
attaaaaatatactgataaagatagaataagagagagagagagagaatggaagggagagagagttgtcacccattgctgagaggaggtaggagaagagaggagaaaggttacaaccatggcttatccaccactcagatgcatgtcatggctgncatatgtgat

SEQ ID NO: 32466 - DNA, 351 bp, Glycine max
  Clone ID: LIB3138-032-Q1-N1-A3
ggccaccataaacaatatgtgtgcatatgggctcaatcctgggatttcaggttctcgtcttttgggcaccattcctcagtccatttcacagcaaactgtttggaatcaaatggcaacagtgagaacaccattgaattttgattctagcaagcacagcttttgtcagttttctattgaccttctcggtggaggagacttattgggcaaaactggagattgggtcacacttatacacaattctccaattagtaacttattgagaggtgctgcttgtaagaaaagctgcttaatggtcaacattgtgatgtctgggaatgcagcagtcaaaaggagtgattgggcctcattggt

SEQ ID NO: 32467 - DNA, 369 bp, Glycine max
  Clone ID: LIB3138-032-Q1-N1-A4
gtgctctgctcgtgcctctagggttatcatatctccatttccatttcctctctctcagtttccaagaatcttaagctatgggaaagtcttacccaaccgtgagcgctgattaccagaaggccgttgagaaggcgaagaagaagctcagaggcttcatcgctgagaagagatgcgctcctctaatgctccgtttggcatggcactctgctggaacttacgacgtgagctcgaagaccggtggtcccttcggaaccataaagcacccctccgaactcgctcacggcgctaacaacggtcttgacatcgctgttaggcttttggagccactcaaagcggagtttcctattttgagctacgccgatttctacc

SEQ ID NO: 32468 - DNA, 324 bp, Glycine max
  Clone ID: LIB3138-032-Q1-N1-A5
ggaagctatacagtcgagaaggactgttctatcttgatttgcatgggtgcaaaaagctgttgcgcctaccatagcacagagaggagagttccattcgatgcagacgatgatgaatgctcctgattcaaatgataatattgatttactgttgagcattgatttgttgggattacaaggagcaggtaaagctttttcaaacaaaattgtttttgatgataaacttgtgttggctaacacacaataattctttgatggaaattttccagtggattcttggttaccaatatttgtgaagtgtatttatcctaggagtcaattaccttc

SEQ ID NO: 32469 - DNA, 407 bp, Glycine max
  Clone ID: LIB3138-032-Q1-N1-A7
aaaagaaagaatcccaggcgaggagaaagatggaggggaaggagcaggatgtgtcgttgggagcgaacaagttccccgagagacagccgattgggacggcggcgcagagccaagacgacggcaaggactaccaggagccggcgccggcgccgctggttgacccgacggagtttacgtcatggtcgttttacagagcagggatagcagagtttgtggccacttttctggttctctacatcaccgtcttaaccgttatgggagtcgccggggctaagtctaagtgtagtaccgttgggattcaaggaatcgcttgggccttcggtggcatgatcttcgccctcgtttactgcaccgctggcatctcagggggacacataaacccggcggtgacatttgggctgtttttg

SEQ ID NO: 32470 - DNA, 346 bp, Glycine max
  Clone ID: LIB3138-032-Q1-N1-A8
cgttaatcagccccaagagaaagatttgttggagggaaatttttcctttgatattaaatctcgctctagattggaaaaagtttcctctacaaaagcacaatttgttagtggaaaaaccttcaaatatgatataattggtgctggttcacattcttcagaagattttcctgaaaaggaagatcaagaaaaacccaaaaagattgatgccagattgagacaaagaatagatcctcaatacaatgaggttcaggctcagatggaaacaaatttgtttaaattggctcttgatgatggtgaaacttctaaaggttccatgttggatctgaaaatttttaatctaaaattg

SEQ ID NO: 32471 - DNA, 403 bp, Glycine max
  Clone ID: LIB3138-032-Q1-N1-A9
cccaaattaaaggcaagaaaagtgagagtggccatttcaataattttcaacaacttatggatttggcagtttcatggaatctcagtgcaaatatcatgaaggaacgaatcaaagctgataaaagtgatatggtttatgtcttctctgctggaaggaaggacaaaattgtacattgcttcttgaataaagaaggcgaatgtagtatacgtcctgactcaatagaagatccagaagcacaacttttgctcaaagcttcagaaactatgctcatgaaagcttatgcttttttgaagtacaacaatgcgaccaatttgattgtcaggacccatttggcagaattggtcaatgaagacttttatgatgaaaaatttaattttattggcacaattgggactccagcttt

SEQ ID NO: 32472 - DNA, 408 bp, Glycine max
  Clone ID: LIB3138-032-Q1-N1-B1
ccaacttccaaaccctataagtctacgcttttaattctctgtagctctctctctcaaatcggtgctcccttcggcggcgcgtgagggtttacagcggcgcgtgagggtgttattcgcccgttattccaagctccccgctgacctatgctttgtccgacccacattggatagttcacgccggatagaaggcggaatctcactggacggccgtgatttggcacctccatggcttccgccgtccttgctaatcggaacgaacctaattggcatcggcatagacgcggcggagctggattcatgggaaaaacacctttctctaaccctaattctaaattagcgaatatgcaagacgacccaatcggcatccgatgatgcttactctatcaaccggcgatcgaacgacgccct

SEQ ID NO: 32473 - DNA, 397 bp, Glycine max
  Clone ID: LIB3138-032-Q1-N1-B10
cttattattttttttttttttaatgtattttttagaatgagttatttttttttatttttatatttttttttaataaatattattattacatattatttttattcatgtaagttgacaaaattataaccacatttttgggaattgatctttccaaaaaaaaatatgggcctaataatggttttgaaaaaaagagttttaatgggcaaatcaaacttcatggcatttgagtttacttattgacaatcccaaaaaaatacattttaaaaaattctcttgggaatctataaaaaatttgaaaatgctggttatactataatgccagctgtttctgaaacaaagctactgtcagatcttctgaaaatgcggaattctattcatgatctggaatttgtgtttt

SEQ ID NO: 32474 - DNA, 415 bp, Glycine max
  Clone ID: LIB3138-032-Q1-N1-B11
cggctcgagcttgatgcaggagctggtcgtcttggtggaaccacacaatacactgtgaacaaccagatggtgaatgccactctcatgaacattgctgataaccccaccaatgtgcagcttccaggtatgtacaacaaggaagagaacccccgtgttcccatcattgtcaccggtaacgatttctcaacactctatgcacctctcatccgtgatgggcgtatggagaagttctactgggcaccaacaagggaagaccgcattggtgtttgcaccggaattttccgcactgatggtattcctgaacaggacattgtcaagcttgttgacaccttccctggccaatccattgatttctttggtgcactgagggccagagtatatgatgatgaagtgaggaagtggatttctggtgttg

SEQ ID NO: 32475 - DNA, 280 bp, Glycine max
  Clone ID: LIB3138-032-Q1-N1-B12
tattcgagctcgagcctaatcgtctcgagcggctctaggatttatagaaaggatttgtgtttggttggctgctgaattgaaagggaaatcaagcattaatgcgttgggagctatgagattgtattgattaacccgtggtgagccttaattacggtcggggttagatataaaaagccatttaattacttttaaaggctcagagtttacattcggagatcggttgtggggaaagaaaggcgaatgcttgactcttctaaagtttttatttcgcaacggaagt

SEQ ID NO: 32476 - DNA, 408 bp, Glycine max
  Clone ID: LIB3138-032-Q1-N1-B2
tgagtgatgaaggtggaaattggagcttgggacaacagcaactgttttgtcttggaagagtactacttaagaggaacagaatacttgttctagacgaagctactgcatcgattgactctgcaacagatgccattctacaacaagtgattagacgagaatttgcagaatgcacggttgtaaccgtggctcacagagttccaactgtaatagatagcgacatggtcatggtcctgtcctatgggaaactagtggaatatgatgacccttcaaaacttatggagaccaactcttggttctctagattggtcgctgaatattggtcgagctgcaggaagaactcctccccaaatattaacaggcagcaacattgaacaagaaaagggagtacaaacaaactgaaggaaaact

SEQ ID NO: 32477 - DNA, 412 bp, Glycine max
  Clone ID: LIB3138-032-Q1-N1-B3
gctaatatgtggttgatgttaacaaaatttaatcaggaacaaagctgaaggacttcttggccacaattgagtcatcttctacctttcaatcggagatagcaaagctccgccttgatgttgaggagtatgcaaaacaatttccaaccattggttttgataaagcaaccatgaagcacaagaattgagaaaagaaaattttccattaggtatgcgttattctttactcattttctcatttgtttattcttattcattttcgtttgtcccatattggttgacaaggtcatagacaagaggtagttagccacagaacttcaaaatggtgcactagagtagagactttgttcttttttcattcaaaaaaccttgtctactttatatacttatatttcatttcatagtgtccactcaa

SEQ ID NO: 32478 - DNA, 212 bp, Glycine max
  Clone ID: LIB3138-032-Q1-N1-B4
gccacgctgatactcaattctacagttagatgcttggaaatagtggctgctagtgacaagcgcttggcacatgccaaaattgagacgtgtgtgctggcacttttctaattgacgtgcttggtgcgtggagttacaggggacactaacattacatggcgggacacaaacaataatttcctgattgcggacataagaaaaactacattgccgag

SEQ ID NO: 32479 - DNA, 418 bp, Glycine max
  unsure at all n locations
  Clone ID: LIB3138-032-Q1-N1-B5
cggctcgagctcgagccgaatcggctcgagcggctcgagtgccaccccaatgcaggatgttcaggttacaattgattggtttatttcctctcaggaatgtgttcccaggacctattgtgttttaaatccacaaaatccttttgtgttaaataggtggatgggaaaattgactttcccccagggcacttcccgaagtgttaagagaatgcctctttctatagggggaggagctggtgcaaagaatgctattctcatgaatatgccaaatgctgttctttcaatgtggagatattttgttggagatctcgtctttgaagtttctaagatgacttctccctacattaaatgtacagtctctttcttcatagcatttggaaatttggctgatgataccatcaattntgaggcttttccccac

SEQ ID NO: 32480 - DNA, 415 bp, Glycine max
  Clone ID: LIB3138-032-Q1-N1-B6
agaaattgattacatcacacagcattagtatgtttcagcaacaacggtcagatccaacagagcaatcaccggcgaccggttttccggcgagctataacaattcaacaacgaattcgagcaacgaggcttcctacgctccagtcccacctacccagcccaaacctatagtggattggtccaccggcctttgtgactgcttctacgaatgtggaaactgttgcatgacgagaaggtgtacatgtgatacctttggcacgaatgcacaaattgttgacaagggatccacatcatgtggtgctagcgaggctctgtatacgctgatttgctgagtcattggctgcggctgactatactctcgcttctaccgccccaagatgagacgacagtatggtctaaagggaaatgggtgttcgga

SEQ ID NO: 32481 - DNA, 372 bp, Glycine max
  Clone ID: LIB3138-032-Q1-N1-B7
ggcacgacggcattatgaatcgagcaataatctggaaaagcgagaagcttgtcttgtcaacccagtgagtgtgtgacgtgtattggatttgcacagtccggacgaagctcgtctaatgaaaaggagagctctctgtcgtattgaacggctcgaaaaagcaactgtcctaccatagtacagattgaagcgttctatagcactcagactgtgatgaatgctactgatatacacgatagtatggatttactgacgatcattgatttgttaagtttacaaagcgcatctaaagttttttcgatgaaactagtctttgatgataagcttgtgtgggctaacactcatgattgcttggatggaaatattacagcggat

SEQ ID NO: 32482 - DNA, 324 bp, Glycine max
  Clone ID: LIB3138-032-Q1-N1-B8
gtcacgactgtattgtctggcgatgaataatccgaaaaggggggatggttctcttggcaacaagggttgttaataaacagtaatgggtcagcgcagttcgaaggatgttcgtctacaaaattagaaacctctttctcgtattgaatggtttcaataagcgtatgtgcctatcataatgcagattgaatcgggcgatttcactcagactatcatgaatgctgggcattgagattattttatggatatactgaacagcattgattttttgattttacaatgcgaatctctaattattttgaacatactggtcttacatgttaagct

SEQ ID NO: 32483 - DNA, 404 bp, Glycine max
  Clone ID: LIB3138-032-Q1-N1-B9
gtcaagattgtgatgtctgggaatgcagcagtcaaaaggagtgattgggcctcattggtacaagtgtttttaacaaacagcaacagtacagagcattttgatgcatgtaagtggacaaaatcagaaccacattcctgggaattgatcttcccaatagaggtatgtggtcctaataatggttttgaaatgtggagttctgagtgggcaaatcaaacttgatggcatttgagtttccttattgacaatcccaaacagtctacagttgttgatattctcttgggaatctctcaagattttgaaattgctggtaatactctgatgccagctttttctgttccacaggctactgacagatcttatgaaaatgcggaatcctctgcatgatctggaatatgtgatttctt

SEQ ID NO: 32484 - DNA, 409 bp, Glycine max
  Clone ID: LIB3138-032-Q1-N1-C1
ccaagaactacttgcacttggtgagaggattggctatgtgaacacaggagtctctgagggtttgctttccaaaaggttggcggaaacaatatattggtcatctgagcaaagtgaaaacgaaaggaactgggtaatatgtctggaagagtacaagaatatggacgatgttggaacacttcaaacttgtggacatgactaccatgtgagctgcattaaaaagtggctatctatgaagaaattatgtcctatctgcaaagtatctgctttgcctgaggatacgaaagataaataacttctgtaatataaattaatcccattttgtgtatatatttggacatccctaaaaaatgaggaaacgaacctgtttttggaaatgttataacaggaatgctactctatatcaatgtat

SEQ ID NO: 32485 - DNA, 403 bp, Glycine max
  Clone ID: LIB3138-032-Q1-N1-C10
cttaaaatatagaacacactaccctcaacatagtaaagcagctggtgcaagtgaagcaatggctcaaaccatgttgctcatgtctagtgtctctagcagttattccgtggatttgaagaaagaccttttcctccaattgcagagtcaaagtttaaggcctaagttctctcaactctcattcaacccacttccaccatcaacttcttccttttcttcaccccgtacattcacaaccctggctctcttcaaatctaagacaaaagccgctcctgctaagactaaggttacaaagccaaagcaaaaggttgaagatggtatctttggcacttctggaggatttggttttactaagcagaacgagctctttgtgggtcgtgttgctatgctcggttttgcagcatca

SEQ ID NO: 32486 - DNA, 418 bp, Glycine max
  Clone ID: LIB3138-032-Q1-N1-C11
cactcactcactcttgttgccttcatggccaagccagtgtccattgaggtatggaacccaagtggcaaatacagagttgtcagcaccaaaccaatgcctggaactcgttggatcaatcttctcattcaaaatgatgttcgccttgaaatatgtaccgagaagaaaacgattttgtcagttgaagacatcattgctttgattggtgataagtgcgatggagttattggacagttgactgaagactggggagaagagttgttctctgctttgagcaaagcgggaggcaaagctttcagtaacatggctgttggttataacaacgtggatgttgatgctgcaaacaagtatggtgttgctgttggaaatactcctggagtgctcactgagacaacagcagagttggcagcttcactaactt

SEQ ID NO: 32487 - DNA, 414 bp, Glycine max
  unsure at all n locations
  Clone ID: LIB3138-032-Q1-N1-C12
tgctaattcattgaaacagacatttacagggtccaaggaattgaaatgaaattaaaacacaatgatttttctttgctagtatcacaattttgatgaacaagtatgtttttgaacattgagatggatcaattaattgtttgctttaaaatctgaaatatgatcaactgatcaagtatgctgttggtatttttgctatctcatgattttgtatttggtgtttctgaattctctttatttgatgcttttgaaaggtaatggtttctgcaaaagaagagccagattgtcccataccacctgctgttgatggtttgttaagggttcataagcaagttatcaatgttgatcgtgaccttgcagatagtgcattggctgctgngcgatcagttgctaccaggcttctagtggcggatactc

SEQ ID NO: 32488 - DNA, 379 bp, Glycine max
  Clone ID: LIB3138-032-Q1-N1-C2
ccggcgcgcgctgaagtttgctaggttcatgagcaggttcgggaagagttaccgaagcgaggaagagatgaaggagaggtacgagatattctcgcaaaacctcaggttcatccgctcccacaacaagaaccgcttgccctacactctctctgttaatcattttgctgattggacttgggaggagttcaaaagacacagactaggcgctgcccaaaattgctctgccactcttaacggcaaccacaagctcactgatgctgttcttcctcccacgaaagactggaggaaagaaggaatagtgagtgatgttaaagatcaaggcagctgcggatcatgctggacattcaacacaactggggctttagaagcagcctatgca

SEQ ID NO: 32489 - DNA, 361 bp, Glycine max
  Clone ID: LIB3138-032-Q1-N1-C3
gcagggacttaaagttggtcttgttgaagttcttcttggtcttcttgattggagggctggcggaaggaatggcttttgttctcagatgaagtggaatgaatctgaagcgtctattggcagggtgcttgcaattgaggtcttgcatgcctttgctactgaaggagcccattgcactaaagtgcgagagctattgaataattctgatgtttggagtgcttacaaagaccagaggcatgatctcttcctcccttcaaatgctcaaatctgcagctgctggcattgctggtctcattgagaattcatcatcgtcgagactcacttatgctcttactgctccaccacaatctactgcttctagaac

SEQ ID NO: 32490 - DNA, 419 bp, Glycine max
  Clone ID: LIB3138-032-Q1-N1-C4
gagctagtttagttatctactcttttctgcatgtttgttctctcaacgactcctccgcgaaagagtattattcaatattttggttgggttgaatcccggggttgaagcgttgcagacatcacggctattctaagagtgtctcgctccctcattcatgtccgatctgtacgacggaggacgggtagttgcgtaactgccgttaacccttcgccgcacggtgggcgtggtgctttgccttctgaaggtggtagcccttcagacttgctcttcctcgctggtggtggtttcttctagtttcttcactcttttcattacttttagcctgcatagttttaaataagaaaaaaaaaacagcgactttgtgactagttaagatcaccgcttcttcttcttcttcttcttcttcttcttctactact

SEQ ID NO: 32491 - DNA, 418 bp, Glycine max
  Clone ID: LIB3138-032-Q1-N1-C5
gttctttcaatgtggagatattttgttggagatctcgtctttgaagtttctaagatgacttctccctacattaaatgtacagtctctttcttcatagcatttggaaatttggctgatgataccatcaattttgaggcttttccccacaagctggtgcagtttggagagattcacgaaaaagttgtattgaaattttcacaagaggaatttcttacagcttggtcaactcaggtgcgtcctgcaacaactctgttggctgatgggtgtccatatttgtatgcaatggtgcatgatagttcagtgtctacaataccaggtgattttgtcattggtgtcaagttgacaaccataaacaatatgtgtgcatatgggctcaatcctggtatttcaggttctcgtcttttgggcaccattcctc

SEQ ID NO: 32492 - DNA, 413 bp, Glycine max
  unsure at all n locations
  Clone ID: LIB3138-032-Q1-N1-C6
atcctcatgaaaaacttaggtattccagctatctcagaggtggaaactcgggaaccaatatattatggacttgctgattgtagttcgaaaaagtcattggtaaactggactctgccatatgcccagcgctacattcataaatttcatattgataaatatgataaactcaagcagtctggttgtgatattttcaaccatctgaatgtcattggtgctgagaagctgttctacaggaatgttataaagacctgtggcagtgtatcaaaaaaacgagtcgaatgtaggtgtcttttgcagggaaacattttgtacaccattaaagaatcagattatcattcctttgttatggagctctctagttngttactaaatgggacttctgaattgcacttggcaaatttccttcatatgat

SEQ ID NO: 32493 - DNA, 282 bp, Glycine max
  Clone ID: LIB3138-032-Q1-N1-C7
aaatcatttactcactcgagaaagcgaaacgcacagaatcaaaagaagagttcttttttgagggagaagagttcttttttgagagagattgagatggcttcgacgaagaagatcacactgaagagttcggacggcgagaccttctaagtggaagaggcggtggcggtggcggtggagtcccagacgatcaagctcatgatcgaggacaactgcgccgacagcggaattcctctccccaatgttaccagcaagattctggccaaggttatcgactattgcaag

SEQ ID NO: 32494 - DNA, 405 bp, Glycine max
  unsure at all n locations
  Clone ID: LIB3138-032-Q1-N1-C8
ggaaaattgactttcccccagggcacttcccgaagtgttaagagaatgcctctttctatagggggaggagctggtgcaaagaatgctattctcatgaatatgccaaatgctgttctttcaatgtggagatattttgttggagatctcgtctttgaagtttctaagatgacttctccctacattaaatgtacagtctctttcttcatagcatttggaaatttggctgatgataccatcaattttgaggcttttccccacaagctggtgcagtttggagagattcaggaaaaagttgtattgaaattttcacaagaggaatttcttacagcttggtcaactcaggtgcgtnctgcaacaactctgttggctgatgggtgtccatatttgtatgcaatggtgcatgat

SEQ ID NO: 32495 - DNA, 149 bp, Glycine max
  Clone ID: LIB3138-032-Q1-N1-C9
agttacaaaccaataaaatcttcattctgtcctatggctagtgattgtggcatgtctgttttggttggtacaggagacaatttttggtctggactatatgtcatctcatctaccgttggctttgtgatattgctggcttttgtgtatgt

SEQ ID NO: 32496 - DNA, 407 bp, Glycine max
  Clone ID: LIB3138-032-Q1-N1-D1
tacaaagcgggtgctctaaaagaaggcctaaaacgtaactatgtgaaacactgtgagtacgtggcaattttcgatgcaaatttcaagccagagccagattttctcagacgttccattcctttcttggtgggcaaccccgacattgctcttgttcaagctcgttggagatttgtgaattctgacgagtgcttattgacaagaatgcaagagatgtccctggattaccatttcacagtagaacaagaagttggatcagccactcatgctttcttcggtttcaacggaactgctggtatttggagaatagctgctatcaacgaagctggtgggtggaaagacagaacaacagtggaagatatggaccttgctgttcgtgctagtcttaagggatggaaatttttgtacct

SEQ ID NO: 32497 - DNA, 418 bp, Glycine max
  Clone ID: LIB3138-032-Q1-N1-D11
gggttgtgaaagcagagaagtgagatacactaagttatcctcataaatacactctaattaggtggcaagataagtgtctaaccttagtaacattgccacatattgtgttcattttggaattgtgccactaaaattctattcaattcatctatggctgcctcttcttatgctatgcaatcaatcctggcaaaccctttgatccgcatttccagcgggtctagggtgaaccaatttggcgttcctgctttgcacatgagaaggaatgttggcctgagagttaggtccatggctaaggaagaacaaccaagtgagcctgcaaccccagttacaccgccaccatcagtagaacccaagccacagccagtctctgctccttcaccaaaggtgagcactaagttttctgatgtgttggcattca

SEQ ID NO: 32498 - DNA, 417 bp, Glycine max
  Clone ID: LIB3138-032-Q1-N1-D12
cagcgccatagcgttctctaagctatcgtgcgaggtccctcgacctccgcacaaccccagcaccaaggggctgtgcctgtcgtcgtcttccacgcccatgtcggaacccgacacccaggcgccgccgccgcctccgttcctgctccagcgcccgccgcttctgcagtcggcgtcgccgctcttcaagcagcggtcgtggtcgccggacgccttccgcgacgaggcgtggctccgccgcaaggggaactggaagaaccgccgcagtaagagcgtcaccgatgaggacgtggacgagctcaaggcctgcatcgagttaggctttggattcgattcctcccccgaggtcgagctcgatcaacgcctctccgatactctacccgctctcggcctctactacgccgtcaacaaacgctacaa

SEQ ID NO: 32499 - DNA, 412 bp, Glycine max
  Clone ID: LIB3138-032-Q1-N1-D3
gggcaatgatattctgtgttgcgattatgctagttttgatggtttgattaccaagcaagttatgagcaagatggcagaaatgataaacagtctttgtggtggtgatgaaaaattgatgcgtgaaaggacgcacctgctgttggcttgttgttcaaggatggcaatttgtaagaaagatgtttggagagttgaatgtggaatcccttctggatttccgctcacagttatttgcaatagcatttttaatgagatgctcattagatatagctatgaaaaattactgcgccaggctaaagctccaagtatgtttttacaatccttcaaaaattttgtttctttgtgtgtgtatggtgatgataacttaattagtgttcatgaatatgtcaagccttactttagtggttctaaattg

SEQ ID NO: 32500 - DNA, 419 bp, Glycine max
  Clone ID: LIB3138-032-Q1-N1-D4
actgaacgtgcaatgcttgcgggccacttcctagtatatactgaatcaaaacaagatactactacacattgattcaatccaactcatttcttatctccttttctctttggtagaattttcaataaacttagtccaacactaaaatataaaaatccaaatcagaaaaccaaaaaaaaacccttcttccacacataggcgtccacgtatccaaagtttattatcttatccgcgagataaggcaacggtgatcctctcaatccttcgtatcacattcacagcctctcttggttgatgacaccaagagacagcacaaagacccttcgtttcaatcccacaacacactcattcctcattcttccactcccgcacaaaaatggcgtctttgcagcaccccacagcttccctccaatccaaacacg

SEQ ID NO: 32501 - DNA, 422 bp, Glycine max
  Clone ID: LIB3138-032-Q1-N1-D5
gcgaaagagaaagagagagagagagagagatggcgtcgggctggggaattaccggaaacaaaggtcgctgctacgatttctggatggatttcagcgagtgcatgtctcgctgccgtgagcccaaggactgtgcttttctccgcgaagactacctcgagtgcctccaccattccaaagagtttcaacgacgaaaccggatttacaaggaggagcagcgcaaactaagggctgctaccaggaaaggccaggaggatggggttaatgaacatcatcattagaacctggagttaattttcaatctaagcttctgaacaattattttgataaaatgtttgtgatttgcttggatcggtattcctgcatgttctgtgagcccatattttatacttttgatgttgcgggcttcttttccctgtgcaata

SEQ ID NO: 32502 - DNA, 407 bp, Glycine max
  Clone ID: LIB3138-032-Q1-N1-D7
gtacagagcattttgatgcatgtaagtggacaaaatcagaaccacattcctgggaattgatcttcccaatagaggtatgtggtcctaataatggttttgaaatgtggagttctgagtgggcaaatcaaacttcatggcatttgagtttccttattgacaatcccaaacagtctacagtttttgatattctcttgggaatctctcaagattttgaaattgctggtaatactcttatgccagctttttctgttccacaggctactgccagatcttctgaaaatgcggaatcctctgcatgatctggaatttgtgttttctttcgcttgttcgtttgtttaattcaataaaggaaattaggcatgaccctcttgttgagtatgctctgcctatttgaaaatttccacacc

SEQ ID NO: 32503 - DNA, 282 bp, Glycine max
  Clone ID: LIB3138-032-Q1-N1-D8
cttaattagtgttcatgaatatgtcaagccttactttagtggttctaaattgaaaagctttctagctagtcataacatcaccattactgatggtattgacaaaactagtgcaactttgcaatttagaaagttagcagattgtgattttctcaagagaaactttaagcagatgtctaatgttttgtgggtggctcctgaagacaaggcgagtttatggtcacaacttcattatgtttcgtgtaataatctggaaatgcaagagcttatcttggcaatctcgaa

SEQ ID NO: 32504 - DNA, 393 bp, Glycine max
  Clone ID: LIB3138-032-Q1-N1-D9
ggcccctaagaagaaggtgaacaagtacaacgaaaactggaaaaaggagtggtttggcgcggggatattctacgaggggagcgaggaagtggaggtggacgtgttcaagaagctggagaagaggaaggttttgagcaacgtggagaaagcaggcttgctctccaaggcagaacaattaggattctcgctctcttccatagagaagctcggcgtcttctccaaagccgaagagctcggcttgctcagcttgctcgaccgagccgccagcttctgcccctccgtcctcgcctgcgccgacatccccgtcttcgtcgccgcaatcgccgtcgttgtcatcattcccgatgactccgtcgcgctcgtcgccgtccaggctgttgttgccgtcgcact

SEQ ID NO: 32505 - DNA, 289 bp, Glycine max
  Clone ID: LIB3138-032-Q1-N1-E1
atctggaaatgcaagaagcttatcttggcaatctcgtaaatggggtaccagaattggatttgcacaggccaaaagaagctcccccattgagaaaggaagctctctttcgtattggatggctggaaaaagctggtgtgcctaccatagcacaaattggagaggtccattccatgccaaagatgatgaatgcttctggatcaaaaggatatattgatttactggtgggccttggtttggtggggttaccaagggcaaggtaagctttttccaaccaaaatggttttgatga

SEQ ID NO: 32506 - DNA, 416 bp, Glycine max
  Clone ID: LIB3138-032-Q1-N1-E10
gccaccccaatgcaggatgttcaggttacaattgattggtttatttcctctcaggaatgtgttcccaggacctattgtgttttaaatccacaaaatccttttgtgttaaataggtggatgggaaaattgactttcccccagggcacttcccgaagtgttaagagaatgcctctttctatagggggaggagctggtgcaaagaatgctattctcatgaatatgccaaatgctgttctttcaatgtggagatattttgttggagatctcgtctttgaagtttctaagatgacttctccctacattaaatgtacagtctctttcttcatagcatttggaaatttggctgatgataccatcaattttgaggcttttccccacaagctggtgcagtttggagagattcaggaaaaagttgt

SEQ ID NO: 32507 - DNA, 419 bp, Glycine max
  Clone ID: LIB3138-032-Q1-N1-E11
ggagctagagaatgatgatgaagtctgctatgtgtgcagtggtggttgtagcacttcttcttctggcggaggtggggcccatggctgaggctgtgacatgcaccccaacagagttgagtccgtgtcttccagcaatcacttccggtgctaaaccttccaatgcttgttgcacgaagctgaagcagcaaaaaccatgcttatgtggctacctcaaaaacgctagcttgaagcagtatgttaactctcctaatgcccgaaaaaccgttgcttcttgtgggattccctttccaacttgttaattaattaagccttcttataattaaagtgtgggatatatatatatatatagataaacagtttaatttatacacactttgatcctacaaagcatcttgacacaagcattcaataggatttca

SEQ ID NO: 32508 - DNA, 418 bp, Glycine max
  Clone ID: LIB3138-032-Q1-N1-E12
gtctttgtggtggtgatgaaaaattgatgcgtgaaaggacgcacctgctgttggcttgttgttcaaggatggcaatttgtaagaaagatgtttggagagttgaatgtggaatcccttctggatttccgctcacagttatttgcaatagcatttttaatgagatgctcattagatatagctatgaaaaattactgcgccaggctaaagctccaagtatgtttttacaatccttcaaaaattttgtttctttgtgtgtgtatggtgatgataacttaattagtgttcatgaatatgtcaagccttactttagtggttctaaattgaaaagctttctagctagtcataacatcaccattactgatggtattgacaaaactagcgcaactttgcaatttagaaagttagcagattgtgattt

SEQ ID NO: 32509 - DNA, 378 bp, Glycine max
  Clone ID: LIB3138-032-Q1-N1-E2
attcctcagtccatttcacagcaaactgtttggaatcaaatggcaacagtgagaacaccattgaattttgattctagcaagcacagcttttgtcagttttctattgaccttctcggtggaggaatcttactggacaaaactggagattggatcacacttatacaaaattctccaattagtaacttgatgagagttgctgcttggaagaaaggctgtttaatggtcaagattgtgatgtctgggaatgcagcaatcaaaaggagtgattgggcctcattggtacaagtgattttaacagacagctacacgcacagagcattttgatgcatgtaagtggacaaaatcagaaccacattcctgggaatagatcttcccaat

SEQ ID NO: 32510 - DNA, 406 bp, Glycine max
  Clone ID: LIB3138-032-Q1-N1-E3
acctactctactgattttattgaggagtgggtcaaaattggcttgcctgcaaaggcaaaggtgaagacacaacatggggatgcaccttttgctgagttgtgctcacactgtgagaaggaagctgtgaatgtttcccttggaaaccttctaacatacccatttgttagagatggcttggtgaacaagacattgtcactaaaaggaggatactatgactttgttaagggatcttttgagctctggggccttcagtttggccttgcatcctctttctccgtatgaacatcaaccattatcaatgacctcatcttggttccctaagtattctcctatctaaaatgtactctgaaattaatattgcccttgttatgaatgcatgcatgtgctgaatttcctaataataaaa

SEQ ID NO: 32511 - DNA, 417 bp, Glycine max
  Clone ID: LIB3138-032-Q1-N1-E4
gttgaagctcttcttttgccttgcaacaatttcaagtaacctctgccactgatcacaaacccagtaatggttttttctgctgtgttcactcccactctcaaccttgccatttcatccagcacatactgttgtagaagaagaacatcatctaccacaagaagagttgttacagtgagagctagctccacagagaaggatgaatccaaggacaaagatgcttcagcattcaacccttttgggtttgtcactgacaacccttctagccgaaatgccattcaactgcctgaaaaccctgctgaggatggcaacgttggccaaatgctatataggatagaagacaagggcaaggaatatgggtcatatgttaaatctggcaagttaagatggtttgtgagagaaactgggtcagcaaatggc

SEQ ID NO: 32512 - DNA, 374 bp, Glycine max
  Clone ID: LIB3138-032-Q1-N1-E5
gcttaacttgcattcgaactggtcttacccagcgccaaccggctaggttcgttgcaacttaattttttttttttttttaaaaaaaaaatcaaaacagagacacaaccctagctttcacatccgcgaaacccgtcaccaccggcgcacccaggccaacgttgttctcttatcgtcgccggcgctcctgattgtcgtgctgtttggacactcgagcacgttgccctcgcacacgctcttcatctcgccgtcgcactcgcacgttctgagtttcagtttgaaccgaagcaaatatggtgcggcacaagcgtgggaggccttcaccggaaaattctccgtccaaacggagaagaagacgttctccgttggaatgtcgt

SEQ ID NO: 32513 - DNA, 397 bp, Glycine max
  Clone ID: LIB3138-032-Q1-N1-E7
gatttgttgggtttacaaggagcaggtaaagcttttccaaacaaaattgtttttgatgataagcttgtgttggctaacacacaagaattctttgatggaaattttccagtggattcttggttaccaatttttgtgaattgtctttatcctgtaagtcaattaccttcagaagctgtcgttgtaaatgttacatgtggtagtggacgtgtggtttacccaccactgcttggattagttctgcagttaacaatcgctcctcagatatcaacaaaaggattcgcacagcacttgggaaaggtaagaaaattgtttttcttactagagttgatccttttccagtagctttactggctgttctttttggcgttaagaatgaaattctgagttctaacgccac

SEQ ID NO: 32514 - DNA, 377 bp, Glycine max
  Clone ID: LIB3138-032-Q1-N1-E8
agcatgtggaaatttcgctgatgataccatgaattttgaggcttttccccacaagctgatgcacttgggagagattaaagacaaaaatgtattgaaattatcacaacaggaatttcttacagatcgatcaactcaagtgcgttctgcaacaactctgaaggatgatgggaggccatatttgtatacaatgcagcatgataggtaagtgtctacaataccacgagattttgtcattggtgtcaagttgacaaccataaacaatatgtgtgcatatggactcaatcctggtatttcaaggtctcgacttttgggcaccatacttcagtccatttcacagcaaactgtttgcaatcataatggcatcagcgagaacacca

SEQ ID NO: 32515 - DNA, 406 bp, Glycine max
  Clone ID: LIB3138-032-Q1-N1-E9
ggtacaagtgtttttaacaaacagcaacagtacagagcattttgatgcatgtaagtggacaaaatcagaaccacattcctgggaattgatcttcccaatagaggtatgtggtcctaataatggttttgaaatgtggagttctgagtgggcaaatcaaacttcatggcatttgagtttccttattgacaatcccaaacagtctacagtttttgatattctcttgggaatctctcaagattttgaaattgctggtaatactcttatgccagctttttctgttccacaggctactgccagatcttctgaaaatgcggaatcctctgcatgatctggaatttgtgttttctttcgctcgttcgtttgtttaattcaataaaggaaattaggcatgaccctctttgtgagt

SEQ ID NO: 32516 - DNA, 409 bp, Glycine max
  Clone ID: LIB3138-032-Q1-N1-F1
attgtatttgcacagtccagaggaagctcgccaattgagaaggaaagctctctctcgtattgaatggctgcaaaaagctgatgtgcctaccatagcacagattgaagagttccattcgatgcagaggatgatgaatgctcctgattcaaatgataatattgatttactgttgagcattgatttgttgggtttacaaggagcaggtaaagcttttccaaacaaaattgtttttgatgataagcttgtgttggctaacacacaagaattctttgatggaaattttccagtggattcttggttaccaatttttgtgaattgtctttatcctgtaagtcaattaccttcagaagctgtcgttgtaaatgttacatgtggtaatggacacgtgggttacccaccactgcttgga

SEQ ID NO: 32517 - DNA, 319 bp, Glycine max
  Clone ID: LIB3138-032-Q1-N1-F10
gaaacacattacagaagaagcttaattattcaactgaggcaagacactagacaagactatttttaagcttctagtttcaatgtttatcttcccaaaaagagactgtggtggtggtacctttggtttgtacataaatggagaaactgaaagtgtctgctaagaatgatcctgctggcagcagtgatcaagcagattcatttccaatattcgaactgggggagagtgaaaatgttggacagaagagcagtagaagagacgaagatgatacaaaagctgtaagattggatggagattctgtaattgctccctctaattctgc

SEQ ID NO: 32518 - DNA, 337 bp, Glycine max
  Clone ID: LIB3138-032-Q1-N1-F11
ctcacacattacacataactcttactcttttgtccgtcgctggacggatcacgatactgtgtggatactgtttacggcaacggtgatattaccgaaaccagaaagtgccggttgtacgtcagagtcggacttacccagatgctctgagggggtgtgatcatagacatcctgcacgccgaacaggtcaggatcatggatgaggcctatgcctgctgggtgatagtcctggagcgtgtcccaagcgacatccgggacgagagcaggatgcaccgcctgagcgattcgatggtgattaatgatatcgatgcgtctcgttactatcacagcaatggggaac

SEQ ID NO: 32519 - DNA, 402 bp, Glycine max
  Clone ID: LIB3138-032-Q1-N1-F12
gatcatgcccgtccagaagcagacccgcgccggtcagcgaacccgcttcaaggccttcgtggtggtcggcgacaacaacggccacgtcggtctcggagtgaagtgcagcaaggaagtcgccaccgccatacgcggcgccatcattctcgcaaagctctctgttattcctgtgaggagaggctattggggtaacaagatcggaaagccccacaccgttccctgcaaggttaccggaaagtgtggctccgtcaccgtccgcatggtccccgcccctcgtgggtccggaatcgtcgccgctagggtccccaagaaggtcttgcagttcgctggaatcgatgacgtcttcactttcttcaggggtttcaccaaaacccttggaaatttcgtcaaggctacttttga

SEQ ID NO: 32520 - DNA, 203 bp, Glycine max
  Clone ID: LIB3138-032-Q1-N1-F3
caagtgtttgagacaatgaaagaagaaagctttgaaccaaacatccaaatacaggcactcttggctaggcattacacctcatctgggcttaaagaaaaagctgaagctatgttgaaagagatggaaggggaaaactttgaagagaatcaatgggtatgtgcaactttgctccgcctttatgcaaacctgggaaaggctgatga

SEQ ID NO: 32521 - DNA, 423 bp, Glycine max
  Clone ID: LIB3138-032-Q1-N1-F5
ctcgagccgaatcggctcgagattttcacaagaggaatttcttacagcttggtcaactcaggtgcgtcctgcaacaactctgttggctgatgggtgtccatatttgtatgcaatggtgcatgatagttcagtgtctacaataccaggtgattttgtcattggtgtcaagttgacaaccataaacaatatgtgtgcatatgggctcaatcctggtatttcaggttctcgtcttttgggcaccattcctcagtccatttcacagcaaactgtttggaatcaaatggcaacagtgagaacaccattgaattttgattctagcaagcagagcttttgtcagttttctattgaccttctcggtggaggaatcttagtggacaaaactggagattggatcacacttatacaaaattctccaattagtaa

SEQ ID NO: 32522 - DNA, 156 bp, Glycine max
  Clone ID: LIB3138-032-Q1-N1-F6
ggtttagtttcatttttttgaagctcttaaacttaaagcttaagccatgggattctcattctttctggatttatcttaagcccttctggcacgggctgggtaactttatgggttttttttttctgaccgggtcttaattttctttccattattttt

SEQ ID NO: 32523 - DNA, 312 bp, Glycine max
  Clone ID: LIB3138-032-Q1-N1-F7
cactaactcgggtttggggcagtggcgtacattggaccacgatatacacgatgtgcacatatgggcttaatactggcatgaccagtgctcggaccatggacaccacccctcatcccatgtcacaccgacccagttctggatatggcggcacatgtgataacaccatggcattctgactgtcgcatgcacagctcctgactgtctcatgggacctgatactgggagcaatgttagtggacacagctgtgtaccggatcacacttataccatagtcttccaatgagtacctacgtgagaggtgcggctagaaag

SEQ ID NO: 32524 - DNA, 349 bp, Glycine max
  Clone ID: LIB3138-032-Q1-N1-F8
atctccaaaacgttatggtggaaacgcgggttgaaagtggagacccaagggatgtgatctgtgatctgtctcaaaagttaggcgctgacttgataatcatggctagccacggctatggagttgtaaagagggctttccttggaagtgtgagcaattactgctcacagaacgtgaagtgcccagatttgatagtcaagaagccaaaaccatgtgctggtgctggaaaatgatctgccacttttgttctgtatttgggctatctatgtacaattttgttcatgggtatgtgacgtttttacctatggcgtaactagtggttctaggacgatcttgcaatgtggatgatatt

SEQ ID NO: 32525 - DNA, 244 bp, Glycine max
  Clone ID: LIB3138-032-Q1-N1-F9
ggttgaaatacacctattccttccggctcaaatttgtgcacgggaagacagactatgacactaggcactaactgactattccaactagcgcctatttacttaggagagggtgtatggagcgcagactgctagcatactgatgtgcgattaagccggttcttccatattggatgttgaagcctcgagtcaatatttagagtttgctaccatacgtgggcctacgatagatgatcctgctcattct

SEQ ID NO: 32526 - DNA, 417 bp, Glycine max
  Clone ID: LIB3138-032-Q1-N1-G10
cggctcgagaaggagcaggtaaagcttttccaaacaaaattgtttttgatgataagcttgtgttggctaacacacaagaattctttgatggaaattttccagtggattcttggttaccaatttttgtgaattgtctttatcctgtaagtcaattaccttcagaagctgtcgttgtaaatgttacatgtggtagtggacgtcgtggtttacccaccactgcttggattagttctgcagttaacaatcgctcctcagatatcaacaaaaggattcgcacagcacttgggaaaggtaagaaaattgtttttcttactagagttgatccttttccagtagctttactggctgttctttttggcgttaagaatgaaattctgagttctaacgccactaatcctatgctgacgcgacttcttg

SEQ ID NO: 32527 - DNA, 417 bp, Glycine max
  Clone ID: LIB3138-032-Q1-N1-G11
agatgtgctagtttaaaactcttttttacagtactaattaactctgattccataaaaacaaaaaaaattaactctgattaacagatacgtgagtggaagcactgggaagactctattggcaatgacaataaaaatgaaacacaaccagttttggaaccaacagtgactcatgttcaccaacacgcttttatccagaatcgttttactggtcttggcaaagattctgctgttctgggttgggtgaaatcattcttcaagcaattttatggatctgtgaccaaattagattatgtgacattaaggcttgggttcattatgacccactgcaaaggaaatccaaagtttaatttccataaatacatgattcgtacccttgaagatgatttcaagaaagttgttggtataagctggtatctt

SEQ ID NO: 32528 - DNA, 411 bp, Glycine max
  unsure at all n locations
  Clone ID: LIB3138-032-Q1-N1-G12
gttagttcctttgcttctaagaccagtttcagactattgttcactcatctccattctcttcttaaattctcaacacatcttctctctctaaagtctaaaccatgcctgtagtgacagaacacatgaaatggagaagaccaagaaaccaattcaggcaccccatttcagaaactgatgatccaaaccctcaaatcccttccataatccaatcctctcacagcaaatccaccttctcctctctcttttcttctttctccacctccaatgaaaccagagaccaaaatagaaacaacaacaacaaaagcaacagaaaattctctgcagcaaccttcagaggcttcggctgcactgccggtgcatcgcanaaggtgtcggtgccggtgcctgcggtgattcgctcctcggcggata

SEQ ID NO: 32529 - DNA, 411 bp, Glycine max
  Clone ID: LIB3138-032-Q1-N1-G2
cttaattgccttaaggaacgttcgagaccacagaggtttctctagtcttcttctgtggagagcttgttttctcttgttcattcatctcacttccaattaaggaacaagctttccaccaatttgaatcaccaatggctcgctctttctccaacctcaaggttctctctgctcttgtcgccgacggattctccaacactctcaccaggcgtgggtacgcagtagcgacacaaagcgcaacaagaggaggagcagcctccatcagcggcaagtcaggggaagacaaggtactaggaggaggtgctgaaaaggtttcgtgggtcccagaccctgtcactggttactacaaaccggagaacatcaaagagattgatgttgctgagctgagagccacggttttgggcaaaaaattca

SEQ ID NO: 32530 - DNA, 421 bp, Glycine max
  Clone ID: LIB3138-032-Q1-N1-G4
gttgagatccactgctgcagaatccaatttgtgaccctaaatccaagttactatgactgctcagacccaagaggagcttcttgcgcaacacctcgaacagcaaaagatccatgatggtgaacctgttgtcgaggatgatgatgatgaggaagaggatgatgatgatgatgatgatgaggatgatgaccatgccgaaggactagaaggtgatgcatctggtaggtcgaagcagaccagaagtgaaaagaagagtcgcaaggcaatgcttaaacttggaatgaaacctgtcacaggtgtcagccgagtgacagtcaagaagagcaagaatatcctgttcgttatctcaaaaccagatgttttcaagagtgcaacatctgaaacttacattatatttggggaagccaagattgaagacttgagc

SEQ ID NO: 32531 - DNA, 409 bp, Glycine max
  Clone ID: LIB3138-032-Q1-N1-G5
gttaagaccgcgaaaacagtggcttcaccagggaggggtattttggccatggatgagtgcaatgctacctgtgggaagcgtttggcttcaattgggctagagaacactgaagctaaccgacaggcataccgtaccctactcgtgacaggtccaggccttggtcagtacatctctggtgccattctatttgaggaaacactctaccaatccacaactgatggcaggaagattgttgacgtgctgcttgagcaaaacattgttcctggtattaaagtcaacaagggtttggtgccccttgcaagtttcaacgacgagtcatggtgccaaggtttggatggtctagcctatcgctcagctgcatactacgagcaaggtgcccgtttcgtcaaatggcgtactgttgtgagca

SEQ ID NO: 32532 - DNA, 398 bp, Glycine max
  Clone ID: LIB3138-032-Q1-N1-G6
tctcgatctcgctctccgtatagcaggtcacctgtcagcatgcatgacagatcatactctccctatgaaatacgatatgactcgccggatgcgcactcctacagaaggcaccgttaccgatctgtttcacgaagtgcctcgcctgatgatccttattatggaaggcaccgttacaggtctgtttctcggagtgcctcacccaggccaaggagaaggtcaaggaggagctactcacggagtgctacacctgtttcaaagagaagcaactcacgaaatgtgtcccccaggtcaaggaggagccattcaagaagctctaagaggagtggcaaatgtgagaaacgctactcaagaagctcgagtgtgaatgcaagttcaagatcagtatcgaggtcaaatac

SEQ ID NO: 32533 - DNA, 412 bp, Glycine max
  Clone ID: LIB3138-032-Q1-N1-G7
gaaactttaagcagatgtctaatgttttgtgggtggctcctgaggacaaggcgagtttatggtcacaacttcattatgtttcgtgtaataatctggaaatgcaagaagcttatcttgtcaatctcgtaaatgtgttacgagaattgtatttgcacagtccagaggaagctcgccaattgagaaggaaagctctctctcgtattgaatggctgcaaaaagctgatgtgcctaccatagcacagattgaagagttccattcgatgcagaggatgatgaatgctcctgattcaaatgataatattgatttactgttgagcattgatttgttgggtttacaaggagcaggtaaagcttttccaaacaaaattgtttttgatgataagcttgtgttggctaacacacaagaattctt

SEQ ID NO: 32534 - DNA, 409 bp, Glycine max
  Clone ID: LIB3138-032-Q1-N1-G8
gacaaaatcagaaccacattcctgggaattgatcttcccaatagaggtatgtggtcctaataatggttttgaaatgtggagttctgagtgggcaaatcaaacttcatggcatttgagtttccttattgacaatcccaaacagtctacagtttttgatattctcttgggaatctctcaagattttgaaattgctggtaatactcttatgccagctttttctgttccacaggctactgccagatcttctgaaaatgcggaatcctctgcatgatctggaatttgtgttttctttcgcttgttcgtttgtttaattcaataaaggaaattaggcatgaccctcttgttgagtatgctctgcctatttgaaaatttccacacctcttttaattgtcgtaatgatgtgtgaagt

SEQ ID NO: 32535 - DNA, 270 bp, Glycine max
  Clone ID: LIB3138-032-Q1-N1-G9
gtggatacccagattgcttattcacttatagaggagcaagaaggacgaaagagattgcgagatgactacatttcatttgttggcctccttgcagatccacgttattgtggcaaatcatatgatgagaaggaagaagttcgtgtcctccttcgacaggaccccaagttttggagacacagaccattatctgaacaaatggtccgtgctgctgctgatgatgttcgttttcttctctacatttatcaccaaatgatggagaaattaaatgag

SEQ ID NO: 32536 - DNA, 359 bp, Glycine max
  Clone ID: LIB3138-032-Q1-N1-H1
ctgggattgaacactgtttagacttctgaacgtcaacggctatgaggggcttattacattagcagcgatgactcattctctttccatgcaccaacttgctcaaaaaccccttcgtctcaactattaccctgataaccttgaaaacatcatacccttcggatcagaccccactcagtctcaacccataccaccctatccacatacatcccaggctgctgatgctcaggctccgtcacttccttacagctattaccctatgagatagaacacggatgagacctccaccgagtggaacccagttatcccctaatcatctggggaatcaacattccccaccatagacgttgcgaggctcattc

SEQ ID NO: 32537 - DNA, 417 bp, Glycine max
  Clone ID: LIB3138-032-Q1-N1-H10
agcattttgatgcatgtaagtggacaaaatcagaaccacattcctgggaattgatcttcccaatagaggtatgtggtcctaataatggttttgaaatgtggagttctgagtgggcaaatcaaacttcatggcatttgagtttccttattgacaatcccaaacagtctacagtttttgatattctcttgggaatctctcaagattttgaaattgctggtaatactcttatgccagctttttctgttccacaggctactgccagatcttctgaaaatgcggaatcctctgcatgatctggaatttgtgttttctttcgcttgttcgtttgtttaattcaataaaggaaattaggcatgaccctcttgttgagtatgctctgcctatttgaaaatttccacacctcttttaattgtcgta

SEQ ID NO: 32538 - DNA, 400 bp, Glycine max
  Clone ID: LIB3138-032-Q1-N1-H11
gcccgaccagcgcctctcctccaaccacggcttcggtggtgacagggaacgcgccttcgaggcaggcaagaagggcggatcgacccagcccgatgaggtctacaagccatctgaacacgacggtctccgagaggatggccagcccgaccagcgcaagagctccgagcacggattcggtggtgaccgacaggctgcctccgaggctggccagaagggcggctccaagtaaacaactttccacgagcatcaagtactagggagcagctatcagatcttgcgcaatgtttcgttagctagtcaataccttagtcaaagtcgaatgttcagtgccaccacatactcgccatgattcgctctggcgtagctgaaatgtatcctgcacaattcatcagctttcctc

SEQ ID NO: 32539 - DNA, 422 bp, Glycine max
  Clone ID: LIB3138-032-Q1-N1-H12
ctctttcttctgtctcctacccctgcctcatagcctcagcttctgccccaaattcacatcttttccttccacaaatcaaacctccatcgccaacaaagcccaagccctttgaactcattctaccttccttaaaaacacaaaatccccaaattcacatcactcattcccttccattccacgccacaaaacaatggccacccccaccctcataggcccacctgaactctacaatccctaccccacccaaaccccagccccaaccccaaccccaaccccaacccaaccccaaacagtcacaagaaccactccaattgaccctttcatagatcaaatggtggtcaaattcaacaccatgtcatccccaccacccccaaacatgaccctaacagaaaacatgtctcccacattcttcacaacgggaa

SEQ ID NO: 32540 - DNA, 173 bp, Glycine max
  Clone ID: LIB3138-032-Q1-N1-H2
ggccttctttcccacaggaaaccttattgggccaaaggggttttctctgtcatcgtataactcgagagcaagcaccgttgagccatttctcgttgatgaaaagaagatcactgcaagacacattatcttttgggttgaaaaacgtttggcagcacaggggatcattcctggat

SEQ ID NO: 32541 - DNA, 362 bp, Glycine max
  Clone ID: LIB3138-032-Q1-N1-H3
cggcttccttagtcattagtgaccagagcggtgctgagggggccgctgtgttaacgaataactacatagcaagctccattcatccatttgtcgccgatgaaaggaacatcactcatggacactttatcctttgcataggcaaaagattggaaccacacgggatcatttatgggtggaaagactatgctcttgacattgtaactttgctacgcctggtgttaatcctgcaccatgtgtacccatcaagataacattgagaccttgatgcatgtctttaatgtacaagacgattgtgaaggggaagaggtgataagggctcgcctcaatcttcgataatactgcacgggcataagtagttaaac

SEQ ID NO: 32542 - DNA, 424 bp, Glycine max
  Clone ID: LIB3138-032-Q1-N1-H4
cttgttgagagttgctgcttggaagaaaggctgtttaatggtcaagattgtgatgtctgggaatgcagcagtcaaaaggagtgattgggcctcattggtacaagtgtttttaacaaacagcaacagtacagagcattttgatgcatgtaagtggacaaaatcagaaccacattcctgggaattgatcttcccaatagaggtatgtggtcctaataatggttttgaaatgtggagttctgagtgggcaaatcaaacttcatggcatttgagtttccttattgacaatcccaaacagtctacagtttttgatattctcttgggaatctctcaagattttgaaattgctggtaatactcttatgccagctttttctgttccacaggctactgccagatcttctgaaaatgcggaatcctctgcatga

SEQ ID NO: 32543 - DNA, 414 bp, Glycine max
  Clone ID: LIB3138-032-Q1-N1-H5
ctctgcccaatcttcttcagcttgaagcaactgagaattctgcttatcttgatatgcttcggttgtttgcacatggaacatggaatgattacaagagtaatgctgaccgtcttccacaattgatacctgatcagatcctcaagcttaagcaacttacagttcttacactggctgagacatataaggtactaccctatgaccaactgatgcaggagttagatgtgacaaatgttcgtgagcttgaagattttctaattaatgaatgcatgtatgcgggaatagttcgaggaaagttggatcagttgcggcggtgctttgaggtccaatttgcagctggtagggacttgaggcctgatcaactagggaatatgatacagactctctctaactggatgtctacatcagaaaatatgc

SEQ ID NO: 32544 - DNA, 410 bp, Glycine max
  Clone ID: LIB3138-032-Q1-N1-H7
gtttggaatcaaatggcaacagtgagaacaccattgaattttgattctagcaagcagagcttttgtcagatttctattgaccttctcggtggaggaatcttagtggacaaaactggagattggatcacacttatacaaaattctccaattagtaacttgttgagagttgctgcttggaagaaaggctgtttaatggtcaagattgtgatgtctgggaatgcagcagtcaaaaggagtgattgggcctcattggtacaagtgtttttaacaaacagcaacagtacagagcattttgatgcatgtaagtggacaaaatcagaaccacattcctgggaattgatcttcccaatagaggtatgtggtcctaataatggttttgaaatgtggagttctgagtgggcaaatcaaac

SEQ ID NO: 32545 - DNA, 372 bp, Glycine max
  Clone ID: LIB3138-032-Q1-N1-H9
atcgcttatcgttaaacacacttctcatcgtcactttagtcatctcttgcggtggcacaaactggatcacgtttcaaacgactaacttggtgaccggtgaggtgttcctagttaccatacgaaagaggattttggtgtaggatgggatcgatagagaacgcttccaaaccaaggaaggaaaatccgaaatttgaattgccagcgggttttagatttcatccaacagatgaagaactcataaatcaatacctcacaaagaaggttgttgacaactgtttctgtgctatagccattggtgaggttgatttgaacaagtgtgagccatgggatttgcctgggttggctaaaatgggtgaaactgagtgtattttt

SEQ ID NO: 32546 - DNA, 347 bp, Glycine max
  Clone ID: LIB3138-033-Q1-N1-A1
ctcaccactgcctctttcttcccacccataaccctgccttccaaactctcctctctccgactccccacccgccgccaccccaagccactcagattctcctcctccaccatcaccgccaccatctccgtcggcgacaagctcccggaggccaccttctcctacctggactcgtccggcgaggtgcagacgacgacggtgtcggaactgacgaaggggaagaaggcggtgctgttcgcggtccccggcgctttcacccccacgtgctcgcagaagcacgtgccgggcttcgtggagaaatcgggggagctgagggcgaaggggatcgacacaatcgcatgcatttcggt

SEQ ID NO: 32547 - DNA, 381 bp, Glycine max
  Clone ID: LIB3138-033-Q1-N1-A10
tgcaattcactctgtacaattcttcgttcgttctctgcagttatatcctttttgagcttgaatggcggacgctgaaaccttcgctttccaggctgagatcaaccagcttctaagtctcatcatcaacacattctacagcaacaaggagattttcttgcgtgaactcatcagcaatgcttctgatgctttggataagattcgattcgagagcttaaccgacaagagcaagctcgatgctcagccagagctcttcattcgtcttgtgcctgacaaggataacaagactctttccattattgacagcggcattggaatgaccaaagcagatttggtgaacaacttgggtaccattgcgaggtccggtaccaaggagttcatgga

SEQ ID NO: 32548 - DNA, 383 bp, Glycine max
  Clone ID: LIB3138-033-Q1-N1-A11
tgcacttcccaagaacacagttggaggaaccattctgcgtagtgatctattggcaaattttttgacagagggcaattttagagcaagtgttgatttgcagcgcactcatcgtattagaggaatgattaaaatggtggccacagttggtattcctgagaatacaggtatatcattggcctgtgctatgaatagttcttttagggggcgcgccagttctgatatttacaccatctgctctcaagactgtgaattgtggaatcctgcttgcacaaaagcaatgactatgtcatttaatccaaacccgtgttctgatgcatggagtttggaatttctgaagcgtactggatttcattgcgatatcatttgtgtcactggatggactg

SEQ ID NO: 32549 - DNA, 356 bp, Glycine max
  Clone ID: LIB3138-033-Q1-N1-A12
gaatgaaccgcccggagctcgtatgagagttggtttaactgccctgactatggcggaatattttcgagatgtcaatgaacaagatgtacttctatttatcgacaatatctttcgcttcgtccaagcaggatctgaagtatctgccttattgggtcgaatgccttctgctgtgggttatcaacccactcttagtactgaaatgggttctttacaagaaagaatcacttctaccaaagaggggtccataactttttattcaagcaagttatgtacccgcagacgatttaaccgatcctgcgcctgctacgacatttgcacatttagatgctactactgtactatcaagaggattagcg

SEQ ID NO: 32550 - DNA, 333 bp, Glycine max
  Clone ID: LIB3138-033-Q1-N1-A2
aacaactatgagggctgatggtggcccatattagtatgcaatggagcatgatagttacattgtctacaataccaggagattttgtcattggtggcaagatgactaccataaacaatatgcgtgcatatgggctcaatgctggaatatgacgttcttggctattgggcaccatttgtcagcacatttcacagcacactgtttggaatcaaatggcatcagtgagaacaccattggatattaattctagcaagcagaacttttgtcagttttctattcaccgtctgtttccaggaagataactggacaaaactggagattggatcacacttatac

SEQ ID NO: 32551 - DNA, 380 bp, Glycine max
  Clone ID: LIB3138-033-Q1-N1-A4
cttccaagagagtagcatatcatagcatattgagaaaattttctttttctcttttttgtttctgcctgttatcataaagaggatcaataaccccctaccataagagaaatcaaacccaaaagtacatcaacaagaatcatggggggtggaggaggtgcaattggggtgagaggtcccaatgaagatgatgatgatattggaaagattgaagaagaaaacaagtggccaccatggcttaggccacttctccaaacaagcttttttgttcaatgcaaagtccatgcagattcccacaaaagtgaatgcaatatgtattgcttagattgtatgaatggagccctttgctctgcctgtcttgctttccacagagaacacagagc

SEQ ID NO: 32552 - DNA, 384 bp, Glycine max
  Clone ID: LIB3138-033-Q1-N1-A5
ggcaacagtgagaacaccattgaattttgattctagcaagcagagcttttgtcagttttctattgaccttctcggtggaggaatcttagtggacaaaactggagattggatcacacttatacaaaattctccaattagtaacttattgagagttgctgcttggaagaaaggctgtttaatggtcaagattgtgatgtctgggaatgcagcagtcaaaaggagtgattgggcctcattggtacaagtgtttttaacaaacagcaacagtacagagcattttgatgcatgtaagtggacaaaatcagaaccacattcctgggaattgatcttcccaatagaggtatgtggtcctaataatggttttgaaatgtggagttctgagtg

SEQ ID NO: 32553 - DNA, 386 bp, Glycine max
  Clone ID: LIB3138-033-Q1-N1-A6
ctgcaatgcatgtgggagctatagaaattatcattgatagtttcgcaagtcctgattgcaacatagttggtgcaatgcttttggttgatacttatcataccaatcctgaaaatgcagttcgtagtatttttgttgcgcctttcagaggcggaaggcccattcgggtggttacatttccgaataccattgtgcagattgaaccagacatgaattcaaggtttcagtttttgagtaccactaccaatggtgattttgttcaagggaaagatctcgcaatggttaaagttaatgtagcatgtgctgctgttggcttgacatcaagttacactccaactccattgttggaatctggtttgcaaaaagacagagggttaattgtggagtat

SEQ ID NO: 32554 - DNA, 231 bp, Glycine max
  Clone ID: LIB3138-033-Q1-N1-A8
cggctcgagctcgtcttcaatcctttcgttattctcttattcatccttctcttctgaataatccagatctctttctgcccttttctccgtcacgcttttcgtgaccggatctgtatggatttgatccagatctacacgccgatggtggttttggccgggtctttcatagatctggtgcgtagaggctcagatctacggtaccgaggtacaacagagaatcgatgacaagaa

SEQ ID NO: 32555 - DNA, 372 bp, Glycine max
  Clone ID: LIB3138-033-Q1-N1-A9
ttggaatcaacccatactccatggaatggactggtttggccaatagattactgagtaagggcaatgatattctgtgttgcgattatgctagttttgatggtttgattaccaagcaagttatgagcaagatggcagaaatgataaacagtctttgtggtggtgatgaaaaattgatgcgtgaaaggacgcacctgctgttggcttgttgttcaaggatggcaatttgtaagaaagatgtttggagagttgaatgtggaatcccttctggatttccgctcacagttatttgcaatagcatttttaatgagatgctcattagatatagctatgaaaaattactgcgccaggctaaaacttcaagtatgtttttac

SEQ ID NO: 32556 - DNA, 280 bp, Glycine max
  Clone ID: LIB3138-033-Q1-N1-B1
ataaaaaaaaaaaattttttatcctaaaaaaaaagcaaaaaacaaagggtgaaaaaatgaaaaaagcaataggataaatatacaacaacaacattgcaaaccatgaaaaaaacctatggcaaaaagtgattgtcatggaagggtcatattacaaaaaaggggggggggcgcccccttttctacctgatcccccggaaaatatttttggccgcggattccacgggtcgtattttttctctttaaaatggggcgatgcaaacctggtttgatgaatgcccct

SEQ ID NO: 32557 - DNA, 372 bp, Glycine max
  Clone ID: LIB3138-033-Q1-N1-B10
atctgaaatgtatgtggtggagagcaaggtgggcgccatagggtgcatgctggtgtccctcttcttcctcgggacatggcctgctgtcatgactctgctagaaaggcgcggtcgtcttcctcaacacacctaccttgattacaccctcaccaacctcatggctgctgttatcattgctttcacctttggtcagattggcaacgctcaacccaacttcttgtctcagctttctcaggataactggccttctgttctgtttgccatggggggtggagtggtccttagtgttggaaatttgtcaacacaatatgcttgggcttttgttggtttatcagttgtagaagtgatcacatcaagcataactgttgttat

SEQ ID NO: 32558 - DNA, 193 bp, Glycine max
  Clone ID: LIB3138-033-Q1-N1-B11
aaaaattactgcgccaggctaaagctccaagtatgtttttacaatccttcaaaaattttgtttctttgtgtgtgtatggtgatgataacttaattagtgttcatgaatatgtcaagccttactttagtggttctaaattgaaaagctttctagctagtcataacatcaccattactgatggtattgacaaaac

SEQ ID NO: 32559 - DNA, 365 bp, Glycine max
  Clone ID: LIB3138-033-Q1-N1-B12
caacacactatggatgtttggtcatggatatgtgagctccccaactcggtggaggggaccgagtcccactcgccacccatgaagttcgaaatcgcgagtgagaagaacgacgacaagctggacaactcaactcgttccattcacctgaaagctgagcgaacctccggctcagactcggaagctgcggtgatcttcaccgtatgcttgcaaggctttcacccacacaacgctcacaagcctctatgggtctccgaaaagtgccacctctcatcagaaaagccgttcctccctctcctcctccaactcctccaggaaatcatatcccactcccccacggcgcacgatagcacctgcccccgttccca

SEQ ID NO: 32560 - DNA, 385 bp, Glycine max
  Clone ID: LIB3138-033-Q1-N1-B3
ggaaattttccagtggattcttggttaccaatttttgtgaattgtctttatcctgtaagtcaattaccttcagaagctgtcgttgtaaatgttacatgtggtagtggacgtggtggtttacccaccactgcttggattagttctgcagttaacaatcgatcctaacatatgagcataaggatctgcacaacacttgtgaaagggacgaaaattgtttttcttactatagtagatccttttacagtagctttactggctgctctttttggcgttaagaatgaaattctgagttctaacgccactaatcctatgctgacgcgacttcttgagaactgtaagagtctcaaatatctggttgatgagtgtccttttgcatttgtgaact

SEQ ID NO: 32561 - DNA, 282 bp, Glycine max
  Clone ID: LIB3138-033-Q1-N1-B4
ggcaaattttttgacagagggcaattttagagcaagtgttgatttgcagcgcactcatcgtattagaggaatgattaaaatggtggccacagttggtattcctgagaatacaggtatattattggcctgtgctatgaatagttcttttagggggcgcgccagttctgatatttacaccatctgctctcaagactgagaattgtggaatcctgcttgcacataagcaatgactatgatatttaattcaaatccgtgttctgatgcatggaggtttggaattgt

SEQ ID NO: 32562 - DNA, 381 bp, Glycine max
  Clone ID: LIB3138-033-Q1-N1-B6
gaaacattttctttccatttgacaccatatacgacactgccattgatgtggcaatggagatgttaaagaactggagattagtgacttggaaccattggagattgctaaaatgattgaggaggagatatcagctttggtccctaaatggagggattggggcagtgctgagtatcaaaagcagcatagttttagctatgaagaagagtatgacatgagtaaccaccaccctttcttctcaacatcttctcgctcttcctctcatgcttctcttccagtgtttggttcttcctacaagaataattcccactatcgtgggaatcattacccttttgctcaagattggcctcaagatgaactatttatgaatgatgatgcgagctc

SEQ ID NO: 32563 - DNA, 383 bp, Glycine max
  Clone ID: LIB3138-033-Q1-N1-B7
atgatgttgaaactcctaaaggttccatgttggatctgaaaatttctcaatctaaaattgcacttcccaagaacacagttggaggaaccattctgcgtagtgatctattggcaaattttttgacagagggcaattttagagcaagtgttgatttgcagcgcactcatcgtattagaggaatgattaaaatggtggccacagttggtattcctgagaatacaggtatatcattggcctgtgctatgaatagttcttttagggggcgcgccagttctgatatttacaccatctgctctcaagactgtgaattgtggaatcctgcttgcacaaaagcaatgactatgtcatttaatccaaacccgtgttctgatgcatggagtttg

SEQ ID NO: 32564 - DNA, 331 bp, Glycine max
  Clone ID: LIB3138-033-Q1-N1-B8
cggctcgagggaatttcttacagcttggtcaactcaggtgcgtcctgcaacaactctgttggctgatgggtgtccatatttgtatgcaatggtgcatgatagttcagtgtctacaataccaggtgattttgtcattggtgtcaagttgacaaccataaacaatatgtgtgcatatgggctcaaatcctgtattttcaggttctcgtcttttgggccccatttcttaagccatttcacaacaaactggttggaaataaaaggccaacagtgagaacaccattgaattttgattttagcaagcaaagctttggtcagttttctattgaccttt

SEQ ID NO: 32565 - DNA, 382 bp, Glycine max
  Clone ID: LIB3138-033-Q1-N1-B9
ggtttgctgggtttgataaggaaaagaaggagcttgatgctgaggttcatcgcaaatatgtttttggtggacatgttgctgcctatatgaagatcttggctgaagatgaaccagagaaataccagtcacacttcagtgaatacatcaagcgtgggatagaagctgatggtattgaggcactgtataagaaggttcatgccgccattcgtgctgatcctactcttaagaaatctgataagcagcccccgaaggagcacaagaggtacaacttgaagaagctgacttatgaggagaggaaggctaagttgattgcacgtgtggcgtctctcaactctgctgctgataacgatgaagatgatgagtgaaagttcattcaagattc

SEQ ID NO: 32566 - DNA, 343 bp, Glycine max
  Clone ID: LIB3138-033-Q1-N1-C1
gtgttcccaggacctattgtgttttaaatccacaaaatccttttgtgttaaataggtggatgggaaaattgactttcccccagggcacttcccgaagtgttaagagaatgcctctttctatagggggaggagctggtgcaaagaatgctattctcatgaatatgccaaatgctgttctttcaatgtggagatattttgttggagatctcgtctttgaagcttctaagatgacttctccctacattaaatgtgcagtctctttcttcatagcatttggaaatttgtctgatgataccatcaattttgaggctttttcccacatgctggtgcagattggagagat

SEQ ID NO: 32567 - DNA, 300 bp, Glycine max
  Clone ID: LIB3138-033-Q1-N1-C10
gcaactttctctatcaatgggccttcgccatcgccgccgccggcatcaccagcggctccatcgccgaacgcacacagttcgtggcctatctcatctactcctccttcctcaccggcttcgtctaccccgtcgtctcccactggttctggtccgcagacggctgggcttctgccatttcccccggagaccggctattttccaccggcgtgatagacttcgccggctccggcgtagtccacatggttggtggagtagccggcttctggggcgcactgatagaaggcccgagaatcggacgct

SEQ ID NO: 32568 - DNA, 365 bp, Glycine max
  Clone ID: LIB3138-033-Q1-N1-C11
ctcaggtccagtagattcctctctttcgattcatttgcttctcgctgatcaaagctgtttattaggtaacttggtatgggagttgtgactgtttctagctcggctgctcggactccattgggattgaatacaaagttttgcaataatcgtctgaagagacctttaattgtagcatttaagggggataagcacaatgactcagctttggttgcaacacaagagaaaattcctgtgccggttgaaacggcgaagaagacgcagaaaaagaggataggaaaaactaacaaactacctaagagagagagttctccatcttccatggatgtggactacaatgaagctgctgccatgcttgaaatctatac

SEQ ID NO: 32569 - DNA, 377 bp, Glycine max
  Clone ID: LIB3138-033-Q1-N1-C12
ctcaagaccagtagaaacctctcttgcgaatcacatgcttctcgctgatcaaagctgcatattagggcacttggtatggaagtagggactgtttctagctcggctgctcagacatccattgggatcgaatacaaagatttgcagtactcgcctgacgagacctttaattgatgcatttaacaggggataagcacaatgactcagctttggttgcaacacaagagaaaattcctgtgccggttgaaacggcgaagacgacgcataacaagaggataggaaaaactaacaaactacctaagagagagagttctccatctgccatggatgtggactacaatgaagctgctgccatgcttgaaaatctatacaaacttagc

SEQ ID NO: 32570 - DNA, 379 bp, Glycine max
  unsure at all n locations
  Clone ID: LIB3138-033-Q1-N1-C2
gagcattttgatgcatgtaagtggacaaaatcagaaccacattcctgggaattgatcttcccaatagaggtatgtggtcctaataatggttttgaaatgtggagttctgagtgggcaaatcaaacttcatggcatttgagtttccttattgacaatcccaaacagtctacagtttttgatattctcttgggaatctctcaagattttgaaattgctggtaatactcttatgccagctttttctgttccacaggctactgccagatcttctgaaaatgcggaatcctctgcatgatctggaatntgtgttttctttcgcttgttcgtttgtttaattcaataaaggaaattaggcatgaccctcttgttgagtatgctct

SEQ ID NO: 32571 - DNA, 377 bp, Glycine max
  Clone ID: LIB3138-033-Q1-N1-C3
gtggagtattttggaaggatgtcttacgttgctcataacgttaatcagccccaagagaaagatttgttggagggaaatttttcctttgatattaaatctcgctctacattggaaaaagtttcctctacaaaagcacaatttgttagtggaaaaaccttcaaatatgatataattggtgctggttcacattcttcagaagactttcctgaaaaggaagatcaagaaaaacccaaaaagattgatgccacattgagacaaagaatatatcctcaatacaatgaggttcaggctcagatggaaacaaatttgtttaaattgtctcttgatgatgttgaaactcctaaaggttccatgttgggatctgaaaattctcaatc

SEQ ID NO: 32572 - DNA, 363 bp, Glycine max
  unsure at all n locations
  Clone ID: LIB3138-033-Q1-N1-C4
caacaactctgttggctgatgggtgtccatatttgtatgcaatggtgcatgatagttcagtgtctacaataccaggtgattttgnnattggtgtcaagttgacaaccataaacaatatgtgtgcatatgggctcaatcctggtatttcaggttctcgtcttttgggcaccattccttattttatttcacaacaaactgtttggaatcaaatggcaacagtgagaacaccattgaattttgattctagcaagctgggcttttgtcagttttctattgaccttctcggnggaggaatcttagtggacaaaactggagattggatcacacttatacaaaattctccaattagtaacttattgagag

SEQ ID NO: 32573 - DNA, 372 bp, Glycine max
  Clone ID: LIB3138-033-Q1-N1-C5
cttcatctcttccacatttcaatattgtcttttcttcttttatatcatcaaaacttcaaaaagcacagtcaaaagctaacacttatagactcatagttgttccaacacacaaagtgtgtgtgagagagagagagagagagagagtagtgatgggtggttgtgaagtagagtttgaggcagatcagtgcaagataccaaagctacccttgttgaaccctcctacaatgcattctccagagagatcagggatgaaaactccaccacttttcacctcagcttcagttccatttggttgggaagaggagccagggaagctaaggccttgcactgatattgtgagcttctccaaccctactccaaagtgcttggaac

SEQ ID NO: 32574 - DNA, 356 bp, Glycine max
  Clone ID: LIB3138-033-Q1-N1-C6
ctaaccatgttctgcattcagatgtggacgttaatctgtttgtgtgggaaggactttactacgcaccgagcaaagcttgcacttatagactcatatgcgatgcaacacctataaacatatggtgatagagagcgagagagagcgtgtcctgatgtgtggttgagaaggaaaaaatggtgcatatcattgcaagataccggtgctcacatgatagatactttatttcctggcgcattgcaggatgattacttgtgttaactccaccacttttcacctcagcttcagttccatttgagtgggaagaggagccagggaagctaatggcttgcactgatattgagagcttctccaaccct

SEQ ID NO: 32575 - DNA, 372 bp, Glycine max
  Clone ID: LIB3138-033-Q1-N1-C7
gaaagccggtacatatgatccaaagcgactactgggtgttacgacccttgatgttgtgagggcaaatacttttgtggcagaggtacttggagttgatccaagagaggttgatgttccagtggttggaggtcatgctggtgtcacaattttgcctcttttgtcacaggttaagcctcgcagtagcttcactgcagaagaaactgaatacctgacaaatcgcatccaaaatggtggaactgaagttgttgaggcaaaagctgggacaggttctgcaacactatcaatggcatatgcagctgccaagtttgctggtgcatgcctccgtggcttaaaaggagaagctggggtagtggagtgtgcttttgttgattc

SEQ ID NO: 32576 - DNA, 358 bp, Glycine max
  Clone ID: LIB3138-033-Q1-N1-C8
gtatgataatgggggcatcagcatcatcggtttggtataatgtgagagtgccgcatccaacgaaagaggtgcccatattagactatgatctggctcttctgttccagcctatgctcatgcttggaatcactgttggtgttgctctcagtgttgtcttcccttactggcttatcactgttctcatcatcattctcttcatagggacttctcaaggccattctttaaaggaattgagatgtggagggaagagactattttcaagagagaaaagaccaagcaacgggcgacgttggttgattctcatggtgaagataagacagttagaatcgacacaaaatatgaaccgttgattcctaaa

SEQ ID NO: 32577 - DNA, 372 bp, Glycine max
  Clone ID: LIB3138-033-Q1-N1-C9
ggcggccaccgcttccagaaccacccgattctcttcttcctcttcacaccccaccttccccaaacgcattactagatccaccctccctctctctcatcaaaccctcaccaaacccaaccacgctctcaaaatcaaatgttccatctccaaaccccccacggcggcgcccttcaccaaggaagcgccgaccacggagcccttcgtgtcacggttcgcctccggcgaacctcgcaagggcgcggacatccttgtggaggcgctggaaaggcaaggcgtgacgactgtgttcgcgtaccccggcggtgcgtcgatggagatccaacaagcgctcacgcgcttcggcggcattcggaacgtgcttccgcgccacga

SEQ ID NO: 32578 - DNA, 376 bp, Glycine max
  Clone ID: LIB3138-033-Q1-N1-D10
ctccctcgtaaccaaaagccatttccaactcaaaaaacatggctccttttcctcttatgtgcttcgttattttgctcctatcctccactgtttcagtcacagccaccgccacccaaacaaccttaacagtgggaaaactcgaccaagttccacacataatgtgcaaggagtgcgagcttccacccccaccccctaaagagtgtcctccgccgccgataccactagcacctccaccaccgttaccaccatcaccttcaccaccgttaccaccatcacctccaccaccgttaccaccatcaccttccgcaaccttaccggcacctataccgctatcttcttcgccacccttaaccgcattttcttcgtcaaccttacc

SEQ ID NO: 32579 - DNA, 381 bp, Glycine max
  Clone ID: LIB3138-033-Q1-N1-D11
acaaggcagaaagcaagctcatcctagagttttaaaaatggcagcagcctcctccatggctctctcttccccatccttggctggcaaggccgtgaagctgggcccatcagcccccgaagtcgggagggtcagcatgaggaagaccgtcaccaagcaggcctcctccggaagcccatggtacggcccagaccgcgtcaagtacttgggcccattctctggcgagcccccgtcctacctcactggcgagttcccaggtgactacggctgggacactgctgggctttcggccgacccagaaaccttcgccagaaaccgtgagctcgaagtgatccactccaggtgggccatgctcggggccttgggctgcgtcttccccgaact

SEQ ID NO: 32580 - DNA, 369 bp, Glycine max
  Clone ID: LIB3138-033-Q1-N1-D12
gtcgctgcttctccctcatggaaaacacagcggcgttgggggaacttgaagtgctccatgacgacaacgccatcataccctaagccctcggagattccgtggcagaaggagctctgcaactccgtcaacctcatcggcaatgtcgcggcccccgtcgaaatcaaacacctcccctccggcaaggtcgtcgcctggacccgcctctgcgtcaagaaaagcgccacgcaatcatcgtccataagcctcacattctgggacgacctcgctcatgtcgcgtcccagcatctccagaaaggttaccaaattcatgtctccggtcgcctcataatcgacacggtcgaaaccgaggaaggcaaaacccaaacttac

SEQ ID NO: 32581 - DNA, 260 bp, Glycine max
  Clone ID: LIB3138-033-Q1-N1-D2
ggacgcacctgctgttggcttgttgttcaaggatggcaatttgtaagaaagatgtttggagagttgaatgtggaatcccttctggatttccgctcacagttatttgcaatagcatttttaatgagatgctcattagatatagctatgaaaaattactgcgccaggctaaagctccaagtatgtttttacaatccttcaaaaattttgtttttttgggtgtgtatggggatgataacttaattagtgttcatgaatatgtc

SEQ ID NO: 32582 - DNA, 320 bp, Glycine max
  Clone ID: LIB3138-033-Q1-N1-D4
agagaagtgagatacactaagttatcctcataaatacactctaattaggtggcaagataagtgtctaaccttagtaacattgccacatattgtgttcattttggaattgtgccactaaaattctattcaattcatctatggctgcctcttcttatgctatgcaatcaatcctggcaaaccctttgatccgcatttccagcgggtctagggtgaaccaatttggcgttcctgctttgcacatgagaaggaattgttggcctgagagttaggtccatggctaatgaagaacaaccaagtgagcctgcaatcccagttacacc

SEQ ID NO: 32583 - DNA, 388 bp, Glycine max
  Clone ID: LIB3138-033-Q1-N1-D5
cagtcctttgctccacttccttcaaatgaagtgcatgaagaaaagtccatgcaaacttcctctgtaacagacttgaagacgtttgatacttctgcctcaataaatcttaaacccccacctattgaccgtcataaatcatttgatgatgaagaattctccaagaggcccacaattgtgaagaagactgtaacagctcctgcaaatgtgaaatcatattctattgctgaactgcagattgctactggcagcttcagtgtggatcaccttgttggcgagggatcttttgggcgtgtttaccgggctcaatttgatgatggacaggttcttgcagtgaagaagattgaatcatctatccttcccaatgatttgacagaatgattttatacaa

SEQ ID NO: 32584 - DNA, 384 bp, Glycine max
  Clone ID: LIB3138-033-Q1-N1-D6
ctcttattcatccttctcttctgaataatccagatctctttctgcccttttctccgtcacgcttttcgtgaccggatctgtatggatttgatccagatctacacgccgatggtggttttggccgggtctttcatagatctggtgcgtagaggctcagatctacggtaccgaggtacaacagagaatcgatgacaagaacgcagatccgacggtagatccagccgattccgcttgttcgatcgctacagacccctgtatcggatcattaagcagcgtgtctcgcgcgttctacacgtgttgccgatctcggatgttgtaaaattagtttatgatgtgaagctatggagtggaaaatatgtggatgtaagagatttcgggatgaat

SEQ ID NO: 32585 - DNA, 375 bp, Glycine max
  Clone ID: LIB3138-033-Q1-N1-D7
gggagaagaagcggtgagaaagcaaggacaaaggggtgttgatggagataaatggtacttgcttatctgcttacaagactgtaaatattggtgctgtaatttaatacacgagactagcatttctttttcgatggttccttttgagtgaaaaaaaccttgtctactcatcagatgtctttggagagatctttaagacgacattgactgctaacaacaatacagtggatcaatcattaaaggcttacttattcttctatcttcttattattcttcttcttgtaacaacaataagataccatctttcccactcatgaagagactaaacagcttatattcttacactgtcctcatgacaatttttccatgatcatcaac

SEQ ID NO: 32586 - DNA, 383 bp, Glycine max
  Clone ID: LIB3138-033-Q1-N1-D8
gaaatgtgaaagcttaaacccccaaaaccaaaaccctagcgaggttggttcccaattcccatggtttctcacccgaaatcgaagttcagtgtctatcaaaacccttccttttcggcggttctcacttccaacagtcttcaaccttccaagttcaccatcctctccttcttctctgcctccgcattcgcttttctcgctgtcttctttagggaaaacggcttcgtccacattttgagcttcgcagctttttcccctgtcacagcttgtaagtttccaacctcaatttttttaattagggtaatttctgatccctttattgaacttcagattggcttgccaagacgctacaagctatagtgggttttatcttcattgtttctgca

SEQ ID NO: 32587 - DNA, 303 bp, Glycine max
  Clone ID: LIB3138-033-Q1-N1-D9
ttccttattgacaatcccaaacagtctacagtttttgatattctcttgggaatctctcaagattttgaaattgctggtaatactcttatgccagctttttctgttccacaggctactgccagatcttctgaaaatgcggaatcctctgcatgatctggaatttgtgttttctttcgcttgttcgtttgtttaattcaataaaggaaattaggcatgaccctcttgttgagtatgctctgcctatttgaaaatttccacacctcttttaattgtcgtaatgatgtgtgaagtgtgtgttatttt

SEQ ID NO: 32588 - DNA, 361 bp, Glycine max
  Clone ID: LIB3138-033-Q1-N1-E1
ttccttattgtctataccaaacagccttctaaattggataaagtctcgtgtaccactccacaatttgtaagtgcagaaaccactctaattccaacaattggtgctgcgcaagcttcttccaaatatttttctgaagcggaagaccatgaaagacccggaaagagtgatgccttactgtgacaaagactagacacctccctacaacagaggttcatgctcagatggaaacaaatttgttttaattgtctcttgatgatgttgacacttctaaaagttccatgttggatctgaaaatttcttcatcttaaaatgcactttccaagaacacaatttggtggaaccattctgcgtagtgatctat

SEQ ID NO: 32589 - DNA, 389 bp, Glycine max
  Clone ID: LIB3138-033-Q1-N1-E10
ctgggaatgcagcagtcaaaaggagtgattgggcctcattggtacaagtgtttttaacaaacagcaacagtacagagcattttgatgcatgtaagtggacaaaatcagaaccacattcctgggaattgatcttcccaatagaggtatgtggtcctaataatggttttgaaatgtggagttctgagtgggcaaatcaaacttcatggcatttgagtttccttattgacaatgccaaacaggctacagtttttgatattctgtggggaatctctcaagattttgaaattgctggtaatactcttatgccagctttttctgttccacatgctactgccagatctttttaaaatgcggaatcctctgcatgatctggaatttgtgttttcttt

SEQ ID NO: 32590 - DNA, 382 bp, Glycine max
  Clone ID: LIB3138-033-Q1-N1-E11
aatgaattggcacatggatccccaccctatctgtgcctttggctatgtgtgtgaatttaaatgataactgaagaaaactaaggaaggaaggaagagtgagcgtgaaagatgccttgggtgaggctttcagagtctccaaggctcgacgttgctattgacatgggtaatccatttctcaatctcactgttgatggtttccttaagatcggagctgtcgcagccacgcgatcagctgctgaagatacttatcatattatccaaaaggggaatatctcaagtcgtgatttcgagaaaacttaagaagatgtgtaaagaaggtgtatattggggaactatagctggcgtttatgttggaatggaatatggggtagagaggatccgt

SEQ ID NO: 32591 - DNA, 393 bp, Glycine max
  Clone ID: LIB3138-033-Q1-N1-E12
ctcgagccgaaagatttgttggagggaaatttttcctttgatattaaatctcgctctagattggaaaaagtttcctctacaaaagcacaatttgttagtggaaaaaccttcaaatatgatataattggtgctggttcacattcttcagaagattttcctgaaaaggaagatcaagaaaaacccaaaaagattgatgccagattgagacaaagaatagatcctcaatacaatgaggttcaggctcagatggaaacaaatttgtttaaattgtctcttgatgatgttgaaactcctaaaggttccatgttggatctgaaaatttctcaatctaaaattgcacttcccaagaacacagttggaggaaccattctgcgtagtgatctattggcaaat

SEQ ID NO: 32592 - DNA, 381 bp, Glycine max
  Clone ID: LIB3138-033-Q1-N1-E2
tagcaactaactctaaaaatcctcactgtatggccatcaatctcagtggcactgcttctcttcactctaagccttcctttctgactcatgaacacaacaacctcatcaaattctatcatcctttttcctctttgctcacaacatgtgctcaaacacatgggactgacactggagttacacagaaagatgatgcttctgctggatctttatcttcttctcgtgcacagctggatcttttggagcaacttacatctacaagctcacctaatagtggttatgaaagtgatggaagatctcgcacacttacaatccgagagcagatcgtgcagttgtttggagaaagggatgatgatttcaccatacccctaggtaaaaacttga

SEQ ID NO: 32593 - DNA, 379 bp, Glycine max
  Clone ID: LIB3138-033-Q1-N1-E3
gtaagcaatcaggtgcaacattcccttgttgatatgcgtccccaacagagaatggcagagctttgtcagcatacaggagtcaaacttataacgtatggaacagtaatgggtggtctgttgtctgagaagttccttgacaccaacatagctattccttttgctggtcctgcaataaacactccctccctccaaaagtacaaaaggatggtagatgcttggggaggatggagtttgttccagggactgcttcggactcttaaacaagtagcttctaaacatggcgtatcgatcgcaactgttgctgtgaagtatatactagatcagcctgcagtagcaggatcaatggttggtgtcagacttggcttggcagaacatattc

SEQ ID NO: 32594 - DNA, 387 bp, Glycine max
  Clone ID: LIB3138-033-Q1-N1-E4
tgcagattgaaccagacatgaattcaaggtttcagcttttgagtaccactaccaatggtgattttgttcaagggaaagatctcgcaatggttaaagttaatgtagcatgtgctgctgttggcttgacatcaagttacactccaactccattgttggaatctggtttgcaaaaagacagagggttaattgtggagtattttggaaggatgtcttacgttgctcataacgttaatcagccccaagagaaagatttgttggagggaaatttttcctttgatattaaatctcgctctagattggaaaaagtttcctctacaaaagcacaatttgttagtggaaaaaccttcaaatatgatataattggtgctggttcacattcttcagaag

SEQ ID NO: 32595 - DNA, 385 bp, Glycine max
  Clone ID: LIB3138-033-Q1-N1-E5
gttcgtcaccatgactttcaagcgcaggaatggaggtcgcaacaaacacggccgcggccacgtcaagttcattcgatgctccaactgcggcaaatgctgccctaaggacaaggctatcaagaggtttctggtgaggaacattgttgaacaggctgcagtcagagatgtgcaggaggcttgtgtctacgaacaatacacgcttccgaagctgtatgtgaagatgcagtattgtgtttcctgtgctatccactctcatgttgtgagggttcgatcccgcactgataggagaaagcgtgagcctccacagcgattcatcaggcgcagggatgatgcaccaaggcctggtcagcctggtcaagccccacgtcctgctggagtaagagct

SEQ ID NO: 32596 - DNA, 390 bp, Glycine max
  Clone ID: LIB3138-033-Q1-N1-E6
cttaattagtgttcatgaatatgtcaagccttactttagtggttctaaattgaaaagctttctagctagtcataacatcaccattactgatggtattgacaaaactagtgcaactttgcaatttagaaagttagcagattgtgattttctcaagagaaactttaagcagatgtctaatgttttgtgggtggctcctgaggacaaggcgagtttatggtcacaacttcattatgtttcgtgtaataatctggaaatgcaagaagcttatcttgtcaatctcgtaaatgtgttacgagaattgtatttgcacagtccagaggaagctcgccaattgagaaggaaagctctctctcgtattgaatggctgcaaaaagctgatgtgcctaccat

SEQ ID NO: 32597 - DNA, 372 bp, Glycine max
  Clone ID: LIB3138-033-Q1-N1-E7
aacaaaaacaacacatcacggagccaccaaccatggcttccaagctctgcgactcatgcaaatccgccactgctaccttgtactgccgccctgacgccgcgttcctctgcggcgcctgcgattctaaggtccacgccgccaacaagctcgcgtcgcgccacccgcgcgtggcgctctgcgaggtgtgcgagcaggccccggcgcacgtaacctgcaaggctgatgccgccgcgctctgccttgcctgcgaccgcgacatccactccgccaaccccctcgccagccgccacgagcgcatccccgtctcaccgttcttcgagtccgtacactccgtcaaggcctcctcgccgatcaacttcctagatgaccacc

SEQ ID NO: 32598 - DNA, 381 bp, Glycine max
  Clone ID: LIB3138-033-Q1-N1-E8
taaaattcaagctgtaattgaagctggtgtttgtccccgacttgttgagctgctgctgcacccatccccttcagtgctaattcctgctcttcgaactgttggaaatattgtcactggagatgatatgcagacacaggttatcatcaatcaccaggctcttccttgccttctgaatctgttgaccaataattataaaaaaagcatcaagaaggaagcttgttggaccatatcaaacatcacagctggtaataaacagcagattcagcaggctgtgattgaggctaatctaattgctcctttggtcaatctgcttcaaaatgctgagtttgatatcaagaaagaagctgcttgggctatctcaaatgctacatccggtggttc

SEQ ID NO: 32599 - DNA, 379 bp, Glycine max
  Clone ID: LIB3138-033-Q1-N1-E9
ctccactgggccgggcctcaagcccacaccgactactttcgtcccctccgccgtcgccacgcccaattcctccctcctcagcgaagaagccttcaaaggacttggccgcgacttcgacgaattcgaccacgcctccgattccgactccgccgccgaatccgttcaccccgacgagcttgacatttccaagctcgacttgccctcgcgcctcgtcgagtctctccagagccgtggaattactcaacttttccccattcagagagcggtgttagtacctgcactagaaggtagagatatcattgcgcgagccaagaccggtaccggaaagacgttagcgttcggaattcctattattaaaggcctcactgaagatgaacac

SEQ ID NO: 32600 - DNA, 385 bp, Glycine max
  Clone ID: LIB3138-033-Q1-N1-F1
tatttttcttcctcagtagtgtcatttacgcttctcttctctgcagcaactatgcctaaccctaaggtcttcttcgacatgaccatcggcggtcaatctgctggccgcatcgtgatggagctctacgccgacgtcactccccgcaccgccgagaacttccgcgcgctttgcaccggcgagaagggcgtagggcggagcggcaagcccctccactacaagggctcgtccttccaccgcgtgatcccgagtttcatgtgtcagggtggcgacttcaccgccggaaacggaaccggcggcgagtcgatttatggcgccaagttcgccgacgagaacttcgtgaagaaacacaccggtcccggcatactctccatggcgaacgccggtc

SEQ ID NO: 32601 - DNA, 394 bp, Glycine max
  Clone ID: LIB3138-033-Q1-N1-F10
gcgcagatggattccaccgagctcttgtctatgatttcttcccgaatggttctcttgaaaagttcttagcaccaccggacaacaacgatgttttcctcggttgggagaaattgcaacaaattgctcttggtgttgccacagggattgagtatctccatcttggttgtgatcacagaatacttcacttcgacatcaatcctcacaatgttttactagatgaccacttcctccccataatcacggattttggacttgccaagttgtgtcccaaaaatcaaagcacggtgtctatgaccgcagcaagaggaacgttagggtacattgcccctgaagttttctcaagaaacttcggtaacgtgtcttacaagtctgacatttacagctatggaatgtt

SEQ ID NO: 32602 - DNA, 316 bp, Glycine max
  Clone ID: LIB3138-033-Q1-N1-F11
gcgccaatggcttcccacgggcaagcctcacctagctatatcggcccggcagtttggctacgcacggatgtatatcatcactctggtatctttcaagcatggcatgagacattggatactctgagcgtgccgtcatgtaatggctggtattataatagcccctttggcactactccttgaaagaaaaatacgaccaaagatgactcttcccatcttactgacgatagcggcacttggttaccttgagccaacgctacatcagaacttgtacaacatggggatgaagatgacctcaacaacgagtgcatctgccact

SEQ ID NO: 32603 - DNA, 344 bp, Glycine max
  Clone ID: LIB3138-033-Q1-N1-F2
gtgttcccaggacctattgtgttttaaacccacaaaatccttgtgggatcaatacgtggctgggaagactgactttaccccaccgcacttgccgaagcggtaagacaatgcctgtttgtatatgtgcgggagctggcgcacagaacgctacttctaatgaatatgcgctatgccgcgcttatcaatggcgaaaggttttgcgggaaacctcttcactacaagggcttaggactaccacctccctaccctaaatgttctgtgtcttgcttgataccttaccgccatatacctgacgataccatcaattatgaagcttttcccgaccagctgctacaacttggaga

SEQ ID NO: 32604 - DNA, 373 bp, Glycine max
  Clone ID: LIB3138-033-Q1-N1-F5
gtctttattctaatcctactttggaagatatcccacattcagcttgggaccttttttgctgggacagtgagaaaactttaccaaataatttttctgcagaattgctctcttgcaaattggatactgttactggccaatattatcctgagtgggctccaattaattgtcgagttcatcgacaaccaattcacatcactgaaggaaattatgtcagaaagcaagatgtcagcattgaatatgatgcatgtacaattccaaatgattgtggttcattggttgttgccaaggttggaaatcacaaacaaattgttggtttccatgttgcttgaagcaaaggaagactgcgatatgcttcattgataccatatgttga

SEQ ID NO: 32605 - DNA, 396 bp, Glycine max
  Clone ID: LIB3138-033-Q1-N1-F6
acaacgcacccttcatctcttccctttcactcattctttgatcccctttttcttcacgccaactctctcttctgggtttctttcattttcagaatctcattatcacctcactgtgattatcttctaattccaaattggtgtttggttgctgagaaactccaagaaaaaaaaaatacagcttttccgtgtattgatgatcctctgttcactcagaaaacttttctcttttgtgtgtagagtctagtacctcagactgcatgacccacttctgaattttctttgttttcgtcgtccttcgctagaaaagctataaaagacaagattttttaatctggatcttgccttcttctttttttccttactcataccatatttcgcttcatttttctttttttt

SEQ ID NO: 32606 - DNA, 298 bp, Glycine max
  Clone ID: LIB3138-033-Q1-N1-F7
ctcgagccgctgcttgtgaatcatatctggctgcagaagcaggacacgatgctttataaatatcattgcttgatgaacatagcgattgactgtttcaggttgcagaagatctatatcaaccatgttcccgtggagaaattatccgctggccttcagactgtctaaggaagggctataaatagattcgtcctgatgttggtttctaacagtttcatttcgatgatccacataaatactatatctacttttatttagggtgcttctaatcacattgccttacacattggcattccttaag

SEQ ID NO: 32607 - DNA, 377 bp, Glycine max
  Clone ID: LIB3138-033-Q1-N1-F8
ctccaattctagaataaaattcctattcttcttctcatttcaactctttgcaattgcgatctttcattccttttttttactcttggtaagcgtagttcggtgttggagaaccagcttccagttccagaatactgctgaacagagttcggcttcgctttattgggactcagttgtgtttctactaggttatcttctctgaattgcaaatgaatgatcgttgaaaaaccatgaagaaggtgaggagaaagatcggcaagtatgaggtgggtcggactattggcgaaggcaccttcgccaaggttaagttcgcaagaaactcggagacaggggagagcgtggctattaaagtcatggcttagaccaccattctccagcac

SEQ ID NO: 32608 - DNA, 246 bp, Glycine max
  Clone ID: LIB3138-033-Q1-N1-F9
ctcgagccgctctagccgcaacttcctgcttcatctggagaaaatcgtgttggtgttgccccaacttcctcaacaaattctgcacctgccaagccacggatgcgctggacacctgagcttcatgaggcatttgtggaggctgtcaaccaacttggtgggagtgaaagagctacccctaaaggtgtgctgaagctcatgaaagttgatggattaactatataccatgttaaaagccacctacagaag

SEQ ID NO: 32609 - DNA, 395 bp, Glycine max
  Clone ID: LIB3138-033-Q1-N1-G10
agagcattttgatgcatgtaagtggacaaaatcagaaccacattcctgggaattgatcttcccaatagaggtatgtggtcctaataatggttttgaaatgtggagttctgagtgggcaaatcaaacttcatggcatttgagtttccttattgacaatcccaaacagtctacagtttttgatattctcttgggaatctctcaagattttgaaattgctggtaatactcttatgccagctttttctgttccacaggctactgccagatcttctgaaaatgcggaatcctctgcatgatctggaatttgtgttttctttcgcttgttcgtttggttaattcaataaaggaaattaggcatgaccctcttgttgagtatgctctgcctatttgaaaatt

SEQ ID NO: 32610 - DNA, 393 bp, Glycine max
  Clone ID: LIB3138-033-Q1-N1-G11
gccgaaggcgcaggccccgatctcgccgcgcccgaagcccaaggccttgcgcctgccgatgccggcactccccacggcgtcgccaacactgcggccggtaaggagtcgttcgacgaggtcttcaggcaggacaaggcgtactcgggcgagtgggcgcagacggccgggcgcttcaagccggcgtacaggcctgtgccgcagcggtggaagaacagcgagatcctggcgcgtttgaggtcgcatgtcaagtcgcgtagtgcgggtggtgtgctggaaggcgagggcgtggaggcgaaggcggacgatgcgaatgctgggaagggaatgggttttatgccggagttgaagaattatgatcgtgcttgagggccttggttcggatgatgggtattg

SEQ ID NO: 32611 - DNA, 386 bp, Glycine max
  unsure at all n locations
  Clone ID: LIB3138-033-Q1-N1-G12
gatttgttgggtttacaaggagcaggtaaagcttttccaaacaaaattgtttttgatgataagcttgtgttggctaacacacaagaattctttgatggaaattttccagtggattcttggttaccaatttttgtgaattgtctttatcctgtaagtcaattaccttcagaagctgtcgttgtaaatgttacatgtggtagtggacgtggtggtttacccaccactgcttggattagttctgcagttaacaatcgctcctcagatatcaacanaaggattcgcacagcacttgggaaaggtaagaaaattgtttttctactaggagtgatccttttcagtagctttactggcttgtctttttgcgtaagaatgaaatctgagttcta

SEQ ID NO: 32612 - DNA, 381 bp, Glycine max
  Clone ID: LIB3138-033-Q1-N1-G2
agcagatcaatctctctctctctctcaaccataatagtcatgggtttgaaggaggattttgagcagtatgctgagaaagcaaagactttgccaccgactcaatcaaacgaagacttgcttatcctttatggattgtacaaacaggccaccgttggacctgtcaacaccagccgtcctggaatgttcaacatgagggacagagctaaatgggatgcatggaaggctgttgaagggaaatccaaggacgaagcaatgggtgattacatcattaaggtgaaacagctgctggaagcagctggcttgcctgcttgataacattgtcatgccttgctttctgattctgtgctagaagttcacaacagtttggaaataaacaattgc

SEQ ID NO: 32613 - DNA, 382 bp, Glycine max
  Clone ID: LIB3138-033-Q1-N1-G3
gaaagatgtttggagagttgaatgtggaatcccttctggatttccgctcacagttatttgcaatagcatttttaatgagatgctcattagatatagctatgaaaaattactgcgccaggctaaagctccaagtatgtttttacaatccttcaaaaattttgtttctttgtgtgtgtatggtgatgataacttaattagtgttcatgaatatgtcaagccttactttagtggttctaaattgaaaagctttctagctagtcataacatcaccattactgatggtattgacaaaactagtgcaactttgcaatttagaaagttagcagattgtgattttctcaagagaaactttaagcagatgtctaatgttttgtgggtggct

SEQ ID NO: 32614 - DNA, 350 bp, Glycine max
  unsure at all n locations
  Clone ID: LIB3138-033-Q1-N1-G4
gcttgtgttggctaacacacaagaattctttgatggaaattttccagtggattcttggttaccaatttttgtgaattgtctttatcctgtaagtcaattaccttcagaagctgtcgttgtaaatgttacatgtggtagtggacgtgggtggtttacccaccactgcttggattagttctgcagttaacaatcgctcctcagatatcaacaaaaggattcgcacagcacttgggaaaggtaagaaaattgtttttcttactagagttgatccttttccagtagctttactggctgttctttntggcgttaagaatgaaattctgagttctaacgccactaatcctatgctg

SEQ ID NO: 32615 - DNA, 238 bp, Glycine max
  Clone ID: LIB3138-033-Q1-N1-G5
gttctttttggcgttaagaatgaaattctgagttctaacgccactaatcctatgctgacgcgacttcttgagaactgcaagagtctcaaatatctggttgatgagtgaccctttgcatgtgtgaactactatgtggcattttcttcacttaaataaagccgcctactgtgtgcaaggggggggtttaattttggcatcaaaaaaaaacaaaggaatgcgcgcgatacttggaagccgg

SEQ ID NO: 32616 - DNA, 361 bp, Glycine max
  Clone ID: LIB3138-033-Q1-N1-G7
caaaactggagattggatcacacttatacaaaattctccaattagtaacttgttgagagttgctgcttggaagaaaggctgtttaatggtcaagattgtgatgtctgggaatgcagcagtcaaaaggagtgattgggcctcattggtacaagtgtttttaacaaacagcaacagtacagagcattttgatgcatgtaagtggacaaaatcagaaccacattcctgggaattgatcttcccaatagaggtatgtggtcctaataatggttttgaaatgtggagttctgagtgggcaaatcaaacttcatggcatttgagtttccttattgacaatccaaacagtctacagtttttgatattc

SEQ ID NO: 32617 - DNA, 233 bp, Glycine max
  Clone ID: LIB3138-033-Q1-N1-G9
gacagcgagagagagagagacacatagagagagtgatagagttggtgactttctcacatgatgggttcgacaaaggggactggccccacctccgaacgcaaaagcaactcactgcagaggaagatgatgatgaagaatatatcagcaacaacttcaactcacagaaatggtgtgccctcaacctggtactcaggttcaagaagaacacgcatctccaccccacaatgaatcta

SEQ ID NO: 32618 - DNA, 327 bp, Glycine max
  Clone ID: LIB3138-033-Q1-N1-H1
tggtggtttacccaccactgcttggattagttctgcagttaacaatcgctcctcagatatcaacaaaaggattcgcacagcacttgggaaaggtaagaaaattgtttttcttactagagttgatccttttccagtagctttactggctgttctttttggcgttaagaatgaaattctgagttctaacgccactaatcctatgctgacgcgacttcttgagaactgtaagagtctcaaatatctggttgatgagtgtccttttgcatttgtgaactagtatgtagtattttattcacttaaataaagcgcattactatgtgcaatgag

SEQ ID NO: 32619 - DNA, 389 bp, Glycine max
  Clone ID: LIB3138-033-Q1-N1-H10
gaattgtggaatcctgcttgcacaaaagcaatgactatgtcatttaatccaaacccgtgttctgatgcatggagtttggaatttctgaagcgtactggatttcattgcgatatcatttgtgtcactggatggactgccaccccaatgcaggatgttcaggttacaattgattggtttatttcctctcaggaatgtgttcccaggacctattgtgttttaaatccacaaaatccttttgtgttaaataggtggatgggaaaattgactttcccccagggcacttcccgaagtgttaagagaatgcctctttctatagggggaggagctggtgcaaagaatgctattctcatgaatatgccaaatgctgttctttcaatgtggagatattt

SEQ ID NO: 32620 - DNA, 374 bp, Glycine max
  Clone ID: LIB3138-033-Q1-N1-H11
aaagcgtaaactgtcctttctactgcgaaagggatcatcacctccgattcccagatttctgtgtgttcggcgtcaccttgtggttctggaaccaccttctctccgtcgtttctgaccataaaacggtgccatttcccagcaaatggaactgcgtgtccgtgcgacattgtaaatctgagagaggatgattcttacaaagggttttgtaactggtagaatcagtaagtgaaagcttgggttcacgaagaacaatggcaaagctcagagattcggtgagtttgatgatgaaaggagtagcaagttgttatctgagaataaggaagcctcgccggagataatggattcgaatcagcaaagaagaagggtttcagaag

SEQ ID NO: 32621 - DNA, 382 bp, Glycine max
  Clone ID: LIB3138-033-Q1-N1-H2
gtattatttccttcttcagcttagctcaaccacttccacttcaacaatcaacatggcttcatcactcgcaaccatactcgtcgccttgccccaaaccccgcaatgccgtagcaccttccgatccgatccacccaaactatccctaaccctaaaacccaaggccactgttacatgtaaggccaccctgtccactaccctggagactagcatccagcagcagcagcagcaagatgaccaaaaacaaaagcccgtggccgaggtgtggcgcaagatccacggggaggacaactgggccgggcttctggacccgatggacccggttatgcgaggcgagctgacccgctacggcgagatggcccaggcctgctacgacgcattcgac

SEQ ID NO: 32622 - DNA, 385 bp, Glycine max
  Clone ID: LIB3138-033-Q1-N1-H3
cgagaattgtatttgcacagtccagaggaagctcgccaattgagaaggaaagctctctctcgtattgaatggctgcaaaaagctgatgtgcctaccatagcacagattgaagagttccattcgatgcagaggatgatgaatgctcctgattcaaatgataatattgatttactgttgagcattgatttgttgggtttacaaggagcaggtaaagcttttccaaacaaaattgtttttgatgataagcttgtgttggctaacacacaagaattctttgatggaaattttccagtggattcttggttaccaatttttgtgaattgtctttatcctgtaagtcaattaccttcagaagctgtcgttgtaaatgttacatgtggtagtg

SEQ ID NO: 32623 - DNA, 356 bp, Glycine max
  Clone ID: LIB3138-033-Q1-N1-H7
ccattcctcagtccatttcacagcaaactgtttggaatcaaatggcaacagtgagaacaccattgaattttgattctagcaagcagagcttttgtcagttttctattgaccttctcggtggaggaatcttagtggacaaaactggagattggatcacacttatacaaaattctccaattagtaacttgttgagagttgctgcttggaagaaaggctgtttaatggtcaagattgtgatgtctgggaatgcagcagtcaaaaggagtgattgggcctcattggtacaagtgtttttaacaaacagcaacagtacagagcattttgatgcatgtaagtggacaaaatcagaaccacat

SEQ ID NO: 32624 - DNA, 154 bp, Glycine max
  Clone ID: LIB3138-033-Q1-N1-H8
ctcacccaatcgttcagggaaaattgtttttgggcggggattcaaagctcatggtgattaaaaaagcagctaagctctgcaatgcatgtggagctttaaatatcattttagtgccaagcctgatgacctaattgtccagctttgttaatccttt

SEQ ID NO: 32625 - DNA, 342 bp, Glycine max
  Clone ID: LIB3138-033-Q1-N1-H9
gttctgagtgggcaaatcaaacttcatggcatttgagtttccttattgacaatcccaaacagtctacagtttttgatattctcttgggaatctctcaagattttgaaattgctggtaatactcttatgccagctttttctgttccacaggctactgccagatcttctgaaaatgcggaatcctctgcatgatctggaatttgtgttttctttcgcttgttcgtttgtttaattcaataaaggaaattaggcatgaccctcttgttgagtatgctctgcctatttgaaaatttccacacctcttttaattgtcgtaatgatgtgtgaagtgtgtgttattttt

SEQ ID NO: 32626 - DNA, 348 bp, Glycine max
  Clone ID: LIB3138-034-Q1-N1-A1
caaactgtttggaatcaaatggcaacagtgagaacaccattgaattttgattctagcaagcagagcttttgtcagttttctattgaccttctcggtggaggaatcttagtggacaaaactggagagtggatcacacttatacaaaattctccaattagtaacttattgagagttgctgcttggaagaaaggctgtttaatggtcaagattgtgatgtctgggaatgcagcagtcaaaaggagtgattgggcctcattggtacaagtgtttttaacaaacagcaacagtacagagcattttgatgcatgtaagtggacaaaatcagaaccacattcctgggaattgatc

SEQ ID NO: 32627 - DNA, 407 bp, Glycine max
  Clone ID: LIB3138-034-Q1-N1-A11
gtgatgataacttaattagtgttcatgaatatgtcaagccttactttagtggttctaaattgaaaagctttctagctagtcataacatcaccattactgatggtattgacaaaactagtgcaactttgcaatttagaaagttagcagattgtgattttctcaagagaaactttaagcagatgtctaatgttttgtgggtggctcctgaggacaaggcgagtttatggtcacaacttcattatgtttcgtgtaataatctggaaatgcaagaagcttatcttgtcaatctcgtaaatgtgttacgagaattgtatttgcacagtccagaggaagctcgccaattgagaaggaaagctctctctcgtattgaatggctgcaaaaagctgatgtgcctaccatagcacag

SEQ ID NO: 32628 - DNA, 387 bp, Glycine max
  Clone ID: LIB3138-034-Q1-N1-A12
atcgctgtttttcccgaacaagagagcatggccgtagctgatcccaagcctcactccgaacctaaggtctggaacttcttcaagctttcgttccgacattccgccgccaccaatacgacgccgccttccgctaaccttcaccatcttcatgatcaccataaccaccaccaccaccaccaccaccaccacaaccctaataatctccccctcgagggttccacttcccacacctacaattccgattcctccggcgcgagatctcttctgccaacacgacgtcgtgtcaagctcgatccctgcaacacgctctactttccttatgagccgggcaaaaccgttacgagtgccatcaggagtaaaaacaccaattgaattagcgtaactttc

SEQ ID NO: 32629 - DNA, 259 bp, Glycine max
  Clone ID: LIB3138-034-Q1-N1-A2
ggatgatgaatgctcctgattcaaatgataatatcgatttactgttgagcattgatttggcggggttacaaggagcaggttaagctttttcaaacaaaattgattttgatgatcagctcgtgttggctaacacacaagaattctttgatggaaattttccagtggactcttggttaccaatttttgagaattgtctttatgctgtaagtcaattaccttcagaagcctgtcgtgtaaatgatacatgtggtagtggacg

SEQ ID NO: 32630 - DNA, 392 bp, Glycine max
  Clone ID: LIB3138-034-Q1-N1-A3
tctgcgtagtgatctattggcaaattttttgacagagggcaattttagagcaagtgttgatttgcagcgcactcatcgtattagaggaatgattaaaatggtggccacagttggtattcctgagaatacaggtatatcattggcctgtgctatgaatagttcttttagggggcgcgccagttctgatatttacaccatctgctctcaagactgtgaattgtggaatcctgcttgcacaaaagcaatgactatgtcatttaatccaaacccgtgttctgatgcatggagtttggaatttctgaagcgtactggatttcattgcgatatcatttgtgtcactggatggactgccaccccaatgcaggatgttcaggttacaattgattggttta

SEQ ID NO: 32631 - DNA, 284 bp, Glycine max
  Clone ID: LIB3138-034-Q1-N1-A5
ctaaagccaaatcttatttttcaattgaatatttaatctaattcgcggggttattgtcattaatttataaaccttcttggttggggaattctaacgaataaggttggagattggatcacacgtatacacatgtctactattagaaacttgtaaatagtttttttttggaaaaaaggctagttaatggtcaaaattgttatgcttgcaaaagcataaattgaaaagttatgatttgcacatattgtatgatgtgttttttaaatacaaaatccgaacatataatt

SEQ ID NO: 32632 - DNA, 388 bp, Glycine max
  Clone ID: LIB3138-034-Q1-N1-A6
aaaaccttcaaatatgatataattggtgctggttcacattcttcagaagattttcctgaaaaggaagatcaagaaaaacccaaaaagattgatgccagattgagacaaagaatagatcctcaatacaatgaggttcaggctcagatggaaacaaatttgtttaaattgtctcttgatgatgttgaaactcctaaaggttccatgttggatctgaaaatttctcaatctaaaattgcacttcccaagaacacagttggaggaaccattctgcgtagtgatctattggcaaattttttgacagagggcaattttagatcaagtgttgatttgcagcgcactcatcgtattagaggaatgattaaaatgggtgccacagttggtatttctg

SEQ ID NO: 32633 - DNA, 276 bp, Glycine max
  Clone ID: LIB3138-034-Q1-N1-A7
tgcgatatcatttgtgtcactggatggactgccaccccaatgcaggatgttcaggttacaattgattggtttatttcctctcaggaatgtgttcccaggacctattgtgttttaaatccacaaaatccttttgtgttaaataggtggatgggaaaattgactttcccccagggcacttcccgaagtgttaagagaatgcctctttctatagggggaggagctggtgcaaagaatgctattctcatgaatatgccaaatgctgttctttcaatgtgg

SEQ ID NO: 32634 - DNA, 286 bp, Glycine max
  Clone ID: LIB3138-034-Q1-N1-A8
cacaaggcagaaagcaagctcatcctagagttttaaaaatggcagcagcctcctccatggctctctcttccccatccttggctggcaaggccgtgaagctgggcccatcagcccccgaagtcgggagggtcagcatgaggaagaccgtcaccaagcaggcctcctccggaagcccatggtacggcccagaccgcgtcaagtacttgggcccattctctggcgagcccccgtcctacctcactggcgagttcccaggtgactacggctgggacactgctgggctttc

SEQ ID NO: 32635 - DNA, 405 bp, Glycine max
  Clone ID: LIB3138-034-Q1-N1-A9
ctcgagccgattcggctcgaggccctttgaggggggaatggagatgtccttggatacgtctgatcatacatcagatcttgagagtgaaaggacaaatggaaaaccaaagaataaacttcctcgtcctcgtaatcctctaattgatgctgttgctgctcatgacaaaagcaagcttaggaaggttactgaacgggttatgcctcaaattgcaccaaaggtagatgaaagagattctttactagaacagataagaacaaagtccttcaacttgaagcctgctgtgactacacgacctagcattcaaggtccaaaaacaaatttgaagtttgctgccatcttggagaaagcaaatgcaattcgccaggctttggctggaagtgatgaagatgatgatgcagattggag

SEQ ID NO: 32636 - DNA, 330 bp, Glycine max
  Clone ID: LIB3138-034-Q1-N1-B10
attttgtcgtctgagtttgtcagtgaaacaagagacagaagcctaatagcaagttggtgtccacaggaacaagtgctaaaccatccttcaattggtgtattcttgactcattgtggatggaactcaactactgaaagtgtttgtgctggagtgccaatgttgtgttggccattttttgcagaacagccaacaaactgtagatacatttgcaatgagtgggaaattgggatggaaattgataccagtgcgaagagagaggaggtggagaagctagtgaatgaattgatggtgggagagaagggaaagaagatgagagaaaaggtcatggag

SEQ ID NO: 32637 - DNA, 348 bp, Glycine max
  Clone ID: LIB3138-034-Q1-N1-B11
cttacagtgaggatgatatccataagagtattaagtataacgtgtgggccagtacccaaaatggcaacaagaagcttgatgctgcatatcatgaggcacagcagaaacctggtggctgccctgtttttctctttttctcagttaataccagtgggcaatttgtggggcttgctgaaatgattggtcctgttgattttaacaagagtgttgagtattggcagcaagacaagtggaatggctgctttcctcttaagtggcacgttgttaaggatgttcctaacaatttgttgaggcacattacccctgataacaatgagaacaaacctgtcactaacagtagggatacac

SEQ ID NO: 32638 - DNA, 245 bp, Glycine max
  Clone ID: LIB3138-034-Q1-N1-B12
atagatcaagaagatttggttactgtaaagcatgcagagaacaaagcatttggagggacagaaccaatggatgtctctacaacatcaacattgcaaccatgtcaaattcctaggtcagatgtgatagttttggaagggcatacttcaaaagtgtgtgcttgtgcatggagtcctacaagatctcttctagcatcaaggtctggggattcaacagctcgtatttggacaatagcagaagggagatg

SEQ ID NO: 32639 - DNA, 396 bp, Glycine max
  Clone ID: LIB3138-034-Q1-N1-B2
gtcattggtgtcaagttgacaaccataaacaatatgtgtgcatatgggctcaatcctggtatttcaggttctcgtcttttgggcaccattcctcagtccatttcacagcaaactgtttggaatcaaatggcaacagtgagaacaccattgaattttgattctagcaagcagagcttttgtcagttttctattgaccttctcggtggaggaatcttagtggacaaaactggagattggatcacacttatacaaaattctccaattagtaacttgttgagagttgctgcttggaagaaaggctgtttaatggtcaagattgtgatgtctgggaatgcagcagtcacaaggagtgattgggccctcattggtacaagtgtttttaacaaaacagcacag

SEQ ID NO: 32640 - DNA, 336 bp, Glycine max
  Clone ID: LIB3138-034-Q1-N1-B3
ggttcacattcttcagaagattttcctgaaaaggaagatcaagaaaaacccaaaaagattgatgccagattgagacaaagaatagatcctcaatacaatgaggttcaggctcagatggaaacaaatttgtttaaattgtctcttgatgatgttgaaactcctaaaggttccatgttggatctgaaaatttctcaatctaaaattgcacttcccaagaacacagttggaggaaccattctgcgtagtgatctattggcaaattttttgacagagggcaattttagagcaagtgttgattttgcagcgcactcatcgtattagaggaatgattaaaat

SEQ ID NO: 32641 - DNA, 407 bp, Glycine max
  unsure at all n locations
  Clone ID: LIB3138-034-Q1-N1-B4
aattgaagttgaagtcttgcccttctctcttcaactccaaacacaagacatcatcatccatggctgcctccgtctccactgtcggagctgtcaacagagctcttttgaacctgaatgggtctggacctggggtttcagctcccagttcatccttctttgggagcagcttgaagaaggttattggctcaagggtccccaacacaaagatttcctctggaagcttcaagattgttgctgtagaagagaagaaagagattgaagagacccagcagaccgacaaggacagatggaagggtcttgcctatgatatctcagacgaccaacaggacatcacangaggaaagggtttggttgactcccttttccaagctccacaggatgctggaactcactatgctgtcatgagc

SEQ ID NO: 32642 - DNA, 136 bp, Glycine max
  Clone ID: LIB3138-034-Q1-N1-B5
aattgaagttgatttcttgcccttctctcttcaactccaaacgcaaggcgatcatcatccatggctgcctccgtctccactgtcggagctgtcaacagagctcttttgaacctgaatgggtctggacctggggttt

SEQ ID NO: 32643 - DNA, 306 bp, Glycine max
  Clone ID: LIB3138-034-Q1-N1-B6
gtgacatatttgacccctttttcagttcagtgtccaatttgtttggagtatcccctgtgtccgcagataacctcatgtggacatattttctgtttcccatgtattctacagtacttattgatgggtgaagaggatcacaaaggtgatagctggaaaaggtgtcctttgtgctttgtgatgatatctgccaaggatttatatacggtgcacatcacaaatgtcaaacagtatcaagtacgagataatgctgagttcacctttttaacgcggaaaaaggattcctttactctgtcacttaaaaataaa

SEQ ID NO: 32644 - DNA, 256 bp, Glycine max
  Clone ID: LIB3138-034-Q1-N1-B7
tgccaccccaatgcaggatgttcaggttacaattgattggtttatttcctctcaggaatgtgttcccaggacctattgtgttttaaatccacaaaatccttttgtgttaaataggtggatgggaaaattgactttcccccagggcacttcccgaagtgttaagagaatgcctctttctatagggggaggagctggtgcaaagaatgctattctcatgaatatgccaaatgctgttctttcaatggggagatatttt

SEQ ID NO: 32645 - DNA, 313 bp, Glycine max
  Clone ID: LIB3138-034-Q1-N1-B8
gaaaataatagaaactaattagagaaaaagtgatgaaacttctggtgaactgcatgaaaaaaatcaggtgcccattaggcgagctggttcattttctttataccaggagtgaattcccaattatttatagatcatggctatatcttttcttatgtgttaatgaattgtttgggaaagaaatgagaggaaacagcgttaagggatggaaaaatctacgttatgttcctttttttttaaaacaatgaggagatattttgttggagaactcgtctttgaagtttctaagatgacttctccctacattaaatgtaca

SEQ ID NO: 32646 - DNA, 366 bp, Glycine max
  Clone ID: LIB3138-034-Q1-N1-B9
ggtgattttgtcattggtgtcaagttgacaaccataaacaatatgtgtgcatatgggctcaatcctggtatttcaggttctcgtcttttgggcaccattcctcagtccatttcacagcaaactgtttggaatcaaatggcaacagtgagaacaccattgaattttgattctagcaagcagagcttttgtcagttttctattgaccttctcggtggaggaatcttagtggacaaaactggagattggatcacacttatacaaaattctccaattagtaacttgttgagagttgctgcttggaagaaaggctgtttaatggtcaagattgtgatgtctgggaatgcagcagtcaaaaagagtgattgg

SEQ ID NO: 32647 - DNA, 354 bp, Glycine max
  Clone ID: LIB3138-034-Q1-N1-C1
caacaactctgttggctgatgggtgtccatatttgtatgcaatggtgcatgatagttcagtgtctacaataccaggtgattttgtcattggtgtcaagttgacaaccataaacaatatgtgtgcatatgggctcaatcctggtatttcaggttctcgtcttttgggcaccattcctcagtccatttcacagcaaactgtttggaatcaaatggcaacagtgagaacaccattgaattttgattctagcaagcagagcttttgtcagttttctattgaccttctcggtggaggaatcttagtggacaaaactggagattggatcacacttatacaaaattctccaattagttaac

SEQ ID NO: 32648 - DNA, 339 bp, Glycine max
  Clone ID: LIB3138-034-Q1-N1-C11
cacactttctagatagctagcctgtaagatatatatatagatatttcatatatatcctatggtccgtgagtgcccttgttctgtaccaaccctttcttccacatgttgagtttcagcatcgtcctctcttgagtccccatatcaaatacccaccgaattcaaccccccatataacaaatctcctcccatcccatttttcagcaccaaagtttgaaacttttctcaattgggttgaggagagtttgactcaaatttttatttttctaacgaagcagtagctattagaagtgcaaaaattaaatgtccaacatcttcttgttgatgtttgagattcatgta

SEQ ID NO: 32649 - DNA, 300 bp, Glycine max
  Clone ID: LIB3138-034-Q1-N1-C12
ccggctacggccaaaccggctacggtcaaactggtagcgaataccaacaaactggacttgctggagctggattagctggaactactactggctacaatgaaaccagcacccttaacaagggctttgtcgaaggacaatccaccacccaaactggtgttattagagaagaagttattgttgaacaacccgtcattgttgaacaagaagttatcagagaaactgcccccgttgaaaacagacacctcttcactgaacaacaacaattcattgaacctagaactttctttgaaagaagtcgat

SEQ ID NO: 32650 - DNA, 332 bp, Glycine max
  Clone ID: LIB3138-034-Q1-N1-C2
aatttctgaagcgtactggatttcattgcgatatcatttgtgtcactggatggactgccaccccaatgcaggatgttcaggttacaattgattggtttatttcctctcaggaatgtgttcccaggacctattgtgttttaaatccacaaaatccttttgtgttaaataggtggatgggaaaattgactttcccccagggcacttcccgaagtgttaagagaatgcctctttctatagggggaggagctggtgcaaagaatgctattctcatgaatatgccaaatgctgttctttcaatgtggagatattttgttggagatctcgtctttgaa

SEQ ID NO: 32651 - DNA, 284 bp, Glycine max
  Clone ID: LIB3138-034-Q1-N1-C3
caaagtttgaaacgtgtcaaaattaaaaagcgagagagattaaagaatagagttgttggtgtaacaggcgagggcagagggaagggttagggaacaattggagtgcacgaaagcgatgccaaaaaaaccaaacaatcattaacaacagccctaacccccccgacgtctttcaaaactgattcggagcaattaatgtaaaatctatggacatcaacgaggaatcttcattctctcttccgttttgtttgcatcattaatagacccaaatggacccgaacccgaca

SEQ ID NO: 32652 - DNA, 292 bp, Glycine max
  Clone ID: LIB3138-034-Q1-N1-C6
gaatgattaaaatggtggccacagttggtattcctgagaatacaggtatatcattggcctgtgctatgaatagttcttttagggggcgcgccagttctgatatttacaccatctgctctcaagactgtgaattgtggaatcctgcttgcacaaaagcaatgactatgtcatttaatccaaacccgtgttctgatgcatggagtttggaatttctgaagcgtactggatttcattgcgatatcatttgtgtcactggatggactgccaccccaatgcaggatgttcaggttac

SEQ ID NO: 32653 - DNA, 310 bp, Glycine max
  Clone ID: LIB3138-034-Q1-N1-C7
cggctcgagtgacaaaactagtgcaactttgcaatttagaaagttagcagattgtgattttctcaagagaaactttaagcagatgtctaatgttttgtgggtggctcctgaggacaaggcgagtttatggtcacaacttcattatgtttcgtgtaataatctggaaatgcaagaagcttatcttgtcaatctcgtaaatgtgttacgagaattgtatttgcacagtccagaggaagctcgccaattgagaaggaaagctctctctcgtattgaatggctgcaaaaaagctgatgtgcctaccatagcaca

SEQ ID NO: 32654 - DNA, 377 bp, Glycine max
  Clone ID: LIB3138-034-Q1-N1-C8
cacaacttaaccctctctctctgagatggcaaagaatgtggggattctcgctatcgacatctacttccctcccacctgtattcagcaggaattgctggaggctcatgatggtgccagtaaagggaaatatactattggacttggtcaagattgcatggcgttttgtacagaagtagaagatgtcatctcgatgagtttgacagtagtttcttcccttcttgaaaagtatgcgattgatcctaaacaaattggtcgtctggaagtaggcagtgagactgtgattgacaaaagcaaatccatcaaaactttcatcatgcaaatctttgagaaatatggaaataccgatattgagggcgttgattcaactaatgcatgct

SEQ ID NO: 32655 - DNA, 377 bp, Glycine max
  Clone ID: LIB3138-034-Q1-N1-C9
ggagatggaggtgagtgggagagagaggagtgtgaggagtcatagtcagaggaggcatgtgtttgaggacattgatgttgatttggtggtgggagaggagcaagagaagaagcatgaggagttggttggagaggaggaagagcaggctagagttagcatatgtattcctcccaagaatgctcttttgttgatgaggtgcagatctgatccggtcaaaatggctgctttggctaaccggttttgggaatctcctgttcacaaagacaaatgtcaagaagaacaacaagatgatgaagaagaaagtggagatgaggaggaagagcaagaggatgacaaagagcaacaccacaaaatgaaagatgaacaacaagaagaag

SEQ ID NO: 32656 - DNA, 406 bp, Glycine max
  Clone ID: LIB3138-034-Q1-N1-D1
gggaaaattgactttcccccagggcacttcccgaagtgttaagagaatgcctctttctatagggggaggagctggtgcaaagaatgctattctcatgaatatgccaaatgctgttctttcaatgtggagatattttgttggagatctcgtctttgaagtttctaagatgacttctccctacattaaatgtacagtctctttcttcatagcatttggaaatttggctgatgataccatcaattttgaggcttttccccacaagctggtgcagtttggagagattcaggaaaaagttgtattgaaattttcacaagaggaatttcttacagcttggtcaactcaggtgcgttctgcaacaactctgttggctgatgggtgtccatatttgtatgcaatggtgcatgat

SEQ ID NO: 32657 - DNA, 293 bp, Glycine max
  Clone ID: LIB3138-034-Q1-N1-D10
caaaatcagaaccacattcctgggaattgatcttcccaatagaggtatgtggtcctaataatgggtttgaaatgtggagttctgagtgggcaaatcaaacttcatggcatttgagtttccttattgacaatcccaaacagtctacagtttttgatattctcttgggaatctctcaagattttgaaattgctggtaatactcttatgccagctttttctgttccacaggctactgccagatcttctgaaaatgcggaatcctctgcatgatctggaatttgagttttctttcgc

SEQ ID NO: 32658 - DNA, 328 bp, Glycine max
  Clone ID: LIB3138-034-Q1-N1-D11
taagaaagatgtttggagagttgaatgtggaatcccttctggatttccgctcacagttatttgcaatagcatttttaatgagatgctcattagatatagctatgaaaaattactgcgccaggctaaagctccaagtatgtttttacaatccttcaaaaattttgtttctttgtgtgtgtatggtgatgataacttaattagtgttcatgaatatgtcaagccttactttagtggttctaaattgaaaagctttctagctagtcataacatcaccattactgatggtattgacaaaactagtgcaactttgcaatttaaaaagttagcc

SEQ ID NO: 32659 - DNA, 314 bp, Glycine max
  Clone ID: LIB3138-034-Q1-N1-D12
ctcgagccgattcggctcgaggggaaaagaagggattttactgattcagattggttagaatctgcgtttctcttctacgatgagaacaagaaccttgtgcgtgtgaaggtcaaggattctcttgacactagaaaactagggtatgtttaccaagatgttgacattccatggttaaattctaagcccacgccgcgtaggtcaagggttcagaaggtagcattagcacaaaattttggtgttggtgcagcacatgctgctgagacttcaaggaatgtgaagttcccactagtgttggattcagttgtgagcacaat

SEQ ID NO: 32660 - DNA, 406 bp, Glycine max
  Clone ID: LIB3138-034-Q1-N1-D2
ctcgagccgaaaatcagaaccacattcctgggaattgatcttcccaatagaggtatgtggtcctaataatggttttgaaatgtggagttctgagtgggcaaatcaaacttcatggcatttgagtttccttattgacaatcccaaacagtctacagtttttgatattctcttgggaatctctcaagattttgaaattgctggtaatactcttatgccagctttttctgttccacaggctactgccagatcttctgaaaatgcggaatcctctgcatgatctggaatttgtgttttctttcgcttgttcgtttggttaattcaataaaggaaattaggcatgaccctcttggtgagtatgctctgcctatttgaaaatttccacacctcttttaattgtcgtaatgat

SEQ ID NO: 32661 - DNA, 333 bp, Glycine max
  Clone ID: LIB3138-034-Q1-N1-D3
gttcagactataaaggaggttattattgttgttatgatcaaacccagtgcaggttgagggaaggctttgagggcccaaagaggagcctctacctaagatacacagtgaagtgggttgaatggaacaagttcattgtgcctgtaaagatttatatacttgatgtcactgatactttaaaaatatcagatgattctagtggaatgatccctgagcatgattgcaagaccgagtatgaagttgaatcttgcagcactggccaaaagaatggtaatggctgtcttgatgtgaagagaacaagcctcccaatgcaaaagggtggttatgtcatatatg

SEQ ID NO: 32662 - DNA, 369 bp, Glycine max
  Clone ID: LIB3138-034-Q1-N1-D4
aagaactcgactcaagaagacagcaaaagtactgagccatgggtcccgtcatcgagtcccatttcttagccttcactgcccttgtcactattgcctatcagtttctgtttttcgtcgtcactgcgctcctcaaattcgacaaagtcactgattttgctggaagtacgaatttcatcataattgctgcattgaccctggtcatcaaagcctcctggtattttcgacagataatcctcactttgtttgttgggacatggggacttcgcctctgccttttcctcctattcagaattttgcagtggggagaggaccggcgcttcgatgaaatgcgtagtaatttgggtagactggccatattttggatatttc

SEQ ID NO: 32663 - DNA, 347 bp, Glycine max
  Clone ID: LIB3138-034-Q1-N1-D6
caactacaaaggttgctgtaggagataagatattgaagtagtgctaagtgcctaacacctgcagtgaacaatggcctctgcatcagcatctcttctcaagtcttcacttgttcttgacaagtctgagtgggtgaagggacaaacacttcgccaaccttctgctgcatcagttgtgagatgcaaccccaccaccccatcaggcctcaccatcagagctggttcctatgctgatgagctcgttaagaccgcgaaaacagtggcttcaccagggaggggtattttggccatggatgagtccaatgctacctgtgggaagcgtttggcttcaattgggctagagaacactg

SEQ ID NO: 32664 - DNA, 406 bp, Glycine max
  Clone ID: LIB3138-034-Q1-N1-D7
gctttcagcatttgcaccataaatttccatgataaggaatacggaactcttttagctgttggcactgcgaagggactgcaatttttgcccaaaaggaccataactgctggattcattcatatttataggttcgtagaggatggaagatctcttgaacttcttcacaaaactcaagttgaaggtgttcctcttgctctatgtcaatttcaaggaagattacttgcagggataggacctgtgctcaagttgtatgatttgggaaaaagaagattgttaagaaaatgtgagaataagctattccccaacacaattgtctccattcatgcatatcgcgatcggatttatgttggtgatgtccaagagtccttccattattgcaagtataggcgtgatgaaaaccaacttt

SEQ ID NO: 32665 - DNA, 331 bp, Glycine max
  Clone ID: LIB3138-034-Q1-N1-D8
ggtcaagattgtgatgtctgggaatgcagcagtcaaaaggagtgattgggcctcattggtacaagtgtttttaacaaacagcaacagtacagagcattttgatgcatgtaagtggacaaaatcagaaccacattcctgggaattgatcttcccaatagaggtatgtggtcctaataatggttttgaaatgtggagttctgagtgggcaaatcaaacttcatggcatttgagtttccttattgacaatcccaaacagtctacagtttttgatattctcttgggaatctctcaagattttgaaattgctggtaatactcttatgccagctttt

SEQ ID NO: 32666 - DNA, 354 bp, Glycine max
  Clone ID: LIB3138-034-Q1-N1-D9
ggctgatgggtgtccatatttgtatgcaatggtgcatgatagttcagtgtctacaataccaggtgattttgtcattggtgtcaagttgacaaccataaacaatatgtgtgcatatgggctcaatcctggtatttcaggttctcgtcttttgggcaccattcctcagtccatttcacagcaaactgtttggaatcaaatggcaacagtgagaacaccattgaattttgattctagcaagcagagcttttgtcagttttctattgaccttctcggtggaggaatcttagtggacaaaactggagattggatcacacttatacaaaattcttcaattagtaacttattgagagttgc

SEQ ID NO: 32667 - DNA, 332 bp, Glycine max
  Clone ID: LIB3138-034-Q1-N1-E1
gttttcttcatataccctaatttgttttcacagctatgacatctgtgaagctcacaaccccccagacgggcgagttcgagcagcccaccggactcttcatcaacaatgagttcgtaaaggccgttgacggcaagacctttgatgttatcaacccctccactgaggaggtcatctgcagtgttcaggaggccaccgagaaggatgttgacatcgctgttgctgccgcccgcaaagccttcaacggcccatggcgaaaggagacaccagagaacaggggaaagctgcttaacaagcttgccgatctgttcgagaagaatgccgacctcattgct

SEQ ID NO: 32668 - DNA, 368 bp, Glycine max
  Clone ID: LIB3138-034-Q1-N1-E10
tagggtttttctttttctcttctcactgcatcgcttcaggttcttctgaaaagatgtctcgcgtgtatgttggtaacttggattcacgagtcactgagagagatctcgaagacgaattccgcgttttcggagttattcggagtgtttgggttgcacgtagaccacctggttatgcttttattgactttgatgaccgcagagacgcacaggatgctatccgtgaattggatggcaagaatggttggagggttgagctttctcacaactctaaaagtggaggtggtggtcgtggtggtcgctctggtggttctgatttgaaatgttacgagtgtggtgaacctggtcattttgctcgggaatgccgcatg

SEQ ID NO: 32669 - DNA, 354 bp, Glycine max
  Clone ID: LIB3138-034-Q1-N1-E11
aatcaaatggctacagcgagaacaccattgaattttgattctagcaagcagagcttttgtcagttttctattgaccctctcggtggcggaatattaatggacaaaactggagattggatcacacttatacaaaattctccaattagtaacttgctcagagacgctgcttggaagaaaggctggacaatggtcaccattgagacgcatgggaatgcatccgtcaaaaggagtgattgagcctcattggtacaagtgtttttaacaaacagcagcagtacagagcattgtgatgcatgtcagtggacaaaatcagaaccacattgctgcgaatggatcttaccaatacaggtatgt

SEQ ID NO: 32670 - DNA, 347 bp, Glycine max
  Clone ID: LIB3138-034-Q1-N1-E12
atggcaatggcgcttcgcaggctttcatcttcaattgacaagcctctgcgccctctcttcaatgccggttccctctactacaagtcgtctttgcctgatgaagctgtttacgacaaggagcgacccggagttacatggccgaagcagttgaatgctccacttgaggtcgtggatcctgagattgctgatattattgagcttgagaaagctaggcaatggaaggggctagaattgataccgtcagagaatttcacctctgtgtctgtgatgcaagcggctggatcggttatgaccaacaaatacagtgaggggtaccctggtgcaagatattatggtggaaatgagta

SEQ ID NO: 32671 - DNA, 346 bp, Glycine max
  unsure at all n locations
  Clone ID: LIB3138-034-Q1-N1-E2
cgctttctctctctaaactgcatagcgtcagcgtagttgcaaattccaggttttcttcctttagcctagcttttactcattatctctctttctctctctctcagaggttctagaaagatccactccgaaatggacggtgcgccacaatccgccggtgccggaggtccggcgccgttccttctgaagacctacgacatggtggacgatgccttcaccaacgacatcgtttcgtggagctctaccaacaacagcttcgtcgtgtggaaccctcccgagttcgctcgcctccttcttccgacctatttaagcacaacaactttncagcttatccgtcagctaaatacta

SEQ ID NO: 32672 - DNA, 376 bp, Glycine max
  Clone ID: LIB3138-034-Q1-N1-E3
agaggattagcttcgtagtttggtccaagcggttgcttttggtttttcttgcacttcacatgtttttttttgtaacggttttgggtgtgagagtgaagagcacacttcaactattgagaaccgttgacctccatggctgtgacatcacctcttgtcgtagcaggttctcaacttcggtgtcacaattttagaagaaccagacactgggctcttacactgagttgggaaaaacagcagctgaagagagcacagaagtgtggtggggatgagaatccatggaagccagtgaagatagtgatgcgtgtggttgatcatcatccaagggatggtgatgtctcctatggactgcacaagggatttggtttcccttccaaag

SEQ ID NO: 32673 - DNA, 339 bp, Glycine max
  Clone ID: LIB3138-034-Q1-N1-E4
cagaattcctaaagaagaaaggaggaggttcacgctatccaagggcgtaatactcttcatcctaatttctttgatcccttgcatttcttcacctttggatatacatagcattggtctagttcttaggtccctgtcttgcccttttttggattttagtcagagtagtgaatacagtttgttcatgaaagttgattactttccactgtccagtcttgtgcgcctaactggaggtattgcagcatggatgcttttcttggcatatttgaataagtttgttagcttgtacagagaatatttcagtaatgctgagagcttgttatagaaaattcattattgttg

SEQ ID NO: 32674 - DNA, 339 bp, Glycine max
  Clone ID: LIB3138-034-Q1-N1-E5
cggaattcctatttaataaaggaggagggccacgctatccaagggcgtattactcttcattctaatttctttgatcccttgcatttcttcacctttggatatacatagcatcggtctagttcttaggtccctgtcttgcccttcattggattttagtcagagtagtgaatacagtttgttcatgaaagttgattactttccactgtccagtcttgtgcgcctaactggaggcattgcagcatggatgctcatcttggcatatttgaataaatttgttagcttgtacagagaatatttcagcattgctgagagcttgatatagaagattcattattgttg

SEQ ID NO: 32675 - DNA, 404 bp, Glycine max
  Clone ID: LIB3138-034-Q1-N1-E6
caccattgaattttgattctagcaagcagagcttttgtcagttttctattgaccttctcggtggaggaatcttagtggacaaaactggagattggatcacacttatacaaaattctccaattagtaacttgttgagagttgctgcttggaagaaaggctgtttaatggtcaagattgtgatgtctgggaatgcagcagtcaaaaggagtgattgggcctcattggtacaagtgtttttaacaaacagcaacagtacagagcattttgatgcatgtaagtggacaaaatcagaaccacattcctgggaattgatcttcccaatagaagtatgtggtcctaataatggttttgaaatgtggagttctgagtgggcaaatcaaacttcatggcatttgagtttcctt

SEQ ID NO: 32676 - DNA, 315 bp, Glycine max
  Clone ID: LIB3138-034-Q1-N1-E7
ttgcaattgaagttgaagtcttgcccttctctcttcaactccaaacacaagacatcatcatccatggctgcctccgtctccactgtcggagctgtcaacagagctcttttgaacctgaatgggtctggacctggggtttcagctcccagttcatccttctttgggagcagcttgaagaaggttattggctcaagggtccccaacacaaagatttcctctggaagcttcaagattgttgctgtagaagagaagaaagagattgaagagacccagcagaccgacaaggacagatggaagggtcttgcctatgatatc

SEQ ID NO: 32677 - DNA, 357 bp, Glycine max
  Clone ID: LIB3138-034-Q1-N1-E8
tccaactccatttccctctctatttatttatttatttgttatttatggaatgtgcttctctaatctgttatccaaatgtgttaaagggttcaaatgaacattttatctgctacgcaattagatttgctctaggtgttactgctctatttgacgcaatgtttttttaaatcttacaacagccctattagattggctctgattgcttcagctctgcttgaccatgcacaattgtctccgcagttgtgtcactgattattttatgtctgattaatttaaggttaataattgcttctgtcatgtgaaactcattccaccagcacgattctagtcacattataacttttatgatggacagga

SEQ ID NO: 32678 - DNA, 299 bp, Glycine max
  Clone ID: LIB3138-034-Q1-N1-E9
atttgaatctatttttatatgcgaatcaatcctactacttctggtcctgaggtttctgcgcttgaaaaaaaaaatctgggacgtatcgcccaaataattggtccggtactagatgtagcttttcccccaggtaagatgcctaatatttacaacgctctgatagttaagggtcgagatactgttggtcaacaaattaatgtgacttgtgaagtacagcaattattaggaaataatcgaattagagctgtagctatgagtgcgacagaaggtctaatgagaggaatggaagtgattgacac

SEQ ID NO: 32679 - DNA, 274 bp, Glycine max
  Clone ID: LIB3138-034-Q1-N1-F1
cacaggcactggaccctgcagacgacgagaggctctgtgttttcttaattgagaaggcattgagtaagtttccaactgggaaagaacaaatacttacaatagttgatctcagaggtttcagtacagaaaatgctgatcttaaattcttgacattcttgttcgatatattctactattactatcccaagcgattggctcaagtcctatttgtagatgcaccttttgtttttaagccaatttggcagctagtcaagcccatgttaaaatcatatgc

SEQ ID NO: 32680 - DNA, 369 bp, Glycine max
  Clone ID: LIB3138-034-Q1-N1-F10
aagtgtttttaacaaacagcaacagtacagagcattttgatgcatgtaagtggacaaaatcagaaccacattcctgggaattgatcttcccaatagaggtatgtggtcctaataatggttttgaaatgtggagttctgagtgggcaaatcaaacttcatggcatttgagtttccttattgacaatcccaaacagtctacagtttttgatattctcttgggaatctctcaagattttgaaattgctggtaatactcttatgccagctttttctgttccacaggctactgccagatcttctgaaaatgcggaatcctctgcatgatctggaatttgtgttttctttcgcttggttcgttggttaattcaat

SEQ ID NO: 32681 - DNA, 368 bp, Glycine max
  Clone ID: LIB3138-034-Q1-N1-F11
caagctggtgcagtttggagagattcaggaaaaagttgtattgaaattttcacaagaggaatttcttacagcttggtcaattaaggtccgtcctgcaccacctttgtggctgatgggtgtccatatttgtatgccatggtgcatgatagttcaatgtctacaataccaggtgattttgtcattggtgtcaagttgacaaccataaacaatatgtgtgcatatgggctcaaacctggtatttcaggttctcgtcttttgggcaccattcctcagtccatttcacagcaaactgtttggaatcaaatggcaacagtgagaacaccattgaattttgattctagcaagcagagcttttgtcagttttctat

SEQ ID NO: 32682 - DNA, 302 bp, Glycine max
  Clone ID: LIB3138-034-Q1-N1-F12
gattctgtcattggtgtcaaggtgacaaccatacacaatatgggtgcatatggactcaatcctggtctttcaggtgctaagttatggggcaccattactaactccattttacagcagactgtcagaaatcaaatggcaacagcgagaacaccattggattctgattctagcaggcagagcttttgtcagatttctattgaccttctcggtggaggaagcttatgggacaaaactggagattggatcacacttatacaaagacctccaattagaaaccagttgagagttgctgtttggaagaa

SEQ ID NO: 32683 - DNA, 342 bp, Glycine max
  Clone ID: LIB3138-034-Q1-N1-F2
gagggtcagagtgagaaagagagagagagagagagaaactgagagaaattcgcaaaccctaatttcggaaagatcggcgatggctgcctccaaggatcgcgagaacttcgtctacatcgccaagctcgccgaacaggccgagcgatacgaagagatggtggaatcaatgaagaacgttgcgaatctcgacgttgaactgactgtggaggagcggaatttactttctgttgggtacaagaatgtgattggtgctcggagagcatcgtggaggatcctgtcttccattgagcaaaaggaagaaacaaaagggaacgagttgaatgcgaagcggattaaggagta

SEQ ID NO: 32684 - DNA, 350 bp, Glycine max
  Clone ID: LIB3138-034-Q1-N1-F4
ctcatcttatcaacacaacatcccgcccttcctcctcttccctcatatatcccgaccctacactctttgactttaaacagtcactactacttcttcttctcaatcctaccagaactcgaacaaccatgtccaaccttatcgctactaagcgggtcgaccttctcgccccttaccttctccttgaccaggggtcgcgtgtgcaggctgagtacatttggattgacggtgatggaggtcttccatgcaagactatgactctggataaagctccggctttcgtcttcgagctcaaagagtggaactttgacgggtcgtcgaccaaccaagcacccggtgacaactctgatgtc

SEQ ID NO: 32685 - DNA, 348 bp, Glycine max
  Clone ID: LIB3138-034-Q1-N1-F5
ctcatcttatcaacacaacatcccgcccttcctcctcttccctcatagtatcccgaccctacactctttgactctaaacagtcactactacttcttcttctcaatcctaccagaactcgaacaaccatgtccaaccttatcgctactaagcgggtcgacctcctcgccccttacctcctccttgaccaggggtcgcgtgtgcaggctgagtacatttggattgacggtgatggaggtcttcgatgcaagactatgactctggataaagctccggcttacgtcttcgagctcaaagagtggaactttgacgggtcgtcgaccaaccaagcacccggtgacaactctgat

SEQ ID NO: 32686 - DNA, 285 bp, Glycine max
  Clone ID: LIB3138-034-Q1-N1-F7
gcttttccaaacaaaattgtttttgatgataagcttgtgttggctaacacacaagaattctttgatggaaattttccagtggattcttggttaccaatttttgtgaattgtctttatcctgtaagtcaattaccttcagaagctgtcgttgtaaatgttacatgtggtagtggacgtggtggtttacccaccactgcttggattagttctgcagttaacaatcgctcctcagatatcaacaaaaggattcgcacagcacttgggaaaggtaagaaaaatggtttt

SEQ ID NO: 32687 - DNA, 151 bp, Glycine max
  Clone ID: LIB3138-034-Q1-N1-F8
attctagcaagcagagcttttgacaggtttctattgaccttctcggaggaggaatcttagtggacaaaactggagattggatcacacttatacaaaaagctccactgactaacttagtgacaggagctgcttgtaagataggcagaaaaat

SEQ ID NO: 32688 - DNA, 277 bp, Glycine max
  Clone ID: LIB3138-034-Q1-N1-F9
gcaggatggaatagatgccattgaagatgttatctaccatggtgaaacatatgatgtgactacaattagagctagcacacccatgtttctcatgtctcggaagattaaatcacttggcgtcaaatgggttatcttcggagaaggatctgatgagatctttggagggtatctgtacttacacaaggcacccaacaaggaggagtttcacagagaaacatgccgcaaggtcatagatttatcttgatcattgacttaaacaatacctagtgggataagg

SEQ ID NO: 32689 - DNA, 303 bp, Glycine max
  Clone ID: LIB3138-034-Q1-N1-G1
aatggagatcaccaatgtgagcgagtatgaagctattgcaaagcagaagatgccaaagatggtgtttgactactacgcatctggtgcagaggaccagtggactctgtaggagaacagaaatgccttttccagaattgtgtgacagccacgtattcttattgatgtgagcaagatagacatcacaactactgtcctgcgctatatactatccatgccaatcatgcttgccctaacaggcatgcataaaatggctcatactgagggagaatatgcaacatcaagagctgcatctgctgctggaac

SEQ ID NO: 32690 - DNA, 314 bp, Glycine max
  Clone ID: LIB3138-034-Q1-N1-G10
tcaatggccaccacagcagctctatccggaaccatggtgagcacctccttcatgaggaagcaacctatgacgaccaagagcctaaagacattccccaacgctctttttggtctgaaaggtggacgaggtggtcgtgtaacttgcatggcctcgtacaaggtgaagctcataaccccagaaggagaagtggagtttgaatgcccagatgatgttttcattgttgacaaggctgaggaagaaggcattgaacttgcctactcgtgcagggctggatcttgcgtttcatgtgttgggaaaattgggaaaggtgacgt

SEQ ID NO: 32691 - DNA, 109 bp, Glycine max
  Clone ID: LIB3138-034-Q1-N1-G11
aaaaagactatatatatacaccagaaatggagaaccatcatgagggccttatatagttaggaagcaacccttttgggaccaaaatcctaaaagagcattacgcaacgct

SEQ ID NO: 32692 - DNA, 372 bp, Glycine max
  Clone ID: LIB3138-034-Q1-N1-G12
cggactgaaaaacaaacgcgaagtctggagagtgaagctcactgtggccaaaatccgtaaggccgcccgacagctcttgacccttgacgagaaggatccccgccgcctattcgaaggcgatgccatcctccgtcgcctccatcgcctcggggtgctcgaggagtccaaaaacaaactcgattacgtcctcggtctcaagatccaggacttgctccaacgacgactccagacccaatgctggaagttgggactggccaaatctatccatcacgctcgcgttctcattcgccaacgacacattcgagtcggacgtcaactcgtcgacaattcctttttccttgttcgagtcgagagccagaaacacattgatta

SEQ ID NO: 32693 - DNA, 405 bp, Glycine max
  Clone ID: LIB3138-034-Q1-N1-G4
ggacccagagatcaagactttcaacctgatcatcgaacagcccgtcgaccgcgtcgactcgcgccctacccccgacgtcacacccgtcgtcacccctgccggctctcgcatgaactcgttctctggtggcgagcgtccagcggtcaagaacaactttggcaaggcctcggatgagctcacgggtaacgactcggtcgtcggctcgcctgtgccttctcgacctggcagcccgggcaatgagaagcgcaccgaggacggtgtgccccagcagaacacgggtgtcactctggatgcgttcaagcgggccctaggtgccaacgcgcagaagaagaagacctttgacgatgaggaatgagcggtgcgacatcagggaggggggcagaagagtagggagagcgcaactca

SEQ ID NO: 32694 - DNA, 399 bp, Glycine max
  Clone ID: LIB3138-034-Q1-N1-G6
gtcatcgttgggatctccatacgccggatctgctaaaatacgcttgatccatatgggcctcctcgaccacttgtgggacgacaccgtcgccggcccaaggccggaaaacggtctcggcaagctccgaaaacaccacaccttcactttccgacctagctccggcaaggaaacggagggcgggagcgtgagatcgtacggagacgaatcgtcggaggaagcgacgagagtgacgcgtagtatcatgatcgtgaaaccgcccgggtaccagagtggatcgcctccggtttctcccgccggttctactactccgatttctccgttttccggaggaaaagattcgtttcggtttcgaagaaggtcggcatcagatgcgtacgagaagagagggcagaacagatc

SEQ ID NO: 32695 - DNA, 390 bp, Glycine max
  Clone ID: LIB3138-034-Q1-N1-G8
cttcggactcatgagatctccgatcggcgtgtctgcatcaagtggtggaaagttggtagatggtactatggcttccgcatgagggatgagtcacattctcggtgggtttctttggcagatttggcaacagaagatgatgagcatgttttgggagtgcttcgccgaggtactgttcatgaggttttacgtgttcagatctctgtggttggtcgtccatcaacaccttggtcctgccagattacccagagattggaatagctatacggagataaactaaagtattgatatctatctgaattagtatgtgtatagttattgtttgtaaaattctgcggtaacatgtatagtttgtcatcaaagataagacaataataagttcataatgttcgt

SEQ ID NO: 32696 - DNA, 309 bp, Glycine max
  Clone ID: LIB3138-034-Q1-N1-G9
tgggaatgcaataatcaaaaggagcgattgggcctcattgggacaagtgttgttaacaaacagcaacagtgcagagcattgtgatgcatgtaagaggacaaaatcagaaccacattcctgggaattgatcttccaaatagaggtatgtgggcctaataatggttttgaaacgtggagttatgagtgagcaaatcaaacttcatggcatgtgagtttacttattgacaatcccaaacagactacagatttagatattctcttgggaatctatcaagattttgaaatagctggttatactcttatgccagc

SEQ ID NO: 32697 - DNA, 287 bp, Glycine max
  unsure at all n locations
  Clone ID: LIB3138-034-Q1-N1-H1
ccaaaaactaatgcccaaatccaacgggcccctccaaaacaacttgggcctggcacttgcaaccaatccacaccaaacaacatgaccgacaacacccccggaatggctgacaagctcggcgcanacaaagacaccaatgctattcctagcccgaaccctagtgtgatcagctcagcgggtgctattcgaaagcagttcaaccccgacggcgcaattggccagattggcgagaaggtccgaggaccattcaacaaggacggtgtcattggaagccagttcgatgcgag

SEQ ID NO: 32698 - DNA, 273 bp, Glycine max
  Clone ID: LIB3138-034-Q1-N1-H11
gtttttgatattctcttgggaatctctcaagattttgaaattgctggtaatactcttatgccagctttttctgttccacaggctactgccagatcttctgaaaatgcggaatcctctgcatgatctggaatttgtgttttctttcgcttgttcgtttgtttaattcaataaaggaaattaggcatgaccctcttgttgagtatgctctgcctatttgaaaatttccacacctcttttaattgtcgtaatgatgtgtgaagtgtgtgttatttt

SEQ ID NO: 32699 - DNA, 258 bp, Glycine max
  Clone ID: LIB3138-034-Q1-N1-H12
aacaattaaaccgttcttcttcgattcaagttcgaagaagaagcgatgagttcgggtagcagccacagcagtgagaaggagaaggagaaacagagggtgagtcgcacgtcgctgatactgtggcacgcgcaccaaaacgacgccggatcggtgcgcaagctcctccaggaggatccctcgctcgtcaaggccagggactacgacaaccgaacgccgctccatgtggcgtccctccacggctggatcgacgtcgccacg

SEQ ID NO: 32700 - DNA, 320 bp, Glycine max
  Clone ID: LIB3138-034-Q1-N1-H2
agtgtatgcacagaagccggtatgtatgctatccgggcccggaggaggactgtaacagagaaagactttcttgatgcagtaaataaagtcatcaaaggataccagaagttcagtgcaactccaagtatatggtctataactgagttattctttatgccctttcccagaccatagagaacgtcatctctatttcccctgaaattgaaggcacgtgagtcttttattaactcctgatgaatgcatcttgcagcaacctttcctgatgtacatccaaaatgcgagcaaaacttcttttacccttgacgatatacttatattat

SEQ ID NO: 32701 - DNA, 398 bp, Glycine max
  Clone ID: LIB3138-034-Q1-N1-H3
cttcaacttcacccattcatacgtggtgttgttactgctgctcttttctcttttcttttctctttagttctctcttcccctttctttttctttttcttcttcttctgagcttgtttaagcttttcttccattaacatattatcacaatgtgtggtattcttgctgttcttggttgttctgatgactctcgagccaaaagggtccgcgtgcttgagctctctcgcagattgaagcaccgtggccctgactggagtgggctccatcaacatggtgactgctttttggcacatcaacggttagccatagttgatcctgcttctggggatcaacctctctttaacgaggacaaatccgtcattgttaccgcatatggagagatttacacccatgaagagctc

SEQ ID NO: 32702 - DNA, 248 bp, Glycine max
  Clone ID: LIB3138-034-Q1-N1-H4
ctgaatcttacttacaactacggacgcaaagaccctatgcttcaggggtgtctacgcatccattgtgagggctctcaacagagcgctgttgaaccccaatgcttatggagctggagctatacttttaacctgagcctgttttgtgaccaggttgaagaaggctattggctattggcttcccaacggcatagtgaccagggtgggctgtaccattgttgccgtggagatgtcttacgatcatgattgga

SEQ ID NO: 32703 - DNA, 354 bp, Glycine max
  Clone ID: LIB3138-034-Q1-N1-H5
tagaaatgcatatgatttctggtgctgagaagtcaaaggaggttaagtttgctgtgcccctactggacatgaatataaacaagatggtggcttgctgtccctggagatattcccagaggatatacttacaggttgcatatcctgttggaagaaaatatatgtcagtgccttcagctcctcgcctgaagttagtatcttctcctgagctgaaagctgtattttccattgatgatgtcaagctacctcctctggtggacgggataatatcttccaaatctagaagaatatcttgtgaaacaagtcttagaggctgtttcattaattgaagttagaaggcacttcattgaagcatta

SEQ ID NO: 32704 - DNA, 290 bp, Glycine max
  Clone ID: LIB3138-034-Q1-N1-H6
gtttttgatattcgattcagaagataatatggatttactgttgcgcgttgatctgttatgccaacattgtgtggtccacaggctactgaacaaaattgtttttgatgataagcttgtgttggataacacacaagagttctttgatggtaagttcgcagtggaatctaggttaccaatttttgtgaattgcctttatcctgtaagtcaattaccttcagaagctgtccgcgtcaatgttacatgtcgtaatgaacgtggagggtacccacctctgcttggattagttctgc

SEQ ID NO: 32705 - DNA, 245 bp, Glycine max
  Clone ID: LIB3138-034-Q1-N1-H7
gtctcgcccaatacctactctccgctcccaagagcacgcaccaccactattgcacttcttcctcgttctccctctttttcttcttcttcgctaaacccttttttctatctcactaacacaacaatgggagacgagaagaagggcaagcctgctgcttccggcgtgtggtccaccatcaagcctttcgtcaatggtggagcctccgggatgctcgccacctgcgtcattcaacccatcgatatgat

SEQ ID NO: 32706 - DNA, 353 bp, Glycine max
  Clone ID: LIB3138-034-Q1-N1-H8
aaattttatttgtggcaatcctgatcaaatgcggggcaagaatggtaatctacattcacagccattaagatcaaactcttttcctttgcaacctccttttataccaaataattcattttctccaaatccccaaacttttgcaacttcagtagtgccacctagaactggtggacccagcttctctgcagcaccactacttaatgtaccaaatattagcaatcggaaaatttctggatatcctagtaatgctcatgatccacgccctgttaaacaatggaatggagacttgaaacaaagttctaacaataatgctccaagtcctgtaaagtcaattggcgaacaaactggacata

SEQ ID NO: 32707 - DNA, 309 bp, Glycine max
  Clone ID: LIB3138-034-Q1-N1-H9
tgtgtctcttctcttcccaaactctcttcttctattccaaagacccttttgaagtaatcgatggagtttcagtctctttccagattctaccttcttctttccttaaccattctcttccttgcaccctttcacgctcaagctaaaattaaagtcacttactgcgataagaaggcagactatcctgtgaaggtgtctggagttgaaatatcaccagaccctgtggagagtggcaagcctgctacctttaagatctcggctacttctagtaaagctatttatggtggagaagttgtaattggagtttcatac

SEQ ID NO: 32708 - DNA, 355 bp, Glycine max
  Clone ID: LIB3138-035-Q1-N1-A1
agctggtgcaaagaatgctattctcatgaatatgccaaatgctgttctttcaatgtggagatattttgttggagatctcgtctttgaagtttctaagatgacttctccctacattaaatgtacagtctctttcttcatagcatttggaaatttggctgatgataccatcaattttgaggcttttccccacaagctggtgcagtttggagagattcaggaaaaagttgtattgaaattttcacaagaggaatttcttacagcttggtcaactcaggtgcgtcctgcaacaactctgttggctgatgggtgtccatatttgtatgcaatggtgcatgatagttcagtgtctacaata

SEQ ID NO: 32709 - DNA, 384 bp, Glycine max
  Clone ID: LIB3138-035-Q1-N1-A2
cgtcttttgggcaccattcctcagtccatttcacagcaaactgtttggaatcaaatggcaacagtgagaacaccattgaattttgattctagcaagcagagcttttgtcagttttctattgaccttctcggtggaggaatcttaatggacaaaactggagattggatcacacttatacaaaattctccaattagtaacttgttgagagttgctgcttggaagaaaggctgtttaatggtcaagattgtgatgtctgggaatgcagcagtcaaaaggagtgattgggcctcattggtacaagtgtttttaacaaacagcaacagtacagagcattttgatgcatgtaagtggacaaaatcagaaccacattcctgggaattgatc

SEQ ID NO: 32710 - DNA, 323 bp, Glycine max
  Clone ID: LIB3138-035-Q1-N1-A4
gtttaatcttgtggtccgtcaaaagtttttaaattttgggagggtcattatgaagaaaagggacaaacttagttgtcaagttggaatcaacccatactccatggaatggactggtttggccaatagattactgagtaagggcaatgatattctgtgttgcgattattctagttttgatggtttgattaccaaacaagttatgagcaagatggcagaaatgataaacagtctttgtggtggtgatgaaaaattgatgcgtgaaaggacgcacctgctgttggcttgttgttcaaggatggcaatttgttagaaagatgtttgga

SEQ ID NO: 32711 - DNA, 324 bp, Glycine max
  Clone ID: LIB3138-035-Q1-N1-A6
gtttaatcttgtggtccgtcaaaagtttttaaattttgtgaggttcattatgaagaaaagggacaaacttagttgtcaagttggaatcaacccatactccatggaatggactggtttggccaatagattactgagtaagggcaatgatattctgtgttgcgattatgctagttttgatggtttgattaccaagcaagttatgagcaagatggcagaaatgataaacagtctttgtggtggtgatgaaaaattgatgcgtgaaaagacgcacctgctgttggcttgttgttcaaggatggcaatttgtaagaaagatgtttggag

SEQ ID NO: 32712 - DNA, 385 bp, Glycine max
  Clone ID: LIB3138-035-Q1-N1-A7
ggatactgcatactcgctggatctcccaatctggcttcaaactcaacaatggcatacgccgcacctccgctggacccgccaggaataggcacgaactcgccttcgtctcagaagaagagagtggcttatttgtatgacagcgacgtcgggaactatgcctaccagtcgggacatctgatgaaaccccatcgaattcggatggcgcattcgcttgttatgaactatggactgtacaacaagatggagatttaccgggccaaaccagcgtcaaaatacgagatgacacagttccatacggacgaatacgtggactttttgcagcgtgtcactcccgacaatgaacatcttctggctaaagagtgcgccaagcacaatgttggggaag

SEQ ID NO: 32713 - DNA, 392 bp, Glycine max
  Clone ID: LIB3138-035-Q1-N1-A8
attttgcgggtatttgtgagtgtgtgagagagagagcgagcagtttcagacacagagagaggggtttgggattggagggattgacgctgcgtctcttcctcttctctttcgatccatccctcattcctaatcctccaatccaaccacctcagccttacactcacatatacacatatctgaacgcgtatcgtccctcctatggcttcaaagcgcatcctcaaggagctcaaggacttgcagaaagacccaccaacttcttgcagcgctggtccagtagctgaggacatgttccattggcaagcaacaataatgggtcctgctgatagtccttatgctggaggtgtattcctagtcactattcacttccctccggattatcctttcaagcctcc

SEQ ID NO: 32714 - DNA, 262 bp, Glycine max
  Clone ID: LIB3138-035-Q1-N1-B2
cgcacttcgcgtgttcgtgtcgtttccactttttctctcattactctctctgcctttccgtctttttctttcatcgccaaaaccctaattcgatccgccggacctagcactcaccgtagatgactgtacgattgaggaacaggtgagagatcagagaggctggatttcctcgccgaatggagggagggatacatccatggattatgatgacaatgattttcaaagccagaatctccatttacctggtgaagggagcacaaaa

SEQ ID NO: 32715 - DNA, 393 bp, Glycine max
  Clone ID: LIB3138-035-Q1-N1-B3
gagaggaatcagcccttttccgtatactttacttgaacaagccgtttgagttcggcgtgtttaataaataaaatcacaagacaacgttgtcttgcgcctgaaagtgttgtggagacaaaaccacaatacagttttagaatggagaagacagcagttaaagttcgatgccagaggattgggtgcgacgccatgttctccgaggccgacaaccccgacggttcctgtcgataccatgattcgggacctatatttcatgatggaacaaaagaatggagttgttgcaagaaaagaagtcatgattttagcttgtttttggaaattccaggatgcaagacaggaaaacataccacagttaagcaagttattacaccagtgaagaagaacaccatgccc

SEQ ID NO: 32716 - DNA, 377 bp, Glycine max
  Clone ID: LIB3138-035-Q1-N1-B4
aaagattttatccaattgaaattttaaaaatgactgggataaacttaagaattcaattattgaaattgaataagtaaacaatttaattggattggtcgaatggtatcaaaaaaatggagtactaactcccatttcttatttattattgaattaaccgatcaacttgctttgttatcgaacatttctttttgatttcaaaaattttccggaaaaaatttgaatctatttttatatgcgaatcaatcctactacttctggtcctgaggtttctgcgcttgaaaaaaaaaatctgggacgtatcgcccaaataattggtccggtactagatgtaccttttcccccaggtaagatgcctaatatttacaacgctctgtttg

SEQ ID NO: 32717 - DNA, 275 bp, Glycine max
  Clone ID: LIB3138-035-Q1-N1-B5
cagaaccacattcctgggaattgatcttcccaatagaggtatgtggtcctaataatggttttgaaatgtgcaggtctgagtgggcaaatcaaacttcatggcatttgagtatccttattgacaatcccaaacagtctacagactttgatattctcttgggaatctctcatgattttgaaattgctggtaatactcttatgccagctctttctgttccacaggctactgacagatctatctaatatgctgaatgctctgcatgatctggaatttgt

SEQ ID NO: 32718 - DNA, 168 bp, Glycine max
  Clone ID: LIB3138-035-Q1-N1-B7
agtttctccaaattcctttccttcttccaaatccctttactgtcacgtgaaatctaacaccgaccgtgtacatagattatgtaatccaattaaatgatcgtctgcgaacaaataacatcagtttacttacagaaagcgcttatcaatggctttacacgaccatcttcc

SEQ ID NO: 32719 - DNA, 302 bp, Glycine max
  Clone ID: LIB3138-035-Q1-N1-B8
caacaatcacaacatttagctgccggctcagcttttatgtcgcaacaacaaatgcgacaacggccatcgtcgtcctgtcagtttggttcgatggtgacggtgccaccacaagctgctttacaacgcgtgacaccacctgtttcgtgcaattcttcttgcacaacaaccaatgttttttacccaggcgcgatttcttcatcaacaacaatgtcgacgacgacttcgacaacatcttctgcagcagcagcagcagcggcagcagttgcacttgcgacaaatgcaaggatgaaaggagatgtgat

SEQ ID NO: 32720 - DNA, 302 bp, Glycine max
  Clone ID: LIB3138-035-Q1-N1-C1
gaaaagaaaatcctcacccattttcttcgtagccaaacactctgaaattctcagttatgtcggggcaagcgtatgtggatgatcacctactgtgtgaaatcgaaggtaaccacctcactcacgccgctatcatcggccaagacggaagcgtttgggctcagagcaccaacttccctcagttcaaacctgaggaaataactgccatcaataatgactttaatgagcctggatcacttgctccaactggattgtatatcggtggcaccaaatacatggtcatccagggtgagcctggtgctgtc

SEQ ID NO: 32721 - DNA, 245 bp, Glycine max
  Clone ID: LIB3138-035-Q1-N1-C2
cacagacgtttgctcgaaagccactgtggtcgatataacctcaggtgcacacttggcagttgctgtggacgctactattgcattgacaaacggggtgtttgtggttcaggaggcgaaccactagacatgaacgcacggctcacacagcgggcgcaggctgaggcactctcattttggtaaaaatgcggcacatgcatacaattttgatgtaactcgttcgtgcttattgaatgataggaactata

SEQ ID NO: 32722 - DNA, 255 bp, Glycine max
  Clone ID: LIB3138-035-Q1-N1-C6
tgcaaaaagctgatgtgcctaccatagcacagattgaagagttccattcaatgcagaggatgatgaatgctcctgattcaaatgataatattgatttactgctgagcattgatttgttgggtttacaaggagcaagtaaagcttttccaaacaaaattgtttttgatgataagcttgtgttggctaacacacaagaattctttggtggaaattttccagtggattcttggttaccaaattttgggaaatggcttt

SEQ ID NO: 32723 - DNA, 222 bp, Glycine max
  Clone ID: LIB3138-035-Q1-N1-C7
aaaagacgcaaattttacttacattagcggcgcttcacactgtggacacgaggtgaacgtcacggaggagcaagaacacccccaatggacagaagccacagtgttacagctaagatattctgccggcaaagaggcacacgctcacatggcaccaaagtggaataaaatgcctgccggtgaagcaggcactgcgaaaggatcaaaattgggtcccaaaataca

SEQ ID NO: 32724 - DNA, 338 bp, Glycine max
  Clone ID: LIB3138-035-Q1-N1-C8
cattaaatggatggaaacgctactctacttcatcatctcatcattgaagtctgggagatcctcatatctgctcgacgtgcttgtgggacttctatatcctgtgatttgcttgcaggaaacatcaaataaggatttgtcaacattagccaaggtagcatttgaattgcttaaatggatgattgtttgggaacctcaccttcagaaggctgtatctgtgattcttactgctgccaatgatttcaactggcgaactagatctgctacattgacatatctgcgcacattcatgtacaggcacacttatattctctcaagttcaaagaagcaagaaatttgga

SEQ ID NO: 32725 - DNA, 296 bp, Glycine max
  Clone ID: LIB3138-035-Q1-N1-D1
aaaaccttcaaatatgatataattggtgctggttcacattcttcagaagattttcctgaaaaggaagatcaagaaaaacccaaaaagattgatgccagattgagacaaagaatagatcctcaatacaatgaggttcaggctcagatggaaacaaatttgtttaaattgtctcttgatgatgttgaaactcctaaaggttccatgttggatctgaaaatttctcaatctaaaattgcacttcccaagaacacagttggaggaaccattctgcgtagtgatctattggcaaaattttt

SEQ ID NO: 32726 - DNA, 297 bp, Glycine max
  Clone ID: LIB3138-035-Q1-N1-D3
ggattaggcaaaatgcagggatacagtatttgcataagggaaattgtatgtgaagtaagggctgcttttgtaagtatagaaaggcaatatctcaagagtttgtaaaagggttggatatatactcagtgattcatttgctccattttacgattttccatgtcgttcgcgtcatcattctcgatgctccggcaccgcgcgggggcttacggggcgcctcttcttcttcttcgccgctttcgctgcctacaaattgccggcagacaccaacaacaaaaccctaacaaacaagccccccct

SEQ ID NO: 32727 - DNA, 379 bp, Glycine max
  Clone ID: LIB3138-035-Q1-N1-D4
caggaattcatggagcatatgttgaccgtgatgctttaactgctgctggggaaaaagttgccaatgttgattggagaaaaatctcaactgaacattttgaagctgccgaagcaggccttataacaaattactatggagtcaaattaatgtgtgaagcacttattccccttctagaattgtcaggcacaccaaggattgtcaatgtttcctcctccatggggaagttggagaaaataccaaatgcatgggctagaggagccctaagtgatgctgagagcctaacagaagaaaaggtggatgaggttttgaatcagtttctaaaagattttaaagagggttcattagaaaccaaagggtggccacatgctttttctgcata

SEQ ID NO: 32728 - DNA, 263 bp, Glycine max
  Clone ID: LIB3138-035-Q1-N1-D5
cgacaagggtttggtaccccttgctggttccaacgacgagtcatggtgccaaggtctggatggtcttgcctctcgctcggctgcatactaccagcaaggtgcccgtttcgccaaatggcgtactgttgtgagcatccccaacggtccctctgctctggcaggtaatgaagctggctggggtctggctcggctatgcagtaattgctcaagacaatggattggtcccaattgtggaaccagaaatcttgcttgatggggagcat

SEQ ID NO: 32729 - DNA, 379 bp, Glycine max
  Clone ID: LIB3138-035-Q1-N1-D6
cttaattagtgttcatgaatatgtcaagccttactttagtggttctaaattgaaaagctttctagctagtcataacatcaccattactgatggtattgacaaaactagtgcaactttgcaatttagaaagttagcagattgtgattttctcaagagaaactttaagcagatgtctaatgttttgtgggtggctcctgaggacaaggcgagtttatggtcacaacttcattatgtttcgtgtaataatctggaaatgcaagaagcttatcttgtcaacctcgtaaatgtgttacgagaattgtatttgcacagtccagaggaagctcgccaattgagaaggaaagctctctctcgtattgaatggctgcaaaaagctgat

SEQ ID NO: 32730 - DNA, 151 bp, Glycine max
  Clone ID: LIB3138-035-Q1-N1-D7
ggacgcacctgctgttggcttgttgttcaaggatggcaatctgtaaaaaagatgtttggagaggttaattttgaaatcccttctgatttccccttacaagtattttccattgccattttaaagggaatcttctttaaaattggctttaaaa

SEQ ID NO: 32731 - DNA, 383 bp, Glycine max
  Clone ID: LIB3138-035-Q1-N1-D8
attaaaatggtggccacagttggtattcctgagaatacaggtatatcattggcctgtgctatgaatagttcttttagggggcgcgccagttctgatatttacaccatctgctctcaagactgtgaattgtggaatcctgcttgcacaaaagcaatgactatgtcatttaatccaaacccgtgttctgatgcatggagtttggaatttctgaagcgtactggatttcattgcgatatcatttgtgtcactggatggactgccaccccaatgcaggatgttcaggttacaattgattggtttatttcctctcaagaatgtgttcccaggacctattgtgttttaaatccacaaaatccttttgtgttaaataggtggatgggaaa

SEQ ID NO: 32732 - DNA, 319 bp, Glycine max
  unsure at all n locations
  Clone ID: LIB3138-035-Q1-N1-E1
gtcacaacttcattatgtttcgtgtaataatctggaaatgcaagaagcttatcttgtcaatctcgtaaatgtgttacgagaattgtatttgcacagtccagaggaagctcgccaattgagaaggaaagctctctctcgtattgaatggctgcaaaaagctgatgtgcctaccatagcacagattgaagagttccattcaatgcagaggatgatgaatgctcctgattcaaatgataatattgatttactgttgagcattgatttgttgggtttacaaggagcaggtnaagcttttccaaacaaaattgtttttgatgat

SEQ ID NO: 32733 - DNA, 357 bp, Glycine max
  Clone ID: LIB3138-035-Q1-N1-E2
caaggcagaaagcaagctcatcctagagttttaaaaatggcagcagcctcctccatggctctctcttccccatccttggctggcaaggccgtgaagctgggcccatcagcccccgaagtcgggagggtcagcatgaggaagaccgtcaccaagcaggcctactccggaagcccatggtacggcccagaccgcgtcaagtacttgggcccattctctggcgagccctcgtcctaccttactggcgagttcccaggtgactacggctgggacactgctgggcttactgccgacccagaaaccttcgccagaaaccgtgagctcgaagagatccactcccggtgggccattcttggggcc

SEQ ID NO: 32734 - DNA, 268 bp, Glycine max
  Clone ID: LIB3138-035-Q1-N1-E3
atcagaaccacattcctgggaattgatctttccaatagaggtatgtggtcctaataatggatttgaaatgtggaattctcagtgggccaatcaaacttcatggcatttgagtttccttattgacaatcccaaacaggctacagtttttgatattctcttgggaatctctcaagattgtgcaattgctgggaatacctttatgccagctttttctgtttcacaagctactgtcagatcttgtgaaaatgcagaatcctctgcatgatct

SEQ ID NO: 32735 - DNA, 322 bp, Glycine max
  Clone ID: LIB3138-035-Q1-N1-E4
cggctcgagctcaaaccaattcccacttttcctctcttcgcctcccctcaggaaccaatgtccataatcaccccacgccgtcatcctcaaacgacacccttccgctagcaaaacgactgcggtttggtcgtcgtcttccccgaggcatgctcttgggatattattattcatcatcgtaatcacaccctacagagacgttgactttgtgctttttctgggaggggaacaaatggaccaagctcttctggacgacataatcaatcgccttctcgaagttcgcagccggccggggaagcaggtgcagctgtcggagtcggagatc

SEQ ID NO: 32736 - DNA, 313 bp, Glycine max
  Clone ID: LIB3138-035-Q1-N1-E5
tcacacttatacaaaattcttcaattagtaactggttgagagttgttgtttggaagaaaggctgtttaatggtcaagattgtgatgtctgggaatgcaacactcaaaaggtgtgattgagccttatttgtacaagtgtttttaacaaacaacctcgggatccctccattttgatgcatgtaagtggactaattcataaccacattcctgggtattgctctttccaataaaagtatgtggtcctaataaaggctttgaaatgtggagttatgagtgggcaaatcaaactgtttggcatttgagtttacttattg

SEQ ID NO: 32737 - DNA, 388 bp, Glycine max
  Clone ID: LIB3138-035-Q1-N1-E6
acaaaatcagaaccacattcctgggaattgatcttcccaatagaggtatgtggtcctaataatggttttgaaatgtggagttctgagtgggcaaatcaaacttcatggcatttgagtttccttattgacaatcccaaacagtctacagtttttgatattctcttgggaatctctcaagattttgaaattgctggtaatactcttatgccagctttttctgttccacaggctactgccagatcttctgaaaatgcggaatcctctgcatgatctggaatttgtgttttctttcgcttgttcgtttgtttaattcaataaaagaaattaggcatgaccctcttgttgagtatgctctgcctatatgaaaatttccacacctcttttaatt

SEQ ID NO: 32738 - DNA, 354 bp, Glycine max
  Clone ID: LIB3138-035-Q1-N1-E8
ctcgtgccgcaaaaaaaaaaaaaaaaaaaaaaaaaaaaaaaaaaggaaaaaaaaaaaaaaaaaaacaaaaaaaaaaaaaaaataaaaaaaaaaaaataaaaatagaaaaaaaaaaagaagaaagaaaaaaaaaaaaaaaaaaagggggcggcccgggatattattattcatcatcccgaaaaaaaatttacagagacggccgactgggggctcaatctggcatgagaacaaatggaccaaactctgggggacgacatgaaacaatcggcttctcgaaaaaagaagtggccggtgaaacatgcgcaaatataagagtcggagatccaaaatgtaaaagccgggggcccagagagg

SEQ ID NO: 32739 - DNA, 356 bp, Glycine max
  Clone ID: LIB3138-035-Q1-N1-F3
tgttttgtgggtggctcctgaggacaaggcgagtttatggtcacaacttcattatgtttcgtgtaataatctggaaatgcaagaagcttatcttgtcaatctcgtaaatgtgttacgagaattgtatttgcacagtccagaggaagctcgccaattgagaaggaaagctctctctcgtattgaatggctgcaaaaagctgatgtgcctaccatagcacagattgaagagttccattcaatgcagaggatgatgaatgctcctgattcaaatgataatattgatttactgttgagcattgatttgttgggtttacaaggagcaagtaaagcttttccaaacaaaattgtttttgatg

SEQ ID NO: 32740 - DNA, 264 bp, Glycine max
  Clone ID: LIB3138-035-Q1-N1-F4
ggtgattttgtcattggtgtcaagttgacaaccataaacaatatgtgtgcatatgggctcaatcctggtatttcaggttctcgtcttttgggcaccattcctcagtccatttcacagcaaactgtttggaatcaaatggcaacagtgagaacaccattgaattttgattctagcaagcagagcttttgtcagttttctattgaccttctcggtggaggaatcttagtggacaaaactggagattggatcacacttatacaaaat

SEQ ID NO: 32741 - DNA, 359 bp, Glycine max
  Clone ID: LIB3138-035-Q1-N1-F5
tgtattgtgggtgtctcctgaggacaatgcgagtttacggacacgagctttattatctaacgtgtcataatctggcaatgcaagacgcttatcttgtcgatctcgtcaatgtgtgacgagaattgtatttgcacagcccacaggaagctcgccaattgagaaggaaagctctctctcgaattgaatggctgcaaaaagctgatgtgcctaccatagcacagattgaagagttccattcaacgcagacgatgatgaatgctcctgattcagaatgatcatattgatttactgttgagcattgatttgttgggtttacaaggagcaggataagctatttcaaacaaaattgtttttgatga

SEQ ID NO: 32742 - DNA, 328 bp, Glycine max
  Clone ID: LIB3138-035-Q1-N1-F6
tgatagttcagtgtctacaataccaggtgattttgtcattggtgtcaagttgacaaccataaacaatatgtgtgcatatgggctcaatcctggtatttcaggttctcgtcttttgggcaccattcctcagtccatttcacagcaaactgtttggaatcaaatggcaacagtgagaacaccattgaattttgattctagcaagcagagcttttgtcagttttctattgaccttctcggtggaggaatcttagtggacaaaactggagattggatcacacttatacaaaattctccaattaatgacttgttgagagttgcttcttggaag

SEQ ID NO: 32743 - DNA, 348 bp, Glycine max
  Clone ID: LIB3138-035-Q1-N1-F7
ctcgagccgaatcggtcggaaaaaaaaaaaaaaaaaaaaaaaaaaaaaaagagaaaaaaaaaaaaaaaaaaaaaaacaaaaaaagaaaagagctaaaaaaaaaacaaagaataccatgggcccagacaaaagaaagtgaaacaaatgagaaagaaaaagtctcaatcaaaatgggggggcgccgaaaaagggagggcctaccacaggaaaaaaatgaagagggccattcaaggcagaagaagattaatgctattgagtgaaatgataatattgaagtaaaccagggcaaacgattttttggggtgaaaaggataatggggagcaaatccaaaaaaaaaagaaccggtg

SEQ ID NO: 32744 - DNA, 389 bp, Glycine max
  Clone ID: LIB3138-035-Q1-N1-F8
gagagattcaggaaaaagttgtattgaaattttcacaagaggaatttcttacagcttggtcaactcaggtgcgtcctgcaacaactctgttggctgatgggtgtccatatttgtatgcaatggtgcatgatagttcagtgtctacaataccaggtgattttgtcattggtgtcaagttgacaaccataaacaatatgtgtgcatatgggctcaatcctggtatttcaggttctcgtcttttgggcaccattcctcagtccatttcacagcaaactgtttggaatcaaatggcaacagtgagaacaccattgaattttgattctagcaagcagagcttttgtcagttttctattgaccttctcggtggaggaatcttagtggacaaaact

SEQ ID NO: 32745 - DNA, 205 bp, Glycine max
  Clone ID: LIB3138-035-Q1-N1-G1
gggacttttcaacttggtactgtatcgtggtatagagagtatagcttccaaggaatcatctgtcgggtcctcaagctctgataagccttaaaatttgctggtgctgattaaaaatcatagttaccatggtcctttttccatcttttgtgaatggattggtaagaactgtgtccatcacaaaagcgaaaaattgtcaaagggaggg

SEQ ID NO: 32746 - DNA, 352 bp, Glycine max
  unsure at all n locations
  Clone ID: LIB3138-035-Q1-N1-G2
aaagttttgcttctttctttcttactttctctcactcaccaaatagttttctcacaaaggaggaagaatggcatctttcatttcactctctttgttgcttctctttctcaattaccccttcctttccctctcaaccaaccctgaagggaacgctctgcatgctttgagaagcaggatttctgatcccaacaatgtgttgcagagttgggacccaacactggttaatccctgtacttggttccatgttacttgtgactccaacaatcatgtgattcgcttgtaaggatccctttgntcttttcttttctttctgttagtttattcttcagacttttttttagtctttttggtt

SEQ ID NO: 32747 - DNA, 359 bp, Glycine max
  Clone ID: LIB3138-035-Q1-N1-G4
gtttggagagattcaggaaaaagttgtattgaaattttcacaagaggaatttcttacagcttggtcaactcaggtgcgtcctgcaacaactctgttggctgatgggtgtccatatttgtatgcaatggtgcatgatagttcagtgtctacaataccaggtgattttgtcattggtgtcaagttgacaaccataaacaatatgtgtgcatatgggctcaatcctggtatttcaggttctcgtcttttgggcaccattcctcagtccatttcacagcaaactgtttggaatcaaatggcaacagtgagaacaccattgaattttgattctagcaagcagagcttttgtcagttttctattg

SEQ ID NO: 32748 - DNA, 325 bp, Glycine max
  Clone ID: LIB3138-035-Q1-N1-G6
ctcaaatatctggttgatgagtgtccttttgcatttgagaactagtatgtagtattttattcacttaaataaagcgcattactatgtgcaatgagtgtgtttaaatttaaaaaaaaaaaagaaaaaagaaaaaaaaaaaaataaaaataccagatgataataaaattggagtaaaaatgagacaaccataaacaatatgtgtgcatatgggctaaatagatgatatttcaggttatagtcttttgggcacgcattccttagactatttcacaaacagactgtattggaatcgaatggcctctacaagaacaccattgaattatga

SEQ ID NO: 32749 - DNA, 369 bp, Glycine max
  Clone ID: LIB3138-035-Q1-N1-G8
ctcgagccgattttattcacttaaatatctggttgatgagtgtccttttgcatttgtgaactagtatgtagtattttattcacttaaataaagcgcattactatgtgcaatgagtgtgtttaaatatgaaaaaaaaaaaaaaaaaaaaacaaaaaaaaaaaaaaaaaaaaaaaaaaaaaacaaacataaacaatatgtgtgcaatatagactaaataaataaataaaaaagatatagaattttgggcaaccatttctcagtccatttcacagcaggcgggggggcatcaaatgggggctgtgacaacaccattaaatttggacggtacccgggggggcttccgttttttttttattgggcttttttaaa

SEQ ID NO: 32750 - DNA, 330 bp, Glycine max
  Clone ID: LIB3138-035-Q1-N1-H1
caaatagctctgattacaagatgagatcatttagcccaaaccactatttaattttgttccttattctcactgtgtggacattccacgtcatgtctcgcaggttgtctgaggtctgcacttccgagagacatgagaagtggatggcacagtatggtaagctttacacggatgctgctgagaaggaaaaacgtttccaaatattcaaaaacaatgtgcagttcattgagtctttcaatgctgctggggacaaacctttcaacctaagcattaatcaatttgctgaccttcattatgaagaatttaaggcttcacttattaatgttcagaaaa

SEQ ID NO: 32751 - DNA, 401 bp, Glycine max
  unsure at all n locations
  Clone ID: LIB3138-035-Q1-N1-H3
gntcgaggtgaaagagaagaaagagattgaagagacccagcagaccgacaaggacagatggaagggtcttgcctatgatatctcagacgaccaacaggacatcacaaggaggaaagggtttggttgactcccttttccaagctccacaggatgctggaactcactatgctgtcatgagctcctacgagtaccttagcactggacttcgccagtacttggacaacaacatggatggattttacattgctccagcttttatggacaaacttgttgttcacattaccaagaacttcatgaccctgcccaacatcaagggtcctctcattcttggtatctggggaggcaagggacaaggaaaatctttccaatgtgagcttgtctttgccaagatgggaatcaac

SEQ ID NO: 32752 - DNA, 366 bp, Glycine max
  Clone ID: LIB3138-035-Q1-N1-H4
gcctctggcctcagctcggccgtctcatcggctgcatcaggcgcaacaagcgagggatccagcctcgcatccgccgtctcatctggcagcatcaccggctcagcagcctctgcctcggcttcttccatcatcgccggagccaactcgaccgtcgcgtctcgtctgtcgtcgctcaactctgagctgtccaccatcgcctccaccgctacctccctccgatccagcatctcggccgagatctcgcgtgccagcgcctcgttgtcgtctgtccaagctcaggtcacctctgccgtagactctgcgggcgcttctgcttcagcctcggccactggtgagggtgccgctatccagtacgctgcccccgct

SEQ ID NO: 32753 - DNA, 229 bp, Glycine max
  Clone ID: LIB3138-035-Q1-N1-H5
gtataagagaagaaagagattgaagagacccaacccaccgacaaggacagatggaagggtcttgcctatgatatctcagacgaccaacaggacatcacaagaggaaagggtttggttgactcacttttccaagctccacaggatgctggaactcactatgctgttgtgagctcctacgagtaccttagcactggacttcgacacgacttggacaacaacatggatggat

SEQ ID NO: 32754 - DNA, 399 bp, Glycine max
  Clone ID: LIB3138-035-Q1-N1-H6
gccaagccaccagcattcctgctgatagagtccctgacatgggcaaaagacagctcatgaatctgcttcttcttggtgccatttcactcccctctgctggaatgcttattccctacacctacttttttgtccctccaggttcaggttcttcagctggtggtactgttgccaaggatgctgttggaaatgatgtaattgcagagaattggctcaaggcacatggacctggtgaccgaacccttgcacaaggattgaagggagatcctacctatcttgttgtggagaaagacagaacccttgcaacatatgcaattaatgccgcgtgcactcaccttggatgtgtcgtgccatggaatcaagcagagaacaagttcatctgcccttgccatggatctcagt

SEQ ID NO: 32755 - DNA, 343 bp, Glycine max
  Clone ID: LIB3138-035-Q1-N1-H7
gaagaacaagtagttgagaactaagaaggagaagcaaatggcttcctcaatgatctcttccccagctgttaccactgtcaaccgtgccggtgccggcatggttgctccattcactggcctcaagtccatggctggcttccccaccagaaagaccaacaatgacattacctccattgctagcaacggtggaagagtgcaatgcatgctgtggccaccacttggcaagaagaagcttgagactctttcctacctgccagaccttgatgatgcacaattggcaaaagaagtagaataccttcttaggaagggatggattccttgcttggaaatcgagttggagcac

SEQ ID NO: 32756 - DNA, 399 bp, Glycine max
  Clone ID: LIB3138-035-Q1-N1-H8
gcattttgatgcatgtaagtggacaaaatcagaaccacattcctgggaattgatcttcccaatagaggtatgtggtcctaataatggttttgaaatgtggagttctgagtgggcaaatcaaacttcatggcatttgagtttccttattgacaatcccaaacagtctacagtttttgatattctcttgggaatctctcaagattttgaaattgctggtaatactcttatgccagctttttctgttccacaggctactgccagatcttctgaaaatgcggaatcctctgcatgatctggaatttgtgttttctttcgcttgttcgtttgtttaattcaataaaggaaattaggcatgaccctcttgttgagtatgctctgcctatttgaaaatttccacac

SEQ ID NO: 32757 - DNA, 373 bp, Glycine max
  Clone ID: LIB3138-002-Q1-N1-A1
tttgaaaccttctaaactcactctctcactttctcactccctgactccctccgttgacgtttttgttttctttttctctgtgttctgaagaagttttagggtttcgttttgtttctctcttcggccacttcaggctatggattcatttgagccagatggaaatgggaaggagtcactgccaccaccacctcctgttgttccctctgatattgtacctctcaaagcagaggaggtgctctgtacccctaccgagcataataagaaaaaggcttcccgacttccaatagccagatctggtctgggatcaaaaggaaataaaatacaattactaacccaatcactttcaaagttaatgttgctaaaaaatgatggg

SEQ ID NO: 32758 - DNA, 332 bp, Glycine max
  Clone ID: LIB3138-002-Q1-N1-A10
tttcttttctttcaacacccgtaactttacacaccctttcttcttcacacattgagcaaattctcacaaacataacctatctattcacatttcaatctcctaactattctcacccctgactagctgtgctaccacatctataattcattgctcaatccatacctagaacaagaccctgacatcaaggtagcctgtaacacatacacccaaaccaacatgttcaaaatctttagagagatcacaaacaaacccaacctagactattagaaaattgtccctcacacataccgcgaaattttattcatctataataatgtttgtctttatgctca

SEQ ID NO: 32759 - DNA, 279 bp, Glycine max
  Clone ID: LIB3138-002-Q1-N1-A11
acagtctacagtttttgatattctcttgggaatctctcaagagtttgaaattgctggtaatactcttatgccagctttttctgttccacaggctactgccagatcttctgaaaatgcggaatcctctgcatgatctggaatttgtgttttctttcgcttgttcgtttgtttaattcaataaaggaaattaggcatgaccctcttgttgagtatgctctgcctatttgaaaatttccacacctcttttaattgtcgtaatgatgtgtgaagtgtgtgtta

SEQ ID NO: 32760 - DNA, 420 bp, Glycine max
  Clone ID: LIB3138-002-Q1-N1-A12
cgcgactctcgatactaaccaccaggacaaccaacccgccagaatggtcaacctccgcactcagaagcgcctcgcggcctccgtggtcggttgcggaaagcgcaagatctggctcgaccccaacgagaccagcgaaatcgccaacgccaactcccgtcagaccgtccgcaagctcgtccaggatggcctcatcatccgcaagcccgtcaccatgcactcgcgtgcccgcgcccgggagctgaccgccgctcgacgaattggtcgccaccgtggtttcggtaagaggaagggtaccaaggacgctcgtatgccaagccaaatcgtctggatgcgccgtctccgtgtcctccgccgtctcctcgtcaagtaccgtgccgccggaaagatcgacaagcacctttaccacgagctgtaccacct

SEQ ID NO: 32761 - DNA, 333 bp, Glycine max
  unsure at all n locations
  Clone ID: LIB3138-002-Q1-N1-A2
ctattggtgggaatcggcatgaatggcgaggggagtgaagcagtgcaagtggagaaggagagcttggtgtacatgtggggttacctgcccggagctctgccgcagaggacgcctctgttgacgccgcttcttgttagggttccgccctctggttacttttggaaggatgtctgcggcggtggttgtggattcgccatggctatctctgagcctggaaagctcataacatggggttcaacagatgatttaagccaaagctatngtacatctggcaaacatgggaaactncagagcctttcctcttcactgaatgactatgtaagctgcactgat

SEQ ID NO: 32762 - DNA, 157 bp, Glycine max
  unsure at all n locations
  Clone ID: LIB3138-002-Q1-N1-A4
tattggcaaattttttgacagagggcaattttagagcaagtgttgatgtgcagcgcactcatcgtattagaggaatgattaanatggtggccacagttggtattcctgagaatacaggtatatcattggcctgtgctatgaataggtcttttagggg

SEQ ID NO: 32763 - DNA, 331 bp, Glycine max
  Clone ID: LIB3138-002-Q1-N1-A5
gtggaaagaggatgagaccagctttggtgttcttggtgtcaagggcgactgcagagttacttggcttgaaggaacttactgcaaagcatcgacgtttagcagagataattgaaatgattcatactgcaagtttgatacatgatgatgtactagatgagagtgaccttcgacgagggaagaaaactgttcatcaaatgtttggaacaagagttgcagtgctggctggagacttcatgtttgcacagtcatcatggtatctagccaaccttgaaaatattcaagtcattaaactcatcagtcaggtgataaaagattttgcaagtggggaaat

SEQ ID NO: 32764 - DNA, 441 bp, Glycine max
  Clone ID: LIB3138-002-Q1-N1-A6
agaacacatattgctgcaaaagcagttgagattgctgagaggggcatatcaagagacaggtggccagaatattacgacacgaagagatcccgattcattggaaaacaatctcaactatatcagacttggtcaatcgcaggataccttgttgcaaagctgctgcttgcagacccaagtaaagcaaacatactgatcaccgaagaggattctgagcttgtgaatgccttgattagtgccaaccctagaggaaagcgagggcgcaaaaatttgaggcagacttacattgtatgagtctttaattgcaattcttggttcctttgggtcaaattcatttttcctctgattattagcagcatgttattcttgctagatacggcaagaatatgcaaaaatatattgtagtttgagttggttgtgatgaaacaaaaatactagtatgta

SEQ ID NO: 32765 - DNA, 259 bp, Glycine max
  Clone ID: LIB3138-002-Q1-N1-A7
gcgattattgattagtacaaaaaaaaaaaaaaaaaaagagaatgttggggagcactcatcaaccatggtgatgttgtttgcacacacagattcaatagtcacttactaattcttggagaaaaccaagtgtcagttattacttaccagccaaaccgaaaagaattccgattcgattccgagagaaccacccttaagaacgaccaccacaaccaccaccaccaccagcgccgagcatagcaaagacactaccgttggaatc

SEQ ID NO: 32766 - DNA, 314 bp, Glycine max
  Clone ID: LIB3138-002-Q1-N1-A8
ccttgctgatcctcatgatgggaaccaccacttctccggactgtctctatacactcctcagcatcaaaccatgaccgtgaagaatcctcttggctccctttccgcaccccaagtcaaaatatttctcttgctccaaacccattgatacaagtctcagaaagaaccaacctccatcttccagaccttgatcggacacacgctggatggctcatgctcaacagggcctagcagcttaggctatctcctaggcactcaaccatagcccacgattgatcaatggcaatgcattggcacttgagtttgatgtgcttaat

SEQ ID NO: 32767 - DNA, 313 bp, Glycine max
  unsure at all n locations
  Clone ID: LIB3138-002-Q1-N1-A9
aaattcttcaataagctctcacattttgtgaccaaaataatacgttangaaaaaagaaaaaaatgtcatccactgctagcttgggttatggggctccaacctgcttcaacaacgttcatcacacaaagaagcagcaagcaatgaggaacagtttcttgagcaataagcacaacagtgtgagagtgatgaagggttggagaggaagacatggtaacactaacaacacatccaaaagggtaggaattgtgcagtgtagagggttaggggacttcataggtggagacttgataaagcttgatcttggacgttggct

SEQ ID NO: 32768 - DNA, 310 bp, Glycine max
  Clone ID: LIB3138-002-Q1-N1-B1
gacctattgtgttttaaatccacaaaatccttttgtgttaaataggtggatgggaaaattgactttcccccagggcacttcccgaagtgttaagagaatgcctctttctatagggggaggagctggtgcaaagaatgctattctcatgaatatgccaaatgctgttctttcaatgtggagatattttgttggagatctcgtctttgaagtttctaagatgacttctccctacattaaatgtacagtctctttcttcatagcatttggaaatttggctgatgataccatcaattttgaggcttttccccac

SEQ ID NO: 32769 - DNA, 197 bp, Glycine max
  Clone ID: LIB3138-002-Q1-N1-B10
ggaaacatctataaaagcctcctttagattatttttatttagggggttaactgtttcctttatatttaaaagttgagttgtagcaattcaaagtattctatgcagtgtaataaagacaatgtacacggtcataaaaaaaattaaatagatacagtaggcaattattttcttttaaataataataatgaattatattc

SEQ ID NO: 32770 - DNA, 425 bp, Glycine max
  Clone ID: LIB3138-002-Q1-N1-B11
cacttatacaaaattctccaattagtaacttgttgagagttgctgcttggaagaaaggctgtttaatggtcaagattgtgatgtctgggaatgcagcagtcaaaaggagtgattgggcctcattggtacaagtgtttttaacaaacagcaacagtacagagcattttgatgcatgtaagtggacaaaatcagaaccacattcctgggaattgatcttcccaatagaggtatgtggtcctaataatggttttgaaatgtggagttctgagtgggcaaatcaaacttcatggcatttgagtttccttattgacaatcccaaacagtctacagtttttgatattctcttgggaatctctcaagattttgaaattgctggtaatactcttatgccagctttttctgttccacaggctactgccagatct

SEQ ID NO: 32771 - DNA, 416 bp, Glycine max
  Clone ID: LIB3138-002-Q1-N1-B12
atttcatttcgttaatcactcctaacttctgcattccaaaggggaactcggacacgacgtcgtattggtgctacagttgcacgcgcttcgttcacatccacgagcagaacgacgtcgtgtgcccccgctgccatggcggcttcgtcgaaaaggtcaccgccgggcaatcggcaaggcaggggttccgccgccgccgccgcaacgccgggagccactcgccgttcaacccggtgatcgtgctccgtggaccgggggaggacgaggagagcagctttgagttatactacgacggattcgacggcgaggggctccgcccgctgccgtccaccatgtcggagtttctgctcggatcgggattcgaccggttgctggagcaggtttcgcagatcgagataaacggcttgggaaggccggag

SEQ ID NO: 32772 - DNA, 327 bp, Glycine max
  Clone ID: LIB3138-002-Q1-N1-B2
cagcaacagtacagagcattttgatgcatgtaagtggacaaagtcagaaccacattcctgggaattgatcttcccaatagaggtatgtggtcctaataatggttttgaaatgtggagttctgagtgggcaaatcaaacttcatggcatttgagtttccttattgacaatcccaaacagtctacagtttttgatattctcttgggaatctctcaagattttgaaattgctggtaatactcttatgccagctttttcttgttccacaggctactgccagatcttctgaaaatgcggaatcctctgcatgatctggaattgtgttttctt

SEQ ID NO: 32773 - DNA, 115 bp, Glycine max
  Clone ID: LIB3138-002-Q1-N1-B3
atttaatttcttacttggaattatgtattggcttggtggttgagctcgaattttgacagcgccattcttccatagatcagtgctgattggtaagaagcccttcattttctcttca

SEQ ID NO: 32774 - DNA, 322 bp, Glycine max
  Clone ID: LIB3138-002-Q1-N1-B4
attcctcagtccatttcacagcaaactgttggaatcaaatggcgacagtgagaacaccattgaattttgattctagcaagcagagcttttgtcagttttctattgaccttctcggtggaggaatcttagtggacaaaactggagattggatcacacttatacaaaattctccaattagtaacttgttgagagttgctgcttggaagaaaggctgtttaatggtcaagattgtgatgtctgggaatgcagcaatcaaaaggagtgattgggcctcattggtacaagtgtttttaacaaacagcaacagtacagagcattttga

SEQ ID NO: 32775 - DNA, 418 bp, Glycine max
  Clone ID: LIB3138-002-Q1-N1-B6
atcagtagaacccaagccacagccagtctctgctccttcaccaaaggtgagcactaagttttctgatgtgttggcattcagtgggccagcacctgagaggatcaatggaaggttggccatgattgggtttgtggctgcaatggcagtggaagtagccaaagggcaaggtgtgttagaacaaatatccaatggtggcatcccatggttcttggggacaagtgtggtccttacccttgcttccttgattccactcttccaaggtgtcagcgtggagtctaagtccaaagggttcatgtcctcagatgcagaactgtggaatgggagatttgctatgttgggtttgattgctctggcttttactgagtatgttaaggtagtactttggtataattcagtcatgaaggcacaccacaatgga

SEQ ID NO: 32776 - DNA, 401 bp, Glycine max
  Clone ID: LIB3138-002-Q1-N1-B7
aaaaaaagagagtaaacacagtttaacaagagactacataaggctttttttaatttctctagcagttgagtttaattccgatgaataagaaaaatataatcataatcatattatactatgtcttcattggtactgaactcttccgttgcggtactgaactcttccgttgctgtcgttgctgtccttggggaggcaactggcaggaagatctcttctccctgacactttcaacaccgcaatccaccattaatcgggaacccgacaagagcagagctccgccacgattacggaaagataagaggcgtgaaagagcaggtattgagatgcagatcagtgagaacaacaacttattcgagcaatctcgaggcaaagagaagataagcaatttaaaatgctcatgg

SEQ ID NO: 32777 - DNA, 390 bp, Glycine max
  Clone ID: LIB3138-002-Q1-N1-B8
tgatagttcagtgtctacaataccaggtgattttgtcattggggtcaagttgacaaccataaacaatatgtgtgcatatgggctcaatcctggtatttcaggttctcgtcttttgggcaccattcctcagtccatttcacagcaaactgtttggaatcaaatggcaacagtgagaacaccattgaattttgattctagcaagcagagcttttgtcagttttctattgaccttctcggtggaggaatcttagtggacaaaactggagattggatcacacttatacaaaattctccaattagtaacttattgagagttgctgcttggaagaaaagcttgttaatggtcaagattgtgatgtctgggaatgcagcagtcaaaaggagtgattg

SEQ ID NO: 32778 - DNA, 347 bp, Glycine max
  Clone ID: LIB3138-002-Q1-N1-B9
ggtattgcaagttctcgtatcttgggcaccattcctcattggggttgacatcaaactgtctggaatcaaatggcaacagagagaacaccattgaattgagattctagcaagcaaagctttggtcaggtttatattgaccttctcggcggatgaatactaggggacaaaactggagatcgtatcacacttatacaaaattcttcaattagtaacttattgagagttgctgcttgtaagaaaggctgtacaatggtcaagattgcgatgtctagaaatgcatcacccaaaaagagtgattgctcctcattggtacaaagtgctgtaacaaacagcagcagctcacatca

SEQ ID NO: 32779 - DNA, 261 bp, Glycine max
  Clone ID: LIB3138-002-Q1-N1-C1
gagatattttgttggagatctcgtctttgaagtttctaagatgacttgtccctacattaaatgtacagtctctttcttcatagcatttggaaatttggctgatgataccatcaattttgaggcttttccccacaagctggtgcagtttggagagattcaagaaaaagttgtattgaaattttcacaagaggaatttcttacagcttggtcaactcaagtgcgttctgcaacaactctggtggctgatgggtgtccatattt

SEQ ID NO: 32780 - DNA, 421 bp, Glycine max
  Clone ID: LIB3138-002-Q1-N1-C10
gaacacactaccctcaacatagtaaagcagctggtgcaagtgaagcaatggctcaaaccatgttgctcatgtctagtgtctctagcagttattccgtggatttgaagaaagaccttttcctccaattgcagagtcaaagtttaaggcctaagttctctcaactctcattcaacccacttccaccatcaacttcttccttttcttcaccccgtacattcacaaccctggctctcttcaaatctaagacaaaagccgctcctgctaagactaaggttacaaagccaaagcaaaaggttgaagatggtatctttggcacttctggaggatttggttttactaagcagaacgagctctttgtgggtcgtgttgctatgcttggttttgcagcatcattgttgggtgaaggaataactgggaaagg

SEQ ID NO: 32781 - DNA, 426 bp, Glycine max
  Clone ID: LIB3138-002-Q1-N1-C12
ctagttttgatggtttgattaccaagcaagttatgagcaagagggcagaaatgataaacagtctttgtggtggtgatgaaaaattgatgcgtgaaaggacgcacctgctgttggcttgttgttcaaggatggcaatttgtaagaaagatgtttggagagttgaatgtggaatcccttctggatttccgctcacagttatttgcaatagcatttttaatgagatgctcattagatatagctatgaaaaattactgcgccaggctaaagctccaagtatgtttttacaatccttcaaaaattttgtttctttgtgtgtgtatggtgatgataacttaattagtgttcatgaatatgtcaagccttactttagtggttctaaattgaaaagctttctagctagtcataacatcaccattactgatggta

SEQ ID NO: 32782 - DNA, 372 bp, Glycine max
  Clone ID: LIB3138-002-Q1-N1-C2
ggaccgaacgatccgtctatacaacccacagaaggctcctacgacctgtgtcgcgcctaccgcctcgaacgtgtacccgcccgggctcgtcaacaagtacagcgcgcatggctatgaagtcctttccattgacgtcaataccgacaatgataaattcgtgtccaccggcggcgacaagacagtctttgtatgggacgtgcagactgctcagacagtgagacgcttcaccggccactcagggcgcatcaatcgcggagtcttcggtggcgagggagacagcatcatcgcgagcgggagcttcgacgggacggtcaagatttgggacctgaagtcgaacgcatataagcccatcatgacgctcgatgacgccaa

SEQ ID NO: 32783 - DNA, 406 bp, Glycine max
  Clone ID: LIB3138-002-Q1-N1-C3
gtgatgataacttaattagtgttcatgaatatgtcaagcctgacttgagtggttctaaattgaaaagctttctagctagtcataacatcaccattactgatggtattgacaaaactagtgcaactttgcaatttagaaagttagcagattgtgattttctcaagagaaactttaagcagatgtctaatgttttgtgggtggctcctgaggacaaggcgagtttatggtcacaacttcattatgtttcgtgtaataatctggaaatgcaagaagcttatcttgtcaatctcgtaaatgtgttacgagaattgtatttgcacagtccagaggaagctcgccaattgagaaggaaagctctctctcgtattgaatggctgcaaaaaagctgatgtgcctaccatagcac

SEQ ID NO: 32784 - DNA, 280 bp, Glycine max
  Clone ID: LIB3138-002-Q1-N1-C4
tgggaatgcagcagtcaaaaggagtgattgggcctcattggtgcaagtgtttttaacaaacagcaacagtacagagcattttgatgcatgtaagtggacaaaatcagaaccacattcctgggaattgatcttcccaatagaggtatgtggtcctaataatggttttgaaatgtggagttctgagtgggcaaatcaaacttcatggcatttgagtttccttattgacaatcccaaacagtctacagtttttgatattctcttgggaatctctcaagatttt

SEQ ID NO: 32785 - DNA, 429 bp, Glycine max
  unsure at all n locations
  Clone ID: LIB3138-002-Q1-N1-C5
gcttggaagaaaggctgtttaatggtcaagattgtgatgtctgggaatgcagcagtcaaaaggagtgattgggcctcattggtacaagtgtttttaacaaacagcaacagtacagagcattttgatgcatgtaagtggacaaaatcagaaccacattcctgggaattgatcttcccaatagaggtatgtggtcctaataatggttttgaaatgtggagttctgagtgggcaaatcaaacttcatggcatttgagtttccttattgacaatcccaaacagtctacagtttttgatattctcttgggaatctctcaagattttgaaattgctggtaatactcttatgccagctttttctgttccacaggctactgccagatcttctaaaatgcggaatcctctgcatgatctggaaattgnngtttctttc

SEQ ID NO: 32786 - DNA, 377 bp, Glycine max
  Clone ID: LIB3138-002-Q1-N1-C6
tgttgctgttgttgttgttcatggtgttaagtgatagataacagaagggagagcagaacctagaaatcgcgttggttcgttggtttatgacttggagtgaaaccctaactaatattgaagatgagcattcggaggttgagtgccgaagaatcgcaaacactttactctctcctcagagcagagcaacgttcgctccatgagatcctctcccaattcaacgctgcaatcccttccacccgccatttcactctctcttcctatctcctcatcctattgcaggacaataaggtgctcagcaccactgagcggttaatagcttttgctctgctagttgaggcttattcatcccagaaaccggcttcaaatcccttcataag

SEQ ID NO: 32787 - DNA, 369 bp, Glycine max
  Clone ID: LIB3138-002-Q1-N1-C7
cgacaatgaagaaagtagtcttacagttggacttacatggtggtagaatcaagcaaaaagctatgaaaacagcatctggcctttcaggggttgaatcagtttctgttgatatgaaagacatgaaaatgatcgtgttgggggacattgatccagtgagtgcagtgtcgaagctacgaaagtgttgtcacactgaaatagtttcagttggaccagcaaaagaggagaagaaggagaatgtggagccagcaaaagtaccagttcctctaaagctccatgaagcctatcccctttattatcagatgacaccacattatggtcaaagtcactatgtcacaagttacgaagaggatcctagtggctgtgtcatct

SEQ ID NO: 32788 - DNA, 325 bp, Glycine max
  Clone ID: LIB3138-002-Q1-N1-C8
ccgagaagaaccgtaaagagatctgcaaatacctcttccaagagggagtttgctttgcgaagaaggacttcaatctggcgaagcacccggagattgatgtgccgaatctgcaggtgataaagctgatgcagagcttcaaatccagagagtacgtgagggaaacatttgcgtggatgcactattactggttcctcaccaacgatggaattgagttccttaggacttacctcaaccttccatccgaaattgtccctgccactctcaagaagcaggccaagcccgccggaagaccattcggtggcccacccggtgatcgccccaaggg

SEQ ID NO: 32789 - DNA, 371 bp, Glycine max
  unsure at all n locations
  Clone ID: LIB3138-002-Q1-N1-C9
ctccactggttttttatctgcatgcacacagttgcatagctgtggaaaccaaaaattcctgaagaagggtagcatcaacaagcagttctgaaaatggagatcaccaacgtcagtgagtatgaggctattgcaaagcagaagttgccaaagatggcgtttgactactacgcatctggtgcagaggaccagtggactctgcaagagaacagaaatgccttttccagaattttgtttcggccacgtattcttattgatgtgagcaagatagacttgacaactactgtcctangcttcaaaatatccatgccaatcatgattgccccaacagccttttagaaaatggctcatcctgagggagaatatgcaacatc

SEQ ID NO: 32790 - DNA, 313 bp, Glycine max
  Clone ID: LIB3138-002-Q1-N1-D1
caacaagatgatcttctagagaagccaacagttacagtgactgaacctaaatataggcatgaattctaccagaaacatgatcaggtggttgtgaccatatttgcaaagaaaatcccaaaggaaagcattactgttgacttcggtgaacaaatactaagtgttagtattaatgtcacaggagaagacacatatgtttttcaacctcgcttatttggaaagatcataccttccaattgtcaatatgaagttttgtccaccaaaattgaaattcgtcttgcaaaagcagaacctattcactggacatctctagaat

SEQ ID NO: 32791 - DNA, 427 bp, Glycine max
  Clone ID: LIB3138-002-Q1-N1-D10
tggacagtggacctgatgatcatatatttgtatactatactgaccatggaggtccaggggtgctcgggatgcctgctggtccttacttatatgcggatgatctgattgaagtcttgaagaaaaaacatgcttctggaacgtataaaaacctagtattttatctggaggcatgtgaatctgggagtatctttgaaggtcttcttcccgaagatatcaatatttatgcaaccacagcttccaatgcagaagaaagtagttggggaacatattgccctggggagtatcctagtcctcccccagaatattcaacctgcttgggtgatctgtacagtgttgcttggatggaagacagtgacagacacaatttacgaacagaaactctgcatcaacaatataaattggttaaagagaggactatatctggaga

SEQ ID NO: 32792 - DNA, 415 bp, Glycine max
  Clone ID: LIB3138-002-Q1-N1-D11
gcctaccatagcacagattgaagagttccattcgatgcagaggatgatgaatgctcctgattcaaatgataatattgatttactgttgagcattgatttgttgggtttacaaggagcaggtaaagcttttccaaacaaaattgtttttgatgataagcttgtgttggctaacacacaagaattctttgatggaaattttccagtggattcttggttaccaatttttgtgaattgtctttatcctgtaagtcaattaccttcagaagctgtcgttgtaaatgttacatgtggtagtggacgtggtggtttacccaccactgcttggattagttctgcagttaacaatcgctcctcagatatcaacaaaaggattcgcacagcacttgggaaaggtaagaaaaatgtttttcttact

SEQ ID NO: 32793 - DNA, 426 bp, Glycine max
  Clone ID: LIB3138-002-Q1-N1-D12
ggttacaattgattggtttatttcctctcaggaatgtgttcgcaggacctattgtgttttaaatccacaaaatccttttgtgttaaataggtggatgggaaaattgactttcccccagggcacttcccgaagtgttaagagaatgcctctttctatagggggaggagctggtgcaaagaatgctattctcatgaatatgccaaatgctgttctttcaatgtggagatattttgttggagatctcgtctttgaagtttctaagatgacttctccctacattaaatgtacagtctctttcttcatagcatttggaaatttggctgatgataccatcaattttgaggcttttccccacaagctggtgcagtttggagagattcaggaaaaagttgtattgaaattttcacaagaggaatttcttacagc

SEQ ID NO: 32794 - DNA, 290 bp, Glycine max
  unsure at all n locations
  Clone ID: LIB3138-002-Q1-N1-D2
tttacaagggctctcacttcatgaagccaaaaggggtgtttcagaatgcttcctagttgagaacaacaatggttcctccattgctggaaggagacttgagatcacagcacgaactgctggggcttcaaagacaattgaggtggaggttgacaagccacttggcctcaccttaggccaaaagtctggtggtggtgttgtcatcactgctgttgatggtggtgggaatgcagcaagagcagggttaaaggcaggggaccaagtcctttacactagcagtttctttggngatg

SEQ ID NO: 32795 - DNA, 264 bp, Glycine max
  unsure at all n locations
  Clone ID: LIB3138-002-Q1-N1-D3
ctaatagctgaacgggagaaaactattcctacattggttggcattgaatgtcccacggatgataaacttactcatccacaactattgacaaacctaagactcgctccttcactattctccctatggattataatcttgaggaccgncaaaagcttcataaaaatgagaggttcattatgattaacacggacaaacttagtcgccaagattgaatcatcccatactccatgtaatgcactgctatgatcaaaaaattactgagaa

SEQ ID NO: 32796 - DNA, 294 bp, Glycine max
  Clone ID: LIB3138-002-Q1-N1-D4
tatcaacaaaaccgattcccacgagggcttgctttaagtaagagaaattgttttatcttactatgagttgatcctctttccattatgctttacttggctgtctctttttgtgcgttatagaatgataattctgatttctaacgaccactaatacctatgcatgacgcgactctcttgagaacttgtaaaagtctcaaatatctgcttgatgagcgtccttttgcatttgtcaactagtatgtattattttattcacttaaataaagcgcattactacttgcaatgagtgtgttt

SEQ ID NO: 32797 - DNA, 349 bp, Glycine max
  Clone ID: LIB3138-002-Q1-N1-D5
gtatgctggtgaggtgggctatctatctgcatcaataagaacagtagctgatgctagagtgggtgacactattactcactatggcagaaaggctgacaattctctccctggatatgaggaagccactcctatggtgttctgtgggttgtttcctgttgatgctgaccaattccctgatctgcgtgatgcacttgaaaagctacaactcaatgatgctgcacttaagtttgaacctgagacatcaagtgccatgggatttggctttagatgtgggtttctgggccttcttcatatggaaattgttcaggagaggcttgagagagaatacaatttgagcctaataacaact

SEQ ID NO: 32798 - DNA, 386 bp, Glycine max
  unsure at all n locations
  Clone ID: LIB3138-002-Q1-N1-D6
ctcnagccgctcgagccgatcacacttatacaaaattctccaggtagtgacttgttgagagttgctgcttggaagaaaggctgtttaatggtcaagattgtgatgtctgggaatgcagcagtcaaaaggagtgattgggcctcattggtacaagtgtttttaacaaacagcaacagtacagagcattttgatgcatgtaagtggacaaaatcagaaccacattcctgggaattgatcttcccaatagaggtatgtggtcctaataatggttttgaaatgtggagttctgagtgggcaaatcaaacttcatggcatttgagtttccttattgacaatcccaaacagtctacagtttttgatattctcttgggaatctctcaagattt

SEQ ID NO: 32799 - DNA, 439 bp, Glycine max
  Clone ID: LIB3138-002-Q1-N1-D7
cgctagtgcaaagggtttctttgaggtcacccatgacatttgtgacctgacatgtgcagatttccttcgagcccctggagttcagacgcctgtaattgttcgtttctcaactgtcattcatgagcgtggtagccctgaaaccttgagggaccctcgaggttttgccgtgaagttttacaccagagagggtaactttgaccttgttggaaacaaccttcccgtcttctttgtacgtgatggcatgaagtttccagatatggttcatgctcttaaacccaatcccaagaaccacatccaggagaattggaggatccttgacttcttctctcactttccagaaagccttcacatgttcacctttttatttgatgatttgggtgttccacaagattacaagcatatggatggttttggagttaacacatacacactgatcaac

SEQ ID NO: 32800 - DNA, 298 bp, Glycine max
  Clone ID: LIB3138-002-Q1-N1-D8
taacaatcgctcctcagatatcaacaaaaggattcgcacagcgcttgggaaaggtaagaaaattgtttttcttactagagttgatccttttccagtagctttactggctgttctttttggcgttaagaatgaaattctgagttctaacgccactaatcctatgctgacgcgacttcttgagaactgtaagagtctcaaatatctggttgatgagtgtccttttgcatttgtgaactagtatgtagtattttattcacttaaataaagcgcattactatgtgcaatgagtgtgtttaaa

SEQ ID NO: 32801 - DNA, 304 bp, Glycine max
  unsure at all n locations
  Clone ID: LIB3138-002-Q1-N1-D9
aagaagaagcttcttcagtgccacctgcaccgcccatagtggccatgctgccataccctggcatgggccacctaatcccaatgatcgaagttcgcaagcgagcggtgcgctaccataacctggccgtcaccttcgtcattcccactgacggcccaccttctaaagcccaaaaggccgtctttcaggcccttccggacttcattttccacacctttctcccttcggtcaatctcttcgacttttcaccgggcaccaaaattgaaaccctgatcttccacaccgnnctccttttcctccctttcct

SEQ ID NO: 32802 - DNA, 168 bp, Glycine max
  Clone ID: LIB3138-002-Q1-N1-E1
gcggaatcctctgcatgatctggaatttgtgttttctttcgcttgtgcgtttgtttaattcaataaaggaaattaggcatgaccctcttgttgagtatgctctgcctatttgaaaatttccacacctcttttaattgtcgtaatgatgtgtgaagtgtgtgttatttt

SEQ ID NO: 32803 - DNA, 421 bp, Glycine max
  Clone ID: LIB3138-002-Q1-N1-E10
caaaattgtttttgatgataagcttgtgttggctaacacacgggaattctttgatggaaattttccagtggactcttggttaccaatttttgtgaattgtctttatcctgtaagtcaattaccttcagaagctgtcgttgtaaatgttacatgtggtagtggacgtggtggtttacccaccactgcttggattagttctgcagttaacaatcgctcctcagatatcaacaaaaggattcgcacagcacttgggaaaggtaagaaaattgtttttcttactagagttgatccttttccagtagctttactggctgttctttttggcgttaagaatgaaattctgagttctaacgccactaatcctatgctgacgcgacttcttgagaactgtaagagtctcaaatatctggttgatgagtgt

SEQ ID NO: 32804 - DNA, 332 bp, Glycine max
  Clone ID: LIB3138-002-Q1-N1-E11
cccgccttgcgattcgcgcgttcgtcgtctcttccctggcgaggaggtgcctgagctcctacgtggtcaactgccacacgcctacgcacgacgccacgtcgattcggccgcttacgctgcgtgaagattcgagcaagcggagcgtgcattgggtgttcctcggctgacccggcgtcagaaaaggaacgtacgctaggcgcctctcgaacctgctgggcgttcctgacatcgccaccggcgatctcgttcgcgacgaactcaccttctttgggcccctttcttcccagctatcagaaattgtaaaacaagggcaattggcgttagaagaaatt

SEQ ID NO: 32805 - DNA, 309 bp, Glycine max
  Clone ID: LIB3138-002-Q1-N1-E2
tattaataaaacctagagttatggcaacacgaacccccatcaattttgagggcactatgaacggctcgagaaaagattctaaagaaatataactaatattctttagaataatcaaaaagaatattaaattcaaataaattttagatagaaaaaagacttaaaaaggaggatttgaaatgcgagatctaaaaacatatctttccgtggcaccagtagtaagtactctatggttcggggctttggcgggtctcttgatagagatcaatcgtttttttccagatgcattgatattcccttttttttcattct

SEQ ID NO: 32806 - DNA, 379 bp, Glycine max
  Clone ID: LIB3138-002-Q1-N1-E3
gttgaatgtggaatcccttctggatttccgctcacagttatttgcaatagcatttttaatgagatgctcattagatatagctatgaaaaattactgcgccaggctaaagctccaagtatgtttttacaatccttcaaaaattttgtttctttgtgtgtgtatggtgatgataacttaattagtgttcatgaatatgtcaagccttactttagtggttctaaattgaaaagctttctagctagtcataacatcaccattactgatggtattgacaaaactagtgcaactttgcaatttagaaagttagcagattgtgattttctcaagagaaactttaagcagatgtctaatgttttggtgggtggctcctgaggacaag

SEQ ID NO: 32807 - DNA, 277 bp, Glycine max
  Clone ID: LIB3138-002-Q1-N1-E4
ggacatttactacatcacaggagagagcaagaaggcagtggagaactgtcccttcttggagagactcaagaagaagggctatgaagttcttttcatggtggatgcaattgatgagtatgctgttggacaactcaaggagtacgatggcaagaaattggtttcagctacaaaggaagggttgaagctagatgatgagacttggggaagagaaaaagaagaaagaggagaagaagaagtcatttgatgaactctgcaaggtcatcaaggacattctggg

SEQ ID NO: 32808 - DNA, 238 bp, Glycine max
  Clone ID: LIB3138-002-Q1-N1-E5
gaaaattgtttttcttactagagttgatccttttccagtagcgttactggctgttctttttggcgttaagaatgaaattctgagttctaacgccactaatcctatgctgacgcgacttcttgagaactgtaagagtctcaaatatctggttgatgagtgtccttttgcatttgtgaactagtatgtagtattttattcacttaaataaagcgcattactatgtgcaatgagtgtgttt

SEQ ID NO: 32809 - DNA, 163 bp, Glycine max
  Clone ID: LIB3138-002-Q1-N1-E6
tggcctttgtacaattaaggtgcacaaaacaatctcaagttggagaacttttctagaattaaccttattctgaaaagctcgtatgtttgatagatgttattgtcaaatatcatatatctttcttcccttcaatattgtgagttgggttcaaggtagaccttgt

SEQ ID NO: 32810 - DNA, 436 bp, Glycine max
  unsure at all n locations
  Clone ID: LIB3138-002-Q1-N1-E7
ctcaagttttttctcttctctcggtttcatcgccatggatgaggaagtgcgcaagatcttcagcaagttcgacaagaacggcgacggcaagatctcgtgcgccgagctgaaggagatgatggtggcgctgggatccaaaacgacgtcggaggaggtgaagcgcatgatggcggagcttgatcggaacggcgacggctacattgacctgaaggagttcggcgagttccattgcggcggcggcgacgggagggagctccgggaggcgttcgagctgtacgatctggacaagaacgggctgatctcggcgaaggagctgcactccgtgatgcggaggttgggggagaagtgctccctcagcgactgccggaggatgatcgngaacgtggatgccgacggtgacgggcacgtcaattttgaagagtttaagaagatgatg

SEQ ID NO: 32811 - DNA, 384 bp, Glycine max
  unsure at all n locations
  Clone ID: LIB3138-002-Q1-N1-E8
attttagaagaataccccctcttttgctgcatcagaggagtggtaaattaagagcatggctgcacaagctcttgtatcatcatcttctcttaccttctcagcggaggctgcaagacaaagtcttggaccaagatcactccaatctccatttggcttctccagaaaagcctcctttcttgttaaggcagctgctaccccccctgtcaagcaaggatcagacagacctttgtggtttgcatcaaagcaaagtctttcttacttggatggcagccttccgggtgactatggatttgaccctctgggactntcagaccctgaaggaacaggagggttcattgagccgaaatggctagcatatggtgagataatcaatggtcgttatgc

SEQ ID NO: 32812 - DNA, 418 bp, Glycine max
  Clone ID: LIB3138-002-Q1-N1-E9
gcttgcttcttgttgttgtaactaaagaacaagagattgctggttcttcccttttggtttcaaatttcaatttttcatcgggttcttttaaatggagagagatttcatgggtctcaactcaaaaaaacctcttgcttgggtgaaggaagagatgcacgtttatggcttcgaagactctggcttcacaaagggtcggattgcacagtggccattctcgaacaaagtatctgcccttccacatttgatgtctttcaaagcttctcaagatgataagacttagaagatagtgtctgatcccttaacatctgcagggtttatgtctatcttaagtcaagaagcatttgactctagtcagaaacgctgtgctggtgaaccccagaagtctttcaatcacgatggggcaggtcgccttcatttt

SEQ ID NO: 32813 - DNA, 416 bp, Glycine max
  Clone ID: LIB3138-002-Q1-N1-F1
gttgtttctggcactccaaatgatcaatctgatgatggaaagaatggggataatcaaaccattagcaagatgaagcttgctcacattgagaaaaggcctactagggtgcctagacctcctcctagaccatctggtggagctgctgttaccgcaactgcaaatccttccaacggagtaccatctgctccaccacctcctcctcctcctccaggcgctccaccaccaccaccaccgccaccaggtggaccacctcccccacctcctcccccaggaagcctatcaagaggtggaatggacggtgacaaagttcaccgagctccacagctagttgaattttatcaaacattgatgaaaagggaggcaaagaaggatccttcatcactattagttacttctgcaagtaatgcatttgatgc

SEQ ID NO: 32814 - DNA, 427 bp, Glycine max
  Clone ID: LIB3138-002-Q1-N1-F10
cgcattgcctcttacgtttccgcttcgcatgttttgttctcggcgcttccgtcgcatgttgcttttcacacccttctctcctcggtatacaccctctagatgagaaatattacaactctgaggtgatcaagtgcagggatggatcaaaatccttctccagagaccgtctcaatgacaatttctgtgattgtcctgatggcactgatgagcctggaacttcagcttgccccaacggaaaattttattgcagaaacctaggtagcaagccgcagtttatagtttcttctcatgttaatgatcatttttgtgattgttgtgatgggagtgatgaatatgatggaatcatttgttgcccaaacacatgtgtcatgggtgggaatgctgagtccacgtttagcaattgcaagtcagaagcaagtcaaaatgg

SEQ ID NO: 32815 - DNA, 389 bp, Glycine max
  Clone ID: LIB3138-002-Q1-N1-F11
ggaggaatgtattagctgcggatgtttaatgtactttgtgatgtaactatattagcttcattagacgttgggatgaagaatttgagagattagcccctgaatcttcagaataggtcacaatgcattggaaaactcttgactttgtgcactcaaattgcgtggttttatgattttatcggtttgtttcaaaaaaaaaaaaaaaaaaaaaaaaaaaaaaaaaaaaaaaaaaaaaaaaaaaaaaaaaaaataaaaaaccacaaaaaaaaaactaaaataaccaaacacaaaaaacataaaccacacctaaaaaaagaacaaattcacattaaagaaaatcctattataacaaaagggggggccccccctttattgaatttgttccccccttt

SEQ ID NO: 32816 - DNA, 389 bp, Glycine max
  Clone ID: LIB3138-002-Q1-N1-F12
ctcgagccgcatgaactgaataaaaggatgcctcatgcttgggctaaaaaaaaaaaaaaaaaaaaaaaaaaaaaaaaaaaaaaaaaaaaaaaaaaaaaaaaaaaaaaaaaaaaaaaaaaaaaaaaaaaaaaaaaaaaaaggaagtaggaaaaaaaaaaaaaaaagaaaaaaattaaaaaaaaaaaaaatgaaggaaaaaaaaattaaaaaaaaaaagggggtggttagaagcttggagaaatcatggcaataaaaataataatgggtgaaatgtgtaaaagggtcacaattttacaaaatatacgagcataaaacatagggggcataaacttggaaagcctaaggggtgaataaattaaaataaattgcattatttctaaatgcctgat

SEQ ID NO: 32817 - DNA, 370 bp, Glycine max
  Clone ID: LIB3138-002-Q1-N1-F3
ctccagctgttaccactgtcaaccgtgccggtgccggcatgggggctgcattcactggcctcaagtccatggctggcttccccaccaggaagaccaacaatgacattacctccattgctagcaacggtggaagagtgcaatgcatgcaggtgtggccaccagttggcaagaagaagtttgagactctttcctacctgccagaccttgatgatgcacaattggcaaaggaagtagaataccttcttaggaagggatggattccttgcttggaattcgagttggagcacggtttcgtgtaccgtgagcacaacaggtcaccaggatactacgatggacgctactggaccatgtggaagctgcctatgtttgg

SEQ ID NO: 32818 - DNA, 219 bp, Glycine max
  Clone ID: LIB3138-002-Q1-N1-F4
aaaaaaaaattttttaaaaaaaaaaaaaaaaaaaaaaaaaaaagagggggttaaataaaattaataagttgtcgaccccaaaatttatttctcgacccacccattacttacttcccacctccccctttaattctcccactcataccttttcgtatccctgtttaacctttgttccttccttaaatttctttcctttctcattgcaatacttttttcctt

SEQ ID NO: 32819 - DNA, 364 bp, Glycine max
  Clone ID: LIB3138-002-Q1-N1-F5
gaacgacaacacgcctcactctttatcttaattaactgacgcgtacgactttatatcacaatgaacaacactaatgctgccaacggaaagggaaagttcaaaccctacagaaatcgacctggaaagagacaaggacttcttgagctcttcagttttctcttaattcttgcatcagttcctgcctttttgggaggagtcttctctatcttcgttgctctctctgcatttgtccttggaataattggactcttcgcatggactcgaagacacgctaaactctttattttgttagcaattgctgtgatcgcagcagccattgtcagcatcattttgagaggaacattccacgctcagtgcgttccct

SEQ ID NO: 32820 - DNA, 421 bp, Glycine max
  unsure at all n locations
  Clone ID: LIB3138-002-Q1-N1-F6
caactacaaaggttgctgtaggagataagatattgaagtagtgctaagtgcctaacacctgcagtgaacaatggcctctgcatcagcatctcttctcaagtcttcacttgttcttgacaagtctgagtgggtgaagggacaaacacttcgccaaccttctgctgcatcagttgtgagatgcaaccccaccaccccatcaggcctcaccatcagagctggttcctatgctgatgagctcgttaagaccgcgaaaacagtggcttcaccagggaggggtattttggccatggatgagtccaatgctacctgtgggaagcgtttggcttcaattgngctagagaacactgaagctaaccgccaggcataccgtaccctncttgtgacagntccaggacttggtcagtacatctcttgtgccatt

SEQ ID NO: 32821 - DNA, 304 bp, Glycine max
  Clone ID: LIB3138-002-Q1-N1-F7
aatccttcaaaaattttgtttctttgtgtgtgtatggtgatgataacttaattagtgttcatgaatatgtcaagccttactttagtggttctaaattgaaaagctttctagctagtcataacatcaccattactgatggtattgacaaaactagtgcaactttgcaatttagaaagttagcagattgtgattttctcaagagaaactttaagcagatgtctaatgttttgtgggtggctcctgaggacaaggcgagttaatggtcacaacttcattatgttttcgtgtaataatctggaaatgc

SEQ ID NO: 32822 - DNA, 369 bp, Glycine max
  unsure at all n locations
  Clone ID: LIB3138-002-Q1-N1-F8
ttttatttacncaacagtgaatttggcgtctcagatggggcgtagaaagagagtattcattcatttcgtgattggaggataataccaatttgcactttctttcaggatgccagactagtttttaaagcagacagtcttggtcgggaaattttgtcaattgcattgcctgcagcaatggctttgacagctgatcctattgcttcactagttgacacagcatttattggccaaataggtccagttgagcttgctgctgtaggagttaccatagctctcttcaatcaagtatcaaggatcgcaatattcccacttgtcagtgtcacaacttctttngnngctgatgaagatacccttagtggagcaaaccct

SEQ ID NO: 32823 - DNA, 426 bp, Glycine max
  Clone ID: LIB3138-002-Q1-N1-F9
ggaagaaaggctgtttaatggtcaagattgtgatgtctgggagatgcagcagtcaaaaggagtgattgggcctcattggtacaagtgtttttaacaaacagcaacagtacagagcattttgatgcatgtaagtggacaaaatcagaaccacattcctgggaattgatcttcccaatagaggtatgtggtcctaataatggttttgaaatgtggagttctgagtgggcaaatcaaacttcatggcatttgagtttccttattgacaatcccaaacagtctacagtttttgatattctcttgggaatctctcaagattttgaaattgctggtaatactcttatgccagctttttctgttccacaggctactgccagatcttctgaaaatgcggaatcctctgcatgatctggaatttgtgttttcttt

SEQ ID NO: 32824 - DNA, 408 bp, Glycine max
  unsure at all n locations
  Clone ID: LIB3138-002-Q1-N1-G1
cctcatcatgggaaccatttttcctcctcactctctctctccgctccgcaacatcaaaccttcaccctcaagaattctcttggctccctctccccaacccaagtcaaattctctcttttgctccaaacccattgtttcaagtctcagaaagaaccaaacttcatctcccaaaccttcatcgggcacaagctggttggctcatgctcaacagggcctagcagctttggctatctccttggcactcaactttagcccagttttgtttaatggcaatgcattggcatctgagtttgatgtgcttaatgagggtccacccaaagattcttatgtgtttgatgatgcangagttgctagtaaggtgaccagntctggatttaaagcagttgttgtctgatttggaatcaagga

SEQ ID NO: 32825 - DNA, 413 bp, Glycine max
  Clone ID: LIB3138-002-Q1-N1-G10
ctttgaagttttttagatgacttctccctacattaaatgtagggtctctttcttcatagcatggggaaatttggctgatgacaccatcaattttgaggcttttccccacaagctggtgcagtttggagagattcaggaaaaagttgtattgaaattttcacaagaggaatttcttacagcttggtcaactcaggtgcgtcctgcaacaactctgttggctgatgggtgtccatatttgtatgctatggtgcatgatagttcagtgtctacaataccaggtgattttgtcattggtgttaagttgacaaccataaacaatatgtgtgcatatgggcttaatcctggtatttcaggttctcgtcttttgggcaccattccttaatccattttacagcaaactgtttggaataaat

SEQ ID NO: 32826 - DNA, 425 bp, Glycine max
  Clone ID: LIB3138-002-Q1-N1-G11
cgcgtctggtttctctcccaacattctcatctgggtcttccgaatttcttgatttgatctttctccctctcagaaactggcctcagccaagagtttctcctttttccttttcacctgttcagcattgatatttggttatacattgcattaggttgaatatcagtgttttcaatttgataaaagatattgattctgtaagtccatttgctaagaatcaaatcaaaaaagtatcttctaaatttgatagaataggatcaaaatttcgccatgagtttctctgaccatattccatcctttatgatgtcaccgccgtcgttttccacagacacggatgccattgaagtgaggcttcaattcccaacgaacaacgaatcattggagccacattcaccacaggatcaacccccttcgttcaagagggcaag

SEQ ID NO: 32827 - DNA, 429 bp, Glycine max
  Clone ID: LIB3138-002-Q1-N1-G12
gtgcgtttgatataagaagggggttaccgtgtttgtttcttgaccgaacgaacaagcatatggtagcttaaagccctagtttcaatgcgaacatcctataatcttgttcttcttcgctctcgcttccgccgctctcacaatttccacgcataccgttccctctccgtcgtaatcctcaaaccagaccaccatccaccagctatcattccctcaaattcccgattccttcttcccggcttcaatgctcatcgccatcgcagtttctttaccagggctaagccagcaaccaccaacattgaattcaacgatcaccacagtcagcgagctgttaaaactgcattgtggtgtaactttcttgttttttcactcaagtttggagtatggttagcttcctctagtcatgttatgttagctgaagtcgtccactct

SEQ ID NO: 32828 - DNA, 385 bp, Glycine max
  unsure at all n locations
  Clone ID: LIB3138-002-Q1-N1-G2
ggcaagttcaccgagaggacccgtatttgcttccgagatgctctgtgccgtcttgctagaaacactgaagaacaacctgtaatgctggaccagaatgaagatcttaacatacagaaggcaataccacatacagatcacaatgaaacaatgaggtctcaggacaagaaaccaatggaatcagaaaccaacaatattgacagaataattgcaaatctcatgttcaagagcatggagttcaacatacatcattctccaattacatcatcaacaaactccgttcaacaagttattggaagtaataatggtccacgtggaaacaactcanaagccatgaatatggaagacaaatcttgctactcccacccacanaaaatactagtagatg

SEQ ID NO: 32829 - DNA, 384 bp, Glycine max
  Clone ID: LIB3138-002-Q1-N1-G3
cggctcgagcggctcgagcggctcgagaccaaagccttcctagaacgaaaaaaaaaagaagagcaattttccctcaccaaagaagaagaagcaaacaatggccgatcaacttaccgatgaacagatctccgagttcaaggaagccttcagcttgttcgacaaggacggcgatggttgcatcacaaccaaggagcttggaactgttatgcgttcattggggcaaaacccaactgaggcagagctccaggacatgatcaatgaagtggatgctgatgggaatggtaccattgacttccctgagttcctaaatctcatggccaggaagatgaaggacactgattctgaggaggagctgaaagaggcatttccgggttttcgacaagg

SEQ ID NO: 32830 - DNA, 377 bp, Glycine max
  unsure at all n locations
  Clone ID: LIB3138-002-Q1-N1-G4
cttctccaaaaccatccaactctcatgttcgaagaaaacatacacaggctcttcaaactctaattttcttttcctttcatttaatttcctcaatggcggcttccgtcgaccagcgtccgtaccccggcctccacaatggcgtcgttcggcccctcaaaccaggcccggatatcccgcgtcccaagaagctaccccagccgccgccgccactctcggattcctcaagcgacgaagaagaagacaccaccttgaacttgaaggacctgattcgcaagggaacaacggaagttgaatcctccattttcgacccgcgcgacgatggaacctctgaccactggatccaacgaactcttnccttgtnccgttaacgggaaagc

SEQ ID NO: 32831 - DNA, 364 bp, Glycine max
  Clone ID: LIB3138-002-Q1-N1-G5
cctgtttgggtgacttgtacagtgttgcttggatggaagacagtgacagacacaatttgcgaacagaaactctgcaccaacaatataaattggttaaagagaggactatatctggagattcatactatggctctcacgtgatgcagtatggtgatgtagggctaaccaaagatgttctcttccattatttgggtacagatcctgctaatgataatttcacttttgtggatgaaaactccttatggtcaccttcaaaaccagtcaaccaacgtgatgctgatctcatccatttttggaatagttccgcaaagctcctgaaggttctctcaagaaaaataccgcttaaaaaccagttttgaagcaa

SEQ ID NO: 32832 - DNA, 420 bp, Glycine max
  unsure at all n locations
  Clone ID: LIB3138-002-Q1-N1-G6
ctctatctgnnnccgctcgagcagttatttgcaatagcgttggtaatgagatgctcattagatatagctatgaaaaattactgcgccaggctaaagctccaagtatgtttttacaatccttcaaaaattttgtttctttgtgtgtgtatggtgatgataacttaattagtgttcatgaatatgtcaagccttactttagtggttctaaattgaaaagctttctagctagtcataacatcaccattactgatggtattgacaaaactagtgcaactttgcaatttagaaagttagcagattgtgattttctcaagagaaactttaagcagatgtctaatgtatcgtggttggctcctgaggacaaggcgagtttatggtcacaacttcattatgtttcgtgtaataatctggaaatgcaag

SEQ ID NO: 32833 - DNA, 391 bp, Glycine max
  unsure at all n locations
  Clone ID: LIB3138-002-Q1-N1-G7
gaaacattcaaaagagtttcttctcctttcttccatcgtgccgcggcgaagatgaagatagcgtggcttctgctgctcctcctggtatcagtgtccgttcaagtttgggccctgaaatcgccgtttcacccgcgagacgtacttcctctgcttcccaaacagttgtcgtggcccatcctcaatcgcctccacagcgcggtggatctcctccccgtcttcgtcggcgccgcctcttctccggacgacaatctcaagtggaaaggtgcatgcttctacgagaacaaagcctggatggtgtttcacaacaagagcggcactcaatttggcggtggaacccttcacctaaaggttagcaatgctcacagttggacatgcatggatncttatattt

SEQ ID NO: 32834 - DNA, 357 bp, Glycine max
  unsure at all n locations
  Clone ID: LIB3138-002-Q1-N1-G8
ctcgagccgataaaatgcaagtctctatatatacgatccatgcgctcatcatcatccaaatcactcgttgctatctccaaagtcccagcacacccatttccgttctttgtccttgatgggtttagtctttggaaaaataaccgttgagacagcaaaatatgaagtgatcaaatccacaagtgagtacgaaatccgtaagtatgcaccatcagtagtggctgaagtcacatatgacccttcacagttcaagggaaacaaagatggtggctttatgattttggccaattacattggcgctgtggngaagccccagaacaccaagcctgaaaagattgccatgactgcaccggtcataac

SEQ ID NO: 32835 - DNA, 390 bp, Glycine max
  Clone ID: LIB3138-002-Q1-N1-G9
agtgcttctgctgcaagacctcgctgaaaattagggtttcgagtcggaggtagacgaagatgttcggaagggctccgaagaaaagcgacagcaccaggtactacgaaatcctcggcgtttccaagaacgcttcgccggatgacttaaagaaggcttacaagaaagccgccattaagaaccatcctgacaaaggcggggatcccgagaagtttaaagagcttgctcaagcctatgaggttctgagtgaccctgagaagcgcgagatttatgatacatatggagaagatgctcttaaggaaggaatgggtggtggtggcggtggccatgatccatttgatatcttcagttcattcttggtggaagtccgtttgggtcaggtggtagcagtag

SEQ ID NO: 32836 - DNA, 296 bp, Glycine max
  Clone ID: LIB3138-002-Q1-N1-H1
ccacagcaacaataacaatggcagcctcactacaagctgcagctaccgtcatgcaacccaccaaggtgggcatggccactcgcaacctcaaatctacacaatgcatttctaaggcttttggcttggaacccgctgcagctaaactcatttgctcccttaagcccgatctcaaagattttgctcaaaaatgtgtcgacgccaccaaaattgcaggattcgcccttgccacctcagctctcgttggttctggagcgagtgcagaaggtgttccaaagaggctaacctttcgacgaaat

SEQ ID NO: 32837 - DNA, 429 bp, Glycine max
  unsure at all n locations
  Clone ID: LIB3138-002-Q1-N1-H10
ctcgagccgattcggctcgagccccaatgcaggatgttcaggttacaattgattggtttatttcctctcaggaatgtgttcccaggacctattgtgttttaaatccacaaaatccttttgtgttaaataggtggatgggaaaattgactttcccccagggcacttcccgaagtgttaagagaatgcctctttctatagggggaggagctggtgcaaagaatgctattctcatgaatatgccaaatgctgttctttcaatgtggagatattttgttggagatctcgtctttgaagtttctaagatgacttctccctacattaaatgtacagtctctttcttcatagcatttggaaatttggctgatgataccatcaattttgaggcttttccccacaagctggtgcagtttggagagattcangaaaaag

SEQ ID NO: 32838 - DNA, 393 bp, Glycine max
  Clone ID: LIB3138-002-Q1-N1-H11
cagctccaataacgctggcgatgggccggaaaagacccgcgagcggaaaagttggttcccacggtttaagtccaattggctgggcacgttccgttccaagcaaatgttccagtgctgcgagtgcgcagtggtccttgcttccaacaataactcgctcttgagtcaggccggacgctacaagggcgccgagggcaagcactgccggtgtgggaaggaccagtggcatctcgccaagtccgtcgaggagaccgagtacaaccgccgtatggagatcagcaaggcttttggtggcatgcgctacgatgaggccgtactccgactgcgtagcatgggccaatctgagctggactttaagccgtccgagtacacggccaacgatggattgcctacaca

SEQ ID NO: 32839 - DNA, 431 bp, Glycine max
  unsure at all n locations
  Clone ID: LIB3138-002-Q1-N1-H12
acataaccacaatacctcaacaccacaatcatggacaagagcgaaggagaagctccacattggcagcagccgccgcaagtcacagcccgagaacgatgctagcctgggaagctcaacctccggccatggtgtcggcaccattgaagagaaccgcgactcaatcgactcggagctcgcctcaatgcccccccacgagcgcgtcgcatacctccaagaattcgagcacagcgacaagcacgacgcgcccaagaaaggcgggctcatcgagaagctgattgcgcgtggcaacaagcgcacggaagagcaactcgcccgtgaggcggcggagcgcgaggagaagaacagggcggcgacacatgcgcaattgggtcccggtgcgggcgcgagtgcgcatagtgccgcggngccgacgacggataagtgtattcgct

SEQ ID NO: 32840 - DNA, 393 bp, Glycine max
  Clone ID: LIB3138-002-Q1-N1-H2
gtaaagcttttccaaacaaaattgtttttgatgataagcttgtgttggctaacacacaagaattctttgatggaaattttccagtggattcttggttaccaatttttgtgaattgtctttatcctgtaagtcaattaccttcagaagctgtcgttgtaaatgttacatgtggtagtggacgtggtggtttacccaccactgcttggattagttctgcagttaacaatcgctcctcagatatcaacaaaaggattcgcacagcacttgggaaaggtaagaaaattgtttttcttactagagttgatccttttccagtagctttactggctgttctttttggcgttaagaatgaaattctgagttctaacgccactaatcctatgctgacgcgac

SEQ ID NO: 32841 - DNA, 365 bp, Glycine max
  Clone ID: LIB3138-002-Q1-N1-H3
caagccttactttagtggttctaaattgaaaagctttctagctagtcgtaacatcaccattactgatggtattgacaaaactagtgcaactttgcaatttagaaagttagcagattgtgattttctcaagagaaactttaagcagatgtctaatgttttgtgggtggctcctgaggacaaggcgagtttatggtcacaacttcattatgtttcgtgtaataatctggaaatgcaagaagcttatcttgtcaatctcgtaaatgtgttacgagaattgtatttgcacagtccagaaggaggctcgccaattgagaaggaaagctctctctcgtattgaatggctgcaaaaagctgatgtgcctacc

SEQ ID NO: 32842 - DNA, 247 bp, Glycine max
  Clone ID: LIB3138-002-Q1-N1-H4
agatccgtccatacatatggatctttgattgcgtgcggccatgataacagaatgagtgttcatgaatgtgtcaagccttactttagtggtctaaatagacaagctctctagcaagtctaacatcaccatgactgatggtatggacaaaactagtgcagctttgtctattagaaagtgagctgattgtgatctgctcaagagaaactatgagcagatatcaaacgttatgtgtgcggctcctgaggac

SEQ ID NO: 32843 - DNA, 403 bp, Glycine max
  Clone ID: LIB3138-002-Q1-N1-H5
gcagaatatggatgatagcaatgaagttgccagtggatcacctgtgccaggtgtgaagcctcagaaactggatgaagcaataaaaattcccaaggaaacaattgaaattcttaagaaccaagtttttgggtttgacacttttttcgtaactagccaagatccttacgagggtggagtgctgttcaaaggaaacttgcgagggcaagctgctaaaagttatgataaaatatcgaagagattgaaagataaatttggagatgaatacaagcttttccttttagtaaatccagaggataatatgccagtggctgttgtggttccaagaacaaccttacaaccagagacaactgctgtacctgagtggtttgctgctggatcttttggactggttacaggttttacc

SEQ ID NO: 32844 - DNA, 376 bp, Glycine max
  Clone ID: LIB3138-002-Q1-N1-H6
gtttttcattgtgcattattcaatggccaccacagcagctcgatccggaaccatggtgagcacctccttcatgaggaagcaacctatgacgaccaagagcctaaagacattccccaacgctctttttggtctgaaaggtggacgaggtggtcgtgtaacttgcatggcctcgtacaaggtgaagctcataaccccagaaggagaagtggagtttgaatgcccagatgatgttttcattgttgacaaggctgaggaagaaggcattgaacttccctactcgtgcagggctggttcttgcgtttcatgtgttgggaaaattgtgaaaggtgacgtggaccagtcagatggtagcttccttgatgatgaacaaatagaa

SEQ ID NO: 32845 - DNA, 427 bp, Glycine max
  Clone ID: LIB3138-002-Q1-N1-H7
caatggtgcatgatagttcagtgtctacaataccaggtgattgtgtcattggtgtcaagttgacaaccataaacaatatgtgtgcatatgggctcaatcctggtatttcaggttctcgtcttttgggcaccattcctcagtccatttcacagcaaactgtttggaatcaaatggcaacagtgagaacaccattgaattttgattctagcaagcagagcttttgtcagttttctattgaccttctcggtggaggaatcttagtggacaaaactggagattggatcacacttatacaaaattctccaattagtaacttattgagagttgctgcttggaagaaaggctgtttaatggtcaagattgtgatgtctgggaatgcagcagtcaaaaggagtgattgggcctcattggtacaagtgtttttaac

SEQ ID NO: 32846 - DNA, 316 bp, Glycine max
  Clone ID: LIB3138-002-Q1-N1-H8
tccatccagattgatagttcattgcatgcaaccatagttttagtaggttttttcttctttgttttcaattaggtttttgctgctctccttcaaactccgtctttccgaatcctctctttgtgattgtgttctgttctgcttcctaccgcgatagtttctcttctgaagcatggccatggcggtttctgcaattggttttgaaggtttcgagaagaggctggaaatatcctttttccagccgggactttttgctgaccctgagggaatgggtttaagagctctttgcaaagtccagttggatgagatactttacacc

SEQ ID NO: 32847 - DNA, 404 bp, Glycine max
  Clone ID: LIB3138-002-Q1-N1-H9
cggctcgagcccagctgttgctagagcagaagatgatgacagttttgtaggtgaaggggttcactatgatgtacctggtaaagacttgagccaaagtccggtctctgaggacatggaagagtctcctaagaacaaagaaaaaccttcatatgtcacagaacctacttatggtcctgtcccaccttcaatggttcctcaagggtggcaagaaacaaatggatatgatgtaatgcaaacacaagcctttgatgctggctaccaaggagagtggcaggaataccagtatgctgaacaactggcttacccagatcagtatcttcagcaaaatatgcagccttatgatgtgcaagcaggtttaaatcttccacaagatccacgctttatgtctcaagaagaaaaggatc

SEQ ID NO: 32848 - DNA, 286 bp, Glycine max
  unsure at all n locations
  Clone ID: LIB3138-001-Q1-N1-A1
tggaaatgcaagaagcttatcttgtcaatctcgtaaatgtgttacgagaattgtatttgcacagtccagaggaagctcgccaattgagaaggaaagctctctctcgtattgaatggctgcaaaaagctgatgtgcctaccatagcacagattgaagagttccattcgatgcagaggatgatgaatgctcctgattcaaatgataatatngatttacttgtgagcattgattttgtgggtttacaaagagcaagtaaagctttttcaaacaaaattggttttgatga

SEQ ID NO: 32849 - DNA, 393 bp, Glycine max
  Clone ID: LIB3138-001-Q1-N1-A2
ctcgagccgaatcggctcgaggaaagatgtttggagagttgaatgtggaatcccttctggatttccgctcacagctatttgcaatagcatttttaatgagatgctcattagatatagctatgaaaaattactgcgccaggctaaagctccaagtatgtttttacaatccttcaaaaattttgtttctttgtgtgtgtatggtgatgataacttaattagtgttcatgaatatgtcaagccttactttagtggttctaaattgaaaagctctctagctagtcataacatcaccattactgatggcattgacaaaactcgtgcaactttgcaatctagaaagttagcagattgtgattttctcaagagaaactataagcagatgtcttatgtttt

SEQ ID NO: 32850 - DNA, 361 bp, Glycine max
  unsure at all n locations
  Clone ID: LIB3138-001-Q1-N1-A3
aagttttcagatttttttagttatataatgcctgctcttgctgggcagcatagtacaagttattgcagcttgatgggtggtagttgcttgtttaattgtacggtttttctagtgaagcacaggcaggcttctctagaactacggatatagaaaaaggccatagttattattgtgcagcagctgattgcatcgtgggtgaaagaaaagtttctcatgtaaagggttttgttatgcatctggtttgactatgtgcttatatcaaatctataagcatatgagacatttttaatgtattgntccttttttcttttttgttcaattattttagctaaacggttctatttccaaatttgtacaccta

SEQ ID NO: 32851 - DNA, 293 bp, Glycine max
  Clone ID: LIB3138-001-Q1-N1-A7
gggaagtttaaaacaagccttggaaggtaaatatgtggagccagggcctggtggtgacccaataagaaatccaaaagtcttgccaacaggaaagaatattcatgccctggacccacaagctattcctacaactgcagcgatgcagagtgccaaaatagtggtagataggttgattgagaggcagaaagctgagaatgggggaaaatatcctgagacaattgcacttgtattgtggggtactgataatattaaaacatatggtgaatccctggctcaagtgttgtggatgattg

SEQ ID NO: 32852 - DNA, 337 bp, Glycine max
  Clone ID: LIB3138-001-Q1-N1-A8
gaagtgttgaagaaccgtcacaaaagattcaggaagcaatgcagtgatatgaaaatgatagttggtcaaaagggatttcagtgggatgggacacaaaacatgatagtagctgatgataaagcatgggatgaatgtataaaggcccatcctgatgctcaacctttcaaaaaaagagtcattccgtattatgatgatttgtgcataatttatggccatgcagttgctgatgggagatacagcctttcgtgttttgatgtagattttgaatacgaagaaaaagatttggatgacaagactatcactagtaaaggagtggatgatcaaagctccccagcag

SEQ ID NO: 32853 - DNA, 293 bp, Glycine max
  Clone ID: LIB3138-001-Q1-N1-A9
ctggaatttgtgttttctttcgcttgttcgtttgtttaatgcagtaaaggaaattaggcatgaccctcttgttgagtatgctctgcctatttgaaaatgtccacacctcttttaattgtcgtaatgatgtgtgaagtgtgtgttattttaaaggcaaaccttttattgagcgacaactgactgcttcgtgggtgagagcaaagtttatcgtcatacgggttctggtatgcatatccgaccgactatgtgctgatatcaaattctataagcatatgaaacatattttaatgaat

SEQ ID NO: 32854 - DNA, 419 bp, Glycine max
  unsure at all n locations
  Clone ID: LIB3138-001-Q1-N1-B1
cgggaattttactttcataaagaactgaaccgatacattggcagtgtcggaaaatatgcaggcctatctattggtgccctcactgcctatgcagatttcatgacggcaattggctcagggacaggaatattgcttgcagtaacaatcatctatcagtacttcgagacatttgagaaagagaaagctagccaacttggcttcttttgtttctaagctcttctaacaaattcacttgtggtgacgcaattccgctttaccgcacccaccattttgttgtgtaatgaagacttgttgtaagttgtttaacaaaccaataaggaaaacttaaaataattttttttaatacttttctcaaaccaagaaaccccctaatataatccttgtaaagtcttttgaatttctatgaatacactnccttt

SEQ ID NO: 32855 - DNA, 354 bp, Glycine max
  Clone ID: LIB3138-001-Q1-N1-B2
gtgttcatagagttgccaatgagagcaaccgttcatgggtctggtgggattatgtgacagatttccatgtcagatgttctatgaaggagaaaagatacagcaaggattgtgctgaggaagtcatgaaatcattagatctgcctatggataaaattaagaaatgcatgggtgatcctgaagcagatgtggagaatgaagtgctaaagaatgagcaacaagtccagatcggtagaggatctcgcggtgatgtcaccatcttgccaacgttggttataaacaatgtccagtatagaagaaaattggagagaacttgtgtactcaaagcttgatgttctggatttaaagagactactg

SEQ ID NO: 32856 - DNA, 327 bp, Glycine max
  Clone ID: LIB3138-001-Q1-N1-B3
gaccgcgttcgagggcaccgacgagcacggcaacctcggcggcttcgtcggctccaagacggagacggcgttgctcgcgttcgccaaggcggcgcagtggtccgactaccgcgccgtccggtccgaggccgccgtcgcgcagatggtccccttcagctcggagcgcaaggcgatgggcgtcgtcgtcaagctgcgcgacggtcggcaccgcctcttcctcaagggcgcgtccgagatcctgaccaagctctcgacctcgcacgtcgtcgttcacaacccgcgctcgcagtcaatccccgacccgcgcgacgacgacgacagcgacaa

SEQ ID NO: 32857 - DNA, 418 bp, Glycine max
  Clone ID: LIB3138-001-Q1-N1-B7
cgggagtcaaacttgcagaaagaactgaaccgatacattcccactgccgcagcatttggaggcatatgtattggtgccctgactgtgttggcagatttcatgggggcaattggctcaaggacaggaatattgcttgcagtaacaatcatctatcagtacttcgagacatttgagaaggagagagctagcgagcttggcttctttggtttctaagctctgctagcaaattcactggtggtgacgcaattcggctctaccgcacccacagttttggtgtgtaatgaagactggttggaaggtggttaacacacaataagggagaacttaaaataggtttttttattacttttctcaaccgaggaagcccctagtatatcgctggaaatgtctttggattttctatgaatacacttgccgt

SEQ ID NO: 32858 - DNA, 334 bp, Glycine max
  Clone ID: LIB3138-001-Q1-N1-B8
gcctaaacctgtctcaagaaggccacattacgcccttctggggggcaacgcgacacactcccatcgtctccttcttcatcttcgtcttctgactcaccttctctcattcaagacaggcctggctatgctgaccctgccctcatcatcaccccaactgatgcagaggatatggcgaaggaatacgagcaagctattggataactacagaacttgttgtgcggaaagagtgaacatctagccacaactgctcgaaaaggggaacagatgacatcttctctgggaacatcatcatctgatggcataccatcattagaagcctgagacaggatccaag

SEQ ID NO: 32859 - DNA, 421 bp, Glycine max
  unsure at all n locations
  Clone ID: LIB3138-001-Q1-N1-B9
gacaaaatcagaaccacattcctgggaattgatcttcccaatagaggtatgtggtcctaataatggttttgaaatgtggagttctgagtgggcaaatcaaacttcatggcatttgagtttccttattgacaatcccaaacagtctacagtttttgatattctcttgggaatctctcaagattttgaaattgctggtaatactcttatgccagctttttctgttccacaggctactgccagatcttctgaaaatgcggaatcctctgcatgatctggaatttgtgttttctttcgctttttcgtttgtttaattcaataaaggaaattaggcatgaccctctttgtgagtatgctctgnctatttgaaaatttccacacctcttttaattgtcgtaatgaatggggaaatgtgtggtatttt

SEQ ID NO: 32860 - DNA, 276 bp, Glycine max
  Clone ID: LIB3138-001-Q1-N1-C1
ctcaggtgcgtcctgcaacaactctgttggctgatgggtgtccatatttgtatgcaatggtgcatgatagttcagtgtctacaataccaggtgattttgtcattggtgtcaagttgacaaccataaacaatatgtgtgcatatgggctcaatcctggtatttcaggttctcgtcttttgggcaccattcctcagtccatttcacagcaaactgtttggaatcaaatggcaacagtgagaacaccattgaattttgattctagcaagcagagctttt

SEQ ID NO: 32861 - DNA, 345 bp, Glycine max
  Clone ID: LIB3138-001-Q1-N1-C2
ggtggtttacccaccactgcttggattagttctgcagttaacagtcgctcctcagatatcaacaaaaagattcgcacagcacttgggaaaggtaagaaaattgtttttcttactagagttgatccttttccagtagctgtactggctgttctttttggcgttaagaatgaaattctgagttctaacgccactaatcctatgctgacgcgacttcttgagaactgtaagagtctcaaatatctggttgatgagtgtccttttgcatttgtgaactagtatgtagtattttattcacttaaataaagcgcattactatgtgcaatgagtgtgtttaaaaaacaaggc

SEQ ID NO: 32862 - DNA, 350 bp, Glycine max
  Clone ID: LIB3138-001-Q1-N1-C3
cttttgttactgatgagcttgaaaatcagaagttggagatagaggatggcaagcacacacaaaagactaatgacacttgtgaagtctctaagttggagaattctggtgcttcagaattggttcaaactgagaaaacagatggtcgtaattgtgcattaacaatagatggggtgccaggcaatcagaattacccaagacatgtccctgtgcacgttgttgatgggaaccttggaactagtactcaaaatctatccccagatatggtgtttcaagactccatatttcagccgaaaggaggggttaataggcaacctaaccttgtcaccaattctgctacatcacacataagt

SEQ ID NO: 32863 - DNA, 306 bp, Glycine max
  Clone ID: LIB3138-001-Q1-N1-C8
actcttcacctcgtcctccgtctccgtggtggcatgcagagctgcgttaagacactcaccggcaagaccataaccctagaggttgaaagctccgacaccatcgataacgtcaaggccaagatccaggacaaggagggtatccccccggaccagcaacgtctcatcttcgtcggaaagcagctcgaggacggtcgcaccctcgccgactacaacattcagaaggaatcaacccttcacctcgtcctccgtctccgaggtggcatgcagatcttcgttaagaccctcaccggcaagactattacccta

SEQ ID NO: 32864 - DNA, 280 bp, Glycine max
  Clone ID: LIB3138-001-Q1-N1-C9
gtttcagagctcttagagatgtcaggattcctcctggaccgaggcttttgattattgaccagatcgacaaggacccggattggaaagagaagcgaggacatcgaaagcgactgggatgaaaagcatgactgggagggactttgaaatgacaagcaaaatgtatagtacgacgaaagcgattcgaggacagtcgactcttgccgactacaacatccagaaggaagtaaccgttcaactcgtgctacatcttcgtggtggcatgcaaattttcgttaagacc

SEQ ID NO: 32865 - DNA, 110 bp, Glycine max
  Clone ID: LIB3138-001-Q1-N1-D1
aatgattaaaatggtggccacagttggtattcctgagaatacaggtatatcattggcctgtgctatgaatagttcttttagggggcgcgccagttctgatatttacacca

SEQ ID NO: 32866 - DNA, 349 bp, Glycine max
  Clone ID: LIB3138-001-Q1-N1-D2
ttcaacttcaacttgaacttgaacttgttgcatttggatctcatgggagaagaagcactactgcaaaacaagcaggttctattcaaagggtacatagatggtgttcctaaagaaaccgatatggaactcaaggtcgactcacatattgcgctcaagcctcccccacaaggctcatcagctattctcgttaagaacctttatctctcttgcgatccatacatgcgcggtcgcatgcgtgatttccacggatcttatatccctccttttcttccagcccaggcacttgaaggatttggtgtgtctaaagttatacactctgataatccaaattacaaagcctgtgatttca

SEQ ID NO: 32867 - DNA, 325 bp, Glycine max
  Clone ID: LIB3138-001-Q1-N1-D3
cgggcatgtaatttatgtagaaaagttaaaaacctaatactttgtacaacaacttgcaagttggttcaaatgtacccaacctaactccgggccaaaaagtaacatttaaattttgcagggacgaaaaatagacaactttttgtagttatggattcagaacattttcatatttatgaagatgaaaacttattttaacattttttaaaacaaaattgtcaatgtacattaattgctgttgtctaagcatttgacaatagcaattaatgtacattgacaaatgcttagacaacatttaaaaaatctgtataggtttgaaaaaacagaa

SEQ ID NO: 32868 - DNA, 299 bp, Glycine max
  Clone ID: LIB3138-001-Q1-N1-D7
tattggcaaattttttgacagagggcaattttagagcaagtgtggatttgcagcgcactcatcgtattagaggaatgattaaaatggtggccacagttggtattcctgagaatacaggtatatcattggcctgtgctatgaatagttcttttagggggcgcgccaggtctgatatttacaccatctgctctcaagactgtgaattggggaatcctgcttgcacaaaaacaatgactatttcatttaatccaaacccgtggtctgatgcatggagtttggaatttctgaagcgtactgga

SEQ ID NO: 32869 - DNA, 214 bp, Glycine max
  Clone ID: LIB3138-001-Q1-N1-D8
attaactccagcttcaatataagcatgtgttgcatgtggattccgggaattttgttgtttgatggtttatgtaattttttgttcatgattttttctctaggtggatataccgcatgtaaatagtataagttttgtcagcaatagaagattttcttttatcagatataaatataaatttctaatattcttcagaaatttagaaacatttttgttt

SEQ ID NO: 32870 - DNA, 302 bp, Glycine max
  Clone ID: LIB3138-001-Q1-N1-D9
tgataacttatttagtgttcatgaatatgtcaagccttaggtgagtggttctaaattgaaaagctttctagctagtcataacatcaccattactgatggtattgacaaaactagtgcaactttgcaatttagaaagttagcagattgtgattttctcaagagaaactttaagcagatgtctaatgttttgtgggtggctcctgaggacaaggcgagtttatggtcacaacttcattatgtttcgtgtaataatctggaaatgcaagaagcttatcttgtcaacctcgtaaatgtgttacgag

SEQ ID NO: 32871 - DNA, 249 bp, Glycine max
  Clone ID: LIB3138-001-Q1-N1-E2
ctcttctctcttctctctctagggttgccttccttctctctccgtggctcctccttcccgttcgccggccggaatcctattttccggccatatttccggctgcctgcaattccccttcaccttccgaactcaatcaatcttttcaattcgaagctgttgctatcttttgcagcgatattggagcagagagagggaagatggcaagtcaaagcggtgcctctagaaggagtatttcgtcgtcgacgagga

SEQ ID NO: 32872 - DNA, 441 bp, Glycine max
  unsure at all n locations
  Clone ID: LIB3138-001-Q1-N1-E3
atccaaagccaccaaatcagtttgtggcataaaatggagccaagggagatagcttttcttctgcctttctctatttctctctagagcttaatttctttctctatcaccccttgcttgcactttccatcatattttggatcatttaagtttttgaaactaggcgaacattattgtattgaaaacactttcatttgatcttcttcttgttcatagtcttatgaccatagagatattttaataagaagatcggtttgtttctgatatagtttctagtgtttcatcaagtcacgtgcttcttattgttttttttttacaagcttacaactcangtacccatcatatatacccatataacagaattattaggaaattnggtgtttttgtccccaaagaatgaagggccaaaataatcaataccccttaaactctgtttccaagttt

SEQ ID NO: 32873 - DNA, 387 bp, Glycine max
  Clone ID: LIB3138-001-Q1-N1-E7
tgaggttggttcgcttgacgaggccatcaatttggtcaagagttgtgggggggactcatgcaattgaaggccttaccacaggattggacttgaagggttattcagaagcccccatttccccagctaggttttttgaagcggttgccgatgatttgctaactctcaataaaaatcttcagtcgattgttggagcagaaaatcctgttttgatgtctgcagctgagcagatttttagtgctggtgggaagaggatgagaccagctctggtgttcttggtgtcaaaggcgactgcagagttacttggctttgaaggaactacttgtaagcatcgacgtttagcaaaaattattgaatgattcatactgcaagcttgatacatgatgatgt

SEQ ID NO: 32874 - DNA, 335 bp, Glycine max
  Clone ID: LIB3138-001-Q1-N1-E8
ttcaagtgatagaagatttacagcaggagttgacaagagaacctgcagatggtgaactagctgatgcaacaaacatgagcattacacaagtaaggaaagcaatagatgttggtcaagctgcaagaaataaactcataaagcacaatctccggcttgttttgttcgtgatcaacaaatattttacagattttgcaagtggccctaggtttcaagatctttgccaggcaggagttaaggggcttataacagcaatcgatcgttttgagccaaacaggagatttcggctatcaacttatagtttggtttggataagacatgctatcattcgttcaatg

SEQ ID NO: 32875 - DNA, 304 bp, Glycine max
  Clone ID: LIB3138-001-Q1-N1-E9
ctgctcttttctcttttcttttctctttagttctctcttgccctttctttttctttttcttcttcttctgagcttgtttaagcttttcttccattaacatattatcacaatgtgtggtattcttgctgttcttggttgttctgatgactctcgagccaaaagggtccgcgtgcttgagctctctcgcagattgaagcaccgtggccctgactggagtgggctccatcaacatggtgactgctttttggcacatcaacggttagccatagttgatcctgcttctggggatcaacctctctttaac

SEQ ID NO: 32876 - DNA, 359 bp, Glycine max
  Clone ID: LIB3138-001-Q1-N1-F1
ctctatgcacctttcatccgtgatgggcgtatggagaagttctactgggcaccaacaagggaagaccgcattggtgtttgcaccggaattttccgcactgatggtattcctgaacaggacattgtcaagcttgttgacaccttccctggccaatccattgatttctttggtgcactgagggccagagtatatgatgatgaagtgaggaagtggatttctggtgttggtgttgacagtgttgggaagaagcttgtgaactcaaaagatggacctccaacctttgagcagcccaagatgactctggagaagctcttgctgtatggtaacatgcttgtccaagaacaagagaatgtcaagag

SEQ ID NO: 32877 - DNA, 317 bp, Glycine max
  Clone ID: LIB3138-001-Q1-N1-F2
gaaactttaagcatatgtctaatgttttgtgggtggctcctgaggacaaggcgagtttatggtcacaacttcattatgtttcgtgtaataatctggaaatgcaagaagcttatcttgtcaatctcgtaaatgtgttacgagaattgtatttgcacagtccagaggaagctcgccaattgagaaggaaagctctctctcgtattgaatggctgcaaaaagctgatgtgcctaccatagcacagattgaagagttccattcgatgcagaggatgatgaatgctcctgattcaaatgataatattgatttactgttgagc

SEQ ID NO: 32878 - DNA, 308 bp, Glycine max
  Clone ID: LIB3138-001-Q1-N1-F3
cacagattgaagagttccattcgatgcagaggatgatgaatgctcctgattcaaatgataatattgatttactgttgagcattgatttgttgggtttacaaggagcaggtaaagcttttccaaacaaaattgtttttgatgataagcttgtgttggctaacacacaagaattctttgatggaaattttccagtggattcttggttaccaatttttgtgaattgtctttatcctgtaagtcaattaccttcagaagctgtcgttgtaaatgttacatgtggtagtggacgtggtgggttacccaccact

SEQ ID NO: 32879 - DNA, 335 bp, Glycine max
  Clone ID: LIB3138-001-Q1-N1-F7
gctgatgataccatcaattttgaggcttttccccacaagctggtgcagtttggagagattcaggaaaaagttgtattgaaattttcacaagaggaatttcttacagcttggtcaactcaggtgcgtcctgcaacaactctgttggctgatgggtgtccatatttgtatgcaatggtgcatgatagttcagtgtctacaataccaggtgattttgtcattggtgtcaagttgacaaccataaacaatatgtgtgcatatgggctcaatcctggtatttcaggttctcgtcttttgggcaccattcctcagtccatttcacagcaaactgtttggaa

SEQ ID NO: 32880 - DNA, 87 bp, Glycine max
  Clone ID: LIB3138-001-Q1-N1-F8
gatgagtgttcttttgcatttgtgaactagtatgtagtatgggattcacttaaataaagcgcattactatgtgcaatgagtgtgttt

SEQ ID NO: 32881 - DNA, 332 bp, Glycine max
  Clone ID: LIB3138-001-Q1-N1-G1
caagtgggggttggtttgtgtttttttgttatatttgtatgttggtctgtgctgggtccttaatttgtggctgagaattaattattattatcaattatgggtctctcaaatttcccaagtgcatctgaaggggtgctacctgtgcttgtgataaacacggttctctcagtggcagtgttgaagaacatgtttagatccatgctccaagtagtacttggtggcagtgctgctgctaatggttcaaacattgaacatgatgaaagttcatcatcatcatgggaaaggaaggtgtcaataactcagtacaagtcattgtgccacagccacgacat

SEQ ID NO: 32882 - DNA, 354 bp, Glycine max
  unsure at all n locations
  Clone ID: LIB3138-001-Q1-N1-G2
ggacaaacttgttgttcacattaccaagaacttcatgaccctgcccaacatcaaggttcctctcattcttggtatctggggaggcaagggacaaggaaaatctttccaatgtgagcttgtctttgccaagatgggaatcaaccccatcatgatgagtgctggagagttggaaagtggaaatgcaggagagccagcaaaactgatcaggcagagataccgtgaagccgcagacttgatcaagaagggaaagatgtgtgctctcttcatcaacgatcttgatgcangagctggtcgtcttggtggaaccacccaatacactgtcaacaaccagatggtgaatgccaccctcatgaa

SEQ ID NO: 32883 - DNA, 331 bp, Glycine max
  unsure at all n locations
  Clone ID: LIB3138-001-Q1-N1-G3
gggggaggagctggtgcaaagaatgctattctcatgaatatgccaaatgctgttctttcaatgtggagatattttgttggagatctcgtctttgaagtttctaagatgacttctccctacattaaatgtacagtctctttcttcatagcatttggaaatttggctgatgataccatcaattttgaggcttttccccacaagctggtgcagtttggagagattcaggaaaaagttgtattgaaattttcacaagaggaatttcttacagcttggtcaactcangtgcgtcctgcaacaactctgttggctgatgggtgtccatatttgtatg

SEQ ID NO: 32884 - DNA, 294 bp, Glycine max
  Clone ID: LIB3138-001-Q1-N1-G7
aggatgttcatgttacaattgattggtttatttcctctcaggaatgtgttcccaggacctattgtgttttaaatccacaaaatccttttgtgttaaataggtggatgggaaaattgactttcccccagggcacttcccgaagtgttaagagaatgcctctttctatagggggaggagctggtgcaaagaatgctattctcatgaatatgccaaatgctgttctttcaatgtggagatattttgttggagatctcgtctttgaagtttctaagatgacttctccctacattaaat

SEQ ID NO: 32885 - DNA, 263 bp, Glycine max
  Clone ID: LIB3138-001-Q1-N1-G8
aggatttcgattggcgagacaaaggagccgtcactaacgtcaaggaccaaggggcgtgtggttcgtgctggtctttcagtaccacgggagcgttggaaggagctcattatctggccactggtgagcttgtgagccttagtgagcaacagcttgtggattgcgaccacgtgtgtgatccagaagaatatggagcgtgtgactcgggctgtaatggtgggttgatgaacaatgcatttgagtacatacttcagtctgggggagta

SEQ ID NO: 32886 - DNA, 357 bp, Glycine max
  Clone ID: LIB3138-001-Q1-N1-G9
ggactttccccatggctcttctgcattttaataaaggagattgaccatggtagctgccagaatagtaggaagcatgggatagtcccaccccaccaattctttgatgcttgaaggggcactctatgtgttaatagttccatatacctatcaagctcctaataaatgtagatatagacttttttttatacaatgtagacatagacttggttggttgttgcttcttttcctttcatttacatccgagctttccatttggctaagctgagattcctagtcatattatacatttggcacggtatagaatatgtaattgcataaaagcaaattcactaaactaggtgactgaccacttttttt

SEQ ID NO: 32887 - DNA, 305 bp, Glycine max
  Clone ID: LIB3138-001-Q1-N1-H3
caaacctaagacgcgctgcttcactattctccctatggagttgaatcttgtggtccgtcaaaagtttttaaattttgtgaggttcattatgaagaaaagggacaaacttagttgtcaagttggaatcaacccatactccatggaatggactggtttggccaatagattactgagtaagggcaatgatattctgtgttgcgattatgctagttttgatggtttgattaccaagcaagttatgagcaagatggcagaaatgataaacagtctttgtggtggtgatgaaaaattgatgcgtgaaagga

SEQ ID NO: 32888 - DNA, 348 bp, Glycine max
  Clone ID: LIB3138-001-Q1-N1-H7
ctaatgtttatgtcaggttataactccaaggaaataaaacaaataccaaagaatcttctttgctttctctcctttgcactttcctcctcttccttgtgatttttgtttgcatcacagggagaaactgagacacagaagatgagagagataattagtattcatattggacaagctggaattcaggtggggaattcatgctgggagttgtattgccttgagcatggaattaaccctgatggcaccatgcctagtgatacctcagttggtgtagcacatgatgctttcaacaccttcttcagcgagacgggatcccgcaagcatgtgccaagggcttttatttgtgatctg

SEQ ID NO: 32889 - DNA, 355 bp, Glycine max
  unsure at all n locations
  Clone ID: LIB3138-001-Q1-N1-H8
ttattttgcccttttcgctcagggattgaagtgaaacctggcagaccgtgtccttatcacgctgacaatgtgcgagggaagcttcatgttactcaggctactctaggcattggctcatcatcggagaaaagcattcttcagtgctcttctggacacaaaagtccagttttcttgtgttcattgctaccagataaggttattttgcggatgatgatggggatgatcttagggatgactatgaatatgattcatggggagaggatattgaaggaactgagtcagaggagtcgtctgaatatgatagtgaagatggatatgctgatgactntatcgntgatagtgatactgacatgta

SEQ ID NO: 32890 - DNA, 366 bp, Glycine max
  Clone ID: LIB3138-002-Q1-N1-B5
cggctcgagccagatgacagaagcagaggaagagagagaaacaccaaagatgggtctttgctttggttgcttcggcgtagacaaacgcatgagcaaggaagaagagagattggcctctgaagaagcgcgtgccaaagctgctgaagccgcacagaaaaggcaagagcaatttgagaattctgcagcaggacgagctgctcgtgcacagcaacaagcaatggcaaagcaatctgcaaataccaacaaaggcgaaccagttctaaagtggcaaatgagttgaggttagacattctgtcagttggagttaactttttattacgtgtaagtatcgatgacaggtccaaccagaattatatgctctgcatg

SEQ ID NO: 32891 - DNA, 357 bp, Glycine max
  Clone ID: LIB3138-003-Q1-N1-B8
tacctcccgcgcgcgcgtacgctagctcttcattctcctctcgcaacaccttttcctttcatgaaacccccatcttcccaatagaagcgtttctttccaaagaatagctttctcattctacattcttatgatactcctaaaaccttttatcattcgtttttccttatcacttatcctataccttcccctgtttttattattctaccctaaatttttcaacatcatgaaactattcctaattctgatctaccaattttgtttcctgcacacatttcttgcttacctttttttaccactgatatacattcataacctattattaagtttttctttgaatctaacattcctttttttcat

SEQ ID NO: 32892 - DNA, 398 bp, Glycine max
  Clone ID: LIB3138-003-Q1-N1-E11
ccggaattaccggatcgacccaagcgtgctagagggtgtatttctagtcaggctcgggagtttgacctgactaatatagccattgtccatgcatgaggcatctttgtaaggatcttcattctgctcggtgacaatctaacctgaaggcgcaaagattgaacttgatctacataaatgatcaatggaaagacaatctgacatggtaaccaacgaactgtgaacagatgaaacctttgagacatgcctaatagaatcatcaatacgactaatacagaatcgagaagaggggatcactcatgagtgcactgatgagctcagtatcccaaggatgattgactcttagacacccctccagactgacctattcgtggcgattactagacatgactactggagag

SEQ ID NO: 32893 - DNA, 313 bp, Glycine max
  Clone ID: LIB3138-003-Q1-N1-G1
ctaaactccgaattccgctccagccaaaatcttcattttcaccaaccctaacaaaagctcttaaaggtagggtctttgcattggatgaaattgaaaaacaatttcacattatattccttgccaaagacatactttttgacaactttaatcggaggacaagcagttatgaccttgacaatgaaactcttgcctttaaacctgttttaagctccatgcttgcaagaatttatcattatccacaaagcaatgaggaatacaagaaaagaatgccgccaatggtggagttctggtcttcttagaaagtgttccatca

SEQ ID NO: 32894 - DNA, 391 bp, Glycine max
  Clone ID: LIB3138-004-Q1-N1-G5
gatcgagataactagaaacagtgtgatgaaaatgaaggtccttgttttcttcgttgctacaattttggtagcatggcaatgccatgcgtacgatatgttccctctccgaatgaacactggctatggtgcccgtactccggaggtgaaatgcgcaagttggaggcttgctgtggaagcacacaacatctttggctttgagaccattcctgaagagtgcgttgaagcaacaaaggaatacatccatggcgaacaatatagatcagactccaaaacagttaaccaacaagcttacttttatgccagagacctcgaagtccatcccaaagacacatttgtgttcagtatagatggcaccgtactctctaatattccatactacaaaaaacatgga

SEQ ID NO: 32895 - DNA, 354 bp, Glycine max
  Clone ID: LIB3138-004-Q1-N1-H2
tcctgtgatgcttcttacttcttttggccattggaaactgtaggcaaggggagaccaccaccgcaatgtttgcattatacctgtctcagcacatggtacaaatcctgctagtgctgctatgtgtggaatgaaaattgtctctgttggaactgacgccaaaggtaacattaatatagaagaattgagaaaggctgccgaaacacataaagacaacttatctgcacttatggtaacatatccttcaactcacggtgtttatgaggaaggtattgacgaaatttgcaagattattcatgataatggaggccaagtatatatggatggtgccaacatgaatgctcaggtgggactcac

SEQ ID NO: 32896 - DNA, 273 bp, Glycine max
  Clone ID: LIB3138-005-Q1-N1-A3
gttatgacaaaggacgcgcgcggacggaagctaagaattctggtgggagtaaagtgtgattagaaaaactttcaactgaccattatcccggcctagtgttaactttgaaggtacaatactatatgaatggtgccaacataatctcgttatgtatgacctttattactacaatcactctggtacaataccctcttgcttcgaaatgccagcgttactagaacttacagggaaacagtcttaccggcacgatacctgaagcattaataagcaact

SEQ ID NO: 32897 - DNA, 331 bp, Glycine max
  Clone ID: LIB3138-005-Q1-N1-B1
ctaattaggctcgagagaaaaagaaaaatttctccaccgaaatcaatttcccacataagcgaccatatcgttggagttcgcacaacaaaacaagagaaaatgggtggacgcaagtgtgctttaacttggatgttgagtttggtgttgatgatgagtatggcacatgcgcaatctggtactagcgcatactgtgcccaggagctaattccatgcctggactaccttaatggcacgatcaacccaccaagcttctgctgcgaccctctgaaacgaacagtccaaaacgaactcgcctgcctctgtaacatctacttctcccctggccttcttc

SEQ ID NO: 32898 - DNA, 387 bp, Glycine max
  Clone ID: LIB3138-005-Q1-N1-B6
tgctggtggcccccgccgtgtggtaactgacccaatctacccaggtggcagcttcgacccattgggccttgctgatgacccagaggcttttgctgagcttaaggtgaaggaactcaagaacggacgattggccatgttctctatgtttggcttctttgttcaggccattgtcaccggaaagggtccattggagaacctcgccgatcaccttgctgaccctgtcaacaacaacgcctgggcctatgccaccaacttcgtccccggaaagtgagcgtcaaagaacgaaatgacttttgagagtttttagatttgtgtttggtgaagtacttcagataatgtgaattatcttgtgtatccgaatccaacttaatgttacttgctttttac

SEQ ID NO: 32899 - DNA, 88 bp, Glycine max
  Clone ID: LIB3138-005-Q1-N1-C3
aaaagttacttaacacttagcaccttgctatactacctgtgcgctctaaactgtagtatcacctcatttattgatatagatgaaaaac

SEQ ID NO: 32900 - DNA, 436 bp, Glycine max
  Clone ID: LIB3138-005-Q1-N1-C5
cctcgaatttcgcttcgggcttaaatcttcgttttccttctttttttctccttgaactcgaatgttcactatggcagatgaggtggttctgctagatttctggccaagtccatttgggatgagggtcaggattgcacttgctgaaaagggtatcaaatatgagtccaaagaagaggacttgcagaacaagagccctttgctcctcaaaatgaacccggttcacaagaaaatcccggttctcatccacaatggcaaacccatttgtgaatctctcgttgctgttcagtacattgaggaggtctggaatgacagaaatcccttgttgccttctgacccttaccagagagctcaggctagattctgggctgactttgttgacaataagatatttgatcttggaagaaagatttggacatcaaagggagaagaaaaagaa

SEQ ID NO: 32901 - DNA, 149 bp, Glycine max
  Clone ID: LIB3138-005-Q1-N1-D3
tgccgcgacgaagctcgaattcgctcgagcttattaactggatcaattattgttgaagatgtaatttatgaagatgtttatagtgaagtcagttgtatttttccttctagagagttggtgtttcgacgccttgtatttgagagagctgc

SEQ ID NO: 32902 - DNA, 318 bp, Glycine max
  Clone ID: LIB3138-006-Q1-N1-A6
taattctgctcgagctcccaaacagatatttatcctctttctttcattcaaagaaacaagcccctctttataatcattgatccttttctaataaataccatttactcttccaatttcgtcatgcccaaaacctccttcaatcttcatcatcctttataaacaatgcattctttatcttctcccattacatacaaatattctgatataataccttttattaactagaaatctcaaataacctacattccagacatttataataaaaaatacactgtcccttcttattttactttcctccaattaatttattttcctcgc

SEQ ID NO: 32903 - DNA, 401 bp, Glycine max
  Clone ID: LIB3138-006-Q1-N1-E4
aactcgaaattccttttgaaatttgaaaatttttttgatgatcccatcaattttcaggcttttgcccacaatctgatgcagtttggagacactcacttacaatagcgtatcgaaattgtacaacaggaatgtcttacagcttggacaactcatgtgcgtcctgcaacaactctgttggctgatgggtgtccatatttgtatgcaatggtgcatgatagttcactgtctacaataccatgtgattttgtcattggtgtcaagttgacaaccataaacaatatgtgtgcatatgggctcaatcctggtatttcacgatctcgtgtttttggcaccattcctcagtccatttcacagcaaactgtttggaatcaaatggcaacaggctgaacaccattgaattt

SEQ ID NO: 32904 - DNA, 333 bp, Glycine max
  Clone ID: LIB3138-006-Q1-N1-H2
tgctgcttggaagaaaggctgtttaatggtcaagattgtgatgtctgggaatgcacaatcaaaaagagtgattgggccttattggtacaagtgtttttaacaaacagcaacagtacagagcattttgatgcatgtaagtggacaaaatcagaaccacattcctgggaattgatcttcccaatagaggtatgtggtcctaataatggttttgaaatgtggagttctgagtgggcaaatcaaacttcatggcatttgagtttccttattgacaatcccaaacagtctacagtttttgatattctctttggaatctctcaagattttgaaattgct

SEQ ID NO: 32905 - DNA, 375 bp, Glycine max
  unsure at all n locations
  Clone ID: LIB3138-007-Q1-N1-A2
aaaaagttngagcacgctgccctcgtacgtaaattcggatttaggttaaaattgtgatgtctgttaatgcagcagtcaaaaggagtgattgggcctcattggtacaagtgtttttaacaaacagcaacagtacagagcattttgatgcatgtaagtggacaaaatcagaaccacattcctgggaattgatcttcccaatagaggtatgtggtcctaataatggttttgaaatgtggagttctgagtgggcaaatcaaacttcatggcatttgagtttccttattgacaatcccaaacagtctacagtttttgatattctcttgggaatctctcaagaatttgaaattgctggtaatacttttatgccagcttttt

SEQ ID NO: 32906 - DNA, 410 bp, Glycine max
  unsure at all n locations
  Clone ID: LIB3138-008-Q1-N1-B5
ctcctctcttactctggatactcttgcatcatcgctctggagggcaactccatgggtgaggaggccantttcatgcccgtgtccggaggtttcattctaatggccggacactgggtcgatgagtccctaggcttcatggccggctggaacttcttcttctacgaagctctgctgattcctttcgaaatcacagctctcaacattgtgctgcgatactggagagatgacataccactcgctgctgtctgtgcggccgtcatcgttctatatgctgcttgcaacatcttggctgtaaaagcatacggagaaagagaaattttgctcttttgatgcaaagtcctgctgatacttgattctctactggtttcaccttcgtcaccattgttggaaggtaaaccttaaaaagattc

SEQ ID NO: 32907 - DNA, 295 bp, Glycine max
  Clone ID: LIB3138-008-Q1-N1-C2
aagctcgaattcgctcgagatcttcaaatactctatttctatcttccaatcctgctcctgggttgagtgatttttaaagggggagacctcctcaacctcgcccatttacaaagaaagctctctcccctattgaatggccacacaaagctcatgtgcctaccataactcatccttgaagagatccattccatgctaaagataattaatgctcctgattcaaatgattactattgatttactgttgaccatcaatcatgttgattcacaaagagcaggtccaagcttttccaaacaa

SEQ ID NO: 32908 - DNA, 213 bp, Glycine max
  Clone ID: LIB3138-008-Q1-N1-D4
gctctaattctgctcgatcctatactcattttattttatctcatttactccctcctctctgtagagatcttttaaaaagacaagcacacacacacacacactcacacacacacacacaccaaacacttctaatttttttctcatattaaattataccacctttctttttctactttaaacctccctttactttaaaatctatctctctctttc

SEQ ID NO: 32909 - DNA, 305 bp, Glycine max
  Clone ID: LIB3138-008-Q1-N1-E2
cgaagctcgaatttgctcgagtctatatacatctttttccaccgaaaaaacatatccatatgaaagattacccttaataggggccatctccacattatctataatccgtaaatatacccccatagaatctacctattcagctttccatcggtatgtatccatgcgaataactcaacatgcctctttctgaaacaaaataactaccctctatccatgcctcaaaagggttgattatatgtaaaaacaaccaatgaatccatgattaaacccttctacatttttttattataaacttattcatcaat

SEQ ID NO: 32910 - DNA, 220 bp, Glycine max
  Clone ID: LIB3138-008-Q1-N1-E6
aagaagctccctctccgatgaggattcttaaaaaagggggtgggcctaccctaacccatttttgaatattccataccatgcaaaagatgatttatgcccctgaatcaaatgatatttttgattttcttttgaacatttatttgtttgggttctcacaaatccagtatagcttttccaaacaaaatttattttgatgataaacttgaggtagcttacacac

SEQ ID NO: 32911 - DNA, 241 bp, Glycine max
  unsure at all n locations
  Clone ID: LIB3138-008-Q1-N1-F1
gaagagcgcggcgaagctagaattctgctcgaggtattaggtcctttttattgcgaactagtatgtantaggtaggcacttaaataaagcggagttagtctgttcaatgagtgtgtttaaatataaaaaaaaaaaaaaaaaaatatataaaattttaaaaaaaaaataaataataaataaaaaaaaaaaaattattaaaaaattaaaataaaataataaataaaaaattattgggcggccc

SEQ ID NO: 32912 - DNA, 402 bp, Glycine max
  Clone ID: LIB3138-008-Q1-N1-F12
aatgaacaacttgtattttgccctgccattgtggttcctggtgtgtactactcaaatgataagatgcttcaaaccaggatattctcttatgctgattcacaaaggcacagacttggaccaaactatctgcaacttcctgctaatgctcccaagtgtgctcaccacaacaatcatcatgaaggtttcatgaatttcattcacagggatgaggaggttaattacttcccttcaaggtatgatcctgttcgtcatgcagaaacgttccccatacctcctgctatctgcagtggaaggcgtgaaaagtgtggaattgagaaggagaacaactttaagcagccctgagagagataccgatcttgggcacctgacaggcaagatagatttaatcgccgatgggttgat

SEQ ID NO: 32913 - DNA, 338 bp, Glycine max
  Clone ID: LIB3138-008-Q1-N1-F3
cgtcgttactcgaattcgctcgaggccttaaaagattattttcaattcttgtaaacatccgtggaggcaatgacatgggaagaggggtgctccaaaccatttcgcggcttgtgaatctctggatgaggataaggtatctgacaaaattgttttgggaggtcagagagatgagaagaaattaaaaattgccccaactatcatattgggtgttcctgaagatgctatgataatgcacgaggagatatttgggccaataatgccaatcgtcactgtagacaatataaaaaattgctacagttttattaaatcaaaaccaaaaccttttgctgcatattttt

SEQ ID NO: 32914 - DNA, 220 bp, Glycine max
  Clone ID: LIB3138-009-Q1-N1-A11
aatccctccgtaaaacaaatttttattttaacaaataacaaatcaaaaaccgtcatgattttaaataaccgtctgccccttcataacaaacctatccctacaccaaaccaaatcaaatcgaaaatcctctaaaaattccaataccacattttcaacaaaataaatcccccaaaataatcatatcttactatcaaaatatatttatttcttaacaccccta

SEQ ID NO: 32915 - DNA, 320 bp, Glycine max
  Clone ID: LIB3138-009-Q1-N1-B8
agaattcagatcgagagaaaatcctcactcattttttcgtagccaaacactctcaaattgtcagttatgtcttggcaagcgtgtgtggatgatcacctactgtgtgaaatcgaaggttaccaccttactcacgccgctttcatcggccaagaccgaagcgtttgggctcaaagcaccaactttcctcaggtaagcttttcattttcctttaactcttttttcccaatcggatcgcgatttattgttatttccttagggaagcttctagaatcgccgatctatgctcacttgttatggatattcaacatgcacaatagttc

SEQ ID NO: 32916 - DNA, 207 bp, Glycine max
  Clone ID: LIB3138-009-Q1-N1-C5
ccttacctaagcattgaattcgagtctagcatcaaatggttcaaaacgcgccgtccacactatcacgggtgtggttacaacctgttgcatggagtataatatggtactaaacagcacccgggattgtaccatgagctgtaatgtgcctaaatgtgcatacaaggcttgaaatatgaggacggctactgacttctcatacaccagaaa

SEQ ID NO: 32917 - DNA, 82 bp, Glycine max
  Clone ID: LIB3138-009-Q1-N1-F7
gttaaatttttttttttttaaaaaaaaacacaaaaaatggagaagttttaataaaaaaacaagccccaaaaaaaaattctct

SEQ ID NO: 32918 - DNA, 402 bp, Glycine max
  Clone ID: LIB3138-009-Q1-N1-G10
gcaattgaagttgaagtcttgcccttctctcttcaactgcgaacacaagacatcatcatgccatggctgcctccgtctccactgtcggagctgtcaacagagctcttttgaacctgaatgggtctggacctggggtttcagctcccagttcatccttctttgggagcagcttgaagaaggttattggctcaagggtccccaacacaaagatttcctctggaagcttcaagattgttgctgtagaagagaagaaagagattgaagagacccagcagaccgacaaggacagatggaagggtcttgcctatgatatctcagacgaccaacaggacatcacaagaagaaagggtttggttgactcccttttccaagctccacaggatgctggaactcactatgctg

SEQ ID NO: 32919 - DNA, 315 bp, Glycine max
  Clone ID: LIB3138-010-Q1-N1-B1
atgttttcataatgggggttctatcccctctggaaatgctctcacacctattcgccatatcatttatgatgagatgctcattaaatatacctttgtaaaataactgcgccaggcttaagctacaagtatgtttttacaaaccatcaaaaattttggttctttttgcgcctactgtgttgatcacttaattatagctccagaatttttctagccttactttaacagctctatattaaaaaacgtatttgcttggcataacaatcccattactgagggtattggccaaactattgccacttttcaatttataaagtt

SEQ ID NO: 32920 - DNA, 81 bp, Glycine max
  Clone ID: LIB3138-010-Q1-N1-B6
cggctcgagccttcccttggggtccaagaaagaggaaccacggtaaggggtgcctcaacagcattgtcataaccagttgag

SEQ ID NO: 32921 - DNA, 215 bp, Glycine max
  Clone ID: LIB3138-010-Q1-N1-D8
gctttctgaggatgtttctgggtcctatcaatgttcgtgcctgcaggaaggacgttcagctcaaggtcaaagaggaatacaacagttacagggatagaactgccctgctattcctgctttttccggcaacactgcttattctaagatcttgggtttggtctggatgcttgccaacttttcctgttcagatgtaccaggtggatatatcatcatta

SEQ ID NO: 32922 - DNA, 409 bp, Glycine max
  Clone ID: LIB3138-010-Q1-N1-E7
taacttcagaattttgcagcaccactggcatccccgttgactgggttggtgacgagcagaaaagcaatgttgggttatttcaaaacaattcccagagagcttttactgatgttaatatgggtcaagtatacaatgtagttgatgattatgagcaacaaagaatctgtagtgcagttgctagtggcaatactggaatcataaggaggcatcgtgaggtacgaaatgaacagctaagcataaactcaacacaaggtactgcacagaggagaattcgtttgtcaatggctacacatggctcaaataagacggtgaaaagtgaaagttgtgcacaagaagagctttatgcaaaaccagtcattgctgtgggggagaaaggttcagaaaatcatgcttctgatgaaagtgctac

SEQ ID NO: 32923 - DNA, 79 bp, Glycine max
  Clone ID: LIB3138-010-Q1-N1-F2
caaaatgttgaaggtgctaggtttcctgtcttgactccaaaccttaaaggctttgaggcagctgttgctgctggagcta

SEQ ID NO: 32924 - DNA, 376 bp, Glycine max
  Clone ID: LIB3138-010-Q1-N1-G1
tgcaggcttccctcagactcagaattcggaatctagggtccaggttcttttaaggggcccgccacaagctatttttacacggtctggtgttaacactgtgaatcgtggaattcttcttacacaaaagcaattactattgtaattaaaccaaaccccttttctgatacatgcaactctgaattacccaagcagactctctttaattgcgacatcatctgcgtgactggaaggacttccgacccaactcacgatgtctaggttacaattgattgatttattatctctcacgaatatcgttccaagacctattgagaatctaatacacccaacccttttgtgttaaatacgttgatgggcaaatatactttgccccaca

SEQ ID NO: 32925 - DNA, 396 bp, Glycine max
  Clone ID: LIB3138-010-Q1-N1-G4
attgaattcaaaaactaagttcatttcttgtgctttgctttatgcctcaaaaccaaacatgtcgaacacatgcggcaactgtgactgcgctgacaagactaactgcaccaagggaaacagctatggtgttatagtagagactgagaagagctacatcgagactgttgacatggatgttccagcagctgagcatgatgggaagtgcaagtgtggcactaactgcacttgcacggactgcacttgtggccattaaggaatatgtatgaaaatgtaattgccatgtgtttggcaatacaaatctccaaataatgtaatcttcgtatgaataaatgtgtgctgttatcctacttcagggtctgtgtagtcatgcagtctgaatcatgtccagttcctgtc

SEQ ID NO: 32926 - DNA, 369 bp, Glycine max
  Clone ID: LIB3138-011-Q1-N1-A1
gctcaatcgtggtatttcaggttctcgtcttttgggcaccattcctcagtccatttcacagcaaactgtttggaatcaaatggcaacagtgagaacaccattgaattttgattctagcaagcagagcttttgtcagttttctattgaccttctcggtggaggaatcttagtggacaaaactggagattggatcacacttatacaaaattctccaattagtaacttgttgagagttgctgcttggaagaaaggctgtttaatggtcaagattgtgatgtctgggaatgcagcagtcaaaaggagtgattgggcctcattggtacaagtgtttttaacaaacagcaacagtacagagcattttgatgcatg

SEQ ID NO: 32927 - DNA, 370 bp, Glycine max
  Clone ID: LIB3138-011-Q1-N1-A10
cttcactcttaactgtagaaaagaaaaaccgaagatgagcttgttgaatgaggagagaaaaccgcacgctgtggttactccatatccagttcaaggacatgtgaaccctttgtttaaactagcgaagctgcttcatctcagaggctttcacataacctttgttcacactgagtacaactacaagcgtttgctcaagtcaaggggtcctaatgcccttgatggcctaccagattttagatttgagagcatcccagatggtcttccgccattggatgatgataatgttactcagcacgttccctctctctgtgactctatcagaaaaaacttcctcaaacccttttgcaaacttgttcatagacttaaccac

SEQ ID NO: 32928 - DNA, 395 bp, Glycine max
  Clone ID: LIB3138-011-Q1-N1-A11
ctcgagccgattcggctcgagctaaattgaaaagctttctaggtagtcataacatcaccattactgatggtattgacaaaactagtgcaactttgcaatttagaaagttagcagattgtgattttctcaagagaaactttaagcagatgtctaatgttttgtgggtggctcctgaggacaaggcgagtttatggtcacaacttcattatgtttcgtgtaataatctggaaatgcaagaagcttatcttgtcaatctcgtaaatgtgttacgagaattgtatttgcacagtccagaggaagctcgccaattgagaaggaaagctctctctcgtatagaatggctgcaaaaagctgatgtgcctaccatagcacaaattgaagagttccattcgatg

SEQ ID NO: 32929 - DNA, 399 bp, Glycine max
  Clone ID: LIB3138-011-Q1-N1-A12
gtggcccagtattgatcatcagaagagtcatgtttgctctccagttccctctctgtaggtaggagttcttttctctcaaacattccataaaacccatgatttttgtggacaccacgttatactgctttcaatttacgagttaccttggctttgagtttctttcagtcattttcacaaacacctttcgctcagcgttaaagaaccgaagaattttgggttattttattttggcgctctgtccaatttcgatagactgaagtgtgcattgctgatttatcaaatcatgatcagaatcagatttaacttaactcttttctctgttgagctatcacgcatcagccatagctcactcactgttactcatagtcataaagttgagcacccccttatgagtgctac

SEQ ID NO: 32930 - DNA, 337 bp, Glycine max
  Clone ID: LIB3138-011-Q1-N1-A4
gcacgcgacgaagctagaattcgctcgagcaacatgtttaattattggaacataaatacaacattcaagttgattctaaaagcagacctattctcaattttctacagaccacagtagtggacatattttagcgaacaataacaagagattgaatctcactgttacactcttatgccatattttacttttccacaggctcctgtcagatcatatgctaatgcataatcctcatcatgatctgtaagaatgctccaattttaatgggtcattcgtccaaatcaatacaagagattataacaaacatcatttgttcagaatcctttgactcttttaaaat

SEQ ID NO: 32931 - DNA, 394 bp, Glycine max
  Clone ID: LIB3138-011-Q1-N1-A5
ggcaaccaccttaacttgcgtaatccacaaaacgacgttttccctgtctatcacaaataacaagtcttccttcccacttgcaccctttctctctcgccggtcgccgaatctttctccgcatccgcaacctccgccgaatccgcctttgattcttcaaccgatggatcggccggcgaccggacctggcgtggacatgccgatcatgcacgatagcgaccgctacgatttcgttcgcgatatcggctcccggaatttcggcgtctcaaggcttatgagggataagcagacgcaagagcttgttgctgttaagtatattgaacgcggagataatattgatgaacatgttaaaagagaaatcattaatcacacgtctctaagacatcctaacattatc

SEQ ID NO: 32932 - DNA, 215 bp, Glycine max
  Clone ID: LIB3138-011-Q1-N1-A6
tcagaagagtcatgtttgctctggagttccctctctgtaggtaggagttcttttctctcaaacattccataaaacccatgatttttgtggacaccaccttatactgctttcaatttacgagttaccttggcttttaatttctttcaatcattttcacaaacacctttcgctcaacgttaaaaaaccgaagaattttgggttattttattttggcg

SEQ ID NO: 32933 - DNA, 402 bp, Glycine max
  Clone ID: LIB3138-011-Q1-N1-A7
gttgacaaccataaacaatatgtgtgcatatgggctcaatcctggtatttcaggttctcgtcttttgggcaccattcctcagtccatttcacagcaaactgtttggaatcaaatggcaacagtgagaacaccattgaattttgattctagcaagcagagcttttgtcagttttctattgaccttctcggtggaggaatcttagtggacaaaactggagattggatcacacttatacaaaattctccaattagtaacttgttgagagttgctgcttggaagaaaggctgtttaatggtcaagattgtgatgtctgggaatgcagcagtcaaaaggagtgattgggcctcattggtacaagtgtttttaacaaacagcaacagtacagagcattttgatgcatg

SEQ ID NO: 32934 - DNA, 344 bp, Glycine max
  unsure at all n locations
  Clone ID: LIB3138-011-Q1-N1-A8
gacggcgccatccttgtcgtctccggcgccgacggccccatgccccaaaccaaagaacacatcctcttagccaagcaagtcggtgtccccaacatggtcgtcttcctcaacaagcaagaccaagtcgacgacgaagagcttctccaactagtcgaactcgaagttcgcgaccttcttacctcctacgaattccccggtgacgatacccccatcgtctccggctccgcactcttagccctagaagcccttatggcgaaccctgccatcaaacgcggcgacaacgagtgggtcgacaaaatctacaaactcatggacgaagtcgacgactacattcccatncccca

SEQ ID NO: 32935 - DNA, 403 bp, Glycine max
  Clone ID: LIB3138-011-Q1-N1-A9
tgctcacagggcacatgcatcaacagagggtgttactaaatgcctgaagccatctgttgctggttttcttttgcaaaaggaacttgattaccttgttggggcggtatcaagccccaaaaggccatttgctgccattgttggtggttccaaggtctcatctaaaattggagtgattgagtcacttttggaaaaagttgacattcttcttcttggtggaggaatgatcttcacattttacaaggcacaaggtctttcagtgggttcatcccttgtagaagaagataagttggatcttgctacatcactacttgcaaaagccaaagaaaagggggtgtctctcttgttaccaagtgatgtggtgattgcagacaaatttgcccccgatgcaaacaagaaggtcgtg

SEQ ID NO: 32936 - DNA, 408 bp, Glycine max
  Clone ID: LIB3138-011-Q1-N1-B1
aaaatattataggaagagagggagaaactaatagagagtcctatgctgggggactcagcagtgttgggaacaggaggaggaggctctggtgatgcagtggcagcagcaccacctgctgcatcaggaggagcacatgatggtggtgttgacggcggtgacggtggcggtggcggatcaaattcaggggatgatagagttgaggaaggtgagaggagctttggtgggaacaggtggccgaagcaagagactttggctttgttgaagatacggtcggatatggacgtggcttttagagatgcaagtgtaaagggtcccttgtgggaagaggtttctaggaagctggcagagcttggctacaacagaaatgccaagaaatgcaaagagaagtttgagaacgtttacaagtac

SEQ ID NO: 32937 - DNA, 190 bp, Glycine max
  Clone ID: LIB3138-011-Q1-N1-B10
gacaaaactagttcaactttgcaatttagaaagttagcagatgttgattttctcaagagaagactttaatcatatgtctaatgttttgtgggtggctattgagatcttctcaagagaatctttacaccgacatctattgttttgtaattcgcttctaatgaacaaggttagattatggtcacaacttaat

SEQ ID NO: 32938 - DNA, 402 bp, Glycine max
  Clone ID: LIB3138-011-Q1-N1-B11
caccaccgtagcagcatcgccggcgtcctctccgtctaacccgacaaaaaaaaaaacaattttaaaaatttcccaaaccgaccatctccgcaaaaaaacacgtgacgatcgttgcgatgagcctgagcacgtgacattcccattgttccgcttaaatttcatgactttttgagttcaagttcgtgggtctgctgttcgttgatttcgtggcttgttagtgcaatttcaagcacgacttgcagcttttaattgaattgaagttctggacacttgctgctttggttcttccaatccccaactgtccaaccaaccagttctgctgatggtgaagtgcggatttgggatacacttcagcatcggacagtgtcatcagcatggttacatagtgccgcacatggtatt

SEQ ID NO: 32939 - DNA, 404 bp, Glycine max
  Clone ID: LIB3138-011-Q1-N1-B12
gaaaataaccatgataaaatagaaaatctagagggttctcctgcggatcaggatgaagcaggggacaaattagcagatgtacttgatgatgatgatgatgatgatgatgatgaagccagtgatagtcatgggagtgaaggatctttgcataataaagtggaagagaatgcaaaagaagctgaggaagaacctattgttaaatctgaaactgatataaaggtcagaaacaaagagtcttctgatgaaatcatcaataaggggaatgatgcatctgaaaatactgagggattatcaagggaagaattgggccggcttgttgcttcacgttggacaggagaaaatactgataagccaagtgctgtacctgatacaacattagacaatgaagatcgggaagatccaaa

SEQ ID NO: 32940 - DNA, 406 bp, Glycine max
  Clone ID: LIB3138-011-Q1-N1-B4
caagcctctactatactgcttcaccttctgctctagaaaattcagggctgaaacatggcttcggctactctctctgtagccaaaccagcccttcaggcaaatgggaaaggcttctctgaattctctggcctccgaagctcatcaggcttccttcccttttctagaaaatcttcagaggatttccattctgtcattgccttccagacctatgcagttggaagcagtggaggatacaagaagggtgtgacagaagcaaaactgaaggttgccataaacgggtttggaaggattggaaggaacttcttgaggtgctggcacggtcgcaaagactcccctcttgatgtcattgccatcaacgacaccggcggcgtgaaacaagcctctcaccttctcaaatacgattcca

SEQ ID NO: 32941 - DNA, 400 bp, Glycine max
  Clone ID: LIB3138-011-Q1-N1-B5
agtagattaaattctcctcaagcaaaacctagagctcccacactgggccactacttagaatgttaaaagccccttccttcatcaaggtactactgtttcatcttccctcaaagattggaacaacaacaggaacatgggtactctaacaactgttcctgtgctcccttctaagcttaacaagccttcgctttctccgcgtcacaattctctttttccctactacggaagacgcgtcgggaagaagaacaaagcaatggttcctgttgctaggttgttcgggccagccatatttgaagcctcaaagcttaaggttttattcttaggagtggacgaaaataaacacccaggaaatctcccaaggacttatactctaacccatagtgatataaccgctaagctc

SEQ ID NO: 32942 - DNA, 331 bp, Glycine max
  unsure at all n locations
  Clone ID: LIB3138-011-Q1-N1-B6
caaaactaggtgcaacttttgcatatttagaaaagttacgcagattggtgattttctcacagagaaaactttanagcagatgtctaatgggttttgtgggtggcttcctgaggacaaggcgaagtttatggtcacaacttcattatgtttcgtgtaataatctggaaatgcaagaagcttatcttgtcaatctcgtaaatgtgttacgagaattgtatttgcacagtccagaggaagctcgccaattgagaaggaaagctctctctcgtattgaatggctgcaaaaagctgatgtgcctaccatagcacagattgaagagttccattcgat

SEQ ID NO: 32943 - DNA, 360 bp, Glycine max
  Clone ID: LIB3138-011-Q1-N1-B7
cagcgatcgaagtttcacatcagccttatccagtttagggtttcggttccttaccctacctttgacgtatcgaaaccttaaatttgggattaggtctgagcaatctggttggtagaacctttggtcttagagagtcaagttttatgtctggattagacgatcaaattcctactgccttcgatccttttgctgatgcaaatgctgatgactcgggtgctgggtcaaaggagtatgtgcatattcgcgttcagcagcgaaatggtaggaaaagcctgacaaccgttcagggattgaaaaaagaattcagctataacaagatacttaaagacgttaagaaagagttctgttgcaatggaacag

SEQ ID NO: 32944 - DNA, 354 bp, Glycine max
  Clone ID: LIB3138-011-Q1-N1-B8
gttctaaattgaaaagctttctagctagtcataacatcaccattactgatggtattgacaaaactagtgcaactttgcaatttagaaagttagcagattgtgattttctcaagagaaactttaagcagatgtctaatgttttgtgggtggctcctgaggacaaggcgagtttatggtcacaacttcattatgtttcgtgtaataatctggaaatgcaagaagcttatcttgtcaatctcgtaaatgtgttacgagaattgtatttgcacagtccagaggaagctcgccaattgagaaggaaagctctctctcgtattgaatggctgcaaaaagctgatgtgcctaccatagcac

SEQ ID NO: 32945 - DNA, 400 bp, Glycine max
  Clone ID: LIB3138-011-Q1-N1-B9
ttggaatttctgaagcgtactggatttcattgcgatatcatttgtgtcactggatggactgccaccccaatgcaggatgttcaggttacaattgattggtttatttcctctcaggaatgtgttcccaggacctattgtgttttaaatccacaaaatccttttgtgttaaataggtggatgggaaaattgactttcccccagggcacttcccgaagtgttaagagaatgcctctttctatagggggaggagctggtgcaaagaatgctattctcatgaatatgccaaatgctgttctttcaatgtggagatattttgttggagatctcgtctttgaagtttctaagatgacttctccctacattaaatgtacagtctctttcttcatagcatttggaaatt

SEQ ID NO: 32946 - DNA, 296 bp, Glycine max
  Clone ID: LIB3138-011-Q1-N1-C1
aattcatctcgcgagaacacaaacctattttaataaaaaaaaaaaaaacaaaaaaaaacgtgacattaaaaaaaaaccgaccacaacaaaaaaaaaaaaaaaaaaaaaacaaaaaaaaataaaaaaaaaaacaaaaaaatataaacaaggcccccccccacccaataaacccccccaccccacaaaaaaatatccacccgcaccttcaagacaaccatcttttcctatatataaacaaataaaaacttaggctaaacaacactaaaaccattctcccgcgaaaaatttttaacctc

SEQ ID NO: 32947 - DNA, 402 bp, Glycine max
  Clone ID: LIB3138-011-Q1-N1-C11
aattgcaatatgaaattgaaagcggttccatggtggcataattggttagtggtaaaagcaggatcaagtcacagcagcctcatggtacgcaagaagcagactcaggattctgaatccactcctccaagaatcacatccaacgtcaaacaaaacctacgcttcctaaagctatggaagagcttccagaatagaaattctagcactcctaagccttctaccagttaccgcaagaagaaagtcgagaaggaagatgatgttgttgacacaaacctttatcgggatcccaccaccttcctctactacacaaaccaacagggtatattagacaatgccgtccctgtacttcttgtggatggctataatgtgtggggctattggatgaagctcaaaaaacatttcgtc

SEQ ID NO: 32948 - DNA, 401 bp, Glycine max
  Clone ID: LIB3138-011-Q1-N1-C12
ctcgagccgaatcggctcgagcggctcgagcgccaattgagaaggaaagctctctctcgtattgaatggctgcaaaaagctgatgtgcctaccatagcacagattgaagagttccattcgatgcagaggatgatgaatgctcctgattcaaatgataatattgatttactgttgagcattgatttgttgggtttacaaggagcaggtaaagcttttccaaacaaaattgtttttgatgataagcttgtgttggctaacacacaagaattctttgatggaaattttccagtggattcttggttaccaatttttgtgaattgtctttatcctgtaagtcaattaccttcagaagctgtcgttgtaaatgttacatgtggtagtggacacgtgggttacccacc

SEQ ID NO: 32949 - DNA, 399 bp, Glycine max
  Clone ID: LIB3138-011-Q1-N1-C3
gagtattttggaaggatgtcttacgttgctcataacgttaatcaggcgccaaaagaaagatttgttggatggaaatttttcctttgatattaaatctcgctctagattggaaaaagtttcctctacaaaagcacaatctgttagtggaaaaaccttcaaatatgatataattggtgctggttcacattcttcagaagattttcctgaaaaggaagatcaagaaaaacccaaaaagattgatgccagattgagacaaagaatagatcctcaatacaatgaggttcaggctcagatggaaacaaatttgtttaaattgtctcttgatgatgttgaaactcctaaaggttccatgttggatctgaaaatttctcaatctaaaattgcacttcccaagaacac

SEQ ID NO: 32950 - DNA, 367 bp, Glycine max
  Clone ID: LIB3138-011-Q1-N1-C4
caataaatctgatgcatgcggttcgctactacgcctactggggaggtcctttctacctcaagcacgtttaaatttccgttcccagtccaaaagcaaatgactttttaatcaaactttaagcatttatcattaaccctatttatttgaaaattcataaaagttttcttcgtcctttatttttccccataacctttccccacataccttgcactgatttggctggaaaaataattgatatctgaactcatgtcaagattttaaagtttgcgaccaagtccttgctaaactcactcatcaataattaggttggttttcccagtttgcttttgctactgagagcttaacaacatccaaaccatcttatgtt

SEQ ID NO: 32951 - DNA, 136 bp, Glycine max
  Clone ID: LIB3138-011-Q1-N1-C5
cgaaattcggttcgagcttatttttttccttttttaactttcactctctctctctctgtcggccataatcatgggagcagtgattctcccagatctcggcaccgagattttgattccggtctgcgccatcattgga

SEQ ID NO: 32952 - DNA, 424 bp, Glycine max
  Clone ID: LIB3138-011-Q1-N1-C6
aacctggaaattcggttcgagattaaacgtgtttgttgaggacaaaaccactggacagaagagcaggattacaattaccaacgacaagggcaggctttctaaggaggagattgagaagatggtgcaggaagctgagaaatacaagtctgaggacgaggagcataagaagaaagtggaggccaaaaatgcattggaaaattatgcctataacatgaggaacacaatcaaggatgacaagattgcttccaaactgtcttctgatgataagaagaaaattgaagatgcgattgagcaggctatccaatggctagatggaaaccaacttgctgaggctgacgaatttgaggataagatgaaggagttggagagcatttgtaatcccatcatagcaaagatgtaccaaggtgcttgtggtgatgcgggt

SEQ ID NO: 32953 - DNA, 381 bp, Glycine max
  Clone ID: LIB3138-011-Q1-N1-C7
ctcgagccgattcggctcgaggtaaatgttacatgtggtagtggacgtggtggtttacccaccactgcttggattagttctgcagttaacaatcgctcctcagatatcaacaaaaggattcgcacagcacttgggaaaggtaagaaaattgtttttcttactagagttgatccttttccagtagctttactggctgttctttttggcgttaagaatgaaattctgagttctaacgccactaatcctatgctgacgcgacttcttgagaactgtaagagtctcaaatatctggttgatgagtgtccttttgcatttgtgaactagtatgtagtattttattcacttaaataaagcgcattactatgtgcaatgagtgtgttt

SEQ ID NO: 32954 - DNA, 382 bp, Glycine max
  Clone ID: LIB3138-011-Q1-N1-C8
ctcaaaccatttttattcaaaccaaactgtccatatactcggggacgttttggtaaacactcaacaactataacactttctgcacataacaatcacctactcagatatcaacaagaaaattctcacatcacttcgtaaacgtaagaaaattagttttcttactagactcaatccttttccagtatctatactgcctgtcctttttatcgttaacaataaaattctcagttctaacgccactaatcctatgctgacgcgacttctttagaactgtaataatctcaaatatctggttaatgagtttcctattgcatttgttaaactagaattaatattttattcacttaaataaatcgcattactatatccaatgagtcttttt

SEQ ID NO: 32955 - DNA, 405 bp, Glycine max
  Clone ID: LIB3138-011-Q1-N1-C9
tgtggtccgtcaaaagtttttaaattttgtgaggttcattatgaagaaaagggacaaacttagttgtcaagttggaatcaacccatactccatggaatggactggtttggccaatagattactgagtaagggcaatgatattctgtgttgcgattatgctagttttgatggtttgattaccaagcaagttatgagcaagatggcagaaatgataaacagtctttgtggtggtgatgaaaaattgatgcgtgaaaggacgcacctgctgttggcttgttgttcaaggatggcaatttgtaagaaagatgtttggagagttgaatgtggaatcccttctggatttccgctcacagttatttgcaatagcatttttaatgagatgctcattagatatagctatgaaaa

SEQ ID NO: 32956 - DNA, 404 bp, Glycine max
  Clone ID: LIB3138-011-Q1-N1-D10
gttttctattgaccttctcggtggaggaatcttagtggacaaaactggagattggatcacacttatacaaaattctccaattagtaacttgttgagagttgctgcttggaagaaaggctgtttaatggtcaagattgtgatgtctgggaatgcagcagtcaaaaggagtgattgggcctcattggtacaagtgtttttaacaaacagcaacagtacagagcattttgatgcatgtaagtggacaaaatcagaaccacattcctgggaattgatcttcccaatagaggtatgtggtcctaataatggttttgaaatgtggagttctgagtgggcaaatcaaacttcatggcatttgagtttccttattgacaatcccaaacagtctacagtttttgatattctct

SEQ ID NO: 32957 - DNA, 397 bp, Glycine max
  Clone ID: LIB3138-011-Q1-N1-D11
ctcgagccggaattttgattctagcaagcagagcttttgtcagttttctattgaccttctcggtggaggaatcttagtggacaaaactggagattggatcacacttatacaaaattctccaattagtaacttattgagagttgctgcttggaagaaaggctgtttaatggtcaagattgtgatgtctgggaatgcagcagtcaaaaggagtgattgggcctcattggtacaagtgtttttaacaaacagcaacagtacagagcattttgatgcatgtaagtggacaaaatcagaaccacattcctgggaattgatcttcccaatagaggtatgtggtcctaataatggttttgaaatgtggagttctgagtgggcaaatcaaacttcatggcatttg

SEQ ID NO: 32958 - DNA, 401 bp, Glycine max
  Clone ID: LIB3138-011-Q1-N1-D12
cggctcgagcggctcgaggttgagaactaagaaggagaagcggatggcttcctcaatgatctcttccccagctgttaccactgtcaaccgtgccggtgccggcatggttgctccattcactggcctcaagtccatggctggcttccccaccagaaagaccaacaatgacattacctccattgctagcaacggtggaagagtgcaatgcatgcaggtgtggccaccagttggcaagaagaagtttgagactctttcctacctgccagaccttgatgatgcacaattggcaaaggaagtagaataccttcttaggaagggatggattccttgcttggaattcgagttggagcacggtttcgtgtaccgtgagcacaacaagtcaccaggatactacgatggac

SEQ ID NO: 32959 - DNA, 406 bp, Glycine max
  Clone ID: LIB3138-011-Q1-N1-D2
gtcacaacttcattttttttcgtgtaataatctggaaatgcaggaagcttatcttgtcaatctggtaaatgtgttacgagaattgtatttgcacagtccagaggaagctcgccaattgagaaggaaagctctctctcgtattgaatggctgcaaaaagctgatgtgcctaccataacacagattgaagagtgccattcaatgcagaggatgatgaatgctcctgattcaaatgataatattgatttactgttgagcattgatttgttgggtttacaaggagcaagtaaagcttttccaaacaaaattgtttttgatgataagcttgtgttggctaacacacaataattctttgatggaaattttccagaggattcttggttaccaatttttgtgaattgtctttat

SEQ ID NO: 32960 - DNA, 404 bp, Glycine max
  Clone ID: LIB3138-011-Q1-N1-D3
cctactggagatattactgctgttagaagaacagcacaattcttcggtaacagttttgaagagcgcctggctgtacaaaggcaagagagagaggaagcaacaactgaacttggattcaaaaaaccattaagcaaggaggaaaaaataaagaagaaaaagcaacgtctggctgctattggtgaagatttattatctattgcagcagaccagcccttccgatttcctgctacattcacatttgttgttagagccttctcagtgttggatggcattggaaaggggcttgacccacgttttgacatcactgagattgccaaaccttatgccctggagttgctcaagtttcgtgaagctggggttgaagttgtcctaaaggacttcaggaagagatgggatagacaatc

SEQ ID NO: 32961 - DNA, 327 bp, Glycine max
  unsure at all n locations
  Clone ID: LIB3138-011-Q1-N1-D4
agcttttccaatcattattgtttttgatgataaccttgtgttgccgtaacacacaaaaattctgcgatggaaattttccagtggattcttggttaccaattcttgtgaattggctttatcctgtaagtcaattaccttcagaagctgtcgttgtaaatgctacatgtggcagttgtcgtcgcttattgtttctctattttttaacaaataccttcaagacaaagcattttttgcatttagtggacaaaattagaaccccattccttggaattgatcttcccattagaggtattnntccttctcttagatttccaaacttttatgcct

SEQ ID NO: 32962 - DNA, 388 bp, Glycine max
  Clone ID: LIB3138-011-Q1-N1-D5
ctgcaacaaccatggagttgtttccgagcatcatcaagcaacggaacccaactactgtggatttcctatctccccagagtgcttatcctcaccactcagaggttccaaccatggtcaaatcaagtgcatttaagtctatagagaaggagcctaaagctgctcagttgacaatcttttatgctgggcaagttgttgtgtttgatgattttcctgctgaaaaattggaggagataatgtcattagccggcaagggaatatcccaaagccaaaacacctctgcatgtgctcacactcataaccagcaagggaatcatccttcctttgttcctaatgtctcccctcaagcaccgtccagaccaattgtttgtgaactgccaattgctaggaa

SEQ ID NO: 32963 - DNA, 394 bp, Glycine max
  Clone ID: LIB3138-011-Q1-N1-D7
ctcgagccgctcgagccgctcgagcggctcgagcgccagttgtgatatttacaccatctgctctcaagactgtgaattgtggaatcctgcttgcacaaaagcaatgactatgtcatttaatccaaacccgtgttctgatgcatggagtttggaatttctgaagcgtactggatttcattgcgatatcatttgtgtcactggatggactgccaccccaatgcaggatgttcaggttacaattgattggtttatttcctctcaggaatgtgttcccaggacctattgtgttttaaatccacaaaatccttttgtgttaaataggtggatgggaaaattgactttcccccagggcacttcccgaagtgttaagagaatgcctctttctataggggga

SEQ ID NO: 32964 - DNA, 390 bp, Glycine max
  Clone ID: LIB3138-011-Q1-N1-D8
cgtaaatgtgttacgagaattgtatttgcacagtccagaggaagctcgccaattgagaaggaaagctctctctcgtattgaatggctgcaaaaagctgatgtgcctaccatagcacagattgaagagttccattcgatgcagaggatgatgaatgctcctgattcaaatgataatattgatttactgttgagcattgatttgttgggtttacaaggagcaggtaaagcttttccaaacaaaattgtttttgatgataagcttgtgttggctaacacacaagaattctttgatggaaattttccagtggattcttggttaccaatttttgtgaattgtctttatcctgtaagtcaattaccttcagaagctgtcgttgtaaatgttacatg

SEQ ID NO: 32965 - DNA, 401 bp, Glycine max
  Clone ID: LIB3138-011-Q1-N1-D9
ggaaaattgactttcccccagggcacttcccgaagtgttaagagaatgcctctttctatagggggaggagctggtgcaaagaatgctattctcatgaatatgccaaatgctgttctttcaatgtggagatattttgttggagatctcgtctttgaagtttctaagatgacttctccctacattaaatgtacagtctctttcttcatagcatttggaaatttggctgatgataccatcaattttgaggcttttccccacaagctggtgcagtttggagagattcaggaaaaagttgtattgaaattttcacaagaggaatttcttacagcttggtcaactcaggtgcgtcctgcaacaactctgttggctgatgggtgtccatatttgtatgcaatggtgca

SEQ ID NO: 32966 - DNA, 404 bp, Glycine max
  Clone ID: LIB3138-011-Q1-N1-E10
ttcttgggaaggtttgtgttcttcaacttccaaagggagaacgtggcaaagcaagtgcctgagcagaacggcctcacacactttgaggctggtgatacacgtgccaaggagtatgtcagcctcctcaaatccaatgaccctgttggattcaacattgttgatgtcttggcttggggctccattggccatgttgttgcttactacatcttggccaccactagcaatggctatgaccctgcattctttggctgatttaatttcatcatcatgttgttccaactgtgtttcttgcttactttttagtatgtaatgtaatcaatgtcatgatgtataggttctctctaaagatccaacaagttcagcatatgctaatttgatcactattttcggctgcaatttggttt

SEQ ID NO: 32967 - DNA, 363 bp, Glycine max
  Clone ID: LIB3138-011-Q1-N1-E12
aggatagataggcctcagaagcagaacaacaatggccactgccactgtttcaatttcaacactatgcgctaccttcggaacccattgcgccatttcccacgaccctaaacctcttttttctcaacctttcagtctcaatcgctttccttctacctcttacaagctcactttatcgcctcgctcacctatttcaacccttcctaaggtctctgaatccgcggttgccgaaaccgaaaccggttcgtccgagcccgaaccggaccaaattgtcccggctcagccttcctcctgggaacccggtctcttcgctgtcgtaatgattggtggacgccaatatattgttcacccggggcgacatcttac

SEQ ID NO: 32968 - DNA, 407 bp, Glycine max
  unsure at all n locations
  Clone ID: LIB3138-011-Q1-N1-E2
ccgaanagaaaagaaaagatgtttgagccacaacagctatacactggcgcgaagaccgaggaattcgacctctaatcaggagaaaccctctacccagggctgagcgtcggcgagaaccagctccgatggggtttcatccgcaaggtctacggcatcctctccgcgcagatcgtcctcaccaccctcgtctccgtcaccaccgttttctatactccaatcaatgacctcctcaagggcaattccaccctcctcctcatcctcctcttccttcccttcatctttttgattcccctgttgaagtaccagcagaagcatcctcataattacatcttgcttgcactcttcaccgtgtcgatcagttccaccatcggagtcacctgtgccaacaccgacgggaaaattgtgct

SEQ ID NO: 32969 - DNA, 376 bp, Glycine max
  Clone ID: LIB3138-011-Q1-N1-E3
gttggaggaaccattctgcgtagtgatctattggcaaattttttggcagagggcaattttagagcaagtgttgatttgcagcgcactcatcgtattagaggaatgattaaaatggtggccacagttggtattcctgagaatacaggtatatcattggcctgtgctatgaatagttcttttagggggcgcgccagttctgatatttacaccatctgctctcaagactgtgaattgtggaatcctgcttgcacaaaagcaatgactatgtcatttaatccaaacccgtgttctgatgcatggagtttggaatttctgaagcgtactggatttcattgcgatatcatttgtgtcactggatggactgccaccccaatgc

SEQ ID NO: 32970 - DNA, 423 bp, Glycine max
  unsure at all n locations
  Clone ID: LIB3138-011-Q1-N1-E4
acctcgaaattcggttcgagcttctttttatcacatttttcttacaagatggcagcatcatcagcgtgccttgtagggaatggtttatctacacggggtaataaaataactcttaaaaaggacttcaatggaagaagatatctctactcatcttggagattntcattattgaacaacaataaggcatcaaaagcattttccataaaggcatctttggagcaaaggcaagaagaagggagaagggggtttctgaaactgttgcttggaaatctgggagttggtttgcctgcactattgggaagtggcaaagcttatgctgatgaacaaggggtttcatcctccagaatgtcttactccaggtttctggagtatttggacaaggacagagttaaaaaagtggatctttatgacaatggaaacact

SEQ ID NO: 32971 - DNA, 126 bp, Glycine max
  Clone ID: LIB3138-011-Q1-N1-E5
gttggcaattggaaaaaaagatgttgggggagttgaatgtggaatcccttctggatttccgctcacagttattggcaatagcatttttaatgaggaggctccattagaatataggctatggaaaaa

SEQ ID NO: 32972 - DNA, 341 bp, Glycine max
  Clone ID: LIB3138-011-Q1-N1-E7
gttctgagtgggcaaatcaaacttcatggcatttgagtttccttattgacaatcccaaacagtctacagtttttgatattctcttgggaatctctcaagattttgaaattgctggtaatactcttatgccagctttttctgttccacaggctactgccagatcttctgaaaatgcggaatcctctgcatgatctggaatttgtgttttctttcgcttgttcgtttgtttaattcaataaaggaaattaggcatgaccctcttgttgagtatgctctgcctatttgaaaatttccacacctcttttaattgtcgtaatgatgtgtgaagtgtgtgttatttt

SEQ ID NO: 32973 - DNA, 365 bp, Glycine max
  Clone ID: LIB3138-011-Q1-N1-E8
gaggacaaggcttttttatggccacaacttcattatgtttcctgtaatactctggaaatgcaagtaccttatcttgtctatcttttaaattctttacaagttttgaatttgctcatactactcttatctcacctatttctaatgcacacgctacttccaaatctattgaaaatgcaagatactctgcctcatctgcaatttagtgtatctttcacttgatcctttgtttaattcaataaacgaaattaagcattacccttttgttgagtatgctcttcctatttgaaaattttcacacctcttttaattgtccttatgatgtttgaagtgttttttattttaaaaaaaaataaaaaaataaaccc

SEQ ID NO: 32974 - DNA, 336 bp, Glycine max
  unsure at all n locations
  Clone ID: LIB3138-011-Q1-N1-F1
gaataaaaaaaactaatcncttcctccaattctccaaatccaataagctctgtatttacttttatccctcctcctacacaatcntcatctttatctttnttaatcatatttttttttaactttcacaatttttcatgcattttcattaaatatctattatcttttttttaaattttttttattttatactccttttttacttaaattattttctatttttacaaattttattaattttttccatttttttattcttataatttttaattataatttcttttttttttccaattttatttataatttttttataatttatattttttttttttttat

SEQ ID NO: 32975 - DNA, 399 bp, Glycine max
  Clone ID: LIB3138-011-Q1-N1-F10
gggtacactagacaacttagaattagaatggatgcatttaggagaaagttgggtaacactggaaaagatagtagaatcttgcgttaggtagtttgagctgatgtggaaaagactgtaaaagctcttgtaaagggagcagatcaaatggaggaaagtccaatagttagaggtagaaggggccaagacaaactataatttaagaaggacttgatttaaatggtttgtcattagacatgatccacatcaattgatccatgtagctgatcccacttagtggggaaaaagtttttttccccatgttgttgttcaatagaaagaagctaaggagtgaagttagaaataagtatttaagttatgcttggttatgaatattgctttttgtcaacctttataaatgat

SEQ ID NO: 32976 - DNA, 285 bp, Glycine max
  unsure at all n locations
  Clone ID: LIB3138-011-Q1-N1-F12
aaacagtctacagtttttgatattctcttgggaatctctcaagattttgaaattgctggtaatactcttatgccagctttttctgttccacaggctactgccagatcttctgaaaatgcggaatcctctgcatgatctggaatttgtgttttctttcgcttgttcgtttgtttaattcaataaaggaaattaggcatgaccctcttgttgagtatgctctgcctatttgaaaatttccacacctcttttaattgtcgtaatgatgtgtgaagtgtgtgttntttt

SEQ ID NO: 32977 - DNA, 408 bp, Glycine max
  Clone ID: LIB3138-011-Q1-N1-F3
ctgatttccaacaatctggcagttgcccctttatttgattgtgtggcacatctaaagtgcccaaatttgaagctgtgctttggtcacataagaatgaaaacaaatctgaaaaattattttcagagagcatcagctcggaagcttgtagtaaaaatgaccgaattttaccctcaaactgatttgaattcagaagtatagactgtctgagaggaagcttcaacgatatatttggaattgcaccaatgagataattggaagacatatttaacaatcccatattttgcaacttattccaaaaccagtctggtacagagtcattaatcccgttatcagaaatatcaaggatatacaaagaactttgagtcttgagccaactttgaaaagtggggcccaacttgcaagatctgt

SEQ ID NO: 32978 - DNA, 323 bp, Glycine max
  Clone ID: LIB3138-011-Q1-N1-F6
aaataaaatactctgtttcggtgcttcactcttctgcaaaccatgaccaccactaccaaactccaatctatattacgcacagtgcacacacattaaatatttaataataattcccctcacattttcccagaaaaataagaattccaatcttgtcctttgggttcatttttttatgcgaatgttcgctaccaatgccacgagcaacctcttcttcccctgcagcccttcgtccttccggtgccgcgccgccgccggagacctctccgcgggcccctccttcatccagtccgtcgccggcggtctaagaattggccagttccccg

SEQ ID NO: 32979 - DNA, 381 bp, Glycine max
  Clone ID: LIB3138-011-Q1-N1-F7
atgaatatgtcaagccttactttagtggttctaaattgaaaggctttctagctagtcataacatcaccattactgatggtattgacaaaactagtgcaactttgcaatttagaaagttagcagattgtgattttctcaagagaaactttaagcagatgtctaatgttttgtgggtggctcctgaggacaaggcgagtttatggtcacaacttcattatgtatcgtgtaataatctggaaatgcaagaagcttatcttgtcaatctcgtaaatgtgttacgagaattgtatttgcacagtccagaggaagctcgctcattgaaaaggaaagctctctctcgtattgaatggctgcaaaaagctgatgtgcctaccatagcac

SEQ ID NO: 32980 - DNA, 338 bp, Glycine max
  unsure at all n locations
  Clone ID: LIB3138-011-Q1-N1-F8
caatcggatttcgatgctgcaggtggtgtcggagctgaacatggacgacgggagcgagacgttcgggattccgaagcagattgtgatatacgacaaagagacgctcttagaccggcggaactgggaggcgctgaattttccggtgatcgcgaagcccttggttgccgacggcagcgcgaagtcgcacaagatggcactggttttcaaccacgacgggttgaattcgctgaagccgccggtggtggtgcaggagttcgtgaaccacggcggggtgatcttcaaggtctacgtcgtcngcnagcgcgtgaggtgcgtgaagcggaagtcactgccggacg

SEQ ID NO: 32981 - DNA, 161 bp, Glycine max
  Clone ID: LIB3138-011-Q1-N1-F9
caatctcatttttatcctacaagtagtgtctaaacttaacatgtacttcttctacgagactttcaacattccaaaacatatttttatatactacaaaaatactctcttatactctcttaacttataggctcttaattctcctttaatttctaatccctttt

SEQ ID NO: 32982 - DNA, 171 bp, Glycine max
  Clone ID: LIB3138-011-Q1-N1-G1
taattctgcttgagcattaacaccctttttctgcttaaattggcacaccaccaatttgcgttgtaacccgaaccaattaaacataaaaagagttcaattttgtgaaaattattaccattcattcttattcatcaacgttcccccttcttgtcccacttccaaatcttcttc

SEQ ID NO: 32983 - DNA, 399 bp, Glycine max
  Clone ID: LIB3138-011-Q1-N1-G10
agaaaagatggcgcggttgatcacagtggtgtggtgcgcggtggcggtgctactgtgcgccgcggcgggcgcgtcgtgggtggaggaggcggcgaacccgatacgaatggtggcgggggtggaggcggaggtggttcgggtgatagggcagtgccggcgcgcgctgaagtttgctaggttcatgagcaggttcgggaagagttaccgaagcgaggaagagatgagggagaggtacgagatattctcgcaaaacctcaagttcattcgctcccacaacaagaaccgcttgccctacactctctctgttaatcattttgctgattggacttgggaggagttcaaaagacacagactaggcgctgcccaaaattgctctgccactcttaacggcaaccacaa

SEQ ID NO: 32984 - DNA, 401 bp, Glycine max
  Clone ID: LIB3138-011-Q1-N1-G11
attatagactatctttatataataatataaataagaataaaggaattaaaaaaaaaaaaaaaaaaaaaaaaaaaaaaaaaggattctatttaaatttaaaaataatatatttaaggtacaaatagtaaatcgaggtacccattttatgataaactttccttccatttttgttcctctagtaggcctagtatttccggcaattgcaatggcttctttatttctttatgttcaaaaaaacaagattttttagatacagaaaacaaagtaaaattctggggttttttattccccaattataatactaaattcaaaaaaaggagagtaatgagtataatctttcgctcaaacgatgtactgatatattctatggcggaggttcgaagaacaagcaatttattttg

SEQ ID NO: 32985 - DNA, 365 bp, Glycine max
  Clone ID: LIB3138-011-Q1-N1-G2
taatcaatgagttctgcagagcataaataaattactctttcatgggtgattacaggggctactagggtatggcaaacgcagatcgcagctcgtgttttgtaaaagagctttcggattatgtagaaaaagatgtgtttttttctgtctggccgattttgtacaaattttaaacaaagtaaaaggttacctatccgcacttttattttttattttgctgctgttgttgcgatatctcttgtcttcctctgtcgtatatagtcacaacggaattacatgacattatggaaggctcttcatttagtcttttagaatgagtacccaataaccgactttcttttaagtacacacagtgcattttagtttgg

SEQ ID NO: 32986 - DNA, 60 bp, Glycine max
  Clone ID: LIB3138-011-Q1-N1-G3
ccccttccccccttccttaacctcgaaattcgcctcgggaaaaaaaaaaaatatattttt

SEQ ID NO: 32987 - DNA, 264 bp, Glycine max
  Clone ID: LIB3138-011-Q1-N1-G4
tgaattcctgctatattgtctgagtttgctgaaattccaggtgagaaccgtgtccctccttcaactccagtaccagccactgtttgaatagcctatatgtaacatctttaatatgtattatcttagaatacagaatgccctctacagcctgctccatatttgtgaatgattaaagtttctaccttactttttcatttttgtagtgttgacaaatgacaacagagagtatatataaaagagaattaagtgtaaaaattactagtt

SEQ ID NO: 32988 - DNA, 306 bp, Glycine max
  Clone ID: LIB3138-011-Q1-N1-G5
gtcttgcaattgaagttgaagtcttgcccttctctcttcaactgcggggacacaagacatcatcatccatggctgcctccgtctccactgtcggagctgtcaacagagctcttttgaacctgaatgggtctggacctggggtttcagctcccagttcatccttctttgggagcagcttgaagaaggttattggctcaagggtccccaacacaaagatttcctctggaagcttcaagattgttgctgtagaagagaagaaagagattgaagagacccagcaaaccgacaaggacagatggaagggtc

SEQ ID NO: 32989 - DNA, 395 bp, Glycine max
  Clone ID: LIB3138-011-Q1-N1-G7
cattaacacccgattctgcttaaattggcacaccaccaatttgcgtgggaacccgaaccaataaaacaaaaaaagagtccaattttgtgaaaattattaccattcattcttattcatcaacgtccccccttctgtgcccacttccaaatcttctcctctcgctatgggttgtggctcctcccttccagatagggattcaaggcagttgggtcgacccaattccgagaatggtggagggcaggacgccaagaatctaagggtcaagcttgttctcttaggtgattctggtgttggcaaaagctgtattgttctacgatttgttcgtggtcagtttgatccaacatctaaggtaactgttggagcttcttttttgtcacaaacaatagctctgcaag

SEQ ID NO: 32990 - DNA, 331 bp, Glycine max; identical to SEQ ID NO: 32665
  Clone ID: LIB3138-011-Q1-N1-G8

SEQ ID NO: 32991 - DNA, 372 bp, Glycine max
  Clone ID: LIB3138-011-Q1-N1-G9
tttgatgcatgtaagtggacaaaatcagaaccacattcctgggaattgatcttcccaatagaggtatgtggtcctaataatggttttgaaatgtggagttctgagtgggcaaatcaaacttcatggcatttgagtttccttattgacaatcccaaacagtctacagtttttgatattctcttgggaatctctcaagattttgaaattgctggtaatactcttatgccagctttttctgttccacaggctactgccagatcttctgaaaatgcggaatcctctgcatgatctggaatttgtgttttctttcgcttgttcgtttgtttaattcaataaaagaaattaggcatgaccctcttgttgagtatgctc

SEQ ID NO: 32992 - DNA, 400 bp, Glycine max
  Clone ID: LIB3138-011-Q1-N1-H10
ggctgatgataccatcaattttgaggcttttccccacaagctggtgcagtttggagagattcaggaaaaagttgtattgaaattttcacaagaggaatttcttacagcttggtcaactcaggtgcgtcctgcaacaactctgttggctgatgggtgtccatatttgtatgcaatggtgcatgatagttcagtgtctacaataccaggtgattttgtcattggtgtcaagttgacaaccataaacaatatgtgtgcatatgggctcaatcctggtatttcaagttctcgtcttttgggcaccattcctcagtccatttcacagcaaactgtttggaatcaaatggcaacagtgagaacaccattgaattttgattctagcaagcagagcttttttcagttt

SEQ ID NO: 32993 - DNA, 358 bp, Glycine max
  Clone ID: LIB3138-011-Q1-N1-H11
aaggaaagcttgaggatgctgtgaattatggaacaaaggcaggagctaagatgatggctgtttgtggaccctttcatcaaaatactgcaagtgcatatagtcttctagctgtggttctctaccacactggagattttaaccaggccaccatctatcagcaaaaggccttggatataaatgagagggagctagggcttgaccaccctgacactatgaaaagctatggggatctttccgtcttttattatcgtctgcaacacattgagttggctctgaagtatgttaatcgtgctctattccttctacattttacatgtgggctgtctcatccaaacacagcagctacttatataaatgt

SEQ ID NO: 32994 - DNA, 357 bp, Glycine max
  unsure at all n locations
  Clone ID: LIB3138-011-Q1-N1-H12
tgcttggcggggataagattaaagattcaacaatggcctctgcttctgctactcttctcaagtcatctcctgttcttgacaagtgcgagtgggtcaaaggccagacccttcgccaacctctcgtgagatgtaacccttcctcagcatcagctctcaccatcaaagctgcttcctatgctgacgagctcgtcaaaaccgccaaaacagtggcctcaccggggcgtggtattttggcgatggatgagtcaaatgcaacctgcgggaagcgtttggcatctattgngttagagaacacagaagctaatcggcaggcataccgtaccctacttgtgacagtacctggtcttggtgaataca

SEQ ID NO: 32995 - DNA, 291 bp, Glycine max
  Clone ID: LIB3138-011-Q1-N1-H4
ctaactgttcctatcccctctgccttcaattttgccactgactgggtgttaaagggaaaaaaatattactaaaaagtagaacaaaatcccaaatacgcagtcagtggcaaaattgaaggcagaggggataggaacagttagcgcgaaccgtgatgttggcacaggtgcgcgtattatagcattagagcttgttgataccactggtgcaggtgatgcattcattgcagctgttatctatgctattagtgccaagtttacaccagagacaatgctattctttgctgctaatgt

SEQ ID NO: 32996 - DNA, 343 bp, Glycine max
  Clone ID: LIB3138-011-Q1-N1-H7
caaaattggtattgttggcagaacaggcagtggaaagtctacgcttataggcgccttattccgtctagtggagccagcaggtggaaaaatcattgttgatggaatagacatttgttctattggacttcatgacttgaggtcacgctttggtattatacctcaggatcctactctttttaatgggacagtcagatacaatttggaccctttatctcaacactctgatcaagagatatgggaggttctagggaagtgtcagttgcaagaggctgtccaagagaaagaagagggattagactcttcagttgttgaagctggagcaaactggaacatgggacaacga

SEQ ID NO: 32997 - DNA, 380 bp, Glycine max
  Clone ID: LIB3138-011-Q1-N1-H8
cactcataacacaaagcacaaagcaaagctcatccttgagttaaaaaatggcagcagcttcttccatggctctctcatccccatccttggctggcaaggccgtgaagctgggcccatcagccccagaagtgggaagggtgagcatgaggaagaccgtcaccaagcaggtctcctcaggaagcccatggtacggcccagaccgagtcaagtacttgggcccattctctggcgagcccccgtcctacctaaccggtgagttcccaagcgactacggctgggacactgctgggctttccgcagacccagaaaccttcgccaagaaccgtgaactcgaagtgatccactccaggtgggccatgctcggagccttgggctgcgtc

SEQ ID NO: 32998 - DNA, 107 bp, Glycine max
  Clone ID: LIB3138-011-Q1-N2-A1
ctacaacggcgattcttgtgatggcacaatgtccttatcaaagaggtacactttcttaaagaagaacctagatttttgtgtggctgggggcgcgtgccatggaagtt

SEQ ID NO: 32999 - DNA, 294 bp, Glycine max
  Clone ID: LIB3138-011-Q1-N2-A10
ctaagctcgaatcggctcgagtgcaatccaaacagtctacattttgatttctctgggaatctctcagatttgaaattgctggtaatctctatgccacttttctgttcacaggctctgcagatctttgaaaatgcggatcctctgcatgatctggaattggttttctttcgcttgttcgttgttaattcaataaggaaattaggcatgaccctcttgttgagtatgctctgcctatttgaaaatttccacacctcttttaattgtcgtaatgatgtgtgaagtgtgtgttatttt

SEQ ID NO: 33000 - DNA, 472 bp, Glycine max
  Clone ID: LIB3138-011-Q1-N2-A12
aagatgagaagggaacagcaggagggatgccgagcttcaattcacaattgcccaattccgatgcgtgctatacagagggaagcacaattgattctattggtgtgtctgactttgatcaatcagttggatatcgcatagaggatgttgttgccttgaggggaaactcagttcttgactcactaagtaagtagccaaacaatttctcgggttcctgttcaagttgattcctttgataagttaccaacttcactcgataaaaacccattaacaaaccaaacagagtgacaaagtttgcaattacaaaaggttcaattatcaaatctggtcagtggtgatacggaacaccaggaagagtctgccatggctgacgccagtcctagaactgatatttctacagatgttgacacggatgataagaatccacggcttgatagaagtcagtcccttgttgctgtggcttctgactccagtg

SEQ ID NO: 33001 - DNA, 129 bp, Glycine max
  Clone ID: LIB3138-011-Q1-N2-A2
ctacaacggtgatttctgcaagggcttttcccccttctgaaacagcttcactttcttaaagaggtagatagatatttctgtagttggggtggctagcaatggaaggtttgcttcccaaactttcttctt

SEQ ID NO: 33002 - DNA, 422 bp, Glycine max
  Clone ID: LIB3138-011-Q1-N2-A3
cttggttaccaatttttgtgaattgtctttatcctgtaagtgaattaccttcagaagctgtcgttgtaaatgttacatgtggtagtggacgtggtggtttacccaccactgcttggattagttctgcagttaacaatcgctcctcagatatcaacaaatggattcgcacagcacttgggaaaggtaagaaaattgtttttcttactagagttgatcctttttcagtagctttactggctgttctttttggcgttaagaatgaaattctgagttctaacgccactaatcctatgctgacgcgacttcttgagaactgtaagagtctcaaatatctggttgatgagagtccttttgcattgtgaactagtatgtagtattttattcacttaaataaaagcgcatactatgtgcaatgagtgtgt

SEQ ID NO: 33003 - DNA, 122 bp, Glycine max
  Clone ID: LIB3138-011-Q1-N2-A4
gagaatcgcaagagcaaaggaaagcccttaggcattaatgagaagaagaagaaagcttttagggttgtagagaaacagcaaatagagtctgccccttttgctgcagagtcattttcagaact

SEQ ID NO: 33004 - DNA, 131 bp, Glycine max
  Clone ID: LIB3138-011-Q1-N2-A5
gtcacattctctctcttctattctaattctgatttctatctctctctacaaattccaaaaccctccccccttccaattccaattattcttttaccatgggttttgaaggttcccctgtctccgggaaaggg

SEQ ID NO: 33005 - DNA, 468 bp, Glycine max
  Clone ID: LIB3138-011-Q1-N2-A6
ggagaagaagagaatcataagaaagcaagaaagaaaatgggagtggagaagcagttgttgaggcctggcaccggtcccaagccaattcccggtcagaacgtcaccgttcactgcactggtttcgggaagaacggtgacctttctcagaaattctggagcaccaaggatcctggccaggaccctttcactttcaaaatcggccaaggttctgttatcaaaggatgggatgaaggtgtgcttggcatgcaaattggtgaagttgctcgtctccggtgctctccggattatgcttatggtgctggtggctttccttcttgggggatacagcccaactctgtcttggaatttgaaatcgaagtcttgagtgcacaatgaaaaccttggtagtctgtctctgtcctaagaataaaatcatcatccatttccatggacttgtattatggtatccccactttgtgactcgtgagt

SEQ ID NO: 33006 - DNA, 249 bp, Glycine max
  Clone ID: LIB3138-011-Q1-N2-A7
gaaattccgagagactgcacctggagataatcttagagttatatatgaaacactaagcaaggatccaaatagtctagccaacttggatcaggatcttcctaattatgctcagcataccgtgcctattttctctttgccacaagagtggctatggtgtgaatcatggtgtggtaatgctacaaaatacaaggcaaaaaccattgatctgtgcaacaatcccatgacaaaagaacccaaactgcagggtgc

SEQ ID NO: 33007 - DNA, 357 bp, Glycine max
  Clone ID: LIB3138-011-Q1-N2-B1
taaaaggggaaaacaaaaactgtgcattcaattcgattgattcacaaatagcaactccttttcctaatcaacacgaacacaacacacacagagaaagatggattttgaactgagaagagcgagagagaagcttgagaaagagcagagggagaggaaggaaagagcaagattgaagcttctgaaggaaaagaaggccaaagaagaagctcaaaagcaaaaagaagccatcgaagctgttcaaagatctcgtcgtattgatgcccgccaagctcaactcaaggctgaccaacagattgcagaaaacctacttgcttgcagaggaatagtgttttaccgactactagaagctttttttta

SEQ ID NO: 33008 - DNA, 459 bp, Glycine max
  Clone ID: LIB3138-011-Q1-N2-B12
gagcgttttccttttctttttaattttttctttggttaagcttaagcaacaaccgtcaccaagcacacgcgcagacgcaagctctttaaacggtggagaacgtgaactgaaccacttcaaagttcaaacccagattttgcaacaaaataagcacgccacaactcacctccactttgcttgagggttatattctattctataaggggaagctcaacttcttcctccttgtcgcatacatagatacatgggttcggcaccagaagtgttggctcagagaagttgtggaaagctcattgggactcggttcctacagtacttgaatggaggtcctctctccttcaaaacccaccaagccatcgttctgattgtaacattttttgcttatgctagttaccatgccaccagaaaaaccacaagtattgtaaagagtgtccttgatccccaatcatcagctatagg

SEQ ID NO: 33009 - DNA, 419 bp, Glycine max
  Clone ID: LIB3138-011-Q1-N2-B2
aatttttgtgaattgtctttatcctgtaagtcaattaccttcagaagctgtcgttgtaaatgttacatgtggtagtggacgtggtggtttacccaccactgcttggattagttctgcagttaacaatcgctcctcagatatcaacaaaaagattcgcacagcacttgggaaaggtaagaaaattgtttttcttactagagttgatccttttccagtagctttactggctgttctttttggcgttaagaatgaaattctgagttctaacgccactaatcctatgctgacgcgacttcttgagaactgtaagagtctcaaatatctggttgatgagtgtccttttgcatttgtgaactagtatgtagtattttattcacttaaataaagcgcattactatgtgcaatgagtgtgtttaaat

SEQ ID NO: 33010 - DNA, 422 bp, Glycine max
  Clone ID: LIB3138-011-Q1-N2-B3
cagcaacccatcggaatattccctttcttcgttttgagtcactggacggcatggccacttccaatggcttcgtcgacggcacttctccggaatccgcattgatctttctcggcagcggttgttcgagcatggttcccaacgtcatgtgcctccttcagccttctgaccctccctgccccgtctgcgtccagtcattgtctatccctcccgaacgaaaccctaattacaggtgcaatacgtctctcttaattgattactgcggcgacgccaacgctggtgatcgtaagtatatattgatcgacgtcggcaagaccttcagggagaccgtgcttaggtggttcgttgcccatcggattcccagagttgattctattattttaactcatgaacatgccgatgcaacccttggattggatgatgta

SEQ ID NO: 33011 - DNA, 52 bp, Glycine max
  Clone ID: LIB3138-011-Q1-N2-B4
tatttattctagaaaagaaagttttttacgttaaataaatgatatcttgtat

SEQ ID NO: 33012 - DNA, 466 bp, Glycine max
  unsure at all n locations
  Clone ID: LIB3138-011-Q1-N2-B5
ccgctacataaagtctttcctctgcctcattattttactcttgtctccccagcattcatattaatatcatgcccttcttctgcattcaaaccttcattttgtagtgggtggggggttcttatttctctggcggtccattgatcgggaagggaggttccaccggcggtcttggttcttcttcggtcttgggaattcgaagggccgcttcctcttttgattttcgaactgcctacggaaacttcgttatggtaaagtatattccccaaccgttcaatcctttccctctttttaattaattaaattatactaatnaattcctgatttttcgaaaaaaaaaaataaaattgggccgggctgagaagaggtggcacccggacaagtgggctcagaatcctgcaaccgctggcgaagccaagcggcggttcagcaaatccaagaagcctactcagcagttctctccgatcag

SEQ ID NO: 33013 - DNA, 167 bp, Glycine max
  Clone ID: LIB3138-011-Q1-N2-B6
cttcaaaatatggctctaacacttcgttcttcaacttcttttattaatcagaaggaaaccaaagtccttaaaacttctgatgatatccctgcgacagttagtttttcaaaattcaagccattggtccgtctccgggcgaaaaattcaatgcaagaagcgcatcacac

SEQ ID NO: 33014 - DNA, 103 bp, Glycine max
  Clone ID: LIB3138-011-Q1-N2-C10
ttcggttcgaggtgtgaagtgtgtgttatttttaaaaaaaaaaaaaaaaaaaaaaagggaaagaaaaaagggaggaggcaaaatagtgagccggaaaaccggg

SEQ ID NO: 33015 - DNA, 213 bp, Glycine max
  Clone ID: LIB3138-011-Q1-N2-C2
ccagcaatttctgttccacaggctactgccagatcttctgaaaatgcggaatcctctgcatgatctggaatttgtgttttctttcgtttgttcgtttgtttaattcaataaaggaaattagacatgaccctcttgttgagtatgctctgtctatttgaaaatttccacacctcttttaattgtcgtaatgatgtgtgaagtgtgtgttatttt

SEQ ID NO: 33016 - DNA, 444 bp, Glycine max
  Clone ID: LIB3138-011-Q1-N2-C3
caaactgtttggaatcaaatggcaacagtgagaacaccattgaattttgattctagcaagcagagcttttgtcagttttctattgaccttctcggtggaggaatcttagtggacaaaactggagattggatcacacttatacaaaattctccaattagtaacttattgagagttgctgcttggaagaaaggctgtttaatggtcaagattgtgatgtctgggaatgcagcagtcaaaaggagtgattgggcctcattggtacaagtgtttttaacaaacagcaacagtacagagcattttgatgcatgtaagtggacaaaatcagaaccacattcctgggaattgatcttcccaatagaggtatgtggtcctaataatggttttgaaatgtggagttctgagtgggcaaatcaaacttcatggcatttgagtttccttattgac

SEQ ID NO: 33017 - DNA, 461 bp, Glycine max
  Clone ID: LIB3138-011-Q1-N2-C4
ggaaaaagttgtattgaaattttcacaagaggaatttcttacagcttggtcaactcaggtgcgtcctgcaacaactctgttggctgatgggtgtccatatttgtatgcaatggtgcatgatagttcagtgtctacaataccaggtgattttgtcattggtgtcaagttgacaaccataaacaatatgtgtgcatatgggctcaatcctggtatttcaggttctcgtcttttgggcaccattcctcagtccatttcacagcaaactgtttggaatcaaatggcaacagtgagaacaccattgaattttgattctagcaagcaaagcttttgtcagttttctattgaccttctcggtggaggaatcttagtggacaaaactggagatgggatcacacttatacaaaattctccaattagtaacttgttgagaggtgctgcttggaagaaggctgtttaatggt

SEQ ID NO: 33018 - DNA, 282 bp, Glycine max
  Clone ID: LIB3138-011-Q1-N2-C5
gcccatcctagagctcataactagagaagccttgtaggtctggctacgggagaccataatgaacggcttcaaaaaacatggggcatattacatatccatctagtgagctgaaccgaactttaacactacaataacttacttgctaaatatatgtctgagaaaacccaccctaggtctgaactaaaaaccggccactacaaccgtaagagtcgccggaatctccatcaatgcgtggccagcgtcttgatcaccacctgtacattcaaggagaggcgctttcgt

SEQ ID NO: 33019 - DNA, 445 bp, Glycine max
  Clone ID: LIB3138-011-Q1-N2-C6
ctctacgacaacctcctttctctctatctctagctcggatgagtgctctctctaactccagtagtagccacggcaattccttcctcaagatgcccgccatcaagtttaccaagctcttcatcaatggagattttgttgattccatatcaggaaggacatttgagactatagaccccagaaaagaagaggtaattgcaagagttagtgagggagataaagaagacattgatattgctgttaaagcagcacgtcaggcatttgactcgggtccatggcctcgcttgccaggctctgaaagggcaaaaattatgatgaaatgggcagacctagttgatgaaaatatagaagaactagcagcattagataccattgatgctggaaagctatactatattaataaggtagcggaaattccttcagctacaaatgcgttacggtactatgc

SEQ ID NO: 33020 - DNA, 430 bp, Glycine max
  unsure at all n locations
  Clone ID: LIB3138-011-Q1-N2-D1
ctgtgtaataaacaagattttcttccttcaaaatttgcttgattggaattcgtattccgtgctttgnaaaaaaaaaaaaaaaaaaaaaaaaaaaaaaaaaaaaaaaaaaaaaaaaaaaaaaaaaaaaaaaaaaaaaaaaaaaaaaaaaaaaaaaaaaaaaaaaaaaaaaaaaaaaaaaaaaaaaaaaaaaaaaaaaaaaaaaaaaaaaaaaaaaaaaaaaaaaannggggggggcccccaaaaaagagactttctcccccgaaaaaaaaattgaaccggtaccctgaggggtaaaaaattttctaaaaaggaggggattaaaaaacgggggaaaaaaaggaaaaaactttttcctgggaaaaaattttttctcccaaaaaattcaaaaaaaaaaatggctggaaaaaaaaaattaaaaaaccggggggcc

SEQ ID NO: 33021 - DNA, 468 bp, Glycine max
  Clone ID: LIB3138-011-Q1-N2-D12
ggggagcgaagaaaagagaagagaagaagaagatggaggtgagtttatcctcaacatcatgtatacccttaagctcgaagttgaagcataagcatggccttttccactctcaaattcccattcacacagcttcaaccaaaaccagaagaaccaaacctttgtccgttgttaacgcctccagacaaaccttgtcttccaattggctcgtttctccacacgatttttctgcatccaccgcttccccatggcttcccagattcgaagagctcgacgccaccaacatgcttctccgtcaaagaattatctttttgggttctcaggtggatgatatgactgcagattttatcattagtcagcttttgtttttggatgctgaagactccaagaaggatatcaagttatttataaactcacctggtggttctgtaactgctggaatgggaatttatgatgccatgaagttatgca

SEQ ID NO: 33022 - DNA, 357 bp, Glycine max
  Clone ID: LIB3138-011-Q1-N2-D2
ctagaacttcatttttctctccctcgtcactaacttgagcgggtggcttgttggtaaaattagtactcaaatcggggttcatgcaactgctgcaaagtggttcaacctctttacaactcagtcttattatgttcaacatcttactgatagattgcatttaaccaaacttcaccaccgagaaaagtcacttttcaactagtccatcaaacactcatactttacaacaaatggtcagatctcaacatcttttatagagtaccaaattctttaatttattcctcaaaacaatcactttcagcctttttttactatatatccttatttatactaattttttaaatttattttctattcttt

SEQ ID NO: 33023 - DNA, 455 bp, Glycine max
  Clone ID: LIB3138-011-Q1-N2-D3
ggaatgattaaaatggtggccacagttggtattcctgagaatacaggtatatcattggcctgtgctatgaatagttcttttagggggcgcgccagttctgatatttacaccatctgctctcaagactgtgaattgtggaatcctgcttgcacaaaagcaatgactatgtcatttaatccaaacccgtgttctgatgcatggagtttggaatttctgaagcgtactggatttcattgcgatatcatttgtgtcactggatggactgccaccccaatgcaggatgttcaggttacaattgattggtttatttcctctcaggaatgtgttcccaggacctattgtgttttaaatccacaaaatccttttgtgttaaataggtggatgggaaaattgacttttccccagggcactttccgaagtgttaagagaatgcctttttctataggggaggagct

SEQ ID NO: 33024 - DNA, 444 bp, Glycine max
  Clone ID: LIB3138-011-Q1-N2-D5
ggagaagccggacaatgctttgggtaagatgcaactgaggagttacatgaatgggcattcccgccaaggggagcgcccatttccgtttagtgccctccggggttttgttcgatcccaccggatgcaacggaagcattacaggggactttcaaatcctcaatgtgtgcatggcatcgaggttgttccatcgcccaatcttatgagtcttgataaggatgagcggagaaagtggattgaactcactggacgagatttgaacttcacaatcccacctgaagcaagtgacttcagttcatggaggaatcttcccaacagagaatttgagctcgagagaccacttcccctgatcaagagcactcttaatccacacccaaagaagctgcttaatggatctgtgttgaatttatcaactcatctgcctagcctcagtaatggtaatgggac

SEQ ID NO: 33025 - DNA, 470 bp, Glycine max
  Clone ID: LIB3138-011-Q1-N2-D6
gagaaacaaatggcagcactgggtggctttaccgacatcaccggagcacagaacagcatcgatatcgaaaatctcgctcgctttgctgttgatgaacacaacaaaaaagagaatgcagttctggagtttgtgagggtgattagtgcaaagaaacaagtggtttctggcaccttgtactatatcactttggaggcaaatgatggtgtgacgaaaaaggtttatgaaactaaggtgttggagaaaccatggttgaacatcaaggaggttcaggaattcaagcccatcactgttgctgttaatcctctttcggtgacggtctagcacatagctaggttatggaagtgactagcttggccgcaagagtaataatatgtatgaactgaataaatgtacctattaactctacaaacggtgtggggttgtgcatgtttgccatcctatatatttcagtataaatattgccatcgaga

SEQ ID NO: 33026 - DNA, 330 bp, Glycine max
  Clone ID: LIB3138-011-Q1-N2-D7
tgctggtcaaggattcctctcaacgtctgactaaggagatactcttggaacacccttggattgttcagaatgccgagccctctggtgtatataggagctagtgcaccttatcattcttatattgtattttcttaatcggggaaatcatcaaaatagcagctgcttctaagtatttgacaacattttggttttgagatgatgcaactatttgaagtaggttgctaggttaagagaaatcacttgttatatgattgtaaaccctactccttcaagggctatataaagaataactgatgtcacttgttatttgattgtaaaccctactccttc

SEQ ID NO: 33027 - DNA, 225 bp, Glycine max
  Clone ID: LIB3138-011-Q1-N2-E1
cgaagtttgctcctgtagctggatatcactggtttgatggagatggaatgattcatggcttgcgcatcaaagatggaaaagctacatatgtttcccgttttgtgagaacttctcgccttaaacaagaagaatactttggaggctccaaatttatgaagattggagatctcaaaggtctattcggacttttaatggttaacatacatatgctgagaactaaatgga

SEQ ID NO: 33028 - DNA, 420 bp, Glycine max
  unsure at all n locations
  Clone ID: LIB3138-011-Q1-N2-E10
cgagaatggcagaagacattgggaaaagcaacctcgaatcctttttgcttcaacaacttnccgaggcgtctggccttctgtcttacgttggatcccctctttcaccgatcacatcatcaatgcttgaaaacgccttctctctcttgtcaagactccgtatgctcaaaaacacgtcaatatatgttccggtccacctgtttccaaagttagatggttccgctcatctagcaatgaaccacggtttattaacacgggtacatttgacagtaaggatgattctcctacgcttgtgatgggtcatggatatgcaacatcgcagggtttcttctttcgcaattttgatgcccttgccctccgtttcagagtgattgctattgatcaaactggttggggtggatctagcaggcctgactttacatg

SEQ ID NO: 33029 - DNA, 475 bp, Glycine max
  Clone ID: LIB3138-011-Q1-N2-E11
cgctgctcaaggtacacgcacccacacccacacccacatttgcctttgctcaactgcaatggcgctgcagtgtaagtgtggcacccaccactctggcgtttcccaattcctactccatttctgcggaaagaggaagaagagaatggaattggagggtgaaatgcagcagcagcagtgcggagattgagaaaggggctgcgagttttgggcccgggagcccagtgagagcaaccaacattctggtggttggagcgactggaaccctgggaaggcagattgtgcgacgggcactcgacgaaggctacgacgttaggtgtctggtcaggcccaggcccgctcctgccgacttccttcgcgattggggagcaacagttgtgaatgctgacctcagtaaaccagaaaccattcctgctaccttggtcggcatacacactgtcattgactgtgccactggctgtcccgaggagcccatcaa

SEQ ID NO: 33030 - DNA, 470 bp, Glycine max
  Clone ID: LIB3138-011-Q1-N2-E12
cgtcaattgagaaggaaagctctctctcgttttgaatggctgcaaaaagctgatgtgcctaccatagcacagattgaagagttccattcgatgcagaggatgatgaatgctcctgattaaaatgataatattgattcactgttgagcattgatttgttgggtttacaaggagcacgtaaagcttttccaaacaaaattgtttttgatgataagcttgtgttggctaacacacaagaattctttgatggaaattttccagtggattcttggttaccaatttttgtgaattgtctctatcctgtaagtcaattaccttcagaagctgtcgttgtaaatgttacatgtggtaagtggacgttgggtttacccaccactgcttggattagttctgcagttaacaatcgctcctcagatatcaacaaaaggattcgcacagcacttgggaaaggtaagaaaattgtttttcttac

SEQ ID NO: 33031 - DNA, 158 bp, Glycine max
  Clone ID: LIB3138-011-Q1-N2-E2
ggttggttgattggtcccattgattcccaaaagaaaagaaaagatggttgggccacaacagctatacactcgcgcggagaccgagggattcgaccttgaattaagggaaaccctttacccaagggttagcgttggggagaaccaacttccattggggt

SEQ ID NO: 33032 - DNA, 370 bp, Glycine max
  Clone ID: LIB3138-011-Q1-N2-E3
cttcatcaacgatcttgatgcaggagctggtcgtcttggtggaaccacacaatacactgtgaacaaccagatggtgaatgccactctcatgaacattgctgataaccccaccaatgtgcagcttccaggtatgtacaacaaggaagagaacccccgtgttcccatcattgtcaccggtaacgatttctcaacactctatgcacctctcatccgtgatgggcgtatggagaagttctactgggcaccaacaagggaagaccgcattggtgtttgcaccggaattttccgcactgatggtattcctgaacaggacattgtcaagcttgttgacaccttccctggccaatccattgatttctttggtgcactg

SEQ ID NO: 33033 - DNA, 255 bp, Glycine max
  Clone ID: LIB3138-011-Q1-N2-E4
cttttaattgtcgtaatgatgtgtgaagtgtgtgttattttaaaaaaaaaaaaaaaaaaaaaaaaaaaaaaaaaaaaaaaaaaaaaaaaaaaaaaaaaaaaaaaaaaaaaaaaaaaaaaaaaaaaaaaaaaaaaaatttaaaaaaaaaaaaaaaaaaaaaaaaaaaaaagggaggtgatttttaaggttttttttgcactgaaaaaaaaattgtataaaggaatgttaatataaaaaatttttaattaataaaaa

SEQ ID NO: 33034 - DNA, 467 bp, Glycine max
  unsure at all n locations
  Clone ID: LIB3138-011-Q1-N2-E5
ttgcactgcacttcgagcttggcttttttatactgctagtgaaagggttgttgcacgactgagaaagaatttgttcagtcatcttgtaaaccaggagatagccttctttgatgttactcgaactggggagcttttaagtaggctatctgaagatacacagatcataaagaatgctgcaactaccaatctttcttaggccctgagaaacttttcaactgcattaattggtctgagcttcatgtttgcaacatcattgaaggtaacattggtggctttggcttgtgtaccttgtctttctggtgctgntcgcaagtttgggccttacctgcgtgaactttcttataaaactcaagctgcagctgcagttgcttcatcaatagctgaggaatcctttggtgcaataagaacagtaagatcatttgcccaagaagattatgaagtaacacgctactcagagaaagttaatg

SEQ ID NO: 33035 - DNA, 465 bp, Glycine max
  unsure at all n locations
  Clone ID: LIB3138-011-Q1-N2-E6
gcaaaacctggtgaaggtggacaattgcctggaaaaaaagttagcatgtatattgctaggttgagaaattctaaaccaggagttcctcttatatctccacctcctcatcatgacatttattctatccaggaccttgctcaagtgatctttgatcctcaataagggaaccctaaaggccaaggtgttttaaaaactgggggttgaacctggaattggcactgttgcatctggggttgcaaagggcaatcctgacattataaagatttcaggacatgatgggggaacaggagcaagccctataagttccatcaagcatgcangaggtccttgggaacttgggcttacagaatctcaccagacactcattgaaaatggacttagagaaagggttattctcagagttgatggtgggtttagaagtggagtagatgtcatgatggcagcaataatgggtgctgatgaata

SEQ ID NO: 33036 - DNA, 387 bp, Glycine max
  Clone ID: LIB3138-011-Q1-N2-F1
ttcttgtaagagctattcaattcctgattcaggttgaaggttccatacatcaattttgtcattgaaccagttgaagtgatttcttctgatggcaagtcaaacatataccctgatttatctgtctacaatatggaagtttctctatcttacattaatggattgattggggtattattggaggtggaagaggtcactaagtacttaaatcggatgcaattgcatgccaagcagtgtgcatctcataataagcagtgtaacattgtggtatctgtaccttcttctagaagtgatgttcttcacccatgtgatgttatggaggatgtggcaattgcttatggattcaatgctattaagggataagtagtagtagataataagggctcaaag

SEQ ID NO: 33037 - DNA, 290 bp, Glycine max
  Clone ID: LIB3138-011-Q1-N2-F11
agaactctttgggttccgaaccgatttctcgtaccactatgttggtgggcgagcttccaattctgcgtctaaaatggttgttcaatgcatgtcttctgccacagatggtcctcccactgtttctgagacaaaattaaattttctcaaagcatataagcgaccaatccctagtatctacaatactgtgctgcaggagcttatattgccgccacattttatgaaatacaagagatcataccgctatgaccctgtgtttgctcttggttttgtcactatatatgataaactta

SEQ ID NO: 33038 - DNA, 261 bp, Glycine max
  Clone ID: LIB3138-011-Q1-N2-F12
gtcggttccaacaaagcaatcaccggcacccggttttccggtgagctatagcaattcaacaacgtattcgaccaacgaggcttcctacgctccagtcccacctccccagcccaaacctcttgtcgattggtccaccggcctctgtgactgcttctccgaatgtggaaactgttgcatgacgtgttggtgtccatgtgttacctttggccgagttgcaaaaattgttgacaagggatccacatcatgtggtgctagtggggc

SEQ ID NO: 33039 - DNA, 272 bp, Glycine max
  Clone ID: LIB3138-011-Q1-N2-F2
gaggtgcttgccttagctatatactcattttcgcgtgtttgcttgctctagatctgattagcttttattcgagttctggttccttgtttcgtccctgcataatctgaattcaaatacttgccatcttgttacttgttacgctaccagatctgttttgaattaagagatggggttgtctttcaccaagctttttagccggctctttgccaagaaagagatgcgtattctcatggtaggtcttgatgctgctggtaagactaccatcttgtaca

SEQ ID NO: 33040 - DNA, 305 bp, Glycine max
  Clone ID: LIB3138-011-Q1-N2-F3
aaaaaaaaaaaataaatataaaaaaaaaaaaaaaaaaaaaaaagagagggaaaaaaaaaaaaaaaaaaaaaaaaaaaaaaaaaaaaaaaaaaaaaaaaaaataaaaaaaaaaaaaaaaaaaaaaaaaaaaaaaaaaaaaaaaaatgggggggccccacctttttggatctttcaccccggaattaaatttgggccgggtttttggggggtaccaaattttcattatagagggggaaattaaagttgggcaaaaacagggaaaaagggttttcctgggaaaaaaatgtttcccttaaaaattccaa

SEQ ID NO: 33041 - DNA, 469 bp, Glycine max
  Clone ID: LIB3138-011-Q1-N2-F4
ctttctcctaaaacatctccagtgggttcttcttcttctattacaacaacgtcgtccaagaccatgaccatggccatggccacgatcctgctcctgttcacggtcttcgcggtttcatcggccctagacatgtcgataatctcgtacgacaacgcccacgccgccacgtcgcgcagcgacgaggagctgatgtccatgtacgagcagtggctagtaaagcacggcaaggtgtacaacgcgctcggagagaaggagaagaggttccagatcttcaaggacaacctgcgattcatcgacgaccacaactcccaagaggaccgaacctacaagctcggactgaaccggttcgcggatctcaccaacgaggagtacagggccaagtacttgggaaccaagatcgatcccaaccggaggctcggcaagaccccgagcaaccgatacgcgccacgtgtcggcgacaaactacctg

SEQ ID NO: 33042 - DNA, 463 bp, Glycine max
  Clone ID: LIB3138-011-Q1-N2-F5
aatccttcaaaaattttgtttctttgtgtgtgtatggggatgataacttaattagggttcatggatttttcaaggcctactttagtgggtctaaaatggaaaggtttctaactaggtataacaataccctttctgatggtttggcaaaaactgtgcaattttgcaattaaaaaggtagccaattgggattttcttaaaaagaaactttaagccaatgtctaatgttttgtgggtggctctgaggacaaggcgaggttatggtcacaacttcaatattgttcgtgtaataatctggaaatgcaagaagcttatcttgtcaatctcgtaaatgtgttacgagaattgtatttgcacagtccagaggaagctcgccaattgagaaggaaagctctctctcgtattgaatggctgcaaaaagctgatgtgcctaccatagcacagaatggagagttccattcgatgc

SEQ ID NO: 33043 - DNA, 468 bp, Glycine max
  Clone ID: LIB3138-011-Q1-N2-F6
ctagcaaattggccttcacactgacatacccgcttccacttacaccaatctcttccttgtcctcctcttctgcttctcgactccaccttcttcaattcaatggccgccacatatgccttcgccctcggctatttctgttttctcccatggccacagccgatcaagacaaggttgaggaagatgctgccgttgttgatagtaaaatcctacaatattgtagcatagacaaaaaagagaagaaatcagttggtgaaatggagcaagaatttctacaggcactgcaagcattctattatgaggggaaggctattatgtcaaatgaggaatttgataatcttaaggaagaactcatgtgggaagggagcaccgttgtgatgctaagtatattattattatatatgtggctagcaatttcattcactgacagttgctagcatgcatgaattcctgctaactttgtaaattgat

SEQ ID NO: 33044 - DNA, 52 bp, Glycine max
  Clone ID: LIB3138-011-Q1-N2-F7
cagaggaccccaacacataaccgccatcatgtcgcaggtccaccccctttcc

SEQ ID NO: 33045 - DNA, 363 bp, Glycine max
  Clone ID: LIB3138-011-Q1-N2-G1
gcattcactttctcctacctcgtccttctaacccaacctcaacctgtttctccgagaatcacatccaacgcttctgtcatggaggaagttaacgttgtggaaactaaggatggaactgtctcagtagctgctgcgtttgctggtcatcaggaagccgtgcaggatagagaccacaaatttttaagaaaagctgttgaagaagcatataaaggggtagattgcaaagatggaggcccttttggtgctgttatagttcataatgatgaaatagttgctagttgtcacaacatggttctgtgtaacacagacccaactgctcatgctgaggtgacagcaataagagaggcttgtaagaagcttaag

SEQ ID NO: 33046 - DNA, 197 bp, Glycine max
  Clone ID: LIB3138-011-Q1-N2-G11
agagaatccgaggcgaagagagaagaaaaattaaaatggaggggaaggacccggatgtgtccctggaacccaacaaattcccggagagccagcctattgggacggcggcgcacagccaagacgacggcaaggactaccaggagccggcgccggggccactggttgacccgacggagtttacgtcatggtccttttac

SEQ ID NO: 33047 - DNA, 463 bp, Glycine max
  Clone ID: LIB3138-011-Q1-N2-G12
ctcaagccgctgtgaattgtggaatcctgcttgcacaaaagcaatgactgtggcatttaatccaaacccgtgttctgatgcatggagtttggaattactgaaccgtactggatttcattgcgatatcatttgcgtcactggatggactgccaccccaatgcacgatgttcatgatacaattgattggtttatttcctctcacgaatgtgttcccaggacctattgtgttttaaatccacaaaatcctcttgtgttaaataggtggatgggaaaattgactttcccccagggcacttaccgaagtgttaagagaatgcctatttctatagggggaggagctggtgcaaagaatgctattctcatgaatatgccaaatgctgttctttcaatgtggagatattttgttggagatctcgtctttgaagtttctaagatgacttctccctacattaaatgtacagtc

SEQ ID NO: 33048 - DNA, 431 bp, Glycine max
  Clone ID: LIB3138-011-Q1-N2-G2
caaactgtttggaatcaaatggcaacagtgagaacaccattgaattttgattctagcaagcagagcttttgtcagttttctattgaccttctcggtggaggaatcttagtggacaaaactggagattggatcacacttatacaaaattctccaattagtaacttgttgagagttgctgcttggaagaaaggctgtttaatggtcaagattgtgatgtctgggaatgcagcagtcaaaaggagtgattgggcctcattggtacaagtgtttttaacaaacagcaacagtacagagcattttgatgcatgtaagtggacaaaatcagaaccacattcctgggaattgatcttcccaatagaggtatgtggtcctaataatggttttgaaatgtggagttctgagtgggcaaatcaaacttcatggcatttgag

SEQ ID NO: 33049 - DNA, 467 bp, Glycine max
  unsure at all n locations
  Clone ID: LIB3138-011-Q1-N2-G4
ctattttggtgtaaaagccgaattcacactccctagtccctaccacatatctccccacccatgagcaatacgggcaaaatgtataattattgaacagcggaacatacgatgatcacccgccaccatgcctttgtccgctaaaattagttcgctgcaacgacaaatacaaaggttgcgtatcgtgctagtgctactactactacttgctgctactgtcactgcttgctacacctcactcttcaacttcngagattccctcacttgatcccgcaactngtacttcatttnccctcgtcagagccccgattgcttgctccctccctacggacaaacccattttcatcgccccaatggacgatgctccgatggacgccttatcctcgatttcctcgccgagtctctggggcttccgtatgtgaaaccgtatctgggtttcaagaacggcgcggtgaaacgcgggaatattg

SEQ ID NO: 33050 - DNA, 200 bp, Glycine max
  unsure at all n locations
  Clone ID: LIB3138-011-Q1-N2-G5
gtgttgaagaggcttacaacaagctaatagttgaacttgagaaaagtgttcctacattggttggcattgaatgtcccaaggatgagaaacttcctcgtcgcanaatttttgacaaacctaagacgcgctgcttcactattctccctatggagtttaatcttgtggtccgtcaaaagtttttaaattttgtgaggttcatt

SEQ ID NO: 33051 - DNA, 155 bp, Glycine max
  Clone ID: LIB3138-011-Q1-N2-G6
cgccgtttggagcagggtcctcagcctcaaccaccactccatttggtggaacgccctctgctcctacgacgccgtttggcgcagcttcctcaacggccacaacaacatccacgactctgttcggaggagcgtcttctgcttcagcgacgccgttt

SEQ ID NO: 33052 - DNA, 284 bp, Glycine max
  Clone ID: LIB3138-011-Q1-N2-G9
ctcgcatattgcaataacttgaaacgctgctcctcagggggagatgagaaaaatacacagagggatatttgaactttccagcaactacaccatatgcctatcttatcagttctaatgaagtttcaattcttgacggatacatttgcaaccctaatactctaccatgtctgaatactttgtgaggccaagacacataataggactctcatgtataatttatatatgaaacaactctagaagcatacggcattatttactctgccaacattaccaagattatgctt

SEQ ID NO: 33053 - DNA, 467 bp, Glycine max
  unsure at all n locations
  Clone ID: LIB3138-011-Q1-N2-H1
gttttattatgctctatcaacacattaaaaagattatatgatatatctgctgtggaagtaggtcaacatttctattggcaaatagggagtttccaagtacatgcccaagtacttattacttcttgggttgtaattgctctcttattggtttcagccattctaattattcgaaatctgcaaaccattcccgctttcggtcagaatttctttgaatatgttcttgaattcattcgagacgtgagcaaaactcaaattggagaagaatatggtccgtgggttccttttattggaacttntgttctatttattttntgttctaattggtcgggggctcttttacctttgaaaatcatacaattacctcacggggagttagctgcacccacaaatgatataaatactaccggtgctttagctttacttacatcaattgcatatttctatgcgggtctttcaaaaaaaggatt

SEQ ID NO: 33054 - DNA, 460 bp, Glycine max
  Clone ID: LIB3138-011-Q1-N2-H10
ggacgcacctgctgttggcttgttgttcaaggatggcaatttgtaagaaagatgtttggagagttgaatgtggaatcccttctggatttccgctcacagttatttgcaatagcatttttaatgagatgctcattagatatagctatgaaaaattactgcgccaggctaaagctccaagtatgtttttacaatccttcaaaaattttgtttctttgtgtgtgtatggggatgataacttaattagtgttcatgaatatgtcaagccttactttaatggttctaaattgaaaagctttctagctagtcataacatcaccattactgatggtattgacaaaactagtgcaactttgcaatttaaaaagttagcaaattgtgattttctcaagagaaactttaagcagatgtctaatgttttgtgggtggctcctgaggacaaggcgagtttatggtcacaact

SEQ ID NO: 33055 - DNA, 118 bp, Glycine max
  Clone ID: LIB3138-011-Q1-N2-H12
cttagttgatcaagtcgaaatcaaccaacaaacaatggaacaggcagggctttttcatgcatgtcagtggacaaaatcagaaccacattcctgggaattgatcttcccaataaaggtt

SEQ ID NO: 33056 - DNA, 244 bp, Glycine max
  Clone ID: LIB3138-011-Q1-N2-H2
tggtgatgaaaaattgatgcgtgaaaggacgcacctgctgttggcttgttgttcaaggattgcaatttgtaagaaagatgtttggagagttgaatgtggaatcccttctggatttccgctcacaggtatttgccataacatttttaatgggatgctcattagatataactattaaaaattacttcgccaggcttaagcttcaaatatttttttaccatccttcaaaaattttggttctttgggg

SEQ ID NO: 33057 - DNA, 448 bp, Glycine max
  Clone ID: LIB3138-011-Q1-N2-H3
aattaatctccatacaataatccgagtgacactcctcactttgtggccatggcttcactgaggtgcctccactcaacccaccctcatcttcatcgcggttcagcgcttctcgccatttcgaaccgctgcttcaaccattcctccttgctgaaccggactctctccgtaaaccctcctcgaaccgctcctccacgcgccatggccaagcccagtttctcaactgcccaagacctagtggcttctcctggcgattttgaatttgcgcagcctctgaaaattgtggagtatcccgacccgagattgagggccaggaataagcgcatagttgccttcgatgatagtctgaagaagctggtccacgaaatgtttgatgtaatgtacaaaactgatggtattggtctctcagcaccccaattagggaataatgttcaacttatggtgttcaatc

SEQ ID NO: 33058 - DNA, 374 bp, Glycine max
  Clone ID: LIB3138-011-Q1-N2-H7
tggatgggactgcacccccatgccaggagttcaaggtacaaatggatgggttatttcctctcaggaatggtgttccaggacctattgtgttttaaatccacaaaatccttttgtgttaaataggtggatgggaaaattgactttcccccaaggcactctccgaagtgttaagagaatgcctctttctatatggggaggagcttgtgcaaagaatgctattctcatgaatattccaaatgcttttctttcaatgtggagatattttgctggagatctcgtctttgaagtttctaagatgacttctccctacattaaatgtacagtctctttcttcatagcatttggaaatttggctgatgataccatcaattttg

SEQ ID NO: 33059 - DNA, 402 bp, Glycine max
  Clone ID: LIB3138-012-Q1-N1-A1
cttgtactctctcttactttttaaccatgtagaatgattcaccgaaggaaaaattagtagcttcttgttgtgctttttattttgttttgttttgtgtagagataaatctgtttggtattgttttgtgttttatgaattatttgatgggtgaagagggagaagaagtggtgagaaagcaaggacaaaggggtgttgatggagataaatggtacttgtatagctgcttacaagactgtaaatattggtgctgtaatttaatacacgagactagcagttctttttcgatggttccttttgagtgaaaaaaaccttgtcttctcatcagctttctttggagagatcttaaagacgacattgactgctaacaacaataaagtggatcaatcattaaaggcttacttt

SEQ ID NO: 33060 - DNA, 251 bp, Glycine max
  Clone ID: LIB3138-012-Q1-N1-A10
gggctacatcaagagatgccctcgcataatatgcttaggagctgacgatatgaaggcaattctgaacaatggaccaattgacgtacatgtatagtgagtatgtttagaggttgaggaatacattgtaatatttaagacttgtgcgaaataagtataaggtacacaattccgtacaacgtacggattcaaagcgtacagtggataccatcatttacgtaacttgttaccacactgtcgtgtattctgttgag

SEQ ID NO: 33061 - DNA, 411 bp, Glycine max
  Clone ID: LIB3138-012-Q1-N1-A11
gaaaaactcaacacaacaccccctctccaccctctttttcttttaatttctcatcttatctattaatcttatatacatatatataaagacatagataatagtcatatagatataattatttcgttatattttccttgcatgggctgttaagatgtctcgcacgtgctcacagtgcggcaacaacggccacaactcacggacatgcaccgacggtggcgccgccgggtctccgagggagaacggcatcatgctgttcggcgtaagagtcatgacggaagctaactcctccttcaggaagagcgccagcatgaacaacctctcacagtacgacgcggagttcaacgccgccgacgccggctacgcctccgacgacgtcgttcacgccttcggccgcacgcgcgagcgcaagcg

SEQ ID NO: 33062 - DNA, 407 bp, Glycine max
  Clone ID: LIB3138-012-Q1-N1-A12
atttgtatgcaatggtgcatgatagttcagtgtctacaataccaggtgattttgtcattggtgtcaagttgacaaccataaacaatatgtgtgcatatgggctcaatcctggtatttcaggttctcgtcttttgggcaccattcctcagtccatttcacagcaaactgtttggaatcaaatggcaacagtgagaacaccattgaattttgattctagcaagcagagcttttgtcagttttctattgaccttctcggtggaggaatcttagtggacaaaactggagattggatcacacttatacaaaattctccaattagtaacttgttgagagttgctgcttggaagaaggctgtttatggtcaagattgtgatgtctgggaatgcagcagtcaaaagaatgattgg

SEQ ID NO: 33063 - DNA, 255 bp, Glycine max
  Clone ID: LIB3138-012-Q1-N1-A2
ttcaaaaactgtctttcttaatgacacatgtgacaatggacggggggggttacccaccaccctctttattatcctctacaatcacaatctctcctcccatatcaacaaaaagattcttactattcttgcgaaaacgaagaaaattctttttcttaccataattgatcccttttcaatttcttcacatccagtcctttttttcaaaaacaatgaaattcttacttcttactccactaattctatgctgactcgact

SEQ ID NO: 33064 - DNA, 277 bp, Glycine max
  Clone ID: LIB3138-012-Q1-N1-A3
ctgtgaccttattttactaacttctcatatagtacacacctgggtggggaagaacatgggttcgatttctttctagaaactaccacttttaatgtggggtggtaacaaacacacgatgctgatcacggtggtttgaattaatttacactattacgagggacttcttgtttcttaaaagccagttcctaagctttaggagggttgaacaaaacacctcctttttccttaaataactttgaaccttgcgccccaaatttggttaactacaaaaaaaaca

SEQ ID NO: 33065 - DNA, 344 bp, Glycine max
  Clone ID: LIB3138-012-Q1-N1-A4
cgaaaggatctcgaagacccaccaacgcacgaaagccgggatctttcagaaaatggattcctattcgaagggtgcataaccgcatggataagctcacactaacccgtcaatttgggatccaattcggttccttaggaggtatcgggaaggaattttggaatgtaataatatcgattcatacagatacagaagaaagggttctctattgattcaaacgctctacctacgagatagggatagagaaagaggaaaaaaccgaggatttcacatagtacttttggtcgaaaaatcgatctgatttttttcgtacttttcgctcaatgatgaaaagggtcagattctac

SEQ ID NO: 33066 - DNA, 295 bp, Glycine max
  Clone ID: LIB3138-012-Q1-N1-A5
cgcgcgcacgctaagctaagaattcgaatcgagcttgggctctctattactttaaaaccaaggcgaatgccccaccgctggggaaattaggagcgactcagggaactttttatttggatttgttcaggggggagataaatcagcttggtattgttatgtgcgttatgaatcatctgatgggggaagagggagaacaaattgtgagcaagcaaggacaaaagggtgttgattgcaatacaaggtgcttgtttaattggttacaagactgcaaccattgacgctgtgattgcataca

SEQ ID NO: 33067 - DNA, 261 bp, Glycine max
  Clone ID: LIB3138-012-Q1-N1-A8
tggagatatactttaatcaaaagacctccaaggttgcagttgtgtgtgcggacaatgtcgaagcaagaactgcactttttctcatggagcttgaggaaaaaagagctattgaggttaattagaaagagcactttgagaggactgtgtctaactttctttgctggactttgcttctctatgttctcaccagcatgcaacatagcagcagatgacctatggaatacctttagaaaaggggttccccatctgacagtatatact

SEQ ID NO: 33068 - DNA, 406 bp, Glycine max
  Clone ID: LIB3138-012-Q1-N1-A9
atcttgccggcgctggtccttgcgcagattgagccgcagtacatcatgtcccgagcgacgttcgtccgagagtcgagctccaagatgtactcgagcaccatctttgcctttacgcagatgctcgccgagatgccgtactcgctcgtgtgcgcgactgcgttcttcctcctgctgtactacggtgtcgggttcgacaaggcatcgtctcgcgccggttacttcttcgtcatgtgcctcctgaccgaggtctacgccgtgacgctcggccaggccgtcgcggccctctcgccgtcgatcaccgttgcggcgctgttcaaccccttcctgctcgtcatgttctcggtcttctgcggcgtcgtcgcgcccaaggcgacgctgccgtacttctggcgcagctggatgtacc

SEQ ID NO: 33069 - DNA, 394 bp, Glycine max
  Clone ID: LIB3138-012-Q1-N1-B1
agaagctaagaggcgcagccgtagcaaaagctcgtggaattgctagcaatggcgaggatcaaggtttacgagctgaggcagaagacgaaggctgatctgctgaatcaactgaaggacctgaaggcggagcttgccttgcttcgtgttgctaaggtcaccggtggtgcccctaacaagctttccaagataaaggtggtgaggttgaacattgcccaggttttgacggtgatttctcagaagcagaaggctgcgttgagggatgcctacaagaataagaagtacttgcctctcgatctccgccctaagaagaccagggctattcgcaggaggcttactaagcaccaggcatcattgaagacagagagggagaagaagaaagagttatatttcccac

SEQ ID NO: 33070 - DNA, 383 bp, Glycine max
  Clone ID: LIB3138-012-Q1-N1-B10
taactggacaaaatcagaaccacattcctgggaattgatcttcccaatagaggtatgtggtcctaataatgggtttgaaatgtggagttctgagtgggcaaatcaaacttcatggcatttgagtttccttattgacaatcccaaacagcctacacttattgatattctcttgggaatctctcaagattttgaaattgctggtaatactcttatgccagctatttctgttccacaggctactgccagatcttctgaaaatgcggaatcctctgcacgatctggaatttgcgttctctttcgctcgatcgtttgtttaatccaataaaggaacataagcatgaccctctcgttgagtatgctctgcctatttgaagatttcacac

SEQ ID NO: 33071 - DNA, 382 bp, Glycine max
  Clone ID: LIB3138-012-Q1-N1-B11
aaaaaaaaaaaaataaaaaaaaaaaaaaaaaaaaaaaaaaaaaggaaaaaaaaaaaaaaaaaaaaaaaaaaaaaaaaaaaaaaaaaaaaaaaaaaaaaaaaaaaaaaaaaaaaaaaaagaaaaaaaaaaaaaaaaaaaaaaaaaaaaaaaaaaaaaaaaaaaaaaaaaaaaaaaaaaggggggggcccccccttttgttgcttctccccccgggttttttttgggggccggttctttgggggggccctgctttcctttattggggggattttgaatcttggggacaaacggggatttagtgtcttctggggaaaaatattttgttgaaacaattcccccaacaataatcagcccgccattaatgggtatagacctgggggtc

SEQ ID NO: 33072 - DNA, 405 bp, Glycine max
  Clone ID: LIB3138-012-Q1-N1-B12
gaaaaagcttttccaagaattggcaaaaagagaagaagggagagagattcatgttcatattttccccttcgtgcccgtcaagtttctgattctctttttcaattcctttctctttcaggtgattttttctccacgataaagttgcgatttcgccggtgtcgttttgccgcaagatggtgtcgttttcgggaatataaaatcagggttgaagttctttcttcagcattgaatctttggttacataggttggtttctttagaactcgattcaatttcaaataattggtcctccctttttgtggaactcaattctattaggttagtggaaagagaaaaaaaaacatggttgaatcaattgctgcaacttcactccttggccaccgtccaatttgtggtggaaatttta

SEQ ID NO: 33073 - DNA, 209 bp, Glycine max
  Clone ID: LIB3138-012-Q1-N1-B2
gacaaaaatgcacttttagtcttttgtgtttatattttgtttaggtttgatcttttaaaaaaatcaatttagttttatgtcttttatggtcatttccaaacatttgatttgtcggttatgggtcacacttttgaatcttattttttattaatttgatatgtaaaacttgtgtcattaacttttcttgcataaatattataaaagtagcc

SEQ ID NO: 33074 - DNA, 402 bp, Glycine max
  Clone ID: LIB3138-012-Q1-N1-B3
gtccatatttgtatgcaatggtgcatgatagttcagtgtctacgaatacgaggtgattttgtcattggtgtcaagttgacaaccataaacaatatgtgtgcatatgggctcaatcctggtatttcaggttctcgtcttttgggcaccattcctcagtccatttcacagcaaactgtttggaatcaaatggcaacagtgagaacaccattgaattttgattctagcaagcagagcttttgtcagttttctattgaccttctcggtggaggaatcttagtggacaaaactggagattggatcacacttatacaaaattctccaattagtaacttgttgagagttgctgcttggaagaaaggctgtttaatggtcaagattgtgatgtctgggaatgcagcagtc

SEQ ID NO: 33075 - DNA, 390 bp, Glycine max
  Clone ID: LIB3138-012-Q1-N1-B5
gatagtttcgcaagtcctgattgcaacatagttggtgcaatgcttttggttgatacttatcataccaatcctgaaaatgcagttcgtagtatttttgttgcgcctttcagaggcggaaggcccattcgggtggttacatttccgaataccattgtgcagattgaaccagacatgaattcaaggtttcagcttttgagtaccactaccaatggtgattttgttcaagggaaagatctcgcaatggttaaagttaatgtagcatgtgctgctgttggcttgacatcaagttacactccaactccattgttggaatctggtttgcaaaaagacagagggttaattgtggagtattttggaaggatgtcttacgttgctcataacgttaatcag

SEQ ID NO: 33076 - DNA, 396 bp, Glycine max
  Clone ID: LIB3138-012-Q1-N1-B6
cttgatcaaagaactcgcgttggattattaggcttaaaaacgcttttgccttctccaaaattctcttacgccaacgaggctcacggtctttggattctcaaaggttacgcgccagtcatgaccatgaaactggcgcgaaccaacacagttcaaaaaactcaattctctggcatcgatgccaaggagtcgattcttcgttactcactcgcgcaccaccaacttgaggcacacgtgcagctagactacaccgttgggttttacgatggtttcattcacgttcgtgcacgtgtcgataatatacgcctccaccctccgaggttaggtttcaaccaaaacgacgacgtggatgatttcgttgaggagaagcacttttcttcacgggttccggtttgggtg

SEQ ID NO: 33077 - DNA, 395 bp, Glycine max
  Clone ID: LIB3138-012-Q1-N1-B7
gaagtcttgcccttctctcttcaactccaaacacaagagatcgggatccatggctgcctccgtctccactgtcggagctgccaacagagctcttttgaacctcaatggatctggacctggggtttcagctcccagttcatccttctttgggagcagcttgaagaacgttattggctgaagggtcctcaacacaaagatttcctctggaagcttcaagactgttgctgtagaagagaacaacgagatcgaagagacccagcagaccgacaaggacagatggaagggtcttgcctatgatatctcatacgaccaacatgacatcacaagaggaaagggtttggttgactgccttttccacgctccacagcatgctggaactcactatgctgtcatga

SEQ ID NO: 33078 - DNA, 398 bp, Glycine max
  Clone ID: LIB3138-012-Q1-N1-B8
ctggactccaaccaggaatcacttccactggactgctgccaaccactgggttgacttccacctaccaaacatccaccctcggaatgaacgatctcaatcgaaacggaatcccagacaatctcgaaagacaaggacttgcaggacagggcttcaccactggaacaactctgccatccagccaattccaaggattctccatcttaagcgatctgaatggaaatggaatccctgacaatcttgagagacgatctaatctcactggaggtctcaacgacctcaaccgaaacggaatccctgataatctcgagagacaattcggacagactggatttgtaggacagcagccgctcactggattgacttcattgaacgacagaaatggcaacggaatccctgac

SEQ ID NO: 33079 - DNA, 411 bp, Glycine max
  Clone ID: LIB3138-012-Q1-N1-B9
gtccatttcacagcaaactgtttggaatcaaatggcaacagtgagaacaccattgaattttgattctagcaagcagagcttttgtcagttttctattgaccttctcggtggaggaatcttagtggacaaaactggagattggatcacacttatacaaaattctccaattagtaacttattgagagttgctgcttggaagaaaggctgtttaatggtcaagattgtgatgtctgggaatgcagcagtcaaaaggagtgattgggcctcattggtacaagtgttttttaacaaacagcaacagtacagagcattttgatgcatgtaagtggacaaaatcagaaccacattcctgggaattgatcttcccaatagaggtatgtggtcctaataatggttttgaaatgtggagtt

SEQ ID NO: 33080 - DNA, 401 bp, Glycine max
  Clone ID: LIB3138-012-Q1-N1-C1
ttgtcattggtgtcaagttgacaaccataaacaatatgtgtgcatatgggctcaatcctggtatttcaggttctcgtcttttgggcaccattcctcagtccatttcacagcaaactgtttggaatcaaatggcaacagtgagaacaccattgaattttgattctagcaagcagagcttttgtcagttttctattgaccttctcggtggaggaatcttagtggacaaaactggagattggatcacacttatacaaaattctccaattagtaacttgttgagagttgctgcttggaagaaaggctgtttaatggtcaagattgtgatgtctgggaatgcagcagtcaaaaggagtgattgggcctcattggtacaagtgtttttaacaaacagcaacagtaca

SEQ ID NO: 33081 - DNA, 279 bp, Glycine max
  Clone ID: LIB3138-012-Q1-N1-C10
ggttgtggctctttaaatagcatgtggaaggaggacttacaaagacgggggggttcttgtgcctctcgtgaactgaatttttaaattgtacgtggaagggaaagttctggatgctgttgatgagagattaaacatggagtttgttgttgatgaaatgacaagcttgattggtgtaaggttgtggtgtactaaccctaacaacaaggaaaggcccacctctacacaagttataaaagttcttcaacttgtagcgccattagccacgctttcacttgatat

SEQ ID NO: 33082 - DNA, 390 bp, Glycine max
  Clone ID: LIB3138-012-Q1-N1-C11
ggttttgatattctcttgggaatctctcaagattatgaaattgctggtaatgctcttatgccagcttttactgttccacaggctactgccagatcttctgaaaatgcggaatcctctgcatgatctggaatttgtgttttctttctcttgttcgtttgtttaattcaataaaggaaattaggcatgaccctcttgatgagtatgctctgtctatttgaaaatttccacacgtgttttaattgtcgtaatgatgtgtgaagtgtgcgttctttttaaatgtaaaaaatgagttatttttttataaaaattattgttttttataatgataattgttttataaaatagaatatatttttttctatagcatgttttttctcttatttttttttt

SEQ ID NO: 33083 - DNA, 401 bp, Glycine max
  Clone ID: LIB3138-012-Q1-N1-C12
atttttacatgtgctggttggcgagcttgcatacagtcactagtgtgtattgtttgtactttggatattgatgttttcatggccttgatgtcaaagtatagtcaactgctaacaagagaaatgttgggctgaagtaagaagagttctttaagttctttctagtcatgagagatcatgtgatgtgatactctagtgttatctatacttgatcatctaattgcaaaagtgagtaataatacttgtaaaattttcgtagcttgcattgctaatagattatcagttttaaaccatgggggcaaattaggtatcctatttgatctgtggaaaattcatcatatatagatacttgtaaattgaattttctagagagtgcgtgaaattttaggtttctatttcttttt

SEQ ID NO: 33084 - DNA, 401 bp, Glycine max
  Clone ID: LIB3138-012-Q1-N1-C3
cttccctatcgcgcaggagaatgtgttggcttattctccccgacgaagggtggaggcgaattctggagatcggaatcaagagcaacggtttcagttacaaggatctctgctgcgtctcaatctcatgccgccggcttgatcgcctctccttggaagaacctttttggaaccggcttctcttctctgactatccccaatcccaatctcacccttcttcttcttcttcttcttcttcttctaaatctctttacagattaaggtttgagagagacaaggagaggagaatagctgctcatatgagggctgtgctgagaaaggaaagccagtttgccgaacattccagaaggctcaaagatatgaacacacgtctcgctcaagaaaccaccaaagccacgcaaact

SEQ ID NO: 33085 - DNA, 405 bp, Glycine max
  Clone ID: LIB3138-012-Q1-N1-C4
cataccgagagtggcccgaggaaaagaggcaggagtggctcttgtctgaactcagtggaaagcgccctctctttggccatgaccttcccaaaacagaagaaatcaccgatgttttggaaacattccgtgtcatttcagagcttccctcagacaacttcggtgcctacatcatatcaatggcaacatccccatctgatgtgcttgctgttgagcttttacaacgtgaatgccatgtgaagcagccactaagggtggtgccactgtttgaaaagcttgctgatcttgaggccgctccggctgcggtggcacgtcttttctctatagattggtacagaaaccgcattgatgggaagcaagaagttatgatagggtactcagactcaggaaaagatgcaggccgtcttt

SEQ ID NO: 33086 - DNA, 377 bp, Glycine max
  Clone ID: LIB3138-012-Q1-N1-C5
aagaaagtaaaagttttctcccaaaaacaatatccctggggctgggttaaatcctaaagtctcatgttacactcattttatcgccactacttatagcatttcacatctgactctactaaatcaactagcggcagttagaacaccattgcattttctttctcacaaacagaactttgtaacctattttattaaacttctcgctggaggaatcttattcgactaaactggggatttgatcacacttatacaaaattcttcaattcataacttctttagagttgctgcttggaataaaagctgttttatggtcaagattgagatttctgggaattcaaccatcaaaacgaatgattggaccttatttgtacaagtgtttt

SEQ ID NO: 33087 - DNA, 303 bp, Glycine max
  Clone ID: LIB3138-012-Q1-N1-C6
ttagagtacaaatctggagattggatcacacttatacggaggggtccaattggtaactggtctcccttttctgctttccttaaaggctcaataaaggtcaccattgtgatgtcaacaaatgctgtcatcaaaaagagtgattgagcctaattgggtcacgtgtttataacaaacagcacctcctcatagcattttgttgcttgtgagctgacacaatcagaaccacatttcttgcaatcgatcttgccaatacacgtatgtggtactcataatgagttttaaaactggaggtctgagggggca

SEQ ID NO: 33088 - DNA, 405 bp, Glycine max
  Clone ID: LIB3138-012-Q1-N1-C9
gccagttctgatatttacaccatctgctctcaagactgtgaattgtggagtgctgcttgcacaaaagcaatgactatgtcatttaatccaaacccgtgttctgatgcatggagtttggaatttctgaagcgtactggatttcattgcgatatcatttgtgtcactggatggactgccaccccaatgcaggatgttcaggttacaattgattggtttatttcctctcaggaatgtgttcccaggacctattgtgttttaaatccacaaaatccttttgtgttaaataggtggatgggaaaattgactttcccccatggcacttcccgaagtgttaagagaatgcctctttctatagggggaggagctggtgcaaagaatgctattttcatgaatatgccaaaagct

SEQ ID NO: 33089 - DNA, 402 bp, Glycine max
  Clone ID: LIB3138-012-Q1-N1-D1
cggtgctgaaggacgtgagttgggaggtgaagaaaggggagaaggtgggtttagtcggcgtgaacggtgcggggaagacgacgcagatgaggataatcgcggggctcgaggagccggatttcgggaacgtggtgaaggcaaaggagaacatgagaatcgcgtttctgaaccaggagttcgaggtagcgctgagcaggactgtgagggaggagttcaccagcgcattcaaggaggagatggaggtggcagggaagctggagaaggtgcagaaggcgctcgagggtgctgttaatgatttggagctcatggggaggcttttggatgagttcgatttgcttcagaggagggcgcagaatgtgaaccttgatgaggttgatgccaagattagtaagttgatgcctg

SEQ ID NO: 33090 - DNA, 387 bp, Glycine max
  Clone ID: LIB3138-012-Q1-N1-D10
tgataacttaattagtgttcatgaatatgtcaagccttactttagtggttctaaatcgaaaagctttctagctagtcataacatcaccattactgatggtattgacaaaactagtgcaactttgcaatttagaaagatagcagattgtgattttctcaagagaaactttaagcagatgtctaatgttttgtgggtggctcctgaagacaaggcgagtttatggtcacaacttcattatgtgtcgtgtaataatctggaaatgcaagaagcttatctcgtcaatctcgtaaatgtgttacgacgaattgtatttgcacattccataagaagctcgttaattgagaaggaaagctctctctcggattgaatggctgcaaaaagctgatg

SEQ ID NO: 33091 - DNA, 367 bp, Glycine max
  Clone ID: LIB3138-012-Q1-N1-D11
gcactatttctagcaaggcatttgctctccatagcagctaaagtgtgtggggctttctggaggcctcactgccaggaacaaaatgagatgtttgggcgcgaggcacacaagcagctggactatgcggaatgctatcccggcggattttggtgaggaactaagatgatcaaggcatgcatatatgccaaactggaaggttccccaacgcggattattgatggccacgttctatgtggtgaggtagaattatcagacctgactcacatttctggttcaaagaatcttgcaacctttatgctagatgagcatcagatgtttcaataggaaatttgtagtatcacatacatagctgtacatcttatagatt

SEQ ID NO: 33092 - DNA, 379 bp, Glycine max
  Clone ID: LIB3138-012-Q1-N1-D2
cttttgtcagttttctattgaccttctcggtggaggaatcttgggggagaaaactggagattggatcacacttatacaaaattctccaattagtaacttattgagagttgctgcttggaagaaaggctgtttaatggtcaagattgtgatgtctgggaatgcagcagtcaaaaggagtgattgggcctcattggtacaagtgtttttaacaaacagcaacagtacaaagcattttgatgcatgtaagtggacaaaatcagaaccacattcctgggaattgatcttcccaatagaggtatgtggtcctaataatggttttgaaatgtggagatttgagtgggcaaaataaacttcatggcatttgagtttgcttattgac

SEQ ID NO: 33093 - DNA, 391 bp, Glycine max
  Clone ID: LIB3138-012-Q1-N1-D3
tctctttctctctttctagttcgtgttcttcgacgcaaatccggggtgggatctctcttggtttttctctaggtttttcgcgatggcgtcgaagcgaattttgaaggagcttaaggatttgcagaaggatcctccaacatcttgcagtgccggtatatttttatttttttgttttgatattcttttcctattttattgctgagaatttggttgtgtttgtttaaacaatttggatttaaattttggtaaggaagaagctgcgcgattctgattttctagcagtaatatttgtatattgtaaaataaaattcctgtttagaattttgtttcttaggttttttgttgagatttatttcaatcggttgtagcggatgtcgtttgatataagtct

SEQ ID NO: 33094 - DNA, 402 bp, Glycine max
  Clone ID: LIB3138-012-Q1-N1-D4
caggtgcgtcctgcaacaactctgttggctgatgggtgtccatatttgggtgcaatggtgcatgatagttcagtgtctacaataccaggtgattttgtcattggtgtcaagttgacaaccataaacaatatgtgtgcatatgggctcaatcctggtatttcaggttctcgtcttttgggcaccattcctcggtccatttcacagcaaactgtttggaatcaaatggcaacagtgagaacaccattgaattttgattctagcaagcagagcttttgtcagttttctattgaccttctcggtggaggaatcttagtggacaaaactggagattggatcacacttatacaaaattctccaattagtaacttattgagagttgctgcttggaagaaaggctgttta

SEQ ID NO: 33095 - DNA, 322 bp, Glycine max
  Clone ID: LIB3138-012-Q1-N1-D5
atgaatgataaatgttgagatctgaacaaacaaatcaaggtgggtggaatttgcgtgtacttatcgacaatcacaaacaatctacagattatgatattgtttcgggaacctgtcatgattaacaaattgcaggcaatactcaaattccaaatttttttgttccacaagctactgccagatcttctgaaaatgactaatactgtgcatgatctcaaatcatgtctatgcttatattaggtcgcatggaaactcaataaaggacaaaaggcatcacccgctcttttaataagctctggctattagaaaagtttcacacctattt

SEQ ID NO: 33096 - DNA, 397 bp, Glycine max
  unsure at all n locations
  Clone ID: LIB3138-012-Q1-N1-D6
cgcctcaccattttgaggatggagctggacatccagaagtttgggaataatgctgatcagcagcattttgagtttcaacatttcccttcttcctacctccgactggctgcacaccgtgttgctcaacactacaacatgcaaacaatggttcaagataatggcttagatggccagggaagtaaaattctggtgaggaagttaccagaaagcaagtatcctgtggttcgattatctgaaatacctgctaagcagttggaaaatgataaatctgagctgaaaaaatttgttattagacctaggcccaatagaaacagnttgaatgatgccaacggagttgggacgaaaggaaatcctgtaagaagtgtggaagaaaggaaggaggaatatgaccgggcgc

SEQ ID NO: 33097 - DNA, 321 bp, Glycine max
  Clone ID: LIB3138-012-Q1-N1-D7
gaaagatgaaaaaaccgcggatttcacatacttcttgtgggcgaaaaatcgatctgatttttttcctactattcgctcaatgatgaaatgggtcagattctacaggaccaaaccttgcgggagttatggaacgatggcagaaaagatgtaaaacaaagttattcaaaatgcacaccatgagtcctgatttcaaacgaaaaaattcaatcttgattgaacaggatctttctgattattgactaatgggacacctggattgatcgccaaaaagatttcttgttcttattagaagattgctattggattcacatatttttggtg

SEQ ID NO: 33098 - DNA, 401 bp, Glycine max
  Clone ID: LIB3138-012-Q1-N1-D8
cgtgaataaattctaaatcgagtaaaacaagaaaaaaaaaaagacgaaacgtgaaaaggaaaaaggggtttgcagtgttccacccacacgcacgcagaagcagaagcagaagcgcaagcgcgtgtaaccctaattagggtttgcaagccgatttgggattcgcctttcgcgtgatcgcagcgctggatccgtaccgtgttcctccgtctacggaagcgccttttgctcgatccttcgccgatctcggaagcatgtacggtccccgaggtgagcagcggaacaggcaacttaccttatgggtatgctggtggcttccagccccctccctttcctgtggttcgtctcagggggcttccattcaactgcactgacattgacatcttgaagttctttgctggact

SEQ ID NO: 33099 - DNA, 407 bp, Glycine max
  Clone ID: LIB3138-012-Q1-N1-D9
gcgtgtcttcccccaacgaaaccaacgaggaagcaagggggatcttgaattctgcgcttaacgcttcgaatctttgaattcattcaaagatctccctctacgcatatcagggcactatggctgccacggtgaaacaaatgtctttgatcgtgtcactgttgggtgtggtgtccttcattttgggagttgttgctgaaaacaagaagcctgtggctggaacacccgtgcctggttcggatggtatctctgtcacctgcaagtacccagccgatccaactgttgcattggggtatctttctacagcatttcttgttgcatccactgtgattgggtatatgtctttgttttacccttacaaaggaaagtctattccacaagggattctgtttaagcacaccactttcaca

SEQ ID NO: 33100 - DNA, 69 bp, Glycine max
  Clone ID: LIB3138-012-Q1-N1-E1
ccccatcttcctgagcgactaacaacaattgccaacatgacgtgcgagaacactgacattgtcgacgag

SEQ ID NO: 33101 - DNA, 390 bp, Glycine max; identical to SEQ ID NO: 33075
  Clone ID: LIB3138-012-Q1-N1-E10

SEQ ID NO: 33102 - DNA, 406 bp, Glycine max
  Clone ID: LIB3138-012-Q1-N1-E11
ggagagattcatgaaaaagttgtattgaaattttcacaagagggatttcttgcagcttggtcaactcaggtgcgtcctgcaacaactctgttggctgatgggtgtccatatttgtatgcactggtgcatgatagttcactgtctacaataccaggtgattttgtcattggtgtcaagttgacaaccataaacaatatgtgtgcatatgggctcaatcctggtatttgacgctctcgtcttttgggcaccattcctcagtccatttcacagcaaactgtttcgaatcaaatggctgcagtgagaacaccattgaatcttgattctagcaagcagagctttagtcagatttctattgaccttctctgcggaggaatcttaaccgaccaaactggagattggatcacac

SEQ ID NO: 33103 - DNA, 411 bp, Glycine max
  Clone ID: LIB3138-012-Q1-N1-E12
cttcttcccaaccactactactcactcactgcagatctcaattgcatcgctgtccatggctaccatcgttagcatcaaggcccgccagatcttcgacagtcgtggcaatccaactgtcgaggtggatttgacttgctccgatggtacttttgccagagctgctgttccaagtggtgcatccactgggatttatgaggcccttgaattgagagatggaggatctgactaccttggaaagggtgtatcaaaggctgttgacaatgtgaacaccgtcattggccctgctttgattggcaaggacccaactgagcagactgctattgacaacttaatggttcaacagcttgatggaactgttaacgaatggggttggtgcaagcaaaagctaggagcaaatgccatattggcagt

SEQ ID NO: 33104 - DNA, 432 bp, Glycine max
  Clone ID: LIB3138-012-Q1-N1-E2
gaaaaaggccggactcctaacatgacacaccaaccgcactgattatgataagaaaatgacaacacgccataccaaggtcttccagctcatgcaacaatacagcacaagaacacggcccaggcacccgaaaaagaaaaagacacgccacaaccagcctcacacgtgactgggccagaacacagcgacattgaagactgacaagaaccatatgactctactagccagcctagacaccatctataacaagaatgggacagcagccacaagcacgagtgacacaacgaacgaatgtgcagcaaatcaaactcagcgaaggcgtgccaccacaacaacctccgcacaatgatgtgcaagaagacccctggaaagtgcagcaacaactcaaaaggacaagggaacggagccacacgaaagagcaaaacacagatgcgc

SEQ ID NO: 33105 - DNA, 251 bp, Glycine max
  Clone ID: LIB3138-012-Q1-N1-E4
cctcattttcctattcgtttcacaacaacaaccatcaacacggcgggggccacttaccttaatcccgatactcccatatctcccattttctctataaacccgcacaacaatatgcaaaatcaccttcaccatctcactccacctcacgttcttacaaacaaatatatccttctttacaccactacttcgcctactcttcacgccaattccctctacctctatctccagcacccaacccacaaccttaacaa

SEQ ID NO: 33106 - DNA, 397 bp, Glycine max
  Clone ID: LIB3138-012-Q1-N1-E5
ggttattcgcgttttcttcttttgcatgttcatttctccgtcgatcagtgaagtgtgaaacgacgccgtttcgttgctctcggctcgaactgatggagtgggtttctctgtgatctcgagggggagttcggcgatgtgtgagctaattcggtgcctggtgtttgattctgttttcggttttgcgcatttttttgctcgaattatatgaaatgtttgattggaacgacgaagagctagctaacataatatggggtgaaggaggtgagagtgttgatcatattgtgccatatccagaggtaaatgaagatgttagcaacataaaagagtggaatcaagaagctgctgcgactaagctcaccaagctgaagaggccagaggcttaaactgattttcatga

SEQ ID NO: 33107 - DNA, 305 bp, Glycine max
  Clone ID: LIB3138-012-Q1-N1-E6
ttttacaagcgtaattttttgcttaataacgttatgtgatcggtgatgctattattactggtatgtttgagtcattcttttttttagttttaagaaaaaaattgtacaacaatttattttaatactttttaaatatttttattatgttttattattttttatattgcataattttataatggaacatcgtaaaatagaataataaacttattttatctatttctaacttacaatagtttctaaaattttaaaactgaaactcaaccctcaaaattaaaactaggtttaattttgaattatttcaa

SEQ ID NO: 33108 - DNA, 400 bp, Glycine max
  Clone ID: LIB3138-012-Q1-N1-E8
gacaaaactagtgcaactttgcaatttagaaagttagcagatggtgattttctcaagagaaactttaagcagatgtctaatgttttgtgggtggctcctgaggacaaggcgagtttatggtcacaacttcattatgtttcgtgtaataatctggaaatgcaagaagcttatcttgtcaatctcgtaaatgtgttacgagaattgtatttgcacagtccagaggaagctcgccaattgagaaggaaagctctctctcgtattgaatggctgcaaaaagctgatgtgcctaccatagcacagattgaagagttccattcgatgcagaggatgatgaatgctcctgattcaaatgataatattgatttactgttgagcattgatttgttgggtttacaaggag

SEQ ID NO: 33109 - DNA, 408 bp, Glycine max
  Clone ID: LIB3138-012-Q1-N1-E9
cgaggtgaaccttgacaagttcttcgaggacgtggaaggcgtgaaggaggaactaaaggagttggaaggtttggctcagagtctaaggagcagccacgagcagagcaagacgctgcacaacgcgaaggcggtgagggacctgcgcgcgcgcatggacggcgacgtctcggcggcgctgaagaaggcgaagctgatcaagctcaagctcgaggcgctggagcggtccaacgccgcgaaccggaacatgcctgggtgtggaccgggttcgtcctcggaccggacccggacctccgtggtcaacgggctcaagaagaagctgaaggatgctatggagagttttaacgagattcgccagcttgtgtcctcggagtaccgcgagaccgtgcagcggcggtacttcaccgtcac

SEQ ID NO: 33110 - DNA, 394 bp, Glycine max
  Clone ID: LIB3138-012-Q1-N1-F1
aagccattcattttgaacaacaaagagtgattaatcaagtccgacaacgggttttacaacaagccttacagggagctctaggaactctaaagagttgcttgaacaacgagttacatttacgtactgtcagtgctaatattggcatgtttgggacgatgaaagaaaaaataactgattagtctttctattataaaatagagtataggcattatttttttcttctaaaaaaataaaattaagaaattttcatggtaaccattcgtgcagatgaaattagtaaaattatccgtgaacgcattgagcaatataatacggaagtaaaaattgtaaatacgggtaccgtacttcaagtaggcgacggtattgctcgtatttatggtcttgatgaagtaat

SEQ ID NO: 33111 - DNA, 412 bp, Glycine max
  Clone ID: LIB3138-012-Q1-N1-F10
gcatttggaaatttggctgatgataccatcaattttgaggcttttccccacaagctggtgcagtttggagagattcaggaaaaagttgtattgaaattttcacaagaggaatttcttacagcttggtcaactcaggtgcgtcctgcaacaactctgttggctgatgggtgtccatatttgtatgcaatggtgcatgatagttcagtgtctacaataccaggtgattttgtcattggtgtcaagttgacaaccataaacaatatgtgtgcatatgggctcaatcctggtatttcaggttctcgtcttttgggcaccattcctcagtccatttcacagcaaactgtttggaatcaaatggcaacagtgagaacaccattgaattttgattctagcaagcagagcttttgtcagt

SEQ ID NO: 33112 - DNA, 404 bp, Glycine max
  Clone ID: LIB3138-012-Q1-N1-F11
atcccctccctcccattctcttttgactttcaaaaatggcctttgcaagtgtcatagccattgttgcatttcttcttctacaacctctttcaactacttctgacttcctttctccttggctttctcccatctttgatgatgtctgcaaagaagtggaatgtggaaaaggaacatgtaaaccttccaagaacagcactttcttgtttgaatgcgagtgtcatcagggttggaaacagagtctttccaatgatgatgatgagtcaagcttgaagtttcttccttgcatcgttcccaattgtacattggactactcttgctccaaagcccctgcccctgttcaagaaaaggcaacaaagtccaatgagtcaattttttatgcttgccactgggttgattgtggaggt

SEQ ID NO: 33113 - DNA, 361 bp, Glycine max
  Clone ID: LIB3138-012-Q1-N1-F12
ggcaaggaactcaatgtcagagaggcttgcaaaagacattgatgctgccatcaagaggatctcagatgaagcatatgaaattgcactggagcatataaggaacaaccgtgaggccattgacaagattgtggaagtccttctggagaaggagactctgagcggagatgaattccgtgctatattgtctgagtttgttgaaattccagctgaaaaccgtgttgctccttcaactccagtaccagccactgtttgaatagcctatatatgtaacatctttcatatgtattatcttagaatacagaatgccctctgcagcctgctccatatttgtgaatgattaaagattctaccttactttttc

SEQ ID NO: 33114 - DNA, 404 bp, Glycine max
  Clone ID: LIB3138-012-Q1-N1-F2
ttgggccaaatctctgaaagactgaccgttcaggtttctgatgtaaagaatgtcattatctggggcaatcactcatcaacccagtatcctgatgttaatcatgcaactgttgcaacctcagctggggagaagcccgtccgtgagcttatagctgatgatgcctggttgaatggggaattcattactactgttcaacaacgtggcgctgcaattatcaaagctagaaagctttcaagtgcactatcagctgctagtgctgcttgtgaccatattagagactgggttcttggaactcctcagggcacttgggtatcaatgggagtatattctgatggttcctacaatgttccagctggacttatatattcattccccgtcacttgtgccaatggggaatgggcaat

SEQ ID NO: 33115 - DNA, 328 bp, Glycine max
  Clone ID: LIB3138-012-Q1-N1-F3
taaccctaaatttttcatttcattacctaacaaaaacaatacgggacggggttttaaatatagtattttcccccctctactaacaaccaagatatcctcgaacaaacttctacccttaccctccttccttgccaattttaacaatttttgctcgaataaacaccccccctcctcattttcattcctttgttcttaataaaaaagaaatcccttttcaaatctccaaaacttacaatcccaaaatttcatgttacacatctttgcaacacaattttttatcataatcccattacatcttgttctcctaaaatacccaatccaaaataaa

SEQ ID NO: 33116 - DNA, 396 bp, Glycine max
  Clone ID: LIB3138-012-Q1-N1-F4
ggcagtggaagccgataatccttattttcgattgggttacaacagcttgggtgcttttgcaactatcaaccatcttcacttccaggcttattatttggctctgcccttcccaattgagaaggcccccactaagagaattgcaagtgtaaatggtggggtgaagatatctgaactgttgaagtatccggttagaggctttgtctttgagggcggcgaaatgctggaagatctatcaaacgttgtttcagatgcatgtatatgtcttcagaacaacaacatacctttcaatgttcttatctctgactgtggaaagcaagtgtatctgttaccacagtgttatgcagagaaacaagctcttggagaagtgaatgctgagcttcttgacacccaagtgaa

SEQ ID NO: 33117 - DNA, 396 bp, Glycine max
  Clone ID: LIB3138-012-Q1-N1-F5
ctggtttggccaatagattactgagtaagggcaatgatattctgtgttgcgattatgctagttttgatggtttgattaccaagcaagttatgagcaagatggcagaaatgataaacagtctttgtggtggtgatgaaaaattgatgcgtgaaaggacgcacctgctgttggcttgttgttcaaggatggcaatttgtaagaaagatgtttggagagttgaatgtggaatcccttctggatttccgctcacagttatttgcaatagcatttttaatgagatgctcattagatatagctatgaaaaattactgcgccaggctaaagctccaagtatgtttttacaattcttcaaaaattttgtttctttgtgtgtgtatggggatgataacttaatta

SEQ ID NO: 33118 - DNA, 305 bp, Glycine max
  unsure at all n locations
  Clone ID: LIB3138-012-Q1-N1-F6
ctcatttcttattttaatcactgagtaaggncaatggtgtgcgttgtttttattatgctattttccatattcacattaccaatcattttattatcatgatctcacaaattataaacagactctcttaaggaaatgaaaaatttattcgtataatgacgcacctacttatgacttaatgttcaattatggcaatattttttaaagacttctaaatactttaatatctaatccattttgcatttcctctaactatttttttcaataacatcatcattcctattcatattatatatatttattaaaaa

SEQ ID NO: 33119 - DNA, 399 bp, Glycine max
  Clone ID: LIB3138-012-Q1-N1-F7
ataggggcaaacagcaagtcctacccctaaccctaactggggagcttcttccttcagattcatccgtaccgctagttatattactggattcggggcagattgctgttaccgtgtttctccgctttcatttataagatgcacttctggtcatcattttaccaacatgcaggttttgagttgttggtttttgaatataaatggacgccaaacggttcatccagctggttgaggagaagaagaagaagattatggagagaaaggaagctcctctgaaatgggagcagaagctggaagctgctgctgaaactaaagagaggaagctgaaggctacaaagcataaaaaaagatctggctctgatagtgacagtgataatgacagtgatgatgagagtagaaaga

SEQ ID NO: 33120 - DNA, 397 bp, Glycine max
  Clone ID: LIB3138-012-Q1-N1-F8
cgaatggtgtctggcgtggaggcggaggtggttcgggtgatcggggagtgccggcgtgcgttgaagtttgctaggttcgtgagcaggttcgggaagagttaccaaagcgaggaagagatgaaggagaggtacgagatattctcgcagaatctcaggttcatccgctcccacaacaagaagcgtttgccctatactctctctgttaatcattttgctgattggacttgggaggagttcaaaagacacagactaggagctgcccaaaattgctctgccactcttaacggcaaccacaagctcaccgatgctgttcttcctccaacgaaagactggagaaaagaaggtatagtgagttcagttaaagatcaaggcagctgcggatcatgctggacattca

SEQ ID NO: 33121 - DNA, 393 bp, Glycine max
  Clone ID: LIB3138-012-Q1-N1-F9
cacgcgaacgggggctgcgtaatctccgaattcaaatctagcgctcatgtatgtttgacctcagtgaggatcctggggttgaggtgcgatttttcttcaacgaagcactacaagcaattgatcatgtcatgatgtcttgctaggcagaaatggttccacacgcatttaggttgaagacgtcagaagagatgctaatatttccaactaccataaataatactgcatagttatgtttagtgcttttcagtcattgaccattgatgtgatttagtttccattatatgctaatttccatatattatgtgttttttcctgattgtatttttcgtacatttttttttgatccttggtgtaatattctgctatgcaatgaatttgcacattttaattatt

SEQ ID NO: 33122 - DNA, 408 bp, Glycine max
  Clone ID: LIB3138-012-Q1-N1-G10
atttggctgatgataccatcaattttgaggcttttccccacaagctggtgcggtttggagagattcaggaaaaagttgtattgaaattttcacaagaggaatttcttacagcttggtcaactcaggtgcgtcctgcaacaactctgttggctgatgggtgtccatatttgtatgcaatggtgcatgatagttcagtgtctacaataccaggtgattttgtcattggtgtcaagttgacaaccataaacaatatgtgtgcatatgggctcaatcctggtatttcaggttctcgtcttttgggcaccattcctcagtccatttcacagcaaactgtttggaatcaaatggcaacagtgagaacaccattgaattttgattctagcaagcagagcttttgtcagttttcta

SEQ ID NO: 33123 - DNA, 376 bp, Glycine max
  Clone ID: LIB3138-012-Q1-N1-G12
aggaattggaaagcatctgcaatcctatcattgccaagatgtaccaaggtggtgctggtcctgacatgggtggtgctggtgctggggcagccgaagatgattatgctgctccttctggtggaagtggtgctggccccaagattgaggaagtggactaaatgtgtagttgctttcatccatttatctgtttaaaacttatttgatgcttttttattgaattttaacttttatgatttttgttggatgggatactaattgttctgcccgtgtgatatgaacgttgctttacacattatgacatttgctttatttcattagatgagaatactcattgttttacacttagttctgtggaattattctgtcttgatatttt

SEQ ID NO: 33124 - DNA, 404 bp, Glycine max
  Clone ID: LIB3138-012-Q1-N1-G2
ttcaaactcccttttggcttttctaagtgctgtgattctttctttcatgtttttcttcaggtcctaaagcatacttgtgatttcctccattatttcctttgagatttggacagtagttggtcatacacccaattctaaattagagttgggatgtctggaggagtagtttgatacagtgatgcatctccacagatacttgagtaaagctatatgctgtggtgtagatttttactatggagttaaatgcaagttatgacgtcgagcattcacattctacacaaagaatacagcatgagctgtggcctctagatccaattgatccaaagaaagcaaagtttccatgttgtttggtttggaatccacttcctgtggtctcatggttggctcccttcattggtcatgtt

SEQ ID NO: 33125 - DNA, 150 bp, Glycine max
  Clone ID: LIB3138-012-Q1-N1-G3
gctgaacttacaatatgtaaatattttgttggagatctaatgtggtaaggtttttagatgacaagtccctacaataaatgttctcaccctttctttataccaaattcaaacaccgcttttgataccaccaaattttaagcttttccccac

SEQ ID NO: 33126 - DNA, 398 bp, Glycine max
  Clone ID: LIB3138-012-Q1-N1-G5
tgcaattgaagttgaagtcttgcccttctctcttcaacgccaagcacaagacatcatcatccatggctgcctccgtctccactgtcggagctgtcaacagagctcttttgaacctgaatgggtctggacctggggtttcagctcccagttcatccttctttgggagcagcttgaagaaggttattggctcaagggtccccaacacaaagatttcctctggaagcttcaagattgttgctgtggaagagaagaaagagattgaagagacccaacagaccgacaaggacagatggaagggtcttgcctatgatatcttaaacgaccaacaggacatcacaagaggaaagggtttggttgactcccttttccaagctccacaggatgctggaactcactat

SEQ ID NO: 33127 - DNA, 399 bp, Glycine max
  Clone ID: LIB3138-012-Q1-N1-G6
gtcatttaatccaaacccgtgttctgatgcatggagtgtggaatttctgaagcgtactggatttcattgccatatcatttgtgtcactggatggactgccaccccaatgcaggatgttcaggttacaattgattggtttatttcctctcaggaatgtgttcccaggacctattgtgttttaaatccacaaaatccttttgtgttaaataggtggatgggaaaattgactttcccccagggcacttcccgaagtgttaagagaatgcctctttctatagggggaggagctggtgcaaagaatgctattctcatgaatatgccaaatgctgttctttcaatgtggagatattttgttggagatctcgtctttgaagtttctaagatgacttctccctacat

SEQ ID NO: 33128 - DNA, 295 bp, Glycine max
  Clone ID: LIB3138-012-Q1-N1-G7
aggagaccaggcatggccgttctgcacacataatgtgcgccagctcttttcgcaagaaatctaaccccactcttgtctcaaaggttccatgtgccactctcagaaactctctttctaatatgcaagaagttattcttggcaccaagctttccattctcattcctgctattccagctgtcatcggtgctaaaagctttggcttttgaagaccttcgatttttatattaagcatacttggacttacaccacttgctgaacgggagagcttcattacaaaacaaggtgccttatacac

SEQ ID NO: 33129 - DNA, 396 bp, Glycine max
  Clone ID: LIB3138-012-Q1-N1-G8
aggagaccatgcatggccgttctgcacacataatgtcgtgcaggtctttgcgcaagaaatctatcctaactcttgtctcaaaagttccatgtgccactctcagaaaattttttttaaaattggcaaaaggttttttttgcaaccaactttccatttttattccttgtaatccaagctgccatcgttgctgatggctttggttttggaaaaccttggatttttatattaagtttacttggacttacaccacttgctgaacgtgtgagcttcattacagaacaagttgccttttacactggtcccacagttggaggacttctgaatgctacatgtgggaatgttactgagctcataatagcaatatttgcccttaacaataacaaaattgccgtggtc

SEQ ID NO: 33130 - DNA, 375 bp, Glycine max
  Clone ID: LIB3138-012-Q1-N1-H1
ctgggaatgcagtagtcaaaaggagtgattgggcctcattggtgcaagtgtttttaacaaacagcaacagtacagagcattttgatgcatgtaagtggacaaaatcagaaccacattcctgggaattgatcttcccaatagaggtatgtggtcctaataatggttttgaaatgtggagttctgagtgggcaaatcaaacttcatggcatttgagttttcttattgacaatcccaaacagtctacagtttttgatattctcttgggaatctctcaagattttgaaattgctggtaatactcttatgccagctttttctgttccacaggctactgccagatcttctgaaaatgcggaatcctctgcatgatctggaa

SEQ ID NO: 33131 - DNA, 236 bp, Glycine max
  Clone ID: LIB3138-012-Q1-N1-H10
acaaggcagaaagcaagctcatcctagagttttaaaaatggcagcagcctcctccatggctctctcttccccatccttggctggcaaggccgtgaagctgggcccatcagcccccgaagtcggaagggtcagcatgaggaaaaccgtaaccaagcaggcctcttccggaagccaatgttccggccaaaacggcgtcaagtacttgggcccattctttggcaagcccccgtcctacc

SEQ ID NO: 33132 - DNA, 152 bp, Glycine max
  Clone ID: LIB3138-012-Q1-N1-H11
aggatgcccatctctatcccttccttttgtctcaaacacatattctttctgagaggtatggaattctttctaaatctagcatggacctcaaaaccacactgacggaggaggtcgaaacaatggcactgtcatgattggtgctaacgtgacca

SEQ ID NO: 33133 - DNA, 412 bp, Glycine max
  Clone ID: LIB3138-012-Q1-N1-H12
acaatgccgaacgcaagctcatcctacagtatcaaacacggttgcatttctggtgcatggatctctctttcccatccaaaacaggcaaggccgcgtagctgagcccatcagcccctctagtggggtgggtctgcatgaggataaccgtcacgaagcatgcctactacagaaacccttatgtcggcccagaccgcgatgcgtactagagcacattctctacatatcccccttgctacgttacctagcacttcccaagaagctacaagctggtcagctgatgtgctcacggctcgcttcgatggctgacacagacacacacaatcttataacagacactctacgtgggcaatacatattggcttaagagaggactatatctgaatagttatactatagctcttacatgatgcag

SEQ ID NO: 33134 - DNA, 282 bp, Glycine max
  Clone ID: LIB3138-012-Q1-N1-H3
gcggaagtgcgaataaattgacactgagcacgttgctcttcttgtgcacgcagcaggttgcaaaatgagaaaaggaaagagacaagtaggtgataatagtcaacctgtaagagagatgttaaggtgaacggatgagatggacaaccatctactaaatgcaatggttgaagaaactcgagcaggtaatagtaagatagatggaagttggacactacaagcttacacaaaaattgtccaaaccttgagagattcaggattaacggatgttacaaaaaaatcatg

SEQ ID NO: 33135 - DNA, 388 bp, Glycine max
  Clone ID: LIB3138-012-Q1-N1-H4
caacattcccacatctctcgtatacccttttgtctttggtcagcgaaggtatcttattgagagttcaagactagtcctttgatacgttgaatttctttcaagtattgagattcatttaaaaaatcaattttttgatatcttatacatacatctattgggatgtctagaaccgtggagatcacagttttgtcggcagagaaccttcaaatgaacaaaaaacccattatagggaacgcatttgtgacggttcaatccgacgctagcaacgacacaagtgccacaacagtggattctgaaggagggagttacccttcctggaacgagaagcttgtgatggacgtgccattgcatgcaaggtttataacccgtgaagtgaagagcaagacat

SEQ ID NO: 33136 - DNA, 260 bp, Glycine max
  Clone ID: LIB3138-012-Q1-N1-H6
ctgaggctgcttatccatataacagatcaccccaacagaagagggagggtactggtttgcggagtcaattggacttctgccagcttataatcctctctcctttatttattaacgaaatcatagtcattagtcttggctagtgctgttgcggactctttttcacaaagcgtgcatgtaacagcatccatgttttggtgatctttgacttgagaagagagaaaaatttcagtttaaaaaccgagggatatcggagctaaaac

SEQ ID NO: 33137 - DNA, 61 bp, Glycine max
  Clone ID: LIB3138-012-Q1-N1-H7
gaccggcttgctgtggaacctggtcaacatctgcttgtgggtgtgcggctactacctcgct

SEQ ID NO: 33138 - DNA, 382 bp, Glycine max
  Clone ID: LIB3138-012-Q1-N1-H9
ctcgagccgcgccacagcaactagaattggaacaaaccctatttctcttgtcaaggtttggctttttttctgctccaaaaccgtagaacaagcataggagagtgagaaggagcagcccctgaatttgtttttgcatgatataggcagaacaatgtcttcagatctcagtgattataaaatcatcaaggaaggagaagctgagattcttatgcacgcaaagaatgaagtcttctacaacaaaactcaggtcaataacagggatatatcaatcgctgtcttgagaacatttatatcgaaacggaagcaagagcatgaggcatatttgtccaaaagaacaaaaagggcacaaaaggcatctgaaaatggtgattcttctgaattg

SEQ ID NO: 33139 - DNA, 389 bp, Glycine max
  Clone ID: LIB3138-013-Q1-N1-A1
cttaaccctttgaacatcgttttgcagccatggaaacaggcgtagcatgctacactcgcgggcctttcttgcctagtgtttcttccaagcactctccaccttccatttctccatcttttggcttgaggagtctgaaatcaagctctttatttggagaatcgctaagagtggcctccaaatcaacaataaaggtttcaaagacaaagaatacttcactcgtgaccagatgtgaaattggtgacagtctcgaagaattcctcacaaaagcaacaccagataaggggttgatcaggttgttggtgtccatgggagaagcattgagaacaatttccttcaaagtgaaaacggcttcatgtggtggaacacaatgtgttaatacttttggggat

SEQ ID NO: 33140 - DNA, 407 bp, Glycine max
  unsure at all n locations
  Clone ID: LIB3138-013-Q1-N1-A10
gccatggaaacaggcatagcatgctacactcgcgggcggttgttgcctagtgtttcttccaagcactctccaccttccatttctccatcttttggcttgaggagtctgaaatcaagctctttatttggagaatcgctaagagtggcctccaaatcaacaataaaggtttcaaagacaaagaatacttcactcgtgaccagatgtgaaattggtgacagtctcgaagaattcctcacaaaagcaacaccagataaggggttgatcaggttgttggtgtccatgggagaagcattgagaacaatttccttcaaagtgaagacggcttcatgtggtggaacacaatgtgttaatacttttggggatgagcagctngcagtggatttgctagctaatcagcttctttttga

SEQ ID NO: 33141 - DNA, 392 bp, Glycine max
  Clone ID: LIB3138-013-Q1-N1-A11
gaaagctctctctcgtattgaatggctgcaaaaagctgatgtgcctaccatagcacagattgaagagttccattcgatgcagaggatgatgaatgctcctgattcaaatgataatattgatttactgttgagcattgatttgttgggtttacaaggagcaggtaaagcttttccaaacaaaattgtttttgatgataagcttgtgttggctaacacacaagaattctttgatggaaattttccagtggattcttggttaccaatttttgtgaattgtctttatcctgtaagtcaattaccttcagaagctgtcgttgtaaatgttacatgtggtagtggacgtggtggtttacccaccactgcttggattagttctgcagttaacaatcgct

SEQ ID NO: 33142 - DNA, 410 bp, Glycine max
  Clone ID: LIB3138-013-Q1-N1-A12
ggccatataatttttttttatttgaaataatgtccgggatcatccacaagattgaggagaccctccatgtgggagggcacaagaaagaggagcacaaaggagaacaccatggtgagcacaaaggtgaacacaaaggagaacaccatggtgagcacaaaggtgaacacaaaggagaacaacaccatggggagcacaaggagggacttgtggataagatcaaggacaagatccatggtgatggccatgacaagggtgagaaaaagaagaagaaggacaagaagaagaaggagcatggacatgaccatcatggtcatagcagcagcagtgacagtgattagatcttatatgttaagcaggtgtacggtacgatggtagtgaggagccagaatccctcttcctgctttatgata

SEQ ID NO: 33143 - DNA, 398 bp, Glycine max
  Clone ID: LIB3138-013-Q1-N1-A2
attatccaaaacgccccagtgccttacgctactgctttttgtgtgacagccatatcattaaatattaattaccagagtcaaaagaaaacaatgagtatgcatgtacggtgggtggctattattaattaagaccaaaaccatccaaattctttgcttgtacacctgaaccctaatgaccactttcacacactccattttccaccatgaccttctttttcttttctatttctttctcctcacggaatttccgccgcaggccaccgcgcagcctccgaacacgctgacgccgccgccgcagcaggaccgctttacgaggctgaagttcgacaaatccatggccatcgttctgctgatcctggtggtgggttcttcatcctagggttccctctcgtgtacac

SEQ ID NO: 33144 - DNA, 362 bp, Glycine max
  Clone ID: LIB3138-013-Q1-N1-A3
caagctggtgcagtttggagagattcaggaaaaagttgtgtgtgaaattttcacaagaggaatttcttacagcttggtcaactcaggtgcgtcctgcaacaactctgttggctgatgggtgtccatatttgtatgcaatggtgcatgatagttcagtgtctacaataccaggtgattttgtcattggtgtcaagttgacaaccataaacaatatgtgtgcatatgggctcaatcctggtatttcaggttctcgtcttttgggcaccattcctcagtccatttcacagcaaactgtttggaatcaaatggcaacagtgagaacaccattgaattttgattctagcaagcagagcttttgtcag

SEQ ID NO: 33145 - DNA, 68 bp, Glycine max
  Clone ID: LIB3138-013-Q1-N1-A4
aaaaaaaaaaaaaaaaaaaaaaaaaaaaaaaaaaaaaaaaaagaggaaaaaaaaaaaaaaaggggggg

SEQ ID NO: 33146 - DNA, 411 bp, Glycine max
  Clone ID: LIB3138-013-Q1-N1-A5
gtccgagcagctggtgacatatatctcgtgcactcaaagcgtgcgacagaccagaccagaatgcctctcaactactccaaatgggacaaccttgagctgtcggatgattccgacatcgaggagcacccaaatgtcgacaagaagagcatgatccgatggaagcagcgcgacatccacgagaagcgggagcagcgaaaattgcaaatcgcaaagctgcactctgagatcgctctcaacgctgtccttcgacctcgaatccagaccgttctggacggcacgcgctcaaagggtctggaccactaccgcgccgttcagcgccgtgtgaaagagtcgccatcggacgagaagcctaacaccggcgcgcctaaccagcccacttacgacatgatgcttgctcagcttctcggggat

SEQ ID NO: 33147 - DNA, 406 bp, Glycine max
  Clone ID: LIB3138-013-Q1-N1-A6
gtacagtctctttcttcatagcatttggaaatttggctgatgataccatcaattttgaggcttttccccacaagctggtgcagtttggagagattcaggaaaaagttgtattgaaattttcacaagaggaatttcttacagcttggtcaactcaggtgcgtcctgcaacaactctgttggctgatgggtgtccatatttgtatgcaatggtgcatgatagttcagtgtctacaataccaggtgattttgtcattggtgtcaagttgacaaccataaacaatatgtgtgcatatgggctcaatcctggtatttcaggttctcgtcttttgggcaccattcctcagtccatttcacagcaaactgtttggaatcaaatggcaacagtgagaacaccattgaattttga

SEQ ID NO: 33148 - DNA, 401 bp, Glycine max
  Clone ID: LIB3138-013-Q1-N1-A7
gtcattctgttgagatccgcataagcaaatcaatcatgcggttccttacttatctatgactctgcatatcacctacctaaaaccctaattctacatttggaaaggaaatctcaaatctaatgactaattaatcaatcaatcgtattaataatccatctatcaagtatggactcccaactcaaagacctcaattcgaaaccacccaactgcaacagcaaccccaacagcgtttgccacgaccgtcctcttctgaagccggagccttcggacttctacgacagcattgacgagatggagaagaagttcgccgcgtacatccgccgtgacgcagtacggcaccatgtgacgcggcgaactgccggcaaacgataagctcttgctcggcttcgcgttggtcactc

SEQ ID NO: 33149 - DNA, 399 bp, Glycine max
  Clone ID: LIB3138-013-Q1-N1-A8
gatgaatgctcctgattcaaatgataatattgatttggtggtgagcattgatttgttgggtttacaaggagcaggtaaagcttttccaaacaaaattgtttttgatgataagcttgtgttggctaacacacaagaattctttgatggaaattttccagtggattcttggttaccaatttttgtgaattgtctttatcctgtaagtcaattaccttcagaagctgtcgttgtaaatgttacatgtggtagtggacgtggtggtttacccaccactgcttggattagttctgcagttaacaatcgctcctcagatatcaacaaaaggattcgcacagcacttgggaaaggtaagaaaattgtttttcttactagagttgatccttttccagtagctttact

SEQ ID NO: 33150 - DNA, 398 bp, Glycine max
  Clone ID: LIB3138-013-Q1-N1-A9
caccatttctcagtccatttcacagcaaactgtttggggtcaaatggcaacagtgagaacaccattgaattttgattctagcaagcagagcttttgtcagttttctattgaccttctcggtggaggaatcttagtggacaaaactggagattggatcacacttatacaaaattctccaattagtaacttgttgagagttgctgcttggaagaaaggctgtttaatggtcaagattgtgatgtctgggaatgcagcagtcaaaaggagtgattgggcctcattggtacaagtgtttttaacaaacagcaacagtacagagcattttgatgcatgtaagtggacaaaatcagaaccacattcctgggaattgatctttccaatagaggtatgtggtccta

SEQ ID NO: 33151 - DNA, 340 bp, Glycine max
  Clone ID: LIB3138-013-Q1-N1-B1
ctgcaacaactctgatggctgatgggtgtccatatacgggtgcaacggtgcatgatagttcagtgactacaataccaggtgatcttgtcattggtgtcaaattgacaaccataaacaatatgtgtgcatatgggctcaatcctggtattacaggttctagtattttgggcaccatttctcagtacatttcacagcacactgttaggaatcaaatggcgacagtgagaacaccattgaattttgattctagcaagcagagcttttgacagatttctattgaccttctcggaagaggaatcttaatggacaacactggagattggatcacacttatacaaaa

SEQ ID NO: 33152 - DNA, 400 bp, Glycine max
  Clone ID: LIB3138-013-Q1-N1-B10
ctcgagccgctcaagagaaactttaagcagatgtctaatgttttgtgggtggctcctgaggacaaggcgagtttatggtcacaacttcattatgtttcgtgtaataatctggaaatgcaagaagcttatcttgtcaatctcgtaaatgtgttacgagaattgtatttgcacagtccagaggaagctcgccaattgagaaggaaagctctctctcgtattgaatggctgcaaaaagctgatgtgcctaccatagcacagattgaagagttccattcgatgcagaggatgatgaatgctcctgattcaaatgataatattgatttactgttgagcattgatttgttgggtttacaaggagcaggtaaagctttttcaaacaaaattgtttttgatgataagc

SEQ ID NO: 33153 - DNA, 405 bp, Glycine max
  Clone ID: LIB3138-013-Q1-N1-B11
gggctatatatcatgaacatttgagtcttcattgcgcgcgggcgacctcttccattaacgggtggtgcctctcttccatctccccagccaaaacctctctcaagaaggccacattacgcccttctgtctttgcaaccgttagcactccttcgtctccttctccttcttcttcttcttccttcccttctctcattcaagacaggcctgtctctgctgcccctgcccccatcatcaccccaactgtgacagaggatatggccacagaatacgatcaagctattgcagaacttcataaattgtcgagggagaagagcgaactcaaagccacagctgctgagaaagtggaacagattacagcttctctgggcacatcatcatgtgatggcatgcaatcatcagaagcct

SEQ ID NO: 33154 - DNA, 402 bp, Glycine max
  Clone ID: LIB3138-013-Q1-N1-B12
ctggtgcaaagaatgctattctcatgaatatgccaaaggctggtctttcaatgtggagatattttgttggagatctcgtctttgaagtttctaagatgacttctccctacattaaatgtacagtctctttcttcatagcatttggaaatttggctgatgataccatcaattttgaggcttttccccacaagctggtgcagtttggagagattcaggaaaaagttgtattgaaattttcacaagaggaatttcttacagtttggtcaactcaggtgcgtcctgcaacaactctgttggctgatgggtgtccatatttgtatgcaatggtgcatgatagttcagtgtctacaataccaggtgattttgtcattggtgtcaagttgacaaccataaacaatatgt

SEQ ID NO: 33155 - DNA, 407 bp, Glycine max
  Clone ID: LIB3138-013-Q1-N1-B2
gacgaccaacaagacatcacaagaggaaagggtttggttgactcccttttccaagctccacaggatgctggaactcactatgcagtcatgagctcctacgagtacctcagcactggacttcgccagtacttggacaacaaaatggatggattctacattgctccagcttttatggacaagcttgttgttcacatctccaagaacttcatgaccctgcccaacatcaaggttcctctcattcttggtatctggggaggcaagggacaaggaaaatctttccaatgtgagcttgtctttgccaagatgggaatcaaccccatcatgatgagtgctggagagttggaaagtggaaatgcaagagagccagcaaaactgatcaggcagagataccgtgaagctgcagacat

SEQ ID NO: 33156 - DNA, 408 bp, Glycine max
  Clone ID: LIB3138-013-Q1-N1-B3
ctcgctcgccaaaagaagcagctggagagtgagacagcgcagagggtgaacaagcgtcgtctggagcgcgagcgagggcgcagggaagccaccgcggatatgtctgaggacttgtcggaaggagagaagggagatccggtgagtgacgtgtcggctcacggcggcgacgccgccaacaaccgagccaggttgcctagaatcagttccgctgatgccatggagacttgggccaacagtcagaaagggaagaagctctacattgtactcatcagcattcatggcctaattcgaggcgagaatatggagctaggacgtgattctgacacgggtggtcaggttaagtatgttgtggaacttgcgagggcattgggatcaatgccaggagtttatcgggttgatttgctaact

SEQ ID NO: 33157 - DNA, 179 bp, Glycine max
  Clone ID: LIB3138-013-Q1-N1-B4
atgagatgctcattagatatagctatgaaaaattactgcgccaggctaaagctccaagtatgtttttacaatccttcaaaaattttgtttctttgtgtgtgtatggtgatgataacttaattagtgttcatgaatatgtcaagccttactttagtggttctaaattgaaaagcttttta

SEQ ID NO: 33158 - DNA, 316 bp, Glycine max
  Clone ID: LIB3138-013-Q1-N1-B5
aagagcttcaatggcggtttctctctctgttactcctcttggggtctccaattcttcgtcttctctatcttccaagccaaagtttccatctttgggctttctctctggcaccaacaccttgggggttaatggcccaaaacctttgacctcaacacctgtggttcattttgctccaaaaccgtgggatttttaacctgatcccttaaacccacctccaaaaacctttgttgatgactctgaccccaccacctttgaggttggtgacctggggactcctagcccttcggcaattaccattgtgtggcaattcaaatcc

SEQ ID NO: 33159 - DNA, 388 bp, Glycine max
  Clone ID: LIB3138-013-Q1-N1-B6
ctcgagccgaatcggctcgaggtagatttccatgacatgggagttataatgttataatatgaatggcaaatagatactattgagaagggaaaaaaaaaaaaaaaaaaaaaaaaaaaaaaaaaaaaaaaaaaaaaaaaaaaaaaaaaaaaaaaaaaaaaaaaaaaaaaaaaaaaaaaaaaaaaaaaaaaaaaaaaaaaaaaaaaaaaaaaaaaaggggggggcccccccataataacctcttccccccggaaaaaaattccgacccgttccctgtaggcgaccaacttttcctttaagagagcctatttaaacctgggcgaaataagggacaaaactgttccctggggaaaaatgttaccctttcaaaattccccaaaataaacaaccc

SEQ ID NO: 33160 - DNA, 338 bp, Glycine max
  Clone ID: LIB3138-013-Q1-N1-B7
aatgtaagtatgggatggaactggtgagcgcaaggaatggggtaggatctatgattatgatgtctacaatgacttgggcgatccagataagggtgaaaagtatgcacgccccgttcttggaggttctgccttaccttaccctcgcagaggaagaaccggaagaggaaaaactagaaaagatcccaacagtgagaagcccagtgattttgtttaccttccgagagatgaagcatttggtcacttgaagtcatcagattttctcgtttatggaatcaaatcagtggctcaagacgtcttgcccgtgttgactgatgcgtttgatggcaaatttttgagcc

SEQ ID NO: 33161 - DNA, 340 bp, Glycine max
  Clone ID: LIB3138-013-Q1-N1-B8
aaataatcttaagtggaaccttctgcgaaattagccttccttcgtcccttgattgaagtataaattaggggtgttgaaattcaaagccatatccgtcattaaccaaatttgtgtttctccgattgcaagcaatggactccttcaattccttcttcgattcaacaaaccgatggaattacgatactctcaaaaacttccgtcaaatttctccggtcgttcagaatcacctcaagcaggtttatttacttttgggtttccccggggttgttgcgcttgtggggcttaacttcattttcttttggacaatggggggtttcttactacaatggcatgccttgga

SEQ ID NO: 33162 - DNA, 399 bp, Glycine max
  Clone ID: LIB3138-013-Q1-N1-B9
gcgttgtctccaaagcacgccaaattacccacacgcaggcgacaacaaccgcgcgcgtttcacacctccataactcggagtagcatacgcagcgtcgttgactcgcaactcgtaacttggcctcgcgcgccgatggcgtcggtccccagcaccgtcgctccccgcaccttcctgccgtcgattcccaagccgagagctcctcttcacgccgcgaaatccgtcgccagcgccgcgcgcaacttcccgagactttcgcacaacctcattctctccggaaacaaacgcgcggtggcggtgaactcggcgtcggaggagttcgacgtgatatcggtgcagagcgaggacattaccgaccagcatgagggcgtcgtggtgagccgcgtctagatggaaggtgga

SEQ ID NO: 33163 - DNA, 354 bp, Glycine max
  Clone ID: LIB3138-013-Q1-N1-C1
gttgtttctgaggctcccctcacctctctctccgaaatccgcaaattgcctgtgaatgctagaaaccctaggcacgttcgatttgatgctctcccatttgcaatcaagggcgagcgcattcggttcttgcacgcaaggctggtactaccgctgcatcggcctcgatccctgaattcatcattctttctcgcaccatctttttctattccgattcgatttgttggtgttgttgttgttgttgtgtttttgtttccttccttgacgaatcatcacgatgttgatgagcaagcagaagaagagccagatccagaacgcgaagaggttgttgataagcatcaatgtgctggggagcgc

SEQ ID NO: 33164 - DNA, 405 bp, Glycine max
  Clone ID: LIB3138-013-Q1-N1-C10
tggtgctggttcacattcttcagaagattttcctgaaaaggaagatcaagaaaaacccaaaaagattgatgccagattgagacaaagaatagatcctcaatacaatgaggttcaggctcagatggaaacaaatttgtttaaattgtctcttgatgatgttgaaactcctaaaggttccatgttggatctgaaaatttctcaatctaaaattgcacttcccaagaacacagttggaggaaccattctgcgtagtgatctattggcaaattttttgacagagggcaattttagagcaagtgttgatttgcagcgcactcatcgtattagaggaatgattaaaatggtggccacagttggtattcctgagaatacaggtatatcattggcctgtgctatgaatagttc

SEQ ID NO: 33165 - DNA, 405 bp, Glycine max
  Clone ID: LIB3138-013-Q1-N1-C12
gttcagtgtctacaataccaggtgattttgtcattggtgtggagttgacaaccataaacaatatgtgtgcatatgggctcaatcctggtatttcaggttctcgtcttttgggcaccattcctcagtccatttcacagcaaactgtttggaatcaaatggcaacagtgagaacaccattgaattttgattctagcaagcagagcttttgtcagttttctattgaccttctcggtggaggaatcttagtggacaaaactggagattggatcacacttatacaaaattctccaattagtaacttgttgagagttgctgcttggaagaaaggctgtttaatggtcaagattgtgatgtctgggaatgcaacagtcaaaaggagtgattgggcctcattggtacaagtgt

SEQ ID NO: 33166 - DNA, 385 bp, Glycine max
  Clone ID: LIB3138-013-Q1-N1-C2
caactcaggtgcgtcctgcaacaactctgttggctgatgggtgtccatatttgtatgcaatggtgcatgatagttcagtgtctacaataccaggtgattttgtcattggtgtcaagttgacaaccataaacaatatgtgtgcatatgggctcaatcctggtatttcaggttctcgtcttttgggcaccattcctcagtccatttcacagcaaactgtttggaatcaaatggcaacagtgagaacaccattgaattttgattctagcaagcagagcttttgtcagttttctattgaccttctcggtggaggaatcttagtggacaaaactggagattggatcacacttatacaaaattctccaattagtaacttgttgagagttgc

SEQ ID NO: 33167 - DNA, 390 bp, Glycine max; identical to SEQ ID NO: 32964
  Clone ID: LIB3138-013-Q1-N1-C4

SEQ ID NO: 33168 - DNA, 310 bp, Glycine max
  Clone ID: LIB3138-013-Q1-N1-C5
gagtggtgcttttttacattcttcaaaaaattttcctgaaaagggggatcattaataacccaaactgatttatgccagattgagacaaataatatatccttaatacactcagattgacgctctagattaaccaacaatctataaagtgcactattccgcatattcaactacttttcggtactgactttaaaccgtaaatttaaaatgttaaaaaaaagtattcaagagctcttctaacacaaaaacgtatttttacttccctgagactttttattcatcttagttcattatctaatttgtttaattatta

SEQ ID NO: 33169 - DNA, 409 bp, Glycine max
  Clone ID: LIB3138-013-Q1-N1-C6
ggcattcctgctgatgttcttgcaaagcgagctcatgaatttgaaaaacatgttgctcatgaaagcctcaaggatcagattcctgctgttgacaagttgtattctactaaggttaataaatttgcaaaaattatgaaccttagacaaagtgttgttggtgatcttaaacttcttactgatgggaagttgtatgagggtaagcatattcctgtatctaatattagtgcaggggaaaatcatgtagttcaaatacccttaatggcacaggaggaaattctgtcttctagtgcaagtgatttcagaactgcaatggtgagtaaaaatagcaagcctcaagctactgcaatgcatgtgggagctatagaaattatcattgatagtttcgcaagtcctgattgcaacatagttg

SEQ ID NO: 33170 - DNA, 215 bp, Glycine max
  Clone ID: LIB3138-013-Q1-N1-C7
ggaaaaataggtgtttacttggtagtcatattaattggcagtggcaaatactgcctaagacactgtgaaggtctggttgttagaaatttggcatgtatttgatttttttggatcctttatttctcgttttatttctggttgtgcagccactttgggaattgtattggacaactttctgttgccatctaatctagttgaagctagcttatcgtgtc

SEQ ID NO: 33171 - DNA, 401 bp, Glycine max
  unsure at all n locations
  Clone ID: LIB3138-013-Q1-N1-C8
ctaccctgaacatagtaaagaagccagtgctaggattggtgggtgaagcaatggctcaaaccatgttgctcatgtctagtgtctctagcagttattccgtggatttgaagaaagaccttttcctccaattgcagagtcaaagtttaaggcctaagttctctcagctctcattcaacccacttccatcatcaacttcttccttttcttcaccccgtacattcacaactctggccctcttcaaatctaagaccaaagccgctcctgctaagactaaggttacaaagccaaagcaaaaggttgaagatggtattttttgcacttctggaagatttggttctactaaacagaacgagctctttgtgggtcgtgttgctatgcttggtttngcaacatcactgttg

SEQ ID NO: 33172 - DNA, 404 bp, Glycine max
  Clone ID: LIB3138-013-Q1-N1-C9
attctttctaaggttgcacaagatatggttgaggaatggttcgattgtgttgatgaggaggattcctttgaggaagtttctttaagtgcagcacttaatggtgttgagggtttggactatatggaaagaattcctcttgccacatctgagggatttcctcatgtgctttcacgcaaaaatggtgaaaaaggcaaaaggagatttgtctctggggatggtgaagagatgacactgattccgggaaccagtgttgaagaggcttacaacaagctaatagttgaacttgagaaaagtgttcctacattggttggcattgaatgtcccaaggatgagaaacttcctcgtcgcaaaatttttgacaaacctaagacgcgctgcttcactattctccctatggagtttaa

SEQ ID NO: 33173 - DNA, 402 bp, Glycine max
  Clone ID: LIB3138-013-Q1-N1-D10
gctacttatgggaatacttggccctcacaggagataagcttaatggtgttgaaatgattgcctgccgccttgctactcattattcactaaatgcaaggcttgctttgcttgaagaacgtcttggtaaactaatcacagatgaaccttctgttgtggaggcatcccttgcacagtatggtgatcttgtttatccagataggagcagtgtccttcacaggattgatacaattgatagatgtttcagtcaagaaactgtggaggaaattattgaagctttggggaaagaagctactgaatcttgtgacgaatggtgtttgaatactctaaggagaataagagaagcctcccctttgagtttgaaagttactttacaatctatacgtgaaggtagatttgaaactc

SEQ ID NO: 33174 - DNA, 394 bp, Glycine max
  Clone ID: LIB3138-013-Q1-N1-D11
caatttttatggcttttccccacaagctggtgcagtttggagagattcaggaaaaagttgtattgaaattttcacaagaggaatttcttacagcttggtcaactcaggtgcgtcctgcaacaactctgttggctgatgggtgtccatatttgtatgcaatggtgcatgatagttcagtgtctacaataccaggtgattttgtcattggtgtcaagttgacaaccataaacaatatgtgtgcatatgggctcaatcctggtatttcaggttctcgtcttttgggcaccattcctcagtccatttcacagcaaactgtttggaatcaaatggcaacagtgagaacaccattgaattttgattctagcaagcagagcttttgtcagttttctattga

SEQ ID NO: 33175 - DNA, 390 bp, Glycine max
  Clone ID: LIB3138-013-Q1-N1-D12
gaaacacatgacttgattacaagatcatcactttgttgtgaccaaagtgatgaacctgctagggcgagtgagattgaatctttgaagcaacttaatcctgataatgtcttctacaaaaatgaaaatgcagtttcttttaagggtgactcctctgttagagaacctaaatctaatatggaattagatctaaagaataatacacctctaggggatacagcatcaattactccttctagcattgatatgatcactacggatgttttggcctcagaccctccattacattcatcacctgtgtggttaaattcttgcaagtcttccagtaacaagatatgttccaacatgcaattttcttttcaagagcttaagaaaaggagagagaagaggttt

SEQ ID NO: 33176 - DNA, 398 bp, Glycine max
  Clone ID: LIB3138-013-Q1-N1-D3
gggaattgatcttcccaatagaggtatgtggtcctaataatggttttgaaatgtggagttctgagtgggcaaatcaaacttcatggcatttgagtttccttattgacaatcccaaacagtctacagtttttgatattctcttgggaatctctcaagattttgaaattgctggtaatactcttatgccagctttttctgttccacaggctactgccagatcttctgaaaatgcggaatcctctgcatgatctggaatttgtgttttctttcgcttgttcgtttgtttaattcaataaaggaaattaggcatgaccctcttgttgagtatgctctgcctatttgaaaatttccacacctcttttaattgtcgtaatgatgtgtgaagtgtgtgttatttt

SEQ ID NO: 33177 - DNA, 372 bp, Glycine max
  Clone ID: LIB3138-013-Q1-N1-D5
acaaaggttgctttatgagataagatattgaagtagtgctaagtgcctaacacctgcagtgaacaatggcctctgcatcagcatctcttctcaagtcttcacttgttcttgacaagtctgagtgggtgaagggacaaacacttcgccaaccttctgctgcatcagttgtgagatgcaaccccaccaccccatcaggcctcacaatcagagctggttcctatgctgatgagctcgttaagaccgcgaaaacagtggctttaccaggtaggggtattttggccatggatgagtccaatgctacctgtgggaagcgtttggcttcaattgggctagagaacactgaagctaaccggcaggcgtaccgtacccttc

SEQ ID NO: 33178 - DNA, 406 bp, Glycine max
  Clone ID: LIB3138-013-Q1-N1-D6
cgaaagtcaaatgcataaggtcatgtttgatgataaagagaacatctcatttattgatggcctcctagataaacaaccagtgttcaggtttccttgtcttcagaatgttgatgaaaatttaaagaagaataaggctgtaaaaatcgccaaaccacagaagcctacaaatgcaagtgtccgagctggtgattggatctgcctggtctgcaacaacttgaacttctcttttaggaatgaatgtaatcgctgtagagctcaaacaaggaagcaaaactacattcagagtctcctcttgatttcggatagtcccaaaactgaagctagttctcctaaaagactggccctcaaggatctgaccaatcagatggctcctccaaacaattctaaccctttgggaatgctagtc

SEQ ID NO: 33179 - DNA, 366 bp, Glycine max
  Clone ID: LIB3138-013-Q1-N1-D7
atttgggttttgtggttgatgaggttgagattgaaatggagggtgatgatggcgatgggaattcggtggcgtcagggttcactaatgccgttgaggaggaagaagaggaggaggaggaggatgccggggaagaggcgctgaggtacctcgaatgggagattctcttggcggttaacaattcggagaggaatgtgaatggtgtgttggagcacgagggcaatgctgttggtggtgctgatttcttaacaattcaggatggttatgtgtatgccgcagagtatgatgtttcgttcgggcagtttcttgagaatgagagtgccttgaaaggaagccctccggctgctaagagtgttgtggagagtctcc

SEQ ID NO: 33180 - DNA, 399 bp, Glycine max
  Clone ID: LIB3138-013-Q1-N1-D8
ctcgagccgattcggctcgagctcgagccgctcgaggggtgcgtagtgatctattggcaaattttttgacagagggcaattttagagcaagtgttgatttgcagcgcactcatcgtattagaggaatgattaaaatggtggccacagttggtattcctgagaatacaggtatatcattggcctgtgctatgaatagttcttttagggggcgcgccagttctgatatttacaccatctgctctcaagactgtgaattgtggaatcctgcttgcacaaaagcaatgactatgtcatttaatccaaacccgtgttctgatgcatggagtttggaatttctgaagcgtactggatttcattgcgatatcatttgtgtcactggatggactgccaccccaatgc

SEQ ID NO: 33181 - DNA, 256 bp, Glycine max
  Clone ID: LIB3138-013-Q1-N1-D9
gggaatctctcaagattttgaaattgctggtaatacggttatgccagctttttctgttccacaggctactgccagatcttctgaaaatgcggaatcctctgcatgatctggaatttgtgttttctttcgcttgttcgtttgtttaattcaataaaggaaattaggcatgaccctcttgttgagtatgctctgcctatttgaaaatttccacacctcttttaattgtcgtaatgatgtgtgaagtgtgtgttatttt

SEQ ID NO: 33182 - DNA, 409 bp, Glycine max
  Clone ID: LIB3138-013-Q1-N1-E1
attgtgattttctcaagagaaactttaagcagatgtctaatgttttgtgggtggctcctgaggacaaggcgagtttatggtcacaacttcattatgtttcgtgtaataatctggaaatgcaagaagcttatcttgtcaatctcgtaaatgtgttacgagaattgtatttgcacagtccagaggaagctcgccaattgagaaggaaagctctctctcgtattgaatggctgcaaaaagctgatgtgcctaccatagcacagattgaagagttccattcgatgcagaggatgatgaatgctcctgattcaaatgataatattgatttactgttgagcattgatttgttgggtttacaaggagcaggtaaagcttttccaaacaaaattgtttttgatgataagcttgtgtt

SEQ ID NO: 33183 - DNA, 383 bp, Glycine max
  Clone ID: LIB3138-013-Q1-N1-E10
cggctcgagcctcagtccatttcacagcaaactgtttggaagcaaatggcaacagtgagaacaccattgaattttgattctagcaagcagagcttttgtcagttttctattgaccttctcggtggaggaatcttagtggacaaaactggagattggatcacacttatacaaaattctccaattagtaacttgttgagagttgctgcttggaagaaaggctgtttaatggtcaagattgtgatgtctgggaatgcagcagtcaaaaggagtgattgggcctcattggtacaagtgtttttaacaaacagcaacagtacagagcattttgatgcatgtaagtggacaaaatcagaaccacattcctgggaattgatcttcccaat

SEQ ID NO: 33184 - DNA, 398 bp, Glycine max
  Clone ID: LIB3138-013-Q1-N1-E11
caaatatgatataattggtgctggttcacattcttcagaggattttcctgaaaaggaagatcaagaaaaacccaaaaagattgatgccagattgagacaaagaatagatcctcaatacaatgaggttcaggctcagatggaaacaaatttgtttaaattgtctcttgatgatgttgaaactcctaaaggttccatgttggatctgaaaatttctcaatctaaaattgcacttcccaagaacacagttggaggaaccattctgcgtagtgatctattggcaaattttttgacagagggcaattttagagcaagtgttgatttgcagcgcactcatcgtattagaggaatgattaaaatggtggccacagttggtattcctgagaatacaggtatatcat

SEQ ID NO: 33185 - DNA, 405 bp, Glycine max
  Clone ID: LIB3138-013-Q1-N1-E12
cagagcctctgcttccgacacaaatcaatctttctgggcatatattattcttttgtttttttaatttattctccatacacatgcagacaataagttcgaacaagttcaggagcggcatggatttcttccaccgcgcgaaggcggtgcgcctccgcagccaccacgacaagtacctcctcgcggaggaggacgaggagtcggtgacgcaggaccgcaacggctcctccaaaagcgcacggtggacggtagaatacgtggccgaatacgacaacataattcgcctgaagagctgttacggcaagtacctcaccgcttccaaccacctcttcctcttgggcatgacgggccacaaggttctccagacgcttccctcgaggctggactcttctgtcgagtgggaacccg

SEQ ID NO: 33186 - DNA, 407 bp, Glycine max
  Clone ID: LIB3138-013-Q1-N1-E2
attacccctttggttttttgtgaggaataattaaaatctgggtcattttatcacaaagtgacattgattctctataccctatagtgcctcaacctcacaaaactaaaaggccaaagagaaattttgttcaattggggtgctagctataatgggtaacacatttggtgcgaagaaaaccacaaaggttatgaaaattgatggtgagacattcaaattgaagacaccagtgaaagttggggaagtgcttaaggatcaccctggtcttgttttgctagattctgaggcggttaaacactatggcgtgagagcaaagccattggaagcacacaaggatttgcagcctaagaggctgtattttcttgtggagcttccgaaggagacgacgccgcgaagggttcgttccggca

SEQ ID NO: 33187 - DNA, 407 bp, Glycine max
  Clone ID: LIB3138-013-Q1-N1-E3
tgcaaaacgaaaattatacatatccaacaatgacgaccacgggggttgctctctgccttttatttgcattcctcttctacgcggctgaaggagccaaggttagtttcaataacaagtgcacatacacggtatggccaggaaccctaaccggtgaccaaaagccccaattatcaacaactggtttcgagttgggtccaggagcatccaactctgtggaccttccatctccatggtccggtcggttctgggcccgaacaggatgctccaacaacaacggaaggttcagctgcgccaccgccgattgcgcctccggtcaagtcgcatgcaacggtgccggtgcaatcccgccagctactttggtagaaatcacagttgcagcaaacggagggcaagatttctacgacgtg

SEQ ID NO: 33188 - DNA, 406 bp, Glycine max
  Clone ID: LIB3138-013-Q1-N1-E4
gtagacacagaagtcacggtatttgccaatggtcaactaaaagtgtgtcttcttccttgaactctcctctaagaatacccttagcaagttcaaggaagaagacacaattttagtagacacagaagtcacggtatttgccaatggtcaacttccccaacaaaagctagtttttaggagggttgaagctgattccaattctactgttgaagacagaagggaaggctttccacagattctgtgaacgcacgttactgctccttatttctccacatgctaggtttcacaacaaattttgagtataggtcgttttcttacactaatgcaactctgatcttgttcatagcatgatatagtttatagttcttcacacaataacttttattggtcaatacaaataccatgctta

SEQ ID NO: 33189 - DNA, 314 bp, Glycine max
  Clone ID: LIB3138-013-Q1-N1-E5
gagaattccaagttctgttctgagaagaattcacaacaaccggccttctctgttttattttattccttcactctgtgaaaacaaaacatcatgtctcagaaccagaatggcaagtgggtgcgaattgccccagaacaagttcgaggctcctccaatggacacgtggaagtgggaggttccaacaggctctgcataaaccctcagaaagatcacaagtccgaaagctatgaggaccttcaattggagttcaaccctcttgtgttcagctttctggagcagtatttgcctcctcacatgttgaacctctcacgtga

SEQ ID NO: 33190 - DNA, 374 bp, Glycine max
  Clone ID: LIB3138-013-Q1-N1-E6
cgagcttcggctggatccacgggcttcgcttctcgggcgtcgacctcgaccgcttccccaacctgaaggcgtggtgggagcgcatcaacgagcggcctgcggtacaagctggtctggccattccttccaagcctggcattggcaacgatggatacctgcagaagctgagcgaggacaaggagttcgctgcgaaagagaaggagatcgccgaccagattcagaaggccaaagaacagtatggttacaagtactcctcgccgtgagcgatggacgttcggatgagggatgccgagctggcgtcaacgtgacgcccggcagcggcttcttggtggaagcataataaagctcacaataatttatagaaatttatcttc

SEQ ID NO: 33191 - DNA, 403 bp, Glycine max
  Clone ID: LIB3138-013-Q1-N1-E7
gtgtttttaacaaacagcaacagtacagagcattttggggcatgtaagtggacaaaatcagaaccacattcctgggaattgatcttcccaatagaggtatgtggtcctaataatggttttgaaatgtggagttctgagtgggcaaatcaaacttcatggcatttgagtttccttattgacaatcccaaacagtctacagtttttgatattctcttgggaatctctcaagattttgaaattgctggtaatactcttatgccagctttttctgttccacaggctactgccagatcttctgaaaatgcggaatcctctgcatgatctggaatttgtgttttctttcgcttgttcgtttgtttaattcaataaaggaaattaagcatgaccctcttgttgagtatgc

SEQ ID NO: 33192 - DNA, 380 bp, Glycine max
  Clone ID: LIB3138-013-Q1-N1-E8
gtcggtaacgcgggcggtatcatcagctcgttcctgtgccggtcgacccaggcgccgcgatactaccaaggccacggtgtcaacgttgcgtactgcttcatgacggtctgcctcgctggcttcatgacgttttacctcgagcaccagaacaagaagaaggccgagctgcgcgagtcgcgcacgtggacggccgaggagcggagcgagatctctgaacgccaagccgacagctcgccgttctttgtctacacgctttaaaatggcggggtgtgggctggcagggctggcgatggggcgtgtgaagggctcattggtttagatggcagtgaaaatgacaacacatactttgtatattgttttgatgcaaatgtgaagtgatg

SEQ ID NO: 33193 - DNA, 406 bp, Glycine max
  Clone ID: LIB3138-013-Q1-N1-E9
agaagatcgaacgaaggctccttccgttattccattcagcgattccatggtggcgagaggcgtgccggcaatggcggcggtggccgttgccgcccttgacttgacggaatcctccaactggtggcgggacatcaaccgctccccgctctggcaggatcgcattttccacctcctcgccatcctctacggaatcgtcgccgccgtcgctctcgttcaattagtgcgaatacaattgagagtgccggaatatggttggaccacgcagaaggtctttcactttctcaatttcattgtgaatggggttaggtgttttgtttttgtcttccgtcgggatgtgcagaagttgcagccagagattgtccaacatatcttacttgacatgcctagtcttgctttctttacaact

SEQ ID NO: 33194 - DNA, 409 bp, Glycine max
  Clone ID: LIB3138-013-Q1-N1-F1
cttttggaagcattgttcatggtctactgcccaagggtcggtgagaaaaggcattaccgaaggtggatgtcatgaagcagaatggcataacacctaccatccatgtttttacgtcactaatagttcatttctttaaagagaaacaagtagagaaagctattgagacttttgaggagatgctacactcaggttatgaaccaaccattgtcacatattctgcacttatacgtgggtacatgaacgttgggaggcctattgatgcgtgggatatcttctaccgtatgaaactcaaaggaccctttcctgattttaaaacgtattctatgttcctcacttgcctttgcaaggttgggaaatctgaagaaagaatgagacttatttctgaaatgttggacagtggaattgttcc

SEQ ID NO: 33195 - DNA, 292 bp, Glycine max
  Clone ID: LIB3138-013-Q1-N1-F10
atatacatgggaagccgagaggatattctaaaacgcggggtgttgttttgcaaggcagctgctgaggttccttggcatgttccatgtggtggtgtttgctatggagatggaaatttggccttcatcgcaaatgattggcatactgctttgctgccagtgtatctgaaagcctattatcgtgaccatggtataatgaagtacacaagatctgttcttgtgattcataacataacacaccagggtcggggccccgttgatgattttcgcttcacggacttaccttaacactaca

SEQ ID NO: 33196 - DNA, 390 bp, Glycine max
  Clone ID: LIB3138-013-Q1-N1-F11
gaaaagagaaggcaatggctatcaggttgatggattgggactctccattcttcaacactctgcacagaatcatggatctgacggaggacgccgagaagaacttgaacgctccgactcggacatacgtgcgcgacgccaaggcgatggctgcgactcctgctgacgtgaaggagtaccctaactcgtacgttttcgtgatcgacatgcctggcctgaaatctggggacattaaagtgcaggtggaggacgacaacgtgcttctgataagcggcgagaggaagaaggaggaagaaaaagaaaaagaagggggaaagtatttgaagatggagagaaagcttggcaagttgatgaagaagtttactctccctgagaatgccaacaccgatgcta

SEQ ID NO: 33197 - DNA, 315 bp, Glycine max
  Clone ID: LIB3138-013-Q1-N1-F12
aaagaatttgatgcagtcagcacaagcgaacaccctagtgtggtggtagctggttcacaagaatgtgtgattctacactaacaaggctctaaaattatgaacaaattcagcaaatccgtagtgctttaagaataattgctgaattgtgtcaccgtttaagtcacatagtattgtgctgtgcttgagccttaaggtcctgtgttgtatgtatttgctgttatctgcctttatgacgcgttcatgtgaaagtacgatgtaataactgctcacctgagtactgttgttggtgttttggggtatgatgtatcataatgc

SEQ ID NO: 33198 - DNA, 414 bp, Glycine max
  Clone ID: LIB3138-013-Q1-N1-F2
cacaatccacttcaatcttcattcccagattacccttccttggattcccctcacaacaattacaactaccaaacccttccctcacaaccgtcacttcccacgcatccaatgctgcagcaacaacaacaacaacaacagcatcgaaatcgacatggtgaagaacagccaaggaatctacgcccccaaagcctccaaggtggtcgtcctctgggacctcgacaacaaacccccccgcggcccaccctacgacgtcgccatctccctcaaaaccctcgccgcccgcttcggcgaccttgtcgacttctccgcctacgccaaccgccacgccttcgtccacctcccccagtgggtcctccagcaacgccgcgaccgcaaaaacctcgacatcctcgaacgaaagggaatcatcacccc

SEQ ID NO: 33199 - DNA, 408 bp, Glycine max
  Clone ID: LIB3138-013-Q1-N1-F3
caaaaagaggttttccaaacaaatccagaaaggaaaatacaggggggattttaataacagccacctctttgtaaaagagcacaggaaaaagaacaaagtttaagaaaccaagagtcagaaaataattaaagtctttacaggtcatttaacttgaaattttaagttagctgcagcaagttaatgcaggtttcgcctttgtgcaatttgatggtggcactactgatctatcattggcatttatcaattaaaaactacgatgtcctcttggaaagagcttggttttggagttctaaacatgcattgtagtgtcaaaacattagcctttggtaaattcggttctattttttctaaattgaaatatttttttcttcaatatattactatatttgcagccgtgagttgctttta

SEQ ID NO: 33200 - DNA, 402 bp, Glycine max
  Clone ID: LIB3138-013-Q1-N1-F4
ggagaagttgagttgtttggtgtggggggaagcccttttggcagaagggtgcagattgccctggaactgaagggagtccaatacacttactttgaagaagatcttaggaacaagagtgatcttcttatcaaatacaaccctattcacaagaaggtacctgtgcttgtccacaatggaagaccattggctgagtcccttgtgatccttgaatacattgatgagacatgggagaaccaccaccccatcttgccttaacaaccttatgatagagccttggctcgattctggtcaaagttcattgatgacaaatgcatgcctgcaatatcaaaggcagcatttactgcagacaaggaagaacgtgacaagggcactgaggaatcactcgagtctcttaaattcttg

SEQ ID NO: 33201 - DNA, 408 bp, Glycine max
  Clone ID: LIB3138-013-Q1-N1-F5
gtattttggaaggatgtcttacgttgctcataacgttaatcagccccaagagaaagatttgttggagggaaatttttcctttgatattaaatctcgctctagattggaaaaagtttcctctacaaaagcacaatttgttagtggaaaaaccttcaaatatgatataattggtgctggttcacattcttcagaagattttcctgaaaaggaagatcaagaaaaacccaaaaagattgatgccagattgagacaaagaatagatcctcaatacaatgaggttcaggctcagatggaaacaaatttgtttaaattgtctcttgatgatgttgaaactcctaaaggttccatgttggatctgaaaatttctcaatctaaaattgcacttcccaagaacacagttggaggaac

SEQ ID NO: 33202 - DNA, 404 bp, Glycine max
  Clone ID: LIB3138-013-Q1-N1-F6
gtgagaacaccattgaattttgattctagcaagcagagctggggtcagttttctattgaccttctcggtggaggaatcttagtggacaaaactggagattggatcacacttatacaaaattctccaattagtaacttgttgagagttgctgcttggaagaaaggctgtttaatggtcaagattgtgatgtctgggaatgcagcagtcaaaaggagtgattgggcctcattggtacaagtgtttttaacaaacagcaacagtacagagcattttgatgcatgtaagtggacaaaatcagaaccacattcctgggaattgatcttcccaatagaggtatgtggtcctaataatggttttgaaatgtggagttctgagtgggcaaatcaaacttcatggcatttgag

SEQ ID NO: 33203 - DNA, 408 bp, Glycine max
  Clone ID: LIB3138-013-Q1-N1-F8
tgcaattgaagttgaagtcttgcccttctctcttcaggtccaaacacaagacatcatcatccatggctgcctccgtctccactgtcggagctgtcaacagagctcttttgaacctgaatggggtctggacctggggtttcagctcccagttcatccttctttgggagcagcttgaagaaggttattggctcaagggtccccaacacaaagatttcctctggaagcttcaagattgttgctgtagaagagaagaaagagattgaagagacccagcagaccgacaaggacagatggaagggtcttgcctatgatatctcagacgaccaacaggacatcacaagaggaaagggtttggttgactcccttttccaagctccacaggatgctggaactcactatgctgtcatg

SEQ ID NO: 33204 - DNA, 405 bp, Glycine max
  Clone ID: LIB3138-013-Q1-N1-F9
agaaaagtcgagctgcacggccagctgttgatcaagataacgggacagctacgcaaaccaaagttgacaccaagacacacaacgtggctagaggaacccaggatgacactgagggggataacaaagttttgacacctaactctgatgcaaatggaaactctaagacagttgtgacacccaaacctgatcctgaagtgggtgaaaacaagccattgaaatcagattcaaacaaggagaacgtggaggtgccagaatctccttctaaatccaaagttactggtttggtagtggataattcagcccagaaggacgtagatgtcaaacaatccaaggttcagatcactaaaaacataaagccaaatattgactctgacaatgtagtgtccttctcaactaacaatgctg

SEQ ID NO: 33205 - DNA, 386 bp, Glycine max
  Clone ID: LIB3138-013-Q1-N1-G10
ctacaaccaacggacaagcttcgttctggcgaagaatggcggcgccgggctcatccgccggcggcggcggagggacggcgaaggctacggtggcggagcagatctcgcaggcggtgcagtccacctccaacctcctccaccttatgcggcactcttctcctgcccaggctcaactggttaagcttcctaagaatcttttggcaaaggtttccaccatcaagaatacagagcaggttttggagcagttgcctggggtgatatcatctcttgacgcacacatggaaaatgggttgcaaaatgttccacatctaaagaccgtggttcaagtactttcaaatatggaaagtagccagcttagcttgctatcccgaccccatcctctccag

SEQ ID NO: 33206 - DNA, 405 bp, Glycine max
  Clone ID: LIB3138-013-Q1-N1-G11
ctcgtaaatgtgttacgagaattgtatttgcacagtccagaggaagctcgccaattgagaaggaaagctctctctcgtattgaatggctgcaaaaagctgatgtgcctaccatagcacagattgaagagttccattcgatgcagaggatgatgaatgctcctgattcaaatgataatattgatttactgttgagcattgatttgttgggtttacaaggagcaggtaaagcttttccaaacaaaattgtttttgatgataagcttgtgttggctaacacacaagaattctttgatggaaattttccagtggattcttggttaccaatttttgtgaattgtctttatcctgtaagtcaattaccttcagaagctgtcgttgtaaatgttacatgtggtagtggacgt

SEQ ID NO: 33207 - DNA, 355 bp, Glycine max
  Clone ID: LIB3138-013-Q1-N1-G12
gcggaattctctgcatgatctggaatttgtgttttcgttcgcttgttcgtttgtttaattcaataaaggaaattaggcatgaccctcttgttgagtatgctctgcctatttgaaaatttccacacctcttttaattgtcgtaatgatgtgtgaagtgtgtgttattttaaaaaaaaaaaaaaaaaaaaaaaaaaaaataataatttaataaaaaattatttaaaaaaatttataaatattataaaaagattatttaaaaaaaaaaaattttaattagaatattataaaaggggggtccccactttttaagtttcgtcccccgggaatattcgtcttcctcaaaagatgttccttc

SEQ ID NO: 33208 - DNA, 402 bp, Glycine max
  unsure at all n locations
  Clone ID: LIB3138-013-Q1-N1-G2
ggtggaaaaacagggattattatttttgtagacctgaaaacggaggacaatgtctgctgaatcgccaagttctgctcgtaaaggggttgttcatctcagagccaccggcgatgctcctattctcaagcaatccatattcaagatagcaggaactgatgaattcgctgaagtgatagactttcttcgncgacagctccacagggaaacattgtttgtatacatcaatagtgctttttcaccaaaccctgatgaattgcccattgatttgattaataattttggttttgatggcaaactggaggtcacactacgcttgttctatggcatggggctaaccctgaatgatggctgcaggttacaaaagctccatattgtgaatacattgcttcctttcagaaattc

SEQ ID NO: 33209 - DNA, 351 bp, Glycine max
  Clone ID: LIB3138-013-Q1-N1-G3
gccagggaatcagatatggccagatcaaaagattaaattgagattgaaagtgctctatatgtatgctgctggattttatacatactccatacttgctttagtattttgggaaacgaagcgctctgactttgtggtttccatgggccatcatgttattactgtcattctcatcgtgttatcctacatttttaggtttgttcgtgttggatctgtagttttagctcttcatgatgctagtgatgtgtttattgagacaggaaaaatgtccaaatacagtggtgctgaaacaacagctagcattgcatttattctttttggtttgggttttaccgtgacacggatcatttacta

SEQ ID NO: 33210 - DNA, 336 bp, Glycine max
  Clone ID: LIB3138-013-Q1-N1-G4
gggatgaggataaaggggcttgccggaaaatataaaaaagaaagaaagaggtggtaacacgaaaggcgcgtggcagccgctggtttaaccgaaaagaaagcaactttgtcctacatcagaggcaacggaaaagaggatcctttctgcttcttctcttctcttccacacaaagacatcgtttcattgctctctctcttgtgcggacacaatttttgatggggatatacctcagcactcccaaaacagagaaggcctctgaagatggtgagaacgacaagcttcgcttcggtttgtcttccatgcagggctggcgtgctaccatggaagatgctcatg

SEQ ID NO: 33211 - DNA, 405 bp, Glycine max
  Clone ID: LIB3138-013-Q1-N1-G5
ctcgagccgattcggctcgagctggatttcattgcgatatcgtttgtgtcactggatggactgccaccccaatgcaggatgttcaggttacaattgattggtttatttcctctcaggaatgtgttcccaggacctattgtgttttaaatccacaaaatccttttgtgttaaataggtggatgggaaaattgactttcccccagggcacttcccgaagtgttaagagaatgcctctttctatagggggaggagctggtgcaaagaatgctattctcatgaatatgccaaatgctgttctttcaatgtggagatattttgttggagatctcgtctttgaagtttctaagatgacctctccctacattaaatgtacagtctctttcttcatagcatttggaaatttgg

SEQ ID NO: 33212 - DNA, 394 bp, Glycine max
  Clone ID: LIB3138-013-Q1-N1-G6
gagcaggtcaagctgtttcaaacaacattgtttttgacgatgggcttgtgttggctaacacacaagaattctttgctggaaatgttgcagtggattcttggttaccaatgcttgagaattgtctttatcctgtcagtcaattaccttcataagctgtcggtggacatgttacatgtggtagcggacgtggtggattacccaccactgctaggattaatgctgcatataacaattgctcctcacattttaacaaaaggattcgcacagcacttgggaaaggtcagaaaatattttttcttactagagatgatccttttacagtagcttcactggctggtcttttaggcgttcataatgaaagtcttggttctcacgccactcaacctatgctgac

SEQ ID NO: 33213 - DNA, 384 bp, Glycine max
  Clone ID: LIB3138-013-Q1-N1-G7
ggctcgtcactccttgctcttagccctcctcctcttcgccggcgtggccaccgccgcgatggcggtggccgcgtccgacgccgacgacatcctgatccgtcaggtggtgccagatgttggcgaagccgaagaggaggacaacctgctgaacgccgagcaccacttcgcgagcttcaaggccaagttcgccaagacctacgccaccaaggaggagcacgatcatcgcttcggcgtcttcaagtccaacctccgcagagccaggctgcacgccaagctcgacccctccgccgtccacggcgtcaccaaattctccgatctaactccggccgagttccgccgccagttcctcggcctcaagccgctccgcttcccggcgcacgccca

SEQ ID NO: 33214 - DNA, 408 bp, Glycine max
  Clone ID: LIB3138-013-Q1-N1-G8
ctctctctctctctctctcattcacacgaatcacactgtgcgcagtgcgattcattcaccaatggatcgcaacggtgttctctctcttgcattcatctgcattgtagtcgccggcgtcggaggccagtctcccgccgcagcgccctcgaacactccggcaacccccgccgccgccactcccgcccaagcaccttccacaccgaattcaccagccccagttgcttctcccaaatcatctccaccagcttcgtctcctaagcccgcaaccgcaacccctgcttcgtcgccggcggcatctcctaccaccacccccgccgcgcctgctccagcgaccaagccacctgcagcctctcctcctccggcgccggttcccgtgagctctccccccgctcccgtgccggtgagttc

SEQ ID NO: 33215 - DNA, 406 bp, Glycine max
  Clone ID: LIB3138-013-Q1-N1-G9
cttcactcaaattcgaagcgaaggagagaaaagaagaagcgaagtgtgtttgggaacaatggcagagcaaaagaaccggtggagctgggacgtcgccggctttgacccgtggaagtcgtctacgcctccgcagtcgccggcggcggcggaacacggcgatcggaaacctagtgcgccgttggtgcggcggtactccatttcggccacgtcggttcttccgcaatcgaagcacgctgtggccttcaagcttcagcggctgaaggaccaagtcaagcttgctaaagaagactatttgcaattaagacaagaagcaagtgaacttcaagaatattcaaatgcaaaacttgatcgagttacacgatatctaggtgttcttgcagagaaaacccgcaatctagatcaagtt

SEQ ID NO: 33216 - DNA, 235 bp, Glycine max
  Clone ID: LIB3138-013-Q1-N1-H10
ggaagtgattagaaatagaggcattcctgctgatgtgcttgcaaagcgagctcatgaatttgaaaaacatgttgctcatgaaagcctcaaggatcagattcctgctgttgacaagttgtattctactaaggttaataaatttgcaaaaattatgaaccttagacaaagtgttgttggtgaatagggaaggaaaaagatggaaaaaaatgtgactgtttcatgtactgatatttgt

SEQ ID NO: 33217 - DNA, 313 bp, Glycine max
  Clone ID: LIB3138-013-Q1-N1-H11
tcgaaagaaaaccagctttgttgttaatgtcttcggggtcggacaccacccaaaaacgacaacttccacttcaacacttgaagccaaatttttttttcaaactccaaacaccccctcctctctctctctctctctctctctctctctctcttatatgctttctttcttcaccaaacacaacacccttgtgatctgtctgtctctgcgttttcagtacgcatagatcctgctctattgttttctgaacccactcttccacttttaattccttagcccacacttgattattggggtcattaaaagatttcttttt

SEQ ID NO: 33218 - DNA, 399 bp, Glycine max
  Clone ID: LIB3138-013-Q1-N1-H12
ctgagtcttgcaattgaagttgaagtcttgcccttctctcttcaactccaaacacaagacatcatcatccatggctgcctccgtctccactgtcggagctgtcaacagagctcttttgaacctgaatgggtctggacctggggtttcagctcccagttcatccttctttgggagcagcttgaagaaggttattggctcaagggtccccaacacaaagatttcctctggaagcttcaagattgttgctgtagaagagaagaaagagattgaagagacccagcagaccgacaaggacagatggaagggtcttgcctatgatatctcagacgaccaacaggacatcacaagaagaaagggtttggttgactcccttttccaagctccacaggatgctggaac

SEQ ID NO: 33219 - DNA, 405 bp, Glycine max
  Clone ID: LIB3138-013-Q1-N1-H4
ggaactaaggatggggaacagtgggtttttgtattacaatcgagcaagtggaggaccctcttcttataagagtactcttgggggtcatcaccaccaagcattgttggcacagacccaccagggacatgttgggtttggggcagcatcatcgtctacatcatccttaggtgttgtgaatgcgttgaggaattcaaaatatgccaaagctgctcaggaattgcttgaagagttttgcagtgttgggagaggccagttcaagaagaacaagttcaataggcaactctcaaaccctagttccaatcttcgaggtagcggcggcggtgcttcttcgtcttcctcaaaagatgttcctcctttgtcagcagctgatagaattgagcatcaaaggaggaaggtcaaactcct

SEQ ID NO: 33220 - DNA, 330 bp, Glycine max
  Clone ID: LIB3138-013-Q1-N1-H5
gtctggattatggggtgcatgaaaacaatgatgaccttgacaatgggaaaactagtctgccccaaccttctttttctcattttggtcatgtgaatgcactcgcaggtttcttggaggagcacaaagtatatgtgaatagcttcttggggaatttgaggtttgcaaaggtgggtggtgtgccatcaagtgtgcctggagaagaaagcccttcaacaaacggagagggagatattagtagtaacaatggtaataatggtaatggtaataatgaaaacaaggatgaaaacggaggaaattcgccgcagaaggttgccaacaacatattcagta

SEQ ID NO: 33221 - DNA, 402 bp, Glycine max
  Clone ID: LIB3138-013-Q1-N1-H6
cggctcgagcggctcgagtccaccttcactgcaatgtccgcctgcgagctctcctcctccgccgccatctcctccttcccctcccgccgccgctccaacgccgtcgttctgtcgaggcgcagccgcgccgccagggtctccgccatggccaaggagttgcacttcaacaaagacggcaccgcaattaagaagctccagagcggtgtgaacaagctcgcggatctggttggggtcacgcttggtcccaagggaagaaatgttgttctcgagagcaagtatggctcgccgaaaatcgttaacgacggtgtcactgtcgctaaagaggttgagttggaggatcccgttgagaatattggtgccaagttggtgagacaagcggctgccaagacaaacgacttggct

SEQ ID NO: 33222 - DNA, 394 bp, Glycine max
  Clone ID: LIB3138-013-Q1-N1-H7
ccgagccaatcctctgtcattcatgatggattctagcgggtgatggggctaatgtggagctaatgaagggaacccacagatcagagccgggtctgacgcaccatgttatatgatgaacaacattcatattgataccaaactgcctgtagctggtgaccacaaatgggtggcatggatatgttccttcaatgtcctcatggcacccggtgagactcgctccatagtttgcagagctcgaaacttcttacagatctcagtgccatggccagccaggaagaagtcattcctagatggcatcaccattggacttcaaacaaggtatgtgatggagacatgatagatattcaaggccaagagaaaatcttactttcataaaccaaggaatgtggagaca

SEQ ID NO: 33223 - DNA, 275 bp, Glycine max
  Clone ID: LIB3138-013-Q1-N1-H8
gtcccacatctccatccagctcattagtgccaccaaggctggtggacatgggaaaggaaaagttggaaaggctacaaatttaagaggacaagtgtcgttaccaaccttgggagctggcgaagatgcataccatgttcattttgaatgggacagtgacttcggaattcccggtgcattttacattaagaacttcatgccagttgagttctattttaagtcttttacttttgaagacatttcaaaccaccgaaccattcactttgtattccacttct

SEQ ID NO: 33224 - DNA, 408 bp, Glycine max
  Clone ID: LIB3138-013-Q1-N1-H9
gaaagatttgttggagggaaatttttcctttgatattgaatgtcgctctagattggaaaaagtttcctctacaaaagcacaatttgttagtggaaaaaccttcaaatatgatataattggtgctggttcacattcttcagaagattttcctgaaaaggaagatcaagaaaaacccaaaaagattgatgccagattgagacaaagaatagatcctcaatacaatgaggttcaggctcagatggaaacaaatttgtttaaattgtctcttgatgatgttgaaactactaaaggttccatgttggatctgaaaatttctcaatctaaaattgcacttcccaagaacacagttggaggaaccattctgcgtagtgatctattggcaaattttttgacagagggcaattttag

SEQ ID NO: 33225 - DNA, 334 bp, Glycine max
  Clone ID: LIB3138-014-Q1-N1-A1
ctaaacaccacagaccaactcgtcaaggatttagagaacccgggtgatgatcaccatattcgtttgaaccatcacgctcagcctttcctatgtcaccaggtatgctgattatcaaccgggttctctaaacaccacacaccaactcgcctgggatctagaagattatgacatcgttttccacataggacgacatgccttatgcgaatggatacatctaacaacgggaccaattcacagctcaagtgccatatatttccttgacagtgccatacatgattgctagtggaaatcatgaacgtgactgcccaaacacaggatcattctatgatactcc

SEQ ID NO: 33226 - DNA, 399 bp, Glycine max
  Clone ID: LIB3138-014-Q1-N1-A10
ctcatttctttctattcatttcttcattccaccatcaccatggtcaaggagaagaagaacgtggtggtcaagaacaagaagccaaacaacaatgccgacgagcttcacttccgcggcgtccggaagcgaccatggggccgctacgccgccgagatccgtgaccccggcaagaagacccgcgtctggctcggcaccttcgacaccgccgaggacgccgcccgcgcctatgacgccgccgcccgcaacttccgcggccccaaagccaaaaccaacttccccgtgccccccgacgacaacaacaacaacaacgttaacgtgaacaaaaacaagagtgttaacgttaaatctcacagtcccagccagagcagcaccgtgaagtccgccaccccgaagcgtgaa

SEQ ID NO: 33227 - DNA, 82 bp, Glycine max
  Clone ID: LIB3138-014-Q1-N1-A11
cttttaatttattaatactttcactcaattaaggaggggtgtggataataagaacgtattggattgatctttaaccaatatc

SEQ ID NO: 33228 - DNA, 305 bp, Glycine max
  Clone ID: LIB3138-014-Q1-N1-A12
agaacaggtatttgttaactaataccgtgcagcaaaaggcttggtgagggaaatatgaacgtgttggtaccactcaaaaacgtgcccgtgccggcaaggtagctccattcactgggcttaagtacatggctgtcgtgcccacccgtaagaccaaccaggaacttaccttcatagatcgcaacggtggaggagtgctatgcctgcaggtatggccacgagctggcaaatagatgcgtgtgactctattctacgtgccagacattgatgatgcacatgtcggtgacgaagtacaataccttcttatg

SEQ ID NO: 33229 - DNA, 170 bp, Glycine max
  Clone ID: LIB3138-014-Q1-N1-A2
tgtgaatgtaaacttaagcttcctttagccaataataagtacagaatctcatggttatgaacctaatgtcagagctacaagagtaactgtttcggtacacatacaaggcacataaccatgagattgtgtacttattattgtgtgaatgtaaacttaagcttcctttagcc

SEQ ID NO: 33230 - DNA, 393 bp, Glycine max
  unsure at all n locations
  Clone ID: LIB3138-014-Q1-N1-A3
aaggaaagctctctctcgtattgaatggctgcaaaaagctgatgtgcctaccatagcacagattgaagagttccattcgatgcagaggatgatgaatgctcctgattcaaatgataatattgatttactgttgagcattgatttgttgggtttacaaggagcaggtaaagcttttccaaacaaaattgtttttgatgataagcttgtgttggctaacacacaagaattctttgatggaaattttccagtggattcttggttaccaatttttgtgaattgtctttatcctgtaagtcaattaccttcagaagctgtcgttgtaaatgttacatgtggtagtggacgntgtgttacccaccactgcttggattagttctgcagttaacaatcgct

SEQ ID NO: 33231 - DNA, 338 bp, Glycine max
  Clone ID: LIB3138-014-Q1-N1-A4
gctcttgttctctgattggcctagccagtagtagccaatttggtggagctggttgggaatggcgtcgaaaccgaaatcaaatggaaattccaaatgcaacaaaggattcgctgacagctatatgctgttgaatcctgaagacgctcatttcttcgatcttgttcatgtgctgtattcccgtaacttgggaaaccgaaaatttgtggacagcaatgctgagggatcttatgagggaagcttccgccaaagatggcttatattcgtctctgtggtgctccagaagcttctgttgctcatcgctaagccactttcgttctttggctcttgcgttgagttct

SEQ ID NO: 33232 - DNA, 384 bp, Glycine max
  Clone ID: LIB3138-014-Q1-N1-A5
ctcaggaatgtgttcccaggacctattgtgttttaaatccacaaaatccttttgtgttaaataggtggatgggaaaattgactttcccccagggcacttcccgaagtgttaagagaatgcctctttctatagggggaggagctggtgcaaagaatgctattctcatgaatatgccaaatgctgttctttcaatgtggagatattttgttggagatctcgtctttgaagtttctaagatgacttctccctacattaaatgtacagtctctttcttcatagcatttggaaatttggctgatgataccatcaattttgaggcttttccccacaagctggtgcagtttggagagattcaggaaaaagttgtattgaaattttcacaag

SEQ ID NO: 33233 - DNA, 386 bp, Glycine max
  Clone ID: LIB3138-014-Q1-N1-A6
aaagcagccgtagggcagtgctttcacttgttgctgctggtttggccactggctcttttgttcaagctgtgcttgctgatgccaaatctatcaaagttggaccacctcccccaccttctggtggattgcctggaacgttgaactcagatgaagcaagagaccttcagctgccattgaaagataggttcttccttcaaccattgtctcctactgaggctgcacaaagggcaaaggaatcagccaaggagattgttggtgttaagaagttgattgaaaagaaggcttggccatatgttcagaatgatctgcgtctcagggctgagtatttgcgctttgatctcaacactgtcattgctggaaagcctaaggatgagaagaaatcactc

SEQ ID NO: 33234 - DNA, 387 bp, Glycine max
  Clone ID: LIB3138-014-Q1-N1-A8
agcttatcttgtcaatctcgtaaatgtgttacgagaattgtgtttgcacagtccagaggaagctcgccaattgagaaggaaagctctctctcgtattgaatggctgcaaaaagctgatgtgcctaccatagcacagattgaagagttccattcgatgcagaggatgatgaatgctcctgattcaaatgataatattgatttactgttgagcattgatttgttgggtttacaaggagcaggtaaagcttttccaaacaaaattgtttttgatgataagcttgtgttggctaacacacaagaattctttgatggaaattttccagtggattcttggttaccaatttttgtgaattgtctttatcctgtaagtcaattaccttcagaagc

SEQ ID NO: 33235 - DNA, 399 bp, Glycine max
  Clone ID: LIB3138-014-Q1-N1-A9
attttattatcttcttcgtctgttctttgcattgaagaaaatttctttgaattgaagaaaacttgaaatcgaattgtgaaacagaaaataaaccaaaggaaatttttactgattgaattgcagagattggaaaaatggcgttgagtatgactcaacagatcgggaccctagctggtgcgacggtgccggattcctcggccggagaatcgaccgcggcggtgagtgccgccgcggtgtggaagtcaccgacggcgagtctgaagtgcaaggtaatgaggacggatggctgcgcggaggggctttcgccgccgctgagtccgtgcaggtcgccggtgctgcgggcggatctgtcggcggcgtgtcaggcattcacggcggaggtggcggaagaggagtacg

SEQ ID NO: 33236 - DNA, 333 bp, Glycine max
  Clone ID: LIB3138-014-Q1-N1-B1
agccagcgacttaacatcacataaaacaaacaagacaataaatgtaaagtgtgctaacaatcttgagcctctgggtagatttatctctcttgtttcgtatagttgatcaagatctattaccaatttcagtcgcttggtgttgacatctatgaagattccccccacccctcgttttctcagtagtttgaactcacagcatacaggaaaggaaaccctttatggttataactgagaataactctgttgactgcatctatgttttgactagaaaaacttactcgagaattcagattggttatgtacgaaagtttgtgtaaataacattattcgctt

SEQ ID NO: 33237 - DNA, 400 bp, Glycine max
  Clone ID: LIB3138-014-Q1-N1-B10
tctaaattgaaaagctttctagctagtcataacatcaccattactgatggtattgacaaaactagtgcaactttgcaatttagaaagttagcagattgtgattttctcaagagaaactttaagcagatgtctaatgttttgtgggtggctcctgaggacaaggcgagtttatggtcacaacttcattatgtttcgtgtaataatctggaaatgcaagaagcttatcttgtcaatctcgtaaatgtgttacgagaattgtatttgcacagtccagaggaagctcgccaattgagaaggaaagctctctctcgtattgaatggctgcaaaaagctgatgtgcctaccatagcacagattgaagagttccattcgatgcagaggatgatgaatgctcctgatt

SEQ ID NO: 33238 - DNA, 401 bp, Glycine max
  Clone ID: LIB3138-014-Q1-N1-B11
gtgtttttcatttcatcgtgcattcaatggccaccacagcagctctatccggaaccatggtgagcacctccttcatgaggaggcaacctatgaccaccacaagcctaaagacattccccaacgttggtgaagctctttttggtctgaaaagtggacgaggtggtcgtgtcacttgcatggcctcgtacaaggtgaagctcataaccccagaaggagaagtggagtttgaatgcccagatgatgttttcattgttgacaaggcagaggacgaaggcattgaacttccctactcgtgcagggccggttcttgcgtttcctgtgttggcaaaattgtggaaggtaacgtggaccagtcagatggtagcttccttgatgatgagcaaatagatagtggctgggtt

SEQ ID NO: 33239 - DNA, 278 bp, Glycine max
  Clone ID: LIB3138-014-Q1-N1-B12
gggatggactgtctccccaacgctcgatgttcagggtacattggattggtttatctcctgtcaggaatgccttcccaggacctattgtgttttaaatccacaaaatcctttcgtgtccaataggtggatgggaaatttgtctttcccgcagggcactacccggagagttaagagaatgcctctttttatagggggaggagctggcgcaaaaaatgctattctcatgagtatgcccaatgctgttctttcaatgtggagatattttgcaggagatctcg

SEQ ID NO: 33240 - DNA, 392 bp, Glycine max
  Clone ID: LIB3138-014-Q1-N1-B5
gatcaaggcagctgcggatcatgctggacattcagcagaactggggctttagaagcagcctatgcacaagcatttgggaagagtatctctctttctgagcagcagctagtggattgtgctggccgtttcaacaactttggctgtaatggtgggttgccatcacaagcctttgagtacatcaaatacaatggaggacttgagacagaggaagcatacccctacactggaaaagatggtgtatgcaaattctcagctgaaaatgttgccgttcaagtcattgactcggtcaatatcaccttgggtgctgagaatgaattaaaacatgcagttgcatttgttcggccgggtagtgtggcctttcaagtggtgaatgggttccatttctacgagaa

SEQ ID NO: 33241 - DNA, 388 bp, Glycine max
  unsure at all n locations
  Clone ID: LIB3138-014-Q1-N1-B6
atttaatccaaacccgtgttctgatgcatggagtttggaattggtgaagcgtactggatttcattgcgatatcatttgtgtcactggatggactgccaccccaatgcaggatgttcaggttacaattgattggtttatttcctctcaggaatgtgttcccaggacctattgtgttttaaatccacaaaatccttttgtgttaaataggtggatgggaaaattgactttcccccagggcacttcccgaagtgttaagagaatgcctctttctatagggggaggagctggtgcaaagaatgctattctcatgaatatgccaaatgctgttctttcaatgtggagatantttgttggagatctcgtctttgaagtttctaagatgacttct

SEQ ID NO: 33242 - DNA, 175 bp, Glycine max
  Clone ID: LIB3138-014-Q1-N1-B7
gtggaatttagagtttgtggctgtgagcttcagagtgtaagtgtggtagcaaggttaacatttccttgactatcatttcttttccttctttctctcccactaaagatgtgaaatgtacaatgaatataggttttgatatggaacatgtagaatataaagtataaacagttttaat

SEQ ID NO: 33243 - DNA, 357 bp, Glycine max
  Clone ID: LIB3138-014-Q1-N1-B8
aacgcatacaaatcagctttgctccattagccattgcggttcagactctcttttaaatgagattgctagagcggcccttgtaccagacacaagttatattgccaagccagctgcctcatggcttgatgattttcttgtgtgggtgtctccagaagcatttgggtgctgcaggaagtttacaaatgggagttattgccctcctgatgatcagcctccttgctgtgctcctggggaaagctcttgtgtttcagtaggaacatgtaaagattgcacaacgtgtttccgtcactcagatctccataatgatcgtccatctacaacacaatttagggagaaactgccatggtttcttagttc

SEQ ID NO: 33244 - DNA, 395 bp, Glycine max
  Clone ID: LIB3138-014-Q1-N1-C1
gttttctattgaccttctcggtggaggaatcttagtggacaaaactggagattggatcacacttatacaaaattctccaattagtaacttgttgagagttgctgcttggaagaaaggctgtttaatggtcaagattgtgatgtctgggaatgcagcagtcaaaaggagtgattgggcctcattggtacaagtgtttttaacaaacagcaacagtacagagcattttgatgcatgtaagtggacaaaatcagaaccacattcctgggaattgatcttcccaatagaggtatgtggtcctaataatggttttgaaatgtggagttctgagtgggcaaatcaaacttcatggcatttgagtttccttattgacaatcccaaacagtctacagtttttg

SEQ ID NO: 33245 - DNA, 349 bp, Glycine max
  Clone ID: LIB3138-014-Q1-N1-C10
ggatgagaaacttcctcgtcgcaaaatttttgacaaacctaaggcgcgctgcttcactattctccctatggagtttaatcttgtggtccgtcaaaagtttttaaattttgtgaggttcattatgaagaaaagggacaaacttagttgtcaagttggaatcaacccatactccatggaatggactggtttggccaatagattactgagtaagggcaatgatattctgtgttgcgattatgctagttttgatggtttgattaccaagcaagttatgagcaagatggcagaaatgataaacagtctttgtggtggtgatgaaaaattgatgcgtgaaaggacgcacctgctg

SEQ ID NO: 33246 - DNA, 333 bp, Glycine max
  Clone ID: LIB3138-014-Q1-N1-C11
attacccatactttctgccagtaaaaatgtttaggggggaacggtattcttatagacaaccatcattaaccaactatattttgtgtaccgttccaagattaattctctagtctattgcactgtacacaagactttcatgctctagaaccatccatgattggggcacccccttatccaatggcctcttctttacaaatattacctgaatgggataactgttccgtgtgccaaatgcttcgcacagtgcccaataagtgattgccacgcaatttgtatgcttgaggtgcctacatgaataataacattggccctttttgagagaatgtgaataac

SEQ ID NO: 33247 - DNA, 392 bp, Glycine max
  Clone ID: LIB3138-014-Q1-N1-C2
caagaacacagttggaggaaccattctgcgtagtgatctattggcaaattttttgacagagggcaattttagagcaagtgttgatttgcagcgcactcatcgtattagaggaatgattaaaatggtggccacagttggtattcctgagaatacaggtatatcattggcctgtgctatgaatagttcttttagggggcgcgccagttctgatatttacaccatctgctctcaagactgtgaattgtggaatcctgcttgcacaaaagcaatgactatgtcatttaatccaaacccgtgttctgatgcatggagttttgaatttcttaagcgtactggatttcattgcgatatcatttgtgtcactggatggactgccaccccaatgcaagatg

SEQ ID NO: 33248 - DNA, 366 bp, Glycine max
  Clone ID: LIB3138-014-Q1-N1-C3
ctcgagccgagatgagtgtacttttgcatttgtgaactaatgggtaggattttattcacttaaataaagcgcatcactatgtgcaatgagtgtgcttcattgtattagaggaatgattaaaatggtggccacagttggtattcctgagaatacaggtatatcattggcctgtgctatgaatagttcttttagggggcgcgccagttctgatatttacaccatctgctctcaagactgtgggtggcggaatcctgcttgcacaaaagccatgaatattatatttaatccaaacccgggttctgatgcatggagtttggaatttctgaagcgtactggatttcattgcgatatcatttgtgtcactgg

SEQ ID NO: 33249 - DNA, 382 bp, Glycine max
  unsure at all n locations
  Clone ID: LIB3138-014-Q1-N1-C4
gttcctccgctcaacaactataataacatctttctctctccgagcagatcacactatggccacctcaagcgccaaatcagtccatgatttcaccgttaaagatgccaagggaaatgatattaatcttggtgactacaaaggaaaggtccttatcattgtcaatgttgcctcacaatgtggcttgactaattcaaattacactgagctcagtcagttgtatgagaaatacaaacagaaaggtctggaaattctggcatttccatgcaatcagtttggggcacaggagcctggatctaatgaacagatacaagagtttgtttgtactcgcttcaaagctgagtntcccgtttttgacaaggttgatgtgaatggtgacaaagct

SEQ ID NO: 33250 - DNA, 389 bp, Glycine max
  Clone ID: LIB3138-014-Q1-N1-C5
ctgatgggtgttcatatttgtatgcaatggtgcatgatagttgagtgtctacaataccaggtgattttgtcattggtgtcaagttgacaaccataaacaatatgtgtgcatatgggctcaatcctggtatttcaggttctcgtcttttgggcaccattcctcagtccatttcacagcaaactgtttggaatcaaatggcaacagtgagaacaccattgaattttgattctagcaagcagagcttttgtcagttttctattgaccttctcggtggaggaatcttagtggacaaaactggagattggatcacacttatacaaaattctccaattagtaacttattgagagttgctgcttggaagaaaggctgtttaatggtcaagattgtg

SEQ ID NO: 33251 - DNA, 349 bp, Glycine max
  Clone ID: LIB3138-014-Q1-N1-C6
gcgcactcatcgtattagaggaatgattaaaatggtggccacagttggtattcctgagaatacaggtatatcattggcctgtgctatgaatagttcttttagggggcgcgccagttctgatatttacaccatctgctctcaagactgtgaattgtggaatcctgcttgcacaaaagcaatgactatgtcatttaatccaaacccgtgttctgatgcatggagtttggaatttctgaagcgtactggatttcattgcgatatcatttgtgtcactggatggactgccaccccaatgcaggatgttcaggttacaattgattggtttatttcctctcaggaatgtgttccc

SEQ ID NO: 33252 - DNA, 390 bp, Glycine max
  Clone ID: LIB3138-014-Q1-N1-C7
tctatctctcttcgttttgttcttccttgcgctcctgctcgtgcgttcgttctccctcgcgtagatcggcaatggcggagaccgagacgtttgctttccaggctgagatcaaccagctcctcagtctcatcatcaacaccttctactccaacaaggaaatcttccttcgtgaactcatcagcaacgcctctgatgctttggacaagattagatttgagagtttgacggacaagagcaagctcgatgctcagccagagttgttcattcatattattcccgacaagactaacaattcgctgaccattgttgacagtggcattggcatgaccaaagctgatttggtaaacaacttgggtacaattgctaggtctggtaccaaggaattcatgg

SEQ ID NO: 33253 - DNA, 389 bp, Glycine max
  Clone ID: LIB3138-014-Q1-N1-C8
gagaattattatcccgttcttttccgtggagtcaatgggacagttgctcatgaattcatcattgacctgagaggctttaagaatactgctggaattgagcctgaagatgttgcaaagcgcctcatggactacggttttcatgcaccaacaatgtcatggcctgtgcctggcacactcatgattgagccaactgagagtgaaagcaaggctgaactagacaggttctgtgatgctcttatttccattagacaagaaattgctgagattgagaaaggaaatgctgacattaacaacaatgtacttaagagcgcccctcatccaccatcactgctcatggctgatgcatggacaaaaccatactccagggaatatgcagccttcccagctcc

SEQ ID NO: 33254 - DNA, 401 bp, Glycine max
  Clone ID: LIB3138-014-Q1-N1-C9
tttccccacaagctggtgcagtttggagagattcaggaaaaaggtgtattgaaattttcacaagaggaatttcttacagcttggtcaactcaggtgcgtcctgcaacaactctgttggctgatgggtgtccatatttgtatgcaatggtgcatgatagttcagtgtctacaataccaggtgattttgtcattggtgtcaagttgacaaccataaacaatatgtgtgcatatgggctcaatcctggtatttcaggttctcgtcttttgggcaccattcctcagtccatttcacagcaaactgtttggaatcaaatggcaacagtgagaacaccattgaattttgattctagcaagcagagcttttgtcagttttctattgaccttctcggtggaggaatctt

SEQ ID NO: 33255 - DNA, 394 bp, Glycine max
  Clone ID: LIB3138-014-Q1-N1-D1
tcactcgcaagcaaaaagaaagaatcccaggcgaggagaaagatggaggggaaggagcaggatgtgtcgttgggagcgaacaagttccccgagagacagccgattgggacggcggcgcagagccaagacgacggcaaggactaccaggagccggcgccggcgccgctggttgacccgacggagtttacgtcatggtcgttttacagagcagggatagcagagtttgtggccacttttctgtttctctacatcaccgtcttaaccgttatgggagtcgccggggctaagtctaagtgtagtaccgttgggattcaaggaatcgcttgggccttcggtggcatgatcttcgccctcgtttactgcaccgctggcatctcagggggacacataaacc

SEQ ID NO: 33256 - DNA, 403 bp, Glycine max
  Clone ID: LIB3138-014-Q1-N1-D10
catagttactgaagaaaatggcaaccatctccgctgctatcacgaccccatcgatcacccgcgcatgtctagtgcaaaaacgttctcttgggttctcatctcccgttcttggtttgccagcaatgggtaaggtgggaagagtgagttgctccatggaggaaaagccttcttctgtgaaggaaagcagctcaagcatgttggggatgggggcatctttgatggcagcggccagcgccgcagccatgtcaggcccagccatggccttggtggatgagagacttagcactgaaggaaccgggctacccttcggcctcagcaacaaccttctcggttggatcctgttcggcgtcttcggactcatctgggctctctattttgtctacacttcctctcttgaagagga

SEQ ID NO: 33257 - DNA, 396 bp, Glycine max
  Clone ID: LIB3138-014-Q1-N1-D11
attagtaacttgttgagagttgctgcttggaagaggggctggggaatggtcaagattgtgatgtctgggaatgcagcaatcaaaaggagtgattgggcctcattggtacaagtgtttttaacaaacagcaacagtacagagcattttgatgcatgtaagtggacaaaatcagaaccacattcctgggaattgatcttcccaatagaggtatgtggtcctaataatggttttgaaatgtggagttctgagtgggcaaatcaaacttcatggcatttgagtttccttattgacaatcccaaacagtctacagtttttgatattctcttgggaatctctcaagattttgaaattgctggtaatactcttatgccagctttttctgttccacaggctact

SEQ ID NO: 33258 - DNA, 180 bp, Glycine max
  Clone ID: LIB3138-014-Q1-N1-D12
aaatgttacatgttgaaatttacgtggtggaagaggggccgctgatcggattaaatccccaccccacaatctctcctaaaatatcagcgtgaggcttctcacagggctcaggaccggttagaaaactgcatctgttaatagcgtttatcctcatgcaacaacacaacaacctaatctttt

SEQ ID NO: 33259 - DNA, 295 bp, Glycine max
  unsure at all n locations
  Clone ID: LIB3138-014-Q1-N1-D2
ctctctcattgcgtgcaccaccccaaaaaaaaatatacatatagatatgtacataaaaaaaacaacccccccccccccaannnnnnnntntanngggncgcagttggtgacggcgcaacacagcctggaaattggattggtctataaaaccccttcgggggctctccactttgacgggcaggggaatttttcatgggaggaaggaaaaagtttggggctcatgtgagccggattttgggtgaggaaagagcaaggtgaagaacaccttatctcatggctttcacttgggaaaggg

SEQ ID NO: 33260 - DNA, 379 bp, Glycine max
  Clone ID: LIB3138-014-Q1-N1-D3
gacaaccataaacaatatgtgtgcatatgggctcaatcctggtgtttcaggttctcgtcttttgggcaccattcctcagtccatttcacagcaaactgtttggaatcaaatggcaacagtgagaacaccattgaattttgattctagcaagcagagcttttgtcagttttctattgaccttctcggtggaggaatcttagtggacaaaactggagattggatcacacttatacaaaattctccaattagtaacttattgagagttgctgcttggaagaaaggctgtttaatggtcaagattgtgatgtctgggaatgcagcagtcaaaaggagtgattgggcctcattggtacaagtgtttttacaaacagcaacagta

SEQ ID NO: 33261 - DNA, 296 bp, Glycine max
  Clone ID: LIB3138-014-Q1-N1-D4
gacaaccattggcattatatgtgcatatgggctgagccctggggttgagggcattcgacagcagaccgccattcctcaaacggtttcacagcgaacagcatggaatcaagtggctaccgagcgaacaccatggcattttgatattgaccagcatagctgttgactgttatctatcgaccctggcggaggaggcacactaatgcacaaaactgcagataggatcacactgatacaaaatgcttcaaataaagactgattgatagtcactactgtgatgactggctatgcaatggtca

SEQ ID NO: 33262 - DNA, 389 bp, Glycine max
  Clone ID: LIB3138-014-Q1-N1-D5
tggagagattcaggaaaaagttgtattgaaattttcacaagaggaatttcttacagcttggtcaactcaggtgcgtcctgcaacaactctgttggctgatgggtgtccatatttgtatgcaatggtgcatgatagttcagtgtctacaataccaggtgattttgtcattggtgtcaagttgacaaccataaacaatatgtgtgcatatgggctcaatcctggtatttcaggttctcgtcttttgggcaccattcctcagtccatttcacagcaaactgtttggaatcaaatggcaacagtgagaacaccattgaattttgattctagcaagcagagcttttgtcagttttctattgaccttctccgtggaggaatcttagtggacaaaa

SEQ ID NO: 33263 - DNA, 383 bp, Glycine max
  Clone ID: LIB3138-014-Q1-N1-D6
atctgctctcaagactgtgaattgtggaatcctgctggcacaaaagcaatgactatgtcatttaatccaaacccgtgttctgatgcatggagtttggaatttctgaagcgtactggatttcattgcgatatcatttgtgtcactggatggactgccaccccaatgcaggatgttcaggttacaattgattggtttatttcctctcaggaatgtgttcccaggacctattgtgttttaaatccacaaaatccttttgtgttaaataggtggatgggaaaattgactttcccccagggcacttcccgaagtgttaagagaatgcctctttctatagggggaggagctggtgcaaagaatgctattctcatgaatatgccaaatgc

SEQ ID NO: 33264 - DNA, 392 bp, Glycine max
  Clone ID: LIB3138-014-Q1-N1-D7
ctcgagccgttccaactttacattttcccaccaaccgtcctcgtgcattcctcaaaacaatcgttaatctcttctccattgtgaactctgatattctccaagtacacaacacaaacacacatcaatttatagcacccgatttctcttttccccctcaaattcagctccattttgttacagattcaaataataagccaagcagccacaccatgatctcgtcaatgaaatgcacagcctcatctctcacatgttctgctttctcaaacagaaagcttcccattgcaaggcctcaactcgtgacattaccaaccatcaacaacgttgaacaaaacatgggtccctctcagttgtgttcacagaagcctctctacctttcatccaccgagaacttg

SEQ ID NO: 33265 - DNA, 389 bp, Glycine max
  Clone ID: LIB3138-014-Q1-N1-D8
atttggaaatttggctgatgataccatcaattttgagggtttgccccacaagctggtgcagtttggagagattcaggaaaaagttgtattgaaattttcacaagaggaatttcttacagcttggtcaactcaggtgcgtcctgcaacaactctgttggctgatgggtgtccatatttgtatgcaatggtgcatgatagttcagtgtctacaataccaggtgattttgtcattggtgtcaagttgacaaccataaacaatatgtgtgcatatgggctcaatcctggtatttcaggttctcgtcttttgggcaccattcctcagtccatttcacagcaaactgtttggaatcaaatggcaacagtgagaacaccattgaattttgattcta

SEQ ID NO: 33266 - DNA, 397 bp, Glycine max
  Clone ID: LIB3138-014-Q1-N1-D9
cttgttgagagttgctgcttggaagaaaggctgtttaatggtgaagattgtgatgtctgggaatgcagcagtcaaaaggagtgattgggcctcattggtacaagtgtttttaacaaacagcaacagtacagagcattttgatgcatgtaagtggacaaaatcagaaccacattcctgggaattgatcttcccaatagaggtatgtggtcctaataatggttttgaaatgtggagttctgagtgggcaaatcaaacttcatggcatttgagtttccttattgacaatcccaaacagtctacagtttttgatattctcttgggaatctctcaagattttgaaattgctggtaatactcttatgccagctttttctgttccacaggctactgccagatct

SEQ ID NO: 33267 - DNA, 340 bp, Glycine max
  Clone ID: LIB3138-014-Q1-N1-E1
gacattttcccttttcagctttcattggtgtggcctagctgttgtctgagtgagaaagccttcatctctgcaaagcgcacttttgcgctttggggttcccttgttgcttgttatcaccttctgttatgctacttctactgctgcagcaacaactcaagtttcagggaatgaagagctgccaaagacaaacctaaatgggcatgatgaagaagcaaaattcggattttttcatcataaaccaatattcaagaaacatattccaattccagtatataaaccttgtccaaagccatttccagtgtataaacctataccaaagccagttccagttccagtgtac

SEQ ID NO: 33268 - DNA, 395 bp, Glycine max
  Clone ID: LIB3138-014-Q1-N1-E10
gccgtctctactgttgaaacctctccatgcaccttggatgtggactacaatgaagctgcagccaaacttgaaaatatatataaactcagccctgtatctgatacctgtaatgtggaagatatagatagtaaaatcgagagagtcttgcggaggaggaagaaggttagtgaggaacgtgatgatggaaattgtgataatgtggttagaaaccagaataagaaggccaaacgattgagtcttgataagaggattgcattgaaaaataatgcaaaggaggaggtgattgatcaaactcagaagaaaaggaatgttaagaatagagtacaaaatattgatgtgcttatcaaggattattcagcatcaactgatttagttagcatggactggaagaaaat

SEQ ID NO: 33269 - DNA, 351 bp, Glycine max
  Clone ID: LIB3138-014-Q1-N1-E11
cgtccatgtctggttgagctcagtgaggatcctgatgttgacgtgcgatttttctccaaccaagcactacaagcaattgatcatgtcatgatgtcttgctaggcagaaatggttccacacgcatttaggttgaagacgtcagaagagatgctaatatttccaactaccataaataatactgcatagttatgtttagtgcttttcagtcattgaccattgatgtgatttagtttccattatatgctaatttccatatattatgtgttttttcctgattgtatttttcgtagatttttttttgttccttggtgtaatattctgctaggcaatgaattgcacatttcaatcatt

SEQ ID NO: 33270 - DNA, 400 bp, Glycine max
  Clone ID: LIB3138-014-Q1-N1-E12
ctgcatcgtcccacgtggcagctgagttgagatgggaagcagaagaagcactctggttctgaggcgcaacctcgtaccaacaaccatggcggtccctgctacatcctcagcccctgtccttcgacccatccgcaccaatcactccttctcttgccctttccgctctctcccctctcccgccgccagaaaacccctaaccgtcttcgccatggcccccaaaaagaaggtgaacaagtacaatgataagtggaagaaggagtggtttggagcggggatattctacgagggaagcgaggaggtggaggtggacgtgttcaagaagatagagaagaggaaggttttgagcaacgtggagaaagctggcttgctctacaaggcagaggacttgggattcacgctc

SEQ ID NO: 33271 - DNA, 348 bp, Glycine max
  unsure at all n locations
  Clone ID: LIB3138-014-Q1-N1-E2
gcattttgatgcatgtaagtggacaaaatcagaaccacattcgtgggaattgatcttcccaatagaggtatgtggtcctaataatggttttgaaatgtggagttctgagtgggcaaatcaaacttcatggcatttgagtttccttattgacaatcccaaacagtctacagtttttgatattctcttgggaatctctcaagattttgaaattgctggtaatactcttatgccagctttttctgttccacaggctactgccagatcttctgaaaatgcggaatcctctgcatgatctggaaattgngttttctttcgcttgttcgtttgtttaattcaataaaggaaatt

SEQ ID NO: 33272 - DNA, 339 bp, Glycine max
  Clone ID: LIB3138-014-Q1-N1-E3
aataagaagaaggaacactcgctctgcaaagtgtgtgaacgaaccctaataatggagacgaaggagaacggaccgagcaagaaggtttcgaatgggggaatagatggacccacgaacccgatggtcactcctctgctcaatgatctctaccaattcaccatggcttacgcttactggaaagctggcaagcatcaagaacgtgctgtgttcgatttgtattttcggaggaatccgtttggtggggagtataccgtcttcgctggcttgggagagtgcataaggttcatagctaattcacgctcgctgaggggagatcgattttgtaggaatgttattttc

SEQ ID NO: 33273 - DNA, 337 bp, Glycine max
  unsure at all n locations
  Clone ID: LIB3138-014-Q1-N1-E4
atccttcaaaaattntgtttctttgtgtgtgtatggggaagatgacttaattaggggtcatgaatatgtcaagccttactttaatggttctaaattgaaaagctttctagctagtcataacatcaccattactgatggtattgacaaaactagtgcaactttgcaatttagaaaggtagcagattgtgaatttctcaagagaaactttaagcagatgtctaatgtgttgtgggtggctcctgaggacaaagcgagtttatggtcacaacttcattatgtgtcgcgtgataatctggaaatgcgcgaagcttatcttgtcaatctcgtaaatgtgtta

SEQ ID NO: 33274 - DNA, 386 bp, Glycine max
  Clone ID: LIB3138-014-Q1-N1-E5
caagttgacaaccataaacaatatgtgtgcatatgggctcaagcctggtatttcaggttctcgtcttttgggcaccattcctcagtccatttcacagcaaactgtttggaatcaaatggcaacagtgagaacaccattgaattttgattctagcaagcagagcttttgtcagttttctattgaccttctcggtggaggaatcttagtggacaaaactggagattggatcacacttatacaaaattctccaattagtaacttattgagagttgctgcttggaagaaaagcttgttaatggtcaagattgggatgtctgggaatgcagcagtcaaaaggagtgattgggccttattggtacaagtgtttttaacaaacagcaacagta

SEQ ID NO: 33275 - DNA, 387 bp, Glycine max
  Clone ID: LIB3138-014-Q1-N1-E6
gtccatatttgtatgcaatggtgcatgatagttcaggggctacaataccaggtgattttgtcattggtgtcaagttgacaaccataaacaatatgtgtgcatatgggctcaatcctggtatttcaggttctcgtcttttgggcaccattcctcagtccatttcacagcaaactgtttggaatcaaatggcaacagtgagaacaccattgaattttgattctagcaagcagagcttttgtcagttttctattgaccttctcggtggaggaatcttagtggacaaaactggagattggatcacacttatacaaaattctccaattagtaacttgttgagagttgctgcttggaagaaaggctgtttaatggtcaagattgtgatgtctg

SEQ ID NO: 33276 - DNA, 385 bp, Glycine max
  Clone ID: LIB3138-014-Q1-N1-E7
gataacttaattagtgttcatgaatatgtcaagccttactttagtggttctaaattgaaaagctttctagctagtcataacatcaccattactgatggtattgacaaaactagtgcaactttgcaatttagaaagttagcagattgtgattttctcaagagaaactttaagcagatgtctaatgttttgtgggtggctcctgaggacaaggcgagtttatggtcacaacttcattatgtttcgtgtaataatctggaaatgcaagaagcttatcttgtcaatctcgtaaatgtgttacgagaattgtatttgcacagtccagaggaagctcgccaattgagaaagaaagctctctctcgtattgaatggctgcaaaaagctgatg

SEQ ID NO: 33277 - DNA, 391 bp, Glycine max
  Clone ID: LIB3138-014-Q1-N1-E8
accgaacactcttcttcaatcaagcgaaggtggtctcgattgcaagtgatccacgatacactctacgcttcacaaaaccttcaaacccaattccacagaattcttctgcttcaccatgccaccaaagcctttagactatgggtcaataaatgaaaacgtgaagaagagtcaatatgctgtcagaggtgaattataccttcgagcttctgaacttcagaaagagggcaaaaagattatctttactaatgttggcaacccgcatgcattgggacagaaaccactgagcttccctcgccaggttgttgctttgtgccaagctccattcctacttgatgatcctaatgttggactgctattccctgctgatgcaattgcaagagctaaacactat

SEQ ID NO: 33278 - DNA, 394 bp, Glycine max
  Clone ID: LIB3138-014-Q1-N1-E9
agcaccacattcacctgaggcttccaaagcaatggcttcccttgcagcatccactgctgctgcttcccttggcatgtcagaaatgcttggaaaccccatcaacttcagtggtgccacaaggccagctccatctgcttctagtcctgcctccttcaagactgtggctcttttctccaaaaagaaggctacaccaacacctccaaaaaaagctgctgctgctgctcctgccaatgatgagcttgccaagtggtatggtcctgacagaaggatcttcttgcctgagggtctcttggaccgatccgaaatcccagagtacttgaccggagaagtccctggagactatggttatgacccatttggtcttagcaagaagccagaagactttccaaatatc

SEQ ID NO: 33279 - DNA, 384 bp, Glycine max
  Clone ID: LIB3138-014-Q1-N1-F1
ctcgagccgaatcggctcgaggttacattcccttcacaagattgtcacagaacaactcttgagaaagaaagaatggctgccaacacattgatgagttctgccatctcagccttcccatctctcctttcctcctcaaaatccagatttgccgcagcagttcctctttccagctttgttgtcaccaatgcctcttcttctcgcttttccatgagtgctgactggatgcctggccagcctagacccccctaccttgatggttcagcacctggtgactttggattcgaccctcttcgtcttggtgaagtaccagagaatcttgagaggttcaaagagtcagaactcattcactgcagatgggccatgcttgctgttccagggattttg

SEQ ID NO: 33280 - DNA, 363 bp, Glycine max
  Clone ID: LIB3138-014-Q1-N1-F10
ggaagatgctcatgcagctcatccatgtttggacgagtccacgtcatactttggtgtttatgatggccatggaggcaaagcagtttcaaaattctgtgccaagtatctacacctgcaggtgcttaagagtgaagcttacttagctggagatttaggcacatctttacagaaatcttttctcagaatggatgagatgatgcgtggacaaagagggtggagagaattagcaatcttgggggataaaatagaaaagttgtctggtatgctagagggctttatatggtctcccaggagtagtgaagccaatgaccgtgttgatgattgggctttgaggagggccccattctgatttactggaccaac

SEQ ID NO: 33281 - DNA, 379 bp, Glycine max
  unsure at all n locations
  Clone ID: LIB3138-014-Q1-N1-F11
cttgaggtctgcaatatgggaaaggcaatatcttgggcaacaggtctatctcagagtgtgggatgcacagaaaagccttgctaatgaatatgacattcccaacaatgttctgctttgcggcaaagctgttgggcatcacccttagaacatatatcaactatcagcctcctatttatcggtgtattttctggtcatgagggcttgactacaactagaattccttttcctttttcttaaaaatgaaaaaggacaatgagaagctactttctacaaatttcggatagactcgagtatatttgagaaaaaaaaaagtatttttattaatttttcatttgctcgtttgagtattaacaattganttcatacttaatttatttat

SEQ ID NO: 33282 - DNA, 250 bp, Glycine max
  Clone ID: LIB3138-014-Q1-N1-F12
gtaacagccagctaaccgtgaaaagcccaccatggaaatcgggcgctctgggggtccgaattgtattctggataaccattctcagtggcagacctggcccaagtcccctgaaatggggcgccagagaaggtgagagccctgtcgtgcccgggccctgttgcaccaccaggcgctgttggtgagtctggttgataggaaatgcagccccaatcggtcggttgattccgtacaaagctaaatactgtctaga

SEQ ID NO: 33283 - DNA, 392 bp, Glycine max
  Clone ID: LIB3138-014-Q1-N1-F2
caagcctcaccatcttagggaacttgacgcggctgaatatgaagaaatggttggtgctccagcactaagtttcaataaatctttcagggaagtggaatcacccctagttggatcaaaggaaataggcaatgcggaaatattagatgagttaactactaatagaggggagttgaaggtcagaactgtcagctttggtgaagaaagaaattgccaggcttaccctgatgaaaatggatcgacactcacagatttttagaaaaggtgatgaatccgatgttatacggtaaatgttccaatcccagaagaagggatatgacattcatacgtctactctagaagaagatgatatcaatatatagatgactatcaagttttaaaatctagaaattttc

SEQ ID NO: 33284 - DNA, 313 bp, Glycine max
  Clone ID: LIB3138-014-Q1-N1-F3
ctggtgtatactactcaaatgatcagatgcttcagaccaggatgttatattatgctgattcacaaaggcacacacttggaccaaactatctgcgacttcctgctaatgctaccaagtgtgctcaccacactaatcatcatgaaggtgtcatgaatttcattcacagggatgaggaggtcaattacttgccttcaaggtatgatcctgttcgtcatgcagaaaggttcccgatacctgctgctatctgcagaggaaggcgtgaaaagagtggaattgagaaggagaacaacttctagcagcccagacagagata

SEQ ID NO: 33285 - DNA, 397 bp, Glycine max
  Clone ID: LIB3138-014-Q1-N1-F4
gaaggctgctgaaacacacaaggataacttatctgcacttatggtaacatatccttcaacccacggtgtttatgaggaaggtattgacgaaatttgcaatattattcatgataatggaggccaagtatatatggatggtgccaacatgaatgctcaggtgggactcacaagcccgggttggataggagcagatgtttgccatctcaatctccacaagacattttgcatccctcatggaggaggtggccctggcatgggacctattggtgtaaagaaacacttggcaccatttttaccttcacaccctgtgatagaaactggtggaattcctgcccctgacaaacctcaaccacttggtaccatcgctgctgcaccatggggctcagcactcatattg

SEQ ID NO: 33286 - DNA, 327 bp, Glycine max
  Clone ID: LIB3138-014-Q1-N1-F5
tgggaatgcagcagtcaaaaggagtgattgggcctcattggtgcaagtgtttttaacaaacagcaacagtacatagcattttgatgcatgtaagtggacaaaatcagaaccacattcctgggaattgatcttcccaatagaggtatgtggtcctaataatggttttgaaatgtggagttctgagtgggcaaatcatacttcatggcatttgagtttacttattgacaatgccaaacagtgtacagtttttgatattctatagggaatctctgaagattatgaaattgctggtaatactcttatgacagctttttctgttccacaagc

SEQ ID NO: 33287 - DNA, 391 bp, Glycine max
  Clone ID: LIB3138-014-Q1-N1-F6
gctcgcgaacggtcagggcgagcccccagactggcagaactggatcggtatcgtcctcctgctcattgtcaactccaccatcggtttcgtcgaggagcgcaacgctggtaacgccgtcaaggcgctcatggactcgctcgcccccaaggcccgcgtcaagcgcaacggcgcgtggcgcgaggttgaggcgtccgagctcgtccccggtgacctcgttgcattcaagcacggtgacatctgcccggccgactgccgtctcgttgaggcgattgacgtgtcgatggaccaggccgcccttacgggcgagtcgctcccccagggcaagaagctcggtgacgagtgtttctcgggctcgacctgtaagcagggcgagtgtgagggtatcgtcatc

SEQ ID NO: 33288 - DNA, 354 bp, Glycine max
  Clone ID: LIB3138-014-Q1-N1-F9
ctgagagtcagctgttgcgtcctaaagagatttggggcgcgtgggaaaccctacttaggtacgattaaccccactcccttaaccacatgcaaaacaccatattccgaaggtagcaggacagcgctgcagtgaagacaaatgacaatgactactctcaggacatgatatctgacatgtccaagtacatcgctagaaacacgcgtgtttagaagtctgtcaagcttgaccattgatacatctttcataaactcacatgtatgaaatcaaaaatcatcagcacttatcccaatgcgcttactgaagactcaacgagcgaagtgattgatatgacaccggatcttgaaatgcccaagc

SEQ ID NO: 33289 - DNA, 397 bp, Glycine max
  Clone ID: LIB3138-014-Q1-N1-G1
gcaaagtgcaaaacctgagagagaaaatggagaagatgaaaatggaagaggttcaatcaaccacgaagaaacagcgtgttgctacacacactcacattaaaggcctaggtctcgaggcgagtggaaaagcattgagttttgctgctgggttcgttggacaagttgaggcaagagaagcatcaggtcttgtggtggacatgatacggcagaagaagatggccggccgggcacttcttctcgccggaccgcccgggaccggcaagacggcattggcacttggaataagccaggagcttggcaccaaggtaccgttctgccctatggttggctccgaagtttactcctcggaagtaaagaagactgaagttctcatggaaaattttcgacgggccattgg

SEQ ID NO: 33290 - DNA, 388 bp, Glycine max
  Clone ID: LIB3138-014-Q1-N1-G10
tctacttgctgctcaaatctacaatctcagtctctgttattgggtgctgctgcattgagatcaaaaccgtgtctctctctctgcaacacttatcgacccaaacgcattcggaagcgttctccaattgttggcgctcaatctgaaaacggagctctcgttacttccgagaagcctgacactaattacggaagacaatacttccccctcgctgctgttgtaggccaagatgctataaaaactgctcttttacttggggccattgaccctgggattggaggaattgccatatcaggaaagcgaggaactgccaaaactgtaatggcacgtggactgcatgcaatactgcctcctattgaagtagtagtaggttccatagccaatgcggatc

SEQ ID NO: 33291 - DNA, 340 bp, Glycine max
  Clone ID: LIB3138-014-Q1-N1-G11
tttgcttgttaacaagcacacaaattctcactcatgctgaatgacattacctacaagttgaaggcttgaacatgtgaattgcttaagttcaaattacagtgcaagcaaaagggaattcgaaacatgagacatagaaaaccaaatattattttgaccttgtatgattttctttttgttcttttcaggattcatctgttattgcacagttggggatacctgacatgcgcttaccgctcctttatacattatcttggccagaaagaatctattgctctgaagtaacttggcctcggattgatcttagcaagtatggttctctaacattttatgcaccggatga

SEQ ID NO: 33292 - DNA, 394 bp, Glycine max
  Clone ID: LIB3138-014-Q1-N1-G2
cacaacttcattatgtttcgtgtaataatctggaaatgcaagaggcttatcttgtcaatctcgtaaatgtgttacgagaattgtatttgcacagtccagaggaagctcgccaattgagaaggaaagctctctctcgtattgaatggctgcaaaaagctgatgtgcctaccatagcacagattgaagagttccattcaatgcagaggatgatgaatgctcctgattcaaatgataatattgatttactgttgagcattgatttgttgggtttacaaggagcaggtaaagcttttccaaacaaaattgtttttgatgataagcttgtgttggctaacacacaagaattctttgatggaaattttccagtggattcttggttaccaatttttgtgaa

SEQ ID NO: 33293 - DNA, 312 bp, Glycine max
  Clone ID: LIB3138-014-Q1-N1-G4
cttgctttgttatcgaacatttctttttgatttcaaaaatttggcggaaaaaatttgaatctatttttatatgcgaatcaatcctactacttctggtcctgaggtttctgcgcttgaaaaaaaaaatctgggacgtatcgcccaaataattggtccggtactagatgtagcttttcccccaggtaagatgcctaatatttacaacgctctgatagttaagggtcgagatactgttggtcaacaaattaatgtgacttgtgaagtacagcaattattaggaaataatcgaattagagctgtagctatgagtgc

SEQ ID NO: 33294 - DNA, 384 bp, Glycine max
  Clone ID: LIB3138-014-Q1-N1-G5
attcataatcaggcactgcatgagcttgtcgaccctaccctcgggtttgaatccgatttcaaagtcaggaaaatgataaatgctgtggctgagttagcatttcagtgcttgcagagttctaaagagatgagaccttctatggaagaagtggtggagactctcaaggatatacagagtgatggcaaacataaaagccagcctgaggtaatggacatcacaagcacagctgatgatgttgtgttgctcaaggatgaccctcctccaccatcacctgattctaatgcggtgagcaagtcgacaacgccaaatgctagcggataagtggaccttctttctcacttccatcaaagcatcaagttaaccttatccaaatttatgtaaaag

SEQ ID NO: 33295 - DNA, 390 bp, Glycine max
  Clone ID: LIB3138-014-Q1-N1-G6
cagggttaggtttaggtcccttgtctggtctggtgtgcaattctccccatacaataacaatacacccactttatcaaccaatcaatcaatatacctagtagtgattagatttagtgatcgatcctctcctttcgttctcaaaccgtagatttagattttagggtttctctcttaatataatcttttgacacttccgtaacaaacaaaaaaattacataaattttcccttataattattattatttggcttttatctttggattaactaggcttgagctatcacaaataattgtttcggagaatggaaaagaaaaaggtggcagttcccctcgtgtgccacggtcattctcgccctgtggttgatctcttctacagtcccgttacgcctga

SEQ ID NO: 33296 - DNA, 389 bp, Glycine max
  Clone ID: LIB3138-014-Q1-N1-G7
ctgcaaaaagctgatgtgcctaccatagcacagattgaagagtgccattcgatgcagaggatgatgaatgctcctgattcaaatgataatattgatttactgttgagcattgatttgttgggtttacaaggagcaggtaaagcttttccaaacaaaattgtttttgatgataagcttgtgttggctaacacacaagaattctttgatggaaattttccagtggattcttggttaccaatttttgtgaattgtctttatcctgtaagtcaattaccttcagaagctgtcgttgtaaatgttacatgtggtagtggaccgtgtggtttacccaccactgcttggattagttctgcagttaacaatcgctcctcagatatcaacaaaaggat

SEQ ID NO: 33297 - DNA, 389 bp, Glycine max
  Clone ID: LIB3138-014-Q1-N1-G8
ctactactactacttttcctccacaaaatgatgctcggaatcaagagggttcccactgtcgtttccaactaccaaaaagacgacgctgcagactctcctcgtcccgtcggaggttgtggtcggaattgcctcaaagcttgttgccttccagatgcaaagctgcctttgtatgctttcaagaaggctaatggaaaggatttggccctgcatgcatgcgccggggagcctcccctcacattcctcgactcacttgttcttggagagtgggaagatcgcatgcagagaggactttttcgctatgatgttaccgcctgtgaaaccaaggtgattcctggtgaatatggtttcgttgcccagcttaatgagggtcgtcacctcaagaagagacc

SEQ ID NO: 33298 - DNA, 402 bp, Glycine max
  Clone ID: LIB3138-014-Q1-N1-G9
gtgagaacaccattgaattttgattctagcaagcagagcttttgtcagttttctattgaccttctcggtggaggaatcttagtggacaaaactggagattggatcacacttatacaaaattctccaattagtaacttattgagagttgctgcttggaagaaaggctgtttaatggtcaagattgtgatgtctgggaatgcagcagtcaaaaggagtgattgggcctcattggtacaagtgtttttaacaaacagcaacagtacagagcattttgatgcatgtaagtggacaaaatcagaaccacattcctgggaattgatcttcccaatagaagtatgtggtcctaataatggttttgaaatgtggagttctgagtgggcaaatcaaacttcatggcatttg

SEQ ID NO: 33299 - DNA, 380 bp, Glycine max
  unsure at all n locations
  Clone ID: LIB3138-014-Q1-N1-H1
aacaaaacagagaaaatggcgctgttgtgtggcggcatgccatggtcgaaggtgatagttcctcccattttccaccactctcacacccctcgcaccttcttcttccaacgacgccgtttctcagtctctgctctctccgaacaaccaccacccgttcgcgttcgtttcgctccttctcccaccggaaacctccacgtcggcggtgcccgaacggccctcttcaactacttgttcgcaaggtccaaaggtgggaaatttgtgctgagaattgaggacactgacttggagaggtccagtagggagtctgaggaggccatgctcaaagatctttcttggcttggactngattgngatgaaaggcctggtgttggaggggatta

SEQ ID NO: 33300 - DNA, 339 bp, Glycine max
  Clone ID: LIB3138-014-Q1-N1-H11
ccacaataactcttcaaggatcctccttcccacgagattctttggtgggaaaaatccaagaggtttgaaatttgaaggcagggaacatggattatttcaatgcaccaggaaaaaaccatctctttgttccagggccgggtaacattccagaccagatcatacgggccatgaacagaaacaatgaggactaccgttctccagcaattccagctatgacaaaaactctgcttgaggatgtcaagaagattttcaagaccactactggaaccccatttctcattcctacaactggtactggtgcttgtgagagtgctcttacaaacacactgtcttctggga

SEQ ID NO: 33301 - DNA, 363 bp, Glycine max
  Clone ID: LIB3138-014-Q1-N1-H12
caggggtgctcgggatgcctgctggtccttacttatatgcggaggatctgattgaagtcttgaagaaaaaacatgcttctggaacgtataaaaacctagtattttatctggaggcatgtgaatctgggagtatctttgaaggtcttcttcccgaagatatcaatatttatgcaaccacagcttccaatgcagaagaaagtagttggggaacatattgccctggggagtatcctagtactcccccagaatattcaacctgcttgggtgatctgtacagtgttgcttggatggaagacagtgacagacacaatttacgaacagaaactctgcatcaacaatattaattggttaaagaaaggacta

SEQ ID NO: 33302 - DNA, 389 bp, Glycine max
  Clone ID: LIB3138-014-Q1-N1-H2
aagcaatgcaagtggagatggagattgagaaggagaggttggtgtacatgtggggttaccttcccggagctctgccgcagaggacgccactgttgacgccggttctcgttagggttccgccctctggttactcttggaaggatgtttgcggtggtggttgtggattcgccatggctatctctgagcctggaaagctcataacatggggttcaacagatgatttaggccaaagctatgttacatctggcaaacatggggaaattccagagcctttccctcttccaactgaagtgactattgtaaaagctgcagctggatgggcacattgtgtttctgtgacagattgtggagaagtttacacatggggatggagggaatgtgtaccctct

SEQ ID NO: 33303 - DNA, 279 bp, Glycine max
  Clone ID: LIB3138-014-Q1-N1-H3
ggcgtgtggaattcagtggacaatgttgcgagtagcgttgaaccgattggcgttgccgagagtgtcggcaggtagtgtagtgtttgagcagcgcacagtgagcggagcggtgcgttatgcgtcgtcgtctagtatggtgcggttcactcgcgaccacgagtgggtcaagctcgactcggccaactccaacatcggcatcgtcggagtgtcagactatgcgcagaaggctttaggagacgtcgtttacgtcgatttgccgagcgtcggacgcaagctgag

SEQ ID NO: 33304 - DNA, 397 bp, Glycine max
  Clone ID: LIB3138-014-Q1-N1-H4
gtttggaatcaaatggcaacagtgagaacaccattgaattttgattctagcaagcagagcttttgtcagttttctattgaccttctcggtggaggaatcttagtggacaaaactggagattggatcacacttaatccaaaattctccaattagtaccttgttgaaagttgctgcttggaagaaaggctgtttaatggtcaagattgtgatgtctgggaatgcagcagtcaaaaggagtgattgggcctcattggtacaagtgtttttaacaaacagcaacagtacagagcattttgatgcatgtaagtggacaaaatcagaaccacattcctgggaattgatctttccaatagaggtatgtggtcctaataatggttttgaaatgtggagttctgag

SEQ ID NO: 33305 - DNA, 387 bp, Glycine max
  Clone ID: LIB3138-014-Q1-N1-H5
ttggcataatacattgatttgtttcttaaaaacaacactgcaatgtctgccatatttctgcttgttggaatgctatcgtccattacagttgcacaatccataggagtttgctatggagtgattggtgataatctaccatcaaggcaagaagttgtggacttatataaaacaaatggcattggtagaatgcgtatatactacccagatgaagaagcactccaagcccttagaggttcaggcattgagttgattatggacgtggctaaggaaacccttcaatcattgacagactccaatgctgctacagattgggtcaataaatatgttacaccttactcgcaagacgtcaatttcaagtacatcgctggtggaaatgaaattcatccc

SEQ ID NO: 33306 - DNA, 337 bp, Glycine max
  Clone ID: LIB3138-014-Q1-N1-H6
gacggagaaaccaatggctactgctgcaactacaactactgccccagattttattgaatgagaagagaagagaatctccaaacccaacactttgtttgacattcccattcattcacgctaaaatgattcgtcaatctctttacacccctccttccatcaccttctcaaccccatctccaaaacgtcaccgtttcgctcctcctagttggagaattcgatgcgacgcgtcgtcggtgtcggtggagcagaaggttgttgggccttaccctggtgggctgggcccacacacgggtagagacccaaacgcgaagaagccagagtggctgaggcagaaagc

SEQ ID NO: 33307 - DNA, 387 bp, Glycine max
  Clone ID: LIB3138-014-Q1-N1-H7
aagaggagcactcattgtcgggtttcttctatgaagactgcacagcctacggtgaatggggggactcatgcatttgaaggccttaccacaggattggacttgaagggttattcagaagaccccatttcccctgctaggctttttgaagtggttgccgatgatctgctaactctcaataaaaatcttcagtcgattgtaggagcagaaaatccagttttgatgtctgcagctgagcagatttttagtgctggtggaaagaggatgagaccagctttggtgttcttggtgtcaagggcgactgcagagttacttggcttgaaggaacttactgcaaagcatcgacgtttagcagagataattgaaatgattcatactgcaagtttgata

SEQ ID NO: 33308 - DNA, 293 bp, Glycine max
  Clone ID: LIB3138-014-Q1-N1-H8
cttggtcatgggagtggcacctgttaaggctcaatttgagggtgctgaaatgggtgtgcccgctgagaacgatggctgcaaatgtggaccaaactgctcctgcaacccctgcacttgcaagtgaggtgttgggagagcaagcttcaagcagagatagcccttaattaggaataatgataaactattaatgtgtagctaaaaacttatgtattatttctgtgatggatttcgtgcactctggtgttttgtgtttaacaaacatccttacacaaaagtgggcatgacttgtcttt

SEQ ID NO: 33309 - DNA, 306 bp, Glycine max
  unsure at all n locations
  Clone ID: LIB3138-014-Q1-N1-H9
tctgtgttaactccctgtgtccctccctatattattactaccgggagagaaagagtgatcttgcaagttctgatctattcctgttccagcaagccatggcaatttcaggtccagagactcagagtccttcagtgaaaagcgactctcaggtggaagttgagtgtgtgaaatgcgactcgtgcgggttcacagaggaatgcacccctgcgtacatcacgagggtgcgtcagaggaaccacngtcacttgctgtgtgggctgagcgtggaggctgtaaaacacgatgtggtgagatcagataggctca

SEQ ID NO: 33310 - DNA, 297 bp, Glycine max
  Clone ID: LIB3138-014-Q1-N2-A1
ttcctaaacttggaatttgggttcgagagaatgcgtatatcctacccagatgaagaagcactccaagcccttagaggttcaggcattgagttgattatggacgtggctaagggaaacccttcaatcattgacagactccaatgctgctacagattgggtcaataaatatgttacaccttactcgcaagacgtcaatttcaagtacatcgctgttggaaatgaaaatcattccaataccaatgaggcacaatatattctatctgccatgaccaacattcagaatgcaattttattaac

SEQ ID NO: 33311 - DNA, 236 bp, Glycine max
  Clone ID: LIB3138-014-Q1-N2-A10
gctcattagatatagctatgaaaaattactgcgccaggctaaagctccaagtatgtttttacaatccttcaaaaattttgtttctttgtgtgtgtatggtgatgataacttaattagtgttcatgaatatgtcaagccttactttagtggttctaaattgaaaagctttctagctagtcataatatcaccattactgatggtattgacaaaactagtgcaactttgcaatttaaaa

SEQ ID NO: 33312 - DNA, 184 bp, Glycine max
  Clone ID: LIB3138-014-Q1-N2-A11
gttattgtcttttgagtgatgggtttgtgctcttcggtccccagaaacgctaacgaagacatgaagctcaaactctcgttcggttcaaaatctgagaagcttgggattccttcaacatccatcaagggacaacaaccacaaccaccccaaaatgggtggtcaacggctcggtcaacgaccacct

SEQ ID NO: 33313 - DNA, 179 bp, Glycine max
  Clone ID: LIB3138-014-Q1-N2-A12
atttgaaagttatggaagaatgtggccacacatacacaaccgtattctagcatctttgatattataccaaattacaatgtttgggtactttgggacgcagaaattctactatacaccacttgtgcttcctcttcccatattgtcattggtctttggttttgtctgggcaaagaaatttt

SEQ ID NO: 33314 - DNA, 250 bp, Glycine max
  Clone ID: LIB3138-014-Q1-N2-A2
ttagatggtttgattaccaagcaagttatgagcaagatggcggaaatgataaacagtctttgtggtggtgatgaaaaaattgattccgtgaaaggacgcacctgctgttggcttgttgttcaaggatggcaatttgtaagaaagatgtttggagaggtgaatgtggaatcccttctggatttccgctcacagttatttgcaatagcatttttaatgagatgctcattagatatagctatgaaaaattact

SEQ ID NO: 33315 - DNA, 370 bp, Glycine max
  unsure at all n locations
  Clone ID: LIB3138-014-Q1-N2-A3
ctcgagccgaatcggctcgagcaatttaccagctatacttgttccttttgaaggttagaagtgctacaatacaaacaatggcagctactcaggaagatgtgaagcttttgggtattgtgggaagcccatttgtgtgcagggtccagattgcccttaagttgaagggagttgaatacaaatttttggaagaaaatttgggcaacaagagtgatttgcttctcaaatacaaccctgttcacaagaaggttccagtgtttgttcacaatgagcagcccatagcagagtctcttgtgattgatgaatacattgatgagacatggaagaacaaccccatcttaccttctgatccttaccaaagagcctnggctcg

SEQ ID NO: 33316 - DNA, 303 bp, Glycine max
  Clone ID: LIB3138-014-Q1-N2-A4
gtcacgttttccttttcggctaaaaccctaacctaaccttatcaccccaaaaccctcaatctccaactttaccccggtaacgaatcttcgcctccctccttctatcgtgacccgaacccgcaattgtaaccggattcgggcggggcttgatggggatttctcggcgaaaaggagcagcagcagcaacaacaacgaccagagggagacgataatgttacctgggtgtgactacaaccattggctgattgtgatggagtttccaaaggaccctgcacccacccgtgaacagatgattgacacgta

SEQ ID NO: 33317 - DNA, 349 bp, Glycine max
  Clone ID: LIB3138-014-Q1-N2-A5
cagttccgcaaggtgaatgttccacctcatcgttatacccctctcaagaaagcttggatggatatctatagtcccatatatgaacagatgaaaattgatgtccgtatgaatttgaaggctcgtagagtggagctgaagacaaggcctgatacacctgatattagtaacctgcaaaaatgtgctgattttgtccatgctttcatgttgggttttgatgtcatagatgccattgctcttctgcgtttggatgagctctacattgagtcctttgagatcaaggatgttaaaacacttcgaggagatcacttgtctcgtgctattggaaagttgtctggtaagggtggtaaaa

SEQ ID NO: 33318 - DNA, 310 bp, Glycine max
  Clone ID: LIB3138-014-Q1-N2-A8
ttaatattaggttggtctgatttatcagcttccagatgcgacaccagagcagatcaagaaggcatactacaaattgcatgaaatcttgccacccggatttgagtggaaatgatcctgagaccacaaatttttgcatgttcatcaatgaagtctacacggagctcagcgatcccgtacaacgcatgatttatgatgaaattcatggctactctttaacttcaatcaatcctttcttggatgattcaagcacaagggatcatgcctgtgatgatgaattcagctgcataggctgcaaaaatagtgccaatgt

SEQ ID NO: 33319 - DNA, 352 bp, Glycine max
  Clone ID: LIB3138-014-Q1-N2-A9
ctcgagccgcgtctttgaagtttctaagatgacttctccctacattaaatgtacagtctctttcttcatagcatttggaaatttggctgatgataccatcaattttgaggcttttccccacaagctggtgcagtttggagagattcaggaaaaagttgtattgaaattttcacaagaggaatttcttacagcttggtcaactcaggtgcgtcctgcaacaactctgttggctgatgggtgtccatatttgtatgcaatggtgcatgatagttcagtgtctacaataccaagtgattttgtcattggtgtcaaagtgacaaccataaacaatatgtgtgcatatgggctcaat

SEQ ID NO: 33320 - DNA, 321 bp, Glycine max
  unsure at all n locations
  Clone ID: LIB3138-014-Q1-N2-B1
agaagagctatgacgtcgcctcccaccctaaatctggaaattggtctcggggaaggatcagaattcaagtaaatctaagaagaaatggttggggaggcaaaaatttgagacttcagtctcatactcagaagctggtaaagcaccaccaccaccacctcctattcctccaccaggaggagattaaattaactgatattgaacatgaaatcagtcatgatcacgatcaagttgttgaagttgcaactgccatggatgctgaggaactngatccttctgttcaaatagaacctgttagggttgaagctgccctaattgctcatt

SEQ ID NO: 33321 - DNA, 369 bp, Glycine max
  unsure at all n locations
  Clone ID: LIB3138-014-Q1-N2-B10
ctctccctccctctctctctctctctctctctctctctctctctaagctctttcttgttgaaactgtgagtctatgttatttgtggcggagcatgaactccaccaccaacacttcgaattctcagtcaatggctgcagcagcaccgagtgatggttctgggaagaaggtaagaaagccttacaccataaccaagtccagagagagttggactgaggaagaacatgataagtttctcgaagctctccaactatttgacagggactggaagaaaattgaagattttgtaggttcaaaaacagttattcagattcgaagccatgcccagaaatacttcttgaaagttcaaaagaatgggactgtngcacatg

SEQ ID NO: 33322 - DNA, 375 bp, Glycine max
  Clone ID: LIB3138-014-Q1-N2-B11
caaagaacagaagatgatggcacaaacgctggcaatgcccgtggcaccttcgctagctatcatctccaattctcgcctctccaacacactctccgttcccgttctgaacaaaccaaaggttcaagggtcaagcatcaagtgcgttcgtgttggcggtgtggagattccgaacaacaagcgaatcgagtactcgctgcagtacattcatggagttggaaggaccagagcgaaacagattctctgtgatatccaaatggataataaaatcacgaaggaactcactgaggaggagctaatcacactcatggacgaggtcttcaaatacatgattgaaggcgacctgagacggttcaatgcggttaatataaagagact

SEQ ID NO: 33323 - DNA, 241 bp, Glycine max
  Clone ID: LIB3138-014-Q1-N2-B12
aaatttttcctttgatattaaatctcgctctagattggaaaaagtttcctctacaaaagcacaatttgttagtggaaaaaccttcaaatatgatataattggtgctggttcacattcttcagaagattttcctgaaaaggaagatcaagaaaaacccaaaaagattgatgccagattgagacaaagaatagatcctcaatacaatgaggttcaggctcagatcgaaacaaatttgtttaaa

SEQ ID NO: 33324 - DNA, 362 bp, Glycine max
  Clone ID: LIB3138-014-Q1-N2-B2
aacactcataacacaaagcacaaagcaaagctcatccttgagttaaaaaatggcagcagcttcttccatggctctctcatccccatccttggctggcaaggccgtgaagctgggcccatcagccccagaagtgggaagggtgagcatgaggaagaccgtcaccaagcaggtctcctcaggaagcccatggtacggcccagaccgagtcaagtacttgggcccattctctggcgagcccccgtcctacctaaccggtgagttcccaggcgactacggctgggacactgctgggctttccgcagacccagaaaccttcgccaagaaccgtgaactcgaagtgatccactccaggtgggccatgc

SEQ ID NO: 33325 - DNA, 328 bp, Glycine max
  Clone ID: LIB3138-014-Q1-N2-B3
ctcgagccgtacagattgtgatggaacttccaattgaacacggtttacttttggacaatcttttggatcttgcacatgccccttttactcacacctcaacatttgctaagggatggagtgttcccaggtttgtttggtttataccattaaaactgaaagcaattgtcattcagaaggggtaaccagtgatgaagggatcaaaatgccttttggggatgttacaatttatctcatttcaaattgatcgaaaacttctttccctttcccccaaatttgtttgaagtttttggcttctagaatacacttctagaatttagagttggaattt

SEQ ID NO: 33326 - DNA, 275 bp, Glycine max
  Clone ID: LIB3138-014-Q1-N2-B7
gtcacaacttcattatgtttcgtgtaataatctggaaatgcaagaagcttatcttgtcaatctcgtaaatgtgttacgagaattgtatttgcacagtccagaggaagctcgccaattgagaaggaaagctctctctcgtattgaatggctgcaaaaagctgatgtgcctaccatagcacagattgaagagttccattcgatgcaaaggatgatgaatgctcctgattcaaatgataatattgatttacttgtgagcattgatttgttgggtttac

SEQ ID NO: 33327 - DNA, 320 bp, Glycine max
  Clone ID: LIB3138-014-Q1-N2-B8
atgataacttaattagtgttcatgaatatgtcaagccttactttagtggttctaaattgaaaagctttctagctagtcataacatcaccattactgatggtattgacaaaactagtgcaactttgcaatttagaaagttagcagattgtgattttctcaagagaaactttaagcagatgtctaatgttttgtgggtggctcctgaggacaaggcgagtttatggtcacaacttcattatgtttcgtgtaataatctggaaatgcaagaagcttatcttgtcaatctcgtaaatgtgttacgagaattgtatttgcacagt

SEQ ID NO: 33328 - DNA, 344 bp, Glycine max
  Clone ID: LIB3138-014-Q1-N2-C1
ggtgtttttaacaaacagcagcagttcagagcattttgatgcatgtaagtggacaaaatcagaaccacattcctgggaatggatcttcccaatagaggtatgtggtcctaataatggtttcgaaatgtggagttctgagtgggcaaatcaaacttcatggcatttgagtttccttattgacaatcccaaacagtctacagtttttgatattctcttgggaatctctcaagattttgaaattgctggtaatactcttatgccagctttttctgttccacaggctactgccagatcttctgaaaatgcggaatcctctgcatgatctggaatttgtgttttctttc

SEQ ID NO: 33329 - DNA, 465 bp, Glycine max
  Clone ID: LIB3138-014-Q1-N2-C10
gtctactgaggactcctcatctgttggggtgatatggcatttagaatggaagggaaaaccttttccctttagcaaagggtgcagtttttatcgtctagaggtgatcaatggcaaaaggcaaataacatatgggcgcgactgtgttgaacctgcaatcaagcctggggatgcgactttggcagcgatcaggagtgtaacatggctactgcagcaatttcctcagttggcaaactggttatagtgaaagattctacattattttggaagcgcataatgtgcctccttttgcccttacaaaattagtctttaaaatttgatcgtagttggattgtataacataaaactattgcacggcaggtgaaaagtgtgtgtgtgtatatacaagatatgggacatatgtgtcaggatgaattgacattatagctgtcaaatttttaccactattataatagcttttgtttgaag

SEQ ID NO: 33330 - DNA, 413 bp, Glycine max
  unsure at all n locations
  Clone ID: LIB3138-014-Q1-N2-C12
tatttttatggtgtgcttgccttgttggttattgtgagaaaggaagagggtttgtttccgttttgtttgtgaattgtaaagaaggaaataaaacattttgggaaggatttgaagtgggttattgttgtttgtggatttcttcattgttttgctctaaaaatggagagagattttctgggtctgagctcaaaaaaaccattggctatgatgaaggaagagatgaatattgatattggaagcaaagacacaggtttcacaaatggagcagtggtaaaatggcccttcatgaacaaagtatatgtccatcctcttttgatgtcattcaatcctnctcaggtgaattctgtgaaccatcctcatggtatgaagatgttttcagttcccaatcaagcaatttcagtttccatgggaca

SEQ ID NO: 33331 - DNA, 374 bp, Glycine max
  Clone ID: LIB3138-014-Q1-N2-C2
ctctcactccccatttccctgcacaaagattttttcccagcttgctcatcaagtccaagaaccaacctaccttttgcaatctcaattcaatggcgtcctctctcattgcgaagcgcttcctctcctcttccctcctctccaggtccctccttcgccccgccgcttccgcttcccaccgctctttcaacaccaacgccatgcgccagtatgacaaccgcgccgacgaccacagcaccgacatcgatcgtcactccgaacgctctttccctagcactgcgcgccgcgacgatatcttctcagatgtgttggatccattttttccgactcggagtttgagccaggttctgaacatgatggaccaggtcatggacaat

SEQ ID NO: 33332 - DNA, 341 bp, Glycine max
  Clone ID: LIB3138-014-Q1-N2-C3
agataatgaagaggaattggtgaaagccaatcgaatgaaaccggagagtgacaaaggaactgaattagaagagaccagtgaatctgagtcagaagaaaccagtgaatcagagtctgatgtggacacagatacagatgaaggtgcagatgaggaagtttacgaggaagaagcctctgatgtccatgaagacatagcaacgattgacaaagaaactcatagggttgcggttgttaacatggactggagatatgttaaggctgttgatttgtatgtattggtaagctcatttgttccacctaatggactgatcaaatcggttacggtctatgcatctgagtttg

SEQ ID NO: 33333 - DNA, 326 bp, Glycine max
  Clone ID: LIB3138-014-Q1-N2-C7
gagggaattaatcaaattcaaagagatgctatgattccaattaaaaattcgttaggtcctttaggaatagcccctcaagttgcccattttgatttttaccgtttaataactcataatcagatctcgataattaaaaatgggcaacttgacaaattaaaagaaacttttcaagtattccaatattatttcctggacgaaaacgagagaatttataaacctgatctgtgtagtaacatcattttaaatccattctatttgaattggcattttctccaccataattattgtgaaaaaacgtttacaataatgagtcttggtcaatttat

SEQ ID NO: 33334 - DNA, 372 bp, Glycine max
  Clone ID: LIB3138-014-Q1-N2-C8
catttatgatccatttggcatttcatcatatttcaccacttgtcctactccacttggatgatttcctaacgtattgttttcacaaatccttgttcttcatcagctaatagtttgagtccaacgaattcagcaacactatagatatatgctatatcttcctttccctatacattttccttctaaagtatctctagttctctacaaatcaacgtggcacattttttagcctaagaaaagctttagctgcaactcaaattcaaagtgtaagcctttcttgtttttattagtttatcttcaccaatggaagagaactttaagtgtgaacaagttggtctcattgatgagctaatgcaagggaaggagctagcaaag

SEQ ID NO: 33335 - DNA, 330 bp, Glycine max
  Clone ID: LIB3138-014-Q1-N2-C9
ggggtggtctttttgaggccatcactggttatggtcttggtgggtcttctatggctttgtttggaagagttggtggaggtatctatactaaggctgctgatgttggtgctgatcttgtcggaaaggttgaaagaaacatccccgaagatgatccaagaaatccagctgtgattgctgataatgttggtgataatgttggggatatcgctggtatgggatctgatctttttggttcatatgccgagtcatcctgtgctgctcttggtgttgcttccatctcttcttttggggtgaatcatgagttgactgctatgttataccctctcatta

SEQ ID NO: 33336 - DNA, 172 bp, Glycine max
  Clone ID: LIB3138-014-Q1-N2-D1
tatatataacctggaggggcctaatggggttgggacctattggtgtccaggtgccttttttgtgggcccccatttcctatggtccggttccctaacacaagtgccaatggttattaaggaaccggtggccttgcattttggacaattgtggggaatggcctaaaattggcat

SEQ ID NO: 33337 - DNA, 378 bp, Glycine max
  Clone ID: LIB3138-014-Q1-N2-D11
cggctcgaggagcaggtaaagcttttccaaacaaaattgtttttgatgataagcttgtgttggctaacacacaagaattctttgatggaaattttccagtggattcttggttaccaatttttgtgaattgtctttatcctgtaagtcaattaccttcagaagctgtcgttgtaaatgttacatgtggtagtggacgtggtggtttacccaccactgcttggattagttctgcagttaacaatcgctcctcagatatcaacaaaaggattcgcacagcacttgggaaaggtaagaaaattgtttttcttactagagttgatccttttccaatagctttactggctgttctttatggcgttaagaatgaaattctgagtt

SEQ ID NO: 33338 - DNA, 471 bp, Glycine max
  unsure at all n locations
  Clone ID: LIB3138-014-Q1-N2-D12
gtatggtgatgataacttaattagtgttcatgaatatgtcaagccttactttagtggttctaaattgaaaagctttctagctagtcataacatcaccattactgatggtattgacaaaactagtgcaactttgcaatttagaaagttagcagattgtgattttctcaagagaaactttaagcagatgtctaatgttttgtgggtggctcctgaggacaaggcgagtttatggtcacaacttcattatgtttcgtgtaataatctggaaatgcaagaagcttatcttgtcaatctcgtaaatgtgttacgagaattgtatttgcacagtccagaggaagctcgccaatngagaaaggaagctctctctcgtattgaatggcttgcaaaagctgatgtgcctaccatagcacagattgaagagttncattcgatgcaaaggatgatgaatgctcctgattcaaatgataatat

SEQ ID NO: 33339 - DNA, 331 bp, Glycine max
  Clone ID: LIB3138-014-Q1-N2-D3
ggcaaatcaaacttcatggcatttgagtttccttattgacaatcccaaacagtctacagtttttgatattctcttgggaatctctcaagattttgaaattgctggtaatactcttatgccagctttttctgttccacaggctactgccagatcttctgaaaatgcggaatcctctgcatgatctggaatttgtgttttctttcgcttgttcgtttgtttaattcaataaaggaaattaggcatgaccctcttgttgagtatgctctgcctatttgaaaatttccacacctcttttaattgtcgtaatgatgtgtgaagtgtgtgttatttt

SEQ ID NO: 33340 - DNA, 408 bp, Glycine max
  Clone ID: LIB3138-014-Q1-N2-D4
ctctctctccgtgttttctcttcaaattatccagaattggattcaaatttccttcaacacgattaacacagatcgcgttcgttcttgttcagacttcacaattcgcgcgcgcacttcatgaatggaagacaaagacagagcagcctccgatccagctgagttcgccggcgacacgagttggacactcgccaccgatgactccgacggtgcgtacctgttccccggcgaccgggagcggagcatactcagggaattcgggtggaacctcgaaccggaccagccaaaccggatcggcaccgacgacggatcgtggaggccggttcagtcctctctgaccggttcgatcgaaccggccgccgccatgtcgtctaggtcgaataaccaaatcgtgtcgtccagctccagcga

SEQ ID NO: 33341 - DNA, 361 bp, Glycine max
  Clone ID: LIB3138-014-Q1-N2-D7
agaaggcccaaaagaggggaagattttaagtttactgaggctctagttaaggcagattactggttactattttttgtttactttgttggtgttggaactggggttactgtacttaataatttggctcaaataggcattgcacaaggtatggaagataccacaatcttgctgtcacttttcagttttttcaattttgtgggtcggcttggtggaggagttgtttcagaatattttgtcaggacaaaaacgattccaaggacaatttggatgacatgcacgcagataattatgatcttcttgtaccttgtgtttgcctatgctatcaaaggaaccctttatcctgcaattgcagttcttggta

SEQ ID NO: 33342 - DNA, 374 bp, Glycine max
  Clone ID: LIB3138-014-Q1-N2-D8
caaaacactcataacacaaagcacaaagcaaagctcatccttgagttaaaaaatggcagcagcttcttccatggctctctcatccccatccttggctggcaaggccgtgaagctgggcccatcagccccagaagtgggaagggtgagcatgaggaagaccgtcaccaagcaggtctcctcaggaagcccatggtacggcccagaccgagtcaagtacttgggcccattctctggcgagcccccgtcctacctaaccggtgagttcccaggcgactacggctgggacactgctgggctttccgcagacccagaaaccttcgccaagaaccgtgaactcgaagtgatccactccaggtgggccatgctcggagccc

SEQ ID NO: 33343 - DNA, 390 bp, Glycine max
  Clone ID: LIB3138-014-Q1-N2-D9
gcctcgggaatatcataattcctctggccagattgttctagattatgcaaaagcaatacaagaaagcgtttttgagcaacttcgtgttgttcgtgatggtcaacttcgaatagttttctctccagacctgaagatatgctcttgggaattttgtgctcgacgccatgaagagctcatccccagaagattgttaatacctcaggttagtcaacttggagtagttgctcaaaaataccaggcatttactcaaaatgcaacacccaatttatccgttccagagttacaaaataattgcaatctgtttgttgcattcacccgtcagttggcaaaagctttagaagttccattggtcaatgatttaggatatacaaagagatacgtgcggtgcct

SEQ ID NO: 33344 - DNA, 434 bp, Glycine max
  unsure at all n locations
  Clone ID: LIB3138-014-Q1-N2-E1
gagctatgacgtcgcatgccccccttccttagcttcgaaattcggttcgagcaatcacgcccccctctggcatctgaacttttgagagcatattgtgcttctcgcaggtatgttaccgctagtggactgcctgatgaaactagagctgctcgccagatactgaaagattacattgatgggaagctgcctcactatgaaatgcccccagcaatgtcaaatgtggaactatactcggttaacttgcatggctctgtttcatctcgtactgaagatgttgatggccaaacttgcaccagattttgagcaagtgttggatgacctcaatttcatttgacatggctaatggacttgtttcgaatgaagttaccatcaagaaggctgatgcatctcataatcaccatangaagcctcagcggaaaaaagatcgtctcaga

SEQ ID NO: 33345 - DNA, 258 bp, Glycine max
  Clone ID: LIB3138-014-Q1-N2-E10
ctcactaccaatgcacaactgacggcacgaagatagctgacgtgctgctttcacaagacattgacacgggtgtgaaagtcaacaagcgaacgctaccccaagcttgtgccaactaagaggcaagatgccaaggtattgatggattaggctttagcatgggtgcttactaccatgctggtgcgcttgttaagacatcgcaaacagtggcttgaatacggaagggtatctaggccatggctgagtacgatgctacctggg

SEQ ID NO: 33346 - DNA, 344 bp, Glycine max
  Clone ID: LIB3138-014-Q1-N2-E11
gaaaagctttctagctagtcataacatcaccattactgatggtattgacaaaactagtgcaactttgcaatttagaaagttagcagattgtgattttctcaagagaaactttaagcagatgtctaatgttttgtgggtggctcctgaggacaaggcgagtttatggtcacaacttcattatgtttcgtgtaataatctggaaatgcaagaagcttatcttgtcaacctcgtaaatgtgttacgagaattgtatctgcacagtccagaggaagctcgccaattgagaaggaaagctctctctcgtattgaatggctgcaaaaagctgatgtgcctaccatatcac

SEQ ID NO: 33347 - DNA, 392 bp, Glycine max
  Clone ID: LIB3138-014-Q1-N2-E12
ctgtgtttgtctttgattggcgaactagactgctcctcctgggatcagaaccgaagaagggtatgaaaggaattccaggggattggaaattttctgcaaaagctggatgcctgaatcgggcgtcccactcaaagctgctttgtgtttctgccatggttatggcagcacttgcactttcttctttgaaagtattgccaaaagaatagctgcttctgggtattgtgtttatgctatggactatccaggttttggtctatctgaaagtttacatggttacataccaaattttgatgatttggttgatgacgttataaaacattttacaaaaatcaaaacaaggcctgaggtgagagggttgccacgattcatatttgggcagtcaatgggtggag

SEQ ID NO: 33348 - DNA, 150 bp, Glycine max
  Clone ID: LIB3138-014-Q1-N2-E3
gagcttgacgtccatgcaccctccttagcctcggattcggttcgggttaccgcctgtgaaaccaaggtgattcctggtgaatatggtttcgttgcccagcttaacgagggtcgtcacctcaagaagaggccaactgagttccgagttgat

SEQ ID NO: 33349 - DNA, 308 bp, Glycine max
  Clone ID: LIB3138-014-Q1-N2-E6
gttttaccatctctacaaccaggtggctaccaacacactggagagagtggctcctctcactcatgcagttgggaacgtactgaaacgtgtatttgtgattggattttcaattatagactttggtaacaagattagcacccaaactggtataggaacagccattgcaattgctggagtggcactctactcgttcattaaagccaggatggaggaagagaagcgtcaagcgaaagcagcattggatgttgcctacccggaggatgtcttgcactgtcaataaccacaaattttcttcaaaataattgagt

SEQ ID NO: 33350 - DNA, 411 bp, Glycine max
  unsure at all n locations
  Clone ID: LIB3138-014-Q1-N2-E7
ggtttttcaagagatgaccttgtgacacagcttaatgcattgaaggtcccacacaaactttcaccgcatttggatgaatttgttcgtatcaaaactgggttgcaggtatgatagtgagacaaagggttgattacaaggatgctttcatatgtgaattttctaacttgtataatgattttttgagtcaaacactgattagaggagaaaagttttggggactaactaaacatatttcctaccatgtgtaatagctaataggttcgatatcaatagtgtgaaattgggctttaaccagctactgacctactgtgggtgtatcttttccttttattttatgctttatanttttcacatgggaggcaattgagttatattcgttttgcttgtattatcctgtatgaactaagcatg

SEQ ID NO: 33351 - DNA, 339 bp, Glycine max
  Clone ID: LIB3138-014-Q1-N2-E8
actatttcgaactccgccatggctgccaccaccgccaccgccacgtcatacttttttggcacccgcctcaacaacccgacaaccttaaacaacggaagattccacgcgctcctcaacttcggcaaaaagaaggcggcggcgccgccaccgaagaaaaaggaagtgaaagtgaaaccctccggcgaccggctggtgtggtttcctaatgcggagccgccggagtggctcgacggaagcatgatcggcgaccgccggttcgacccgttcggtttcgcgaagcccgcggagtacctgcagttcgacctggactcgctggaccagaacctcgcgaagaacgtc

SEQ ID NO: 33352 - DNA, 374 bp, Glycine max
  Clone ID: LIB3138-014-Q1-N2-E9
ggtgtccatatttgtatgcaatggtgcatgatagttcagtgtctacaataccaggtgattttgtcattggtgtcaagttgacaaccataaacaatatgtgtgcatatgggctcaatcctggtatttcaggttctcgtcttttgggcaccattcctcagtccatttcacagcaaactgtttggaatcaaatggcaacagtgagaacaccattgaattttgattctagcaagcagagcttttgtcagttttctattgaccttctcggtggaggaatcttagtggacaaaactggagattggatcacacttatacaaaattctccaattagtaacttgttgagagttgctgcttgaaagaaaggctgtttaatggtc

SEQ ID NO: 33353 - DNA, 391 bp, Glycine max
  unsure at all n locations
  Clone ID: LIB3138-014-Q1-N2-F1
cgagccaattcggttcgaggtgatgtctgggaatgcagcagtcaaaaggagtgattgggcctcattggtccaagtgtttttaacaaacagcaacagtacagagcattttgatgcatgtaagtggacaaaatcagaaccacattcctgggaattgatcttcccaatagaggtatgtggtcctaataatggttntgaaatgtggagttctgagtgggcaaatcaaacttcatggcatttgagtttccttattgacaatcccaaacagtctacagtttttgatattctcttgggaatctctcaagattttgaaattgctggtaatactcttatgccagctttttctgttccacaggctactgncagatcttctgaaatgcggaatctctgcatg

SEQ ID NO: 33354 - DNA, 385 bp, Glycine max
  Clone ID: LIB3138-014-Q1-N2-F10
gagcacttccttaattagttttttctttaattgcttgattttcttgtgtaattgatcggaaatggcaccacaagcagattttggaaaatttgggtttgaaatagaaaagctctttggcaggcaaaagagttttggcaatggcaacgctccagccactcatcaaaatctctgccaatacaaattttatccaacgtatggtgctaccaaggtggttcacatgcatgtagaagatgtcaagtgcaatgaagctgcttcaagattcatatcagaaaagagaacggagcttcagatgaaaggtttgtttgggcagtgattattaataatttaatattgtagttctactgagaaatattcagcagttttttttttttttcctttttattat

SEQ ID NO: 33355 - DNA, 382 bp, Glycine max
  Clone ID: LIB3138-014-Q1-N2-F11
gaaacattggaggtcagacagcaaagggagatacaacactttaccagagtattcttagtccaagatcaagttcttttaaagaggttccaccaagaaacttgtcttctcacaggattgcagccagggagaaaattaagcgtcgtggtgacaatcatcagccaacggttgacaccttgacaaatgattcaacacacattttggatttatcttcaacttctgatcatgacaaagcatcagaagttaccaaaactcttgcattttcaccaagttttctgggatcacttggaaagcttggtggtgttccatcaaagcctgggctgagtggggaggtcccctccattgtgtcacccattttttctccctaatattgttggtgtcccca

SEQ ID NO: 33356 - DNA, 227 bp, Glycine max
  Clone ID: LIB3138-014-Q1-N2-F12
tgaacaatgtgtgtttttcggccgtgggaaaaacaccacgggccttatgtatcaggtgcactatctaggcctaagttaaaaggttgtaggcaagtgcttaagaataaaacggattggcctaataaagtaaacggagccaactagtccccaatcttgtgaagcttaagcatcctctttgcaagtttgagaccaacaactcgatgcaactgtaacagctgatcatggac

SEQ ID NO: 33357 - DNA, 253 bp, Glycine max
  Clone ID: LIB3138-014-Q1-N2-F3
ctgaaatgcttgttaatttgggaattccttgggttataattggtcactctgaacggaggcagcttttgaatgaatcaaatgagtctgtgggagataaagttgcctatgcacttcaacaaggtctgaaagtgatagcatgcattggggaaactcttgaacagcgtgaagctggtacaacaacggctgatagtgctgagcaaacaaacaccattgcagctaaaatatcaaattgggacaatgtccttgttgccta

SEQ ID NO: 33358 - DNA, 233 bp, Glycine max
  unsure at all n locations
  Clone ID: LIB3138-014-Q1-N2-F4
gaactgtaagagtctcaaatatctggttgatgagtgtccttttgcatttgtgaactagtatgtagtattttattcacttaaataaagcgcattactatgtgcaatgagtgtgtttaaattttaaaaaaaaaaaaaaaaaaaaaaaaaaaaaaaaaaaaaaaaaaaaaaaaaaaaaaaaaaaacaaaaaaaaaagaaaaaaaaaaaaaaannnntttaaaaaaaattataaaaa

SEQ ID NO: 33359 - DNA, 75 bp, Glycine max
  Clone ID: LIB3138-014-Q1-N2-F5
ataagatagtaacaggcgaactgatttcgttatcagaccaagaattgtgggatcgtgatcctggttttaaccaag

SEQ ID NO: 33360 - DNA, 424 bp, Glycine max
  Clone ID: LIB3138-014-Q1-N2-F6
cttcttaaagcaggtgctatctgatttcgttatcagaacaagaaggggtggattgtgatactggatataaccaaggatgcaatggaggacttatggactatgcatttgagttcataatcaacaatggcggcattgattctgatgaggattacccataccgtggtgttgatggtagatgcgacacatataggaaaaatgctaaagtcgtttctattgatgactacgaagatgttcctgcctatgatgagttagccttgaaaaaggccgttgcaaatcagcccgtgagcgttgctattgaaggagggggcagggaatttcaattatatgtatctggtgtattcacggggagatgtggcacagcactagatcatggtggtctggctgttgggtatggaacagctaaaggtcatgattattggatcgt

SEQ ID NO: 33361 - DNA, 325 bp, Glycine max
  Clone ID: LIB3138-014-Q1-N2-F7
gcaaaaagctgatgtgcctaccatagcacagattgaagagttccattcgatgcagaggatgatgaatgctcctgattcaaatgataatattgatttactgttgagcattgatttgttgggtttacaaggagcaggtaaagcttttccaaacaaaattgtttttgatgataagcttgtgttggctaacacacaagaattctttgatggaaattttccagtggattcttggttaccaatttttgtgaattgtctttatcctgtaagtcaattaccttcagaagctgtcgttgtaaatgttacatgtggtaatggaacgtggtggttt

SEQ ID NO: 33362 - DNA, 350 bp, Glycine max
  Clone ID: LIB3138-014-Q1-N2-F8
gtcacaacttcattatgtttcgtgtaataatctggaaatgcaagaagcttatcttgtcaatctcgtaaatgtgttacgagaattgtatttgcacagtccagaggaagctcgccaattgagaaggaaagctctctctcgtattgaatggctgcaaaaagctgatgtgcctaccatagcacagattgaagagctccattcgatgcataggatgatgaatgctcctgattcaaatgataatattgatttactgctgagcattgatttgtagggtctacaaggagcatgtaaagctttttcaaacaaaattgcttttgatgataagcttgtgttggctaacacacaataattct

SEQ ID NO: 33363 - DNA, 364 bp, Glycine max
  Clone ID: LIB3138-014-Q1-N2-F9
atgaacttgaatgtatctttatcgtctcctccagttgtggagatttcaaatcagaaagctggtgccaccatatttgcagacatggcaatcgatgttttggaagaagatgaagtaataccagtggcatgcatatcattggtaattcaaggtacaggtctggtcaaaatcaaaggaaacaacctcgtaggttctatcagattgaatgactttcaaatgtcattgaaatggagcaacattggcaatctgcggatgtacctcattcagccagttgtgtggacgcttattgaaactgtcttcttgccatatgcaaatgcacgtctgagtaaagggttacctttgcccatcattcatggtttcaccttac

SEQ ID NO: 33364 - DNA, 426 bp, Glycine max
  unsure at all n locations
  Clone ID: LIB3138-014-Q1-N2-G1
ccatgccccctcctaaacttggaaattcggttcgagatggtctaagcttttggagtttgcaaagactgttggctcaaatttatctgattatgatgccgaaggtgcttggccatatcttattgatgaatttgtggaatatctgaacgagaatggcatcatccaaaatggcctgatcaatgattctagtctaaaatggtgatgcattcagatctcaataaattgctctttaagagaatttgataagcctcttgtgatgagttgtgctattctgtgattgaactcctctttgttattaagtgggattcagtctaaattagattctagagcaaactcattcttgttgacaagtagttgcatcaattgtgagattgttgatatggcatatganattnncttggtattgtngaattagtaatgggagcctac

SEQ ID NO: 33365 - DNA, 346 bp, Glycine max
  unsure at all n locations
  Clone ID: LIB3138-014-Q1-N2-G10
cacaaaacagaacaacacaaactcaaatctcttctcttcttctctctctctatctctcagacacaagcacacaaatgaaaaaaagctaacaataataatatctctgcaaaccattaaggccatggcttttcttctccccaacctccaaccttcacttttagctcaatccaaatccaacaaagacaaagcaaaccttcaccaaactctctcacctcaaaaacccacttctcagtttcctatatcttccaccacatgctcctcttcttctctccaaactgcacaagctgcacaggtcagcacaccacangacaagcagcagcaacagccaaaggatgaattctacctc

SEQ ID NO: 33366 - DNA, 377 bp, Glycine max
  Clone ID: LIB3138-014-Q1-N2-G11
ctatctcacacttttctcctcctacgttgcaatccctctcatttcatggctcgcaagcctttcaaattcaatgaggatgttctcgagcaacttataaatgggactgcgaaattcgaggttgtttcttccccggttccttcagttgctgcttctcctaaccggaacacgagcttgtttgggattgggaatagtagcactgtcttattcgccagaattggctcattctttggtggacactctccagcaatgaaaaaacttgagcatttttcaattcagaaggttacaggggatggacggtgtctgtttcgtgcacttggtcaaggaatggcttacaaataagggaaccactctcaatcaacgcgaggagagagaaaatg

SEQ ID NO: 33367 - DNA, 390 bp, Glycine max
  Clone ID: LIB3138-014-Q1-N2-G4
ctccaaaaccccatgaagaaactaaaccgtgggcgactaagcttgtttactcggttgatttatagcaagatcaagttcgttgcttcatagaagaggtcattggtgaaccagtctatcttgtgggcaactcactaggaggattggttgcattgtattttgcggcaaacaaccctcatttagtgaaaggtgtcgcattgcttaatgcaacacctttttgggggtttctgccaaatcccataaaaagtccaagactagcgaaaatatttccatgggccggaacattccccctaccttcaagtataaagagacttacagagttattgtgggagaaaattagtgatcctaaaagtattgctgaggtacttagtcagggttatgcagatcattcaa

SEQ ID NO: 33368 - DNA, 346 bp, Glycine max
  Clone ID: LIB3138-014-Q1-N2-G5
acggctagcacactgatgaaacttaaccagacccactaaccctcttcacgtaccttgatctataacaagatcaacttcgttgcttcatacaagaaacattggtcaaccattctctcttgtgggctactcactaggaggattggttgcattgtattttgcggcaaacaaccctcatttagtgaaaggtgtggcattgcttaatgcaacacctttttggaggtttctgccaaatcccataaaaagtgcaagactagcgaaaatattttcatgggccggaacattccccctaccttcaagtataaagagacttacagagttattgtgggagaaaattagtgatcctaaa

SEQ ID NO: 33369 - DNA, 336 bp, Glycine max
  Clone ID: LIB3138-014-Q1-N2-G7
gcagatgactctgaatctgcaatcaacgagcagatcaatgtggaatacaacgtttcctatgtgtaccacgccttgtttgcgtacttcgacagagacaacatagctctcaaaggacttgcaaagttcttcaaggaatcaagtgaagaagaaagagagcatgccgagcagcttataaagtatcagaacattcgtggtggacgagtggtgctgcacccaatcacaagtcctccctcggaatttgagcattcggaaaaaggggatgccttgtatgccatggaactagctttgtctttggagaagttgaccaatgagaaacttcttcacgttcacagtgtg

SEQ ID NO: 33370 - DNA, 344 bp, Glycine max
  Clone ID: LIB3138-014-Q1-N2-G8
gtcttttgggcaccattcctcaggccatttcacagcaaactgtgtggcatcaaatggcaacagtgagaacaccattgaattttgattctagcacgcagagcttttgtcagttttctattgaccttctgcgtggaggaatcttagtggacaaaactggagattggatcacacttatacacaattctccaattagtaacttgttgagagttgctgctatgaagaaaggctagataatggtcaagattgcgatgtctgggaatgcagcagtcaaaacgagtgactgggcctgattggtacaagtgtttttaacaaacagcaacagttcagagcattttgatgcatgt

SEQ ID NO: 33371 - DNA, 348 bp, Glycine max
  unsure at all n locations
  Clone ID: LIB3138-014-Q1-N2-G9
ccacctcggagagggatatggagaacaagagtgatcaagaagaactgaagcatcttgggtttgtgaagattgcggcaattaaagcctttgtgtgtgtgtcgaatctctacgacttcgcaaagcaaaactcgggacctttgagatctgctgttggaaccgtggaagacactgtaaccaccgttctgggtcccgtctaccaccaattcaaggctgtccccaaccacctcctcctttttgccgacaacaaggtggatgaagctgctcacaaattcgatgagcatgcaccttcttttgttaagcangttgcaacccaagtcacttgtttggttcaggtagtgacacacaaag

SEQ ID NO: 33372 - DNA, 101 bp, Glycine max
  Clone ID: LIB3138-014-Q1-N2-H1
agcttgtcgtccatgcccccctcctaagcttggaatttgggttggggattgtttttcctctttttccttgcccttaattcgtaggtcctggcgcgagggag

SEQ ID NO: 33373 - DNA, 352 bp, Glycine max
  Clone ID: LIB3138-014-Q1-N2-H10
taaaatggtggccacagttggtattcctgagaatacaggtatatcattggcctgtgctatgaatagttcttttagggggcgcgccagttctgatatttacaccatctgctctcaagactgtgaattgtggaatcctgcttgcacaaaagcaatgactatgtcatttaatccaaacccgtgttctgatgcatggagtttggaatttctgaagcgtactggatttcattgcgatatcatttgtgtcactggatggactgtcaccccaatgcacgatgttcaggttacaatcgattggtttatttcctttcacgaatgtgttcccaggacctattgtgttctaaatccacaaaat

SEQ ID NO: 33374 - DNA, 284 bp, Glycine max
  Clone ID: LIB3138-014-Q1-N2-H11
gacgaatccgatatgggtcgtcaagaccagactacagctctctgcgaggaagaagcatatatctcccacattctactccgctacaccctctaaatccccccttcccggtccgattgccgcttctgccgctgccttgtcaaaagctggaccatcagcgacggccgtacctgcgcaagcgccaaccaaagccgctgcgaacgctataagcacgacattggatatagttcggaatgaggggttcaggggtctgtatagaagcatgtcggcgagttatctgggtgtct

SEQ ID NO: 33375 - DNA, 255 bp, Glycine max
  Clone ID: LIB3138-014-Q1-N2-H12
gaaaaacccaaaaagattgataccagattgagacaaagaatagatcctcaatacaatgaggttcaggctcagatggaaacaaatttgtttaaattgtctcttgatgatgttgaaactcctaaaggttccatgttggatcttaaaatttctcaatctaaaattgcactttccaaaaacacagttggaggaaccattctgcgttgtgatctattggcaaattttttgacagagggcaattttagagcaagtgtttat

SEQ ID NO: 33376 - DNA, 430 bp, Glycine max
  unsure at all n locations
  Clone ID: LIB3138-014-Q1-N2-H2
gtcttttctctggccagcaaaattgctccaagtgttatttttgttgacgaggttgatagtatgcttgggagacgtgaaaaccctagtgagcatgaggctatgcgaaaaatgaaaaatgagtttatggtaaattgggatggtctgcgtacaaaagataaagagcgtgtacttgttcttgctgctacaaacaggccttttgatcttgatgaggctgttattaggaggcttcctcgacgattaatggttaatttgccagatgctccaaacagagaaaaaattctcagtgtcattttggcgaaagaagatttggcacctgacattgattntgaagcaatagctaatatgacagatggatattctgggagtgacttaaagaatctgtgtgtcacagcagctcacttgccaatacgagagatctttgagaaggaaa

SEQ ID NO: 33377 - DNA, 322 bp, Glycine max
  Clone ID: LIB3138-014-Q1-N2-H3
gtttaatggtcaagattgtgatgtctgggaatgcagcagtcaaaaggagtgattgggcctcattggtacaagtgtttttaacaaacagcaacagtacagagcattttgatgcatgtaagtggacaaaatcagaaccacattcctgggaattgatcttcccaatagaggtatgtggtcctaataatggttttgaaatgtggagttctgagtgggcaaatcaaacttcatggcatttgagtttccttattgacaatcccaaacagtctacagtttttgatattctcttgggaatctctcaagattttgaaattgctggtaatac

SEQ ID NO: 33378 - DNA, 250 bp, Glycine max
  unsure at all n locations
  Clone ID: LIB3138-014-Q1-N2-H4
caagttaaagctcttaaggatggaattgctgttgaaaaaccaatctacaaccatgtcactggtctcctggatccccctgagctcattaaaccccccaaaatcttagtcattgaaggcttgcacccaatgtatgattctcgggtcagagatctcttggactntagcatctacctagacattagcaatgaggtcaaattcgcttggaaaattcagagagacatggcagagcgtggacacagtcttgaaagca

SEQ ID NO: 33379 - DNA, 229 bp, Glycine max
  Clone ID: LIB3138-014-Q1-N2-H5
gcacggactgcttcacgtactctatggcttgcaggaagacaatgcgggaaactacgcgaaagcgttccctctctacatgaacgccttggagtacttcaagatcaagggagccatcacgcagaaattcaccgagtacctgcgccgggccgaggagattcgggccgtgctcgacgatggcgtgcccggcccagcctacaacggggacacggcggtggctgcaaggcccaag

SEQ ID NO: 33380 - DNA, 328 bp, Glycine max
  Clone ID: LIB3138-014-Q1-N2-H8
cgcagctgaatcatattcactccaaaaaaaaaaaaaaagctcagagagagagaatggggaaaagacaaatcccagaccctccgaactttaagaaatacggcgttcctttctactccgttgcgtggattccccaacacgttgtcaaatcgcgccaaatcgaaaccgccgatgagtcctcggactccgatcacagcacttcgccggcgaccgaggcggagaaggaacccgcgacggtcgccggtaactacctgctgttcgccggcggcggcggagcaggccacagcggtatccccaatgctttggttattgcgcacttcgatgtcgcgtc

SEQ ID NO: 33381 - DNA, 154 bp, Glycine max
  Clone ID: LIB3138-014-Q1-N2-H9
ggtgaacatcgcgttccaggagacgacgtcgtatgaaacagccaacattaagattcttttcgcgagtaagaaccacggggatccggatccttttgatggtccaagtgggatattgggccatgcattcgctcccactgatgggaggtgccacttt

SEQ ID NO: 33382 - DNA, 238 bp, Glycine max
  Clone ID: LIB3138-015-Q1-N1-A1
gaaaatggtttttcttactagagttgatccttttccagtagctttactggctgttctttttggcgttaagaatgaaattctgagttctaacgccactaatcctatgctgacgcgacttcttgagaactgtaagagtctcaaatatctggttgatgagtgtccttttgcatttgtgaactagtatgtagtattttattcacttaaataaagcgcattactatgtgcaatgagtgtgttt

SEQ ID NO: 33383 - DNA, 308 bp, Glycine max
  Clone ID: LIB3138-015-Q1-N1-A10
gatagatagatcacatatgcacgtagacagcgcagaaatgatcatgaagcacgtgtgcaccccaaaattctctctcacagctgcaggtatactacagctaccatatcatttcatttcattaactaacatatataaatgacgaattatctccttttctctagttacttcactactctctcctaactacctgaagccacattttatactagatgagacaccacgatgacaaaaccatgcacagagcaaaccaagtttaaatgtaactgaataaggaactacaagtgatacatgatctgaaatatattatt

SEQ ID NO: 33384 - DNA, 334 bp, Glycine max
  Clone ID: LIB3138-015-Q1-N1-A11
cacaaagagaagcattagcactaggagcagcaacaactagtctcagctgaaatggcctcttcagtgatggcatctgtggccctcaaacctgcccctttcactgttgagaagtcctcagtgagaggccttccctctctctcaaggaactcttcttcattcagagttgtggccagtggcaagaagatcaagactgacaaaccttatggaattaatggtggcatggctttgagggatggaactgatgcatctggcaggaaaggaaaaggaaagggtgtttaccagtttgtagacaaatacggtgctaatgtcgatggttacagtcctatctacgaca

SEQ ID NO: 33385 - DNA, 269 bp, Glycine max
  Clone ID: LIB3138-015-Q1-N1-A2
gagaagagctatgacatgcactccaccctaacctaggattgcggttcgaggttttctagagagagaaagagagaaaaggttcagaagaatcagataggttagatttatatttatatacataaagaatagatacacttggagttggagttacacattattctctctctcactcacactcagagtggtagctagacaacaaccagagagagagagagagagattgaggatctcgaagaggaagaaaaccgaacggaagaagtgttggggtc

SEQ ID NO: 33386 - DNA, 173 bp, Glycine max
  Clone ID: LIB3138-015-Q1-N1-A3
tacgctcgcaatgcgtctcgcgcttgccatttttctctaaattcaataaatttctaaaaaaaaaacgaggcaaatgaggtgaaaataacaaaaaaaaaagccaagccctatttgggatgagtgacccagaattcacttctttaaatggcgctcaaaatttgattccaaacaac

SEQ ID NO: 33387 - DNA, 316 bp, Glycine max
  Clone ID: LIB3138-015-Q1-N1-A6
gccatggctacttcatcaaccacattattgctatcatcactcatacctgcaagcatcccatcattcaactctggaaaccattcagtttttttgcttcaaaaccgttctttgaatcgacccaagaagagagtttccttcgttgttcaagcagccaagccccctattggtgtggaaattccaaaggtgcagcctcaatttaagcctccgtttcttgggttcactaagactgcagaagtatggaactctagagcttgcatgattggaatcagtggagtttttattgtagagtttataataaacaaaggcatacttcaag

SEQ ID NO: 33388 - DNA, 276 bp, Glycine max
  unsure at all n locations
  Clone ID: LIB3138-015-Q1-N1-A7
aagttattctctccagccacttggggaggccgaagggtgtcactcccaaatacagcttggcacctcttgtgccccggctttctgagctcattggtatccaagttgtcaaggctgaagacagtattggtccagaagtagaaaagttggtggcttctcttccagatggaagtgttcttcttctagaaaatgtgaggttntacaaggaggaagaaaagaatgatcccgagcatgcaaaaaagcttgcctctctggcagatctgtttgtgaatgatgcat

SEQ ID NO: 33389 - DNA, 192 bp, Glycine max
  Clone ID: LIB3138-015-Q1-N1-A8
tgggaatgcagcatcaaaagggtgattggcctatggtcagtgtttaacaaaccacagcaagctttgtgcatgtagtggcaaaatagaccacttctggatgtttcaataagttgggtctataggttgaagtgggttggggcaataaactcatgattggttctatgcatccaagctcagtttgtttttggattt

SEQ ID NO: 33390 - DNA, 284 bp, Glycine max
  Clone ID: LIB3138-015-Q1-N1-A9
tgagtcttcttgatccttctttttctccttgaactcaaacatggcagatgaggtggttctgctagatttctggccaagtccatttgggatgagggtcaggattgcacttgctgaaaagggtatcaaatatgagtacaaagaagaggacttgaggaacaagagtcctcttctcctacaaatgaaccctgttcacaagaagattccggttctcatccacaatggcaaacccatttgtgaatccctcattgctgctcagtacattgaagaagttttgaatgacaaaa

SEQ ID NO: 33391 - DNA, 220 bp, Glycine max
  Clone ID: LIB3138-015-Q1-N1-B10
aaaaaaaaaaaaaaaaaaaaaaaaaaaaaaaaaaaaaaaaaaaaaaaaaaaaaaaaaaaaaaaaaaaaaaaaaaaaaaaaaaaaaaaaaaaaaaaaaaaaaaaaaaaaaaaaaaaaaaaaaaaaaaaaaaaaaaaaaaaaaaaaaaaaaaaaaaaaaaaaaaaaaaaaaaaaaaaaagataaaaaaaatggggtggggggcaggacttaagaaactcacc

SEQ ID NO: 33392 - DNA, 125 bp, Glycine max
  Clone ID: LIB3138-015-Q1-N1-B11
gacttcttgagaactgtaagagtctcaaatatctggttgatgagtgtccttttgcatttgtgaactagtatgtagtattttattcacttaaataaagcgcattactatgtgcaatgagtgtgttt

SEQ ID NO: 33393 - DNA, 95 bp, Glycine max
  Clone ID: LIB3138-015-Q1-N1-B12
gacttctttatatactgtagagtctcaaatatctggtgggtgagtgatctattgcatttgtgaactattttcgtgtattttatccaccttaaata

SEQ ID NO: 33394 - DNA, 421 bp, Glycine max
  Clone ID: LIB3138-015-Q1-N1-B2
attatgaagaaaagggacaaacttagttgtcaagttggaatcaacccatactccatggaatggactggtttggccaatagattactgagtaagggcaatgatattctgtgttgcgattatgctagttttgatggtttgattaccaagcaagttatgagcaagatggcagaaatgataaacagtctttgtggtggtgatgaaaaattgatgcgtgaaaggacgcacctgctgttggcttgttgttcaaggatggcaatttgtaagaaagatgtttggagagttgaatgtggaatcccttctggatttccgctcacagttatttgcaatagcatttttaatgagatgctcattagatatagctatgaaaaattactgcgccaggctaaaacttcaagtatgtttttacaatccttcaaaaatt

SEQ ID NO: 33395 - DNA, 300 bp, Glycine max
  Clone ID: LIB3138-015-Q1-N1-B4
gctatggtgcatgatagttcagtgtctacaataccaggtgattttgtcattggtgttaagttgacaaccataaacaatatgtgtgcatatgggctcaatcctggtatttcaggttctcgtcttttgggcaccattcctcagtctatttcacagcaaactgtttggaatcaaatggcaacagtgagaacaccattgaattttgattctagcaagcagagcttttgtcaattttctattgaccttctcggtggaggaattttagtggacaaaactggaagatggatcacacttatacaaaat

SEQ ID NO: 33396 - DNA, 111 bp, Glycine max
  Clone ID: LIB3138-015-Q1-N1-B5
atcaatccagggttcccctttttctgtgaaggtgggatagctggattctgttgcatggccaaaggaggactatagggtcatttccagcaattgatagcatgatgcaagggc

SEQ ID NO: 33397 - DNA, 310 bp, Glycine max
  Clone ID: LIB3138-015-Q1-N1-B7
gagccgattcggctcgagtgtcaagccttactttagtggttctaaattgaaaagctttctagctagtcataacatcaccattactgatggtattgacaaaactagtgcaactttgcaatttagaaagttagcagattgtgattttctcaagagaaactttaagcagatgtctaatgttttgtgggtggctcctgaggacaaggcgagtttatggtcacaacttcattatgtttcgtgtaataatctggaaatgcaagaagcttatcttgtcaatctcgtaaatgtgttacgagaattgtatttgcacagt

SEQ ID NO: 33398 - DNA, 261 bp, Glycine max
  Clone ID: LIB3138-015-Q1-N1-B8
aaaaaaattaaaaaaaaaaaaaaaaaaaaaaaaaaaaaggagagaaaaaaaaaaaaaaaaaaaaaaaaaaaaaaaaaaaaaaaaaaaaaaaagggcgggcaaaaaaatagtggaaagatagccccggaaaaaaataacaaggcagaaaaataaaggcgaacaaaaaataaacagggggggggcgccttagaggggggctcctcccgacaaggttaatattaccggcgcgacttgggtgtcccccgtcttttcttttggggg

SEQ ID NO: 33399 - DNA, 388 bp, Glycine max
  Clone ID: LIB3138-015-Q1-N1-B9
accaatatagcccaagccctatacaaccaaaccctaacacacacccatttgattcagtttccatggctagcctcaaggttgcatttttggctgcagtgctctgcatggttgtggtgagtgcacccatggcacatgcagctatcacgtgcgggcaggtgacgaatagcctgatcaattgcatcggttacctccagaacggaggaacgccgccgtcgggatgctgcaacggagtgaagagcctcaatgccgccgccaagaccaccgccgaccgccagacggcgtgcaactgcctcaagtcggccgccagccaaatctccggcttcaaagccaacaacgccgcctcgcttccccgcaaatgcggagtctccatcccctacaagatcagcac

SEQ ID NO: 33400 - DNA, 348 bp, Glycine max
  Clone ID: LIB3138-015-Q1-N1-C10
tcatgaccctgcccaacatcaaggttcctctcattcttggtatctggggaggcaagggacaaggaaaatctttccaatgtgagcttgtctttgccaagatgggaatcaaccccatcatgatgagtgctggagagttggaaagtggaaatgcaggagagccagcaaaactgatcaggcagagataccgtgaagccgcagacttgatcaagaagggaaagatgtgtgctctcttcatcaacgatcttgatgcaggagctggtcgtcttggtggaaccacccaatacactgtcaacaaccagatggtgaatgccaccctcatgaacattgctgataaccccaccaatgtgc

SEQ ID NO: 33401 - DNA, 352 bp, Glycine max
  Clone ID: LIB3138-015-Q1-N1-C11
tgaatatgccaaatgctgttctttcaatgtggagatattttgttggagatctcgtctttgaagtttctaagatgacttctccctacattaaatgtacagtctctttcttcatagcatttggaaatttggctgatgataccatcaattttgaggcttttccccacaagctggtgcagtttggagagattcaggaaaaagttgtattgaaattttcacaagaagaatttcttacagcttggtcaactcaggtgcgtcctgcaacaactctgttggctgatgggtgtccatatttgtatgcaatggtgcatgatagttcagtgtctacaataccaagtgattttgtcattggtgt

SEQ ID NO: 33402 - DNA, 160 bp, Glycine max
  Clone ID: LIB3138-015-Q1-N1-C12
attttgatgagggtaactagtggatgaatgctacgtccagaagtaaattcaattccttgcttttcctgtatgatattgtataacttatattattccctgtgattttaacatacaaattgaagacgctggtataattaataattctacttgtatttttttt

SEQ ID NO: 33403 - DNA, 227 bp, Glycine max
  Clone ID: LIB3138-015-Q1-N1-C2
gcacgctctagctgaatcggtggacgcttcctttcgacttctcttcttgagcccaaattctaggtgttatattgcccctcaaaccaactgatcctgctttatctaattgtggcttaagacccttaattaccacgaactgatagtcagtcttgtagagaacatctgaaactaaagaaaaatgctagatacttagggaggtcacaaaaggaatggaatttcaggaatat

SEQ ID NO: 33404 - DNA, 344 bp, Glycine max
  Clone ID: LIB3138-015-Q1-N1-C6
caaatggaagaacacctataacgtgttatcatgtggctttttattaggcaggctacctagtataccaaaagcaccactgtgcttgtactaaataaattcctgcttatatatactggccattatgttatatataaaaatcatatgcatgccgtttatataaataaagctatgttgaataatatatctattttgtaaaaaaaagaagataaaaacaaacaaaaaagaagttaataaacaaactgttgatggtaaaatagataatgataaaaaattttttggttgttgaggtgtaacaaatttttgaaaaaaaaaaaaaaaggggggccccaaattaggaagttttt

SEQ ID NO: 33405 - DNA, 312 bp, Glycine max
  Clone ID: LIB3138-015-Q1-N1-C7
tgcaattgaagttgaagtcttgcccttctctcttcaactccaaacacaagacatcatcatccatggctgcctccgtctccactgtcggagctgtcaacagagctcttttgaacctgaatgggtctggacctggggtttcagctcccagttcatccttctttgggagcagcttgaagaaggttattggctcaagggtccccaacacaaagatttcctctggaagcttcaagattgttgctgtagaagagaagaaagagattgaagagacccagcagaccgacaaggacagatggaaaggtcttgcctatgata

SEQ ID NO: 33406 - DNA, 422 bp, Glycine max
  unsure at all n locations
  Clone ID: LIB3138-015-Q1-N1-C8
tagaagagctanntgacgtcgcattgcctacgtcgtacgtannagctcgnngaattcggcttcnngaggtcacgaggctaattagggnngttgtggaaagggtgtaggagagggatgtannactgaagttaccaaaagggagatgttggttgtnntccaattttcttacctgattgtggggnagtgtattcgattgcaannatcaagcaagagcaactctttgttcaaagtttccatttgaggtgtctccctggatgcctagatatgccacttctagattcacagatttaaaaggagagatcatacatcatttcttgtctgtttctagttttagcgagtacactgtggtcgacattgcccatctaatcaagattgatccggcaataccacccaacagggcatgcctcatcagctgtggtata

SEQ ID NO: 33407 - DNA, 363 bp, Glycine max
  Clone ID: LIB3138-015-Q1-N1-C9
cagttttctattgaccttctcggtggaggaatcttagtggacaaaactggagattggatcacacttatacaaaattctccaattagtaacttgttgagagttgctgcttggaagaaaggctgtttaatggtcaagattgtgatgtctgggaatgcagcagtcaaaaggagtgattgggcctcattggtacaagtgtttttaacaaacagcaacagtacagagcattttgatgcatgtaagtggacaaaatcagaaccacattcctgggaattgatcttcccaatagaggtatgtggtcctaataatggttttgaaatgtggagttctgagtgggcaaatcaaacttcatggcatttgagtttc

SEQ ID NO: 33408 - DNA, 344 bp, Glycine max
  Clone ID: LIB3138-015-Q1-N1-D10
taagattaaagattcaacaatggcctctgcttctgctactcttctcaagtcatctcctgttcttgacaagtgcgagtgggtcaaaggccagacccttcgccaacctctcgtgagatgtaacccttcctcagcatcagctctcaccatcaaagctgcttcctatgctgacgagctcgtcaaaaccgccaaaacagtggcctcaccggggcgtggtattttggcgatggatgagtcaaatgcaacctgcgggaagcgtttggcatctattgggttagagaacacagaagctaatcggcaggcataccgtaccctacttgtgacagtacctggtcttggtgaataca

SEQ ID NO: 33409 - DNA, 439 bp, Glycine max
  Clone ID: LIB3138-015-Q1-N1-D11
cagatgaggggctttctgagtatactcctcagtatttttatgtcattaaagggagcaatggaaatcttaagacttccttttgtgctgatcaatcaaggtcttctcaggcaaatgatgtccgcaagcaaatcgttggcagcgctgttccagttcttaaaggcgaaaagttttccttgcggatactggtggaccattctattgttgaaagctttgctcaaggtggaaggacggttgtgacatctcgggtttatccaacaaaggcaatctatggagctgctaggttgttcttgttcaacaatgctaccgaggccactgtgacagcctcactaaaagtttggcaaatgaattctgcatttatacgcccattccaccctgatcagaagagttaaaaatttgaattggagatagaagagctatagtcacaaaggattggaataca

SEQ ID NO: 33410 - DNA, 357 bp, Glycine max
  Clone ID: LIB3138-015-Q1-N1-D12
gcaggacatgaacaccaacacctccccttttctcccaagatgtgttgaagcctacaattactactctgctgtgtttaacacacttgatgcaactctccctagggagagccaggacaggatgaatgtcgaaaggcaatgcctggcaaaggacatagtcaacattgttgcttgcgagggtgaggaaagaatagaacggtatgaagtcgccggaaaatggaaggcaaggttgccaatggctggcttcactccatccccaatgagcacaaatgttggagaagcaattaggaaacctatttataaagcaatactgtgaccaaattcaaagattaacgagggaaatgggggggtctttaattt

SEQ ID NO: 33411 - DNA, 384 bp, Glycine max
  unsure at all n locations
  Clone ID: LIB3138-015-Q1-N1-D2
cttctctctcttgctccgccaacgacctggccccactcttcaacgacaccgccgccgccaactacctctgcgcccaattcgattccatttctagaaagctcaacgtaacaacctacgccgtcgacaacacctaccttctgttttcagcgtatcttgtcttcgccatgcagctcggcttcgccatgctctgcgccggctccgtcagagccaaaaacaccatgaacatcatgctcaccaacgttctcgacgccgncgncggcggtctcttctactacctattcggctttgcattcgccttcggcggcccctccaacggcttcatcggccgccacttcttcggcctacgaaaattcccgaaggactcccctcccttcggcgactaca

SEQ ID NO: 33412 - DNA, 391 bp, Glycine max
  Clone ID: LIB3138-015-Q1-N1-D3
gtctttgaagtttctaagatgacttctccctacattaaatgtacagtctctttcttcatagcatttggaaatttggctgatgacaccatcaattttgaggcttttccccacaagctggtgcagtttggagagattcaggaaaaagttgtattgaaattttcacaagaggaatttcttacagcttggtcaactcaggtgcgtcctgcaacaactctgttggctgatgggtgtccatatttgtatgctatggtgcatagttcagtgtctacaataccaggtgattttgtcattggtgttaagttgacaaccataaacaatatgtgtgcatatgggctcaatcctggtatttcaggttctcgtcttttgggcaccattcctcagtctatttcac

SEQ ID NO: 33413 - DNA, 145 bp, Glycine max
  Clone ID: LIB3138-015-Q1-N1-D5
cctaatcgttggggtaatcatcttcttcttcctctttctaagatctcttctttttttacgccgcacgccgaaaccatggccggaaaaggagagggtcctgctatcggaatcgatctcggaaccacctactcttgcgtcggtgtgt

SEQ ID NO: 33414 - DNA, 246 bp, Glycine max
  Clone ID: LIB3138-015-Q1-N1-D6
ctagttttgcatatatttctaagtttccttgttcattgtctgtattgcttattttctaattctgcagctcacgaaacttgtcgtgtaggtctgtgtaccatattaaattactacatacacactttttactttcttggcctgatgttactgcagttaaaaactccgctaaaatagacttagacaagaaacattaagtaccgtttgagcatttgatcatttaagtaatttatgatgcttcattcagtc

SEQ ID NO: 33415 - DNA, 257 bp, Glycine max
  Clone ID: LIB3138-015-Q1-N1-D8
tgggtgtccatatttgtatgcaatggtgcatgatagttcagtgtctacaataccaggtgattttgtcattggtgtcaagttgacaaccataaacaatatgtgtgcatatgggctcaatcctggtatttcaggttctcgtcttttgggcaccattcctcagtccatttcacagcaaactgtttggaatcaaatggcaacagtgagaacaccattgaattttgattctagcaagcagagcttttgtcaagtttctattg

SEQ ID NO: 33416 - DNA, 346 bp, Glycine max
  Clone ID: LIB3138-015-Q1-N1-D9
ggctcctgaggacaaggcgagtttatggtcacaacttcattatgtttcgtgtaataatctggaaatgcaagaagcttatcttgtcaatctcgtaaatgtgttacgagaattgtatttgcacagtccagaggaagctcgccaattgagaaggaaagctctctctcgtattgaatggctgcaaaaagctgatgtgcctaccatagcacagattgaagagttccattcgatgcagaggatgatgaatgctcctgattcaaatgataatattgatttactgttgagcattgatttgttgggtttacaaggagcaggtaaagctttttcaaacaaaattgtttttgatgat

SEQ ID NO: 33417 - DNA, 331 bp, Glycine max
  Clone ID: LIB3138-015-Q1-N1-E1
gcaaattgtgattttctcaagagaaactttaagcagatgtctaatgttttgtgggtggctcctgaggacaaggcgagtttatggtcacaacttcattatgtttcgtgtaataatctggaaatgcaagaagcttatcttgtcaatctcgtaaatgtgttacgagaattgtatttgcacagtccagaggaagctcgccaattgagaaggaaagctctctctcgtattgaatggctgcaaaaagctgatgtgcctaccatagcacagattgaagagttccattcgatgcaaaggatgatgaatgctcctgattcaaatgataatattgatttac

SEQ ID NO: 33418 - DNA, 365 bp, Glycine max
  Clone ID: LIB3138-015-Q1-N1-E10
gatgaatgctcttgattcaaatgataatattgatttactgttgagcattgatttgttgggtttacaaggagcaggtaaagcttttccaaacaaaattgtttttgatgataagcttgtgttggctaacacacaagaattctttgatggaaattttccagtggattcttggttaccaatttttgtgaattgtctttatcctgtaagtcaattaccttcagaagctgtcgttgtaaatgttacatgtggtagtggacgtgtggtttacccaccactgcttggattagttctgcagttaacaatcgctcctcagatatcaacaaaaggattcgcacagcacttgggaaaggaaagaaattgttttctac

SEQ ID NO: 33419 - DNA, 355 bp, Glycine max
  Clone ID: LIB3138-015-Q1-N1-E11
agaacaccattgaattttgattctagcaagcagagcttttgtcagttttctattgaccttctcggtggaggaatcttagtggacaaaactggagattggatcacacttatacaaaattctccaattagtaacttgttgagagttgctgcttggaagaaaggctgtttaatggtcaagattgtgatgtctgggaatgcagcagtcaaaaggagtgattgggcctcattggtacaagtgtttttaacaaacagcaacagtacagagcattttgatgcatgtaagtggacaaaatcagaaccacattcctgggaattgatcttcccaatagaagtatgtggtcctaataaatggtttg

SEQ ID NO: 33420 - DNA, 425 bp, Glycine max
  unsure at all n locations
  Clone ID: LIB3138-015-Q1-N1-E12
cttcagaagattttcctgaaaaggaagatcaagaaaaacccaaaaagattgatgccagattgagacaaagaatagatcctcaatacaatgaggttcaggctcagatggaaacaaatttgtttaaattgtctcttgatgatgttgaaactcctaaaggttccatgttggatctgaaaatttctcaatctaaaattgcacttcccaagaacacagttggaggaaccattctgcgtagtgatctattggcaaattttttgacagagggcaattttagagcaagtgttgatttgcagcgcactcatcgtattagaagaatgattaaaatggtggccacagttggtattcctgagaatacaggtatatcattnggcctgtgctatgaatagttctttttagggggcgcgccagttcttatatttacacca

SEQ ID NO: 33421 - DNA, 419 bp, Glycine max
  Clone ID: LIB3138-015-Q1-N1-E4
actaaatacaccaattccatcaagtaccttacattaccgtcaaaatggtcaaagctgtcgccgtcctccgtggagactccaacgttaagggaaccgtcacctttgagcaggagaacgagtcttctcctaccaaaattacatgggacatcacgggccacgacgccaacgctgagcgtggcatgcacgtccacgctttcggcgacaacaccaacggatgcaccagcgccggacctcacttcaatccccacaacaagacccatggtgctcccgaagacgacgagcgccatgttggtgacttgggtaactttaagactgacggccagggcaatgccaaaggcagcgtcaatgataagttgatcaagttgattggttctgagagcgttattggccgcaccatcgtcgtccacgccggcaccgac

SEQ ID NO: 33422 - DNA, 341 bp, Glycine max
  unsure at all n locations
  Clone ID: LIB3138-015-Q1-N1-E5
gtataattagcaccacttccattctcacactacttactctctttctctctctgacggtttccgctgttctctttcaagttccaagaaatgtcaattataacacgcagaggcatccgttacatgccaagactagatgcagcaaaagtatctgctgctttgctagaaaaaggccaaaatcgtgtcatagatgcttcacttacacttattcgagaaagagcaaagcttaagggagaacttgtgcgtgctttgggaggtgctaaagcaacttcaactcttcttggagttcctttgggacataattcatcgttccttcaaagggcctgcatttgcacctnctcgca

SEQ ID NO: 33423 - DNA, 188 bp, Glycine max
  Clone ID: LIB3138-015-Q1-N1-E6
cgacactccctacggtacccccacgttcgagccaagacaattctcttgcctgaaagcttgatcactccaacactactccctttcgcgacgcgcgcagagtgtatccaagcctggcgctggaccttggctgcgaccgcctagagccgagccgacctactctgtctgcaacatgaagttcacctctgtca

SEQ ID NO: 33424 - DNA, 423 bp, Glycine max
  Clone ID: LIB3138-015-Q1-N1-E7
cgcggttctgttgtgtgcatatgcgagcgtctctatgcaacttcacagcccagaaaggtccatcacctcccacaaccttggacttggagcatcataaaacaacaccatgtttgctttcttccatcgaagaaggacgtgcggttaataggagacaacttattcttcacacgccagtagcagtagctgcatttgcagtcccaaatgcattggcactcaatgatgtgtctgaggatgttcgtgtctacactgacgatgagaacaagttcaagattgagattccccaagagtggcaagtgggaacaggagacggagaatctagtgggttaaaatccataactgctttctacccaacagtggcatccatttcaatgtgagcgttgtgatcacagggctgggaccggatttaattaggatggaatcctt

SEQ ID NO: 33425 - DNA, 313 bp, Glycine max
  Clone ID: LIB3138-015-Q1-N1-E8
tatgtttttacaatccttcaaaaattttgtttctttgtgtgtgtatggtgatgataacttaattagtgttcatgaatatgtcaagccttactttagtggttctaaattgaaaagctttctagctagtcataacatcaccattactgatggtattgacaaaactagtgcaactttgcaatttagaaagttagcagattgtgattttctcaagagaaactttaagcagatgtctaatgttttgtgggtggctcctgaagacaaggcgagtttatggtcacaacttcattatgtttcgtgtaataatctggaaatg

SEQ ID NO: 33426 - DNA, 349 bp, Glycine max
  Clone ID: LIB3138-015-Q1-N1-E9
ctcgagccgaatcggctcgagatcaaatggcaacagtgagaacaccattgaattttgattctagcaagcagagcttttgtcagttttctattgaccttctcggtggaggaatcttagtggacaaaactggagattggatcacacttatacaaaattctccaattagtaacttattgagagttgctgcttggaagaaaggctgtttaatggtcaagattgtgatgtctgggaatgcagcagtcaaaaggagtgattgggcctcattggtacaagtgtttttaacaaacagcaacagtacagagcattttgatgcatgtaagtggacaaaatcagaaccacattcctggga

SEQ ID NO: 33427 - DNA, 393 bp, Glycine max
  Clone ID: LIB3138-015-Q1-N1-F1
ctatttgccaatagaaatgttgacctacttccacagcagatagggagtttccaagtacatgcccaagtacttattacttcttgggttgtaattgctctcttattggtttcagccattctaattattcgaaatctgcaaaccattcccgctttcggtcagaatttctttgaatatgttcttgaattcattcgagacgtgagcaaaactcaaattggagaagaatatggtccgtgggttccttttattggaactttgtttctatttatttttgtttctaattggtcgggggctcttttaccttggaaaatcatacaattacctcacggggagttagctgcacccacaaatgatataaatactaccgctgcttttagctttacttacatcaattgc

SEQ ID NO: 33428 - DNA, 387 bp, Glycine max
  unsure at all n locations
  Clone ID: LIB3138-015-Q1-N1-F10
gtgacatcttctgaagcttggggtcttccacataagatgcttgtcaagttggttgattcctttgccaattggttgaaatgtggtcaggaaactcttcaacaaataggaagtcttcctgctccgcctttggcattgatgcaagtcaaccttgatgagaaagaaaggtttagggatctgagggctcagaagagtcttaacaccataagccctagctcagaggaagtgaggacttattttcggaaggaggaggttctcangtactcaattcctgacagagccttttcatatactgcagctgacggtaaaaaatctattgtggcacctttgagaagatgtggtggtaagccaacatcaaaagcccgagaccattttatgttgaaacgtgat

SEQ ID NO: 33429 - DNA, 436 bp, Glycine max
  Clone ID: LIB3138-015-Q1-N1-F11
ctcgagccgcttggaagaaaggctgtttaatggtcaagattgtgatgtctgggaatgcagcagtcaaaaggagtgattgggcctcattggtacaagtgtttttaacaaacagcaacagtacagagcattttgatgcatgtaagtggacaaaatcagaaccacattcctgggaattgatcttcccaatagaggtatgtggtcctaataatggttttgaaatgtggagttctgagtgggcaaatcaaacttcatggcatttgagtttccttattgacaatcccaaacagtctacagtttttgatattctcttgggaatctctcaagattttgaaattgctggtaatactcttatgccagctttttctgttccacaggctactgccagatcttcttgaaatgcggaatcctctgcatgatctggaaatttgtgtttctt

SEQ ID NO: 33430 - DNA, 375 bp, Glycine max
  Clone ID: LIB3138-015-Q1-N1-F12
cattccctaaccctaaccctaaaaccgaatcttctcatgaaacctcccacgccacactcctccgtatcagaatcaggttcgattccctaaccctccacaaatcgctttcttctctttgcagtttctccatggagggctctgcagaggatttcggagcccccgagtcatgggaggtcgctgatttggacgagtccatgaaccgcttgaacctcatgctctcttccaacaacgattctaagcaacctcaccaacgtgtcgccgatgatgacgatgctatgccgcctcctattccgcctccttcgtccagtggcgacgaggtttccgatgacgtcatcaatcaggttgatcagttcccttccgaagctattcaaaacc

SEQ ID NO: 33431 - DNA, 103 bp, Glycine max
  Clone ID: LIB3138-015-Q1-N1-F3
ctattctccgagacaattgacactgctctctcgtcttcattcaactacacccaattacccctttctcctttccttacaaaaacaacaacaacaacaacaattg

SEQ ID NO: 33432 - DNA, 380 bp, Glycine max
  unsure at all n locations
  Clone ID: LIB3138-015-Q1-N1-F4
tgggtttcaattttgttcagtttgtgatgttttgctctgtggagtggaacaccaaaatcatggagggtttgaatgtgtatgagaaagtggtggcgtcgttgtttcaagtcacaaacgcgagacactctggtgaatctgtctttgatctctcctncatatcttcagccatattggtactcttcgttgtcatgatgtacctnccaccatacacaacattttaccagtaagagagcacgaaaatgatgtgaagagaaacgaaaaaagcgtagtggagtgtcttgtattctctcaactctcttactnggtcattttcattattttgatttgcatcactgagagcaacagcttaaaagaggatcccctcaactttaaatgtgtga

SEQ ID NO: 33433 - DNA, 440 bp, Glycine max
  Clone ID: LIB3138-015-Q1-N1-F6
gtggaatcctgcttgcacaaaagcaatgactatgtcatttaatccaaacccgtgttctgatgcatggagtttggaatttctgaagcgtactggatttcattgcgatatcatttgtgtcactggatggactgccaccccaatgcaggatgttcaggttacaattgattggtttatttcctctcaggaatgtgttcccaggacctattgtgttttaaatccacaaaatccttttgtgttaaataggtggatgggaaaattgactttcccccagggcacttcccgaagtgttaagagaatgcctctttctatagggggaggagctggtgcaaagaatgctattctcatgaatatgccaaatgctgttctttcaatgtggagatattttgttggagatctcgtctttgaagtttctaagatgacttcttcctacattaaatgta

SEQ ID NO: 33434 - DNA, 292 bp, Glycine max
  Clone ID: LIB3138-015-Q1-N1-F8
gcattttgatgcatgtaagtggacaaaatcagaaccacattcctgggaattgatcttcccaatagaggtatgtggtcctaataatggttttgaaatgtggagttctgagtgggcaaatcaaacttcatggcatttgagtttccttattgacaatcccaaacagtctacagtttttgatattctcttgggaatctctcaagattttgaaattgctggtaatactcttatgccagctttttctgttccacaggctactgccagatcttctgaaaatgccgaatcctctgcatga

SEQ ID NO: 33435 - DNA, 344 bp, Glycine max
  Clone ID: LIB3138-015-Q1-N1-F9
gggcgagttggtgaagcaaagtcaactcactggaaactcggttgaactcggtgtgtgtagaaatggcgaaacttgaagccaagctagggatgatcttggactcggtgggtcagttcttctccggcaaggaccatcttgcttattgtgactctgacgtcgtagctggatgtgaaagagaggtcttggaggcagaaaaacaatcatctcaagagtatatgcaagactgtctcctgcgtttatcatgggctattgttcactccaaacacccacaagatgtgcaccgtgggatagccatgctcgaatcatctttgcctgctacagaggacccactgcagcaaagggag

SEQ ID NO: 33436 - DNA, 274 bp, Glycine max
  Clone ID: LIB3138-015-Q1-N1-G10
atggcatttgagtctccttattgacaatcccaaacagcctacagtttttgatattctcttgggaatctctcaagatttcgaaagtgctggtaatactctcatgccagctgattctgttccacaggctactgccagatcttctgataatgcggaatcctctgcatgatctggaatgtgcgtactctttcgctagttcgattgtttaattcaatgaatgaaattaggcatgaccctcttgttgagtatgctctgactatttgaaaatctccacacc

SEQ ID NO: 33437 - DNA, 434 bp, Glycine max
  Clone ID: LIB3138-015-Q1-N1-G11
tggaagcaagcttatccaagacatccatcctaataaaggaaacaggagctgaagcttaatcctgagagtttgtcgcaatcttcatgtgatatttttatgcctctgctgaacaatagagcatttgcctgtagccactcgctctccttgctttcatggaaggtttttgaatgaaggctgtggagataatgaaattactatttgctgcatcgcatttggtatgaatagtggctgtttggtataatccactttccttttttgttagatctcttattggaccttagacagacatttttgttgtttgaaataagtagtcttgtgcagactgtacctgatttgtacatgagtttccttatgtcgaaaaagtgtctttaggttgtggtcgcgcctgggattttctttgaaccaataaagcattaaatggtatttggtattgt

SEQ ID NO: 33438 - DNA, 292 bp, Glycine max
  Clone ID: LIB3138-015-Q1-N1-G12
gcaccacaccactctccaatatccccaacatggctcacgtgggttctctatcttccgaaatggagacactgaatcatgtcctagccctagtggaggcattccgagcatttgacgcggacaacgatggccgaatcacgcaggcagagctaggaagaatcttggggtcactcgggtacaaccctatcgagcaagaagttatggcaatgattgaacacggcgacaagaacaaagacgggttgttgagcatccacgagttcttggagatgaacaccaaggattttgagggtggaaa

SEQ ID NO: 33439 - DNA, 315 bp, Glycine max
  Clone ID: LIB3138-015-Q1-N1-G3
attttgtaccgttctttattggcattgaaatcaatgttccttctgaggtgttgaagaaaggaggagggaaaaatgtcccaccagcaacaacaacaacaacaacatcatgaaggtccttttataggactagcactataaattttactattagcttaagctagattgacgtcaataaagattttgtgcaatgtgaaaatctatatctacctcactagcttcattttcattgcgcctttcattgtttcctctaactatattccgtgtttgagaaagtataatgtcactcaatcaaataatgcaataattaatgcccga

SEQ ID NO: 33440 - DNA, 368 bp, Glycine max
  Clone ID: LIB3138-015-Q1-N1-G4
ctctggcagttaaggaagcagcctggggtctggctcgctatgctgcaattgctcaggacaatgggttggtcccaattgtggagccagagatcttgcttgatggggagcatggtattgatagaacttttgaagtagcccaaaaggtctgggcagaggttttcttctaccttgctgagaacaatgtcctttttgagggtattctccttaagcctagcatggttacacctggagccgagtccaaggacaaggccagtcctcagacagttgctgattacaccctcaagctccttcacaggagaattccccctgctgtccctggaattatgtttttgtctggtggacagtctgaggttgaaagctaccctaat

SEQ ID NO: 33441 - DNA, 485 bp, Glycine max
  Clone ID: LIB3138-015-Q1-N1-G5
ccttccgtagcctcggattccggttcgaggctgtccttccaaggtggagatttttggtgggagatctcgtctttgaagtttctaagatgacttctccctacattaaatgtacagtctctttcttcatagcatttggaaatttggctgatgataccatcaattttgaggcttttccccacaagctggtgcagtttggagagattcaggaaaaagttgtattgaaattttcacaagaggaatttcttacagcttggtcaactcaggtgcgtcctgcaacaactctgttggctgatgggtgtccatatttgtatgcaatggtgcatgatagttcagtgtctacaataccaggtgattttgtcattggtgtcaagttgacaaccataaacaatatgtgtgcatatgggctcaatcctggtatttcaggttctcgtcttttgggcaccattcctcagtccatttcacagcaaactgtttggaatcaaatg

SEQ ID NO: 33442 - DNA, 372 bp, Glycine max
  Clone ID: LIB3138-015-Q1-N1-G6
aggttctgtgcttcctacacaacctgttcccccagcatattattatcaaagatccagcactggaaaccaagaaaggccatcaacagaagctgacaagagtgtgcctttgcaggcaaaacatgcacaacaatgtggagttaatgccaagatggcaccagatatagctattaatattgatacaaatcccttttttatgaccagggcaggagttaacaagttagagcaaggtgatcaaatagccatagagacaaacatgctgcagccaaaggcacatcaatatggtggaatcagtgctgcagctggggccactgctcatagaaaagttggtcctgttcagtatggtatgacaagaatgttttaaaagggtgtttt

SEQ ID NO: 33443 - DNA, 342 bp, Glycine max
  Clone ID: LIB3138-015-Q1-N1-G7
gaccactcttagagtgtgatgtttcctgctctgtctatcaagatggcataagggttggctggctcgaaaggttgttggaatacgaaaatttgatttcagatcacgtggtgattttgtatcatgacatcagtgaatttgacaaaataagtgaagtgcatgatcatttcttcagcaacataacatttatatttgaaaacaatgaagaccgcataacagagtttggtgtcttcccggtatatgcctcagaatcagggttgaagttggttggtagcaaggaaatttttgaatgagaattcattactcaaatatctgaaatgagtcacagaaagaattgttgttttt

SEQ ID NO: 33444 - DNA, 350 bp, Glycine max
  Clone ID: LIB3138-015-Q1-N1-G8
gaccactcttttagtgtgatgtttcctgctctgtctatcaggatggcataagggttggctggctctaaaggttgttggaatacgaaaatttgatttcagatcacgtggtgattttgtatcatgacatcattgaatttgacatattaagtgaagtgcatgatcatttcttcagcatcataacatttatatttgaaaacaatgaataccgtataacagagttaggtgtctttcctgtttatgcctcataatcatgtttgatattggtatgtatgtaattatatttttgaatgtttatttatttcttatctcttttaatatagtcacagaaagtattgttttttttcttttaa

SEQ ID NO: 33445 - DNA, 297 bp, Glycine max
  Clone ID: LIB3138-015-Q1-N1-G9
atattatccaatatatttggactctctctcttcttcacatgctcattggctttcagcatatctatggcagaggcaaaactaaggtatgctgttgttactggagcaaacaaagggataggatttgagactgtaaaagagctggcctcaaatggagtcaaggtggtgctcacagcaagagatgagaaaaaaggccatgaagcctttgagagattgaaagagtgtggtttctctgatttggttatttttcaccagcttgatgtcactgaatctgctagtatttcttcactagtagagttt

SEQ ID NO: 33446 - DNA, 423 bp, Glycine max
  unsure at all n locations
  Clone ID: LIB3138-015-Q1-N1-H1
gttaaaagccttagccttccctacaactccaaacacaaagacatcatcatccatggctgcctccgtctccactgtcggagctgtcaacagagctcttttgaacctgaatggttctggagctggagcttcagctcccagttcagccttctttgggaccagcttgaagaaagttattgcctcaaaggtccccaacagcaaagattccggtggaagcttcaagattgttgctgtagaagagaagaaagagattgaagagacccagcagaccgacaaggacagatggaagggtcttgcctatgatatctcagacgaccaacaagacatcacangaggaaagggtttggttgactccctttccaagctccacaggatgctggaactcactatgcagtcatgagctnctacgagtacctnagcactgga

SEQ ID NO: 33447 - DNA, 148 bp, Glycine max
  Clone ID: LIB3138-015-Q1-N1-H11
tacaactacaaaggttgctgtaggagataagatattgaagtagtgctaagtgcctaacacctgcagtgaacaatggcctctgcatcagcatctcttctcaagtcttcacttgttcttgacaaggctgagtgggtgaagggacaaacac

SEQ ID NO: 33448 - DNA, 232 bp, Glycine max
  Clone ID: LIB3138-015-Q1-N1-H12
cgagcgcctcttcacctaccgcggccacaacggcgccgtttggtgctgcgacgtctcaagagattcgggtcggctcataacgggaagtgcggatcagaccgtcaagctatggaacgtgcaaaccggtcagcagttgttcaccttcaatttcgattccccggcgaggtccggggattttgcgggcggcgataagcttgccgttataaccactgatccctttattgaattgccc

SEQ ID NO: 33449 - DNA, 179 bp, Glycine max
  Clone ID: LIB3138-015-Q1-N1-H2
gggcaatgccggcccgcgctgaagtttgctaggttcatgagcaggttcgggaagagttaccgaagcgaggaagagatgagggagaggtacgagatattctcgcaaaacctcaggttcatacgctaccacaacaagaaccgcttgccctacactctatctgttaatcattttgcttattg

SEQ ID NO: 33450 - DNA, 126 bp, Glycine max
  Clone ID: LIB3138-015-Q1-N1-H3
aaaaaaaaatttaatttactgaaaaaaaaaaaaaaaaataagcaagataaaaaaaaaaataccaaaacataaataaaaaaaatggggcggtccccggctggtgggcctctactgccgtggattaat

SEQ ID NO: 33451 - DNA, 307 bp, Glycine max
  Clone ID: LIB3138-015-Q1-N1-H4
ctgaaaaatgaaataaaggattctttttttggagcacaaggaatatttcattataaattaaaacataataaccctctcaattctgtaataaatcaatggacaaattggttaaaggatcattattatcaatatgacttatctaaaagtagatggtccagattagtaccacaaaatggagaaatagaataactgaatatcgtatagctcaaaataaagatttaaccaaatgcaattcatatgaaaaaagccaattaattctttacaaagaacaacaagtaaacgcattaaaaaaaaaaattagaaaaca

SEQ ID NO: 33452 - DNA, 274 bp, Glycine max
  Clone ID: LIB3138-015-Q1-N1-H5
atgaatttcttcaactgggttcatactttcatcgtttttcatgtctttgctgcaacaccccacttcttcttattagcagattcctccgaacaactccccaccaactttctagatgctgccaagaagcctgaggtatttgattggatggtcagaatcagaaggaagattcatgagaatcctgaattgggttatgaagaatttgagaccagtaaactcattagagaggaattggattaactgcgtatcccatataaacaccctgttgcaatcactg

SEQ ID NO: 33453 - DNA, 352 bp, Glycine max
  Clone ID: LIB3138-015-Q1-N1-H7
gtttggagagattcaggaaaaagttgtattgaaattttcacaagaggaatttcttacagcttggtcaactcaggtgcgtcctgcaacaactctgttggctgatgggtgtccatatttgtatgcaatggtgcatgatagttcagtgtctacaataccaggtgattttgtcattggtgtcaagttgacaaccataaacaatatgtgtgcatatgggctcaatcctggtatttcaggttctcgtcttttgggcaccattcctcagtccatttcacagcaaactgtttggaatcaaatggcaacagtgagaacaccattgaattttgattctagcaagcagagcttttgtcagttt

SEQ ID NO: 33454 - DNA, 338 bp, Glycine max
  unsure at all n locations
  Clone ID: LIB3138-015-Q1-N1-H8
gcattttgatgcatgtaagtggacaaaatcagaaccacattcctgggaattgatcttcccaatagaggtatgtggtcctaataatggttttgaaatgtggagttctgagtgggcaaatcaaacttcatggcatttgagtttccttattgacaatcccaaacagtctacagtttttgatattctcttgggaatctctcaagattttgaaattgctggtaatactcttatgccagctttttctgttccacaggctactgccagatcttctgaaaatgcggaatcctctgcatgatctggaatnntgtgttttctttcgctttgttccgttggttaaattc

SEQ ID NO: 33455 - DNA, 317 bp, Glycine max
  Clone ID: LIB3138-015-Q1-N1-H9
ctagttttgatggtttgattaccaagcaagttatgagcaagatggcagaaatgataaacagtctttgtggtggtgatgaaaaattgatgcgtgaaaggacgcacctgctgttggcttgttgttcaaggatggcaatttgttagaaagatgtttggagagttgaatgtggaatcccttctggatttccgctcacagttatttgcaatagcatttttaatgagatgctcattagatatagctatgaaaaattactgcgccaggctaaagctcaaagtatgttttgacaatccttcaaaatattggttctttgtgtgtgt

SEQ ID NO: 33456 - DNA, 412 bp, Glycine max
  Clone ID: LIB3138-015-Q1-N2-A10
gaaccataaccatgtcagacgaggagcaccacttcgagtcaaaggctgatgctggagcatcaaagacatttccccagcaagctggaaccatccgcaaaaacggttacattgtcatcaagaacaggccatgcaaggttgtggaggtttcaacttccaaaactggcaagcatggacacgcaaagtgtcactttgttgcaattgacatcttcactgggaaaaagctagaggatattgtcccatcttcccataactgtgatgttccccatgttaatcgcattgactaccagctcattgacatctcagaggatggatttgtgagtctgctgactgagaactgggtactaaggatgaccttaggcttccaaccgatgaaaatctgctttcgcaggttaatcaaggatggatttgctga

SEQ ID NO: 33457 - DNA, 393 bp, Glycine max
  Clone ID: LIB3138-015-Q1-N2-A11
cgcaagttttaggcttgctgtggaagcacacaacatccgagcctttaaaaccattcctgaagagtgcgttgaaccaacaaaggactacattaatggcgaacaatttagatcagactctaaaacagttaaccaacaagctttcttttatgctagtgaacgcgaagtccatcacaacgacatatttatattcggcatagataacaccgtactctctaatatcccatactatgaaaaacatggatatggggtggaggaatttaatgaaaccttatatgatgaatgggttaacaagggcgacgcaccggcattgccagagactcttaaaaattacaacaaagctgtgtctcttggcttcaagattgtattcttgtcaggaagatatcttgacaaaat

SEQ ID NO: 33458 - DNA, 358 bp, Glycine max
  Clone ID: LIB3138-015-Q1-N2-A12
atcggattataggaagagagagagagaggatggtgaaaacactggaaaaggtggcggaggacgtgcctgtgcaaaagtgttacggtggacaaaatgaatataagaagggaatgatccctcctaacacgatgtttgtgaatccaaaaggcatacggattcagcataccatttacagggacactgctgctgcttttatctgcccttactgatgtgacaccgatcttactaccatcagatcaaagcccaatgtaacagcattagatagatgcttagtgcctatgatgctagtagtctgctttgtatgaactacaatggattgcctttggcataaatatcactactgtgctaaatgtcaaga

SEQ ID NO: 33459 - DNA, 363 bp, Glycine max
  Clone ID: LIB3138-015-Q1-N2-A3
ctcgagccgctcgagccgtgctctcgttgtttctggagcaagtgcagaaggtgttccaaaaaggctaaccttcgacgaaatccagagcaagacatacttggaagtgaagggaactggaactgcttaccagtgcccaaccattgaaggtggagtggactcattcgccttcaagccagggaaatacaacgcccagaagttgtgcctggaaccaactttcttcacagtgaaagcagaaggcgtggccaaaaacgccccacccgaattccaaaacaccaagctcatgactcgtgtcacctacaccctggacgagattgagggtcccttcgagggtacatccgatggaaccgtgaaattcgaggagaa

SEQ ID NO: 33460 - DNA, 265 bp, Glycine max
  Clone ID: LIB3138-015-Q1-N2-A6
ctcgagccgattcggctcgagattaaatctcgctctagattggaaaaagtttcctctacaaaagcacaatttgttagtggaaaaaccttcaaatatgatataattggtgctggttcacattcttcaaaaaattttcctggaaaggaagatcaagaaaaacccaaaaagattggtgcccgattgggacaaaaaattgatccccaatacaatgaagttcaggctcaaattggaaccaatttggttaaattggctcttgatgatgttg

SEQ ID NO: 33461 - DNA, 417 bp, Glycine max
  Clone ID: LIB3138-015-Q1-N2-A7
ctcacccccacactcccatctcacacacccctcgcatccaacaatgtctctcaccattccctccaacctctccaagcccgccgccctccgccccaaactaagcccaaagctaaggtccgccgccacaaccaccatcgtctgcagcaccaccaacaacaacaacaacaacaacgtgtcctccgacctgaaggcgttctccgccgcgctggccctctcctccatcctcctctccgcccctctccccgccggcgccgacatctcggggctcaccccatgcaaggagtcgaagcagttcgcgaagcgtgagaagcagtcgataaagaagctggagtcgtcgctgaagctctacgaggcgggcagcgcccccgcactggccattaaggcgagcgtggagaagacgaagaggaggttcgacaa

SEQ ID NO: 33462 - DNA, 305 bp, Glycine max
  Clone ID: LIB3138-015-Q1-N2-A8
gaaaatgtgaggttttacaaggaggaagaaaagaatgatcccgagcatgcaaaaaagcttgcctctctggcagatctgtttgtgaatgatgcatttggtactgctcacagggcacatgcatcaacagagggtgttactaaatacctgaagccatctgttgctggttttcttttgcaaaaggaacttgattaccttgttggggcggtatcaagccccaaaaggccatttgctgccattgttggtggttccaaggtctcatctaaaattggagtgattgagtcacttttggaaaaagttgacattct

SEQ ID NO: 33463 - DNA, 394 bp, Glycine max
  Clone ID: LIB3138-015-Q1-N2-A9
ctcaaacgaatacgttttctctttctcttcaatttcacccttattagcatagcatattcatttccctttcttgaatcgttcttaactgcgagaggggatatcagagaagttgattggcctcccattaataacagatctgaatgatctgatggagtctaaaggtgggaagaagaagtcgtctagtagtaagtcctttttgtacgaagctcctctcgattacatcattgaagacgttcgaccacacgggggaatcaagaagttcagatctgctgcttactccaactgcatccgcaagccatcctgagattccctaggtcgtgtgaagacgtaacccccttagtcctgcatctgctatatttttctagtctcttctcttctcccttttcttgttttc

SEQ ID NO: 33464 - DNA, 401 bp, Glycine max
  Clone ID: LIB3138-015-Q1-N2-B10
gaaagagaagccacttccaatttcacacacacacagcaacacactgcactgtgtggaaagtaagcatggcaagagtggtggcactccaacagaaccaactatctttctctcccttagcttcctctctttttgacttcagtggaaccagacttcaaactcaacttcagttcaagagaaaactatgccatccaaaagggtctttctacgtctcggcatcgagcaccaagaaaatcctaataatgggaggcaccaggtttattggtgtgtttttatctaagctccttgttaaagagggtcaccaagtgactttattcacaagaagtaaagcgcctgtcactcaacagttgccaggtgaatcagacaatgattatgctgatttttcttcccagatctcgcatttg

SEQ ID NO: 33465 - DNA, 459 bp, Glycine max
  Clone ID: LIB3138-015-Q1-N2-B11
ttgagagttgctgcttggaagaaaggctgtttaatggtcaagattgtgatgtctgggaatgcagcagtcaaaaggagtgattgggcctcattggtacaagtgtttttaacaaacagcaacagtacagagcattttgatgcatgtaagtggacaaaatcagaaccacattcctgggaattgatcttcccaatagaagtatgtggtcctaataatggttttgaaatgtggagttctgagtgggcaaatcaaacttcatggcatttgagtttccttattgacaattccaaacagtctacagtttttgatattctcttgggaatctctcaagattttgaaattgctggtaatactcttatgccagctttttctgttccacaggctactgccagatcttctgaaaatgcggaatcctctgcatgatctggaatttgtgttttcttttcgctagtccgttggtta

SEQ ID NO: 33466 - DNA, 436 bp, Glycine max
  Clone ID: LIB3138-015-Q1-N2-B12
ggcggcttgtctgcaactgtggcaatgcaaactagcgagaccctttgactcattaccggtgcgaaggtcaattcctttgagtctgaggtgttcggccgcgccctcttcttccaagccgacgcgctcctacagcatcactctcatccccggcgacggcatcggccccgaaatcatctcggtggccaaagacgttcttgtcctcgccggttatctcgaagggattaaatacgacttccgcgagatgcttatgggtggagctgcattggatgccacgggactccctttaccccatgaaaccctttctgccgctaagcaatctcatgccgttctccttggtgccgtcggaggttataaatgggataggaacgacaaacatctcaagcctgagactggcttgcttcagatacgtaaagagcttggagtatttgcaaatctt

SEQ ID NO: 33467 - DNA, 381 bp, Glycine max
  Clone ID: LIB3138-015-Q1-N2-B2
tgaagatccttatgaaacttatccccataccagcttgcacaatcatgctgaacgtggtcttaacagagtttctcactctctcagtccagcaggcttacactctcaacacccacttgggtcgcttgaaactcccagttacatgcatgcctgtattcccaggcctcagagttttcctcatactttctctctactactccatttttgtccctgtctttcgacgcatcacgggccatccccacggtgcatctcagcttcagagggtaagaattgggttggcagtgtctattctatcagtggcatgggctgcaatatttggaaggtacagaagaaactatgcaataaaacatgggtatttggctagtttcctcacagcaatgccca

SEQ ID NO: 33468 - DNA, 293 bp, Glycine max
  Clone ID: LIB3138-015-Q1-N2-B3
caaaatcacaactcccaaagcaaaaacccaaatcccaaatgatagtagtaacatgagatgacagacgaccgcgtgcatccaatcccaaacctagctatgtctccggccaccgcccactggacctctgacgccatccacggcggacccctccgtcgtgtcgacctcgacttcggcaccaacggctgggccttccctcccggtgacctctttcttcttcgcttccccaattatttcaccaaacgccagaaatcacccgccggcgactaccttctcttccccttcggtatggactg

SEQ ID NO: 33469 - DNA, 473 bp, Glycine max
  Clone ID: LIB3138-015-Q1-N2-B4
tgcaggaccatgaatggaggcaagctataactgctgctggatctggatgcgttgcagctttatcagttgagagatatcttgtgagcaatgatcttcttatagagttccatcagcccaaaactgaagaggttaagaaggaactaacagacagggatgtacacgagggctttgacattacacttacaaagcataaggggcagtatgctcttcgaaaattgtatcatgacagtccaaggcttatatgcgtattatatacatcaccaacatgtggtccctgtaggactctgaagccaatccttagtaaggtgattgatgaaattgatcagaatgtacattttggtgaaattgatatagaggaagatccagaaatagcagaagcagctggaatatatgggtactcctgtgtgcagtattttaaaaacaaagagatgctcaagactgtcttcagagtcaaaatgaagagagattccgag

SEQ ID NO: 33470 - DNA, 315 bp, Glycine max
  Clone ID: LIB3138-015-Q1-N2-B5
ctttttatttgagtaaaaagacatctttattacacaaaactctgctctgcctatttagaacattccacacctgttataatggcctatatgatgtgtgaagcgtgagctttctgaacagatactgtacctcattcttgttctcctgattgaccacatgaccttcagcttcaacttctttaatctgcctttctatattgcataataatacaaactgggcgggcccccccttatgatctcttgaccccgggatttttattcatgccgttcccttcaagcttaccacctttccctattataggtgcttttataccctgg

SEQ ID NO: 33471 - DNA, 455 bp, Glycine max
  Clone ID: LIB3138-015-Q1-N2-B6
ttgggcctcattggtacaagtgtttttaacaaacagcaacagtacagagcattttgatgcatgtaagtggacaaaatcagaaccacattcctgggaattgatcttcccaatagaggtatgtggtcctaataatggttttgaaatgtggagttctgagtgggcaaatcaaacttcatggcatttgagtttccttattgacaatcccaaacagtctacagtttttgatattctcttgggaatctctcaagattttgaaattgctggtaatactcttatgccagctttttctgttccacaggctactgccagatcttctgaaaatgcggaatcctctgcatgatctggaatttgtgttttctttcgcttagtcgtttgtttaattcaataaaggaaattaggcatgaccctcttggtgagtatgctctgcctatttgaaaatttccacacctctttta

SEQ ID NO: 33472 - DNA, 316 bp, Glycine max
  Clone ID: LIB3138-015-Q1-N2-B8
ctgatgctcgctcatgtagtatttcatcacaatgaaatctttaaaagatagaagattcttgttcgaagaaaaagccgaaataactgacttagcatctgccgtttaatttaacacgtttgtttgtgcttgaatgcgattgaacgtacaaaagatatgaaacacgggaatatttgtggactgcactgtgttgggcacaatattatttgacctgaggggaggctgggcaattgatcccatgttgttatctcaatttagtacgatgcgcttcgaaccctgaagaactacaacggcgtttgaaactgcaaaaattatgggg

SEQ ID NO: 33473 - DNA, 418 bp, Glycine max
  Clone ID: LIB3138-015-Q1-N2-C10
ctcgagccgatgccctctctgctcaaagtcagtctgtgacatgtcaaaggtttgggagaaatttgaccttgagattgctgctacacgaatgcctgagcaatatcaaaataaaatggtttggatcctgtgcaatgactgtggtaaaacttctcacgttcagttccattttgtggctcaaaagtgtccgaactgcaaatcctacaacacacgacaaacatgaggcggagcaggtggccacgattattcattggcttcatcaaaagccttcactcgagagctctcttgatgttgtcgtgacttgtgaaggcagtgaaaatagatgtgcatccattgggtacgtggatgtgcacgtgtgggaatttggaatgccttatgagccacattcagagggataaaataatggttcttatgttgattt

SEQ ID NO: 33474 - DNA, 412 bp, Glycine max
  Clone ID: LIB3138-015-Q1-N2-C11
gaaaaacaagtagttgagaactaagaagaaggaaatggcttcctcaatgatctcctccccagctgttaccaccgtcaaccgtgccggtgccggcatggttgctccattcaccggcctcaaatccatggctggcttccccacgaggaagaccaacaatgacattacctccattgctagcaacggtggaagagtacaatgcatgcaggtgtggccaccaattggcaagaagaagttcgagactctttcctacttgccagacctcgatgatgcccaattggcaaaggaagtcgaataccttctaaggaaaggatggattccttgcttggaattcgagttggagcacggtttcgtgtaccgtgagcacaacaggtcacctggatactatgatggacgctactggaccatgtggaag

SEQ ID NO: 33475 - DNA, 395 bp, Glycine max
  Clone ID: LIB3138-015-Q1-N2-C12
atttgcaatagcatttttaatgagatgctcattagatatagctatgaaaaattactgcgccaggctaaagctccaagtatgtttttacaatccttcaaaaattttgtttctttgtgtgtgtatggtgatgataacttaattagtgttcatgaatatgtcaagccttactttagtggttctaaattgaaaagctttctagctagtcataacatcaccattactgatggtattgacaaaactagtgcaactttgcaatttagaaagttagcagattgtgattttctcaagagaaactttaagcagatgtctaatgttttgtgggtggctcctgaggacaaggcgagtttatggtcacaacttcattatggttcgtgtaataatctggaaatgcaaga

SEQ ID NO: 33476 - DNA, 178 bp, Glycine max
  Clone ID: LIB3138-015-Q1-N2-C3
aaacaattctatatcatttttctcaatagttgcacgcgtctcgatgtcatgattagacatcattttttcctttagtaaattaaaatcataggacttcgatttatctggaaaaatcataatgggacccaaatttaatctcccatgggcccaatattaaatgggatatcattccgcgggg

SEQ ID NO: 33477 - DNA, 372 bp, Glycine max
  Clone ID: LIB3138-015-Q1-N2-C4
ctaccatagcacagattgaagagttccattcgatgcagaggatgatgaatgctcctgattcaaatgataatattgatttactgttgagcattgatttgttgggtttacaaggagcaggtaaagcttttccaaacaaaattgtttttgatgataagcttgtgttggctaacacacaagaattctttgatggaaattttccagtggattcttggttaccaatttttgtgaattgtctttatcctgtaagtcaattaccttcaaaagctgtcgttgtaaatgttacatgtggtagtggacgcttagggtacccaccactgcttggattagttctgcagttaacaatcgctcctcagatatcaacaaaaggattcg

SEQ ID NO: 33478 - DNA, 432 bp, Glycine max
  Clone ID: LIB3138-015-Q1-N2-C6
aggaatctggcgtggaagtaaccaatcgagagtggtaacagaaatagcaataacaatttggttaacaaaaaccctaaagtggagaaagaaggggtttactctaaccggcaatcagattcggaagcctttgacttgtgttcactctgttattctcgcaatggaggttcagattccaaatcacactgttttcgacatgccttcacttctccaagctgtggtcgccgacactgttctcgccgctgctcaatctattgctttgattggatatctgcttactaatggcactagttcagtgtcaccaaatttgactgaagtggatggaaggtttcctttagaagacctttttgggaggaaacatgcttatctacaaaacatgaatagtgaaacagaggacgaggaagatggagatgaggatgatgaagatggacctga

SEQ ID NO: 33479 - DNA, 437 bp, Glycine max
  Clone ID: LIB3138-015-Q1-N2-C7
ctcgagccgattcggctcgagtgaaaagctttctagctagtcataacatcaccattactgatggtattgacaaaactagtgcaactttgcaatttagaaagttagcagattgtgattttctcaagagaaactttaagcagatgtctaatgttttgtgggtggctcctgaggacaaggcgagtttatggtcacaacttcattatgtttcgtgtaataatctggaaatgcaagaagcttatcttgtcaatctcgtaaatgtgttacgagaattgtatttgcacagtccagaggaagctcgccaattgagaaggaaagctctctctcgtattgaatggctgcaaaaaagctgtgtgcctaccatagcacagattgaagagttccattcgatgcaaaggatgatgaatgctcctgattcaaatgataatattgatttactg

SEQ ID NO: 33480 - DNA, 455 bp, Glycine max
  Clone ID: LIB3138-015-Q1-N2-C8
gttctttcaatgtggagatattttgttggagatctcgtctttgaagtttctaagatgacttctccctacattaaatgtacagtctctttcttcatagcatttggaaatttggctgatgataccatcaattttgaggcttttccccacaagctggtgcagtttggagagattcaggaaaaagttgtattgaaattttcacaagaggaatttcttacagcttggtcaactcaggtgcgtcctgcaacaactctgttggctgatgggtgtccatatttgtatgcaatggtgcatgatagttcagtgtctacaataccaggtgattttgtcattggtgtcaagttgacaaccataaacaatatgtgtgcatatgggctcaatcctggtatttcaagttctcgtcttttgggcaccattcctcagtccatttcacagcaaactgtttggaatcaaatggc

SEQ ID NO: 33481 - DNA, 443 bp, Glycine max
  unsure at all n locations
  Clone ID: LIB3138-015-Q1-N2-C9
attgttttcttaaaatttcttccttgccactgccagtgtgtcaccaccatggccaccgtcacaacccaagcctccgccgcgattttccggccatgtgcctcgaaatcgaggtttctgaccggctcttccggtaaactcaaccgggaagtgactatgaggccaatggggtgccctccttctgcctctttcaaggttgaagccaagaagggagagtggttacctggcttggcctccccaacttacctcaatggcactcttcctggtgacaatggatttgaccctctgggactagctgaggacccagagaacttgaggtggtacgttcaagccgagcttgtgaatggacgttgggccatgttggggttgcaggaatgctactntcctgaggtttcaccaagattggaatcatcaatgcccctcaatggtatgatgctgggaaattc

SEQ ID NO: 33482 - DNA, 327 bp, Glycine max
  Clone ID: LIB3138-015-Q1-N2-D10
gtgggtcttctatggctttgtttggaagagttggtggaggtatctatactaaggctgctgatgttggtgctgatcttgtcggaaaggttgaaagaaaaatccccgaagatgatccaagaaatccagctgtaagaaatataatcctgaaactaggcccccttatttggttgacccaaaaaagagaaggcagtatgacagtgctggatttgaggcccttgatgcggatagcatggacatggaaattgatttatctaatcttgggactgtgaacacaatgtttacagctttattcaacaaaatgggtgtccctatcaagactaccatttc

SEQ ID NO: 33483 - DNA, 408 bp, Glycine max
  Clone ID: LIB3138-015-Q1-N2-D11
gtgcactacttcctctagatcccaatcgcgttatgcttttagtcattgctcgtttgctcgttggtatagcacaaggcttcattttcccctccatccacacagttctagctcaatgggttccccctcacgagagatctagatccgtctctctcaccacttctgggatgtacctaggtgcagctctaggtatgcttcttcttcctactctagtcaagttcagaggtcctcaatctgtgtttcttgcggaggccgcattgggcgcttcatggtctttactttggttcaaatacgccactgatcccaaatccactgcctctggtgtcggggaatcagtcttgcccgtcaataaaaaaattgacactcacaacaaaaaaccgctttcagcccaaatcccctgggtcaaaattt

SEQ ID NO: 33484 - DNA, 325 bp, Glycine max
  unsure at all n locations
  Clone ID: LIB3138-015-Q1-N2-D12
cttttagggggcgcgccagttctgatatttacaccatctgctctcaagactgtgaattgtggaatcctgcttgcacaaaagcaatgactatgtcatttaatccaaacccgtgttctgatgcatggagtttggaatttctgaagcgtactggatttcattgcgatatcatttgtgtcactggatggactgccaccccaatgcaggatgttcaagttacaattgattggtttatttcctctcaagaatgtgttcccaggacctattgtgttntaaatccacaaaatccttttgtgtaaataggtggatgggaaaattgactttcccc

SEQ ID NO: 33485 - DNA, 338 bp, Glycine max
  Clone ID: LIB3138-015-Q1-N2-D3
catcaagatattctgttggagcttctttaccaaaggcaactcagtttacacctttgttgatagtgtctagatcgagaaagcttgtcaaggaaagaagatttggtcattgcttttcagtggcagatagtgatcagcttgccgcagacaacaattgcagtaaggattttgacaatgttgaaaggtcaacaaccaatgatcagtttgcattcatgaatcctccagatgaaaatttccaattgcaaactgaaattaatgctgagtcaggatctccaacattaaaggcttccaatggttcaatttaccaaaagccagggtcaaaaacatcttcttagtcacaa

SEQ ID NO: 33486 - DNA, 458 bp, Glycine max
  Clone ID: LIB3138-015-Q1-N2-D4
gttactggccaatattatcctgagtgggctccaattaattgtcgagttcatcgacaaccaattcacatcactgaaggaaattatgtcagaaagcaagatgtcagcattgaatatgatgcatgtacaattccaaatgattgtggttcattggttgttgccaaggttggaaatcacaaacaaattgttggtttccatgttgctggaagcaaaggaagactgggatatgcttcattgataccatatgttgagccagttgtgcaagctcaaagtgctgaagtttactttgacttcttccctgtggaggttgatagtcaagagggagttgctcacattggtgaactgaaatctggtgtctatgttccactgcctacaaaaactaaattggtggaaactcctaaggaatggcaactggatctaccttgggacaaaattcctagtgtcttgactacaactgatga

SEQ ID NO: 33487 - DNA, 449 bp, Glycine max
  unsure at all n locations
  Clone ID: LIB3138-015-Q1-N2-D7
gtgacgctgatccctggcgacgggatcgggccgatggtgacgggcgcggtggagcaagtcatggaggccatgcatgcgcccgtctactttgagaagttcgaggtccacggccacatgaaggccgtgccgccggaggtcctcgattcgattcggaagaacaaggtctgtctcaagggtggactcgtcacccccatgggcggtggcgtcagttccctcaatgttcagcttcggaaggagcttgatctctatgcttctcttgttaattgtttcaacctccctggccttcccacgcgccatgataatgttgatattgttgtcatcagggagaacaccgaaggcgagtactccggcctcgaacacgaggtcgttcccggcgttgttgaaagccttaaggtaataaacaaagtttgttcagagcgaatngctaaatatgcattcgagtatgctta

SEQ ID NO: 33488 - DNA, 249 bp, Glycine max
  Clone ID: LIB3138-015-Q1-N2-D8
gctcaatcctggtatttcaagttctcgtcttttgggcaccattcctcagtccatttcacagcaaactgtttggaatcaaatggcaacagtgagaacaccattgaattttgattctagcaagcagagcttttgtcagttttctattgaccttctcggtggaggaatcttaatggacaaaactggagattggatcacacttattcaaaattctccaattaataacttgttgaaagttgctgcttggaaaaa

SEQ ID NO: 33489 - DNA, 107 bp, Glycine max
  Clone ID: LIB3138-015-Q1-N2-D9
aaaagaacctcatgcatgtacattgaactacttatatttccctaatcagctcattcaatgaaatggaggtgttattgataccaatgcacaagttattttgtttcctc

SEQ ID NO: 33490 - DNA, 425 bp, Glycine max
  Clone ID: LIB3138-015-Q1-N2-E1
gtggcagcagcaggttcaatgcttaaattggatggttcatatactactaagagttatcttgaaataattttggaaagactaccagcaatagaaagaacttctggtgggattcattctcagcaatcagcaaggctgctggagattgttgagtttattcaatctcaaggatgtagctctgcttcagaatcctcatcaagtagggtagtctctccaattgaaggggttattggaggagatgcaatcaaggattagaaggcttgaaagatggctagcgataaatacggttctatggacatttctgatgtctgccctcgttggttattcactgtatcaaagggagcgtcaataatgatctttggaaattttcaggatcatgcatttgccgttcttggttagttacccttcgtataccgatcccaattttt

SEQ ID NO: 33491 - DNA, 360 bp, Glycine max
  Clone ID: LIB3138-015-Q1-N2-E10
tgtgaagagagtacaactggcagacaagtacttgaaagaggctgctcttggtgatgctaatcaagattccatcaacagaggaactttctatggcaaagcagctcagcaagtaaacattcccgttcctgaaggttgtactgatccaaatgcctcaaacttcgacccaactgcaagaagtgatgatggaacctgcttatacacaccctgagaacctaagcattctccacttggagagaagctaaaagttgagataataaaataagttatcttgttcatattggattagtatcccggataattttgagttacattgtctacattttacaatgtgtgcaatgttaaagtcttgatgtctttctc

SEQ ID NO: 33492 - DNA, 279 bp, Glycine max
  Clone ID: LIB3138-015-Q1-N2-E11
ggttcagagagctggatgtcaatggggaggaatgagcctacatattcggatcttctttcaagctttggggccagtggggatccttctcatttatccttgaaggatcaaatgagccctgcttattctgctagaaagcaatcattggatcatgaaagcaaacttcacatgcctcatccatggcctgtaatgccctctaatctgtcactgaacatcttggactctaatacaaaaagtcctgcacatgggggtgatacaacttacaaagctcgagggaatttg

SEQ ID NO: 33493 - DNA, 441 bp, Glycine max
  Clone ID: LIB3138-015-Q1-N2-E12
tgaagcatcagctgccacctgatcatgatgctgaatctataaagaaaatggctactgctgctccacattgtggatcatcaaacgtggaagaagtgctagttgaaggtaatgttggaaaccacagtatcaatagaagtgtttcaggcagcaacaatggaagcaatggacaaaatgggagcagcacagcagttaatgctggagggacaaacacggaaagcaacaatggactcactgggaatagtggcagtggtgatgctagtggaagtggaagtgccaacagagtagatcaaaacaagacttctcaaagggaagtggccttaactaaatttcgccaaaagagaaaagagagaagggagaggtgctttcataaaaaggttccatatcagagcagaaagagattagctgaacaacgacctcgatttcgtggaccatttgtgcgac

SEQ ID NO: 33494 - DNA, 382 bp, Glycine max
  Clone ID: LIB3138-015-Q1-N2-E3
cgccaacgcgcgacgattacatcaaccaaaatctcacgccatcacccgcatcagacgaaagggcgtgccccatatgctacgaaaactggaacgcagatacagagcaaattatccggacccattgcaaccacactttccaccgcgaatgcttcatcgcatggcttggcaaggaaaacgtcaacagcgcgaactcgtgccccagttgtcgcgcaatctgctaccccaaagttgagcaccaaaaagagacaaggttgacgctggatatgtcgtttttgtaccggaccatgcgctcggagtacattacgcgaatttcgttggcgcgtcagtcgagggcaaagaaacacaccaaccagcgacgatatgatgatgaggatggcttttg

SEQ ID NO: 33495 - DNA, 139 bp, Glycine max
  unsure at all n locations
  Clone ID: LIB3138-015-Q1-N2-E5
atctctnttncagcgccggtcgcccttactggggtacctccggccacgacagacgacagctacaacaaccggtggtcgacgttccttttcgatgggctcttcaacatctacgggtggggcggaccctaatttttcgtca

SEQ ID NO: 33496 - DNA, 406 bp, Glycine max
  Clone ID: LIB3138-015-Q1-N2-E6
aaggcagaaagcaagctcatcctagagttttaaaaatggcagcagcctcctccatggctctctcttccccatccttggctggcaaggccgtgaagctgggcccatcagcccccgaagtcgggagggtcagcatgaggaagaccgtcaccaagcaggcctcctccggaagcccatggtacggcccagaccgcgtcaagtacttgggcccattctctggcgagcccccgtcctacctcactggcgagttcccaggtgactacggctgggacactgctgggctttcggccgacccagaaaccttcgccagaaaccgtgagctcgaagtgatccactccaggtgggccatgctcggggccttgggctgcgtcttccccgaactgttgtcccgcaacggggtcaagtttgg

SEQ ID NO: 33497 - DNA, 437 bp, Glycine max
  Clone ID: LIB3138-015-Q1-N2-E7
ccaatattttacaatgtgcaaaagtcggatgtatgcaatcaaacaaaaagttatggtgaagccatgactgaacatgaaaaaagatttggaaaggactctgagaaggtgcagaaatggaggtctgctttgtctgaaatcaaaaacttggaaggagaccatgtcaaacaaaatgagtaccaacatgaattaatcgaaaggattgtggaaaaagtcattaaaattgaaggtagcaagcatacagcaaatcctttccttttatccaatgacagctacgaggaagaatgagtgaaagagggtcaaatatatgctgtggagctgtgaaactaactgattgtaacctctataactggccttgaattcatttggtcctatcaatggtggttttaacatcaagtcaatttcctaaggggtatatggatccctcctaaacctggttc

SEQ ID NO: 33498 - DNA, 386 bp, Glycine max
  Clone ID: LIB3138-015-Q1-N2-E8
gtaccattgaaatatgatttatatgccattgttgtgcatactggactttcttctacttcagggcattacttctgctttgttcgctcagctccagacacatggcataagttggatgattcaatggttactgaggtctcagtagaaacagtactgtctcaggaagcatacatattgttttatgcgcgacagggtactccatggtttttgagtattatggaagagaaaacacaatgtttgaatccaaatattatgagtacatcttcctaagtctgttttagacgttggtgacaacatgtctaaatcaaatcctattttacttccaaatattgaaaagagtgtggctgaagaatccacagagtattctgagcctcagtttgattattatt

SEQ ID NO: 33499 - DNA, 262 bp, Glycine max
  Clone ID: LIB3138-015-Q1-N2-E9
ggaaaaggacaggccctagcttttctacttgaaaaattgaaggctgatgaacaaggaccaatcaacactcttgtttggggggattcaaggaatgatgctgaactggtcactggacctgaaggtaatggggtcttggtcaataatgcacaagaaaaattggttcaatgggtttccaaaaattccagggggaatcccccgattattcattccacctgaaaattttccacttgcatttggccaagcattgggtaactttttttta

SEQ ID NO: 33500 - DNA, 388 bp, Glycine max
  Clone ID: LIB3138-015-Q1-N2-F11
caacagcatttatggattcgtcaactgtgggtggattatgctttcctaccatgccctcacagccagttgggtctggtggtgttgtttcatctacgtatccccgtccatatgttatgagtcttccaggtggtacaagtaatgtgattcctgacagcagaaaatggggaagtcaaagtctggatcttaattcgggccccggtggtacggatactgaacggagagatgatagattgccttctggattgaggcaaatgtctgtccccaattcacaggcctcgatggaggaccacttgaagatgtttcagatggcaggtgcattgaaaagaaaagaacctgattgtggttggggggagggagccgagagattcggttacacgcaacattcatt

SEQ ID NO: 33501 - DNA, 405 bp, Glycine max
  unsure at all n locations
  Clone ID: LIB3138-015-Q1-N2-F4
ctcgagccgaatcggctcgagggacaagctgcggcagtcccgcaacagaagaaacccaaggggtcacaagataaacagcagaaaggtcagctccttgagagcttatatagggaaaaccccaagctttcaagtttatgggggattctcttcccccaaaatagtcagtctgtctggagtggaccacactcacttattcggaaaacaaattctgctcggactagttcaattcacgctgctattaggactttcaatgagtagctttttatctttatcaagtcactacacttnctagcagnctatgtcattaatattttagttgatgtcccttcgtattatatgggtattatagntctcaagttctagataacaacaagcagatttgtaacacgaagaatttggtgcttc

SEQ ID NO: 33502 - DNA, 440 bp, Glycine max
  Clone ID: LIB3138-015-Q1-N2-F5
ctctagagtaattgcggattcagctagaattttctaataatggccaaagacgttgagcaggttacagagcaaggtgaatactccgcgaaggattaccatgacccacctccggcgccgttgatcgacccagatgagctcactaagtggtccttgtacagagccgccatagctgagttcatagcaacactccttttcctttacatcaccgtgttgaccattattggctacaagagacagagtgacaccaaaatccccggtaacaccgagtgcgacggcgttggcattttgggcatcgcttgggccttcggtggcatgatcttcatccttgtttactgcaccgccggcatctctgggggacacatcaaccctgcggtgacattcgggttgttcctgggacgcaaggtgtctttggtgaaggcgttgttgtacatgatagcaca

SEQ ID NO: 33503 - DNA, 416 bp, Glycine max
  Clone ID: LIB3138-015-Q1-N2-F8
attctctcttgttttaagttgaatccttttgagtatctaaacttatcatttgattcatcaattgatgatgtgaaaaagcagtaccgcaagttatcattgatggttcaccctgacaaatgtaagcatccgcaagcaaaggaggcttttggagcattagcgaaagctcaacagttattactggatcaaaatgaaagagattatattcttagccaagttaattcagctaaagaagaacttagagcaaagaggaagaagcagctgaagaaagatacagcttcaaaaatgaagtctttggttgaagagggaaaatatgacaaacaatatgaacaatcaggagagttccggcaggagctcaaagtcaaagttcggcgaactattaacagaatcaagaatggaggagaagaaaaatgcaaatg

SEQ ID NO: 33504 - DNA, 348 bp, Glycine max
  Clone ID: LIB3138-015-Q1-N2-F9
cttcattatgtttcgtgtaataatctggaaatgcaagaagcttatcttgtcaacctcgtaaatgtgttacgagaattgtatttgcacagtccagaggaagctcgccaattgagaaggaaagctctctctcgtattgaatggctgcaaaaagctgatgtgcctaccatagcacagattgaagagttccattcgatgcaaaggatgatgaatgctcctgattcaaatgataatattgatttactgttgagcattgatttgttgggtttacaaggagcaagtaaagcttttccaaacaaaattagttttgatgataaagctgtgttggctaacacacaagaattctttgat

SEQ ID NO: 33505 - DNA, 433 bp, Glycine max
  unsure at all n locations
  Clone ID: LIB3138-015-Q1-N2-G10
gttggctaacacacaagaattctttgatggaaattttccaggggattcttgggtaccaatttttgtgaattgtctntatcctgtaagtcaattaccttcagaagctgtcgttgtaaatgttacatgtggtagtggacgtggtggtttacccaccactgcttggattagttctgcagttaacaatcgctcctcagatatcaacaaaaggattcgcacagcacttgggaaaggtaagaaaattgtttttcttactagagttgatccttttccagtagctttactggctgttctttttggcgttaagaatgaaattctgagttctaacgccactaatcctatgctgacgcgacttcttgagaactgtaagagtctcaaatatctggttgatgagtgtccttttgcatttgtgaactagtatgtagtattttattca

SEQ ID NO: 33506 - DNA, 335 bp, Glycine max
  Clone ID: LIB3138-015-Q1-N2-G11
gttcatttctacacatccctagctctgtcgttccgtcgttgacgatggcgtttcgggtgcgaagccctgacctccgctgtctctttcttctctctctcttgtccatcgcttccgccaatgtcttcttcgaagagcgtttcgatgacgggtgggaaaatcgatgggttaaatcagattggaaaaaagatgagaacgtggctggggagtggaaccacacctctggtcaatggaatggagacgctcatgacaaaggtattcaaaccagtgaggattacagattctatgctatctcagctgagtaccctggattcagcaacaaggggtagacactagtc

SEQ ID NO: 33507 - DNA, 473 bp, Glycine max
  Clone ID: LIB3138-015-Q1-N2-G3
aattgaagttaaaagccttagccttccctacaactccaaacacaaagacatcatcatccatggctgcctccgtctccactgtcggagctgtcaacagagctcttttgaacctgaatggttctggagctggagcttcagctcccagttcagccttctttgggaccagcttgaagaaggttattgcctcaagggtccccaacagcaaggtttccggtggaagcttcaagattgttgctgtagaagagaagaaagagattgaagagacccagcagaccgacaaggacagatggaagggtcttgcctatgatatctcagacgaccaacaagacatcacaagaggaaagggtttggttgactcccttttccaagctccacaggatgctggaactcactatgcagtcatgagctcctacgagtacctcagcactggacttcgccagtacttggacaacaaaatggatggattctacatt

SEQ ID NO: 33508 - DNA, 101 bp, Glycine max
  Clone ID: LIB3138-015-Q1-N2-G5
ggagacctcatccaaatttgggtcatggaagactttgaagcgcactcttcctctgtcaggagcttatgtcttttacatgctagacaccatggagtctgatc

SEQ ID NO: 33509 - DNA, 275 bp, Glycine max
  Clone ID: LIB3138-015-Q1-N2-G6
gacactatgcatagagctgtgactgcacacgcacgcatacctaggacttcggctcgagctactgcaccgcacgtggctccatcatgcgctctgtcttattaccaatctctccgaccctggcctgcacaaaagcgagtgtgggttctcatggcactcgcttgcttaaacgaatgatccaaatggtggcctcccagggacctacagtgtattcttgtttttcttccgccttctctttggatggctatttcaacatgcatgcacatgattttttttac

SEQ ID NO: 33510 - DNA, 354 bp, Glycine max
  Clone ID: LIB3138-015-Q1-N2-G7
gcataactgaacaaacaaagcaaccctatgtcgaaggtggtttgtgtcaccggagccagtggcgccattggatcatgggtggccctcctcctcctccagcgtggttatacggtccatgccaccgtccaagacatcaaggatgaaaatgagacgaaacatttggaggaaatggaaggagcaaagagtcgtctccatttttttgaaatggatcttcttgacatcgactccattgccgctgccataaagggttgctccggcgtaatccacctcgcatgtcctaacatcatcggtcatgtcgaagatcctgagaagcagatactggagccggcgataaaaagaacagttaatgtgttg

SEQ ID NO: 33511 - DNA, 333 bp, Glycine max
  Clone ID: LIB3138-015-Q1-N2-G9
attattctactctcacccttattaaaacactcattttaacatccacttttgcatttccaactatctatctattcctctaatcttttttaccagggctggtgggaactggccttttggcaaagttcttggttggaaatccgtacaagttctatgctgatggagagtggaagaaatctgcttctgggaaaagtgtttccatcatcaaccccactaccagaaagactcaatacaaagttcaagcttgttcacaagaggaggttaataaggtcatggacttagcaaaatctgcacaaaagttatgggcaaagaccccactttggaaacgtgctgagc

SEQ ID NO: 33512 - DNA, 201 bp, Glycine max
  Clone ID: LIB3138-015-Q1-N2-H1
tttccagatatggttcatgctcttaaacccaatcccaagaaccacatccaagagaattggaggatccttgacttcttctctcactttccaaaaagccttcacatgttcacctttttatttgatgatttgggtgttccacaagattacaggcctattgatgggtttgggggtaacacatattcccttgtcaacaaaggttgg

SEQ ID NO: 33513 - DNA, 182 bp, Glycine max
  Clone ID: LIB3138-015-Q1-N2-H10
atcatgttacccagcagtatcataaagccagaaaatgttggtttgtctctctcatatggcttgtcattaaatgccgtgatgttctgggctatatacatgagctgcttcattgaaaacaaaatggtatctgttgagaggatcaaacagttcacaaatattccatcggaagcttcatggaacat

SEQ ID NO: 33514 - DNA, 113 bp, Glycine max
  Clone ID: LIB3138-015-Q1-N2-H11
gtgactcgagaaaagagaattcgggccacgagggtttcatcctgcggcatctgtcatgggaggaggccatgggcaaaaagcaaagatggctcgcgagaagaacatcgagaagc

SEQ ID NO: 33515 - DNA, 415 bp, Glycine max
  unsure at all n locations
  Clone ID: LIB3138-015-Q1-N2-H2
caatacttcgtgctagagatccacctcgacctgtttttgatcacattgaatacaagcccccaccagccatgaagactcaacaacctactaaaccaggctcagactcggttaatgcagcaccagcagcagcggtgtctattttcagactcacacgtgagcagctcaacacactgaaagccaagtctaaagaagatggcaacacaatcagctccagttcttatgagatgttggcgggtcacgtgtggagaagtgtttgcaaagcaagagcacttcctgatgatcaagaaaccaaattgtccattgcaactgatggaaggtcaagagtgcaaccntctcccccaccgggtactttggcaatgtgatattcacaaccacacctatagctggggccagggatctcatgtcaaaaccaaca

SEQ ID NO: 33516 - DNA, 461 bp, Glycine max
  Clone ID: LIB3138-015-Q1-N2-H4
ggttcctaatgcgacaaatagtttatgtggatacaaaattgttactggccagccatctgataggcttggagaggacttttcagagcattataatgattttactgagagattgaataatgttgaggagttcacccgggctacaatcaagaaattaactcaaggaatggatgaaaacaacaaatctatggccggtgctaaaactgatgaagaaaaggaaaaaattaaaactaaaaagcagaatgctacaactgggttgcggacttgtaataacattttgacaatgactaagccattgcacgccaaagtgccttcttttattggagataagagaatcaatctttcttgggaagaagcaacataagcagcatctactgcacctgctgctggagcaaaacggcctgcttatgctgtcaatgggtccaacaatattgtctaaaaaaagggtgaagtgctggtggttt

SEQ ID NO: 33517 - DNA, 307 bp, Glycine max
  Clone ID: LIB3138-015-Q1-N2-H5
cttctccattggttcttcatcttcatgcacacacttgcatagttttggaaaccaagaatttttgaagggtagcatcaacaagaagttctggaaatggagatcaccaatgtcagcgagtatgaagctattgcaaagcagaagttgccaaagatggtgtttgactactacgcatctggtgcagaggaccagtggactctgcaagagaacagaaatgccttttccagaattttgtttcggccacgtattcttattgatgtgagcaagatagacatcacaactactgtcctgggcttcaaaatattcatgc

SEQ ID NO: 33518 - DNA, 369 bp, Glycine max
  Clone ID: LIB3138-015-Q1-N2-H6
gacaaggccactcctctgcaagttgctgattacaccctcaagctccttcacaggagaatcccaccggctgggcctggaatcatagtgctgtatggcggacaagctgatgttgaagcaaccttagaacttgaatgctatgaaccagtctgcatacccatagcacgcgtccttcttctacgccaaagctctcctaaacaccttattgaagacatcaggtggactacatgtgaacgtgaaggctgatcaaaatacactacttttgcgtgccaagtccaactcactcgctcagcttggaaagcacactgccgagggtgaatctgaggaagccactcggggaatgttcgtcaaaggttactcctactaagatca

SEQ ID NO: 33519 - DNA, 440 bp, Glycine max
  Clone ID: LIB3138-015-Q1-N2-H7
gatttgttgggtttacaaggagcaggtaaagcttttccaaacaaaattgtttttgatgataagcttgtgttggctaacacacaagaattctttgatggaaattttccagtggattcttggttaccaatttttgtgaattgtctttatcctgtaagtcaattaccttcagaagctgtcgttgtaaatgttacatgtggtagtggaccgtgggtttacccaccactgcttggattagttctgcagttaacaatcgctcctcaaatatcaacaaaaggattcgcacagcacttgggaaaaggtagaaaattggttttcttactagaagtgatccttttccagtagctttactggctggtctttttggcgttaagaatgaaattctgagttctaacgccactaatcctatgctgacgcgacttcttgagaactgtaagagtctc

SEQ ID NO: 33520 - DNA, 353 bp, Glycine max
  Clone ID: LIB3138-015-Q1-N2-H8
gggctatcaattcgagcatggtggaacaatcaaagaatgtcaagaataacacctatgaatgctggtttttgtgcatttcttagtgtcctacttaagctgtttagaatatctgaaactgtgtttgacataacaaagaaagatttgccctcaactaaagatgttggagatgatcaagattctggaaggtacaccttcgatgagtccgtagttttcttaccatgaacttccattttgttggtgcaattgaccacaatgggtatcaaattttttagggtccaaccaccaatggcaactcaaaatgggaaacattggtgttgacttagggagattttctggagaggttatttgattaa

SEQ ID NO: 33521 - DNA, 393 bp, Glycine max
  Clone ID: LIB3138-015-Q1-N2-H9
gaaattttcacaagaggaatttcttacagcttggtcaactcaagtgcgtcctgcaacaactctgttggctgatgggtgtccatatttgtatgcaatggtgcatgatagttcagtgtctacaataccaggtgattttgtcattggtgtcaagttgacaaccataaacaatatgtgtgcatatgggctcaatcctggtatttcaggttctcgtcttttgggcaccattcctcagtccatttcacaacaaactgtttggaatcaaatggcaacagtgagaacaccattgaattttgattctagcaagcagagcttttgtcagttttctattgaccttttcggtggaagaatcttagtggacaaaactggagattggatcacacttatacaaaattc

SEQ ID NO: 33522 - DNA, 259 bp, Glycine max
  unsure at all n locations
  Clone ID: LIB3138-016-Q1-N1-A1
atgtgaaaaggaaaaaagccttcttaggtaggtgatggcgaggacagctgaacagaatgttgcttcttccaattgtatttacttttttatttctatattattaggaatcgtaatggaaaaaagagatgctattcttttctttttcaaaaaaaaaaaaaaaaaaaaaaaaaaaaaaaaaaaaaaaaaaaaaaaaaataataatactnnnnnnnnaattaaaaaataataaaaaaaataaaaaaatctcaaaatgaatggt

SEQ ID NO: 33523 - DNA, 435 bp, Glycine max
  Clone ID: LIB3138-016-Q1-N1-A10
aagtagttgagaactaagaaggagaagcaaatggcttcctcaatgatctcttccccagctgttaccactgtcaaccgtgccggtgccggcatggttgctccattcactggcctcaagtccatggctggcttccccaccaggaagaccaacaatgacattacctccattgctagcaacggtggaagagtgcaatgcatgcaggtgtggccaccagttggcaagaagaagtttgagactctttcctacctgccagaccttgatgatgcacaattggcaaaggaagtagaataccttcttaggaagggatggattccttgcttggaattcgagttggagcacggtttcgtgtaccgtgagcacaacaggtcaccaggatactacgatggacgctactggaccatgtggaagctgcctatgtttggttgcactgatgct

SEQ ID NO: 33524 - DNA, 452 bp, Glycine max
  unsure at all n locations
  Clone ID: LIB3138-016-Q1-N1-A12
gtgcaatgcttccttactggttttctgccatgaccatgaagagtgtgggaagtgctgctctgaagatggttgaggaagtacgcaggcaattcaacaccattccaggattgatggagggaactgctaagcctgactacgccacttgtgttaagatctccactgatgcttccattaaagaaatgattccacctggtgctcttgtcatgcttacaccccttgttgttggaatcctttttggtgtcgaaacactttctggtgtcctagctggatctttggtgtctggtgtacagattgctatctctgcattcaacaccggtggtgcttgggataatgccaagaagtacattgaagctggtgcttctgagcatgcaaggagccttggtccaaaagggtcagattgtcacaaggcagcttgtattggtgacaccatnggagaccccctcaaggataca

SEQ ID NO: 33525 - DNA, 389 bp, Glycine max
  Clone ID: LIB3138-016-Q1-N1-A3
aatcaaatggcaacagtgagaacaccattgaattttgattctagcaagcagagcttttgtcagttttctattgaccttctcggtggaggaatcttagtggacaaaactggagattggatcacacttatacaaaattctccaattagtaacttattgagagttgctgcttggaagaaaggctgtttaatggtcaagattgtgatgtctgggaatgcagcagtcaaaaggagtgattgggcctcattggtacaagtgtttttaacaaacagcaacagtacagagcattttgatgcatgtaagtggacaaaatcagaaccacattcctgggaattgatcttcccaatagaagtatgtggtcctaataatggttttgaatgtggagtttgagt

SEQ ID NO: 33526 - DNA, 368 bp, Glycine max
  Clone ID: LIB3138-016-Q1-N1-A4
gggaaaaagggttatggactgaaggcaattgagaatgtagctcaaggccagtttcttattgaatacgttggagaggtacttgatatgcaagcatacgaggcacggcaaagagagtatgctttgaagggtcatcggcatttctattttatgaccttgaatggcagtgaggtgatagatgcaagtgcaaaaggaaacttggggcgtttcattaatcatagttgtgatcctaattgtcggacagaaaagtggatggtgaatggggaaatctgtattggactgtttgcattgaaggatattaagaaggatgaagaattgaccttcgattacaactatgtgagggtttttggtgctgctgccaaaaaatgtta

SEQ ID NO: 33527 - DNA, 472 bp, Glycine max
  unsure at all n locations
  Clone ID: LIB3138-016-Q1-N1-A5
atgcgcctcttctggctctgcgcctgccacgcgccccccgaagccggctccctctacttccactacctcctcgcccccagcctccaaacggcgtcgtccaaactcgcctcctccgtcctccgaaccttcttcatcaccgtgggcgtcgacaccgaactctgcttcatgcgcaccctcggttacatcattacaaagcttcacatgatcaaagaactcagcgttggattgggcttaaaaacgatttttccttctcccagattctcttacgccaacgagactcacggtctttggattctcaaaggttacgcgccagtcatgaccatgaaactggcgcgaagcaataacgttaaaaaaagtcaattctctggcatcgatgccaaggagtcaattctccgttactctctggcgcaccaccaactcgaggcacacgtgcagctagaatacanccgtgggtttttcgatgctttcattc

SEQ ID NO: 33528 - DNA, 387 bp, Glycine max
  Clone ID: LIB3138-016-Q1-N1-A6
ttcccaatagaggtatgtggtcctaataatggttttgaaatgtggagttctgagtgggcaaatcaaacttcatggcatttgagtttccttattgacaatcccaaacagtctacagtttttgatattctcttgggaatctctcaagattttgaaattgctggtaatactcttatgccagctttttctgttccacaggctactgccagatcttctgaaaatgcggaatcctctgcatgatctggaatttgtgttttctttcgcttgttcgtttgtttaattcaataaaggaaattaggcatgaccctcttgttgagtatgctctgcctatttgaaaatttccacacctcttttaattgtcgtaatgatgtgtgaagtgtgtgttatttt

SEQ ID NO: 33529 - DNA, 459 bp, Glycine max
  Clone ID: LIB3138-016-Q1-N1-A9
caggattttgggcaaaataatcagttgaaagctcggaaaaaatcacaaggtaaacaagaggtaaaagcattgcaggagttttatggtagctggtctccttcatcaactacatgtggacaatttcagaatcagcagtcttcagtcatacagtcttctccctcttcaattcttgggaaacggaaccagcttcaaggacctgagacactataccaggacatcagaaatacatatgtgacatcctctgcatatgagaaccttacaaatacatattcttctatgtcaacgctaccacaagcacagtcaggagttcttatgcgacagcctctgctttctgggtatgaagcatctcttggtgttatgaatcctgtgagcaagtctgtggacttagttaagcctcttacaatgactccccaggaaaaaattgaaaaattgaggaggcggcagcaaatgcaagcaatg

SEQ ID NO: 33530 - DNA, 168 bp, Glycine max
  Clone ID: LIB3138-016-Q1-N1-B1
tagaagagctatgacatcacatcgtccttaacctcggatttcggttcgggtaaaaaggcaaaaaaccgtccaaaacctggtgggttttcagtggaaatcataacggttactagtggaacaggcatggaaccagttatatggtgccttggatggcctggcctggggggg

SEQ ID NO: 33531 - DNA, 405 bp, Glycine max
  unsure at all n locations
  Clone ID: LIB3138-016-Q1-N1-B10
aattaatatatatcaaccaaaatggggttgtacaagatttcattatgtctattgtgtgtgttggggttagtcattgtgggtgatcatgttgcgtatgctcaagactcaccaacagactatgttaatgcacacaacgctgcaagatcacaggttggtgttccaaatatagtttgggataacgcagtcgctgcttttgcacagaactatgctaaccaacgcaaaggtgactgcaaactcgtccactctggtggtgatggaaaatacggggagaatcttgcaggaagcaccggtaacctaagtgggaaagatgcagtgcaattgtgggtgaatgagaaatccaagtataactacaactncaactcgtgtgttggtggggagtgcctgcactacactcangtcgtttgg

SEQ ID NO: 33532 - DNA, 294 bp, Glycine max
  Clone ID: LIB3138-016-Q1-N1-B11
cgcttctatacacaggcttaatagtgttcttttctttctactattggctcttggcatttcttctgccagaagggcccttctcactcttgatggcggctatggtgtaggccctggcattggtggtggttatggtggatatggaggtggtagcggctcgagacaaggtgggggtgtaaggtatgtgtggtaacatggaacaagttatggccagcagtcttgtatactatattcgattacaaacttgtatatgaccaagtgactggcatgtattatcaagctacttaattacctact

SEQ ID NO: 33533 - DNA, 479 bp, Glycine max
  Clone ID: LIB3138-016-Q1-N1-B2
gttctgatatttacaccatctgctctcaagactgtgaattgtggaatcctgcttgcacaaaagcaatgactatgtcatttaatccaaacccgtgttctgatgcatggagtttggaatttctgaagcgtactggatttcattgcgatatcatttgtgtcactggatggactgccaccccaatgcaggatgttcaggttacaattgattggtttatttcctctcacgaatgtgttcccaggacctattgtgttttaaatccacaaaatccttttgtgttaaataggtggatgggaaaattgactttcccccagggcacttcccgaagtgttaagagaatgcctctttctatagggggaggagctggtgcaaagaatgctattctcatgaatatgccaaatgcttgtctttcaatgtggagatattttgttggagatctcgtctttgaaagttctaagatgacttctccctacattaaatgt

SEQ ID NO: 33534 - DNA, 353 bp, Glycine max
  Clone ID: LIB3138-016-Q1-N1-B3
ctcgagccgaatcggctcgagtcaagattggcgagaatcagatgtcacaaacagaattccaatcattgtaacagggaacgatttttcaactctttacgctccactgatacgcgatggaaggatggataagttttactggcaacctaaccaggaagatatccttaatatcgttcacagaatgtatgagaaagacagtatatctagggatgaagttgaaagggttgtgaacactttccctaatcaagctttggacttttatggagctctaagatcacgtacatatgacagatctattttaaagtggattgatgatattgggaggtgtgaaaattttggaaacaaacttctcaaga

SEQ ID NO: 33535 - DNA, 454 bp, Glycine max
  Clone ID: LIB3138-016-Q1-N1-B4
tagaaagttagcagattgtgattttctcaagagaaactttaagcagatgtctaatgttttgtgggtggctcctgaggacaaggcgagtttatggtcacaacttcattatgtttcgtgtaataatctggaaatgcaagaagcttatcttgtcaatctcgtaaatgtgttacgagaattgtatttgcacagtccagaggaagctcgccaattgagaaggaaagctctctctcgtattgaatggctgcaaaaagctgatgtgcctaccatagcacagattgaagagttccattcgatgcagaggatgatgaatgctcctgattcaaatgataatattgatttactgttgagcattgatttgttgggtttacaaggagcaagtaaagcttttccaaacaaaattgtttttgatgataagcttgtgttggctaacacacaagaattctttgatggaaat

SEQ ID NO: 33536 - DNA, 492 bp, Glycine max
  Clone ID: LIB3138-016-Q1-N1-B5
cattcctcagtccatttcacagcaaactgtttggaatcaaatggcaacagtgagaacaccattgaattttgattctagcaagcagagcttttgtcagttttctattgaccttctcggtggaggaatcttagtggacaaaactggagattggatcacacttatacaaaattctccaattagtaacttattgagagttgctgcttggaagaaaggctgtttaatggtcaagattgtgatgtctgggaatgcagcagtcaaaaggagtgattgggcctcattggtacaagtgtttttaacaaacagcaacagtacagagcattttgatgcatgtaagtggacaaaatcagaaccacattcctgggaattgatcttcccaatagaggtatgtggtcctaataatggttttgaaatgtggagttctgagtgggcaaatcaaacttcatggcatttgagtttccttattgacaatcccaaacagtctacagtttttga

SEQ ID NO: 33537 - DNA, 427 bp, Glycine max
  Clone ID: LIB3138-016-Q1-N1-B7
agtgatgaaaattgcgaccctaaggcacttaaatatgctctgggcaaaggagccattgaatatgaggattttcttcaaagtggtgatcctgagtatgcatggaaacccccagaggatgagtggcagagcattgcattgggttacacatccggtaccactgctagtccgaagggtgtggttttacatcaccgtggagcttatctcatgtctctgagtggagctcttatttggggaatgactgaaggtgctgtgtatctttggacacttcccatgttccattgcaatggttggtgctacacttggacacttgcagctctgtgtggtactaacatatgccttcgccaggtaacagcgaaggcagtgtatggagccattgccaagtataaagtgactcatttttgtgcagcaccagtggttcttaacacac

SEQ ID NO: 33538 - DNA, 417 bp, Glycine max
  unsure at all n locations
  Clone ID: LIB3138-016-Q1-N1-B8
tttcacacagcttatcccttcaccttcttcttcctccttaaaccctatcacactctccctaaaccctaaatccccaacctctccgccgcagcagcatttcaatctcgatattctccggcaccggcgccggaggcctaattccactcttcggtgctccgcctcctcgttctcggagaagcaccacacgaactcctcgaactccgacgacgtggtggagctccccctgttccctctccctctggtcctctatcctggcgccatcctccccttgcagatcttcgagttccgctaccgcatcatgatgcacacgctnctncacaccgacctacgcttcggcatcatctacaccgacgccgtctctggaaccgccgaggtcggctgcgtcggcgaagtcatcaagcacgagcgcctcgtcga

SEQ ID NO: 33539 - DNA, 466 bp, Glycine max
  unsure at all n locations
  Clone ID: LIB3138-016-Q1-N1-B9
ctactatacatacaccatatcaatattacataaaccaaggaattgaactagtaactgataacgaatagaactgaacatggcaatcaaagaagatgtggaggatcgcacacagaaaggaatcagagagccacttgttgtgggggaacagaatcaccatgcaaacaaagggcatccatggatggtttacttcagtacatttattgcagtgtgtggctcttatgaatttggggcctgtgctggatattcatctcccacccaagatgctatcaggaaggatctcagtctgtctttggcagagtactccttgtttggatccatcttgacttttggtgcaatggttggtgcaataacaagtggacctcttgctgantttattggacgtaaaggggcaatgagagtgtcaagtgctttctgtgtcgcagggtggctngttatttatttttctgagggtccagtgcctttggac

SEQ ID NO: 33540 - DNA, 413 bp, Glycine max
  Clone ID: LIB3138-016-Q1-N1-C10
ctgcgttcggcaccagcgaaacgctcttcgttatctttttctcgactccgcggcgtagatccgaggagttcgggaaaccctaactcatcttccttcacaacagaacaacgcttcttttccctatccatcatctcaactgaagtcatggctggactagcacctgaggggtcacagttcgatgctcgtcaatatgattccaaaatgagtgacttactttcatctgatggacaggacttcttcacattctatgacgaggtttatgatagttttgacgctatgggtttgcaggagaatcttctcaagggaatttacgcatacggttttgagaagccatcagccattcagcaaagggggatagttcccttctgcagggacttgatgttattcaacaggctcaatctcgaactgggaag

SEQ ID NO: 33541 - DNA, 382 bp, Glycine max
  Clone ID: LIB3138-016-Q1-N1-C12
ctcggtggaggaatcttagtggacaaaactggagattggatcacacttatacaaaattctccaattagtaacttattgagagttgctgcttggaagaaaggctgtttaatggtcaagattgtgatgtctgggaatgcagcagtcaaaaggagtgattgggcctcattggtacaagtgtttttaacatacagcaacagtacagagcattttgatgcatgtaagtggacaaaatcagaaccacattcctgggaattgatcttcccaatagaggtatgtggtcctaataatggttttgaaatgtggagttctgagtgggcaaatcaaacttcatggcatttgagtttccttattgacaatcccaaacagtctacagtttttgata

SEQ ID NO: 33542 - DNA, 312 bp, Glycine max
  Clone ID: LIB3138-016-Q1-N1-C2
tgaatatgtcaagccttactttagtggttctaaattgaaaagctgtctagctaggcataacatcaccattactgatggtattgacaaaactagtgcaactttgcaatttagaaagttagcagattgtgattttctcaagagaaactttaagcacatgtctaaagttttgtgggtggcttctgaagacaaggcgagtttatggtcacaactccattatgtatcgagtaataatctggaaatgcaagaagcttatcttgtcaatctcgtaaatgtgttacgagaattgtatatgcacagtccagaagaagctcg

SEQ ID NO: 33543 - DNA, 398 bp, Glycine max
  Clone ID: LIB3138-016-Q1-N1-C3
ctacctagctttcggtcgagagatggagaacgatgcctcgaactctaagttcatggaccgcttgcgtcctaggattgcagcgggctagaaagaagttacaaaagccgaatgagtagtcactggtattttgcgaaggttatggataaggttttaaattgcgggtatggtcgctgattcatcgcattccttgatattgctggaaattgcggacaaatgccactgaggtggccataattgcagttgcgttacagtcatagacatccccataacggattgagaaaatggagaaattgttaagggaacctacagggggatcattgggcagggaattttaccaaaaactggctcgaagttcaactattccttctgtcgtgctgggaagcctatcataaaatgac

SEQ ID NO: 33544 - DNA, 426 bp, Glycine max
  Clone ID: LIB3138-016-Q1-N1-C4
tttgattctagcaagcagagcttttgtcagttttctattgaccttctcggtggaggaatcttagtggacaaaactggagattggatcacacttatacaaaattctccaattagtaacttgttgagagttgctgcttggaagaaaggctgtttaatggtcaagattgtgatgtctgggaatgcagcagtcaaaaggagtgattgggcctcattggtacaagtgtttttaacaaacagcaacagtacagagcattttgatgcatgtaagtggacaaaatcagaaccacattcctgggaattgatcttcccaatagaggtatgtggtcctaataatggttttgaaatgtggagttctgagtgggcaaatcaaacttcatggcatttgagtttccttattgacaatcccaaacagtctacagtttttgat

SEQ ID NO: 33545 - DNA, 409 bp, Glycine max
  Clone ID: LIB3138-016-Q1-N1-C5
gtggtggcagcccacatactgcaggagacggcttttggaaaaagttatgcatcagataagcttagtggggcaagaagattgcgtgatgccatagttcttgggtatcaactccaaagggcccctggtcgagatattacaatcccagaatggtatgcaactgctgaaaaccaacttggccgcacaacacctggttcccctgtggatgatggaagatctgcgtttagcttggacattgaaaactttgacattcttcatggagatattcaaggacttccagatactgtggcattcttacagaacctatctgaattacaggacaagcacacaaagcgggagcgtaaggctgcggctaatctcttcaactgggaagaagaaatatttgtgacaagagctcctggaaagttggacg

SEQ ID NO: 33546 - DNA, 423 bp, Glycine max
  unsure at all n locations
  Clone ID: LIB3138-016-Q1-N1-C6
gttgtaactcgttcttcttcttttgttgttctgtgtttgtgtttgttttttctctcacctgaaaatgtcttgctgcggtggtaactgtggttgcggaagctcctgcaagtgcggcaacggctgcggaggctgcaagatgtacccagacttgagctacactgagtcaaccaccaccgagaccttggtcatgggagtggcacctgttaaggctcaatttgagggtgctgaaatgggtgtgcccgctgagaacgatggctgcaaatgtggaccaaactgctcctgcaacccctgcacttgcaagtgaggtgttgggagagcaagcttcaagcagagatagcccttaattaggaataatgataaactattaatgtgtagctaaaaacttatgtattatgtctgngatggttttcgtgcactctggtg

SEQ ID NO: 33547 - DNA, 295 bp, Glycine max
  Clone ID: LIB3138-016-Q1-N1-C7
caaatcagagagcaccttgtcagacattctgatcaatcatcaccagagaatgtgtaagatatgacttacttcataatgtatattaaacttcccattgtatgttatttgtatcaaaatccaattaggatgtttttcttatcccatacatcacgggcaccattttgatgggagcttcaataaatattgtataagttttaagaattttaggccagcattcttttatactattttgtattacaaatttgtatatgaccaagtgactggcatgtattatcaagctactcaattacctact

SEQ ID NO: 33548 - DNA, 411 bp, Glycine max
  Clone ID: LIB3138-016-Q1-N1-C9
agataataggtcttcaaaaattggggttaggtttgataaatcaattccagatggcaatgatcttggaggcctttgtgaggaggaccgtgggttcttttgttctgcaaatcatttactacgggtagatggttctggaggggatgacgcggacaaagttgcaatcagtgatatctttgaggttacctccaatcagagtaaaagtggtccactggtgttgttcattaaagatatagagaaggcaatggttgggaactatgaagttttgaaaaataaatttgaaagcttgccaccaaatgttgtggtaattggctctcatactctgcttgacaatcggaaggagaagacccaacctggtggccttctgtttaccaagtttgggagcaatcagacagcactacttgatcttgcttt

SEQ ID NO: 33549 - DNA, 473 bp, Glycine max
  unsure at all n locations
  Clone ID: LIB3138-016-Q1-N1-D1
caaattcgctttatgctctcatattcgactgcgatggcgtgatcctcgagtctgagcacctgcatcgccaggcctacaacgatgcctttgttcacttcaacgttcgctgcccttcttcttcttctccgggcccactcaattgggacgttcaattctacgacgaactccagaacctcattggtggaggcaaacccaaaatgcgatggtactttaaggaacatgggtggcctacgtccacgttgttccagacgcctccgactaatgatgaggatcgggccaagttgattgacactcttcaggattggaagactgagagatacaaagaaataatcaagtcaggaactgtaaaacccagacctggagttctgagattgatggatgaagctagagatgcanggaaaaagctagctgtttgctcagcagcaactaaaagttcagttattctttgtcttgaaaaccttataggaattgag

SEQ ID NO: 33550 - DNA, 439 bp, Glycine max
  Clone ID: LIB3138-016-Q1-N1-D10
gtttggagagttgaatgtggaatcccttctggatttccgctcacagttatttgcaatagcatttttaatgagatgctcattagatatagctatgaaaaattactgcgccaggctaaagctccaagtatgtttttacaatccttcaaaaattttgtttctttgtgtgtgtatggtgatgataacttaattagtgttcatgaatatgtcaagccttactttagtggttctaaattgaaaagctttctagctagtcataacatcaccattactgatggtattgacaaaactagtgcaactttgcaatttagaaagttagcagattgtgattttctcaagagaaactttaagcagatgtctaatgttttgtgggtggctcctgaagacaaggcgagtttatggtcacaacttcaatatgtttcgtgtaataatctggaaatgc

SEQ ID NO: 33551 - DNA, 434 bp, Glycine max
  Clone ID: LIB3138-016-Q1-N1-D11
attttccagtggattcttggttaccaatttttgtgaattgtctttatcctgtaagtcaattaccttcagaagctgtcgttgtaaatgttacatgtggtagtggacgtggtggtttacccaccactgcttggattagttctgcagttaacaatcgctcctcagatatcaacaaaaggattcgcacagcacttgggaaaggtaagaaaattgtttttcttactagagttgatccttttccagtagctttactggctgttctttttggcgttaagaatgaaattctgagttctaacgccactaatcctatgctgacgcgactttttgagaactgtgagagtctcaaatatctggttgatgagtgtccttttgcaattgtgaactagtatgtagtattttattcacttaaataaaacgctttactatttgcaatgagt

SEQ ID NO: 33552 - DNA, 315 bp, Glycine max
  Clone ID: LIB3138-016-Q1-N1-D3
caaagacaatgttggattttttctcttccactagaactacatactacccttctatagttctgttgttataggagctaattaactgctccaacaaccacaaagagactgaaagaacagcaatggaagctgcattatgcagtgcacttgctctttcacccaatcaagtattcaatgcagcaaatcctggagataaaaatgttcctttgaaatatagcaaagatcggagtgttgtaatgacagtggcagccactggaatattaaggaaaggtggttggttgttggagaggccaaccatagagacaacattacctggtc

SEQ ID NO: 33553 - DNA, 451 bp, Glycine max
  Clone ID: LIB3138-016-Q1-N1-D4
ctttgatggaaattttccagtggactcttggttaccaatttttgtgaattgtctttatcctgtaagtcaattaccttcagaagctgtcgttgtaaatgttacatgtggtagtggacgtggtggtttacccaccactgcttggattagttctgcagttaacaatcgctcctcagatatcaacaaaaggattcgcacagcacttgggaaaggtaagaaaattgtttttcttactagagttgatccttttccagtagctttactggctgttctttttggcgttaagaatgaaattctgagttctaacgccactaatcctatgctgacgcgacttcttgagaactgtaagagtctcaaatatctggttgatgagtgtccttttgcatttgtgaactagtatgtagtattttattcacttaaataaagcgcattactatgtgcaatgaagtgtgtt

SEQ ID NO: 33554 - DNA, 212 bp, Glycine max
  Clone ID: LIB3138-016-Q1-N1-D5
tgtatcgaaagatggtaatgcctctgttgagactgatgtacctttccctgctgattactctgagcttctggaacaagccagagtagctgcagatttggctataaaggataacagacagctaatggagattgagtttcccacagctggactcgggtctgtgccaggtgatggggaaggtggaattgaaatgactgagagcatgcaattgattc

SEQ ID NO: 33555 - DNA, 441 bp, Glycine max
  unsure at all n locations
  Clone ID: LIB3138-016-Q1-N1-D6
ggctcttctcttttcagcaccttaccttattccaatccaatagcaaggagtcaccaaaatagtgtgattcatggctgcaacgaatgcgtcaatctttgcatcttccacgcaatcatgcttgcctgtgtctcctaccatttcaaacacgcttgttagtccttttctcaatgtttcgtcaccaagaagttaccttgtgaagaaaaagcatgtgaaatttagcaaacacatcagtgctgctgctgttgcaacaacaacaacaactgaggaaattcaagagtacaaattccccgtcttaataccttttccatgatctacttttgtctttccttcacttcacaatgatagtgtcacctgcaatgggaaaaaagagcatggaaattaaataatgaataggtgatggggatggtattngagttgtagtgtttgtgctttaagaatttt

SEQ ID NO: 33556 - DNA, 485 bp, Glycine max
  unsure at all n locations
  Clone ID: LIB3138-016-Q1-N1-D8
attggtttaaaatcatgcgtcccactaatttgggaatagaacttaccaaatgaggaaggagactcagatttaatgggacctatataaatttcacccaaatagtgtgtgtggtactaacatttattatagtctattgaaggtgtgctatgttgtatgtagtgactgcatagtttagtttgagaaataaatgcatagactaattaatgaatgaaacatgtgtatcaggacgtgttgataatgtgtacggtgaccgcaacctcatttgcacccttctcccagcatcacaggctgttgaagaacaagcagctgccacagcataatgtgttcaaatgacaactattttcatttcccgttgtacataaactcttattcctattcatacagntcttgcacttgttgaatatngcttcatcatatgtgacaatgatgataatccactgctcttaagtttcatccaatcacaggaaaaaaaaaaaaagtaattc

SEQ ID NO: 33557 - DNA, 422 bp, Glycine max
  Clone ID: LIB3138-016-Q1-N1-D9
gtcataacatcaccattactgatggtattgacaaaactagtgcaactttgcaatttagaaagttagcagattgtgattttctcaatagaaactttaagcagatgtctaatgttttgtgggtggctcctgaggacaaggcgagtttatggtcacaacttcattatgtttcgtgtaataatctggaaatgcaagaagcttatcttgtcaatctcgtaaatgtgttacgagaattgtatttgcacagtccagaggaagctcgccaattgagaaggaaagctctctctcgtattgaatggctgcaaaaagctgatgtgcctaccatagcacagattgaagagttccattcgatgcagaggatgatgaatgctcctgattcaaatgataatattgatttactgttgagcattgatttgtgggtttac

SEQ ID NO: 33558 - DNA, 478 bp, Glycine max
  unsure at all n locations
  Clone ID: LIB3138-016-Q1-N1-E1
caggacctattgtgttttaaatccacaaaatccttttgtgttaaataggtgggtgggaaaattgactttcccccagggcacttcccgaagtgttaagagaatgcctctttctatagggggaggagctggtgcaaagaatgctattctcatgaatatgccaaatgctgttctttcaatgtggagatattttgttggagatctcgtctttgaagtttctaagatgacttctccctacattaaatgtacagtctctttcttcatagcatttggaaatttggctgatgataccatcaattttgaggcttttccccacaagctggtgcagtttggagagattcaggaaaaagttgtattgaaattttcacaagaggaatttcttacagcttggtcaactcangtgcgtcctgcaacaactcttgtggctgatgggtgttcatanttgtatgcaatggtgcatgatagttcagtgtctacaata

SEQ ID NO: 33559 - DNA, 477 bp, Glycine max
  Clone ID: LIB3138-016-Q1-N1-E10
gcatgggatttgtgtcactgcacacactccactaggaggtgctgcagcaaatgctgaatggtttggaacagtttcatgtttggatgaccaagttctcaaaggtctggctgaaaaatacaaaaagactgccgcccagatcagccttcgctggggaattcaaaggaacactgtggtcattcctaaatcgtcaaaactggagaggttgaaagagaactttcaggttttcgattttgagttgtctaaagaggacatggagctcattggaagtatagatagaaaatatcgaaccaatcaaccagctgtgttttggggcatagatttgtatgcgtgagaatgcccttcctaagtctgtatcatggctgtttgaccttgtgttaagattcagatttggtataagctgatctttcaggctccttagtagctcagtttatttgataatgtaaactttcttttgtgatggttgaaaaatcatcttct

SEQ ID NO: 33560 - DNA, 438 bp, Glycine max
  unsure at all n locations
  Clone ID: LIB3138-016-Q1-N1-E11
cataaccataccataccataccagaaaattaaactgaagtgagagagagatgacagtactgtctccttctctttctcggcctaagttgcaatcttcctttctttgttgccctctcaaatattctaagcctacaaatagaaatattcaaccaaaacccacttcttatccacgcattagagctttggaccttgatcaaaacacggtagtggctataagtgtaggtgttgttagtgtggctgttgggattggcattccagtgttctatgaaacccaaattgataatgctgctaagcgagaaaacacacagccctgtttcccatgcaatggatctggcgctcgtaagtattttcctcttcatcatttntcatacttaaagcttggactctatagggaaattaaattttcaatgttgaccattattaaagcangtcacaattt

SEQ ID NO: 33561 - DNA, 452 bp, Glycine max
  unsure at all n locations
  Clone ID: LIB3138-016-Q1-N1-E12
caaaatccttttgtgttaaataggtggatgggaaaattgactttcccccagggcacttcccgaagtgttaagagaatgcctctttctatagggggaggagctggtgcaaagaatgctattctcatgaatatgccaaatgctgttctttcaatgtggagatattttgttggagatctcgtctttgaagtttctaagatgacttctccctacattaaatgtacagtctctttcttcatagcatttggaaatttggctgatgataccatcaattttgaggcttttccccacaagctggtgcagtttggagagattcangaaaaagttgtattgaaattttcacaagaagaatttcttacaacttggtcaactcangtgcgtnctgcaacaactctgttggctgatgggtgtccatatttgtatgcaatggtgcatgatagttcagtgtctacaat

SEQ ID NO: 33562 - DNA, 284 bp, Glycine max
  unsure at all n locations
  Clone ID: LIB3138-016-Q1-N1-E2
gtggaaaggacgcacctgctgttggcttgttgttcaatgcatggcaacttgtaagaaagatgtttggagaggttgaatgtggaatcccttctggatttccgctcacagttatttgcaatagcatttttaatgagatgctcattagatatagctatgaaaaattactgcgccaggctaaagctccaaatatgtttatacaatccttcaaaaattttgtttctttgtgtgtgtatggtgaatataactcaattagngatcaagaatgtgtcaagccttactttagt

SEQ ID NO: 33563 - DNA, 468 bp, Glycine max
  unsure at all n locations
  Clone ID: LIB3138-016-Q1-N1-E3
ctcgagccgattcggctcgagcccgcttgtgcctgaaattgcccacatgtacaagactgacagggctaagtatgaagccactgctcgtagctggacacagaagtatgccatgggatgatcatgctcctcctttagctgcacaatcatgatttttatgaagaaacaaaatttacttttaatgaatgttttatctttttttgtcagtgtaaatcaaccatggtaagggaattgattgtcactttgtgaatatttctttgcaagacatcggtcatggtctcatggaagaaattgtattataatgtcacaatttttctgcttgttgactagctattctaaatgatggtaatcaaattatagttaggaacaggtactatcggcttattgacgtggaatttgatctttttgggcttgggacaaaaaaaaatctcgagtgggattataaaatcatcaaatagactncttatttta

SEQ ID NO: 33564 - DNA, 485 bp, Glycine max
  Clone ID: LIB3138-016-Q1-N1-E4
atgataagcttgtgttggctaacacacaagaattctttgatggaaattttccagtggattcttggttaccaatttttgtgaattgtctttatcctgtaagtcaattaccttcagaagctgtcgttgtaaatgttacatgtggtagtggacgtggtggtttacccaccactgcttggattagttctgcagttaacaatcgctcctcagatatcaacaaaaggattcgcacagcacttgggaaaggtaagaaaattgtttttcttactagagttgatccttttccagtagctttactggctgttctttttggcgttaagaatgaaattctgagttctaacgccactaatcctatgctgacgcgacttcttgagaactgtaagagtctcaaatatctggttgatgagtgtccttttgcatttgtgaactagtatgtagtattttattcacttaaataaagcgcattactatgtgcaatgagtgtgttt

SEQ ID NO: 33565 - DNA, 364 bp, Glycine max
  Clone ID: LIB3138-016-Q1-N1-E5
gaaacaagctctataggaaggagctagcacttgcacttcttttgctcacagcatctgcaagaagtcttttgtcagcacatggtgttcacttctattttttgctcttccaaggattgtcatttctcataatgggtctggacttgattggtgagcaagtgagctgaaataactaataaggattggaaattgttttacttgtttttgacaccaatacttttggttgaatccagattttagttgaagttcattaagatacaatcgtaagattacatagcagctggcaagacaatgaaatatatagattaaagttgattgtcccatcataaaatataaaaaataatgataataataagcattgaggatc

SEQ ID NO: 33566 - DNA, 459 bp, Glycine max
  Clone ID: LIB3138-016-Q1-N1-E6
aatccacaaaatccttttgtgttaaataggtggatgggaaaattgactttcccccagggcacttcccgaagtgttaagagaatgcctctttctatagggggaggagctggtgcaaagaatgctattctcatgaatatgccaaatgctgttctttcaatgtggagatattttgttggagatctcgtctttgaagtttctaagatgacttctccctacattaaatgtacagtctctttcttcatagcatttggaaatttggctgatgataccatcaattttgaggcttttccccacaagctggtgcagtttggagagattcaggaaaaagttgtattgaaattttcacaagaggaatttcttacagcttggtcaactcaggtgcgtcctgcaacaactctgttggctgatgggtgtccatatttgtatgcaatggtgcatgatagttcagtgtctacaata

SEQ ID NO: 33567 - DNA, 344 bp, Glycine max
  Clone ID: LIB3138-016-Q1-N1-E7
gcaaatgtaaatggttatagttgatgaagaaaaaaaagaaaaattgtctctctgaaaaaaaaaaaaaaaaaaaaaaaaaaaaaaaaaaaaaaaaaaaaaaaaaaaaaaaaaaaaaaaaaaaaaaaaaaaaaaaaaaaaaaaaaaaaaaaaaaaaaaaaaaaaaaaaaaagggggcgccccccacctagggaccccgcccccccggaaataaattccggaccgggcccggaaggcgaacaaattttcctaaaagggagactaataaaacctgggcaaaaaaatggcaaaaccggttcccgggggaaaatggtattccgtcaaaaatcccacaaaaaatacaaccc

SEQ ID NO: 33568 - DNA, 367 bp, Glycine max
  Clone ID: LIB3138-016-Q1-N1-E8
cttcattatgtttcgtgtaataatctggaaatgcaagaagcttatcttgtcaatctcgtaaatgtgttacgagaattgtatttgcacagtccagaggaagctcgccaattgagaaggaaagctctctctcgtattgaatggctgcaaaaagctgatgtgcctaccatagcacagattgaagagttccattcgatgcagaggatgatgaatgctcctgattcaaatgataatattgatttactgttgagcattgatttgttgggtttacaaggagcaggtaaagcttttccaaacaaaattgtttttgatgataagcttgtgttggctaacacacaagaattctttgatgggaaatttccagtggatt

SEQ ID NO: 33569 - DNA, 357 bp, Glycine max
  Clone ID: LIB3138-016-Q1-N1-E9
ctgtgaggccagcttttacatagatgcacacgggatgagatcctagagctccctccaaaagcagaggtgattgcttggtcagaaatgactggagttgagatgtttagctatggagaccacatgtttggcatccaaagccacccggaattcacctatgaccttctcttgttctttattgaccgtattattcagcgaaatttggtccaagaagcgtttgctgtggatgcaaaagttaaagcggcatcgcaagaaccagataaagagatattgaaaagattgtgcgttgattttctaaagggtcgattgtgactgacaattcaatatgaatagacaaataatatttttgagatattatta

SEQ ID NO: 33570 - DNA, 218 bp, Glycine max
  Clone ID: LIB3138-016-Q1-N1-F1
tatgccagctttttctgttccacaggctactgccagatcttctgaaaatgcggaatcctctgcatgatctggaatttgtgttttctttcgcttgttcgtttgtttaattcaataaaggaaattaggcatgaccctcttgttgagtatgctctgcctatttgaaaatttccacacctcttttaattgtcgtaatgatgtgtgaagtgtgtgttattttt

SEQ ID NO: 33571 - DNA, 369 bp, Glycine max
  Clone ID: LIB3138-016-Q1-N1-F11
ctcatctgaaccggaaaagaagatcatggaccacaggcttctggaattggagaagcagcttctggaagataacgacgacgaaggagaagctgatgctgcgtctgtgataaccacgagcgagtggtccgagacttatcagaatttaatcagtcccagtccggttcagaaaccggttttgacgacgacgtcgccgacttcttccacgacgtcgtccacgtcatcttcttcctccgtggcttcgcctgcttccggatgctccaagcaaacgctcatggaagccgcatctgcaattgttgaaggtaaacacgatgttgcggcggagatcctgaaccggttgaacggtgtgaaccggagtgataggttgacgga

SEQ ID NO: 33572 - DNA, 254 bp, Glycine max
  Clone ID: LIB3138-016-Q1-N1-F12
gtggagggagcattcatgataaatggtgatacctaacttagcgatatatatatgtatattcttcagaggcatatgcacgtgaacaaacacaaattgttcggaaacttgtttctgagcacaatggctcagattttgtattcgcagaagaacctgaagcaaaaaaagaactttggaaggtaaggaaagaggcactctgggcttgctttgcaatggaaccaaatctggtggcaatgactacaggggggggggggggg

SEQ ID NO: 33573 - DNA, 342 bp, Glycine max
  unsure at all n locations
  Clone ID: LIB3138-016-Q1-N1-F2
ccgacatggaacttccggtgggatcatcgagggcgtgtagctggtgaagatactgctgtaacttggttttctaacgatattagtgggaataatggattggagaataaaaatgaatcctcatatgtatcagaggatggagacccgttgcagaattatcaaattcaaaggaatagattgcaaaaatctccaatctctgaaggaactgctagaaatgtgataaattcatcttctgatcaaactatttcaaggaatgtctccataaaggtgagcatagaacaggtgaaggaattggctgaatcatcaactntatcatgtccatatcccgcaaaacttccacattca

SEQ ID NO: 33574 - DNA, 407 bp, Glycine max
  Clone ID: LIB3138-016-Q1-N1-F3
tccattggttcttcatctgcatgcacacacttgcatagttttggaaaccaagaatttttgaagggtagcatcaacaagaagttctggaaatggagatcaccaatgtcagcgagtatgaagctattgcaaagcagaagttgccaaagatggtgtttgactactacgcatctggtgcagaggaccagtggactctgcaggagaacagaaatgccttttccagaattttgtttcggccacgtattcttattgatgtgagcaagatagacatcacaactactgtcctgggcttcaaaatatccatgccaatcatgcttgccccaacagccatgcaaaaaatggctcatcctgagggagaatatgcaacagcaagagctgcatctgctgctggaacaatcatgactttgtct

SEQ ID NO: 33575 - DNA, 416 bp, Glycine max
  Clone ID: LIB3138-016-Q1-N1-F4
agaagctgtactaaatgctcttttgatctttgtctcatctgttgccgggagcttcgtaatgggcagcttgtaggtggtgcagatccaattgagtgggagtttgtctttcaaggtcatgattacatgcatgctcaaaaagaaaaggctctaaaggaaagaaaaatggtaaagcaaaatgcatcaaatgctgatgctaagcctgaggttcgtgaatggtcaagatgtgggtggcatgcagaaagtaatggtaacattccttgtccaaaagtcaatggtgaatgtaaccatggtttccttgaactgagaaccatattaggcaaacattttatcactaagatagtgcataaagcaaacaaactagcacaggcattcactcttcaagatgtagttaagaaccctgacaacttctgttcatg

SEQ ID NO: 33576 - DNA, 405 bp, Glycine max
  Clone ID: LIB3138-016-Q1-N1-F5
tttgaagtttctaagatgacttctccctacattaaatgtacagtctctttcttcatagcatttggaaatttggctgatgataccatcaattttgaggcttttccccacaagctggtgcagtttggagagattcaggaaaaagttgtattgaaattttcacaagaggaatttcttacagcttggtcaactcaggtgcgtcctgcaacaactctgttggctgatgggtgtccatatttgtatgcaatggtgcatgatagttcagtgtctacaataccaggtgattttgtcattggtgtcaagttgacaaccataaacaatatgtgtgcatatgggctcaatcctggtatttcaagttctcgtcttttgggcaccattcctcagtccatttcacagcaaactgtttgg

SEQ ID NO: 33577 - DNA, 309 bp, Glycine max
  unsure at all n locations
  Clone ID: LIB3138-016-Q1-N1-F6
caaaattattaaagaatgtctctctagaagcaaaggaaaaaaaatnattaaaaaaaaaaaaaaaaaaaaaaaaaaaaaaaaaaaaaaaaaaaaaaaaaaaaaaaaaaaaaaaaaaaaaaaaaaaaaaaaaaaaaaaaaaaaaaaaaaaaaaaaaaaaaaaaaaaaaaaaaaaaaaaaaaaaaaaaaaaaaaacaaaaaaaaataaaaaaatagncatcctcaataaataaaggatagtgaaaaagggggggcggctccacattgcactatanccttcaagcataaaacttaaagtgcaaattctggggc

SEQ ID NO: 33578 - DNA, 344 bp, Glycine max
  Clone ID: LIB3138-016-Q1-N1-F7
gtgaggctggatgaaagaaagttctgcagtacactcgatatgcttcagttggatttgccattgtgcaggcaattggccaagttcttttcctacgtccctatgtcaatgacttttctacagagtgggttatttcttctgttatcttattgactcttggctctgtgtttacaatgtacatcggagaacgaattacagacctaaaacttgggaatggcacctctcttttgatattcacaaacattatctcgtacttgccagcttcttttggtaggacaattgctcaagcatttaatgatgcaaactacattggacttggtaccattggtttgtccttctttttgttg

SEQ ID NO: 33579 - DNA, 434 bp, Glycine max
  Clone ID: LIB3138-016-Q1-N1-F8
ggcttgcaccacccaagaccaatgcctgccatgggagccacccatagcttcataaataggatgtacccaagcaaactatatggtcaatatgggaacactgtcagatctggaatgggttatggtacacatgggtatgattctcgcactaatggacgggcttggttagctgttgacagtaaatacaaaactaggggaagaagtggtggctactttggctatggcaatgagaacgcagatggtttgaacgaactgaacagagggcctagggccaagggtggcaaaaaccaaaaaggttttgcaccaactattctggcagtcaaagggcaaactttgcctgcaactttaggcacagatgaagagaaagacaagactagtaccattctggaatgtgatcaatataacaaagctgattttccagaagaatatactgatgc

SEQ ID NO: 33580 - DNA, 333 bp, Glycine max
  unsure at all n locations
  Clone ID: LIB3138-016-Q1-N1-F9
anaaattgatgcgtgaaacgacgcacctgctgttggcttgttgttcaaggatggcaatttgtaagaaagatgtttggagagttgaatgtggaatcccttctggatttccgctcacagttatttgcaatagcatttttaatgagatgctcattagatatagctatgaaaaattactgcgccaggctaaagctccaagtatgtttttacaatccttcaaaaattttgtttctttgtgtgtgtatggtgatgataacttaattagtgttcatgaatatgtcaagccttactttaatggttctaaattgaaaaagctttctagctagtcataacatc

SEQ ID NO: 33581 - DNA, 289 bp, Glycine max
  Clone ID: LIB3138-016-Q1-N1-G1
aaaaaaaaaaaataaaaaaaaaaaaaaaaaaaaaaaaaaaaaaaaaaaaaaaaaaaaaaaaaaaaaaaaaaaaaaaaaaaaaaaaaaaaaaaaaaaaaaaaaaaaaaaaaaaaaaaaaaaaaaaaaaaaggggcctgcagaaaaacaagattatacctaaaatgagaaatttaaaaagcttggggtaattaaaggctataatttttttttgggtgaaattgtaatacagctaacaattctacacaacaaacaagccgggagcgtaaaaattaaagcctgggttacctaa

SEQ ID NO: 33582 - DNA, 294 bp, Glycine max
  Clone ID: LIB3138-016-Q1-N1-G10
atgacgtgtcatttgaattaaacttgtttgataggcttaaactaggatggtatgtgatctctgtgacatcaactccaagcaaggtccacaaagctgttgatgcatgcaagaatgttcttagaggcctgcatagcaataaaattactgagagggaattggacagggctaaacggacccttcttatgagacatgaagctgaaattaagtcaaatgcctactggttaggattattagctcatttacaagcttcttctgttccaaggaaggacatatcatgtataaggatctaacatt

SEQ ID NO: 33583 - DNA, 280 bp, Glycine max
  Clone ID: LIB3138-016-Q1-N1-G11
cgagaattgtatttgcacagtccagaggaagctcgccaattgagaaggaaagctctctctcgtattgaatggctgcaaaaagctgatgtgcctaccatagcacagattgaagagttccattcgatgcagaggatgatgaatgctcctgattcaaatgataatattgatttactgttgagcattgatttgttgggtttacaaggagcaggtaaagcttttccaaacaaaattgtttttgatgataaagcttgtgttggctaacacacaagaattctttgat

SEQ ID NO: 33584 - DNA, 325 bp, Glycine max
  Clone ID: LIB3138-016-Q1-N1-G12
aaacaatatgtgtgcatatgggctcaatcctggtatttcaggttctcgtcttttgggcaccattcctcagtccatttcacagcaaactgtttggaatcaaatggcaacagtgagaacaccattgaattttgattctagcaagcagagcttttgtcagttttctattgaccttctcggtggaggaatcttagtggacaaaactggagattggatcacacttatacaaaattctccaattagtaacttattgagagttgctgcttgaagaaaggctgtttaatggtcaagatgtgatgtctgggaatgcagcagtcaaaaggagtga

SEQ ID NO: 33585 - DNA, 340 bp, Glycine max
  Clone ID: LIB3138-016-Q1-N1-G2
catcatcaatcaatggagaacaccgagggatccagatctgcgacgaacggggtgctgcctctggcgcgcaaggtggcattgattaccggaattaccggccaagacggttcgtacctgacggaattccttctagacaagggttacgaggtgcacggactgatccgtcgctcctcgaacttgaacacgcagcgcatcgaccacatctatgtggatccccacaacgcccacaaggcccgcatgaagctgcactacgccgatctctacgacgcctactacctgcgccgatggctcgacaccatgcatcccgacgaggtctacaacctcgccgctcagtctcacg

SEQ ID NO: 33586 - DNA, 423 bp, Glycine max
  Clone ID: LIB3138-016-Q1-N1-G3
gaccttctaattctctactctctcacttctttctatcacattttacttgcaagatggcagcgtcatcagcatgccttgtagggaatggtttatctacacggggtaatagaataactctcaagaaggacttcaatggaagatatctctactcaccttggagactttcatcattgaacaataaggcatcagaagcattttccataaagtcttccttggagcaaaggcaacaacaagaagggagaagggggtttctaaaactgttgcttggaaatgtgggagttggtttgcctgcactattggcaagtggcaaagcttatgctgatgaacaaggggtttcctcctccaaaatgtcttactccaggtttctggagtatttggacaaggacagagttaaaaaagtggatctggatgaacatggaaaca

SEQ ID NO: 33587 - DNA, 382 bp, Glycine max
  Clone ID: LIB3138-016-Q1-N1-G4
cacaacacgaaacacacacatgacacaacacagcacgctgcaagaacaacaacaacaacatagccacaacacaaccaaatgacacccacaaagagggagacaaagagagacgctactacttcttcctcctctctgctcgcagaaccctgaagctccagaagccccttttcgaattaattcgcttctcttttatctaaattcattgattcttttcgtcgacatgttggagggtccaacctttcttgtttcgagggacatactgagctcttgtgagcaagagaccaggtggatctacaattccttctgtgtgatggagctcgcgagcaataagcgtcgactggaactagaagaagaagccgtgttgacaaagtcatgcaagctt

SEQ ID NO: 33588 - DNA, 298 bp, Glycine max
  Clone ID: LIB3138-016-Q1-N1-G5
atttatgatgaggctgaagcttccaaatggggtgacaacaagtgcccaaacacgatatttggctagtgtgatcaggaagtacggaaaagatgggtgtgctgatgtaacaacgaggcagaattggcaaattcgtggtgtggtgctacctgatgtgccagaaattctcaagggcctcgatgaggttggattgactagtcttcagagtggaatggacaatgtgagaaaccctgttggtaaccctcttgcaggcattgacccagatgagattgttgatacacgaccttacaacaacttggta

SEQ ID NO: 33589 - DNA, 301 bp, Glycine max
  unsure at all n locations
  Clone ID: LIB3138-016-Q1-N1-G6
ctcgagccgaatcggctcgagcggctcgagttcttattctcttgagttcccacatttttctatcttttttttttttcctttgctgaaaacctggtaacttcaactttggctaaaagcctgctaattaaactacttgaatctgaattctcgtgtgtctattctatgtgaaaatgcaaaaggggaaaattaattcgctaacattctttttttttgggctcaatattatatattattcggtgaacgaggttcagaaaatagaaacctcttttggtttctggaaactngatttactttcatttat

SEQ ID NO: 33590 - DNA, 330 bp, Glycine max
  Clone ID: LIB3138-016-Q1-N1-G8
ccaaaaaatttgtttctttgtgtgtgtatggtgatgataacttaattagtgttcatgaatatgtcaagccttactttagtggttctaaattgaaaagctttctagctagtcataacatcaccattactgatggtattgacaaaactagtgcaactttgcaatttagaaagttagcagattgtgattttctcaagagaaactttaagcagatgtctaatgttttgtgggtggctcctgaagacaaagcgagtttatggtcacaacttcattatgtttcgtgtaataatctggaaatgcaagaagcttatcttgtcaatctcgtaaatgtgt

SEQ ID NO: 33591 - DNA, 157 bp, Glycine max
  Clone ID: LIB3138-016-Q1-N1-G9
gtgacaatgctgtgacagctcttctaacaagaccaggcattgtgttcatacaaagtttaccttttcatcgactctctcaacgaattggtagggcgggggcatcacccaacatggggggaaatcccaaggttttcatacaaattggaggtttcttttt

SEQ ID NO: 33592 - DNA, 377 bp, Glycine max
  Clone ID: LIB3138-016-Q1-N1-H1
tgcagaaggttgatgctccttcagcatatgtgtgtgctggtagcaggatatatgatgccactgaatggtatatctgtcagggcatgagatgtccagcgaatactcataagccaagttttcacgtgaacacaaatttaatgtccaagcataattctggcaaaggaactagttcaggtcaaagaggtgggcatatgccaacacctaatattgaagaaaccatgactgaggaagaattatttgagtggttacagaatgcagtacatgcgggtgcatttgacaattttagtagcactgcaacagagagcccatctcccaaatctggaaatggaatgaaaagtcctggcagtagtagcgccggtgccagtgctggtgctggt

SEQ ID NO: 33593 - DNA, 281 bp, Glycine max
  Clone ID: LIB3138-016-Q1-N1-H10
ctgtttaatggtcaagattgtgatgtctgggaatgcagcagtcaaaaggagtgattgggcctcattggtacaagtgtttttaacaaacagcaacagtacagagcattttgatgcatgtaagtggacaaaatcagaaccacattcctgggaattgatcttcccaatagaggtatgtggtcctaataatggttttgaaatgtggagttctgagtgggcaaatcaaacttcatggcatttgagtttccttattgacaatcccaaacagtctacagtttttgata

SEQ ID NO: 33594 - DNA, 459 bp, Glycine max
  unsure at all n locations
  Clone ID: LIB3138-016-Q1-N1-H2
ctctcattcaagacaggcctgtctttgctgcccctgcccccatcatcaccccaactgtgagagaggatatggcaaaggaatacgagcaagctattgaagaactccagaaattgttgagggagaagagtgaactcaaagccacagctgctgagaaagtggagcagataacagcttctctgggaacatcatcatctgatggcatcccatcatcagaagcctcagacaggatcaaagctggtttcattcacttcaagaaggagaaatatgacaagaatccagctttgtatggtgaacttgccaaaggccagagccccaagtttatggtgtttgcttgctcagactcaaaggtgtgcccatctcatgtgctagatttccaaccaggagaggcctttgtggtcagaaatgttgctaacatngtcccaccatatgaccagtcaaaatacgctggaaactgggcag

SEQ ID NO: 33595 - DNA, 399 bp, Glycine max
  Clone ID: LIB3138-016-Q1-N1-H3
cccttacgcactcctagaagacgaaagggtccacatattgtggaggtgatatagccatcttgcttgcatcatggacaaatgttggtccaaaataaaagtaaagagcagaaaaggttgcaacaattatgaggatccttacgcactcctagaagacgaaaggatatctcagatagcacctcggctaaactaaaggcaagactacagtacacatacttagctcttaggaatgtagttgcatatatcaaatttctgtttactttgcctttgttgatttagttccattgtaaaatgtcatccaggatcaacttgttatctattttgccttcatcattgactcaaaattctttccaactgccttttccgttttgcatagatatatgtataatttaaatctaaatg

SEQ ID NO: 33596 - DNA, 364 bp, Glycine max
  Clone ID: LIB3138-016-Q1-N1-H4
tgtttttacaatccttcaaaaattttgtttctttgtgtgtgtatggtgatgataacttaattagtgttcatgaatatgtcaagccttactttagtggttctaaattgaaaagctttctagctagtcataacatcaccattactgatggtattgacaaaactagtgcaactttgcaatttagaaagttagcagattgtgattttctcaagagaaactttaagcagatgtctaatgttttgtgggtggctcctgaagacaaggcgagtttatggtcacaacttcattatgtttcgtgtaataatctggaaatgcaagaagcttatcttgtcaatctcgtaaatgtgttaccagaattgtatttgca

SEQ ID NO: 33597 - DNA, 187 bp, Glycine max
  Clone ID: LIB3138-016-Q1-N1-H5
tgtttaaacctaattctcatttcttcatcgttcgattcttctcctcctaaagatgcagatcttcgtgaaaactttgaccggtaagaccatcacccttgaggtggagtcctccgacaccatcgataacgtgaaagctaagattcaagacaaggaaaggatcccacctgaccagcagagacttatcttt

SEQ ID NO: 33598 - DNA, 404 bp, Glycine max
  Clone ID: LIB3138-016-Q1-N1-H8
cggcataacctaaacctatctttcttctctctctgtgtgtgcgcttcaacggcaaccagaagcagccatggccactgcaaggactgtgaaggatgtttcacctcatgagttcgttaaggcgtactcctctcacctcaagcgatccggcaagatggagctgccagagtggactgatattgtgaaaactgcaagatttaaggagttggctccttatgatcctgactggtactatgtcagagctgcttccatggcaagaaagatctacttgagaggaagacttggtgttggtgcctttcagaagatttatggtgggagcaagaggaatggtagtcgccctcctcatttttgcaagagcagtggtgccattgctcgtcacattcttcaacaagtgcagaacatgaaca

SEQ ID NO: 33599 - DNA, 95 bp, Glycine max
  Clone ID: LIB3138-016-Q1-N1-H9
gaaaagtcccttcatgtcctttcactctgacagttctgattgttctacccggtgatgtaaggcgaaaggctcacatgaaggttggattaaatata

SEQ ID NO: 33600 - DNA, 259 bp, Glycine max
  Clone ID: LIB3138-017-Q1-N1-A1
gaaattttcacaagaggaaatatttacagcttgctcaacttaaggtgcgtcctgcacaaactctgtggcatgatgggtgtccatatttgttttcaaaggtgcatgatagttcagtgtctacaataccaggtgattttgtcattggtgtcaagttggcaaccataaacaatatgtgtgcatatgggctcaatcctggtatttcaggttctcgtcttttgggcaccattcctcagtccatttcacagcaaactgtttgaat

SEQ ID NO: 33601 - DNA, 203 bp, Glycine max
  Clone ID: LIB3138-017-Q1-N1-A10
taacttcttcccccctacttctactcaaaccatggtatgagacacaaaatcatgttcaaacacaacccaagtaccaaaccatgattttccctaactttttatttgtaatgaaagttagtttactcagccaaactaggatttggggtgtgtgatctatgatcagaatgttctcttaatagtttggaatatttctgaattttagg

SEQ ID NO: 33602 - DNA, 326 bp, Glycine max
  Clone ID: LIB3138-017-Q1-N1-A12
ggctgtttaatggtcaagattgtgatgtctgggaatgcaacaggcaaaaggagtgattgggcctcattggtacacgtgtttttaacaaacagcaacagtgcagagcattttgatgcatgtcagtggacaaaatcagaaccacattgctgggaattgatcttcccaatagaggtatgtggtcctaataatggttttgaaatgtggagttctgagtgggcaaatcaaacttcatggcatttgagtttccttattgacaatcccaaacagactacagtttttgatattctcttgggaatctcttaagattttgaaattgctggtaatac

SEQ ID NO: 33603 - DNA, 153 bp, Glycine max
  Clone ID: LIB3138-017-Q1-N1-A3
gaaaaaaaaagaaaattctctttttttgtgattttttatttgtttgcacacccttcctgaaatctagagacaagccgcaaaattaatccatacccagaatttctctcttctgaatatcttgtgggggttatcttgtttttggtggttttggtt

SEQ ID NO: 33604 - DNA, 259 bp, Glycine max
  Clone ID: LIB3138-017-Q1-N1-A4
gaatgcagcagtcaaaaggagtgattgggcctcattggtacaagtgtttttaacaaacagcaacagtacagagcattttgatgcatgtaagtggacaaaatcagaaccacattcctgggaattgatctttccaatagaaggatgtgggcctaataatgggtttgaaatgtggaggttttagtgggcaaattaaactttaatggctttggagtttcttaattgccaatcccaaccagcttcaagttttggtttttttttt

SEQ ID NO: 33605 - DNA, 295 bp, Glycine max
  Clone ID: LIB3138-017-Q1-N1-A6
ggcagctggtgcttcatggattcagtttgatgagcctacccttgtcttggaccttgagtctcacaagttgcaagcattcactgacgcatatgcagaacttgcgcctgctttgtctggtttgaatgttcttgttgagacctactttgctgacatccctgctgaggcatacaagaccctcacatctctgaatggcgtcactgcatatggatttgatttggtccgtggaaccaacactcttgatttgatcaagggtggattttccagcggaaaatacctctttgctggagtggttgat

SEQ ID NO: 33606 - DNA, 114 bp, Glycine max
  Clone ID: LIB3138-017-Q1-N1-A7
ggaaacgtgatgaaattgcttctcaatataatgctggtggatatatacctcagcaagatggagctggagatgctgcttctcaaatttggaaattgaagtgtttgggggggcatg

SEQ ID NO: 33607 - DNA, 172 bp, Glycine max
  Clone ID: LIB3138-017-Q1-N1-A9
ataagatattgaagtagtgctaagtgcctaacacctgcagtgaacaatggcctctgcatcagcatctcttctcaagtcttcacttgttcttgacaagtctgagtgggtgaagggacaaacacttcgccaaccttctgctgcatcagttgtgagatgcaaccccaccacccca

SEQ ID NO: 33608 - DNA, 320 bp, Glycine max
  Clone ID: LIB3138-017-Q1-N1-B10
gcgttgccattctcatcctcttctttctctctctaccattgccatggatccctacaagcaccggccatccagcgccttcaattctcccttctggactacaaattctggtgctcctatttggaacaacaactcctctttaaccgttggagctagaggtccaattctgctggaggattatcatcttgtggagaagcttgcaaattttgatagggaacgtatcccagaacgtgttgtccatgccaggggcgctagtgcaaagggtttctttgaggtcacccatgacatttctcacctgacatgtgcagatttccttcgagccc

SEQ ID NO: 33609 - DNA, 215 bp, Glycine max
  Clone ID: LIB3138-017-Q1-N1-B11
caaagcatctaataccctcgtttgatagatctgttataagagacactttggggatcggtgagatttacgcgaactcatggatgaacttcggtggagccaccaatgaccgaagcttgaatgtgtgggattccctcggtggaagtcaaaccgatttggttaaagggttgttcgagttgacaccgttggatatcaagaagctgaagaaattagcggag

SEQ ID NO: 33610 - DNA, 335 bp, Glycine max
  Clone ID: LIB3138-017-Q1-N1-B2
aatccttcaaaaattttgtttctttgtgtgtgtatggtgatgataacttaattagtgttcatgaatatgtcaagccttactttagtggttctaaattgaaaagctttctagctagtcataacatcaccattactgatggtattgacaaaactagtgcaactttgcaatttagaaagttagcagattgtgattttctcaagagaaactttaagcagatgtctaatgttttgtgggtggctcctgaagacaaggcgagtttatggtcacaacttcattatgtttcgtgtaataatctggaaatgcaagaagcttatcttgtcaatctcgtaaatgtg

SEQ ID NO: 33611 - DNA, 294 bp, Glycine max
  Clone ID: LIB3138-017-Q1-N1-B3
atgataactcaattagcgttcatgaatatgtcaagccttactttagtggtcctaaagtgaaaagctatctagctagtcataacatcaccattactgatggtattgacaaaactagtgcaactctgcactttaaaaagttagcagattgggattttctcaagagaaactttaagcagatgtctaatgttacgacggtggctcctgaggacaaggcgagtttatggtcacaacttcattatgtttcgtgtaataatgtgcgaatgcaagaagcttatcttgtcaatctcgtaaatg

SEQ ID NO: 33612 - DNA, 279 bp, Glycine max
  Clone ID: LIB3138-017-Q1-N1-B6
gcaaaaagacagagggttaattgtggagtattttggaaggatgtcttacgttgctcataacgttaatcagccccaagagaaagatttgttggagggaaatttttcctttgatattaaatctcgctctagattggaaaaagtttcctctacaaaagcacaatttgttagtggaaaaaccttcaaatatgatataattggtgcttgttcacattcttcagaagatttttcttgaaaggaagatctagaaaaacccaaaaagattgatgccagattgagaca

SEQ ID NO: 33613 - DNA, 206 bp, Glycine max
  Clone ID: LIB3138-017-Q1-N1-B7
acaatttttaatgccacttatcatgtggaattgctgggtgaacatgacgccctttctttgttctgtcaccatgcttttggacagaaatcaattcctatgggtgctaatgtgagtttggtgaagcaggttgtggctgagtgtggaaggcttccactggctctgaaagtgattggagcttctttgcgagaccagaacgaaatgttttg

SEQ ID NO: 33614 - DNA, 173 bp, Glycine max
  Clone ID: LIB3138-017-Q1-N1-B8
cgtcttttgggcaccattcctcagtccatttcacagcaaactgtttggaatcaaatggcaacagtgagaacaccattgaattttgattctagcaagcagagcttttgtcagttttctattgaccttctcggtggaggaatcttagtggacaaaactggagaatgggtcacact

SEQ ID NO: 33615 - DNA, 80 bp, Glycine max
  Clone ID: LIB3138-017-Q1-N1-C1
gtccttttgcatttgtgaactagtatgtagtattttattcacttaaataaagcgcattactatgtgcaatgagtgtgttt

SEQ ID NO: 33616 - DNA, 456 bp, Glycine max
  unsure at all n locations
  Clone ID: LIB3138-017-Q1-N1-C10
ggagatgagctgaacaagctgaggaaatctgcttcctttggtttcagaaacagtggggtaactgcatcatcatcatcatcccccatagcacagccagaatttggcaccgagcaggatgtctcgtgggttcattcattggttaaagatgttccctccgagaggtctgagaagcaacaatatgatcatctcagcaaagagatgcttctttcaccatgggtagaagcaacaatatgatcttcttcagtaaagagatgctgctttcaccatgggtggagcagctgtatatagagcagaagcaaatggtagcatgagcagcaagggctgctgccatgacaatgcttcttggttattctgacataagttgnttatttatttatttaattattttattcattttgaactgcttctactatccacaacattacacaatattatagttagggataggatgagata

SEQ ID NO: 33617 - DNA, 359 bp, Glycine max
  Clone ID: LIB3138-017-Q1-N1-C11
attttggaggtatatatgatacgtgggctccggggggcggagatgtaagaaaaataaccaatttgacccttagtccaagtattatatttggatatttattaaaatcaccttttgggggagaagggtggattgttagtgtggacgatttggaagatataattggggggcatgtatggttgggttccatttgtatacttggtggaatctggcatatcttaaccaaaccttttgcatgggctcggcgtgcacttgtatggtctggagaagcttacttatcttatagtttaagtgctttatctgtttttggttttattgcttgttgctttgtctggtttaataataccgcttatcctagtgag

SEQ ID NO: 33618 - DNA, 392 bp, Glycine max
  Clone ID: LIB3138-017-Q1-N1-C12
gtgagtttgtgtaagttgcgttgtgtgcgagaatgcctgcgacggactaccaaggttcgtcttctccttcatcgttaacccattttggccgttcaattctgagtcttcgtcaagaacaggttcactccatttccatggaagggtcaagcttggaggctgagttggaatcctttcagcaacacgtcactgaccggttccttgaactcacttcggttgttcatgatgatttgctttcgctctcgtgggttgggaagctccttcattgcttcctgtgttgccaagaggaattcaaggccattcttcacagccacaaggctcaggtgttgagacccccattggatcgcatggtgtctgaatactttgagcgcagtgtgaaggctttagatgtttgc

SEQ ID NO: 33619 - DNA, 165 bp, Glycine max
  Clone ID: LIB3138-017-Q1-N1-C2
ttctagcttcttgtttcatgcaagatgtatgcaactggttacgtgatataaattcatgtgaaattgcaaacagggctgtctttttatatggaacatattaaaccaaaataaaattccataccggtgcctggaggcttcccagctatctttatagtgagggcggtt

SEQ ID NO: 33620 - DNA, 291 bp, Glycine max
  Clone ID: LIB3138-017-Q1-N1-C3
ccagttcattaaacttgttttttgctagaagcaggaagagaagcgaaacaaacaaacaacaaaataatcaattgagccacttaccatcagatttagatctcccaacagagagtttctcaaaattgccaagtacccttttcaggatcaaggaagagaatcaagaaccaccaaaaggtgttgttctttgttgtagttgtttgtaactgtagcaacatgaagatggttagaaagttggttgtggtgaggcttgtgttggccatatctgtgttgagctctcttcttctgacaacc

SEQ ID NO: 33621 - DNA, 301 bp, Glycine max
  Clone ID: LIB3138-017-Q1-N1-C4
caataccaggtgattttgtcattggtgtcaagttgacaaccataaacaatatgtgtgcatatgggctcaatcctggtatttcaggttctcgtcttttgggcaccattcctcagtccatttcacagcaaactgtttggaatcaaatggcaacagtgagaacaccattgaattttgattctagcaagcagagcttttgtcagttttctattgaccttctcggtggaggaatcttagtggacaaaactggagattggatcacacttatacaaaattctccaattagtaacttattgagagttgc

SEQ ID NO: 33622 - DNA, 316 bp, Glycine max
  Clone ID: LIB3138-017-Q1-N1-C5
caactctgaaaccgttcaaatcgtacaagaagagtgtaaaaaagcttagaaaaattgggaatgcccttacaattgttgttgttgcaggatgctgttacgaagtatatgtcagagcttttacaagagaggaagctcagaaactgtaatgtcctgaaagttctggatgaagcaaatattgggagttagttttctgttttgttttattattgtggcaacaacttggacgttatgattagcaatgttagaataagcaaaaaagcatttgaaccaaaattgcttgtgcattaatagcttttccaccattccagatgtctac

SEQ ID NO: 33623 - DNA, 406 bp, Glycine max
  Clone ID: LIB3138-017-Q1-N1-C6
attttatctttattccactgaatagaacatgagcatataaatggataccctttatattatctatctttatattatctataaagggtaaagatatccgatgtgaatctatttgtttagttttctatcggtatgtatataggtgaataatccaacatgcctttttgtgaagtaaaaaaactaccctcgatccatgcctcaaaagggttgataataagtaaaaaaaatcaatgaattcatgataaaacccttctgcgtttttttattataaatttttttgtcaataaagggatcaaagggttgggggatcaaatggtaaagttcttttgttggtaaattggaggattagaaacatgactattgctttccaattagcttgttttgcaataattgctatttcatttatttt

SEQ ID NO: 33624 - DNA, 276 bp, Glycine max
  Clone ID: LIB3138-017-Q1-N1-C7
gcagtcaaaaggagtgattgggcctcattggtacaagtgtttttaacaaacagcaacagtacagagcattttgatgcatgtaagtggacaaaatcagaaccacattcctgggaattgatcttcccaatagaggtatgtggtcctaataatggttttgaaatgtggagttctgagtgggcaaatcaaacttcatggcatttgagtttccttattgacaatcccaaacagtctacagtttttgatattctcttgggaatctctcaagattttgaaatt

SEQ ID NO: 33625 - DNA, 265 bp, Glycine max
  Clone ID: LIB3138-017-Q1-N1-C8
ctcagtccatttcacagcaaactgtttggaatcaaatggcaacagtgagaacaccattgaattttgattctagcaagcagagcttttgtcagttttctattgaccttctcggtggaggaatcttagtggacaaaactggagattggatcacacttatacaaaattctccaattagtaacttattgagagttgctgcttggaagaaaggctgtttaatggtcaagattgtgatgtctgggaatgcagcagtcaaaaaggagtgatt

SEQ ID NO: 33626 - DNA, 319 bp, Glycine max
  Clone ID: LIB3138-017-Q1-N1-C9
gacaaaactggagattggatcacacttatacaaaattctccaattagtaacttgttgagagttgctgcttggaagaaaggctgttttatggtcaagattgtgatgtctgggaatgcagcagtcaaaaggagtgattgggcctcattggtacacgtgtttttaacaaacagcaacagtacagagcattttgatgcatgtaagtggacaaaatcagaaccacattcctgggaattgatctttccaataaaggtatgtggtcctaataatggttttgaaatgtggagttcttagtgggcaaatcaaacttcatgggattttg

SEQ ID NO: 33627 - DNA, 392 bp, Glycine max
  Clone ID: LIB3138-017-Q1-N1-D1
gttgccttcattttctcggaaaattcttcttttccgagaaatttcgcgtttttactggtgaatcgataattcacaaatcgggggtgtctgaaattcaaagctgttgttgttgttggctgctggggttagtctctgtggaggtttgggtgttttctgaggcagagccgattctcattttgctccaatggagatgcaggaccaaatagaaagcacaagatcaaccatatttggctcagctagtaacatccattccaatggtgaaaagcaatcccaaaatgttgctcatataccttctgttggaaacaaccaaactcccaaggtgaggaaaccatataccattacttaacaaagggagaagtggactgaggaagagcattaaaagtttcttgagc

SEQ ID NO: 33628 - DNA, 325 bp, Glycine max
  Clone ID: LIB3138-017-Q1-N1-D10
aaatggcaacaaccactgtgatcatgaccactctcccccaattcagtggtctgagacctgaattctcagctgcccctgtgaagaacttggatgctgttcaacaacctatgaggcccaaggggaagggtgctttgggagctcgctgtgactacataggttcatccactaatctgattatggtggctattacaaccctgatgctgattgctgtaaggtgcggatcggctccatcagcaaacaggaaagccacttcacggctaatgctataagggagggacttaggcttgccaactggtgaccctgctggctttaccctaagtgacac

SEQ ID NO: 33629 - DNA, 424 bp, Glycine max
  Clone ID: LIB3138-017-Q1-N1-D11
ttggaatgtttggcaatgcactttagattattccggagttcaaaagctttccactttctaccaattatatgcatttagagttaggcatatcatgaaaaggacctaaaattgaatgattgaactagttagcatctttctgccactaattgtgtgagcggtcataaacttgattttgagcgatcttgattttaggtgaaggggaatttgaagtgaagtgatttatgattggaagtttttattttggaagtaattttgtagtgaaagttagtatcaaaatttcaacttagcacagaagttgtatatatattttttaggagcgaagttaatttttaatcattgtaactaaatatgcaaaagtttgccaaaattatgttttgttccatgcaaatctgtgtttcgtgagctgaaatgctcccccatacta

SEQ ID NO: 33630 - DNA, 266 bp, Glycine max
  Clone ID: LIB3138-017-Q1-N1-D2
catctatccgcatttgcagaggatggttctgttgctgataaatttcacaagtggcataatggaggtggcactctccacgagtcagcttccattgactccacagcactcgtagaggttggcgctgtagttcattcagagtctattgttggtccaaatgttcgtataggttctggaactattgttggcccttctgttacaattgctcattcaacaaacataaggtacacttcctaacaaagttattcaactttctcccaccaatatca

SEQ ID NO: 33631 - DNA, 304 bp, Glycine max
  Clone ID: LIB3138-017-Q1-N1-D4
gaagaacaagtagttgagaactaagaaggagaagcaaatggcttcctcaatgatctcttccccagctgttaccactgtcaaccgtgccggtgccggcatggttgctccattcactggcctcaagtccatggctggcttccccaccagaaagaccaacaatgacattacctccattgctagcaacggtggaagagtgcaatgcatgcaggtgtggccaccagttggcaagaagaagtttgagactctttcctacctgccagaccttgatgatgcacaattggcaaaagaagtagaataccttctt

SEQ ID NO: 33632 - DNA, 262 bp, Glycine max
  Clone ID: LIB3138-017-Q1-N1-D5
attttgcattgtacacaaatatcctttgaagtcaatatccatacatctgttgtggacctcaataccccctggatttcaatgcttctatttgcttgagaaggcatctagtagatggatgctcacatgactgatttggattgggagactttcagtgacggcagcagcagtgaggatcaagaagatattgattttcaatatggtagacaagctcggagcatattatcaagtttagaggaaagcattgggaggatagatgattttc

SEQ ID NO: 33633 - DNA, 410 bp, Glycine max
  Clone ID: LIB3138-017-Q1-N1-D6
ggcgcagcaactcgatcgagtcgctcgccagtgcgggatcgacttcaagaagaacagcgagaaagggatcgacgtgaaccggttcggggagctcctcatgtcctccgggatcgtgttgaacgacgccgtgcactgggttaccttccacagcgggtacgatttcgggtacctcctgaagctgttgacatgccggagcttgccggagacgcaggccgggttcttcgatctgatcaagatgtattttccgatggtgtatgacatcaagcacctgatgaagttctgcaacagcctccacggagggttgaacaagcttgcggagttgttggaggttgagagggttggcgtgtgccatcaggctgggtctgatagtttactcacttcttgtacatttagaaaagtgagggatgcgt

SEQ ID NO: 33634 - DNA, 324 bp, Glycine max
  unsure at all n locations
  Clone ID: LIB3138-017-Q1-N1-D7
caccactgaggaaaatattgctagaaagtagactgggcgatgccattgttggtggtggggttgaagatgaactactccagcctcaatttagcattggaatgaagggtgtttctgaagatgatattcataaggtagaagagctggtcacaagtacacttaaaaagttggcagaagaaggttttgatacagatgccattgaggcttctatgaatacaattgaattttttctgagagagaacaannatgggtcattntctcgtgggttgtctctcatgctccagtccattggtaaatggatgtatgataataattccttttaggcac

SEQ ID NO: 33635 - DNA, 395 bp, Glycine max
  Clone ID: LIB3138-017-Q1-N1-E10
tgcgctcgcaaaccttcctgatatccatccagattgatagttcattgcatgcaaccatagttttattaggttttttcttctttgttttcaattaggtttttgctgctctccttcaaactccgtctttccgaatcctctctttgtgattgtgttctgttctgcttcctaccgcgatagtttctcttctgaagcatggccatggcggtttctgcaattggttttgaaggtttcgagaagaggctggaaatatcctttttccagccgggactttttgctgaccctgagggaatgggtttaagagctcttgcaaagtcccagttggatgagatacttacaccggctgcttgcaccattgtttcatctctcagaaatgatcatgtcgactcctatgttct

SEQ ID NO: 33636 - DNA, 303 bp, Glycine max
  Clone ID: LIB3138-017-Q1-N1-E11
caaaaattttgtttctttgtgtgtgtatggtgatgataacttaattagtgttcatgaatatgtcaagccttactttagtggttctaaattgaaaagctttctagctagtcataacatcaccattactgatggtattgacaaaactagtgcaactttgcaatttagaaagttagcagattgtgattttctcaagagaaactttaagcagatgtctaatgttttgtgggtggctcctgaggacaaggcgagtttatggtcacaacttcattatgtttcgtgtaataatctggaaatgcaagaagc

SEQ ID NO: 33637 - DNA, 347 bp, Glycine max
  unsure at all n locations
  Clone ID: LIB3138-017-Q1-N1-E2
ttttgatattctcttgggaatctctcaagattttgaaattgctggtaatactcttatgccagctttttctgttccacaggctactgccagatcttctgaaaatgcggaatcctctgcatgatctggaatttgtgttttctttcgcttgttcgtttgtttaattcaataaaggaaattaggcatgaccctcttgttgagtatgctctgcctatttgaaaatttccacacctcttttaattgtcgtaatgatgtgtgaagtgtgtgttatttttaaaaaaaaaaaannnaaaaaataatataatttattataattattaatatatataaaaaaaaaaaaaaangggggg

SEQ ID NO: 33638 - DNA, 263 bp, Glycine max
  Clone ID: LIB3138-017-Q1-N1-E3
agaaacgataaaatcaatcaatcaaaggaagcaaaaaagtcagaatggatttgtgtggaaaaggttcttcgcatgaacagcacacaaattcgttttgccacagacccatttcctcccatttgggaaggaccagagtgtttgagatcactgtttcgaggagaaagccttactctaaagttgggtatcgcccatttgttgtcagcgccacggggaagaagaatcatggcaactcctcttcttctggcaatgaagaacggtccatt

SEQ ID NO: 33639 - DNA, 361 bp, Glycine max
  Clone ID: LIB3138-017-Q1-N1-E4
ggctagagcttggaagaaaggctgattgatggtcaagattgtgatgtctgggaatgcagcagtcaaaaggagtgattgggcctcattggtacaagtgtttttaacaaacagcaacagtacagagcattttgatgcatgtaagtggacaaaatcagaaccacattcctgggaattgatcttcccaatagaggtatgtggtcctaataatggttttgaaatgtggagttctgagtgggcaaatcaaacttcatggcatttgagtttccttattgacaatcccaaacagtctacagtttttgatattctcttgggaatctctcaagattttgaaattgctggtcatactcttatgccagctttt

SEQ ID NO: 33640 - DNA, 360 bp, Glycine max
  Clone ID: LIB3138-017-Q1-N1-E5
gctgatgtgtctaattcacatactattaatgacccgtcgaagtcacctccggctaaagagactgacagacaagcttctgcttctgtagcctccgggcaagataattctccacatgaggcatcacctaggctatctcccacgggcatatcatcctgggccaaaaacttgaaaatttctcagccattttctggctcccaagacgactcatcaagtggaaatgttgggaaatcaacttttgcacgcatcacaagtaatttcggattgaggttgtcttcaaagtctcctgtagaagatgacagttccagtgaaacagcttgacaatctaatttgtttggaactattacgaaaggcctggtcgac

SEQ ID NO: 33641 - DNA, 232 bp, Glycine max
  Clone ID: LIB3138-017-Q1-N1-E6
agcaccgccagcacgctcgagctcgatcggtcggcaaatttgggtcgcctgtatgggatgatactaatagaggcatgaatatgtcaagccttacttagcgggctataatgggcgcgtgccttgaaaatcataacatcaccagcactgatggtattgacaaaactcgtgcaactttgaaacttagaaagttagcagattgtgattttctcaagagaaactttaagcagatgtc

SEQ ID NO: 33642 - DNA, 184 bp, Glycine max
  Clone ID: LIB3138-017-Q1-N1-E8
tgatattgagccaaaatttctattactgtcctctgaaggcaaggacggctaaatatcgaggttttctgtagaccaatctaaggaggccacaaccgaaatagcatgactcttatacaaagtagaacaattcaatacttgataatagtggctgcttgtaagaaaggcctgttaatggtcaacattg

SEQ ID NO: 33643 - DNA, 313 bp, Glycine max
  Clone ID: LIB3138-017-Q1-N1-E9
tgacttctccctacattaaatgtacagtctctttcttcatagcatttggaaatttggctgatgataccatcaattttgaggcttttccccacaagctggtgcagtttggagagattcaggaaaaagttgtattgaaattttcacaagaggaatttcttacagcttggtcaactcaggtgcgtcctgcaacaactctgttggctgatgggtgtccatatttgtatgcaatggtgcatgatagttcagtgtctacaataccaggtgattttgtcattggtgtcaagttgacaaccataaacaatatgtgtgcata

SEQ ID NO: 33644 - DNA, 308 bp, Glycine max
  Clone ID: LIB3138-017-Q1-N1-F1
agaaccaccaaaaggtgttgttctttgttgtagttgtttgtaactgtagcaacatgaagatggttagaaagttggttgtggtgaggcttgtgttggccatatctgtgttgagctctctccttctgacaacctcggcacagacagcatgcaggggccaggccttcaccgaaaacaaggttttcttctcatgccgggatcttcctcacctattctcgtacctccactggaactttaaccagagcacaaggaagtttgacatagcattcagacacacaggaatctctggaacagacaaatgggttgcatgg

SEQ ID NO: 33645 - DNA, 153 bp, Glycine max
  Clone ID: LIB3138-017-Q1-N1-F12
cacattcctgggaattgatcttcccaatagaggtatgtggtcctaataatggttttgaaatgtggagttctgagtgggccaatcaaacttcatggcctttgggttttcttattgaccattcccaaccggctaccagttttggttttctctttg

SEQ ID NO: 33646 - DNA, 363 bp, Glycine max
  Clone ID: LIB3138-017-Q1-N1-F2
caagccagagagagaaatggaagaagcatcatgtgtatgcttagttgtcatactgatacttgctctaacattggcatggagggtgctgaactggttatggctaaggccaaagaggttagagaggctcctaagagagcaaggccttcaaggaaatccctacaggcttttggttggggatttaaaggagattatgaatatgcaaaaggaagtcacatccaaacccatgaatctctcccatgatatagtgcctcgtgtcttttcctttctccaacacactctcaacacacatggcaagaattcttttatttggtttgggcgaaaaccaaaggtgatcatcacagagcctgagttaatcaaagatgt

SEQ ID NO: 33647 - DNA, 292 bp, Glycine max
  Clone ID: LIB3138-017-Q1-N1-F3
cttggtaatggaagagaagaagatgcacatgaatttctaaggcttgctgttgagacaatgcaatctgtttgccttatggaatctggggataacatgtcagattcattgaaagaggaaactaatttaatgggcctaacatttggaggttacctccaatcaaagataaaatgcatgaaatgtggagggaaatctgagtgtcaagaaaggatgatggatctgacagttgagatagaaggggagataacaaccctggaggaggcccttcaacagttacaagtgctgagactttgat

SEQ ID NO: 33648 - DNA, 401 bp, Glycine max
  Clone ID: LIB3138-017-Q1-N1-F5
caagtctacacttcaatcaaccactttcaacgaatcaactttcagctttacgcttccagccaattatattcaccatgtctccctgtgactgcaagacctgcggctcctgcaagggcgactgcgcttccagctgcagctgcggctcctgctcccactaagcgcctcatgctgctgctgcgcctgacaccctgagttccccccttcgcgcaaacacaccaccccgacaatgtccccgcaagatccgatcaaacaccacttgggacgtcaagaacaacgcatgggcctttctgatggcgttttggggtgtggagccagagggggggggggggttgaaaggtactctgcttgttcgcttgaacgaatggaacaaatcctgtcaaatgaaaacgggttcgaccttg

SEQ ID NO: 33649 - DNA, 212 bp, Glycine max
  Clone ID: LIB3138-017-Q1-N1-F7
gtgtcaaaattcttggccaacagctttcttgttaattcctcttgcttggttaaacatttggtaccggggttattttcttgcttcatctcgcgagttaactcgtctggattcaattacaaaagcaccagtgattcaccatttctctgaaagcatttccggggtcatgacaattcgcgcattcagaaagcagaaagaattttgcggagaaaaca

SEQ ID NO: 33650 - DNA, 278 bp, Glycine max
  Clone ID: LIB3138-017-Q1-N1-F8
cttcttgcaactgctagtgtgaagggcactttaattagaatcttcaatacaatggatgggtctcgtttacaagaagtaagaagaggggtagatagagctgaaatcaacagtatagctttgtctccaaatgtccagtggttggcagcatcaagtgacagaggcactgttcatgtattcagcttgagagtgagagtgtctggggaggatagtttgactcaaccaaatgcttttcaagggcctgcactgtttcatcagaattcttcatcttctttagatcc

SEQ ID NO: 33651 - DNA, 208 bp, Glycine max
  Clone ID: LIB3138-017-Q1-N1-F9
caacatgacattacaggaggaaagggtttggttgactcccttttccaagctccacaggatgctggaactcactatgcagtcatgagctcctacgagtacctcagcactggacttcgccagtacttggacaacaaaatggatggattctacattgctccagcttttatggacaagcttgttgttcacatctccaagaacttcatgaccc

SEQ ID NO: 33652 - DNA, 195 bp, Glycine max
  Clone ID: LIB3138-017-Q1-N1-G1
ccagataccgattgttcaattcaataatttagagaaaatgtggatgctggtgctgaatatgcagttaatgagctcctactagatccatataactggacttcgtcagtacttgcgcaactaaatggtatgatcatgcaccttctcacacctcatcaccaacaaccactttgatgtttatttgccggcgaacattaa

SEQ ID NO: 33653 - DNA, 243 bp, Glycine max
  Clone ID: LIB3138-017-Q1-N1-G11
gttaaataggtggatgggaaaattgactttccccacgggactttccggaatggtaaaagaatgcctttttctataaggggaggagctggtgcaaagaatgctattctcatgaatatgccaaatgctgttctttcaatgtggagatattttgttggagatctcgtctttgaagtttctaagatgacttctccctacattaaatgtacaggctcttttttcatagcatttggaaatttggctgat

SEQ ID NO: 33654 - DNA, 291 bp, Glycine max
  unsure at all n locations
  Clone ID: LIB3138-017-Q1-N1-G2
ggaagaatcaatgtctcttaaaacctaagggtacttacgtacgttctgcaacaactggtgaaggctgatgggtgtacatatctgaatgcaatggtgcatgataattcagtgtctacaataccaggtgattttgtcattcgtgtcaacttgacaaccataaacaatctgtgtacatatgtgctcaatactggtatatgaggttctcgtcttttgggcaccattcctcagtccatttcacagcaaactgtttggaatcaaatagcaacagtgngaacaccattgaatttttat

SEQ ID NO: 33655 - DNA, 164 bp, Glycine max
  Clone ID: LIB3138-017-Q1-N1-G4
aacctctgaaaatcctttctttctttcatcgatcactctctctctctagatctgttcaaatctccgaacatttccgctcccattttcattttcctggacaaaacccaaccctaaccctttctttcttggtgagacctggattcccccccgagggggtggttttg

SEQ ID NO: 33656 - DNA, 377 bp, Glycine max
  Clone ID: LIB3138-017-Q1-N1-G6
ccaggttcttagcagtgaaactgtcagaaaaagacctgagagaaatttctgaggcggttcccattggtgatgtagcaggtggtagatactacaatggattggatcacttttcatggaagtatgctaacacacctccaaaagattcaaaaatctcaacctgacgcacccaaccaaccctttggttagggaatctaccaagtcatcatgaattgagggtaacaaggctggcaaaggctaatatcaggatgctatttaaatatcaataatgtagcccttcttgatgttggacttcctagatatttggttggttaaaatttttaatttagactgtaatactattttatatgcaacagataattatgagcagtttcgaaggc

SEQ ID NO: 33657 - DNA, 242 bp, Glycine max
  Clone ID: LIB3138-017-Q1-N1-G8
agtgtctcaacaagtgatatgcaaagcatgtctctctgtgcttcactctcctccacagcttcacacctcacttcccttgcctgcgtctcttcttccacctctccactttcccgcaaattttctctcactttccgggaaaaaaacagaaccccaattgcaccacctcacaagctccccttcttctcagcaaggcctgcccccaccagagtagtgttggtgaagtctcaggccacagcacctgc

SEQ ID NO: 33658 - DNA, 303 bp, Glycine max
  Clone ID: LIB3138-017-Q1-N1-H10
ggtggaaccacacaatacactgtgaacaaccagatggtgaatgccactctcatgaacattgctgataaccccaccaatgtgcagcttccaggtatgtacaacaaggaagagaacccccgtgttcccatcattgtcaccggtaacgatttctcaacactctatgcacctctcatccgtgatgggcgtatggagaagttctactgggcaccaacaagggaagaccgcattggtgtttgcaccggaatttttcgcactgatggtattcctgaacaggacattgtcaagcttgttgacacctttcct

SEQ ID NO: 33659 - DNA, 321 bp, Glycine max
  Clone ID: LIB3138-017-Q1-N1-H11
gtgaaaggacgcacctgctgttggcttgttgttcaaggatggcaatttgtaagaaagatgtttggagagttgaatgtggaatcccttctggatttccgctcacagttatttgcaatagcatttttaatgagatgctcattagatatagctatgaaaaattactgcgccaggctaaagctccaagtatgtttttacaatccttcaaaaattttgtttctttgtgtgtgtatggtgatgataacttaattagtgttcatgaatatgtcaagccttactttagtggttctaaattgaaaagctttctagctagtcataacatca

SEQ ID NO: 33660 - DNA, 294 bp, Glycine max
  unsure at all n locations
  Clone ID: LIB3138-017-Q1-N1-H4
ggatcgtaaccatggcaaggttgggtctccttttgttcagaattggcgaccaaactgtaaaatcagattggatttttgtggataaccttgtccttgctcttatattggcgagtatgggacttttggatgacaatcttagcaagggaaaacgccctgtagctgctggccaggcctactttatatctgatggtagtattggatttggttatgtttctactaaccaagttacaagncttgctgagtctgacttctgagtgagtcttcttttttcaggctcaccggtcaattcttttg

SEQ ID NO: 33661 - DNA, 422 bp, Glycine max
  unsure at all n locations
  Clone ID: LIB3138-017-Q1-N1-H5
gattttgtcattggtgtcaagttgacaaccataaacaatatgtgtgcatatgggctcaatcctggtatttcaggttctcgtcttttgggcaccattcctcagtccatttcacagcaaactgtttggaatcaaatggcaacagtgagaacaccattgaattttgattctagcaagcagagcttttgtcagttttctattgaccttctcggtggaggaatcttagtggacaaaactggagattggatcacacttatacaaaattctccaattagtaacttgttgagagttgctgcttggaagaaaggctgtttaatggtcaagattgtgatgtctgggaatgcagcagtcaaaaggagtgattgggccttattggtacaagtgtttntaacanacagcaacagtacaaagcattttgatgcatg

SEQ ID NO: 33662 - DNA, 335 bp, Glycine max
  Clone ID: LIB3138-017-Q1-N1-H6
ctccaaaacactgccttgaagacatggggagggctcccacagaacgtgacggcggcacacgatgcactccttttccgtgccaagtccaactcgctcgcccagcttgggaagtacaccggtgagggtgaatccgcggaagccaagaaggagttgttcgtcaaaggctactcctactaagatgtatgtagtgaatatgatacatgttaggcagcagcaacaccagcagttatagtaggtgttgacggaggatgaagtggaagaagactaatttgtctaaaatgtaatgtttttatagtcttggagactatttttgtttatggttacctgtaccttta

SEQ ID NO: 33663 - DNA, 341 bp, Glycine max
  unsure at all n locations
  Clone ID: LIB3138-017-Q1-N1-H8
cgagaattgtatttgctcagtccanattatgctcgccaattgagaacgaaagctcttgctcgtattgaatggctgcgaaagagtttatgtgccatccatttcggatttcgctcacaggcttttgctatagcatttttaatgagatgctcattagaattagctattaaaaattactgcgcccggctaaagctccaagtatgtttgtacaatccttcaaaaattatgcttctttgtgtgtgtatggtgatgataacttaattagtgttcatgaatatgtcaagccttactttagtggttctaaattgaaaagctttctagctagtcataacatcaccattact

SEQ ID NO: 33664 - DNA, 281 bp, Glycine max
  Clone ID: LIB3138-017-Q1-N1-H9
attaccttcagaagctgtcgttgtaaatgttacatgtggtagtggacgtggtggtttacccaccactgcttggattagttctgcagttaacaatcgctcctcagatatcaacaaaaggattcgcacagcacttgggaaaggtaagaaaattgtttttcttactagagttgatccttttccagtagctttactggctgttctttttggcgttaagaatgaaattctgagttctaacgccactaatcctatgctgacgcgacttcttgagaaactgtagagtc

SEQ ID NO: 33665 - DNA, 366 bp, Glycine max
  Clone ID: LIB3138-018-Q1-N1-A1
tcaggttctcgtcttttgggcaccattcctcagtccatttcacagcaaactgtttggaatcaaatggcaacagtgagaacaccattgaattttgattctagcaagcagagcttttgtcagttttctattgaccttctcggtggaggaatcttagtggacaaaactggagattggatcacacttatacaaaattctccaattagtaacttattgagagttgctgcttggaagaaaggctgtttaatggtcaagattgtgatgtctgggaatgcagcaatcaaaaggagtgattgggcctcattggtacaagtgtttttaacaaacagcaacagtacagagcattttgatgcatgtaagtggacaaaa

SEQ ID NO: 33666 - DNA, 394 bp, Glycine max
  Clone ID: LIB3138-018-Q1-N1-A10
ataagatccaagccatttacaaaaatggtaaccattaaagcatcttacacagtccttccaaatgaaccaactccggagggccttttatggctatctgatattgatcaagtggcacgtctacgccacacacccaccatctacattttccatgcaaaacacaaccatgatacattaattgagaggatgagaaactctcttagcaagattttggttcactactatccaatagccggtcgattgagaaggatagaaggtagtggtcgattggaattggattgcaatgcaaaaggggtggtgttgcttgaagcttgatccacaaaaacattggatgattatggagactttttacgtgagtccatcaaagacttggttccacggttgatacacaacccta

SEQ ID NO: 33667 - DNA, 319 bp, Glycine max
  Clone ID: LIB3138-018-Q1-N1-A11
gagatctctgtattgcttattctctcaatatggaagaattttggatgttattgctctaaagacacccaagcttcggggacaggcatgggtttgtttcagtgaagtcactgctgcaagcaatgcagtgcgacaaatgcaaaacttccctttctatgacaaacctatgagaattcattatgcaaaaacaaagtcagactgtattgcaaaagaagagggtagttttgttccaagggaaaagaagaagaaacaagaggagaaagctgaaagaaagcggcgtgttgaggaagcacagcaatctggtgtggctaatggaacacat

SEQ ID NO: 33668 - DNA, 379 bp, Glycine max
  Clone ID: LIB3138-018-Q1-N1-A12
caaattcgccaaagcttgacatctgattacggcgtctcgcgcttccttcttccaccttccccgggtttcaccgtgccgatgactttttttctgagaaagagatcgtcatccatcgcgtgccttcgttttcccttcatgaaccggggcaggctttggcgttcttggaacttcttcttccgccactggacttgacccaattagtgttatctattattattcactttcttccatttttttccttactaaaaaaaaaaaaacgtggttcttcttctctctctgcggacgagttttctttctcttcgattcgttctggttgctacattctgaagcacttcatatttcgctttttctttttcattttcttttatattatttggat

SEQ ID NO: 33669 - DNA, 410 bp, Glycine max
  Clone ID: LIB3138-018-Q1-N1-A5
gaagaagcatggaatgtcttgcataaaatggtggcttctggcattcagcctgatgtcgtaacatacaacacgatggcaagggcatatgctcagaatggtgagacagagaaggctgaaagactaatattgaaaatgcagtacaacaaagtgaaacctaatgaacgaacttgtggtatcataataagtggttattgcaaggaaggcaatatgacagaagccttgaggtttctatacagaatgaaggagcttggtgtgcatccaaatccagtagttttcaactctcttatcaaaggatatctagacgctacagacacaaatggagtagatgaagcactgacattgatggaaagaattgggatcaaaccagatgtagtaacccttagcaccatcatgaatgcatggagttcaac

SEQ ID NO: 33670 - DNA, 335 bp, Glycine max
  Clone ID: LIB3138-018-Q1-N1-A6
agcataacaacacaagagtcgcatctcaagcttttgtctttctctacttttcttcttctttctgtgtatcgtatcgtattggtaggttgaaaaacaaagagtgtgtgttgttgttgtgtggtttggttttcacttttgttcatcgtttgcgagacacacaggagagaagagatggcgacgagggtggtggcggaacagaagccgaagacgaagattgtgtgcacgctggggcccgcatcgcgctctgtcccaatgatcgagaagcttctgcgggcgggcatgaacgtggctcgcttcaacttcttccatgggtcccacgagtaccaccaggaaac

SEQ ID NO: 33671 - DNA, 187 bp, Glycine max
  Clone ID: LIB3138-018-Q1-N1-A7
ggatatggcaaaggaatacgagaaagctattgaagaacttcagaaattgttgagggagaagagtgaactcaaagcgacagctgctgaaaaagtggagcagataacagcttctctagggacatcatcatctgatggcatcccatcatcagaagcctcagacaggatcaaagctggtttcattcacttc

SEQ ID NO: 33672 - DNA, 352 bp, Glycine max
  Clone ID: LIB3138-018-Q1-N1-A8
actagcaatggcctcaacctcttctgctctcactatatcctcttcttccacccttcatgattgcaaggctccaagacagtcaccagctgcttcaccacaatgtgtgagccttccctctccccttttgcactctcagaactgttcatggaagaccactgcttattgtcgcagtattgctcgaaatgttatggcaatggccacaggagaggcaccagctgaagctgccccgactgaagtgccagagattgtcaagactcttcaagaaacttgggacaaagttgatgataagtatgcagtgagttcactggccctggttggtgtggttgcattgtggggctcagttgggttgatc

SEQ ID NO: 33673 - DNA, 376 bp, Glycine max
  Clone ID: LIB3138-018-Q1-N1-A9
gtttcccgccatatatccaataagctttaaccatgtctgcctttgttggaaagtacgcagatgagcttatcaagaatgccaagtacatagccacacctgggaagggcatcttggcagcagatgagagcactggcaccattgggaagcgcctatcgagcattaacgttgagaacattgaagccaaccgccaagctcttcgcgagcttctcttcaccgctccagatgccctccaatacctctctggtgtcatcctctttgaggaaactctttaccagaaaacctccgatgggaagccttttgttgaagtccttcaagagaacaatgtcatcccaggcatcaaagtggacaagggtgttgttgaattggctggcacaaa

SEQ ID NO: 33674 - DNA, 269 bp, Glycine max
  Clone ID: LIB3138-018-Q1-N1-B10
ggaactttcttccagtcttgaattggaggcaaagcaaacttggcaagtaaatatttctgttcgtgaaggttgttgtactaatccaagtgctagaagttgtgatggaacttgcgtgtaacattcttagcattctcaatgtcttaggtgcaaagagaagatgctaagtttgagatgatcttactatatttttcatattggaccgtcttcctctataattttgagttacagtgtccacttaaattgaatttggtgccttttccttttgtcct

SEQ ID NO: 33675 - DNA, 244 bp, Glycine max
  Clone ID: LIB3138-018-Q1-N1-B11
agagtcttaggtgttttcgttaaggtatatttttaagtttctggccgtttcatgtagccggaaccttccaaactagggtcttggtcgggcggggacaattttcaatgctgggtggttttgatgagtactggtttttggtttgatgggcaaaaaagtctgggatatttcgaatttcacaagccgctataggggtttaggccatttcccttgctgctgagggatgttttaagatgcatttaattta

SEQ ID NO: 33676 - DNA, 349 bp, Glycine max
  unsure at all n locations
  Clone ID: LIB3138-018-Q1-N1-B12
agaatcttattactttttttgtaaagnanacaaataagtttcgcgcggttttatatagtcggagcgggcaaaactatactcattatacattctaaacatattttcataacttgtttgtttttgattagaactgaaataatgattttattaaaaaaacaaatattttatattttaaattatacaaactatattttggttttagtccatatactttaataatcatgtcttatttaaatcacatctaatatattcccaaccttttctttctatccttcctattaaaccaattattatataaagaaaatggcccccctccttttaattcaccttctccctcatattttaattt

SEQ ID NO: 33677 - DNA, 333 bp, Glycine max
  Clone ID: LIB3138-018-Q1-N1-B2
gaagaacaagtagtttagaactaagaaggagaagcaaatggcttgcggaatgatctcttccccagctgttaccactgtcaaccgtgccggtgccggcatggttgctccattcactggcctcaagtccatggctggcttccccaccagaaagaccaacaatgacattacctccattgctagcaacggtggaagagtgcaatgcatgcaggtgtggccaccagttggcaagaagaagtttgagactctttcctacctgccagaccttgatgatgcacaattggcaaaggaagtagaataccttcttaggaagggatggattccttgcttggaatt

SEQ ID NO: 33678 - DNA, 384 bp, Glycine max
  Clone ID: LIB3138-018-Q1-N1-B3
cacaccacgaccaatgatgggcaactaccaccaccctaatgctcaccgtgtcctcaacgagaagattgtttatgaggaggatgtgattggaggatcccgccacaaccacatgcatcaccaccaccctgagactcatgagagagtcaaggtggtggagtatgaacaagttcctgagaggcgcgttgtctatgaagagaaagttgcttatgacaacgatcgttactactctccaaggtattgaaattggacaaatggaagaacacctataacgtgttatcatgtggctttttattaggcacgctacctagtataccaaaagcaccactgtgcttgtactaaataaattcctgcttatatatactggccattatgttatatataaaa

SEQ ID NO: 33679 - DNA, 359 bp, Glycine max
  Clone ID: LIB3138-018-Q1-N1-B4
tcgggaaaggacccacctgctgttggcttgttgttcaaggatggcaatttgtaagaaagatgtttggagagttgaatgtggaatcccttctggatttccgctcacagttatttgcaatagcatttttaatgagatgctcattagatatagctatgaaaaattactgcgccaggctaaagctccaagtatgtttttacaatccttcaaaaattttgtttctttgtgtgtgtatggtgatgataacttaattagtgttcatgaatatgtcaagccttactttagtggttctaaattgaaaagctttctagctagtcataacatcaccattactgatggtattgacaaaactagtgcaactt

SEQ ID NO: 33680 - DNA, 395 bp, Glycine max
  Clone ID: LIB3138-018-Q1-N1-B5
ggggagggacagaaatgggaccagggttatgatgttactgctcgttttctggactattgtaatactctcaaaagtgggtttgtggcacaattgaacaagcagatgaggactggttatagtgatcaattctttgttcagttactgggcaagacagttgatcagctttggcaagactacaaggctaagtatggcaatataccctaggtaaatggctaagagcttgctaatttaaaaataagcgactagtatgtcgcaatctctattgtaggcttgtatcaactctaaatatttaaagttgcaacttatagtaagttatagtggaatggatgttctgattctgatttgtaagtcatgtgtacgccaaaaatttacaagttcaagaaaaaactatttct

SEQ ID NO: 33681 - DNA, 350 bp, Glycine max
  Clone ID: LIB3138-018-Q1-N1-B6
aaaagacagagggttaattgtggagtattttggaaggatgtcttacgttgctcataacgttaatcagccccaagagaaagatttgttggagggaaatttttcctttgatattaaatctcgctctagattggaaaaagtttcctctacaaaagcacaatttgttagtggaaaaaccttcaaatatgatataattggtgctggttcacattcttcagaagattttcctgaaaaggaagatcaagaaaaacccaaaaagattgatgccagattgagacaaagaatagatcctcaatacaatgaggttcaggctcagatggaaacaaatttgtttaaattgtctcttgatgatg

SEQ ID NO: 33682 - DNA, 336 bp, Glycine max
  Clone ID: LIB3138-018-Q1-N1-B7
gaaaagctttctagctagtcataacatcaccattactgatggtattgacaaaactagtgcaactttgcaatttagaaagttagcagattgtgattttctcaagagaaactttaagcagatgtctaatgttttgtgggtggctcctgaggacaaggcgagtttatggtcacaacttcattatgtttcgtgtaataatctggaaatgcaagaagcttatcttgtcaatctcgtaaatgtgttacgagaattgtatttgcacagtccagaggaagctcgccaattgagaaggaaagctctctttcgtattgaatggctgcaaaaagctgatgtgcctac

SEQ ID NO: 33683 - DNA, 398 bp, Glycine max
  unsure at all n locations
  Clone ID: LIB3138-018-Q1-N1-B8
ggaacttgagccacattctgtccctggtggactcaagaagagtgtttcataggacagttaaaattatagcttgcaaaaagggttcactagcaaacattgcaatggcctcaacctcttctgctctcactatatcctcttcttccacccttcttgatggcaaggctccaagacagtcaccagctgcttcccctcaatgtgtgagcctcccccctccccctttgcactctcagaaccgttcatggaagaccactgcttattgtcgcaaggttgctcgaaaagttatggcaatggccacaggagaggcaccagctgaagctaccccaactgaggtgccagagattgtcaagactcttcaaaaaacttgggacanagttgatgataagtatgcagtgagttca

SEQ ID NO: 33684 - DNA, 272 bp, Glycine max
  Clone ID: LIB3138-018-Q1-N1-B9
cgtcaattttgtggcttttctctacaagctggtgcaatttggggaggtttatgaaacagcagtttcgccaatcccacatgatgcatctcttacaacttgttcaactcaggtgcgttctgcatcaactctcctcgctgattggagtccatatgagtatacagtcaatccatgataggtccaaggctaaaactcctattgcttatgcgactattgtcaagttgactaccgtgaactatatctgtgcatatcggctcaatcgtgatatactaggt

SEQ ID NO: 33685 - DNA, 405 bp, Glycine max
  Clone ID: LIB3138-018-Q1-N1-C1
atacaatgaggttcaggctcagatggaaacaaatttgtttaaattggctcttgatgatgttgaaactcctaaaggttccatgttggatctgaaaatttctcaatctaaaattgcacttcccaagaacacagttggaggaaccattctgcgtagtgatctattggcaaattttttgacagagggcaattttagagcaagtgttgatttgcagcgcactcatcgtattagaggaatgattaaaatggtggccacagttggtattcctgagaatacaggtatatcattggcctgtgctatgaatagttcttttagggggcgcgccagttctgatatttacaccatctgctctcaagactgtgaattgtggaatcctgctcgcacaaaagcaatgactatgtcatttaa

SEQ ID NO: 33686 - DNA, 125 bp, Glycine max
  Clone ID: LIB3138-018-Q1-N1-C10
atcatcttcttactctttcatttgtctctctactttccctttcccctctctttcgagggattttctttttctttttttaccccttttttatttttccttcttttttttactttctcttgtttttc

SEQ ID NO: 33687 - DNA, 296 bp, Glycine max
  Clone ID: LIB3138-018-Q1-N1-C11
tgcagattgaaccagacatgaattcaaggtttcagcttttgagtaccactaccaatggtgattttgttcaagggaaagatctcgcaatggttaaagttaatgtagcatgtgctgctgttggcttgacatcaagttacactccaactccattgttggaatctggtttgcaaaaagacagacggttaattgtggagtattttggaaggatgtcttacattgctcataacgttaatcagcctcaagagaaagatttgttcgagggaaataattcctttgatattaaatctcgctctaga

SEQ ID NO: 33688 - DNA, 270 bp, Glycine max
  Clone ID: LIB3138-018-Q1-N1-C4
atcatcttcttactctttcgtttgtctctctactttccctttcccctctctttcgagggtttttctttttctttttttcccccttttttatttttcctttttttctttactttctcttgtttttcagttttgcttccatttcctttgaatccccatttcttgttcctctgcaactctaaccctagaattgaagatgcaaccacagaagttaaggcagcatgccatgttgcaaccatctttctaccaccaccccgctcttcttactccttc

SEQ ID NO: 33689 - DNA, 295 bp, Glycine max
  unsure at all n locations
  Clone ID: LIB3138-018-Q1-N1-C5
ggtcggcctttctgtcttagagagtaggacgcngatattcaagatgcacacaagaaccatgaactgcgaaagggatattcgatttgaacttctggctcggctttgcccaaattccactggagctgatataaggagtgtatgcacagaagccggtatgtatgctatccgtgccaagacgaagactgtaacagagaaagacttcctaggcgcagttaataaagtcatcaaaggataccagaagttcagtgcaactcccaagtatatggtctacaactgagttattctttcatctttt

SEQ ID NO: 33690 - DNA, 377 bp, Glycine max
  Clone ID: LIB3138-018-Q1-N1-C6
gaggggcatttcttataattcacacttgacacacatacacacacagcagttatacggtgtcgtttcatccacttatattcttttccaaaaaaaaaaaagctaaccctagctttttccccctttcgcctttagccgcgtttttccgatctcgattgctttcctctctctctctctcttgattcctcccccaatcttaacgccacctctctaatcgattccgcctctcgctagctcttgattttctgcgccgatcgatcccaatttttcccaggtcggtgcgctggatccgtttttagggtttccgtcgcggatctgtttttcccgatacgggatctggtaggggacattttttatttgatttgggttctgggtctttg

SEQ ID NO: 33691 - DNA, 391 bp, Glycine max
  Clone ID: LIB3138-018-Q1-N1-C7
gctagttcacagcttcagttcgtttttgttgatcctgtgaacttatggctgacggggtggttctgttggatacatgggccagcatgtttgggatgagggttaggattgcattagctgaaaagggtgttgagtatgaatacaaggaagaaaatctcaggaacaagagtcctttgcttttgcaaatgaacccaattcacaagaaaattccagttctgatccataatggcaaaccaatttgtgaatctgcaattatagtgcagtacattgatgaggtctggaatgataaagctccaatcttgccctctgacccttatgagagagctcaagccagattctgggtagattacattgacaaaaaagtgtatgacaacttggaggaaaatgtgggctt

SEQ ID NO: 33692 - DNA, 382 bp, Glycine max
  Clone ID: LIB3138-018-Q1-N1-C8
catcaattttgaggcttttccccacaagctggtgcagtttggagagattcaggaaaaagttgtattgaaattttcacaagaggaatttcttacagcttggtcaactcaggtgcgtcctgcaacaactctgttggctgatgggtgtccatatttgtatgcaatggtgcatgatagttcagtgtctacaataccaggtgattttgtcattggtgtcaagttgacaaccataaacaatatgtgtgcatatgggctcaatcctggtatttcaagttctcgtcttttgggcaccattcctcagtccatttcacagcaaactgtttggaatcaaatggcaacagtgagaacaccattgaattttgattctagcaagcaaagcttttgt

SEQ ID NO: 33693 - DNA, 467 bp, Glycine max
  Clone ID: LIB3138-018-Q1-N1-C9
gcaccatcaccacgctcacctcttaccgctgctgccataaatatgcgtctatgcaacaacatgttcaccaccacctccttgtgcttcacatcatcctcatcatcttcttgaatcagttgactcttcgttcctccctctattctttccgatggagcccatggacatcgttgggaaggccaaggaagacgcttctcttcctaaagcgacaatgacgaaaattattaaagagatgttgcccccggacgtgcgtgtcgccagagatgcacaggatttattgatcgagtgttgcgtcgagtttataaaccttgtctcgtcagagtccaatgaagtctgtaacaaagaagaaacgatgacgattgcaccggagcacgtgttaaaagcgttaggggttcttggatttggcgagtacattgaggaaagttatgcaacatatgaacaacacaagttggatacaatgcaagattctt

SEQ ID NO: 33694 - DNA, 377 bp, Glycine max
  unsure at all n locations
  Clone ID: LIB3138-018-Q1-N1-D1
gatgatctggtgataatgaatatcttaatttgtatgatagaacgaaacagtttatatatatggcctacacctcaatcccaactggattttcccactacctaaatttcttttaatgctatatctaatactttcctagttgagaaggcccaagctttattatcttaatgatttgaagtcgaaggaagacggtgaggtcggcttcatggatcacatgatgtcattcgacccggttagagataaaatcttcagagatattatttatcatgagattcctctntactgtctccaatgtccttcttttttgggtagaatatatcaccgtgtttcgattccttaaatctcttctatttatttgaaggcttacttatattttggtc

SEQ ID NO: 33695 - DNA, 330 bp, Glycine max
  Clone ID: LIB3138-018-Q1-N1-D10
caccttaataatgtattctgttggtggtctcactagctagaaacaacatcactacacacaaatggcacatactttatccactactctggctcttaaccttcccacatcgaggtatgttcgtccctgcagaccaacccacgtgaagcccatgaaagtcatgatgggtgatgcaagaaaaaagctagaacatgtccatgtgcctaaacacaacaagcaccaccagcccctccccaaaaacaaagttgcttctaccccacccgtatggctgtgggatcgatttcctacggcaaggacagtgcaagggatgattgagacgatggagagaatgat

SEQ ID NO: 33696 - DNA, 343 bp, Glycine max
  Clone ID: LIB3138-018-Q1-N1-D11
gcccaattcatcattggacgttgcatcactggaatcggtaatggcatcaacacgtctacgattccaacttaccaggcagagtgctgcaaggccaagaaccgtggtaaggttatctgtatcgagggcagcatggttgccattggtacgctgatcgcctactggatcgattatggctgcctttacggtcccgatgacttcacatggaggtttcccattgccttccaatgcgtcttcaccttcattgttctcggcatgatgatccagctgcccgaatcgcctcgatggctcctgactcatcaccgggaggatgaagctgccactattcttgcatcactcaacgggc

SEQ ID NO: 33697 - DNA, 338 bp, Glycine max
  Clone ID: LIB3138-018-Q1-N1-D12
aaaacaatcttcataaccaaacacaccacatggaaatcagccaaattccgtttttcacccaagaggactactctcacttctacaacctctacgaagacacagactctaacaacagtctcaacaataacaacagcaacaacaagagaaagcgtaacaacagaaaagaagaaggtagtggtggaggtgcacaacaaaaagggcataatggttataataataacgagaacagtgaaagtaacttgaaggacttacttgcttcgctgattatgttagacgaggaagaaattcaagaggaacggaacagaaaagttgagtacgaacagcatcgcaacatgtac

SEQ ID NO: 33698 - DNA, 436 bp, Glycine max
  Clone ID: LIB3138-018-Q1-N1-D5
tgggctttaaccatgtatactacttgtatcaggttcctatgcaattgccattattgtcaagcctacaatatcactagtgaggtaggctgtgtgttactgtttatcgtcttcagagaggaaagcaggatgatgtgtgaaacgccatttgtcttttgtgtaatgtcagtttcataattaaatatttaaagggaaagcttgcaaatggatctagaataatgttattcatctctgatcttcacagttttcatcatctgattacagttggtcacttggtctgatattggaacagttttctcaagaatttcatttcagactgtctgatattggaacatttaaggcaagaactatttgttttcattgaaagtgtcgctatctttagatcaaagcatgcaagtaattcaaattttatttgaacgtgtcaacatggtatcaaatg

SEQ ID NO: 33699 - DNA, 395 bp, Glycine max
  Clone ID: LIB3138-018-Q1-N1-D6
aatgggcgaaacgtatagaaaacgcttaatccgcaggcactgtctcttgatagccggtggcttcccaatccctgctcagctcgcgaaaaacgaaaactagcatctactctccaaagcttctgctgcccgtgagcaacagactaaggtcgatctcatcagaattggtaccagaggaaggtatgatttctccccatatctcctcgccatctatttggtttaacaaaacatacacacgttcttagatttctaccatcatcaaaattcaatgtgtcgagcagtccactctctatagcacatgcacacgagaccagagacatactcagggcatcacaccctgacttagccggagcgggtgctattgagattgtgattatgaagacaacacgagacaaaat

SEQ ID NO: 33700 - DNA, 366 bp, Glycine max
  Clone ID: LIB3138-018-Q1-N1-D7
ttgcagcagcaaagtggatgcccctggttgagtttgtagcgcaaccactcatccaagaagactccatgttcaagaaaatcgtagatatcttcattgctcgtcttgggaagcgatattgcggcttatcaactcatcaagtagtttcaaagtttgacggcatggtgtcttccttatactacaatgtcatcgacaatgaagataactgtgttggaaaatgaggactcgaacacgcaccactcttggcttctcaaatgtcagcaacaagctgaaagctgggctaaccactagtgcagatatccattgtgatatgtaaacatgcaaatgacactttatccctataggtataatgtatattaatatctgtga

SEQ ID NO: 33701 - DNA, 324 bp, Glycine max
  Clone ID: LIB3138-018-Q1-N1-D8
gcgcctataatatttgatgggcgtttggagaagttctactgggcaccaacaagggatgaccgtattggtgtatgaactggaattgatagcaccgattcaattcctgaacaggtccttgttaatattgttgacaccttatctggccaatctattgatttatatggcgcactgaaggtcaaaatatatgatgactaaatgaggaaatggattactagtgatggtgttcactgcattcagaagaagcttgtgaacataaacaatggacctccaacctatgcacataccaagacgactctggaaaaacatttgacggattggaacatg

SEQ ID NO: 33702 - DNA, 470 bp, Glycine max
  Clone ID: LIB3138-018-Q1-N1-D9
cttggaagaaaggctgtttaatggtcaagattgtgatgtctgggaatgcagcagtcaaaaggagtgattgggcctcattggtacaagtgtttttaacaaacagcaacagtacagagcattttgatgcatgtaagtggacaaaatcagaaccacattcctgggaattgatcttcccaatagaggtatgtggtcctaataatggttttgaaatgtggagttctgagtgggcaaatcaaacttcatggcatttgagtttccttattgacaatcccaaacagtctacagtttttgatattctcttgggaatctctcaagattttgaaattgcttgtaatactcttatgccagctttttctgttccacaggctactgccagatcttctgaaaatgcggaatcctctgcatgatctggaaattgtgttttctttcgcttgttccgttgttaattcaataaaggaaattaggcatga

SEQ ID NO: 33703 - DNA, 416 bp, Glycine max
  Clone ID: LIB3138-018-Q1-N1-E1
gcaggatgttcaggttacaattgattggtttatttcctctcacgaatgtgttcccaggacctattgtgttttaaatccacaaaatccttttgtgttaaataggtggatgggaaaattgactttcccccagggcacttcccgaagtgttaagagaatgcctctttctatagggggaggagctggtgcaaagaatgctattctcatgaatatgccaaatgctgttctttcaatgtggagatattttgttggagatctcgtctatgaagtttctaagatgacttctccctacattaaatgtacagtctctttcttcatagcatttggaaatttggctgatgataccatcaattttgaggctgttccccacaagctggtgcagtttggagagattcatgaaaaagttgtattgaaatttt

SEQ ID NO: 33704 - DNA, 404 bp, Glycine max
  Clone ID: LIB3138-018-Q1-N1-E10
ctcgagccgctcgagccgattcggctcgagattgccatcaacgacaccggtggcgtgaaacaagcctctcaccttctcaagtacgattcgatcctcggaaccttcgatgctgatgtcaagcctgttggcagcgacatcatctctgtcgatggaaaggaaatcaaagttgtctctgaccgcaaccctgccaaccttccttggaaggatttggggatagacttggtgattgaaggaactggggtgtttgtagacagagaaagtgcagggaaacacattcaagcaagagctaagaaagtgctcattactgctcctggtaaaggagacattctcacatatgtggttggtgtcaatgagtatgattacagccctgatgaacccatcatcagcaatgcattttgcaccac

SEQ ID NO: 33705 - DNA, 378 bp, Glycine max
  Clone ID: LIB3138-018-Q1-N1-E11
atcggtgtcatgttgacaaccataaacaatatgtgtgcatatgggctcaatcctggtatttcaggttctcgccttttgggctccattcctgacttcatttcacagcaaactgtttggaatcaaatggcaacagtcagaacaccatcgcattttgattatagcaagcatagcttttgccagttttctatcgaccttctcggaggaggaatcttagtggacaaaactggagattggatcacacttatacaaaattctccaattagtaacttattgagagttgctgcttggaagaaaggctgtttaatggttaaaattgtgatgtctgggaatgcagtagtcaaaaggagtgattgggcctcattggtacatgtgttttta

SEQ ID NO: 33706 - DNA, 359 bp, Glycine max
  unsure at all n locations
  Clone ID: LIB3138-018-Q1-N1-E12
ataaaaaaaaagttgacaacaaataaacaatataagaacatatgggctcaaatcactggaataaaaagatctaagactaatggacagcaataagaaaatacaaaagacaacaaactgtttggaaatcaaatagaaacaggggggggcagcattgaattttgattgtagcacgcggaattatttccggcccggtattggaccgtgtcagaagtggatttttagtggacataattagagatggggtcaaaactgataaaaaatttgttaatgtggaaaattattttgagttgcaaattgcaaaaaaggttgngtcgtggataaaaatgtgaaaacctggggtgcagtaatgggggggagaa

SEQ ID NO: 33707 - DNA, 423 bp, Glycine max
  Clone ID: LIB3138-018-Q1-N1-E3
cacgagcttcttgcaggcaaaagcaaaattgagaatgatgagggaagaaggttctgataagaaaaattcgtactgggacaatctttggggcaaacagaaagactatcaaagttcagatgaggaagttgaagaaagagcaaaaagagctgcttcagctgcacgaagatggagggaatactcaagtcgcggtgttgataagcctcccacatttaaacttacagaggcaagccttggcaaggacaagtgaacagtacttcatttaccttgtactatatcatgtagtcccgtgtaattagttcatttatagcctactaagttaaaccaatgagatcttttttctcattctactacccatgattgtatatgcagcaactgctattaaggtcaatttttagaaatagatgaaccataataatactttgg

SEQ ID NO: 33708 - DNA, 381 bp, Glycine max
  Clone ID: LIB3138-018-Q1-N1-E4
cggttcgagcgctctagcggatcgagcggctagaggagggccttacatggcttccgcttgggcttactctgcaattacagctggtgccatctgtacgcccagttccgggctgaagaatggatcaggcggttgacttcttagtggaaggaaattgcgggtggaaaaggggggagcctctattggaggacgatcgatgggcactacagtgtgcgccgttgctgagcccgacagacctctatggttcctaggcagcacccatactccatggcttgatagcactatacctggagacttgtgcattgaccctcttggggttggatcagaccacgagagtcttgcaaggaatgatccggcacagctagtgcactgcctatgggcaat

SEQ ID NO: 33709 - DNA, 387 bp, Glycine max
  Clone ID: LIB3138-018-Q1-N1-E5
ggattgtggaattctgcttgcacaaaagcaatgactatgtcatttaatccaaacccgtgttctgatgcatggagtttggaatttctgaagcgtactggattttattgcgatatcatttgtgtcactggatggactgccaccccaatgcaagatgttcaggttacaattgattggtttatttcctctcaggaatgtgttcccaggacctattgtgttttaaatccacaaaatccttttgtgttaaataggtggatgggaaaattgactgttcgccagggcactatctgaagtgttaagagaatgcctctttctataaggggaggagctggtgcaaagaatgctattctcatgaatatgccaaatgctgttctttcaatgtggagatat

SEQ ID NO: 33710 - DNA, 413 bp, Glycine max
  Clone ID: LIB3138-018-Q1-N1-E6
agttaaaagccttatccttccctacaactccaaacacaaagacatcatcatccatggctgcctccgtcttcactgtcggagctgtcaacagagctcttttgaacctgaatggttctggagctggagcttcagcttccagttcagccttctttgggaccagcttgaagaaggttattgcctcaagggtccccaacagcaaggtttccggtggaagcttcaagattgttgctgtagaagagaagaaagagattgaagagacccagcagaccgacaaggacagattgaagggtcttgcctatgatatcttaagacgaccaacaagacatcacaagaggaaagggtttggttgactcccttttccaagctccacaggatgctggaactcactatgcagtcatgagctcctacgagta

SEQ ID NO: 33711 - DNA, 351 bp, Glycine max
  Clone ID: LIB3138-018-Q1-N1-E7
gtgttaaataggttgatgggaaaattgactttcccccagggcacttaccgaagtgtgaagagaatgcctctatctatagggggaggagctggtgcaaagaatgctattctcatgaatatgccaaatgctgttctttcaatgtggagatattttgttggagatctcatctttgaagtttctaagatgacttctacctacattaaatgtacagtctctttcttcatagcatttggaaatttggctgatgataccatcaattttgaggcttttccccacaagctggtgcagtttggagagattcatgaaaaagttgcattgaaattttcacaagaggaatgtcttacaggttgg

SEQ ID NO: 33712 - DNA, 412 bp, Glycine max
  Clone ID: LIB3138-018-Q1-N1-E8
ctcgagccgctctttcttcatagcatttggaaatttggctgatgataccatcaattttgaggcttttccccacaagctggtgcagtttggagagattcaggaaaaagttgtattgaaattttcacaagaggaatttcttacagcttggtcaactcaggtgcgtcctgcaacaactctgttggctgatgggtgtccatatttgtatgcaatggtgcatgatagttcagtgtctacaataccaggtgattttgtcattggtgtcaagttgacaaccataaacaatatgtgtgcatatgggctcaatcctggtatttcaggttctcgtcttttgggcaccattcctcaatccatttcacagcaaactgtttggaatcaaatggcaacagtgagaacaccattgaattttgattct

SEQ ID NO: 33713 - DNA, 275 bp, Glycine max
  Clone ID: LIB3138-018-Q1-N1-E9
ctcgagccgatctttcttcatagcatgtgaaaattaatctaaggatactatatagaatggagtggttccgcacatacttggtccaattggggagattaaagacaaagtgggattgatatttgtataggaggaattacttacaaatcggttaacgcaaatgcgacctgcaacaacaacattggttgatgggcgtacatattaggaggccatggtgcagtcatagctagtgtttacaataccaagtgagtttgtcattcgtgataaagatgcaacca

SEQ ID NO: 33714 - DNA, 461 bp, Glycine max
  unsure at all n locations
  Clone ID: LIB3138-018-Q1-N1-F1
tgataacttaattagtgttcatgaatatgtcaagccttactttagtggttctaaattgaaaagctttctagctagtcataacatcaccattactgatggtattgacaaaactagtgcaactttgcaatttagaaagttagcagattgtgattttctcaagagaaactttaagcagatgtctaatgttttgtgggtggctcctgaggacaaggcgagtttatggtcacaacttcattatgtttcgtgtaataatctggaaatgcaagaagcttatcttgtcaatctcgtaaatgtgttacgagaattgtatntgcacagtccagaggaagctcgccaattgagaaagaaagctctctctcgtattgaatggctgcaaaaagctgatgtgcctaccatagcacaaattgaagagtttcattcgatgcanaagatgatgaatgcctctgattcaaatgataata

SEQ ID NO: 33715 - DNA, 415 bp, Glycine max
  unsure at all n locations
  Clone ID: LIB3138-018-Q1-N1-F10
tagctgtcgagctcttatttttttccctcacgtgctagaattggcctctcctcgcttattgtcgttgaaggaaaaatttgttgggatctttacattgatgggcttcttgttaattcaaatggaaatttgttggatgctctaatagaataatctactataaaaagctagaaaagatgataatgatggattcctggctaaaataattagcgttgcagagatcatgcttttttgttgatgtcaattttcaatgttgtttacttttcaagttttctttttcatttaacctgagtttagctattgatgttacatacatgccatttggactctntgaaatatgtaatctatgacttcaaggaaatggttagaagttattcatactttcaattaactcaaattaaaaatatccttttactag

SEQ ID NO: 33716 - DNA, 364 bp, Glycine max
  Clone ID: LIB3138-018-Q1-N1-F11
ctcaagactgtgtattgtggaatcctgcttgcacaaaagcaaggactatgtcatttaatccaaacccgtgttctgatgcatggagtttggaatttctgaagcgtactggattttattgcgatatcatttgtgtcactggatggactgccaccccaatgcaggatgttcaggttacaattgattggtgtatctcctctcaagaatgagttcccaggacctattgcgttttaaatccacaacaatccttctgtgttaaataggtggatgggaaaattgactttcccccagggcacttcccgtagtgttaagagaatgcctctttgtatagggggaggagctggtgcaagaatgctattctcatgaa

SEQ ID NO: 33717 - DNA, 493 bp, Glycine max
  Clone ID: LIB3138-018-Q1-N1-F2
caaattagtagacaccctatgaattgttgttctgccatggcgtcccttctcaaatcaccttcctttctctctcctttgaaccaaaagttgaattatgtaagcttttctcccatgaccacaaacctgcaatccaaattttgtcgtgctagtgtaagaaatgggagatggcatgttcctagtttgacaataaaatctcaggcagctgttgaaggggatgtacttgagaaagaatcagtctctatcaatgaagaaagtgattacggggtcgtttgtatgcaccatgttggaattttatgtgaaaacctagaaagatcacttgaattttatcaaaacgttctaggcctcaagattaatgaagcaaggccacatgataagcttccatacaagggtgcttggttgtgggtaggctctgagatgattcatttgatggagcttccaaaccctggccctttaactggacgagctcaacatggtggtcgagatcgtcacacgt

SEQ ID NO: 33718 - DNA, 359 bp, Glycine max
  unsure at all n locations
  Clone ID: LIB3138-018-Q1-N1-F3
caaaaccagtgtcattgcttcaccagatttccactttattgcatcatttacaaaattagttaattcgatcctcttcagcttcaccttccttgggggcaggttttcaaggactctgaacatttgatccatcaccatctcttcttagcagtgaggtgaggtgaggtcactacaatggcttctgcttgtgtgaccctgaaagccaatacccatttagcaaactctgagaaaggctttcttggagaaagaataaaaagtggcttcaacaacagtgccttggtgatgaatcagatggctatacgttctagaagccacaagagggtgaaacatggngttggtgttgtatcttctagtctcacatc

SEQ ID NO: 33719 - DNA, 327 bp, Glycine max
  Clone ID: LIB3138-018-Q1-N1-F5
gtttttgatattctcttgggaatctctcaagattttgaaattgctggtaatactcttatgccagctttttctgttccacaggctactgccagatcttctgaaaatgcggaatcctctgcatgatctggaatttgtgttttctttcgcttgttcgtttgtttaattcaataaaggaaattaggcatgaccctcttgttgagtatgctctgcctatttgaaaatttccacacctcttttaattgtcgtaatgatgtgtggaagtgtgtgttattttaaaacaaaaaaagaaaaactgaagagacagcttttttaaataagcggccaacc

SEQ ID NO: 33720 - DNA, 400 bp, Glycine max
  Clone ID: LIB3138-018-Q1-N1-F7
gtttgtttgtttgtttgtttttttttcttctttctgttcttgttgggctgttattcccttttcggctcattgcagcattctacactgaacggcgtgtttggatggaagcctaaaaattgcggcaattgcgaaagctattactaatcacttggacgtgggacattcacgttcgcgcttcttttttctcttggcattgcgttaacgttgcgtttgtgtgtgcaattaacatcacacaacaaaaccttgttcgttcttctctgaactctctcattagtgtgagccgagagtcatgacggacggtcatctcttcaacaacatcaccctccgaggccgtggaggcaccaatccagggcagataaaaatatatcctggaggaattatatggaagagacagggtggt

SEQ ID NO: 33721 - DNA, 421 bp, Glycine max
  Clone ID: LIB3138-018-Q1-N1-F8
acactacgaggacaagttttcccacaacaaatttcaaacttaaatatgagttttgagtggagtgaagttactagcactttacactagggagaaacattgaagccatcactgaaatcaagcaaatggggaattgctcaatgaagggtaccactggagaatgtcaccactctattcgtgttatgtgtgacagtggtgccattttgcagttaaaagctcctaaaacagtggctcaagtgcttcaacactacccgggttatggtattttccgccagggtcatgcttcagcacctttgccagagcaagagagtttaagctatgatcttttctattatcttctccctttgaaagaggttcaagtggagcaccaaaaaagttgctgcgacaaagttcaacaagtgggtcaaagatcagaagaaatgtg

SEQ ID NO: 33722 - DNA, 380 bp, Glycine max
  Clone ID: LIB3138-018-Q1-N1-F9
ttattctctctctggagctagggcgagtgaccggagcggcgaagatagagtcagatcggaagcggaagaaggcgtcgacctccgcggcggagaaggagaaccggaataagaataagaagttgaagatgtcgtcgtcatcgtcgaaggctggtggcggtggtgaggttagggcttcgcacatattgatcaagcacgaaagttctagaaggaaggcctcgtggaaagatccagaaggcctgataatctagagcacaaccagagaaaacgcggtttgtcagcttaaggcccttcgcgacgacatcgatacgggcaaggccacatctgaggacattgcctctcgcttctacgattgcaacttcgacaagcgcggaagtgatctc

SEQ ID NO: 33723 - DNA, 294 bp, Glycine max
  Clone ID: LIB3138-018-Q1-N1-G1
gcggaatcctctgcatgatctggaatttgtgttttctttcgcttgttcgtttgtttaattcaataaaggaaattaggcatgaccctcttgttgagtatgctctgcctatttaaaaatttccacacctcttttaattgttgtaatgatgtgtgaagtgtgtgttattttaaaaaaaaaaaaaaataaaataaaataaaaaaaaaaaaaaatttaaataaaatttaaataataaaaaaaaaattaatttatatcaaattattttaaaaaaaaatattatttaaaaggggcggcccc

SEQ ID NO: 33724 - DNA, 435 bp, Glycine max
  Clone ID: LIB3138-018-Q1-N1-G10
ttgcaattgaagttgaagtcttgcccttctctcttcaactccaaacacaagacatcattatccatggctgcctacgactccactgacggagctgtcaacagagctcttttgaacctgaatgggtctggacctggggtttcagcttccagttcatccttctttgggagcagcttgaagaaggttattggctcaaggggtccccaacacaaagatttcctctggaagcttcaagattgttgctgtagaagagaagaaagagattgtagagacccacctgaccgacaaggacagatggaagggtcttgcctatgatatctcagacgaccaacatgacatcacaagaggaaagggtttggttgacttcctttttcaagctccacaggatgctggaacctactatgctgtcatgagcttctacgagtaccttaacactgg

SEQ ID NO: 33725 - DNA, 303 bp, Glycine max
  Clone ID: LIB3138-018-Q1-N1-G11
tgctaagaagcttcagatcactaatacgacgacgcattacggaactaaaggttgtgttgtgtcattgctgtttcactctcacgtgctcaaattttgtttgggtctctcaggaattaggatccgttatggggttctctgtaaccaccctaattatcccagtgattgaacttgtggccatccgttgttccataattggtttcaaccagagaccttccgctaatctatttcacctaagctgggttcttactgcaacaacattctgctagatgatgtgggccatcgtgtatctatcacagatgaaac

SEQ ID NO: 33726 - DNA, 382 bp, Glycine max
  Clone ID: LIB3138-018-Q1-N1-G12
ggaggattcctttgaggaagtttctttaagtgcagcacttaatggtgttgagggtttggactatatggaaagaattcctcttgccacatctgagggatttcctcatgtgctttcacgcaaaaatggtgaaaaaggcaaaaggagattttgtctctggggatggtgaagagatgacactgattccgggaaccagtgttgaagaggcttacaacaagctaatagttgaacttgagaaaagtgttcctacattggttggcattgaatgtcccaaagatgagaaacttcctcgtcgcaaaatttttgacaaacctaagacgcgctgcttcactattctccctatggagtttaatcttgtggtccgtcaaaagtttttaaattttgt

SEQ ID NO: 33727 - DNA, 422 bp, Glycine max
  Clone ID: LIB3138-018-Q1-N1-G6
tgcgaatctagtccataagggtcttcaagatttcacccagaagctgaactcagccacaactgatttggagaaagctgaagctcagattggggttgatgtccatagtgctctgaactctgctcttacaggctaataataagtactgtagtgttaagtctttccttctgtatttggtttatttccccccactatgtggcattgatttgtctcggtgtaatcaaagttgctaaaagaacattttcaccatgaatttctatgttgaaagtgacttgataaaataatatttcaacagcttccatctagctcaaggatgttgggcaagaccttgaaattagaaacaaaagtttcatttttgttttggattatcctattgtatggcaaatactggttaacaaataaaaaaaagaccataattttgattt

SEQ ID NO: 33728 - DNA, 295 bp, Glycine max
  Clone ID: LIB3138-018-Q1-N1-G7
atcatggcagctctgttaccttgcgcgccgaacatagtctatggtccgttgttggggaaccggggcacgagccagcatctcgaccgaccggactcgcatgctttctccggttcgaccaccagacactttcttcgcggttcgcttaccgtcgcccggttcggattcaaacccgatttcttgcccgagccggatgaagctgaaggcgttcttaaagaactgttcggccgaacggagggacttctttacacgattgccgatgcccgcgtttcttcgtcttgttgttcttcttccgata

SEQ ID NO: 33729 - DNA, 421 bp, Glycine max
  Clone ID: LIB3138-018-Q1-N1-G9
ctcatcactctgcggagtcactgacagccatccgactttggggagcgcaagatgggcattttcactgcagtagatcactctgccaatccggcacccgtcgaggtgtatggctggcgcatatatctgctcgcaatctccgctgcatttggttcggcaatgttcggctatgacagcgccttcattggaggaactctgtcgctggcgtccttccgaaggacatttggtctcacgcccgagacacaagccgccctctcctctcatatcgtttcgacattccaagggggttgctttttcggcgccctcttcatctatccagcccttgttcgctttggaagacggccatgcctaatccttgctggcatcctcttcacgatcggtgcccgcatccaaaactgaaccgaccgacatgttggcatgatct

SEQ ID NO: 33730 - DNA, 387 bp, Glycine max
  unsure at all n locations
  Clone ID: LIB3138-018-Q1-N1-H1
agagcttgacgtccatgcacgcgttttatgttcgttattttgctcgagaaaagcctnagccttccctacaactccaaacacaaagacatcatggtccatggctgcctccgtctccactgtcggagctgtcaacagagctcttttgaacctgaatggttctggagctggagcttcagctcccagttcagccttctatgggaccagcttgaagaaggttattgcctcaagggtccccaacagcaaggtttccggtggaagcttcaagattgttgctgtagaagagaagaaagtgattgaagagacccagcacaccgacacggacagatggaagggtcttgcctatgatatctcagacgacctacaagacatcacatgaggaaagggttt

SEQ ID NO: 33731 - DNA, 363 bp, Glycine max
  Clone ID: LIB3138-018-Q1-N1-H10
gccaggtcttgctgcaaatgtgaaatttggtggatgtggttcttacccaaatctgccttgggtatccacctcaggttcaggtccaaatggaatgacaatttctggtgttacttataaatacagcactgaccaagtcagaattgtctgtgcatgccatggttctcacatgacccctgaagagtttgttcgtcatgcatacgaagaccaagcctttgcagagggcaatgcaagattggggacagtaacaaacggcaatcctgctgcctgttcccacagctaatcttgtaccgatggaccgtaatatgtaaggtcttaacaagagaatcacgggaattgagctttaatttttgtatagatgaatga

SEQ ID NO: 33732 - DNA, 85 bp, Glycine max
  Clone ID: LIB3138-018-Q1-N1-H11
attgaagcgaattgtctttatcctgtaagtcaattaccttcagaagctgtcatggcaaatgttacatgtggtagtggacgtggtg

SEQ ID NO: 33733 - DNA, 350 bp, Glycine max
  Clone ID: LIB3138-018-Q1-N1-H12
ctctgtctctctctctcggtctcgctcttcttctcatcaagcacagagttacagactcaccgatcttccgattctctttcgtcttggtttatgagctcgaaggagagacccactcttggtggcacgcggattaagacccgcaaacgaaatattgctgcgccgctggaccctgcagcattctcggatgcagtggtccagatttatttggataatgctggtgatctggaacttattgctaagagtattgaatcttcagaccttaacttttcaagatacggtgacaccttttttgaggttgctttcactgggggtcgtacacaacctggaactaccaagcctgatgaggggga

SEQ ID NO: 33734 - DNA, 327 bp, Glycine max
  Clone ID: LIB3138-018-Q1-N1-H2
aaaagccgtatcgtatttttcacaagaggaatctcttacagcttgtttaacttatgtgcgtgctgcaacaactctggtggctgatgggtgtccatatttgtatgcaatggtgcatgatagttcagtgtctacaataccaggtgattttgtcattggtgtcaagttgacaaccataaacaatatgtgtgcatatgggctcaatcctggtatttcaagttctcgtcttttgggcaccattcctgagtccatttcacagcaaactgtttgcgaatcaaatggcaacagtgagaacaccattgatatttgattctagcaagcagagctttt

SEQ ID NO: 33735 - DNA, 273 bp, Glycine max; identical to SEQ ID NO: 32698
  Clone ID: LIB3138-018-Q1-N1-H3

SEQ ID NO: 33736 - DNA, 363 bp, Glycine max
  Clone ID: LIB3138-018-Q1-N1-H4
ttatttcctctcaggaatgtgttcccaggacctattgtgttttaaatccacaaaatccttttgtgttaaataggtggatgggaaaattgactttcccccagggcacttcccgaagtgttaagagaatgcctctttctataggggggaggagctggtgcaaagaatgctattctcatgaatatgccaaatgctgttctttcaatgtggagatattttgttggagatctcgtctttgaagtttctaagatgacttctccctacattaaatgtacagtctctttcttcatagcatttggaaatttggctgatgataccatcaattttgaggcttttccccacaagctggtgcaagttggagagatt

SEQ ID NO: 33737 - DNA, 384 bp, Glycine max
  Clone ID: LIB3138-018-Q1-N1-H5
caacctcgttccaacagccatggcggttcctgcaacatcctcagcccctgtccttcgacccatccccaccaaccgttccttctcttccccattccgttcactccccactcccaccacccgaaaacccctaaccgtcttcgccatggcccctaagaagaaggtgaacaagtacaacgaaaactggaaaaaggagtggtttggcgcggggatattctacgaggggagcgaggaagtggaggtggacgtgttcaagaagctggagaagaggaaggttttgagcaacgtggagaaagcaggcttgctctccaaggcagaacaattaggattctcgctctcttccatagagaagctcggcgtcttctccaaagccgaagagctcggctt

SEQ ID NO: 33738 - DNA, 373 bp, Glycine max
  Clone ID: LIB3138-018-Q1-N1-H8
acaatttggggtttttatttatttcgtttcggtcaaaaaaggagaaaggagaatatatattatgggaaaaaactctcccttcgcctctccagcttcttcttcttctccgttttctgatgctttttctcgaaggtactaattgaagatcccctttccttttcgttttcggtctccccttttctgaccctcaattttttttttggagcatcgtgctgtgataatatatatactctcttcttttcttttcttttcttttttttttttccttttcaagatttatggagatccctgggttagggttagatataatatttctgtagcatttttcaattggttcaactctctctctctttattctctcccaaaagaagaa

SEQ ID NO: 33739 - DNA, 300 bp, Glycine max
  Clone ID: LIB3138-018-Q1-N1-H9
tgtgttcccaggacctattgtgttttaaatccacaaaatccttgtgtgttaaataggtggatggggtaattgactttcccccaacgcactttccgaagtgttaaaagaatgcctctttctataggcggaggggctggtgcaaagaatgctattctcatgaatatgccaaatgctgttctttcaatgtggagatattttgctggagatctcgtctttgaagtttctaagatgacttctccctacattcaatgtacagtctctttcttcatagcatatggaaatttggctgatgacaccatc

SEQ ID NO: 33740 - DNA, 259 bp, Glycine max
  Clone ID: LIB3138-020-Q1-N1-A2
cactgctgtaagaattcccacttttcaccaacgccatctcaaacaacacttcacggcaccctcttcctcttccttacgcctcctcaatctcgcaaagatggaaggaagtgagatcagcgagcaagtagtatgggaggatttgggagcaaagaagaaagtttttgtagctggagccactggtagcactggcaaaagaatcgttgagcagttactggcaaagggttttgctgttaaagctggggttagagacatcgacaag

SEQ ID NO: 33741 - DNA, 185 bp, Glycine max
  Clone ID: LIB3138-020-Q1-N1-C6
tttgtgagaaagacttgctcaaagttgttgatagggagtacacattttcatacattggtgacccctgccgtggaacatacccttttattgcaaagcttaagcaagtgcttgtgggctatgcattggccaatggagagaacgagaagaacacaaacacatcaatctttcaaaagattgcaacattt

SEQ ID NO: 33742 - DNA, 139 bp, Glycine max
  Clone ID: LIB3138-020-Q1-N1-G1
ccaatgcaagatgttcaagtttcaattgattggtttatttcctctcaggaatgtgttccccaggacctattgtgttttaaatccacaaaatccttttgtgttaaataggtggatgggaaaattgactttccccaggcac

SEQ ID NO: 33743 - DNA, 157 bp, Glycine max
  Clone ID: LIB3138-020-Q1-N1-H6
gctcggattcggtcgagacctttgcacttaccattgggttaattgcgcaatacgtgcttaagcctgttcttggaatcttggttgcaaaggcttttggtttgtctaggatgttttacgcgggctttgtcctaaaacttgtgtttcgggggctcaacta

SEQ ID NO: 33744 - DNA, 444 bp, Glycine max
  Clone ID: LIB3138-021-Q1-N1-A3
aaaggtttttaaattttgtgaggttcattatgaagaaaagggacaaacttagttgtcaagttggaatcaacccatactccatggaatggactggtttggccaatagattactgagtaagggcaatgatattctgtgttgcgattatgctagttttgatggtttgattaccaagcaagttatgagcaagatggcagaaatgataaacagtctttgtggtggtgatgaaaaattgatgcgtgaaaggacgcacctgctgttggcttgttgttcaaggatggcaatttgtaagaaagatgtttggagagttgaatgtggaatcccttctggatttccgctcacagttatttgcaatagcatttttaatgagatgctcattagatatagctatgaaaaattactgcgccaggctaaagctccaagtatgtttttacaatccttcaaaa

SEQ ID NO: 33745 - DNA, 347 bp, Glycine max
  Clone ID: LIB3138-021-Q1-N1-A9
atgcagacgatgatgaatgctcctgattcaaatgataatattgatttactgttgagcattgatttgttgggtttacaaggagcaggtaaagcttttccaaacaaaattgtttttgatgataagcttgtgttggctaacacacaagaattctttgatggaaattttccagtattcttggttaccaatttttgtgaattgtctttatcctgtaagtcaattaccttcagaagctgtcgttgtaaatgttacatgtggtagtggacgtggtggtttacccaccactgcttggattagatctgcagttaacaatcgctcctcagatatcaacaaaaggattcgcacagcac

SEQ ID NO: 33746 - DNA, 317 bp, Glycine max
  Clone ID: LIB3138-021-Q1-N1-B2
attttctcaggagaaactttaagcagatgtctaatgttttgtgggtggctcctgaggacaaggcgagtttatggtcacaacttcattatgtttcgtgtaataatctggaaatgcaagaagcttatcttgtcaacctcgtaaatgtgttacgagaattgtatttgcacagtccagaggaagctcgccaattgagaaggaaagctctctctcgtattgaatggctgcaaaaagctgatgtgcctaccatagcacagattgaagagttccattcgatgcagaggatgatgaatgcttctgattcaaatgataatattgat

SEQ ID NO: 33747 - DNA, 367 bp, Glycine max
  unsure at all n locations
  Clone ID: LIB3138-021-Q1-N1-B3
ttaaaagattgcctttttctatagggggaggagctggtgcaaagaatgctattctcatgaatatgccaaatgctgttctttcaatgtggagatattttgttggagatctcgtctttgaagtttctaagatgacttctccctacattaaatgtacagtctctttcttcatagcatttggaaatttggctgatgataccatcaattttgaggcttttccccacaagctggtgcagtttggagagattcaagaaaaagttgtattgaaattttcacaagaggaatttcttacagcttggtcaactcaagtgcgtnctgcaacaactctgttggctgatgggtgtccatatttgtatgcaatggtgcatga

SEQ ID NO: 33748 - DNA, 577 bp, Glycine max
  Clone ID: LIB3138-021-Q1-N1-B4
ggttccgagggagaagttcgagaagcttgaaggagtggttcgaaaaatttatagtcaaattggtgttatcaaggaggatggcctctggatgccggttgatcctgaaaccgagaaaaccctaggttactgcttcattgagtacaatacccctcaggaagctgagcttgctaaagagaagactcatgggtacaaattggaccgggcacacatatttgccgtgagcatgtttgatgactttgacagattcatgaaggtgcctaatgagtgggctcctcctgaaactaagccatatgctccaggggaaaatcttcaacactggctcactgatgcaaaggccagggaccagtttgtgattcgtgctggttcggatactgaggttttgtggaacgatgccaggcatttaaagcctgatcctgtttataagcgtgcattttggacagagagttttgtgcaatggtctcctttggggacatacttggccactgttcacagacagggggcagcagtcttgggaggtgctgcaagctttaatagacttatgcgatatgcacatcctcaagtaaaacttattgatttt

SEQ ID NO: 33749 - DNA, 526 bp, Glycine max
  Clone ID: LIB3138-021-Q1-N1-B5
gaaaaaaaaaaaaattaaaaaaaaaaaaaatataaaaaactaagagggaaaaaaaaaaaaaaaaaaaaaaaaaaaaaaaaaaaaaaaaaaaaaaaaaaaaaaaaaacgaaaaaaaaaaaaaaaaaaaaaaaaaaaaaaaaaaaaaaaaaataaaaaaaaaaaaaaaaaaaaaaaaggggggggccccctctttgaaaactttttcccccggaaaataattcggggccggtttttgggggggaacaaatttttctttatggggggggttttaaaggtgggggaaaaaaggggaaaaggttttctctggggaaaaatttttttccctaaaaattcccaaaaaaaataaaaccggaaataaaaagtggaaagccgggggggcctaagggggggggccaccccaattatttggggggccacaaaggcccctttttaaaggggaaaacctttgggcccctgttttttaaaaaaatgcccaacccccgggagaaggggtttttctttttgggccccagggggtttttttttt

SEQ ID NO: 33750 - DNA, 537 bp, Glycine max
  Clone ID: LIB3138-021-Q1-N1-B6
gtttcgggtaataatcgggaaatgcaagaagcttatctggtcaatctcgtaaatgtgttacgagaattgtatttgcacagtccagaggaagctcgccaattgagaaggaaagctctctctcgtattgaatggctgcaaaaagctgatgtgcctaccatagcacagattgaagagttccattcgatgcagaggatgatgaatgctcctgattcaaatgataatattgatttactgttgagcattgatttgttgggtttacaaggagcaggtaaagcttttccaaacaaaattgtttttgatgataagcttgtgttggctaacacacaagaattctttgatggaaattttccagtggattcttggttaccaatttttgtgaattgtctttatcctgtaagtcaattaccttcagaagctgtcgttgtaaatgttacatgtggtagtggacgttgtggtttacccaccactgcttggattagttctgcagttaacaatcgctcctcagatatcaacaaaaggattcgcacagcacttggg

SEQ ID NO: 33751 - DNA, 546 bp, Glycine max
  unsure at all n locations
  Clone ID: LIB3138-021-Q1-N1-B8
aagacttgactccatgcacctacgtagctcgaattcgctcgaggaagaaccggngtatcaatctgagaagaagcgtcgtctaagtgtggatcaagtgaaggctttggagaagaactttgaggttgaaaacaagcttgaacctgagaggaaggtgaagcttgcccaagaacttgggttgcaacctagacaggtagccgtatggttccaaaaccgtcgagccagatggaaaaccaaacaattggagagagattatggtgtactcaaagccaattatgatgctcttaagcttaactttgacaccctcgatcaggacaacgaagccttacgaaagcaggttaaagaattgaaatcgaggctgctgcaagaagagaacacaggaggaagcggtgtttcggtgaaggaagagataataacgaggcctgcagactcagaagacaaaacgatggaacaaagtaagagtgacccatcttctgaaaccttaaatattaatcctagttcggagtcggaggaggatcacttgaactacgagtgttttaacaacaacga

SEQ ID NO: 33752 - DNA, 460 bp, Glycine max
  unsure at all n locations
  Clone ID: LIB3138-021-Q1-N1-C1
aaagtgtttggtttgggggcgtggtgaccgagggcacgaaaggaggaaactattggctacagaaagtcgtttctttagccgggtttctttcaaaaaatggtgcagagtctctgtttgatggcttctcatggttaccctcctggccttgtcttgcacccacaagtactgggcttgccctgcgctaccatgaagggctaccaaacattctttccttctccagtagcaaaagcagacctgatcagatatcagtctcgttgtcttgagccaagtccatgtgaggagtcaatgaaatctcaaaatgaatggtttgattataacaagtttgtcaatgtcgacttctcagttgaaaggcccatgcttattgatgaccaagcaaactgctcaaatgcagttcttcttggcttttgcattngtgaccaatgcactaagcgtgatgaaattataaatttactaatgtctg

SEQ ID NO: 33753 - DNA, 611 bp, Glycine max
  Clone ID: LIB3138-021-Q1-N1-C2
tcggttcaggccaaacctggaaattggatcacacttatacaaaattctccaattagtaacttattgagagttgctgcttggaagaaaggctgtttaatggtcaagattgtgatgtctgggaatgcagcagtcaaaaggagtgattgggcctcattggtacaagtgtttttaacaaacagcaacagtacagagcattttgatgcatgtaagtggacaaaatcagaaccacattcctgggaattgatcttcccaatagaggtatgtggtcctaataatggttttgaaatgtggagttctgagtgggcaaatcaaacttcatggcatttgagtttccttattgacaatcccaaacagtctacagtttttgatattctcttgggaatctctcaagattttgaaattgctggtaatactcttatgccagctttttctgttccacaggctactgccagatcttctgaaaatgcggaatcctctgcatgatctggaatttgtgttttctttcgcttgttcgtttgtttaattcaataaaggaaattaggcatgacccttcttgtgagtatgctctgcctatttgaaaatttccacacctcttttaattgtcgtaatga

SEQ ID NO: 33754 - DNA, 503 bp, Glycine max
  Clone ID: LIB3138-021-Q1-N1-C3
ggttggggggggaattgcaggaaagccagcaaaactgatcaggcagagataccgtgaagccgcagacttgatcaagaagggaaagatgtgtgctctcttcatcaacgatcttgatgcaggagctggtcgtcttggtggaaccacccaatacactgtcaacaaccagatggtgaatgccaccctcatgaacattgctgataaccccaccaatgtgcagcttcctggtatgtataacaaggaagagaatccccgtgtgcccatcatcgtcaccggtaacgatttctccacactctatgcgcctctcatccgtgatgggcgtatggagaagttctactgggcaccaacaagggatgaccgcattggtgtctgcactggaatttttcgcaccgattcaattcctgaacaggacgttgtcaagattgttgacaccttccctggccaatccattgatttctttggtgcactgagggccagagtatatgatgacgaagtgaggaagtgga

SEQ ID NO: 33755 - DNA, 514 bp, Glycine max
  Clone ID: LIB3138-021-Q1-N1-C4
ggatgatgaatgctcctgattcaaatgataatatggatttactgttgagcattgatttgttgggtttacaaggagcaggtaaagcttttccaaacaaaattgtttttgatgataagcttgtgttggctaacacacaagaattctttgatggaaattttccagtggattcttggttaccaatttttgtgaattgtctttatcctgtaagtcaattaccttcagaagctgtcgttgtaaatgttacatgtggtagtggacgtggtggtttacccaccactgcttggattagttctgcagttaacaatcgctcctcagatatcaacaaaaggattcgcacagcacttgggaaaggtaagaaaattgtttttcttactagagttgatccttttccagtagctttactggctgttctttttggcgttaagaatgaaattctgagttctaacgccactaatcctatgctgacgcgacttcttgagaactgtaagagtctcaaatatctggttgatgagtg

SEQ ID NO: 33756 - DNA, 550 bp, Glycine max
  Clone ID: LIB3138-021-Q1-N1-C5
tctgaaaaaaaattttttttttttttaataatcaaggggttttttggtaccacatgtagtgcaaggatcagcactagcccttcttggattatggcacaccatccacaccatcagatcttacctggtgaagggccctgccaacttcactgtaagattctggtaccagtttaacactacccctcagtctagacttaaacacttagaacttgtttctattttatccttttccatccttgcatttttcgatcaaattctagacttccctcatttccactatgcctttaagcttgacaactttgagcatgcaactatgttcatacaccttgctttgtttgctggtttctccctctccactgagttgactgattcacttgacctcttctccggctttgttgggatacttgcatcctcggtgtttagtcaagaactattccttctccattttcactccacagaccatgttggacttgaaggccattaccactggctgctgcagctcatagtgcttgtctcactagtatcatctttggctgcaactatttttcctaac

SEQ ID NO: 33757 - DNA, 576 bp, Glycine max
  unsure at all n locations
  Clone ID: LIB3138-021-Q1-N1-D3
gggtaataatctggaaatgcaggaggcttatctggtcaatctcgtaaatgtgttacgagaattgtatttgcacagtccagaggaagctcgccaattgagaaggaaagctctctctcgtattgaatggctgcaaaaagctgatgtgcctaccatagcacagattgaagagttccattcgatgcagaggatgatgaatgctcctgattcaaatgataatattgatttactgttgagcattgatttgttgggtttacaaggagcaggtaaagcttttccaaacaaaattgtttttgatgataagcttgtgttggctaacacacaagaattctttgatggaaattttccagtggattcttggttaccaatttttgtgaattgtctttatcctgtaagtcaattaccttcagaagctgtcgttgtaaatgttacatgtggtagtggacgttgggtttacccaccactgcttggattagttctgcagttaacaatcgctcctcagatatcaacaaaaagattcgcacagcacttggggaaggtaagaaaaatgttntcttactagagtgatccttttcagta

SEQ ID NO: 33758 - DNA, 515 bp, Glycine max
  Clone ID: LIB3138-021-Q1-N1-D4
ggagggagatccaaaaagagagagtggaaaagatggcgcggttgatcacagtggtgtggtgcgcggtggcggtgctattatgcgccgcggccggtgcgtcgtgggtggaggaggcggcgaacccgatacgaatggtgtctggcgtggaggcggaggtggttcgggtgatcggggagtgccggcgtgcgttgaagtttgctaggttcgtgagcaggttcgggaagagttaccaaagcgaggaagagatgaaggagaggtacgagatattctcgcagaatctcaggttcatccgctcccacaacaagaagcgtttgccctatactctctctgttaatcattttgctgattggacttgggaggagttcaaaagacacagactaggagctgcccaaaattgctctgccactcttaacggcaaccacaagctcaccgatgctgttcttcctccaacgaaagactggagaaaagaaggtatagtgagttcagttaaagatcaaggcagctgcggatcatgc

SEQ ID NO: 33759 - DNA, 478 bp, Glycine max
  unsure at all n locations
  Clone ID: LIB3138-021-Q1-N1-D5
cgaatttcggttcgaggagcattttgatgcatgtaagtggacaaaatcagaaccacattcctgggaattgatcttcccaatagaggtatgtggtcctaataatggttttgaaatgtggagttctgagtgggcaaatcaaacttcatggcatttgagtttccttattgacaatcccaaacagtctacagtttttgatattctcttgggaatctctcaagattttgaaattgctggtaatactcttatgccagctttttctgttccacaggctactgccagatcttctgaaaatgcggaatcctctgcatgatctggaatttgtgttttctttcgcttgttcgtttgtttaattcaataaaggaaattaggcatgaccctcttgttgagtatgctctgcctatttgaaaatttccacaccccttttaattgtcgtaatgatgtgtgaagtgtgtgttattttnaaaaaaaaaaannnnaa

SEQ ID NO: 33760 - DNA, 490 bp, Glycine max
  Clone ID: LIB3138-021-Q1-N1-D6
tcggttcgaggcctcttttcgatgcacgtggattccgcgtggcgaatcggcgtagaaaaaaacctgttaccggttgaaacagttgacgccgggctcaaatcccttgctagtggatgccctaatttacgcaagctcgaggtggcaggttgcagcgaggttgggatttcaacgattggcgccgagtgtgctaccttgcaggagctggagctgcagaggtgtgacgacgccgttttgggaggtgttgcagggtgtgagaatttgcagattttgaagatagttgggtgtgtgaaggggttttatgagtccgtggtttcggacattgggctaacgattttggcgcaggggtgtaagagattggtgagattggagcttgttggttgcgaggggagttttgacggtgtgaaggcgatcgggcagtgctgtgtgatgctggaggagttggtcattgtggaccacagaatggacgatgggtggcttcgccgggtttcgt

SEQ ID NO: 33761 - DNA, 540 bp, Glycine max
  Clone ID: LIB3138-021-Q1-N1-E1
tccttccaaagggttgggttctttacactggaaccatcgtcactgaaaatggcaaggaaaagaaggtgacaattgattttgagcctttcaaacctatcaatgcatcactgtacctctgtgataacaagtttcacacagaagcactgaatgaacttttagaatctgatgacaagtttggtttcattgtgatggatggaaatggcaccctttttgggactttaagtggaaacactcgtgaggtgcttcacaaatttactgttgatctaccaaagaagcatggtagaggaggtcaatcagctttgcgttttgctcgacttaggatggaaaagcggcacaactatgttaggaaaactgcagaacttgctactcagtttttcatcaatcctgccaccagtcaacctaatgtttctggacttatacttgctggttctgctgacttcaagactgagttgagtcagtcagatatgtttgaccctcgattgcaagcaaaaatattgaatgtggtagatgtttcttatggtggggaaaatggattcaatc

SEQ ID NO: 33762 - DNA, 559 bp, Glycine max
  Clone ID: LIB3138-021-Q1-N1-E3
cttttctgaggaagttgctattcttgatggctactttggcaagcttagtgcaggaagcaatgcttatattttgggtggccaagacaaatcacagaactggcatgtctactctgcttctgcagattctgtaactccatgcgacaatgtttacactctagagatgtgcatgactggcctggatagagagaaagcacaggttttctacaaagaacaatctgcttcagctgccattatgactgttaattctggcattagaaaaattcttccagattctgagatttgtgactttgactttgagccatgtggttattcaatgaactctgttgaaggtgctgctgtttctaccattcatgttaccccagaagatggtttcagttatgcaagctttgagactgttgggtatgacttcaaagtggtgaatctgaacgaaatggttaagagggtattggcatgttttctcccaactgagttctctgttgcagttcatgtggatggtgcaagcaagttgtttgatcagacgtgttttcttgatgttaagggatactgtcgcgaagagagg

SEQ ID NO: 33763 - DNA, 560 bp, Glycine max
  unsure at all n locations
  Clone ID: LIB3138-021-Q1-N1-E6
actctctaagagctctgacatctcatgcacgcctaccttaacttcgaatttcggttcaaggttgacaaccataaacaatatgtgtgcatatgggctcaatcctggtatttcaggttctcgtcttttgggcaccattcctcagtccatttcacagcaaactgtttggaatcaaatggcaacagtgagaacaccattgaattttgattctagcaagcagagcttttgtcagttttctattgaccttctcggtggaggaatcttagtggacaaaactggagattggatcacacttatacaaaattctccaattagtaacttgttgagagttgctgcttggaagaaaggctgtttaatggtcaagattgtgatgtctgggaatgcagcagtcaaaaggagtgattgggcctcattggtacaagtgtttttaacaaacagcaacagtacagagcattttgatgcatgtaagtggacaaaatcagaaccacattcctgggaattgatcttnccaatagaggtatgtggtcctaataatggttttgaaatgtggagttctgagtggg

SEQ ID NO: 33764 - DNA, 395 bp, Glycine max
  Clone ID: LIB3138-021-Q1-N1-F3
aatggaccttcccaataaaggtatgtggtcctaataatggttttgaaatgtggagttctgagtgggcaaatcaaacttcatggcatttgagtttccttattgacaatcccaaacagtctacagtttttgatattctcttgggaatctctcaagattttgaaattgctggtaatactcttatgccagctttttctgttccacaggctactgccagatcttctgaaaatgcggaatcctctgcatgatctggaatttgtgttttctttcgcttgttcgtttgtttaattcaataaaggaaattaggcatgaccctcttgttgagtatgctctgcctatttgaaaatttccacacctcttttaattgtcgtaatgatgtgtgaagtgtgtgttatttt

SEQ ID NO: 33765 - DNA, 530 bp, Glycine max
  Clone ID: LIB3138-021-Q1-N1-G1
ggccttcctgataataccattaggctaatatcctaaaatggagttaaaacattagaaacagcttatgggcactgtgctcctgtaacttgcctcggtctttcacctgatagtaactacctagttacaggatcccgagacacaacagtattactctggagaatacatagggcactttcatctcactcaagtgtcgtatcagaacattccactgggacaggcacatcgtcttcaaccagtaatagttcattgcacttaatagaaaaagaccggagacgtcgaatcgagggtcctatacaggtacttcgggggcaccacagtgaaatactcagttgttgtgttaactcagatcttgggatagttgtttcctgctcccattcatcagatgttctcttgcactctataagaaggggacgtttaattagaaggctcgatggtgtggaagcccatactgtttgcctttcctctgaaggggttgtaatgacctggaatgaatcacagcatactttcagtacttttacactcaatggtac

SEQ ID NO: 33766 - DNA, 406 bp, Glycine max
  Clone ID: LIB3138-021-Q1-N1-G3
tccttaacttcgaatttcggttcgaggcagcccggaaagagataccggtcttgggcacctgacaggcaagatagatttgctcgccgatgggttgatgctttatctgacccacgggtcacccatgagatccgcagtgtctggatatcatactggtctcaggctgaccgttctctaggccaaaagatagcttctcatctcagcacgaggccaaatatttaatgttgttgccaactccagaatgattgttagagttgcagacgtgcaaagagtacgataaggatgtgattttggattacctgaaagaactaatccttttcttgcaatattatgttgtgtgtacccataactccatgaatgcaactcgttgacctatctcaataaatgccgtttgtatttgttagtattt

SEQ ID NO: 33767 - DNA, 562 bp, Glycine max
  unsure at all n locations
  Clone ID: LIB3138-021-Q1-N1-H3
cggttcgggtgaaaaagtgcaggatctttttttgttggatgttactcctctatccactggtttggagactgcaggaggagtcatgactgtgttgattcccagaaacacaaccattcccaccaagaaggagcaggtgttctcaacctactctgacaaccagcccggtgtgttgattcaggtctatgaaggtgaacgaacgaggactcgtgacaacaatttgcttggcaaatttgagttatctggaattcctcctgctcccagaggtgttcctcagatcactgtttgcttcgacattgatgccaacggtatattgaacgtgtctgcggaggacaaaaccactggacagaagaacaagattacaattaccaacgacaagggcaggctttctaaggaggagattgagaagatggtgcaggaagctgagaaatacaagtctgaggacgaggagcataagaagaaagtggaggccaaaaatgcattggaaaattatgcctataacatgaggaacacaatcaaggatgacaagattgcttncaaactgtcttctgatgataagaagaaa

SEQ ID NO: 33768 - DNA, 509 bp, Glycine max
  unsure at all n locations
  Clone ID: LIB3138-022-Q1-N1-A1
ttaatccgtttttaacttttaattttcctcggcaatctgaaccttccggatttcgtttttctttgttccggtagccagccagccagccatggtgctcttcaatgtttcacgcgttgagaccactcccttcgatggacagaagcctggaacctctggtctccgcaagaaggtgaaagtattcgtgcaacctcattacctccataactttgttcagtcaacattcaatgcattaactgtggaaaaagttagaggtgcaacgctagttgtatctggtgatggtcgttatttttcaaaggaagctattcagattataactaaaatgtcagcagcaaatggagtaagacgtgtttggattggtcaaaatggattactttccactcctgcagtatctgctgttatacgtgaaaanactggagctgatggatccagggcaacaggtgcatttatactgacaagcagtcacaatcccggtggccctaatgaggattttgggattaaatataatatgg

SEQ ID NO: 33769 - DNA, 515 bp, Glycine max
  Clone ID: LIB3138-022-Q1-N1-A5
tttacctccttccccctccttacctcgaattcgtctcggaaaaaatcattttttatcacaacaaaaaaaaaaaaaaaaggggaattacaaaaataaaggcaaaaaaaaaacataataaaaaaaatactaaatataataataaaaatgcccccaaattttttgaccggggcccccccctttttttttgccctcttccccgtaattttttaaaaggggcgcccccggactctcctcctttttcccccggtttttatttctccccccttccccctgggcccccccctttccctttttgggggggctttttaacccgggccctatctttccaaaattttttcccgggggactttttttttcccccccctaatccccaacaaattgagccccctgctaaatttccaaatccgttcgttccctccttgaggaatttaatccctttgtttgcgtgtggttataataccttttttaatggggaaaaatgtgtcctccctttttttaccagaaaccggcccccc

SEQ ID NO: 33770 - DNA, 508 bp, Glycine max
  unsure at all n locations
  Clone ID: LIB3138-022-Q1-N1-A6
accaccattggttcctccattgaccctaacgggcttgctccgcgacgtcgccgccaaattcccttcccgccgcgccatctccgtcgccggaaaattcgacctcacccactcccgccttcatcaactggttgaatccgccgccgcccgcttagtcgccgccggaatcaaacccggcgacgtcatcgctctcaccttccccaataccgtcgagtttgttgtcttgtttctagccgtcattcgagtgcgcgccacagccgcgccgttaaacgcggcttacacagccgaagagtttgagttttacttgtccgactccgagtccaagcttcttctaacatcagcagaaggaaacaactcagctcaagccgcagcttcaaaactcaacatccttcacagcacagcttcaataacccaagccgaagacaaagaagccgagctgagcctctcattaagccactccgagtcagagtcaattaactcggntgagtcactcggaaacgatccagatgac

SEQ ID NO: 33771 - DNA, 429 bp, Glycine max
  unsure at all n locations
  Clone ID: LIB3138-022-Q1-N1-B1
tttaatctctgaccagaacagaacctttgccacacttgccataactactctattgaagacaggaaatgaatcaagtgtggaccgccttatgaagcagattacaaatttcatgtctgatattgctgatgagttcaaaattgttgttgttgaagcaataagatcactatgcttgaaattccctttaaaatatagatctctgatgaatttcctaagtaacattcttagggaagaaggtggctttgattacaagaaagcaattgtagattcaattgtgattcttattagagatatccctgatgctaaggaaagtgggttgcttcatctttgtgagtttattgaagattgtgaattcacttatttgtccacacagatactgcacttnctgggagttgaaggaccaaanacttctgaccccagcaaatatattcg

SEQ ID NO: 33772 - DNA, 318 bp, Glycine max
  Clone ID: LIB3138-022-Q1-N1-B5
aaaaggagagaactttttttcttggttggagtttccattttgttggggttttctaaagcgaagtgaaaaattcaatggcggaggttttaaccaaggcgagtttggtttcatcttcttggcatggggttagtcaacggcatcatcatcgaagggtttcaacggttctttcaaataatacatgtagcttccgttccggcgtgggaaagttctcttctttgaagatgaattctcaggttctcagatcttggtcctcttcttctgagtttcagggtaaaaagcttgcctttcatgtaaatataggattacccaatagggtca

SEQ ID NO: 33773 - DNA, 563 bp, Glycine max
  Clone ID: LIB3138-022-Q1-N1-B6
cccttaaccattttgtgtgcttatgggctcaatcctggtttttcaggttctcgtcttttgggcaccattcctcagtccatttcacagcaaactgtttggaatcaaatggcaacagtgagaacaccattgaattttgattctagcaagcagagcttttgtcagttttctattgaccttctcggtggaggaatcttagtggacaaaactggagattggatcacacttatacaaaattctccaattagtaacttattgagagttgctgcttggaagaaaggctgtttaatggtcaagattgtgatgtctgggaatgcagcagtcaaaaggagtgattgggcctcattggtacaagtgtttttaacaaacagcaacagtacagagcattttgatgcatgtaagtggacaaaatcagaaccacattcctgggaattgatcttcccaatagaggtatgtggtcctaataatggttttgaaatgtggagttctgagtgggcaaatcaaacttcatggcatttgagtttccttattgacaatcccaaacagtctacagtttttgatattct

SEQ ID NO: 33774 - DNA, 412 bp, Glycine max
  Clone ID: LIB3138-022-Q1-N1-C1
tcgaatttcgcctcgagagcgggctatggtggatactttgtttgggaccgagttagggattcgggccgggtcggaggttcgagctgaggtatccgaattggtgagtcagttggaagcggcgaatcctacactcgcccccgtggtagaacctgcccttctcaatgggaattgggtgttgctgtacactgcatcttctgaactgttgcctcttctagccgcggtaagattgcctttgttgaatgtggacaagattacacaaacaattgatactagtagctccactattataaactccacaacattgtctagcccttttgcatccttgtctttcagtgcatctgcctcattagaagttcgaacccctacgagaattcatgttacatttaaagaaggttcaatacaaccttcagag

SEQ ID NO: 33775 - DNA, 368 bp, Glycine max
  Clone ID: LIB3138-022-Q1-N1-C3
tgacgctttccccccctccttaaacccgaatttcgcctcgagaaaaaaaaattttgtgagcataatataaaaaaaccttaaagaaggggcgatcacagttaaatacaaaaaaaaaaaacaaaaaaaaacaaaaaaaaatataaactataaaaaaataactaaaccaaacttggggccgcccccctctttttaccctccttcccccgtttttttttttctgcccggtccctgggggcttcccacttttccttttagggagcctttttaaacctggcctaaaccatggcaatagcttttccctgggaaaaattgttaccccccccattttccccccaatttccaacccgaaggcatatttgcaaaaccca

SEQ ID NO: 33776 - DNA, 675 bp, Glycine max
  Clone ID: LIB3138-022-Q1-N1-C4
ggtttggccaatagattactgagtaagggcaatgatattctgtgttgcgattatgctagttttgatggtttgattaccaagcaagttatgagcaagatggcagaaatgataaacagtctttgtggtggtgatgaaaaattgatgcgtgaaaggacgcacctgctgttggcttgttgttcaaggatggcaatttgtaagaaagatgtttggagagttgaatgtggaatcccttctggatttccgctcacagttatttgcaatagcatttttaatgagatgctcattagatatagctatgaaaaattactgcgccaggctaaagctccaagtatgtttttacaatccttcaaaaattttgtttctttgtgtgtgtatggtgatgataacttaattagtgttcatgaatatgtcaagccttactttagtggttctaaattgaaaagctttctagctagtcataacatcaccattactgatggtattgacaaaactagtgcaactttgcaatttagaaagttagcagattgtgattttctcaagagaaactttaagcagatgtctaatgttttgtgggtggctcctgaggacaaggcggagttatggtcacaacttcattatgtttcgtgtaaatatctggaaatgcaagaagcttatcttgtcaatctcgtaaatgtg

SEQ ID NO: 33777 - DNA, 585 bp, Glycine max
  unsure at all n locations
  Clone ID: LIB3138-022-Q1-N1-C6
aaacacacacaaccacacaccaaaggctcgccggaaaatctttctccggcgacctggaattccgacgaaggtagttgcggctccttcgtcccgaaactgaggccctcaaagtataaactttggtggtggtgggtaggatctggcggtgtatgatgggatcttgcatatgcccgttggagactccggcgaggttgctttggaccacaagcttcttccgtcataagcttatgatcttctaataattaataattcacgcacacaaacaaacaaacaaacaaacaaaaaacacttcataacaacaacaacaacccttctgaaattctcaacacaagtttcaaaaaacagagtaaaagaaacagagcataaacacacacacaaaaacacaaacacagacaccttttaagtattaaggtgtctctttctctccccggaaagtttctccgtcggcggtggtgattgaccggagtgccatggagtctggacggattttctttggtgcctctgcttcaagcggcaacaacatgctctntctcggcaacactgaactngcttttcgagggagatcgattatgagcatggaggaag

SEQ ID NO: 33778 - DNA, 274 bp, Glycine max
  Clone ID: LIB3138-022-Q1-N1-D4
aaaaataaaaaaaagaaagggaaaaaaaaaaaaaaaaaaatacaaaaaaaaaaaaatacctaataactaaaaaaaggggcgtcccccctttattaacctttcaaacccggaattaatttcggacccggtccctaaaggattccaaatttcccttataagaagccgtttaaaacctgggctaaataagggcaatagctgttccctgtgaaaaattgtaatccgttaaaatttccaaaaaaaatacaacccgaaaccataaagtgaaaaccctggg

SEQ ID NO: 33779 - DNA, 579 bp, Glycine max
  Clone ID: LIB3138-022-Q1-N1-D5
ctgtttggctccattctgaatggagctttctgcaccttcttcaccctctcttctaagatgtccttcatccctgcttctgaattctagggttagggttttccatacaatacccaaccccacacgcccacctttccaagcttcaatcttttcactcaaccaacgcaatctcactccaatggatcttcccagaaacgtctcctccgctgccttggtgggagacaacgcttcggccacgaccactttgccaattgactcagatgctagaatcggagaggttaaaagggtcaccaaggagaccaatgtatcagtcaaaataaacttggatggttctggggtggctgatagtagtactggaattcccttcctcgatcatatgcttgatcaacttgcttcacatgggctgttagatgtacatgtaaaggctacaggtgacatacatattgatgatcatcacacaaatgaagacgttgcccttgctattggaacagctttgctgcatgcccttggtgataggaagggtattaaccggtttggtaacttctctgctcctcttgatgaagcattgatacatgtttcact

SEQ ID NO: 33780 - DNA, 562 bp, Glycine max
  Clone ID: LIB3138-022-Q1-N1-E4
tttggtttaactgtggaccatggtttggttgggtttacagggagcaggtaaagcttttccaaacaaaatggtttttgatgataagcttgtgttggctaacacacaagaattctttgatggaaattttccagtggattcttggttaccaatttttgtgaattgtctttatcctgtaagtcaattaccttcagaagctgtcgttgtaaatgttacatgtggtagtggacgtggtggtttacccaccactgcttggattagttctgcagttaacaatcgctcctcagatatcaacaaaaggattcgcacagcacttgggaaaggtaagaaaattgtttttcttactagagttgatccttttccagtagctttactggctgttctttttggcgttaagaatgaaattctgagttctaacgccactaatcctatgctgacgcgacttcttgagaactgtaagagtctcaaatatctggttgatgagtgtccttttgcatttgtgaactagtatgtagtattttattcacttaaataaagcgcattactatgtgcaatgagtgtgttt

SEQ ID NO: 33781 - DNA, 613 bp, Glycine max
  unsure at all n locations
  Clone ID: LIB3138-022-Q1-N1-E5
acctcgaatttcggctcaagttcaacctctgaatgcttctctctccataataacaaaaccaacaccctctttctctttctctcttcttcatttccaatgctgcagcaatctgcaagcttcataggcactacgacagacccaattgaattcccgagaaagaattgaagagaaaaaaccgtaaagttaggatcttttgtgtgatttcgatgggtgcgtacagagcggacgatgattacgactacttgttcaaggtggtgttgatcggagactcaggcgttgggaaatcgaacctcttgtctcgtttcacgaagaacgaattcagcttggaatccaaatccaccattggcgtcgaattcgccacccgcagcatccacgtcgatgacaagatcgtcaaggctcaaatttgggacacggcaggccaagaaagatatcgcgcaatcacaagtgcatattatcgaggggctgttggtgcactgcttgtgtatgatgttaccagacatgtgactnttgaaaacgtggagagatggttaaaggagcttcgtgatcacacagatgccaacattgtaatcatgctngtggggaacaaggcggatcttcgtcacttgcgtgctgt

SEQ ID NO: 33782 - DNA, 532 bp, Glycine max
  Clone ID: LIB3138-022-Q1-N1-E6
cctcgaattccgcctcgggaaaaaaaaaaaaaattaaaaaaaaaaaaaaaaaacaaaaaaaaaggggcggcctcaaactattagagaaaaacaacccaaaaaataaattacaaaccgataccatgaaagcaaaccaaacataactaaaaaaaaaacaaataaggggcgccccccacttatggccctcgcccccccgctatttatttcggtcccgggccctcaaggccacccagtttcccatttcggaagcctattaaaacctggccgaattaacgaaaaaacctgctccctgggaaaaattgttttccgctcaatttccccccaaaattccggccccaagccataacttttaaacccggggttccctaatggggcactaacctccctttatttgattggccccaattgccctttttcaattgagaaaccattcgggccacttttttttaataatcaccccatcccccggagagagccgctttgctttttgccccccaggttgttttttttttccacaataaaaacggaaaaa

SEQ ID NO: 33783 - DNA, 609 bp, Glycine max
  unsure at all n locations
  Clone ID: LIB3138-022-Q1-N1-E8
tccctcaacttcgaattctgcttctggatggtaaaagcctatgccagctccaagttcattcaaaatctctgggtgtacttaacctctatggttgttcatcacttagggaattcttagtgacatcagaggaattgacagaactgaacttggcttttactgctatatgtgcattgccatcatcaatttggcaaaaaagaaaactcagatctctttacctaagaggttgtcacaatctcaacaagttatcagatgaacccagattttgtggttcttacaagcactccatcacaacattggcctctaatgttaagagattgcctgtgaacattgaaaatctttcgatgatgacaatgatttggttagatgattgcaggaaactcgtgtctttgccggagcttccgctgttccttgaaaagttaagtgcctgcaactgcacttctttggacacaaagatcactcatcagcaagtgttacaacacatgttacaaagtcgcataccctacttacgcaaacactatcttaagtgttatgatgaagaatatttcttcccnggggatcatgtgattgatgagtgtangtttcacacgacacagaattcaataaccattc

SEQ ID NO: 33784 - DNA, 677 bp, Glycine max
  unsure at all n locations
  Clone ID: LIB3138-022-Q1-N1-F4
ttttaacggtaaaaaagaaaaaccgaaaatgagctggttgaatgaggagagaaaaccgcacgctgtggttactccatatccagttcaaggacatgtgaaccctttgtttaaactagcgaagctgcttcatctcagaggctttcacataacctttgttcacactgagtacaactacaagcgtttgctcaagtcaaggggtcctaatgcccttgatggcctaccagattttagatttgagagcatcccagatggtcttccgccattggatgatgataatgttactcagcacgttccctctctctgtgactctatcagaaaaaacttcctcaaacccttttgcaaacttgttcatagacttaaccactcttctgccactgagggtctcatacccccagttacttgtttggtctctgacggttgcatgccttttactatacaagctgctcaagagcttggactccctaactntatcttttggcctgctagtgcctgttctttcttgtctatcatcaactntcccactctggttgagaaaggtcttacaccactcanagatgagagttatctgacaaatgggtatttggactccaaagtggactggatttctggaatgaagaaactttcgctgaaggacatacctgacttcataaggacaacggatctaaatgatgtgatgt

SEQ ID NO: 33785 - DNA, 530 bp, Glycine max
  Clone ID: LIB3138-022-Q1-N1-F5
taaaaatggtgatgtctgggaatgcagcagtcaaaaggagtgattgggcctcattggtacaagtgtttttaacaaacagcaacagtacagagcattttgatgcatgtaagtggacaaaatcagaaccacattcctgggaattgatcttcccaatagaggtatgtggtcctaataatggttttgaaatgtggagttctgagtgggcaaatcaaacttcatggcatttgagtttccttattgacaatcccaaacagtctacagtttttgatattctcttgggaatctctcaagattttgaaattgctggtaatactcttatgccagctttttctgttccacaggctactgccagatcttctgaaaatgcggaatcctctgcatgatctggaatttgtgttttctttcgcttgttcgtttgtttaattcaataaaggaaattaggcatgaccctcttgttgagtatgctctgcctatttgaaaatttccacacctcttttaattgtcgtaatgatgtgtgaagtgtgtgttat

SEQ ID NO: 33786 - DNA, 637 bp, Glycine max
  unsure at all n locations
  Clone ID: LIB3138-022-Q1-N1-F6
attgcaatttcatttgtgtcactggatggactgccaccccaatgcaggatgttcaggttacaattgattggtttatttcctctcaggaatgtgttcccaggacctattgtgttttaaatccacaaaatccttttgtgttaaataggtggatgggaaaattgactttcccccagggcacttcccgaagtgttaagagaatgcctctttctatagggggaggagctggtgcaaagaatgctattctcatgaatatgccaaatgctgttctttcaatgtggagatattttgttggagatctcgtctttgaagtttctaagatgacttctccctacattaaatgtacagtctctttcttcatagcatttggaaatttggctgatgataccatcaattttgaggcttttccccacaagctggtgcagtttggagagattcaggaaaaagttgtattgaaattttcacaagaggaatttcttacagcttggtcaactcaagtgcgtcctgcaacaactctgttggctgatgggtgtccatatttgtatgcaatggtgcatgatagttcagtgtctacaataccaggtgattttgtcatttgtgtcaagtngacaaccataaacaatatgtgtgcatatgggct

SEQ ID NO: 33787 - DNA, 604 bp, Glycine max
  Clone ID: LIB3138-022-Q1-N1-G1
gccttaacgaatctggtcttaatggatctggacttcacctatctaaccacagtaatggtgatgggttggacctctctcctgtcagcagcaaaaagaggaaggactttttccctcatgggaatgaagaagaatgttacttggctgttaatcctccatccgatcgtattccagatatagaaatgcacccaactgagccacactggttgaatgacttcagcggggtgataaaaagtgtttatggacctgttacagctgcaaaaactatttatgaggatgaacaaggttacttgattattatcagtctgccctttgtagatcttccaagtgtgaaagtttcatggaggaacactctgactcacggtatcataaaggtttcttgtatgagcacatctcgaaagcctctcatcaagagacatgataggacattcaagcttacagatccatcgtcagagcactgccctcctggagagttcgtccgagaaatccctctttcaacccgaattcctgaagacgccaacatagaagcatactacgatgggccaggatctgtgcttgagatcctggtgccaaaacatcgggtgggacctgaagagcatgaagtccg

SEQ ID NO: 33788 - DNA, 595 bp, Glycine max
  unsure at all n locations
  Clone ID: LIB3138-022-Q1-N1-G2
gccgaacagttgattgctccacttgaggcngggatcctgagattgctgatattattgagcttgagaaagctaggcaatggaaggggctagaattgataccgtcagagaatttcacctctgtgtctgtgatgcaagcggttggatcggttatgaccaacaaatacagtgaggggtaccctggtgcaagatatcatggtggaaatgagtatattgacatggctgaaacactgtgccaaaagcgtgccctagaagctattagattggatcccgctaaatggggagtgaacgtgcagcctctgtcagggtctactgcaaatttccacgtttacactgcattgcttaaacctcatgaaagaatcatggcacttgatcttcctcatggtggccatctttctcacggatatcagactgataccaaaaagatatctgcagtctcgatattttttgagacaatgccatatcgattgaatgaaagtacaggatacatcgactatgaccagatggagaaatctgctacactcttcatgccaaaattaattgttgctggagctagcgcttatgcacgtctctatgattatgaacgtgtacgcaaggt

SEQ ID NO: 33789 - DNA, 567 bp, Glycine max
  Clone ID: LIB3138-022-Q1-N1-G3
aacatcctttgtggtggtgatgaaaaattgatgcgtgaaaggacgcacctgctgttggcttgttgttcaaggatggcaatttgtaagaaagatgtttggagagttgaatgtggaatcccttctggatttccgctcacagttatttgcaatagcatttttaatgagatgctcattagatatagctatgaaaaattactgcgccaggctaaagctccaagtatgtttttacaatccttcaaaaattttgtttctttgtgtgtgtatggtgatgataacttaattagtgttcatgaatatgtcaagccttactttagtggttctaaattgaaaagctttctagctagtcataacatcaccattactgatggtattgacaaaactagtgcaactttgcaatttagaaagttagcagattgtgattttctcaagagaaactttaagcagatgtctaatgttttgtgggtggctcctgaggacaaggcgagtttatggtcacaacttcattatgtttcgtgtaacaatctggaaatgcaagaagcttatcttgtcaacctcgtaaatgtgtta

SEQ ID NO: 33790 - DNA, 254 bp, Glycine max
  Clone ID: LIB3138-022-Q1-N1-H1
ctttttggcgttaagaatgaaattctgagttctaacgccactaatcctatgctgacgcgacttcttgagaactgtaagagtctcaaatatctggttgatgagtgtccttttgcatttgcgaactagtatgtagtattttattcacttaaataaagcgcattactatgtgcaatgagtgtgtttaaatataaacaaaaaaaaagaaagtaataaaaaaaaaaagctgaataatggtcaaaattaggatgtctggg

SEQ ID NO: 33791 - DNA, 580 bp, Glycine max
  Clone ID: LIB3138-022-Q1-N1-H2
ttccttagcctcgaattccggttcgagggaatttcttacagctgggtcaactcaggtgcgtcctgcaacaactctgttggctgatgggtgtccatatttgtatgcaatggtgcatgatagttcagtgtctacaataccaggtgattttgtcattggtgtcaagttgacaaccataaacaatatgtgtgcatatgggctcaatcctggtatttcaggttctcgtcttttgggcaccattcctcagtccatttcacagcaaactgtttggaatcaaatggcaacagtgagaacaccattgaattttgattctagcaagcagagcttttgtcagttttctattgaccttctcggtggaggaatcttagtggacaaaactggagattggatcacacttatacaaaattctccaattagtaacttattgagagttgctgcttggaagaaaggctgtttaatggtcaagattgtgatgtctgggaatgcagcagtcaaaaggagtgattgggcctcattggtacaagtgtttttaacaaacagcaacagtacagagcattttgatgcatgtaagtggacaaaatca

SEQ ID NO: 33792 - DNA, 561 bp, Glycine max
  Clone ID: LIB3138-022-Q1-N1-H3
ggttcatccacagaatgggggagacccttaatgtgggagggcacaagaaggaggaggagcataagggtgagcaccatgctggagaatacaaaggggagcaccatggtgaacacagtagtgagtacaaaggagagcatcatggtgaacacaaagctggagagtaccatggtgagcacaagccagagcacaaagaggggttcctagacaaagtcaaggacaagatccatggtgagggcggcgccgccgagggcgagaagaagaagaaggagaagaagaagaaggagcatggccatgagcatggccatgacagcagcagcagcagtgacagtgattaaactgctgcatcacctatatatttaaaaggtttatgggaccatagtagcgagggctgtgccttaatttctctctctatctctctctctctatatctctctctctctttttgctttttccctatcttgtgatctatgtatgagtgagaaaaacaaaagtgagaaattgtgcgtgtatctggttgctaattcgagtgctattagtctgtggtttggctggtttgaaccc

SEQ ID NO: 33793 - DNA, 515 bp, Glycine max
  Clone ID: LIB3138-022-Q1-N1-H4
actcctcaaagattcccaaccagaggcaggatggccttgattttaatctgaatgtggctgagggtgaataaggactgctaaaacaaattggtgaatcttcaggccttccttctggccaatcatcagtggaacttagtcctaaaagatcaagcaggttcaaattggatttaaatagtatcggtgatgatggtgatgcccaaccttcagatcagaggatggaggggccactttttcccagaagaaatggttattggagcccatcacctgcttcatcgtcatcatcaatgcaacctttagtacgaaacattgatctgaatgacagaccattctttcaaaccgatttagtggaccaagggcttagtaagtcatcttcgattattgaagcatataaacaatccaagtcggatgctcctgtgatctctattttgggtgccaaggtggaagttggtacaagagaatatattcctcaaactttgtcttttccaaatgggcaggctattgagcctgcaatggat

SEQ ID NO: 33794 - DNA, 445 bp, Glycine max
  Clone ID: LIB3138-022-Q1-N1-H5
ctgtggttgcttcagatgcagatgaattctcagaggtgttctccaagcctctcaggtctcttccttatgattcacctggacagacttttgtggcatttgagaagccagagggagtgccaacagttggaaaattttctaacgttctgaaatttattattaaagaggttgacccaaccacgggtgaggctgaagatgacggtgttgaagatgaataccagctggaggatctggagattgttgcagcagattatgtgttgaaagtgggggtgtctaattttaggaatgcatgggaaagcttgggccctgattttgagcgtgtggatgagtatggtcttggtcctagagagagtttggctgaagctgtaaatactgttatcaacctacttggcttggatccttgtgagggcacagatgatgttccaccctattcaagatcacacacatg

SEQ ID NO: 33795 - DNA, 442 bp, Glycine max
  Clone ID: LIB3138-023-Q1-N1-A11
cccttcctaagcctggaaattcggttggagcaggcactctccaccttccatttttccatctttgggcttgaggagtctgaaatcaacctctttatttggagaatcgctaagagtggcctccaaatcaacaataaaggtttcaaagacaaagaatacttcactcgtgaccagatgtgaaattggtgacagtctcgaagaattcctcacaaaagcaacaccagataaggggttgatcaggttgttggtgtccatgggagaagcattgagaacaatttccttcaaagtgaagacggcttcatgtggtggaacacaatgtgttaatacttttggggatgagcagcttgcagtggatttgctagctaatcagcttctttttgaggccttaaattactctcatttctgcaagtatgcttgctctgaagaaaatcctgagctcttggac

SEQ ID NO: 33796 - DNA, 447 bp, Glycine max
  unsure at all n locations
  Clone ID: LIB3138-023-Q1-N1-B12
gacgttgcactgcactcgtaagtttggaatttgggttggagcccaaccacattttttctggggaagcaggcttgaactaatgttggggaacacgttcgagcccaaccaaaattctaaacctccaaacaaggaggttcctcctcaggaatttaatgatagggtgctggaaggttttcaagtcacccccctttggcatcaaggttttattcgcgatgatggaaggtcaaattatgtagagacggtaaagacagctcgttgggagtatagtacacgtnctgtatatggttggngtgatgttggttctacgcagaagtctactgctgggtggcttgcagcttttcctgtttttgaaccacattggcaaatatgcatggctggtggactgtcaacaagttggatagagtgggatggcgaaaggattgagtttgataatgctccatcttattc

SEQ ID NO: 33797 - DNA, 432 bp, Glycine max
  Clone ID: LIB3138-023-Q1-N1-C5
agctggaaatcgggttggagcaaaggaagagtggatataaagaccgagcaaccttacccaaaaccaaggcatcctttttttttggtcatttccccacactctttttccctccatgagcgccatggatttctcttccatctatggggtctaaaacaaacccttcctaacccttttccttcttttccttctacctttccattctcactctcacaactctacaacctcagctcagataaactctaactccatcctcgtcgctcttctcgattcccattacaccgaactcgccgaacttgttgagaaagcgcttcttctccagcagcttgaagacgccgtcggcaaccacaacatcaccatcttcgccccccgaaaccaagcccttgaacgcgacttagaccctgaattcaagcgtttcttgctcgagcctcgcaa

SEQ ID NO: 33798 - DNA, 413 bp, Glycine max
  unsure at all n locations
  Clone ID: LIB3138-023-Q1-N1-D4
agggttattatggctttaaggaattcgccggcggaggtctgggtagaagttgactggtctgggccgaggaatgatatcaaatgtgggacgaggttctgctgttgtacccactgcaacacattacctcctgatcatcaaatcgagcgcgataacatacgtcgacaattccctgaccgccctcgttcttctcaacgctgataatcttcaacagcaggtccatgatgcccggacaatcgacatgctgcagcanatccgtgacgacgttgtccagcgacttgaagaacttgagcatctcctccatcttgcggtccagcagcgactcgttgaccttggtgaagtagccagcctgcacggngtcgaggggcgcgggctgcttgatgtatgcccagaactggcgcagcgtgtcctggttc

SEQ ID NO: 33799 - DNA, 412 bp, Glycine max
  Clone ID: LIB3138-023-Q1-N1-E4
gttttggatgataagcttgtgttggctaacacacaagaattctttgatggaaattttccagtggattcttggttaccaatttttgtgaattgtctttatcctgtaagtcaattaccttcagaagctgtcgttgtaaatgttacatgtggtagtggacgtggtggtttacccaccactgcttggattagttctgcagttaacaatcgctcctcagatatcaacaaaaggattcgcacagcacttgggaaaggtaagaaaattgtttttcttactagagttgatccttttccagtagctttactggctgttctttttggcgttaagaatgaaattctgagttctaacgccactaatcctatgctgacgcgacttcttgagaactgtaagagtctcaaatatctggttgatgagt

SEQ ID NO: 33800 - DNA, 410 bp, Glycine max
  Clone ID: LIB3138-023-Q1-N1-G2
gagaaactttaagcagatgtctaatgttttgtgggtggctcctgaggacaaggcgagtttatggtcacaacttcattatgtttcgtgtaataatctggaaatgcaagaagcttatcttgtcaatctcgtaaatgtgttacgagaattgtatttgcacagtccagaggaagctcgccaattgagaaggaaagctctctctcgtattgaatggctgcaaaaagctgatgtgcctaccatagcacagattgaagagttccattcgatgcagaggatgatgaatgctcctgattcaaatgataatattgatttactgttgagcattgatttgttgggtttacaaggagcaagtaaagcttttccaaacaaaattgtttttgatgataagcttgtgttggctaacacacaagaat

SEQ ID NO: 33801 - DNA, 53 bp, Glycine max
  Clone ID: LIB3138-024-Q1-N1-A1
gttgggtagaatgagggtgtggtagtaacgcgttctgatggattatcccatac

SEQ ID NO: 33802 - DNA, 479 bp, Glycine max
  Clone ID: LIB3138-024-Q1-N1-A5
tgcatgatagttcagtgtctacaataccaggtgattttgtcattggtgtcaagttgacaaccataaacaatatgtgtgcatatgggctcaatcctggtatttcaggttctcgtcttttgggcaccattcctcagtccatttcacagcaaactgtttggaatcaaatggcaacagtgagaacaccattgaattttgattctagcaagcagagcttttgtcagttttctattgaccttctcggtggaggaatcttagtggacaaaactggagattggatcacacttatacaaaattctccaattagtaacttgttgagagttgctgcttggaagaaaggctgtttaatggtcaagattgtgatgtctgggaatgcagcagtcaaaaggagtgattgggcctcattggtacaagtgtttttaacaaacagcaacagtacagagcattttgatgcatgtaagtggacaaaatcagaaccacat

SEQ ID NO: 33803 - DNA, 466 bp, Glycine max
  Clone ID: LIB3138-024-Q1-N1-B1
aaaggagtgatggggcctctttggtacaagtgtttttaacaaacagcaacagtacagagcattttgatgcatgtaagtggacaaaatcagaaccacattcctgggaattgatcttcccaatagaggtatgtggtcctaataatggttttgaaatgtggagttctgagtgggcaaatcaaacttcatggcatttgagtttccttattgacaatcccaaacagtctacagtttttgatattctcttgggaatctctcaagattttgaaattgctggtaatactcttatgccagctttttctgttccacaggctactgccagatcttctgaaaatgcggaatcctctgcatgatctggaatttgagttttctttcgcttgttcgtttgtttaattcaataaaggaaattaggcatgaccctcttgttgagtatgctctgcctatttgaaaatttccacacctcttttaa

SEQ ID NO: 33804 - DNA, 327 bp, Glycine max
  Clone ID: LIB3138-024-Q1-N1-B2
cgttaacagtaattggcattaccatttttatggagatgctaattaaatttacctttgaaaaatacctgcgccaggttaaagctccaagtttgtttttacaatccttcaaaaattttgtttctttgtgtgtgtatggtgatgataacttaattagtgttcatgaatatgtcaagccttactttagtggttctaaattgaaaagctttctagctagtcataacatcaccattactgatggtattgacaaaactagtgcaactttgcaatttagaaagttagcagattgtgattttctcaagagaaactttaagcagatgtctaatgttt

SEQ ID NO: 33805 - DNA, 583 bp, Glycine max
  Clone ID: LIB3138-024-Q1-N1-B3
tcgcggccggccgttcgccctttaaccttaattggggaataaggataatctttaccaatataggagaaatcattatcaaaatctttatcaagataagggaaatacttattaagttataaaatcagggtaatgatccaccaacccgctagttctttttatgaggcacaaacgggagaatttatcctggaagcggaagagctactgaaaatgcgtgaaactatcacaagggtttatgtacaaagaacgggcaaacctttatgggttatatccgaagacatggaaagggatgtttttatgtcagcagcagaagcccaagcttacggaattgtagatcttgtagccgttgaataaaaaataagtggcaaggattattctaaaaaaatacaggatttgaaatttcatttttgaatcttcttactttcattttaatataatatctctattagttaatctattaatatctattagttaatctattaatagaatataagtaatatagaatctaagtaattcacggttaggatagatctaaaccagctcattatatatatattacaacttactatgccaactatgaaacaac

SEQ ID NO: 33806 - DNA, 547 bp, Glycine max
  Clone ID: LIB3138-024-Q1-N1-B4
ggtttctttcctcataaggattctctaattaaagagaagatattagaagaaaatcatatggatgtctttcagtgacttgttattaaaaaataaaaatatttgcaatggtttagctcttacacgtgtataattacgtgatgcattcagtgtagttgtaacaacctacctcttcatgacacttcaatgtgcaatggttctatcagggtctaatccaatctgtatttgagcttgatgatggatctggtgtggttatcactgttgggaagtatgtaacaccaaatcacaaggacataaacggcaatggaatagagcctgacttccagaaacttccagcatgggatgatatcagccgacatcttaaaaaatgcagtatgtcacaacagggataaagcagtctctttggtattccgatgcaatctattgctttggacttatcattttaattgaaacttttgatgaatctgctcgctggaagctgctttgtatatctcaagaatttcaagttaatatagatatatgcctgaatggtctgcctagccttcttggc

SEQ ID NO: 33807 - DNA, 335 bp, Glycine max
  Clone ID: LIB3138-024-Q1-N1-B5
ttcgggcccaaaaagaacctttaccactaggaccagcaccacctagtctcagctgaaatggcctcttcagtgatggcatctgtggccctcaaacctgcccctttcactgttgagaagtcctcagtgagaggccttccctctctctcaaggaactcttcttcattcagagttgtggccagtggcaagaagatcaagactgacaaaccttatggaattaatggtggcatggctttgagggatggaactgatgcatctggcaggaaaggaaagggaaagggtgtttaccagtttgtagacaaatacggtgctaatgtcgatggttacagtcctatcta

SEQ ID NO: 33808 - DNA, 530 bp, Glycine max
  Clone ID: LIB3138-024-Q1-N1-B6
ccgcggccgtgcaccgggaaggcgccgttgaaggccaagaagagcaagagggttccgctcttcgactcgttcaatcccccgccggccggcaccaagggcgtgaagctcgtggagatgcccgggccgtttcccatggggcagtttccgctagaggggaagagcagggaggagattctcggagagcctctgaagaagtgggagatacatatgctggttaagcccatgatgtcttacaatcgccaggttaatcttggaagggatggattaacgcataacatgctggagttgatacattcacattggaagcgtcgccgagtctgtaaaattcgttgtttaggtgttccaactgtagatatggataatgtttgccatcatattgaggagaaaacaggggggaaaataattcatcgggttggtggtgtagtttatcttttccgtggcagaaattacaactatagtactcgtccacagtatccagtgatgctcttgaagccagctgctcctgtttacccaaaacttatacaggatgc

SEQ ID NO: 33809 - DNA, 470 bp, Glycine max
  Clone ID: LIB3138-024-Q1-N1-D1
aaaaattttcctgaaaaggaagatcaagaaaaacccaaaaggattgatgccagattgagacaaagaatagatcctcaatacaatgaggttaaggctcagatggaaacaaatttgtttaaattgtctcttgatgatgttgaaactcctaaaggttccatgttggatctgaaaatttctcaatctaaaattgcacttcccaagaacacagttggaggaaccattctgcgtagtgatctattggcaaattttttgacagagggcaattttagagcaagtgttgatttgcagcgcactcatcgtattagaggaatgattaaaatggtggccacagttggtattcctgagaatacaggtatatcattggcctgtgctatgaatagttcttttagggggcgcgccagttctgatatttacaccatctgctctcaagactgtgaattgtggaatcctgcttgcacaaaagcaatgac

SEQ ID NO: 33810 - DNA, 436 bp, Glycine max
  Clone ID: LIB3138-024-Q1-N1-E4
aaaattccaaaccggagggaaaaggaagaaggaacatgtcaggcgttagagatgatggccgttgttgttggtgttggtgtgcccaccctcactctctaatctctaagactctctactcttctcttagtgctctaatctaattattattatcaacataagtcacaacaccaccattcttccattctctctctttcttctacactattcattcaatccatgccggtcaacgtgaggtgctgaaggtcaatcgtggtctttcgaaatggggaacgggagcagaagctactcggcgaaccggagcgactacaagcttctagaagaagtcggttacggcgccagcgccaccgtctaccgtgcaatctacctcccctacaacgaggaggtcgccgtcaagtgcctggatctggatcgctgcaatataaatctggacgacata

SEQ ID NO: 33811 - DNA, 352 bp, Glycine max
  Clone ID: LIB3138-024-Q1-N1-E5
caccatgtattctgccactgcctccaacactttctaccttctctgttgtaaacttctctcctggctcctctcagctgcttactgtgattacatgtactctggtattgagacaggagatttagaaaaaagagatgatttgattccacagattctaagagacgaggcatgtgcaaggctttatgagcttgcgacggtgagtgatgctagtggttatacggagaggacattcttgagtcctgcatccatgaaggcaactgatcttattgacaaatggatggaggatgctatgtagagaactcgggtggaccaactggcaaatgtacatggtcgaggtgatggtgcaaacgaaaat

SEQ ID NO: 33812 - DNA, 586 bp, Glycine max
  Clone ID: LIB3138-024-Q1-N1-G1
aggtcacggtaccgaaccgccatccctccgacatatcaaggccataaagagatcaatgtttggtctccgtttgtttatggcaccaacatccccgtcgcgccgttcaatttcctcggcctcagccaggaccagagtaacggtaacgtcctcgtcaccatccgagccgagggtagggttcgttggaaggtcggcaccttcatctccggccgctaccacctctacgtccgctgcccggcgttcatcagctttggaccccgcagcaatggaatcgtcgtcggagagaacgccatcaagttccagattatccaacggtgctccgttagtgtctaaacttaatctcagacaagaaaaatgttaataacatattttctaatacactcttttaaatatgtttattagtgacggaatttagtgatgtattgccttttcgtcactaattctaaagttacaaaaaccttagtgatgaattttttaaaagttacatatgaaatatttcgtcactaaaaattattgaaaaataaatctggaaaattcatgggtattttttttatgggatgtatagtttttaataaattaaacctatcat

SEQ ID NO: 33813 - DNA, 488 bp, Glycine max
  Clone ID: LIB3138-024-Q1-N1-G4
cgagctcgagccgaatcggctcgagggaaaaaccttcaaatatgatataattggtgctggttcacattcttcagaagattttcctgaaaaggaagatcaagaaaaacccaaaaagattgatgccagattgagacaaagaatagatcctcaatacaatgaggttcaggctcagatggaaacaaatttgtttaaattgtctcttgatgatgttgaaactcctaaaggttccatgttggatctgaaaatttctcaatctaaaattgcacttcccaagaacacagttggaggaaccattctgcgtagtgatctattggcaaattttttgacagagggcaattttagagcaagtgttgatttgcagcgcactcatcgtattagaggaatgattaaaatggtggccacagttggtattcctgagaatacaggtatatcattggcctgtgctatgaatagttcttttagggggcgcgccagttctgatatttaca

SEQ ID NO: 33814 - DNA, 478 bp, Glycine max
  unsure at all n locations
  Clone ID: LIB3138-024-Q1-N1-H4
ttgaagtcttgcccttcttttttcaactccaaccacaagacatcatcatccatggctgcctccgtctccactgtcggagctgtcaacagagctcttttgaacctgaatgggtctggacctggggtttcagctcccagttcatccttctttgggagcagcttgaagaaggttattggctcaagggtccccaacacaaagatttcctctggaagcttcaagattgttgctgtagaagagaagaaagagattgaagagacccagcagaccgacaaggacagatggaagggtcttgcctatgatatctcagacgaccaacaggacatcacangaggaaagggtttggttgactcccttttccaagctccacaggatgctggaactcactatgctgtcatgagctcctacgagtaccttagcactggacttcgccagtacttggacaacaacatggatggattntacattgctccagctttta

SEQ ID NO: 33815 - DNA, 446 bp, Glycine max
  Clone ID: LIB3138-024-Q1-N1-H5
ttgaaaattgttgggaaaaccgtcatgccacctgtttcggctcgacaggctactggcagactttctaaaaatgcggaagcctatgcatgagcaggaatgcgtgtgttcttacacttgttcggctgactaattgattaaaggcacttcggcatcaccctttcgtggagtatgctgtggctatgtgcactgaatctcacctgttagacctgtctatgtgatgagtgaaccgtgtgacattgttggcagttatactaggtggaggagctggaacccgtctcttccctcttactaagcgacgagccaaacctgctgttcctattggaggagcttacaggctcattgatgtgccaatgagtaactgcatcaacagtggtatcaacggggtgtatatcctcacccagtttaactctgcctaactcaacaggcacattgcacgcgcttacaac

SEQ ID NO: 33816 - DNA, 491 bp, Glycine max
  Clone ID: LIB3138-024-Q1-N1-H6
aaagtgattgcctttgccggcgaccaaataacttttttgcaaccgtccgttacacgctgcctagcattagaaatggaaagcttgtgaagttctgtaatggggaagtcatgggacgtaagcttttgttaaaaaatggtggtggcagcactaaggattttaagcgccaacaacaacatatatgcatgtctctcaccgctgatgtgtgcactgaatctaacgtgagagacctagatatggaaagaaggaacccaaggacagtgttggcagttatactaggtggaggagctggaacccgtctcttccctcttactaagcgacgagccaaacctgctgttcctattggaggagcttacaggctcattgatgtgccaatgagtaactgcatcaacagtggtatcaacaaggtgtatatcctcacccagtttaactctgcctcactcaacaggcacattgcacgcgcttacaactctggtaatgagtcaccttttgag

SEQ ID NO: 33817 - DNA, 358 bp, Glycine max
  Clone ID: LIB3138-025-Q1-N1-A10
ctcgagccgtctaaattgaaaagctttctagctagtcataacatcaccattactgatggtattgacaaaactagtgcaactttgcaatttagaaagttagcagattgtgattttctcaagagaaactttaagcagatgtctaatgttttgtgggtggctcctgaggacaaggcgagtttatggtcacaacttcattatgtttcgtgtaataatctggaaatgcaagaagcttatcttgtcaatctcgtaaatgtgttacgagaattgtatttgcacagtccaaaagaagctcgccaattgagaaagaaagctctctctcgtattgaatggctgcaaaaagctgatgtgcctaccatag

SEQ ID NO: 33818 - DNA, 474 bp, Glycine max
  Clone ID: LIB3138-025-Q1-N1-A11
tacaagtgtttttaacaaacagcaacagtacagagcattttgatgcatgtaagtggacaaaatcagaaccacattcctgggaattgatcttcccaatagaggtatgtggtcctaataatggttttgaaatgtggagttctgagtgggcaaatcaaacttcatggcatttgagtttccttattgacaatcccaaacagtctacagtttttgatattctcttgggaatctctcaagattttgaaattgctggtaatactcttatgccagctttttctgttccacaggctactgccagatcttctgaaaatgcggaatcctctgcatgatctggaatttgtgttttctttcgcttgttcgtttggttaattcaataaaggaaattaagcatgaccctcttgttgagtatgctctgcctatttgaaaaatttcacacctctttttattgtcgtaatgatgtgtgaagtgtgtgtattt

SEQ ID NO: 33819 - DNA, 385 bp, Glycine max
  unsure at all n locations
  Clone ID: LIB3138-025-Q1-N1-A12
caaggtttatctgctattattaaaagtgttgggatacaagtaccaagcagaagtttgccaaggcagctgcttttagctgatgccatcatcatagtatggacttgaatcaatttttaaattttaacgttattagttcggaaggattcccttgcacatcgtcttgtactcctatttcaccaatatccaaccagttgcttggatccttgaaacttgacataggaaactcacctaactcggccctttctagtcattttgattctgatactctntcttctgcattaagtgacagtcaggaattgcacacctctggggaaattcactctggtgtcaactcttgcaagtctttgcaagaaagcaatcattatttgcacaggccagtcttatt

SEQ ID NO: 33820 - DNA, 191 bp, Glycine max
  unsure at all n locations
  Clone ID: LIB3138-025-Q1-N1-A2
gaagagctatgacatcacatgcaccctaacctcgaattccggttcgggattcgatttgccgcaatgaaggaaaaccctagctaaccgtttcaagatgcaaatcttcgttaaaaccctcactggtnagaccatcactctcgaagtcgagagttcagataccatagacaatgtaaaggccaaaattcaagaca

SEQ ID NO: 33821 - DNA, 408 bp, Glycine max
  Clone ID: LIB3138-025-Q1-N1-A4
ctcctcttctcttcttttccaaaaacaatgaagctcattagcaccatcaaccccaaaaacctcaaactaagccccaaacgcttctttcgtaaaaaggaaccatctttagtctcacgctccgacccgccttctttcggatccggatcctcttccgttgactcttccaccgcaaatcacaaaccttccgccggtaaccaaactccgaccagcgttctcccggacgtctccggcgagtggtccgaggtcgccaccgccgccgttgacgtgcggtgggacctcgcgcaagccttacgcctcatcgatcgcgacaacgacggcgtcgtcacgcgccaggacctcgagttgcttctcacgcgccttggcgcgtcgccgagccccggcgacgtggcgctcattgctcgcgaggtc

SEQ ID NO: 33822 - DNA, 292 bp, Glycine max
  Clone ID: LIB3138-025-Q1-N1-A5
tgagggcagggctcttgttggtagtatgtgctctggctatagaggctgtttacggtgcgtgtagtttatcgagcccatgtgccagcaacctctgctgctctcaatatggatattgcggtagtaccaatgactattgtggcactggttgtgtatttggaccttgtgctggcaaagtctctccaacatcagcttcgagcaacgcgtggccattcggtcctgtgaaggctttatacgttgatgccaacatgaactggaacgacccccccttcactttcaaggccattgctgatgc

SEQ ID NO: 33823 - DNA, 439 bp, Glycine max
  unsure at all n locations
  Clone ID: LIB3138-025-Q1-N1-A6
ctattattttattcttcatccaatgactatacattcattatatttttgtgtaaatagaggaaaaactcgatggaaaaatggtggtttaattctatgttgtttaataggaagttagaatacaggtgtgaattaagtaaatcaatggatagtcttggtcctattgaaaataccagtctaagggaagaccctaaaattttaaccgatatagaaaaaaaaattcacagggatttggattatttagaaatggaaggttttttttctagcgatctgaatactgtttctaagaatgatgatgatcattacatgtatgagactcaatttagttttaacaataatattactagtttcattgatagttgcattgaaagtttcaatttaagtgatattgacaaatacaatgatatttatttntataagtacatttttttgaaggcaaaaa

SEQ ID NO: 33824 - DNA, 381 bp, Glycine max
  unsure at all n locations
  Clone ID: LIB3138-025-Q1-N1-A8
acagagcattttgatgcatgtaagtggacaaaatcagaaccacattcctgggaattgatcttcccaatagaggtatgtggtcctaataatggttttgaaatgtggagttctgagtgggcaaatcaaacttcatggcatttgagtttccttattgacaatcccaaacagtctacagtttttgatattctcttgggaatctctcaagattttgaaattgctggtaatactcttatgccagctttttctgttccacaagctactgccagatcttctgaaaatgcggaatcctctgcatgatctggaatttgtgttttctttcgcttgttcggttgtttaattcaataaaagaaattaagcatgaccctctngttgagtatgctc

SEQ ID NO: 33825 - DNA, 404 bp, Glycine max
  unsure at all n locations
  Clone ID: LIB3138-025-Q1-N1-A9
gtgccaagtaccacaacgcagaaatgctgcaaaacccaagagtattgcgatattccgctcagccattcaatcctccaactcgcacggcagcatcatcactttctccattccaattaatacccacttctccatcttttccaatcctcaaacagcaatgcagattctcacgtagagagctcacaatctttagcaactcttgcttgctactactcttgggttctcaggcagtggatggatccagagcaagagcagaagaagacgttggtaacacaagtaacattgatcaactagaagagaatctggcttttgctgaagaagatgctgctaacataagcagcagtgatcaaccagaagagggattgactttggcagaagatgatgttggtaacacanggaacagtgat

SEQ ID NO: 33826 - DNA, 51 bp, Glycine max
  unsure at all n locations
  Clone ID: LIB3138-025-Q1-N1-B1
aaatttaaaaannaaaaaataaataaaaaaacaaggggtggttttaataat

SEQ ID NO: 33827 - DNA, 241 bp, Glycine max
  Clone ID: LIB3138-025-Q1-N1-B10
cggctcgaggaaaaactcagcacaacacccctcccaaccctctgtttctcttaatttctcatcatatcatatctattaatcttacacatatattaagacatagatataatttttttcgttttatttttccttgcatgggctgttaagataagatgtctcgcacgtgctcacagtgcggcaacaacggccacaactcgcggacatgcaccgacggtggcgccgccgcttcctgcggcgggtc

SEQ ID NO: 33828 - DNA, 240 bp, Glycine max
  Clone ID: LIB3138-025-Q1-N1-B11
cgcatttggaaatttggctgatgataccatcaattatgaggcttttccccacaagctggtgcagtttggagagattcatgaaaaagttgtattgaaattttcacaagatgaatttcttacagattggtcaactcatgggcgtcctgcaacaactctgttggctgatcggtgtccatatttgcatgcaatggtgcatgatagcttactgtctacaataccacgtgattttgtcattggtgt

SEQ ID NO: 33829 - DNA, 387 bp, Glycine max
  Clone ID: LIB3138-025-Q1-N1-B3
atgaaaaattgatgcgtgaaaggacgcacctgctgttggcttgttgttcaaggatggcaatttgtaagaaagatgtttggagagttgaatgtggaatcccttctggatttccgctcacagttatttgcaatagcatttttaatgagatgctcattagatatagctatgaaaaattactgcgccaggctaaagctccaagtatgtttttacaatccttcaaaaattttggttctttgtgtgtgtatggtgatgataacttaattagtgttcatgaatatgtcaagccttactttagtggttctaaattgaaaagctttctagctagtcataacatcaccattactgattgtattgacaaaactagtgcaactttgcaatttaaaaagt

SEQ ID NO: 33830 - DNA, 385 bp, Glycine max
  Clone ID: LIB3138-025-Q1-N1-B4
gagataactagaaacagtgtgatgaaaatgaaggtccttgttttcttcgttgctacaattttggtagcatggcaatgccatgcgtacgatatgttccctctccgaatgaacactggctatggtgcccgtactccggaggtgaaatgcgcaagttggaggcttgctgtggaagcacacaacatctttggctttgagaccattcctgaagagtgcgttgaagcaacaaaggaatacattcatggcgaacaatatagatcagactccaaaacagttaaccaacaagcttacttttatgccagagacctcgaaatccatcccaaggacacattttgtgtcagtatagatggcaccgtactctctaatattccatactacaaaaaaacat

SEQ ID NO: 33831 - DNA, 196 bp, Glycine max
  Clone ID: LIB3138-025-Q1-N1-B5
ctcaaattctaccagctaggaacctattggccatacactccttccatacatttgctgtatggtctgagagctgctcttgatctgatttttgaggaaggactcgaaaatgtgatcgcagggcacagccgtttaggcaaagcacccaaccttgctttaaaggcatggggtttgaaaaattgcacccaaaaggaaaagt

SEQ ID NO: 33832 - DNA, 367 bp, Glycine max
  Clone ID: LIB3138-025-Q1-N1-B6
gggtcttccagcaaaacgctcctgctgatagaaaagatatacaaaaaataaacttatttgtggaggacagggttgtgccaaatggtgttgttgcatatacaagcaaggatgagattcatgttattgcaaaatatgttaatgactatggtggggatgtgaagacagagatcacaggggtgctgtatcatgaaatggtccacgtttggcagtggaatgggaatggtcaggctccaagtggattaattgaaagtattgcagactatgttaggctgaaggcaaactatgcacctagccactggaagaaagcatgggagggacagaaatgggaccaggggtatgatgttactgctcgttttctgggactatt

SEQ ID NO: 33833 - DNA, 287 bp, Glycine max
  Clone ID: LIB3138-025-Q1-N1-B7
gctttgttatcgaacatttctttttgatttcaaaaattttccggaaaaaatttgaatctatttttatatgcgaatcaatcctactacttctggtcctgaggtttctgcgcttgaaaaaaaaaatctgggacgtatcgcccaaataattggtccggtactagatgtagcttttcccccaggtaagatgcctaatatttacaacgctctgatagttaagggtcgagatactgttggtcaacaaattaatgtgacttgtgaagtacagcaattattaagaaataatcgaa

SEQ ID NO: 33834 - DNA, 366 bp, Glycine max
  Clone ID: LIB3138-025-Q1-N1-B8
cacttatggacatcatcactgacctcgccatgttcattactccgctttggattgcggttatcgtcggcgtcgtcgtgggctgggcctggaagcccaaatgggcctttcaccccaaagacgctcttctcaagtttcgctcccctcgcccttccaatccccaaaacgacaccgctttcaccttctccaccaccagttcctccgcgcgtgaaaaagacgcgagtgcgagtgcgagtcatttagtgacggaatacgatttgctgcatctgtggaagttggttgaggaaaaagacggagggccggcatggattcagatgatggaccgttctaccccgaccatgagatatcaagcgtggcgtacggatcctg

SEQ ID NO: 33835 - DNA, 315 bp, Glycine max
  Clone ID: LIB3138-025-Q1-N1-B9
gttcagggtgaccactaacaggcggccatggataaagccataagctggcaccaatgggtaatgtacgtgcacatggtcaaaatggtgcgttaggaggataacccctttaactgacgagatgtaactttactatacacgaagctgatatgtaaccaatgggaaccctgcgtagagcattagatcgtgaaagtactatgccgattaatacaagggctctattgacctaggacaaaacagaatctcaatacataaaactcgaggtcgtaacacatgcatacgaaattcgacatgtacctactatgagggacttgtttc

SEQ ID NO: 33836 - DNA, 388 bp, Glycine max
  Clone ID: LIB3138-025-Q1-N1-C1
caacacactatagtatggtattttattttgggacaaaggagttagttgctggatccctcttgcatcgctttgttgatggtgatgatgagtttcgaaacagcaggtttaagctcataccatcagtcccaaagggctcatggattgtacgccagagtgttggtagtactccttgtttactgggaaaggcggttgattgcaactatattcggggtcccaagtatttagaaattgatgttgatattggttcttctactgttgctaatggagttttgggtctggttattggtgtgattacaacattggtggttgatatggcttttcttgtacaggcaaatacacctgatgaattgcccgagaggcttattggagctgttcgtatttcttattt

SEQ ID NO: 33837 - DNA, 266 bp, Glycine max
  Clone ID: LIB3138-025-Q1-N1-C12
ggtgcaaagaatgctattctcatgaatatgccaaatgctgttctttcaatgtggagatattttgttggagatctcgtctttgaagtttctaagatgacttctccctacattaaatgtacagtctctttcttcatagcatttggaaatttggctgatgataccatcaattttgaggcttttccccacaagctggtgcagtttggagagattcaagaaaaagttgtattgaaattttcacaagaagaatttcttacagcttggtcaac

SEQ ID NO: 33838 - DNA, 406 bp, Glycine max
  Clone ID: LIB3138-025-Q1-N1-C5
ctctttttctcttgcggctagggttttagcgcaacttcttctagatttaaggaagatgggtaaggaaaaggttcacatcacaattgtggtcattggccatgtcgactctgggaaatccactaccactggtcacctgatttacaagcttggaggcattgacaagcgtgttattgagagtgttgagaaagaaactgctgagattaacaagaagtctttcaagtatgcctgggtgcttgacaaacttaaagctgagcgtgaaagaagaatcaccattgatattgctttgcggaagtttgaaacaacaaactattattgcacaaatattgatgcgccttgacatagggattgcattaagaatatgattactgggacattccaagctgactgtgctggtcttatcattgat

SEQ ID NO: 33839 - DNA, 307 bp, Glycine max
  Clone ID: LIB3138-025-Q1-N1-C7
cttcttcttccttaacctatcttgttcttaattatcaatgtctgaatcccattcaactggaaaatgttcttccatgacttcaatactcctcttgtttatgcttctaatcactaacacaggcacaacaggtgcacaatctggtgtatgctatggaagagttggcaacaatttaccgtccccacaagaagtagtggccctttacaaacaatatgatttccgaaggatgagaatctatgatccaagccaacaagtactccaagctctgagagtttccaacattgagttgctgctagatctccctaacgtc

SEQ ID NO: 33840 - DNA, 266 bp, Glycine max
  Clone ID: LIB3138-025-Q1-N1-C9
ctggtgcaaagaatgctattctcatgaatatgccaaatgctgttctttcaatgtggagatattttgttggagatctcgtctttgaagtttctaagatgacttctccctacattaaatgtacagtctctttcttcatagcatttggaaatttggctgatgataccatcaattttgaggcttttccccacaagctggtgcagtttggagagattcaagaaaaagttgtattaaaattttcacaagaggaatttcttacagcttggtca

SEQ ID NO: 33841 - DNA, 390 bp, Glycine max
  unsure at all n locations
  Clone ID: LIB3138-025-Q1-N1-D1
ctgaggcagatgattgcttaagactggtgtatgttaagagtgaattgttgaggattaccagtcaacaaattgagcatcagtgcaccaggagaggaaaaatgtggaggctaaagataggggatggaggaaaaaacccatacatattcagtacaaacaattttctgggcagggaaacatgggagtttgatcccgagacaagtactattgaggagcgaacccaagttaaagcagcttgtgaaaatttctataaaaatcggttcaaaactagagctttgggtgatcgactctggcggtttcagtttctaagggaaaaaaaattcagacaaacaataactagtgtgaagattcaagatgatgaagagatacanatgagaaaactccaacacactg

SEQ ID NO: 33842 - DNA, 347 bp, Glycine max
  Clone ID: LIB3138-025-Q1-N1-D10
gtggaaatgatgtgagtctgaataattacagcgggaaggttctactgattgtgaatgtcgcctcacaatgtggtttgacacagacaaattacaaagaattgaatgtattgtacgagaagtacaagaatcaaggatttgaaatcttggcatttccatgcaaccagtttgctggacaggaaccaggaaacaatgaagaaattcaagaagttgtttgcacaaggttcaaggctgaatttcctatctttgataaagttgaagtcaatgggaagaatgcagcgccactttataagtttttaaaggagcagaaagggggaatatttggtgatggtatcaagtgggacttcaca

SEQ ID NO: 33843 - DNA, 227 bp, Glycine max
  Clone ID: LIB3138-025-Q1-N1-D11
ctcgagcttatgtccaagtgcttacacacggcgggagagctagactcctagctcaaccccaagcccgagcccaagcccaatacacaattgaaaaagcccggtgatcagatgattaacaggagcatagttaccgagccagaccttgggaacaagttgaaggaaaacatgtttctagttggggacaggctggagagacagaatgaagagaaggagctcaccttcgagcg

SEQ ID NO: 33844 - DNA, 404 bp, Glycine max
  Clone ID: LIB3138-025-Q1-N1-D12
atagccaacgcgacttacttcaacgcggcgagccacgaggatcccttgcagttcttaccagaagggttcgtggagagaacaaaaggaaggggctttttggttaagtcatgggctccgcagccacaggttctggcccatcaatcaacgggaggattcttgagccattgcggctggaactctatactggagagcgtggtgaacggcgtgcctttaatagcctggcctctgttcgcggagcagaggaccaacgcgtttatgctcatgcatgaagtcaaggtggcgctgaggcccaaagttgccgaggacactggacttgttcagagccaggaaatagccagcgttgtcaagtgccttatggaatgccatgaagggaagaagcttctttaccgaatcaaggattctca

SEQ ID NO: 33845 - DNA, 133 bp, Glycine max
  Clone ID: LIB3138-025-Q1-N1-D4
gtgcaccaaatattgtttgttaaatgctgcattaccaatgggcggagggaactatttggcgtgggggtatccatatacacatttccaaacaatctacattttttgatcttctcttatcatttccacaatattt

SEQ ID NO: 33846 - DNA, 353 bp, Glycine max
  Clone ID: LIB3138-025-Q1-N1-D5
caagaacttaagtttgttgccatggcaatagtaatcaaagtggcggctctctctggttcccttagaaaagcttcataccactcaggccttatccgagctgcaattgaactgagcaaaggggaaattgaaggaattgaaattgagttcattgaaatttcggagcttcccatgttgaacactgatcttgagatcaatgggacctacccaccaatagttgaagcttttcgtcaaaagattcttcaagctgatagtattctctttgcttctcctgaatataattactctgtcacagctctactaaagaatgcaattgattgggcctctaggcccccaaatgtttgggctggcaaagc

SEQ ID NO: 33847 - DNA, 334 bp, Glycine max
  Clone ID: LIB3138-025-Q1-N1-D6
cccatcccagagttacttgaagctcaagaataaggattttactgttactgttatatgttcatcattattacaaccacaagaacaagaacattgtgctgttcaacttaattctttcatacggggtggggatcttttcttcatttgctttataaaattattttgtttcaagtctggcgttggcctatttcatttaagcttacggtagtttgctatttgggttttggaattggataaaacctttgctatttcattatcgggacgggcttcatttgtacatgaaacaattaatgtctgtttgcattgacatatactgttatgcctgtaaagtttgttt

SEQ ID NO: 33848 - DNA, 254 bp, Glycine max
  Clone ID: LIB3138-025-Q1-N1-D7
gtcaatcctaaacctcacaaactgttctcttccctctctatctgcccttccgccaccgctccccggcactttcaatccctcaaattccccactaaacagaacgctcactctgaaaaccgcgatattggcgaccgcgtcgtcttcgatgacggcatcttcgaaagcggcgccgatttccaaaacgacaggaatctcaccactaacacacccaaacgcagacccagcccaaggacaaaagtgacgccgataacgcg

SEQ ID NO: 33849 - DNA, 269 bp, Glycine max
  Clone ID: LIB3138-025-Q1-N1-D8
accctatttgctttacaacagctatctggtataaatgctgtgtgttatttctctacaactgtttttaaaagtgctggagtgccatcagacattgcaaatgtctgcatatgaattgccaatttggcaggatctatcgtttcaatgggtgacgatggataagcttggaaggaaggttctactattctcgagtttctgaggcatggcaatagcaatgatccttcaagccacaggaccaacttcactcgtatcaaacatgggagctgagtact

SEQ ID NO: 33850 - DNA, 291 bp, Glycine max
  Clone ID: LIB3138-025-Q1-N1-D9
ggcaacaggactcaaaaatagtaagagtggttatgagagcctggtagaggcagctaccctggcttcgcagagatttagtcctattgaacagcatcaacttgtcattcaatcccttgacagagcctttcccaagccaatgcttttactgataaggacactgctaccaccctctaaattcgcaaggaaattgtttggcatcttcaccactttgttctttgcttggttagtcgggccctctgaagtgagagaatcaaaggtggaggggagaagagaaagaaatgtagtccacat

SEQ ID NO: 33851 - DNA, 245 bp, Glycine max
  Clone ID: LIB3138-025-Q1-N1-E1
cgccaattgaaagggaatgatctctcaagattggaacgactgcatagggctgatttccctcccatagaacagattgaaaagtttcatggaatgcaaatgtggatgaatgctcgtgcttcaaatgatgaaatggatttactgttgagcattgatacgttgggttaacaaggagcacgtgaagctcttttaaacataattgtttatgatgataaacttgtgtaggctaacacacaagaattttttga

SEQ ID NO: 33852 - DNA, 283 bp, Glycine max
  Clone ID: LIB3138-025-Q1-N1-E10
cgacgacggaaatggccgtttcgagctcgcacatgcgtgtcacctttgagtgccgctccgatcccgatttctcgccccccccgccgtccttcgacaaccttcgccgccgaaacttccgctcctccgcaggatccggcgcggcgtttcacggcatctcctacctcatcctccgcttgcctcccaacttccagcgccagctaagcaccaaggcgcgccgcaactgcagcaacatcggcgtcgcgcaaatcgtcgccgcttcgtggtcgaacaacagcgacaactc

SEQ ID NO: 33853 - DNA, 386 bp, Glycine max
  Clone ID: LIB3138-025-Q1-N1-E11
gtcttacggagctcataacgttaatcatccccatgagaaagatttgttggagggaaatctttcctttgatattaaatctcgctctagattggaaaaagtttcctctacaaaaccacaatttgttagtggaaaaaccttcaaatatgatataattggtgctggttcacattcttcagaagatttacctgaaaaggaagatcaagaaaaacgcacacagattgttgccagatagagacaaagaatagatcctcaatacaatgaggttgaagctcagatggaaacatatttgcttaaatggtctcttgatgatgttgaaactcctaaaagatccatgttcgatctcgaaatttctcaatctaaaattgcacttgcgaaggacacatttg

SEQ ID NO: 33854 - DNA, 339 bp, Glycine max
  Clone ID: LIB3138-025-Q1-N1-E12
gcttctttcatcttagaagatcccgcacttgcattcaagggtggagggccatacaggcaggaagtgacaaggggacaagatctcactgggaaggactgtagtggcaagactactgatcaaacaagacttcaaaacgttcatactgagacatgccaattttaaaggtacaaagttaataagagctagcttctttgatgctgatttaacaagtgctgacctttcggatgctgatcttacaaatgcaaaattttccctggcaaaagggacaaacgcaaattgaagcaatgctgacttggaaggtgcacttgcaacaagaaacacttatttgaagggatcaaa

SEQ ID NO: 33855 - DNA, 275 bp, Glycine max
  Clone ID: LIB3138-025-Q1-N1-E2
ttgtgaataaagggtgtttgccttccatggctgccacttgtgctgcgtgtgcaattacagctgatgccatctttacgccgagttccgggcagaagaatggatcaggacgcttgtttcttagtggaaggaaattgacggtgaaaaaggagagagcagctattggaggacgaacgacgggcactacagtgtgcgcaactgctgaacctgacagacctttattgttctcaggcagcagccatatttcatggctagatggcacttaaacctggagactt

SEQ ID NO: 33856 - DNA, 394 bp, Glycine max
  Clone ID: LIB3138-025-Q1-N1-E5
gctgccttgagctacgaacaaaaacataatccctgttccagcgttctaccatacacaatgggcaccacagtatctagagttcgttcatctaagatataatggagcaatctacaaaatacaggtcaggcgccacaaagaaagagtctatttggcagatggattggaaaatttcaggaaacaattgggaatctatgaatcaacaaccattcagttttttgcttgtgatcatcactccccctttgacatacatttcataccaaccctggagcggcaaacttgtggcaggcagagacattcatgcagaaagcatatttggactattcagtttactcaggaaatggtcggtgctcctgaacctcttgtatatttattaggtgttcacattgggcttatg

SEQ ID NO: 33857 - DNA, 276 bp, Glycine max
  Clone ID: LIB3138-025-Q1-N1-E6
aaaggattcgcacagcacttgggaaaggtaagaaaattgtttttcttactagagttgatccttttccagtagctttactggctgttctttttggcgttaagaatgaaattctgagttctaacgccactaatcctatgctgacgcgacttcttgagaactgtaagagtctcaaatatctggttgatgagtgtccttttgcatttgtgaactagtatgtagtattttattcacttaaataaagcgcattactatgtgcaatgagtgtgtgtgaatatg

SEQ ID NO: 33858 - DNA, 343 bp, Glycine max
  Clone ID: LIB3138-025-Q1-N1-E7
tcggtatgtatataggtgaataatccaacatgcctttttgtgaagtaaaaaaactaccctcgatccatgcctcaaaagggttgataataagtgaaaaaaatcaatgaattcatgataaaacccttctgcgtttttttattataaatttttttgtcaataaagggatcaaggggttgggggatcaaatggtaaagttcttttgttggtaaattggatgattagaaacatgactattgctttcccaattagctgctgttgcattaatggctatttcatttaattgaattggattagcgtaccttgctgaattcgcttcttctgaaggttgggcgaataacaaaaa

SEQ ID NO: 33859 - DNA, 309 bp, Glycine max
  Clone ID: LIB3138-025-Q1-N1-E8
acactggcctttttttctcgtgtcaatttctaaatccaccaccacaccctctcttctattctctattattattatctccacacccttcactctctctcactcttctctcgaatcttccaccgcaatggccaccgctgccgagaaactctccgctctcaaatccgccgtcgccggattgaacgaaatcagtgagaatgagaagaacggattcatcagcctcgtcggccgctatctcagtggcgaagcgcagcatgtggaatggagcaagatccagacgcctacggacgaagtggttgtgccttacgacac

SEQ ID NO: 33860 - DNA, 208 bp, Glycine max
  Clone ID: LIB3138-025-Q1-N1-E9
aaccattctgcgttgtgatctatcgacaaattatttgacagagggcaattttagagcaagtgttgatttgcagatcactcctcgcattacaggaatgatctaaatggtggccacagacggtattacggagaatacaggcatataactggcctgtgctataaatagctcttctagggtgcacgccaactctgatattgacaccaactga

SEQ ID NO: 33861 - DNA, 321 bp, Glycine max
  Clone ID: LIB3138-025-Q1-N1-F1
gctggaaaaagttgtttttataattttcacaggaggaatttctgacagcttggtcaattcaggtgcgtcctgcaacaactctgttggctgatgggtgtacatatttggatgcaatggtgcatgatagttcagtgtctacaataccaggtgattatgtcattggtgtcaagttgacaaccataaacaatatgtgtgcatatgggctcaatcctggtatttcaggttctcgtcttttgggcaccattcctcaatccatttcacagcaaaactggttggaattaaaatggcaacaggtgagaacaccatttgaattttgatttt

SEQ ID NO: 33862 - DNA, 433 bp, Glycine max
  Clone ID: LIB3138-025-Q1-N1-F10
cctacattggttggcattgaatgtcccaaggatgagaaacttcctcgtcgcaaaatttttgacaaacctaagacgcgctgcttcactattctgcctatggagtttaatcttgtggtccgtcaaaagtttttaaattttgtgaggttcattatgaagaaaagggacaaacttagttgtcaagttggaatcaacccatactccatggaatggactggtttggccaatagattactgagtaagggcaatgatattctgtgttgcgattatgctagttttgatggtttgattaccaagcaagttatgagcaagatggcagaaatgataaacagcctttgcggtggtgatgaaaaattgatgcgtgaaaagacgcaccttcttttggcttgatgttcaagattgcaatgtgtaagaaagatgttggagagttgaatgt

SEQ ID NO: 33863 - DNA, 232 bp, Glycine max
  Clone ID: LIB3138-025-Q1-N1-F11
cgaacctctcttttacaaaaatactcaaagccaggcgagctatgagtcgcagcgagtactaacggcagtataatgaacaagatctatatttttgcaaatgaagtagacaaaaggagtcattctacctaatataaacatgcgctgttcactaactggaacagaacaaaacattctgatatatgtacttgtacagaatgatgaacacatacgactgaatagagttccccaatag

SEQ ID NO: 33864 - DNA, 171 bp, Glycine max
  Clone ID: LIB3138-025-Q1-N1-F12
cggaacttgcgtttatatacctgtcaacggaaattgcatctaaagagacagaatgcaaggacctgggggtggcagggatccttccatagatttgggaggtactgaaagatatggagcctttgggcctccaaagaatttaatttgaaaactaattggagttaaggacctcat

SEQ ID NO: 33865 - DNA, 331 bp, Glycine max
  unsure at all n locations
  Clone ID: LIB3138-025-Q1-N1-F3
cattgatagattctcatgtccagattgcaacatanttggtgcaatgcttttggttgatacttatgataccaatccttaaaatgcaggtcgtagtattttcgttgcgcctttcataggcagaatgcccattcaggtggtgacatttccgaataccatagtgcagattgaaccagacatgaattcaaggtttcagcttttgagtaccactaccaatggtgatgtttttcaaagtgaagatcttccaatggttaaaggtaatagagcatgtgctgctgttggcttgacattcaattacactccaacttctttgttggaaatctgtttgcaaaaa

SEQ ID NO: 33866 - DNA, 333 bp, Glycine max
  Clone ID: LIB3138-025-Q1-N1-F4
gcctgatcgaggcatctgcccagaatcacccaccctgaaccaggttttgatcagtgagacagaggagggagaacacacacacacacacacacacgttaaactaacagtctttattagtaagaagacatggctcaaccgagactcaacggggatctgaataataaccagcatggtcacggtgcatcaacagcagcaccagtgggcggcggttcaaacgcatcagtattagcagctatggattgccatgcaggacccggccacagacattgccattatgcagcattagatgatgatgtacccgcagcattacatgccctacgctcactcacatta

SEQ ID NO: 33867 - DNA, 418 bp, Glycine max
  unsure at all n locations
  Clone ID: LIB3138-025-Q1-N1-F5
cagtgatagcatttcatcaagcatctaagttagatccaagtagctttgaggtgaatgcagtggtaaggagggccagagcagtggcatcagccagaatgagtggtaacttactcttcaaggcatcaaaattcacggaagcatatgctgtatacaatgaaggactagagcatgatccatacaactcagttctgctatgcaatagagcagcatgtcgttctaagctaggtcaattcgagaaagcaattgaagattgtaatgtggcacttatagttcaaccaagttatagcaaggcaaggttggagagggcagattgcaatgccaagttggaaagatgggaagctgcgattcaagattatgaaatgctgnttagagaaaagccaggagatgaggaggtggccagggcccttgtttgagaccc

SEQ ID NO: 33868 - DNA, 428 bp, Glycine max
  unsure at all n locations
  Clone ID: LIB3138-025-Q1-N1-F6
ctcgagccgctctagccacaatttttaatgaagcgtcaaaaccgctcagttcccctcaaattggctgtcaaacaagctttggatgttgcaagggggatggcttatgttcatggccttggatttatccacagggacttgaaatctgataatcttttgatttttggtgacaagtcaattaaaattgctgactttggagttgcccgtattgaggtgcaaactgaaggaatgacacctgagactggaacataccgttggatggctccggagatgatccagcataggccttacacacaaaaagtggatgtatatagctttgggattgttctatgggaactcatcactggtatgcttccatttcagaacatgacagcagtacatgccgcatntgcagttgtcaacagaaatgttcgcccaatcatacctaacga

SEQ ID NO: 33869 - DNA, 283 bp, Glycine max
  unsure at all n locations
  Clone ID: LIB3138-025-Q1-N1-F7
ggaatgattaaaatggtggccacagttggtattcctgagaatacaggtatatcattggcctgtgctatgaatagttcttttagggggcgcgccagttctgatatttacaccatctgctctcaagactgtgaattgtggaatcctgcttgcacaaaagcaatgactatgtcatttaatccaaacccgtgttctgatgcatggagtttggaatttctgaagcgtactggatttcattgcgatatcatttgtgtcactggatggactgccaccccaatgcangatg

SEQ ID NO: 33870 - DNA, 360 bp, Glycine max
  unsure at all n locations
  Clone ID: LIB3138-025-Q1-N1-F8
gtgatctattggcaaattttttgacagagggcaattttagagcaagtgttgatttgcagcgcactcatcgtattagaggaatgattaaaatggtggccacagttggtattcctgagaatacaggtatatcattggcctgtgctatgaatagttcttttagggggcgcgccagttctgatatttacaccatctgctctcaagactgtgaattgtggaatcctgcttgcacaaaagcaatgactatgtcatttaatccaaacccgtgttctgatgcatggagtttggaatttctgaagcgtactggatttcattgcgatatcatgtgtgtcactggatggactgccaccccaatgcangatg

SEQ ID NO: 33871 - DNA, 290 bp, Glycine max
  Clone ID: LIB3138-025-Q1-N1-F9
caacgcctgctttagcacaatctttccgagtccttgaacgtatggcaaacctgaatacgtacgatgatattgctatggattatcaatattgggaagatgctggcgatgatttccgagatggtaaaggtgtattattaccactttggcggttcagcggcttagccaatgcgggcgcttcgaaaatgacgacgggtctttgctggagtcatcaatacgttgactattttgccgttgggtatggatcttatgactttgttcgtcaaggtatcgctggtgcccccactggcttt

SEQ ID NO: 33872 - DNA, 105 bp, Glycine max
  Clone ID: LIB3138-025-Q1-N1-G1
gggcacttcccgatgtgttaagagaatgcctctgtctatagggggaggagctggtttcaagaatgctattcccatgaatatgctaaatgcttggtcttttaatgt

SEQ ID NO: 33873 - DNA, 288 bp, Glycine max
  Clone ID: LIB3138-025-Q1-N1-G10
atgtctctgacttgctgagactattaatatggtgtgacaataagtaaaccattaattcatgtcgaagacaggacccacgacttatttacgccaattgatgtagcctaaattaatgtactaactagcattttaactaacgaggcgtttgtttgataggatcttctcaaatttattttattaaatttgcaacactttgaatccgattaatggcttggaaatgcaattaaaggactgtgtgtggagaataataatctgtgttgcgataatgttaattatgatgggttgatt

SEQ ID NO: 33874 - DNA, 271 bp, Glycine max
  Clone ID: LIB3138-025-Q1-N1-G12
ccagcctccgctgaagaagtggtcgctgttcctgcggagaaccgcaccatctgaagccgaagctgaaaacatcgaagcagagaaggcccagagtggtgtagaagacaagatttcccagtcggcttcgttcaaggaggagaccaacgtggttggcgacctccccgaggcgcataataaagcccttgatgagctcaaaaagcttgttcaagaagcgcttaacaaccatgagctaactgctcccaagcccgaacccgggaagaagaaaccagct

SEQ ID NO: 33875 - DNA, 51 bp, Glycine max
  Clone ID: LIB3138-025-Q1-N1-G3
tatgacgtcgcattgcacgcccgtactgtaagccttcggaattcgtgctcg

SEQ ID NO: 33876 - DNA, 437 bp, Glycine max
  Clone ID: LIB3138-025-Q1-N1-G4
attcgaaatcatgtgcaaataaaaaatggtgtttcacctgcgaatttgaaagattgatattgaagtcaaaggacacaaaatctgcggtgtctcctatgggcataatctcccatctacagaatattgggagtcagcttgctaatggaagagaagaagatgcacatgaatttcttaggcatgttattgacacaatgcaatctgtttgccttatggaagctggggttaatgcattgggctcattagaagaggacactactttaatgggtcaaacatttggaggttaccttctatcaaagataaaatgcatgaaatgtggagggaagtctgagcgtcaagaaaggatgatggatctgacttgtgagatagaatgcgagataacaaccctggtggaggcccttcgacgatttacaagcactgagactttagattggggaaac

SEQ ID NO: 33877 - DNA, 376 bp, Glycine max
  Clone ID: LIB3138-025-Q1-N1-G5
ttgcaacctccacattagttttttccaaccaactcgatgaagatcaattaaaacttgttttttagtgactcggcttgattcttcgtcaggatatacttctattaaaaaagtaattattatcattattatgatgatgatattatagtcaaagaaaaatcaaacgctcttgtacaattaggtaatagtaccacattaaagtatcaccactggaatagtgtgacgtgacaggcaaagtttaagaaccgattcattattttctttttgtccaggaatcgtctcttcttacttaggcaatgttgctactttctaaccaagtgaaatatgcccaactgtataatttgcagcaataaacgttaattttggtactttctttcac

SEQ ID NO: 33878 - DNA, 379 bp, Glycine max
  Clone ID: LIB3138-025-Q1-N1-G6
tgctcggtggtctttccaacctcgggcattgtggttacggtacgaagcttctcatggtgaccgcttacatgctctcaaaagcggccgtctggcctgtcacacttgtacaggctcgcgccctggaagcacatgccaaccacatcaaccagcgcgctgaaaactccgtcattgcctcgtaaatagcttggtccaaaacaagatagcgtcttgcaggagacgttcatccaccatactcgctgcgcccattcgaagaacacccatttcaaggtcatcaattctggaccatgagcttacgtcattcatcaaagacctgcctgctattcacgtcagcaacacacgagcgacttccggctgaattagtgtacgacgggttcttctc

SEQ ID NO: 33879 - DNA, 368 bp, Glycine max
  Clone ID: LIB3138-025-Q1-N1-G7
gggacctcttcttctctacctccccttcccacctcttcaacatttacatccactctgacccctccttcaacctcactctccctctttcccctcttttccgtaacaaattcatctcctccaaacccacctttcgctcctaccctacccttatctccgacactcgccgccttctcgcctacgctctcctcgacgacccttgcaacgcctacttcgccctcctctaccagcactgcatccctctccactccttcaaatacacctacaactgccttttactcttcccaaccttcgattccgaaaaccccgaatcctcgtcccggttcggcctacgacttaaatacagattcttcgtcgagatcctgttccac

SEQ ID NO: 33880 - DNA, 290 bp, Glycine max
  Clone ID: LIB3138-025-Q1-N1-G8
gccatggccacccacgcggctctagcttctacaaggatccccactaacaccaagttcccatccaaggcttcacactctttcccaacccaatgcgcctcaaagagacttgaggtgacagaattctctgggctaagatccacttcatgtgtgacatatgctaacgatgctagagaatcttccttttttgatcttgtagcttcccaactcactcccaagaccaatggatcatcaactcctgtgaggggagagacagtggccaagttgaaggtggcaatcaatggtttccgacg

SEQ ID NO: 33881 - DNA, 181 bp, Glycine max
  Clone ID: LIB3138-025-Q1-N1-G9
ctcgagccgaatcagctcgataacgctgttgcagggaacctatgtaacaccaaggctccatcgaaggactaacacataatgcttcacctattgctcgctagagagccttgacgtgacacattactagcttactactatgaccctaatggcatgcatcaccttaaatcccttgtgaatcatt

SEQ ID NO: 33882 - DNA, 157 bp, Glycine max
  Clone ID: LIB3138-025-Q1-N1-H10
tatttgtatgcaatggtgcatgatagttcagggtctccaataccagtgattatgtcattggtgtcaagttgacaaccataaacaatatgtgtgcatatgggctcaatcctggtatttcaagttctcgtctttttggcaccattcctcagttcatttt

SEQ ID NO: 33883 - DNA, 108 bp, Glycine max
  Clone ID: LIB3138-025-Q1-N1-H12
aacgacgacaagctggacaactcaactcgttccattcacctgaaagctgagcgaacctccggctcagactcgaagctgcgggatctttaccgatgttgcaaggtttta

SEQ ID NO: 33884 - DNA, 252 bp, Glycine max
  Clone ID: LIB3138-025-Q1-N1-H3
ccgctcgagccgctcgagatcaccctctccctcccttgcacaaacccctacttgctctattcttctccaaaacgattcagattcaacactcaatcagcacaactttccccttgctgctcctaacctctccaatccccaccactgcccaaaaccaccggagtcatcgacatcggcgcgggccttgccggactcgccgacggcacccacctgaactcccagaacattccctttctcctcctggaaagcctcgac

SEQ ID NO: 33885 - DNA, 343 bp, Glycine max
  Clone ID: LIB3138-025-Q1-N1-H4
ggctgatgataccatcaattttgaggcttttccccacaagctggtgcagtttggagagattcaggaaaaagttgtattgaaattttcacaagaggaatttcttacagcttggtcaactcaggtgcgttctgcaacaactctgttagctgatgggtgtccatatttgtatgcaatggtgcatgatagttcagtgtctacaataccaggtgattttgtcattggtgtcaagttgacaaccataaacaatatgtgtgcatatgggctcaatcctggtatttcaggttctcgtcttttgggcaccattcctcaatccatttcacagcaaactgtttgggatcaaaat

SEQ ID NO: 33886 - DNA, 308 bp, Glycine max
  Clone ID: LIB3138-025-Q1-N1-H5
gaagaatatggattgggattaaatattttcaactgcccagaattagttgagagagattgctgcaccaacaattgtttctcatggatgatacaaatacttcagtgcctcagtctttccggctttagtgggctgttcagctttccattattttcaagtattattccaggaagtgaaataccaaggtggttcaagaaagagcatgtgggcacgggcaatgtcataaacatagacagatctcactttacgcagcattacaaaaataggataggcattgcgttgggtgtaatcttcgtggtacacaaagaaag

SEQ ID NO: 33887 - DNA, 214 bp, Glycine max
  Clone ID: LIB3138-025-Q1-N1-H6
cacacgcacgctatacctcggaatgggattcgagcaaatgaaagccatggccacctacaacttctctattgttctctccgtgtacctagccttctttttggtgctacttaccaaggcacactcgaccgataccgtttctttcaccttcaacaagttcaacccagtccaaccaaacattatgctccaaaaagatgctagtattttattctctggg

SEQ ID NO: 33888 - DNA, 243 bp, Glycine max
  Clone ID: LIB3138-025-Q1-N1-H7
gaaggaacaagtgaaagagagactttacaacaacaaacatataatgcagctgaagatgctcgatcgtggatagcaagagctaaagaagcagcaaaacatgatccaagaaaacttgagagactcgccagtgttgaagtaatgatgccctcaccaaaagaccctgagcgctttagtttttggctggctactctctccaatcggaggcctgcggaaagattggatctcctacgcataagagacact

SEQ ID NO: 33889 - DNA, 310 bp, Glycine max
  Clone ID: LIB3138-025-Q1-N1-H8
tagaggggcgcgtaagaataaattagagggaaagggggggttgacacttccattttacgaaactcaattaacgtgaaatcaggtctacgaaaatcaccttttggacacctgatttcagttctttttcttctcaataattattatttgtatttgtaaacacacactatcaaagcaaatggggtgctcattctccgggttgaacgcactttacgactccgtgaacggcggaggtgatgtttggatcaacgagaaccgtttccgcatcgtgcgccagcttggaaaaagtggctttccctacgtctacctcgtc

SEQ ID NO: 33890 - DNA, 367 bp, Glycine max
  Clone ID: LIB3138-025-Q1-N1-H9
gtgtgttaatatcatagcaaatctattccatgctcctataagtgatgatgagactgcagtaggtgtgggaactgtggggtcatcggaggcaataatgttggcaggtctagcttttaaaaggaaatggcagacaaagagaaaagcagaaggcaaaccatatgataagcccaacatagtaactggggctaatgtgcaggtttgttgggaaaaatttgcaaggtactttgaggtagagctcaaggaagtgaaactcaaagaaggatactatgtgatggaccctgcgaaagcagttgaaatggtagatgagaacaccatctgtgttgcaaccattttggggtcaactatgaccggaaagtttgaggatgtg

SEQ ID NO: 33891 - DNA, 371 bp, Glycine max
  Clone ID: LIB3138-027-Q1-N1-H1
catgtttttcgtcaactggtagatttgataagcattacatccattatggaggttttggttcgattagtaggtgctgatgaccatgtatatcccaattttatagatgtgatgcaatggttggctgagagcaacctgcttgagatgattgtcgataaattaagtccatctagtcctcctgaagttcatgccaatgtagctgaaactttgtgtaccataactcgagttgcatcatctactctagctattaagctttcaagtccaagttttgttgcaaaaattttgggttatgcattggaagattcacaatcaatgtctagccttgtcaactctctttcagtgtgtatttctttgttggatcccaaaaaatcagc

SEQ ID NO: 33892 - DNA, 240 bp, Glycine max
  Clone ID: LIB3138-027-Q1-N1-H3
tctgacagagagtcatgtttggtgagaaggggaacaggtgcaacaatcgtcagaatgatgtaagatgatttcgcagatggatgggctctttagatcaagtctatgcgctgacgggcatgacatgatgggatttggtccattgcttcctacagaatctgaaaggtccctgatggaaagagttcgtcaggagcttaagattgagctctagcagggctttaagtcaagaattgcagatgtttg

SEQ ID NO: 33893 - DNA, 334 bp, Glycine max
  unsure at all n locations
  Clone ID: LIB3138-028-Q1-N1-A12
gaaaaaggctgatgtccctaccatagcacagattgaagagttccattcgatgcagaggatgatgaatgctcctgattcaaatgataatattgattaactgttgagcattgattggttgggtttacaaggagcaggtaaagcttttccaaacaaaattgtttttgatgataagcttgtgttggctaacacacaagaattctttgatggaaattttccagtggattcttggttaccaattnttgtgaattgtctttatcctgtaagtcaattaccttcagaagctgtcgttgtaaatgttacatgtgggaaggggaccgtgtggttacccaccact

SEQ ID NO: 33894 - DNA, 74 bp, Glycine max
  Clone ID: LIB3138-028-Q1-N1-A6
tacctttgtataaatctatttctgaagaagcaattacaactttcaagggatgaaagcattttgtggcataagga

SEQ ID NO: 33895 - DNA, 314 bp, Glycine max
  Clone ID: LIB3138-028-Q1-N1-B7
agcttttgatcatctcatcctggttctggatcaaaagcggaggacgttcaatgggagggggtcgccatgacctacccggaaactatacttcagctgccctccactacttaaaacaaacaccagcttctggggcaccctgtgggcccgccctctcgcctggtccaatggttactgtaattacagacaacacgctgacgtttggcacgcctatccaatattaaagaaaggaagtctggaagaagaaaaaattattggttttatttatgatgacattgcattcaatggggaaaacccaacgcctggaatcatcatta

SEQ ID NO: 33896 - DNA, 303 bp, Glycine max
  unsure at all n locations
  Clone ID: LIB3138-028-Q1-N1-D8
gctaaaaacgggnttaaatttccgacaacngaccaaacaaaccgggacggggcgcatttcagaccgcttgatcaacaccccttccaacaaacaaatctcagttggctcatcactatccatattaatcctcaattcaaaacgaacgctcatacaccaaaacccccattcctacagtcaacgccccaaaccttgaaacaaactaaaatctgtaaacttctcagaaacattgcttgtacttaaaacacatgtgtgggctgcccaataacgcagagcatgggtcagccaaatcaaaaacatatacta

SEQ ID NO: 33897 - DNA, 115 bp, Glycine max
  Clone ID: LIB3138-028-Q1-N1-H12
ctcaaattttcagtacaggggtactggccagcagaaggtggattaaccggggtaatgattaccgcgcttggagaggagaaaccataatttagcaggggttgggtcaaaatatttt

SEQ ID NO: 33898 - DNA, 163 bp, Glycine max
  Clone ID: LIB3138-029-Q1-N1-A3
taaattattcccataagggctttcctcctataaacgggctacacagattataccgtgctagcgggaaaaatgggatatggaccctttctagcatgacaataaaagctcgggcggctgtggaaggggatcaactacggggctaagagtccctctgtgtcaatga

SEQ ID NO: 33899 - DNA, 56 bp, Glycine max
  Clone ID: LIB3138-029-Q1-N1-A7
ggatggggaagattacctaatttagggtccatgaatttgtcaggccttactttagg

SEQ ID NO: 33900 - DNA, 364 bp, Glycine max
  Clone ID: LIB3138-029-Q1-N1-C2
ccagcgagtgatgatcgcttcgccgcagtaatcgccggagacgaattcgccgtttccctgccgagatctctcaatctccgacgactcagatacctctattaattttcctccggttaggttgttagggtataaatagtacgtagtttttccttatttatggcttccgagaatgtgaagaccggggattccgccgtcaccaccatcgtcaatctcgccgaggaggccaagctcgccagagaaggcgtcgtcaaagctcccagctacgccctcgccagcatctgcaagtcgctcgtcgccggtggcgtcgccggaggagtgtcacgtactgcagttgctcctctggaacgattgaaaattttgctgc

SEQ ID NO: 33901 - DNA, 397 bp, Glycine max
  Clone ID: LIB3138-029-Q1-N1-G6
aggatgacgtcgcacgcccgcgtacgtcaggcaatgaatgtctcgagggagacgaattctgcctacaatgaaggatgagagtttatcgtcaacgcaaccagaagattgggtgattgttcccaaaatgacaacgataaacaatacaagcgcatacgggctcaagagtggcatgaaagggtctcgtcgtaagggcaccatgacgaagtccatacacacagggcactgttaggagagaaatggcacacactgagaacaccattgaatttcgattctagcaagcagagctcatgacagttcactatcgaccatatcagtggaggaatcttagtggacaaaactggcgatcgtatcacacttatgcgcaattctgcaattagccacttgttgaaagttgctg

SEQ ID NO: 33902 - DNA, 431 bp, Glycine max
  Clone ID: LIB3138-029-Q1-N1-H4
gcatgcgcccgcacctaagcatggaactcgaggtcagatggagatgtttgtccttcaatacaaaggcctaatcaagtgaggctctggaaaaggctcagaaattggtgatttccttacaatgcatccaggagtgaactgtataagctttactggtggtgatactggcatttcaatttcaaagaaggcaggcatgattcctctgcaaatggagttaggaggaaaagatgcctgcattgtacttgaggatgctgacctggatttggttgctgcaaacattataaagggaggcttttcatacagtggtcagaggtgcactgctgttaaggttgtcctggtaatggagtccgttgccgatgctttggttgagaaagtgaaggctaaggtggcaaaactaactgttggaccaccagaggatgactgtgatatcaccc

SEQ ID NO: 33903 - DNA, 386 bp, Glycine max
  Clone ID: LIB3138-029-Q1-N1-H6
cgacgcacgcgcgcgtacgtatagcaattcgtttcgagactggttgagagttgctgcttggaagaaaggctgtttaatggtcaagattgtgatgtctgggaatgcaacaatcaaaaggagtgattgggcctcattggtacaagtgtttttaacaaacagcaacagtacagagcattttgatgcatgtaagtggacaaaatcagaaccacattcctgggaattgatcttcccaatagaggtatgtggtcctaataatggttttgaaatgtggagttctgagtgggcaaatcaaacttcatggcatttgagtttgcttattgacaatcccaaacagtctacagttgttgatattctcttgggaatctgtcaagatttagaaattgctg

SEQ ID NO: 33904 - DNA, 390 bp, Glycine max
  Clone ID: LIB3138-030-Q1-N1-A4
ggagccgaccggcacctggttctttgccttctcgtagggtaggaggagttggaagtcgtgctccacctgtcagaccagttagtgtgagagatagacgccctatgatgtccatacctgcaagaagtaggccagtgcctcctccatctagatcttatgataggagaccagttgctcctgcatatccaaaaagtagcatgaagagagattatggtcggcgtgaggatataccacctccaagaagtagagttgctgtagattatggctcaagggttgcttctgaaagacgaacatcttacagggattatcctgctcgtggtcctggctacaccgagctccctagaagcacatctcgtgctgcaccaaggagaggctatgtggatgatgggtatg

SEQ ID NO: 33905 - DNA, 435 bp, Glycine max
  Clone ID: LIB3138-030-Q1-N1-E5
cccttccttagcttgggaattcggttcgaggtctgggaatgcagcagtcaaaaggagtgattgggcctcattggtccaagtgtttttaacaaacagcaacagtacagagcattttgatgcatgtaagtggacaaaatcagaaccacattcctgggaattgatcttcccaatagaggtatgtgggcctaataatggttttgaaatgtggagttctgagtgggcaaatcaaacttcatggcatttgagtttccttattgacaatcccaaacagtctacagtttttgatattctcttgggaatctctcaagattttgaaattgctggtaatactcttatgccagctttttctgttccacaggctactgccagatcttctgaaaatgcggaatcctctgcatgatctggaaattgtgttttctttcgcttgggtcgttg

SEQ ID NO: 33906 - DNA, 150 bp, Glycine max
  Clone ID: LIB3138-033-Q1-N1-A3
gggtctgcccggtatcataaaagggacaatacccccctaccataagagaaatcaaacccaaaagtccatcaacaagaatcatggggggtggaggaggtgcaattggggtgagaggtcccaatgaagatgatgatgatattggaaagattg

SEQ ID NO: 33907 - DNA, 83 bp, Glycine max
  Clone ID: LIB3138-033-Q1-N1-B5
gatgctacagatgctgcaagaagtgcttctgacattgtcctcactgaacctggtctgagtgtcattattagtgcagggcttac

SEQ ID NO: 33908 - DNA, 373 bp, Glycine max
  Clone ID: LIB3138-033-Q1-N1-D1
attgtcatcaattcacacatccaccgttcagttaaaaaccacccaaatccgatggcggcgtcgcggcgtctccgggacctccaatcccaaccggcgaacaagatctgcgtggactgttcccagaagaacccgcaatgggcctccgtatcgtacggcgtcttcatgtgcctagagtgctcaggcaagcaccgcggcctgggcgtgcacatctccttcgtgcgatccgtgacgatggattcgtggtccgaaatccagatcaagaaaatggaagccggaggcaacgacaaactcaacgccttcctcacgcaatacggcatccccaaggaaaccgacatcgtcgccaagtacaactccaatgccgcagccgtctacc

SEQ ID NO: 33909 - DNA, 197 bp, Glycine max
  unsure at all n locations
  Clone ID: LIB3138-033-Q1-N1-F12
cgattggagagattcagggaaaaagtcttatggaattttcacaagaggaatgtcttacagcttgttcaactcaggtgcgtcctgcaacaactcttttagcctaatgggtgtccatatttgtatgcaatggtgcatgatagttcagtgtctacaataccaagtgatnttgttattggggtcaagttgacaaccataaa

SEQ ID NO: 33910 - DNA, 66 bp, Glycine max
  Clone ID: LIB3138-033-Q1-N1-G6
gaatatactaggttctgtcaaacatcgtaacttggttccgcttttagggttttgcgggggtaaaaa

SEQ ID NO: 33911 - DNA, 256 bp, Glycine max
  unsure at all n locations
  Clone ID: LIB3138-034-Q1-N1-A10
taaaagaaattggaccaaagggggataatatggtaaaagttcaaaaatggttctttctacctttttgacctattttgttgtcttttctgctgngtttgaagggttcccgttttaaaaaattgttnttgtggcagggagtgtacataggagccaagtttgattggttgcaattgagttgtaattgttgttaagggtaccaaaacccattaattcttctctcatgtaaagtcagcccgaaatgattgangctgattag

SEQ ID NO: 33912 - DNA, 424 bp, Glycine max
  Clone ID: LIB3138-034-Q1-N1-A4
cggaatttggtctcgcccaatgggacccggggaaaacaccatggattttgaatcttaccaggcgagcctttggccggttttttattgaccttctcggtggaggaatcttagtggacaaaactggagattggatcacacttatacaaaattctccaattagtaacttgttgagagttgctgcttggaagaaaggctgtttaatggtcaagattgtgatgtctgggaatgcagcagtcaaaaggagtgattgggcctcattggtacaagtgtttttaacaaacagcaacagtacagagcattttgatgcatgtaagtggacaaaatcagaaccacattcctgggaattgatcttcccaatagaggtatgtggtcctaataatggttttgaaatgtggagttctgagtgggcaaatcaaacttcatg

SEQ ID NO: 33913 - DNA, 292 bp, Glycine max
  Clone ID: LIB3138-035-Q1-N1-A5
aactcggcatgagcctcgagacagattataggtgcctaacaaaaagcgacactatcaagtgaagcagttacgtttgagcacagcggaaattaaaggcgctacgggtatgccagatggcatagaagattctgaagaatctctaggccagtatatgtgcgcacctgcagtaaggggggctgctttatcagcatggcctttggagaaatttggaacataccggtatttattgtctgggccgaatgtgggaaaagccctctatgaatggatgtatgagaaggaacgctcttactac

SEQ ID NO: 33914 - DNA, 226 bp, Glycine max
  Clone ID: LIB3138-035-Q1-N1-B6
agtgtggagccatgtgaaggagaaactcttgtggtgacagtctttgagattagaaaatcggagattccagattttatcaagagggaggttgagtttcggtttcttgctgttcttcctgaaacacttgatggcaaggcttttgaattttcagccggcctttgtgctcgttattgtgatgagggaatttttcgaccactagatgtaaaggaaaccaaggaatctattt

SEQ ID NO: 33915 - DNA, 272 bp, Glycine max
  Clone ID: LIB3138-035-Q1-N1-C3
tttcatgtacagaagcagcaatattgtggctaggatttttgaccgtcaaatttgcactcctgctcctggcactagtgtgtaatttaattcttgcaggttcatcatgctcggcgattctatgaaaatttggtaccaagttacacagtatatgaggttgagtgcccagaccattcatttcgtaaattcactgatgatggccaataccttataagtttcagcagaaatcatcaggagttgattgtttataggctagatgctttctttttatgcaa

SEQ ID NO: 33916 - DNA, 361 bp, Glycine max
  Clone ID: LIB3138-035-Q1-N1-D9
gtttttacaatccttcaaaaattttgtttctttgtgtgtgtatggtgatgataacttaattagtgttcatgaatatgtcaagccttactttagtggttctaaattgaaaagctttctagctagtcataacatcaccattactgatggtattgacaaaactagtgcaactttgcaatttagaaagttagcagattgtgattttctcaagagaaactttaagcagatgtctaatgttttgtgggtggctcctgaggacaaggcgagtttatggtcacaacttcattatgtttcgtgtaataatctggaaatgcaagaagcttatcttgtcaatctcgtaaatgtgttacgagaattgtatttg

SEQ ID NO: 33917 - DNA, 321 bp, Glycine max
  Clone ID: LIB3138-035-Q1-N1-G3
ccctgaactcggcattgggctcgagctcaggccgctcatggctagagtatataaccactaactgaggaagcggatttctggggttggagtttactcaattgggacgaaacttctgaactccaccgtaggaccttcaccctttcgaccaccgaagatggatttggccacgctctctccgtattgtaacctgcttgtccccaaacaagagaatgtgcagagagttcaactcggtggcaagtactttgaccgagctgctcttggtgatgcttatcaggatggcatctgaagacgaactttctctggctaagcaccccagcatgt

SEQ ID NO: 33918 - DNA, 399 bp, Glycine max
  Clone ID: LIB3138-036-Q1-N1-A3
gaaaaaagtcactcggagcctcctaataggagtgcacaacaagtttctgcgaaaattcctcctcagcaagtgcctagcttcacatcctcttgggctgttgatgacttattggaactaacaggctttgaatcacctgagaaaaaggaatctctgcagtttggagagctggaatggcttacagatgtgggtattttcggcgaacaatttgctcaagaagccttggctgcagctgaagtacctcagcttcccgaaactcataacagtagcagtgttgcttcatacaaaacctccaaatcctacatgtcccacaaaaagcctaggattgaagtcctaaatgatgatgatgatgatgagtattttactgtgcccgatctcggctaagtacgtggcttgccatat

SEQ ID NO: 33919 - DNA, 138 bp, Glycine max
  Clone ID: LIB3138-036-Q1-N1-B2
agagcttgactccatgcacgcgtcgtagctcgattcgtcgggcaaatgttagcccacagccatgccaacatgctatatcactgtgaaatgcgtcaatggcccatcactgctagtgagtcgatttaatctgactaacag

SEQ ID NO: 33920 - DNA, 350 bp, Glycine max
  Clone ID: LIB3138-036-Q1-N1-C10
tgactgccatgcacgcgagcttgaaccctgtataggggccgggctacatttttttattttttttaaaggtaggggataacgcggcggtctacatttattattggtcccagtctagaaaaaactgcatagaacacaaacgtagtgcttgctcatatagattgtctcgctaatgctgaacatataccaatgtactggctggaccgcagcctatttatctatggaatcatagactacttgccatcgattaaagatgccgtaagcgtgaatgatgtctaacctcaaattctacattctcccgctatctataccacacactgagtcattcccactgtgtttataattggaacatt

SEQ ID NO: 33921 - DNA, 69 bp, Glycine max
  Clone ID: LIB3138-036-Q1-N1-C4
gtctagccgcttccgccccgaatatcgcaagctttattttcatcgacctggatgccaaagctttctaac

SEQ ID NO: 33922 - DNA, 391 bp, Glycine max
  Clone ID: LIB3138-036-Q1-N1-E9
cacgcgcacgcaagcttggactctgtatagcgctcgcgcgccactgcaatgggcatggcttagagcgccccgcgctggcgctgtcggcatcgccagttggcgcgaagggaccaccgccggatcttaacgccggtaaccttctcttacacggacggtcctagagcacgcccgggacgacagattgttgctgccaccagtccttgcgctcacgggggctcacgaccaccgtcacctacacacaacctaaagcacaaagccggcccaagagaacgctttcccgtcgcgcaccggcgggctccacgtgccgcacacgcgcaaagcttcctgcgcgccgccatgacaagtctttggacgccaccgaccaacggaggccggaggaactacacccaca

SEQ ID NO: 33923 - DNA, 56 bp, Glycine max
  Clone ID: LIB3138-036-Q1-N1-F4
caccattgaattttgattctagcaagccgagcttttgtcagttttctattgacctt

SEQ ID NO: 33924 - DNA, 256 bp, Glycine max
  Clone ID: LIB3138-036-Q1-N1-G12
cggcgcagcttgatccttatagcggcgccttttttttcttttcttacgttataaacccggggagagatttttatgggggattgtctattgtataaaatcactctaaacggccaaagttttttttcagaaaggcccttttttctggggaagccccgcccttaatcaaatgggagctggtctgcaaggttccagagaggtcaccgattaagctggactctatgaacccccaaatatattttcttcggtgccacaaaca

SEQ ID NO: 33925 - DNA, 290 bp, Glycine max
  Clone ID: LIB3138-037-Q1-N1-A10
ctcgccaattgagaaggaaagctctctctcgtattgaatggctgcaaaaagctgatgtgcctaccatagcacagattgaagagttccattcgatgcagaggatgatgaatgctcctgattcaaatgataatattgatttactggtgagcattgatttgttgggtttacaaggagcaggtaaagcttttccaaacaaaattgtttttgatgataagcttgtgttggctaacacacaagaattctttgatggaaattttccagtggattcttggttaccaatttttgggaat

SEQ ID NO: 33926 - DNA, 236 bp, Glycine max
  Clone ID: LIB3138-037-Q1-N1-A5
gtttgttgagatgtttgttggtgttggtgcttctcgtgttcgtgatttgttcaagaaggcgaaagagaaggccccttgcattgtctttgttgatgaaattgatgctgttggaagacaaagagggactggaattggtggagggaatgatgaaagagagcagaccctcaaccaacttttgacagaaatggatgggtttgagggtaacacaggtttcattgtcgttgcagcaactaaca

SEQ ID NO: 33927 - DNA, 210 bp, Glycine max
  Clone ID: LIB3138-037-Q1-N1-A8
ccttttccagtagctttactggctgttctttttggcgttaagaatgaaattctgagttctaacgccactaatcctatgctgacgcgacttcttgagaactgtaagagtctcaaatatctggttgatgagtgtccttttgcatttgtgaactagtatgtagtattttattcacttaaataaagcgcattactatgtgcaatgagtgtgttt

SEQ ID NO: 33928 - DNA, 243 bp, Glycine max
  Clone ID: LIB3138-037-Q1-N1-D2
ataaaaaacctttgacgtccattccccccttccttaacctcggattccggttcgggaattgattgcccattctgtaccataggatttctggtttagggttgaatatgtaattggggagggagcctttcctgtttcttgatatttgttcatgcatttgtttctctgtgttaattgctttatcaattgtgttgtgatcttttagctgtaccacaaaattctatacctgtcctacgtttccggggg

SEQ ID NO: 33929 - DNA, 83 bp, Glycine max
  Clone ID: LIB3138-037-Q1-N1-D3
ttatggttgccaaacaaatgtgcccccaccaaccttcaagaccaaagggggccttggtcgcattgggcttttaattccaccgg

SEQ ID NO: 33930 - DNA, 143 bp, Glycine max
  Clone ID: LIB3138-037-Q1-N1-E3
acctcgcatgcaccccttccttaaccccggattccgctcgagccttttcttttaggcctttccaaataaagacctggttcaatttctcttcgagccagaaaaatggtcctccggaggttcaagggtgggaagccctacccgga

SEQ ID NO: 33931 - DNA, 240 bp, Glycine max
  Clone ID: LIB3138-037-Q1-N1-E5
tttgacgtcgcttgcccccttccttaacctcggattccggttcagcctttgtttccctggatttcttgcattttccaaaatttacttttgggggcaccaccctttcaccaggattcctcttcttttgttgcccattaccccttttccaaggccttgtttgtgacctccaaaattttgtttccaaagtctttccctaatttggtaaaaatttgaatttgatcccaagggattgggaaactt

SEQ ID NO: 33932 - DNA, 256 bp, Glycine max
  Clone ID: LIB3138-037-Q1-N1-F3
ttcggcttgagatgagatcaaaaagtcgatcactgggggtttgattggcttgcccaatgttggtaaaagtagtcttattaatagcttaaaaaggtcccatgttgtcaatgttggttctactcctgggttaacaagatcaatgcaagaggttcatttggacaaaaatgttaagttgctggattgccctggtgttgttatgccgaagtctcaaaaaaatgatgcttccgtggttttaaaaaattgccagagaattgag

SEQ ID NO: 33933 - DNA, 59 bp, Glycine max
  Clone ID: LIB3138-037-Q1-N1-F5
ctaattctccaagaataagagaatccaaaagtctttcaaaaaataaccatgatgatgca

SEQ ID NO: 33934 - DNA, 243 bp, Glycine max
  Clone ID: LIB3138-037-Q1-N1-G12
aggatatgggccatcaaccaaaaaaattcgaactccagtagcggatatttaagttgttgaggtgaaactgcgcttcaaagcacggcggcttggacataaatggccggccaggacttatacacatcatctttaccgtctttggtgccatgctctgaggctacacactagcataactcatggtgcgggacagtgacatcatacaaacccacaggctaaatgccagtccaccctattattacatga

SEQ ID NO: 33935 - DNA, 74 bp, Glycine max
  Clone ID: LIB3138-037-Q1-N1-G4
caataccaggtgattttgtcattggtgtccagttgacaaccataagcaatatgggtgcatataggctcaatccc

SEQ ID NO: 33936 - DNA, 324 bp, Glycine max
  unsure at all n locations
  Clone ID: LIB3138-037-Q1-N1-G5
atctcctttcgtctctcttacgccatcgacttgtatccaatctaagtgggactgatgatgaaattgaggaaaatattactctctgataagaaagaagaagatgaatatgatcaacttccatccatacgagtgttgacaaaatctcagtttgaaaagttgcctgagccactaaaaaaagattatctggatgaaatggattacagggaaactctntacttaaagaagcagttgaaagaagactatcagaggcgcaaagagaaactactctcaacagataaaaagtttttgaatggtgataaccctgatgatcaacaggcacctact

SEQ ID NO: 33937 - DNA, 58 bp, Glycine max
  Clone ID: LIB3138-037-Q1-N1-H7
gatgacttctccctacattaaatgtacaggctctttcttcatagcatttggaaatttg

SEQ ID NO: 33938 - DNA, 425 bp, Glycine max
  Clone ID: LIB3138-038-Q1-N1-A2
gacgttgcacgccctacgtacgtctggtaattcggttcgaggctaaagctccaagtatgtttttacaatccttcaaaaattttgtttctttgtgtgtgtatggtgatgataacttaattagtgttcatgaatatgtcaagccttactttagtggttctaaattgaaaagctttctagctagtcataacatcaccattactgatggtattgacaaaactagtgcaactttgcaatttagaaagttagcagattgtgattttctcaagagaaactttaagcagatgtctaatgttttgtgggtggctcctgaggacaaggcgagtttatggtcacaacttcattatgtttcgtgtaataatctggaaatgcaagaagcttatcttgtcaatctcgtaaatgtgttacgagaattgtatttgcacagt

SEQ ID NO: 33939 - DNA, 107 bp, Glycine max
  Clone ID: LIB3138-038-Q1-N1-C3
aaatatttacctttttaagggtaacaggggcctccctttttaagttgttgccgaacttgccaatgctcaaccttggtggttcaagccggcctttttttttaacaggc

SEQ ID NO: 33940 - DNA, 347 bp, Glycine max
  Clone ID: LIB3138-038-Q1-N1-F5
tctaagctcgaatcgctcagggactgctctctctaacaatggatgcaggccagaaatgtacagaccaactcacaacacgaggggcttggaggaaaataatgtaacttggggcgagaacagctgaagaactgcagctatgaccatgtagtaaccagttactgaatatagccaatggttgattgcacaggattgaagaaatgtactcatgatgagaatgtaaaatagctcagcattgcaattcatctataattctgatgctgctatacaatggaaacggtgctgatgacctactacatcacaagtgccatgagtcatggattaatggacataaatgctatggcagctct

SEQ ID NO: 33941 - DNA, 108 bp, Glycine max
  Clone ID: LIB3138-039-Q1-N1-A2
cgctcgaattcggctcggggggaagacatggaaaagctgggtggccggggtttgctggttgatgcacggcatcgccgacaatgggtcgtaagctggcggcagacatgt

SEQ ID NO: 33942 - DNA, 291 bp, Glycine max
  Clone ID: LIB3138-039-Q1-N1-A4
tccgactgctaaatgagcgattaaatgatctaacaatgcgagaatctttcgaatccatatttgcaaaagataatccaaaaaacacacgggtctgcattaacttctttacatctattggacttggtggtcttaccgagaacctacgtgagtatatgaagaatatgccacgtcttatcatgcaacaacagaaacaagtttcagaatctgaatcaaatgatgagtcagggagttctgatatataaattctggatcagctagatcagaggcagactcatactcaacaagttctga

SEQ ID NO: 33943 - DNA, 259 bp, Glycine max
  Clone ID: LIB3138-039-Q1-N1-C6
tttgataacacaaaatttccggttgggcctcactcccaaaaggctggctttgttaaaaaagatgggtcatcttctgtttctgctgcagatgttaaacacctgtcaagtgtgacacgaagagaatcaattgctgcatgggagaggagtcattttcataaaaaggctgatggtccctttagtaatgccccaaaacctctgtagaaaatatggacagatgatattttcatgtgcaatacaaatcatattaccctgtgagatg

SEQ ID NO: 33944 - DNA, 231 bp, Glycine max
  unsure at all n locations
  Clone ID: LIB3138-039-Q1-N1-D3
tcctccactttcaactccctcattccccccaaatctttaatcccccaatcccaccccctcattcccaacatcaggcccgggctccggcccaagcctggcccataccctttcatcctcgccgtncacgccgccgagcccgccaaaaaccccgtcgtcaccgacaagcccaagccccaagcccaacaatctgcattcccggccgcggcccgtgcaaccaaatgggccgtggac

SEQ ID NO: 33945 - DNA, 279 bp, Glycine max
  Clone ID: LIB3138-039-Q1-N1-D4
taaaaattttggggctggttttttgtaaggataccatagtgggtgatgaaatgcacagaggggtatccggtggccaaaagaagcgtgtcactacaggagagatgattgttgggcccacaaaaacactattcatggatgaaatatcaacgggtcttgatagttccacaacatatcagattgtgaaatgcttgcagcaaattgtgcaccttaatgaaggaactatcttaatgtgccttttccaacctgcttctgagactttcaatctctttgatgacatca

SEQ ID NO: 33946 - DNA, 332 bp, Glycine max
  Clone ID: LIB3138-039-Q1-N1-F2
ctctgttggctgatgggtgtccatatttgtatgcaatggtgcatgatagttcaatgtctacaataccaagtgattttgtcattggtgtcaagttgacaaccataaacaatatgtgtgcatatgggctcaatcctggtatttcaggttctcgtcttttgggcaccattcctcagtccatttcacagcaaactgtttggaatcaaatggcaacagtgagaacaccattgaattttgattctagcaagcagagcttttgtcagttttctattgaccttctcggtggaggaatcttagtggacaaaactggagattggatcacacttatacaaaat

SEQ ID NO: 33947 - DNA, 190 bp, Glycine max
  Clone ID: LIB3138-039-Q1-N1-G1
aagaggggatcctttgtttctttgaccagtctttttaaaaaaatttctattcggatttttgggccttagggaatttattgtttattacctggggggatttttaaaattagaagggattacctcctttgggtccaccgatttgccctaatattcataggccccttaaatattttttttttccaaccccctt

SEQ ID NO: 33948 - DNA, 291 bp, Glycine max
  unsure at all n locations
  Clone ID: LIB3138-039-Q1-N1-H12
ctcatcctctgtnttttatttctgtaccattggcatggatccctacaagcaccggccatccagcgccttcaattctcccttctggactacaaattctggtgctcctatttggaacaacaactcctctttaaccgttggagctagaggtccaattctgctggaggattatcatcttgtggagaagcttgcantatttgatagggaacgtatcccagaacgtgttgtccatgccaggggcgctagtgcaaagggtttctttgaggtcacccatgacatttctcacctgacatg

SEQ ID NO: 33949 - DNA, 173 bp, Glycine max
  Clone ID: LIB3138-039-Q1-N1-H2
attttgttggagatctcgtctttgaagtttctaagatgacttctccctacattaaatgtacagtctctttcttcatagcatttggaaatttggctgatgataccatcaattttgaggctttttcccacaagctggtgcagtttggagagattcaggaaaaagttgtttgaaat

SEQ ID NO: 33950 - DNA, 168 bp, Glycine max
  Clone ID: LIB3138-040-Q1-N1-D1
gttgaaatcgatgaactccctaagcacattgatgatacacagtacccaaaaacattcttctataaagaagaccttcatccaggcaaaacaatgaaagtacaattcaccaagcgtccctatgcacaaccttatggtgtatatacatgggtaacggatattaaagacacc

SEQ ID NO: 33951 - DNA, 153 bp, Glycine max
  Clone ID: LIB3138-040-Q1-N1-E1
cgctcgggtactggggctaaacaatcttaggccaaaatttttgaatagattggatgaaatgattgtcttcaagcagctcacaaaactggaggtgaaagagattgctgacataatgctcaaagaggtgtttgatatactgaaagtgaaagatat

SEQ ID NO: 33952 - DNA, 109 bp, Glycine max
  Clone ID: LIB3138-040-Q1-N1-G11
cagtgagagtgtcttcgatctgttgaaggctagaaattctgggaggtggattcatgagggaggaagggtcgttttttttttacaacacgaacgtgtttgcggctcttga

SEQ ID NO: 33953 - DNA, 138 bp, Glycine max
  Clone ID: LIB3138-040-Q1-N1-G6
attcgagtggagctcaaaaaatcattcaggagagggctcgatctgctgaaggataaaaattgaaggaggtcgaaacatgaggagaggtatggtcattggtgtataacaacaccaacgtgtttgctgcgctagatactt

SEQ ID NO: 33954 - DNA, 383 bp, Glycine max
  Clone ID: LIB3138-041-Q1-N1-A1
ccagactgagaggaagagagagggagattctttgtttgctaccttctctcggaaaaatggttacgttcaggtttcaccagtaccaggtggttgggagggctcttcccacggaagcagatcagcaccccaagatctaccgaatgaagctctgggccaccaacgaggttcgcgccaagtccaagttctggtattttctgaggaaactgaaaaaggtgaagaagagcaatggccaagtgcttgccatcaacgagatttttgagaagaacccaaccaaaattaagaactatggtatatggttgcggtatcagagtaggactggttaccacaacatgtacaaggagtaccgtgacaccactctaaacggggcagcttaggcaatgtac

SEQ ID NO: 33955 - DNA, 285 bp, Glycine max
  Clone ID: LIB3138-041-Q1-N1-A2
tgcacgcgacgtactcgaattcggtcgggctcgcgcccatgaagcaaattactatatgtgcagacctagctacgagatgtaacaggtatgagagggtgatataactggtggcctctgacaaatctggggctctaatcatggatgcagaacaggtttttacagttatgagttatccggcttctgacaggactggattatgacggcgagaaaatactatatagtaatactggccagtaaggaagtctggtgtatgtcaaagaactcttacaccacatctacaaagga

SEQ ID NO: 33956 - DNA, 383 bp, Glycine max
  Clone ID: LIB3138-041-Q1-N1-A3
aaaagatgaaatatttggccctgtacaaaccatcttgaagttcaaggacatcgacgaagtaattcgaaggtcaaacgcaacgcactatggtctagctgcaggagttttcactaagaatgtgcacacagccaacactttgatgcgagcactgagggttggaacagtatggatcaattgctttgatgtttttgatgctgcaattccctttggagggtacaaaatgagcggcattggcagggagaagggtatctacagtctcaacaattacctgcaagtgaaagctgaggtttcaccagtgaagaaacctgcatggttgtgattagcgaattgctcaaactgctatgaccgaaatcctacgtggctatcatctttttccgctgagg

SEQ ID NO: 33957 - DNA, 377 bp, Glycine max
  Clone ID: LIB3138-041-Q1-N1-A4
tatttgcattgagaagttctctgattttccccaacttgggaggttcactcttcgcactgaaggaaaaactgttgctgtgggaaaagtcactggtctgtgaatttgtaacaattttgacttgaggacgggaattcctgcccaaattaatggagtggcagctttgaggcataattgacagcatcaagtttaccatatattcatttcggtatttattttgcttttacttggggtggtattcagtgaagagttatttgttgccgctggtgcccatgatgtacttgtatacggccttacaaggcttggatgcttcagtattttgcggttggctgcttccaaccgtgctactcttgagatataatttgaaaatagatggtttt

SEQ ID NO: 33958 - DNA, 373 bp, Glycine max
  Clone ID: LIB3138-041-Q1-N1-A6
gctgatggatggtctgctatcagtgatgaggaagttgaatctattctgcctgccgcagcttatgcacttgccaagatacacatgcatcttggttatagtgggtattgttatacagcacgtggtggtttttgctacacagaagaagacatatttgacttccacacagatgacggcatgggagtagatggcttgccaactgaaggtgtagaaattacatatttcgatcaggaaggtgcccgctacatgatttatacaccatctgatccacttctttttgttgctatgaagggtgagaacgggatgttatacattgctgatgatgatctacttgaggatcctgctgtcattgactccatagatgaggagaccgaat

SEQ ID NO: 33959 - DNA, 371 bp, Glycine max
  Clone ID: LIB3138-041-Q1-N1-A8
ctcgcaatggttaaagttaatgtagcatgtgctgctgttggcttgacatcaagttacactccaactccattgttggaatctggtttgcaaaaagacagagggttaattgtggagtattttggaaggatgtcttacgttgctcataacgttaatcagccccaagagaaagatttgttggagggaaatttttcctttgatattaaatctcgctctagattggaaaaagtttcctctacaaaagcacaatttgttagtggaaaaaccttcaaatatgatataattggtgctggttcacattcttcagaagattttcctgaaaaggaagatcaagaaaaacccaaaaagattgatgccagattgagacaaagaat

SEQ ID NO: 33960 - DNA, 371 bp, Glycine max
  Clone ID: LIB3138-041-Q1-N1-B2
acgctgttgaagcgaccgacgagtcttgtgtgtgacctcaaaaccctgccgtcagtcaccgtcttctctgccgccatgaagcttgtcaggtttctcatgaagctgaacaacgaaaccgtttcaatcgagctcaagaacggaacagttgttcatggcaccattacaggtgttgatatcagtatgaatacacatttgaaaacagttaaactaactctgaaagggaaaaacccagttactttggatcatctcagtgtgagaggcaacaacattcgatattatatccttcctgacagcttgaatcttgagactttactggttgaagaggctcctaagatcaagcctaagaagccaactgctgggaagcctttggg

SEQ ID NO: 33961 - DNA, 432 bp, Glycine max
  Clone ID: LIB3138-041-Q1-N1-B3
caccagctaagacctatgactgcacgctgtcacgcgtgcttgagcttcggattcaggtgcagcgagggtggctatttgtaagaaagatgtttggagagttgaatgtggaatcccttctggatttccgctcacagttatttgcaatagcatttttaatgagatgctcattagatatagctatgaagggttgctgcgccaggctaaagctccaagtctgtttttacaatccttcaaaaattttgtttctttgtgtgtgtatggtgatgataacttaattagtgttcatgaatatgtcaagccttactttagtggttctaaattgaaaagctttctagctagtcataacatcaccattactgatggtattgacaaaactagggcagctttgcaatttagaaagttagcatattgtgattttctcaagagaaactt

SEQ ID NO: 33962 - DNA, 373 bp, Glycine max
  Clone ID: LIB3138-041-Q1-N1-B4
gcaacatgcatccaaattttcagattgaactttataattgtattaatctgacggaaaccattgaggagtttgattcatcttggaattttatcatcaataaatatgaactcacgaaaaatgattggcttcagtccttgtacagtgctcgtgctcaatgggttccagcatattttcgtgattcattttttgcagcaatatctcctaatcaaggatttgatggttcttttttttatggttttgtcaaccaccagacaacattaccactgttctttaggcagtatgaacaagctttggagtgctggtttgaaaaagaattagaatcagattatgatactatttgtacaacccctgttctgaagacaccttccccgat

SEQ ID NO: 33963 - DNA, 434 bp, Glycine max
  Clone ID: LIB3138-041-Q1-N1-B5
caccagctaagacctatgcatgcacacgcacgcatgcttaaaattcggattgaggtccagatagggttgcaatggtgcatgatagttcaatgtctacaatgccaggtgattttgtcattggtgtcaagttgacaaccataaacaatatgtgtgcatatgggctcaatcctggtatttcaggtgcttgtcttttgggcaccattcctcagtccatttgacagcccactgtttggaatcaaatggcaacagtgagaacaccattgaatcttgattctagcaagcagagcttttgtcagttttctattgaccttctaggtggaggaatcttattggacaaaactggagattggatcacacttatacaaaattctccaattagtcacttgttgagagttgctgcttggaagaaaggctgtttaatggtcaagattgtg

SEQ ID NO: 33964 - DNA, 370 bp, Glycine max
  Clone ID: LIB3138-041-Q1-N1-B6
ggaaaaagttgtattgaaattttcacaagaggaatttcttacagcttggtcaactcaggtgcgtcctgcaacaactcttttggctgatgggtgtccatatttgtatgcaatggtgcatgatagttcagtgtctacaataccaggtgattttgtcattggtgtcaagttgacaaccataaacaatatgtgtgcatatgggctcaatcctggtatttcaggttctcgtcttttgggcaccattcctcagtccatttcacagcaaactgtttggaatcaaatggcaacagtgagaacaccattgaattttgattctagcaagcagagcttttgtcagttttctattgaccttctcggtggaggaatcttagtg

SEQ ID NO: 33965 - DNA, 375 bp, Glycine max
  Clone ID: LIB3138-041-Q1-N1-B7
caaggatggcaatttgtaagaaagatgtttggagagttgaatgtggaatcccttctggatttccgctcacagttatttgcaatagcatttttaatgagatgctcattagatatagctatgaaaaattactgcgccaggctaaagctccaagtatgtttttacaatccttcaaaaattttgtttctttgtgtgtgtatggtgatgataacttaattagtgttcatgaatatgtcaagccttactttagtggttctaaattgaaaagctttctagctagtcataacatcaccattactgatggtattgacaaaactagtgcaactttgcaatttagaaagttagcagattgtgattttctcaagagaaactttaagc

SEQ ID NO: 33966 - DNA, 372 bp, Glycine max
  Clone ID: LIB3138-041-Q1-N1-B8
ctcgagccgctcgagccgattcggctcgaggtttttaacaaacagcaacagtacagagcattttgatgcatgtaagtggacaaaatcagaaccacattcctgggaattgatcttcccaatagaggtatgtggtcctaataatggttttgaaatgtggagttctgagtgggcaaatcaaacttcatggcatttgagtttccttattgacaatcccaaacagtctacagtttttgatattctcttgggaatctctcaagattttgaaattgctggtaatactcttatgccagctttttctgttccacaggctactgccagatcttctgaaaatgcggaatcctctgcatgatctggaatttgtgttttctttcg

SEQ ID NO: 33967 - DNA, 373 bp, Glycine max
  Clone ID: LIB3138-041-Q1-N1-C2
aaaagctgatgtgcctaccatagcacagattgaagagttccattcgatgcagaggatgatgaatgctcctgattcaaatgataatattgatttactgttgagcattgatttgttgggtttacaaggagcaggtaaagcttttccaaacaaaattgtttttgatgataagcttgtgttggctaacacacaagaattctttgatggaaattttccagtggattcttggttaccaatttttgtgaattgtctttatcctgtaagtcaattaccttcagaagctgtcgttgtaaatgttacatgtggtagtggacgtggtggtttacccaccactgcttggattagttctgcagttaacaatcgctcctcagatatc

SEQ ID NO: 33968 - DNA, 365 bp, Glycine max
  Clone ID: LIB3138-041-Q1-N1-C3
aaagccattccatcttcaccaccaaaaagaaaataatggcaatggccagtgcaacaactccagccacaatcactgttgtggccatctccagtgttgccagcacaaaaagaagggagaggaatgtgcacttcatcagaggtttgaattcctttggagggttgaaggctcagaacagtgtgacatcactaggtcttcctgtgtgcactgaacagtgttttgcaaaggtggtgagctcattgaaatatcaatcatcatctaagggcagaggtggaggtgctgcctcttcaacatgcaatgctgctggtgagattttccagattgcagccatcatgaatggtcttgtgcttgttggggtagcaattgga

SEQ ID NO: 33969 - DNA, 374 bp, Glycine max
  unsure at all n locations
  Clone ID: LIB3138-041-Q1-N1-C4
attgaagttgaagtcttgcccttctctcttcaactccaaacacaagacatcatcatccatggctgcctccgtctccactgtcggagctgtcaacagagctcttttgaacctgaatgggtctggacctggggtttcagctcccagttcatccttctttgggagcagcttgaagaaggttattggctcaagggtccccaacacaaagatttcctctggaagcttcaagattgttgctgtagaagagaagaaagagattgaagagacccagcagaccgacaaggacagatggaagggtcttgcctatgatatctcagacgaccaacaggacatcacangaggaaagggtttggttgactcccttttccaagctccac

SEQ ID NO: 33970 - DNA, 368 bp, Glycine max
  Clone ID: LIB3138-041-Q1-N1-C6
gaaagttagcagattgtgattttctcaagagaaactttaagcagatgtctaatgttttgtgggtggctcctgaggacaaggcgagtttatggtcacaacttcattatgtttcgtgtaataatctggaaatgcaagaagcttatcttgtcaatctcgtaaatgtgttacgagaattgtatttgcacagtccagaggaagctcgtcaattgagaaggaaagctctctctcgtattgaatggctgcaaaaagctgatgtgcctaccatagcacagattgaagagttccattcgatgcagaagatgatgaatgctcctgattcaaatgataatattgatttactgttgagcattgatttgttgggtttacaa

SEQ ID NO: 33971 - DNA, 364 bp, Glycine max
  Clone ID: LIB3138-041-Q1-N1-C8
catgatttcgcctccaactccaagaaatcagtgctcaccgagttgatacaagagatagaacctctggatgttagccacattcagaaggatgttccaccaactacagcagatgccatgaagaggactatatctggtatgctgggcttgcttccgtctgatcaatttaatgttgtcattgaggccttgtgggaacctctctccaagttactgatttcttcaatgatgactgggtatacactacggaatgttgaatataggctttgtcttgagaaaaaccttgatatgtttgaaggagatatagagaagccaaaggcagagagtatgaaagtggacttacaagggttgatgcatgacagtgtaaatg

SEQ ID NO: 33972 - DNA, 378 bp, Glycine max
  Clone ID: LIB3138-041-Q1-N1-D1
ctaaaatatcatgaatctctgcaaggctctcagatcccttcctcgctttgtctcccaagtccctaagagaggcttcggaggtggtggacatggttccgaacaccatgcccctccccagaatgaaattacacaagctgatcttgataaatacaactatctcttccctggcccaaccaagtcagaaagcacctttgctttacacaatgttatcggaaaacttcctttcactagatcaaagggcttcatagaattcttggctaccaatttcaatactgatcaagctaatagcactactgaacgtttcgtacctcctaaggtccatgaaaattccgtctttatatatcaatctaaggagcttgctaatgctgttagaggatt

SEQ ID NO: 33973 - DNA, 358 bp, Glycine max
  Clone ID: LIB3138-041-Q1-N1-D2
ctcgtgccgattctccaccactattcccttcaccccaatcacactttccggtagttgttgctattagtgtagaagatgagtacgctggatgcaacaagggctgaacttggtcttcttgttttatatttgggcaaggctgaagcaagggacaaaatatgcagggcaatacaatatggttccaaatttttgagtaatggggaacctggtactgctcagaatgtagacaaaacaaccagcttggcacgaaaagtcttccgtctctttaagtttgtcaatgacctacatgctttgataagtccaacaccacaggggacacccctccccctagctcttgtgggaaagtccaagaatgctctac

SEQ ID NO: 33974 - DNA, 370 bp, Glycine max
  Clone ID: LIB3138-041-Q1-N1-D4
gccagattgagacaaagaatagatcctcaatacaatgaggttcaggctcagatggaaacaaatttgtttaaattgtctcttgatgatgttgaaactcctaaaggttccatgttggatctgaaaatttctcaatctaaaattgcacttcccaagaacacagttggaggaaccattctgcgtagtgatctattggcaaattttttgacagagggcaattttagagcaagtgttgatttgcagcgcactcatcgtattagaggaatgattaaaatggtggccacagttggtattcctgagaatacaggtatatcattggcctgtgctatgaatagttcttttagggggcgcgccagttctgatatttacacca

SEQ ID NO: 33975 - DNA, 366 bp, Glycine max
  Clone ID: LIB3138-041-Q1-N1-D5
ctcaaatcaaacaactctggcggaggatactgctattgctcggcctgaatctgcatggctgatccacagccgctggttgtgaacgattccccgccaactcagtttcaaaacacacggatcgcctaccttgacgtcttgcgcggcctatctgtttttgtaattaactaactctgttagttcgttctttctttgcatactacgcaatcaatactatttctttctctctagaaatggtctcaacttatgatatgggtggatatatgctgattgcatcttccacatcattgatcatgccccctggaatgggattcactcggctgatttccgcatgcacttatacttttagtagctgaattgctcttgccc

SEQ ID NO: 33976 - DNA, 370 bp, Glycine max
  Clone ID: LIB3138-041-Q1-N1-D6
gctgatgataccatcaattttgaggcttttccccacaagctggtgcagtttggagagattcaggaaaaagttgtattgaaattttcacaagaggaatttcttacagcttggtcaactcaggtgcgtcctgcaacaactctgttggctgatgggtgtccatatttgtatgcaatggtgcatgatagttcagtgtctacaataccaggtgattttgtcattggtgtcaagttgacaaccataaacaatatgtgtgcatatgggctcaatcctggtatttcaggttctcgtcttttgggcaccattcctcagtccatttcacagcaaactgtttggaatcaaatggcaacagtgagaacaccattgaattttg

SEQ ID NO: 33977 - DNA, 371 bp, Glycine max
  unsure at all n locations
  Clone ID: LIB3138-041-Q1-N1-D8
gccaaatgctgttctttcaatgtggagatattttgttggagatctcgtctttgaagtttctaagatgacttctccctacattaaatgtacagtctctttcttcatagcatttggaaatttggctggtgataccatcaattttgaggcttttccccacaagctggtgcagtttggagagattcaggaaaaagttgtattgaaattttcacaagaggaatttcttacagcttggtcaactcaggtgcgtcctgcaacaactctgttggctgatgggtgtccatatttgtatgcaatggtgcatgatagttcagtgtctacaataccaggtgattntgtcattggtgtcaagttgacaaccataaacaatatgt

SEQ ID NO: 33978 - DNA, 376 bp, Glycine max
  Clone ID: LIB3138-041-Q1-N1-E1
gattgggcctcattggtacaagtgtttttaacaaacagcaacagtacagagcattttgatgcatgtaagtggacaaaatcagaaccacattcctgggaattgatcttcccaatagaggtatgtggtcctaataatggttttgaaatgtggagttctgagtgggcaaatcaaacttcatggcatttgagtttccttattgacaatcccaaacagtctacagtttttgatattctcttgggaatctctcaagattttgaaattgctggtaatactcttatgccagctttttctgttccacaggctactgccagatcttctgaaaatgcggaatcctctgcatgatctggaatttgtgttttctttcgcttgttcgttt

SEQ ID NO: 33979 - DNA, 369 bp, Glycine max
  Clone ID: LIB3138-041-Q1-N1-E2
caacgtttggaagtggaagatgagaacagtattctgaagaagacaaaggatgctctgataactttgcagggggttttggaaaggaagtatgataaagaaatcgaggaatctttgaaccagcgccaagtatccccagagggatggtggtcatcgctttataaaatgattgaaggtcttgctatgatgagcagattggccaagaacaggctccatcaatcagacttcggttttgaggacagatcaattaactttgatcaagttgatatgtagggaaaactgcactacttcagataactgccctgcctacacatgattgataacttcataagtttatagacccacagttttgctaactatattttggcacat

SEQ ID NO: 33980 - DNA, 270 bp, Glycine max
  Clone ID: LIB3138-041-Q1-N1-E3
aatttttctttcttttcttaaccaaataaaataaaatgtatcattatctgtattttcttactttagtccaaacacatgattaaagtttagcaacaaatttggtgtaactcccgatatttcaaaaccagaagtaatcagtgtgatctatactgtcagtagagtattatcaacatgctttgtctaaaaaaaaaaaagaaaaaaaaagaaaactgggagaaaatagaaatcagataaaaaatacacacaacatacaaatcccaaagcataaaa

SEQ ID NO: 33981 - DNA, 372 bp, Glycine max
  unsure at all n locations
  Clone ID: LIB3138-041-Q1-N1-E4
ggcaaaggaaaatttgaagcagctgggtcggatggttgcaaagttagctcatgccaaccctatgactgtccttcgaacaattgttcatcagattgaggcttatagagagatgattactcctgtagtggatgcatttaagtacttaactcagcttgagtatgatatattggaatatgttgtgattgagcgtttggcgcttggtggacgtgataagttaaaggatgatggccttaatttgtcagattggcttcaatctcttgcttcattttggggccacctgtgtaagaagtacccatcaatggaattacggngccttttccagtatcttgtgaatcagttaaaaaaggggcagggaattgagcttgttctact

SEQ ID NO: 33982 - DNA, 373 bp, Glycine max
  Clone ID: LIB3138-041-Q1-N1-E6
cacagtcacatacacatactactactcgtttcatttgcctcttgtagtagccaatagccatggttttccaaacaagcaataatccccatttcgtattgtttcccctaatggctcaaggccacatcatccccatgatggacattgcaagactattggcgcggcgtggtgtgattgttaccatattcactaccccaaagaatgcatcacgtttcaattctgttctttctcgtgctgtttcatcaggcctccaaatccggctagttcaactccactttccatccaaagaagcatgactacccgaagggtgcgagaatttcgacatgttaacatcaatggacatgatgtacaaagtcttccacgccatcagcatgct

SEQ ID NO: 33983 - DNA, 376 bp, Glycine max
  Clone ID: LIB3138-041-Q1-N1-E8
cacaagccaagtgaaagtgagaaaaaataaaaatcaacgagcataatgtcagggatcattcacaagattggggagacccttcatgtgggagggcacaagaaggaggaggagcataagggtgagcaccatgctggagaatacaaaggggagcaccatggtgaacacagtattgagtacaaaggagagcatcatggtgaacacaaagctggagagtaccatggtgagcacaagccagagcacaaagaggggatcctagacaaagtcaaggacaagatccatggtgagggcggcgccgccgatggctagaagaagaagaaggataacaagaaaaacgagcattgccatgagcatggccatgacaacagcatctgcagtg

SEQ ID NO: 33984 - DNA, 373 bp, Glycine max
  Clone ID: LIB3138-041-Q1-N1-F1
taaaatgggacttgggactctgccactgaccccttcttacagcggtttctcttcaaactcaggacttatacatgacaccaccaatcacagaagggtcaatagaagcatgaaattcagagtttcagcaaaacaagagaagcaagaagagaagaaaaagcaatctttgttcagcagtgtgactgaagctcttgatttttctcaagtgagatccgctgaggatgctcagcttatagaagaggctagagaagccacaaaatcaggagaaagaatgagtagggaacagtatggagctcttagaaggaaaattggtggtacatacaacgattttttcaaatcttacgttgaagtggacggcgcatatgttgaagagggc

SEQ ID NO: 33985 - DNA, 374 bp, Glycine max
  Clone ID: LIB3138-041-Q1-N1-F2
ttaagataaggcaatgaatctgatgcaggcggttcgctacgacgcctacgggggaggtcctgccggcctcaagcacgttgaagttgccgttcccagtccaaaggcaaatgaggttttaatcaaactggaagcagttagcattaaccctattgattggaagattcagaagggtcttctccgtcctttatttctccccagaacctttccccacataccttgcactgatgtggctggagaaatagttgagatcggaactcaagtcaaagatttcaaagttggcgaccaagtccttgctaaactcactcatcaatatggaggtgggtttgccgagtttgctgtggctagtgagagcttaacagcagccagaccatctg

SEQ ID NO: 33986 - DNA, 377 bp, Glycine max
  Clone ID: LIB3138-041-Q1-N1-F3
cttttgggcaccattcctcagtccatttcacagcaaactgtttggaatcaaatggcaacagtgagaacaccattgaattttgattctagcaagcagagcttttgtcagttttctattgaccttctcggtggaggaatcttagtggacaaaactggagattggatcacacttatacaaaattctccaattagtaacttgttgagagttgctgcttggaagaaaggctgtttaatggtcaagattgtgatgtctgggaatgcagcagtcaaaaggagtgattgggcctcattggtacaagtgtttttaacaaacagcaacagtacagagcattttgatgcatgtaagtggacaaaatcagaaccacattcctgggaatt

SEQ ID NO: 33987 - DNA, 374 bp, Glycine max
  Clone ID: LIB3138-041-Q1-N1-F4
gctgatgataccatcaattttgaggcttttccccacaagctggtgcagtttggagagattcaggaaaaagttgtattgaaattttcacaagaggaatttcttacagcttggtcaactcaggtgcgtcctgcaacaactctgttggctgatgggtgtccatatttgtatgcaatggtgcatgatagttcagtgtctacaataccaggtgattttgtcattggtgtcaagttgacaaccataaacaatatgtgtgcatatgggctcaatcctggtatttcaggttctcgtcttttgggcaccattcctcagtccatttcacagcaaactgtttggaatcaaatggcaacagtgagaacaccattgaattttgattc

SEQ ID NO: 33988 - DNA, 375 bp, Glycine max
  Clone ID: LIB3138-041-Q1-N1-F5
tggaccgcagaggaagaagcagcattgaaagctggagtggtcaaacacggggctggaaaatggcgcaccatacttacagacccagagttcagttccattttgcgcatgcgttcaaatgtagatctcaaggacaaatggaggaacataaatgtgacagcaatatggggatcgaggcagaaagcaaagctagctcttaaaaagaacctactaccatccaccaaaattgacaataaccacttggccttgagtactgtagttcaacgtgacaaagaagttgcaaatcccaagcctttggcagtttctagtgggacatctcctaattcaaaggaaaaaatatcgaagctacagaactttcagttggataatcttatatta

SEQ ID NO: 33989 - DNA, 246 bp, Glycine max
  Clone ID: LIB3138-041-Q1-N1-F7
agacttcatggcatttgagtttccttattgacattcccgaactggatagagttcaggctattctcttgtgaatcttttaagattatggaatggctggtaatactcttatgctcactttttctgtgccacaggctaatgccacatcttttgaaaatgcggaatactctgcatgagcttctgaaaatgcggaatcctctgcgtgatctgggatctgtgaattctttcacttgttcgattgtttaattc

SEQ ID NO: 33990 - DNA, 370 bp, Glycine max
  Clone ID: LIB3138-041-Q1-N1-F8
caacaactctgttggctgatgggtgtccatatttgtatgcaagggtgcatgatagttcagtgtctacaataccaggtgattttgtcattggtgtcaagttgacaaccataaacaatatgtgtgcatatgggctcaatcctggtatttcaggttctcgtcttttgggcaccattcctcagtccatttcacagcaaactgtttggaatcaaatggcaacagtgagaacaccattgaattttgattctagcaagcagagcttttgtcagttttctattgaccttctcggtggaggaatcttagtggacaaaactggagattggatcacacttatacaaaattctccaattagtaacttattgagagttgctgc

SEQ ID NO: 33991 - DNA, 378 bp, Glycine max
  Clone ID: LIB3138-041-Q1-N1-G1
gtttcaagatctttgccaggcaggagttaaggggcttataacagcaatcgatcgttttgagccaaacaggagatttcggctatcaacttatagtttgttttggataagacatgctatcattcgttcaatgaccctctcaaacttcacacgtgttccctttggacttgaatcggttcgagcagaaattcaaaaagctaaaactgagttaacatttgagcttcagaggtcaccaacagaggaagaaataatagaaagagttcatatatcccctgaaagataccatgacgtaattaaggcatcaaaatccattctttctctgaactcgagacatacaaccacacaagaggagttcattaatgggatcgttgatgatgatgg

SEQ ID NO: 33992 - DNA, 372 bp, Glycine max
  Clone ID: LIB3138-041-Q1-N1-G2
aaattgatgcgtgaaaggacgcacctgctgttggcttgatgagtcaaggatggcaatctgtcagaaagatgtttggagagttgaatgtggaatcccttcggtatttccgctcacagttattcgcaatcgcattattaatgagatgctcattacatatagctatgaaaaattactgcgccaggctaaagctccaagtatgtctttacaatccttcaaaaattgtgtttctatgagtgtgtatggtgatgatacacttaattagtgctcatgaatatgctaagccttactttagtggttctaaattgaaaagctttctagctagtcataacatcaccattactgatggtatagacaaaactagtgcaactttgc

SEQ ID NO: 33993 - DNA, 378 bp, Glycine max
  Clone ID: LIB3138-041-Q1-N1-G3
atcttgattaagcctctgcaagctgtacagtctcatcctcaggaaagctcgacgtctgctccaaaacctgcagactgtactgaaactggcagagtgaatgagcttttgcagcataacaaaacggagaatcaggcatcctccatagcagctgagctaggatctggaaacaagttggatgatataaggaatttagaaactggacttgaagatggtggaactgttcaatcagcaaagcctttctgagcattgaatacctgaattataaatttctatcatttgaggctatttattgtgcctgcagatttatctgtcataaagtaagtaaatatctgacatggtgaaatatttagagtttttagctctagtctcaaagatctt

SEQ ID NO: 33994 - DNA, 376 bp, Glycine max
  Clone ID: LIB3138-041-Q1-N1-G6
gtaaagcttttccaaacaaaattgtttttgatgataagcttgtgttggctaacacacaagaattctttgatggaaattttccagtggattcttggttaccaatttttgtgaattgtctttatcctgtaagtcaattaccttcagaagctgtcgttgtaaatgttacatgtggtagtggacgtggtggtttacccaccactgcttggattagttctgcagttaacaatcgctcctcagatatcaacaaaaggattcgcacagcacttgggaaaggtaagaaaattgtttttcttactagagttgatccttttccagtagctttactggctgttctttttggcgttaagaatgaaattctgagttctaacgccactaa

SEQ ID NO: 33995 - DNA, 370 bp, Glycine max
  Clone ID: LIB3138-041-Q1-N1-G7
tgctctcaagactgtgaattgtggaatcctgcttgcacaaaagcaatgactatgtcatttaatccaaacccgtgttctgatgcatggagtttggaatttctgaagcgtactggatttcattgcgatatcatttgtgtcactggatggactgccaccccaatgcaggatgttcaggttacaattgattggtttatttcctctcaggaatgtgttcccaggacctattgtgttttaaatccacaaaatccttttgtgttaaataggtggatgggaaaattgactttcccccagggcacttcccgaagtgttaagagaatgcctctttctatagggggaggagctggtgcaaagaatgctattctcatgaata

SEQ ID NO: 33996 - DNA, 377 bp, Glycine max
  Clone ID: LIB3138-041-Q1-N1-G8
ggcagcccaaataacaacgacaacatctcccccacctctcttcccctgtagcaccaaacttaactctcacaacccgcctatacaatatgtccgacgtcgctaagccagaccccgccgcggatcagacggccgcacctggagccactcttgtcaaggacgagaccgcgaaggtcaccaccgacaaactgtccgacaagcctgagaatgcgggggcaacttcgaccgatgacaagcccatcacagagaaggccaccgaggctgccacttctgctgcagcggcagtgaaggacaacgtcttttctatgtttggtggcggccctgcaaaggctaagaaggaggagacagacgatgttgatgagccgtcaggtgccaccaag

SEQ ID NO: 33997 - DNA, 215 bp, Glycine max
  Clone ID: LIB3138-041-Q1-N1-H1
gagaacaccgtttgcgaagtgcttgccaggctccactctttgtggcagtttgatggttggtagcgcgccacttttttcctgcgcccagtcaccacctgtttccatgattaccgtatacaggcttgggtggctaggctgagacgactgctgcgtaatagtataatagcattgtgatccccagtcttgatgatggtagagtaactacttttgctttt

SEQ ID NO: 33998 - DNA, 387 bp, Glycine max
  unsure at all n locations
  Clone ID: LIB3138-041-Q1-N1-H11
cacattttgtccctggtggactcaagaagagtctttcataggacagttaattaaaattatagcctgaaataagggttcactagcaatggcctcaacctcttctgctctcactatatcctcttcttccacccttcatgattgcaaggctccaagacagtcaccagctgcttcaccacaatgtgtgagccttccctctccccttttgcactctcagaactgttcatggaagaccactgcttattgtcgcagtattgctcgaaatgttatggcaatggccacaggagaggcaccagctgaagctgccccgactgaggtgccagagattgtcaagactcttcaagaaacttgngacanagttgatgataagtatgcagtgagttcacttgc

SEQ ID NO: 33999 - DNA, 380 bp, Glycine max
  unsure at all n locations
  Clone ID: LIB3138-041-Q1-N1-H2
gttttaatgattggtgactagcacaagcatattcgaaccacccagatgaatattccttcacccttagtatagtgtagtagccactgggattcgaatcaacagagaagagatgggattgaattggcatagatgggttgttagtgcttttctacttgttgcatgggctttaattcttgacactggagagatatgtttctgtatgggtggaaagaccagtgattttctgagaaatgattatttatcgttggatatgccaatagacagtgatacgttccgtgtgcctcctggttacaacgctccccaacaggtgcatataacacaaggagatcacgtanggaaaggtgttatcatctcttggattagcccacatgaacccggtt

SEQ ID NO: 34000 - DNA, 311 bp, Glycine max
  Clone ID: LIB3138-041-Q1-N1-H3
atctggtttgcaaaaagacagaggcctaattgaagcctattttggaaggatgtcttacgctgctcataacgttaatcagccccaagagaaagatttgttggagggaaatttttgctttgatattaaatctggctctagattggaaaaggcttcctctacaaaagcacagtgtgttagtggaaaaaccttcaaatatgatataattggtgctgggtcacattcttcagaagattgtactgaaaaggaagatcaagaaaaacccaaaaagattgatgccacattgagacaaagaatagatcctcaatacaatg

SEQ ID NO: 34001 - DNA, 201 bp, Glycine max
  Clone ID: LIB3138-041-Q1-N1-H4
gtttcttacaaggctctactctactgcttcaccttctgctctagaaaattcagtggtgatacatggcttcggctactctctctgtagccaaaccagcccttcaggcaaatgggaaaggcttctctgaattctctggcctccgcagctcatcaggcttccttcccttttctagaaaatcttcagaggatttccattctgtca

SEQ ID NO: 34002 - DNA, 297 bp, Glycine max
  Clone ID: LIB3138-041-Q1-N1-H5
ctctaaatttccttttgcttcttaccaaaaagaaaccttcctggaagctactctctttgcacttccatgatttgatctccgccgaggatatgatggaacttgctcctctttccttttctgattaatattattttttatatttaactggagagagagagagagagagagagagtcatccttcttcatttttagatacctggattcgagacatgagatgaggccgatgcaactgccaccgccttccggtaccggggccaaccctgcccgcaccaacaacagcaaggaccgtccctagcg

SEQ ID NO: 34003 - DNA, 370 bp, Glycine max
  Clone ID: LIB3138-041-Q1-N1-H6
gcaacagtacagagcattttgatgcatgtaagtggacaaaatcagaaccacattcctgggaattgatcttcccaatagaggtatgtggtcctaataatggttttgaaatgtggagttctgagtgggcaaatcaaacttcatggcatttgagtttccttattgacaatcccaaacagtctacagtttttgatattctcttgggaatctctcaagattttgaaattgctggtaatactcttatgccagctttttctgttccacaggctactgccagatcttctgaaaatgcggaatcctctgcatgatctggaatttgtgttttctttcgcttgttcgtttgtttaattcaataaaggaaattaagcatgac

SEQ ID NO: 34004 - DNA, 373 bp, Glycine max
  Clone ID: LIB3138-041-Q1-N1-H7
gccttcatggccaaaccagagtccattgaggtatggaacccaagtggcgaatacagagttgttagcaccaaaccaatgcctggaactcgatggatcaatcttctcgaacaaaatgatgttcgccttgaaatatgtaccgagaagaaaacgattctgtcagttgaagacatcattgctttgattggcgataagtgtgatggagttattggacagctgactgaatactgaggagaacagttgttctgtactttgagcaaagccggaagcgaagctgtcagtaacatggctgttggttataacaacgtgcatgttgatgctgcaaacatgtatagagatgctgttggaaatactcctggagtgctcactgatacaa

SEQ ID NO: 34005 - DNA, 320 bp, Glycine max
  Clone ID: LIB3138-041-Q1-N1-H8
gtttcttacaaggctctactctactgcttcaccttctgctctagaaaattcagtggtgatacatggcttcggctactctctctgtagccaaaccagcccttcaggcaaatgggaaaggcttctctgaattctctggcctccgcagctcatcaggcttccttcccttttctagaaaatcttcagaggatttccattctgtcattgccttccagacctatgcagttggaagcagtggaggatacaagaagggtgtgacagaagcaaaactgaaggttgccataaacggatttggaaggattggaaaggacttcttgaggtgc

SEQ ID NO: 34006 - DNA, 69 bp, Glycine max
  Clone ID: LIB3138-042-Q1-N1-G2
ctcatactagaatttaaatagacagtggataaaacaaacacaatggtggagtgttattttactattatc

SEQ ID NO: 34007 - DNA, 377 bp, Glycine max
  Clone ID: LIB3138-042-Q1-N1-H1
cacgcgcacgcgagctcgggatccggattcagcgagagatgcgtattttcactttcacacacgaagctcgccaatttagaaggaaagcgctctctcgcattgaatggcaaccaaaagctgttgtacctaccccatcacatattgcccagatccatatgcatccattgatgttatacgctcttgagtcagatgataatattgttctactcacccccatggatctgttgttggaacaaccagcgtgtttagctcattacaaacatattaaaattggaaaagccccaccttgtagcgcacacacaactattcttttacggaatttttagtgaccaactttgtttaccgcttatctctaaaaatcgatcattcgttcaatt

SEQ ID NO: 34008 - DNA, 151 bp, Glycine max
  Clone ID: LIB3138-043-Q1-N1-A4
gggaggagctggtgccaaaaatgctattctcatgaatatgcccaatgctggtctttcaatgtggagatattttggtggagaactcgtctttgaaggttctaaaaagacctctccctacaataaaagtacaagctctttctttataacattt

SEQ ID NO: 34009 - DNA, 371 bp, Glycine max
  Clone ID: LIB3138-043-Q1-N1-C1
cggggtgtttttaacaaacagcaccagtccaaaccattttgatgcatgtaagtggacaaaatcagaacccctttctggggattggaccttccaaataaaggattggggccctaatatgggtttggaaatgggaagtcttaagggggcaaataaacttcatggcatttgaagttccttaatgacaatccaaacagtctacagttttgatattctcttgggaatctctcaagattttgaaattgctggtaatactcttatgccaactttttctgttccacaagctactgccagaacttctgaaaatgcggaatcctctgcatgatctggaaatttgtgttttctttcgcttgttcctttgtttaattcaataa

SEQ ID NO: 34010 - DNA, 399 bp, Glycine max
  Clone ID: LIB3138-043-Q1-N1-C2
tcacagttatttgcaatagcatttttaatgggatgctcattagatatagctattaaaaaatactgggcccggcttaagcttcaagtatggttttacaatccttcaaaaattttggttctttggggggggatggggaagaaaacctaattaggggtcatggatatgtgaaggcctaccttaatgggtcttaaatggaaaggcttcttacttggcataccatacccttactgattgtttggacaaactagtgccacttttcaattttaaaagttagccgaatgtgattttctcaggagaaactttaaagcagatgtctaatgtttttgtgggtgggctcctgaggacaagggcgagtttatggtcacaacttcattatgtttcgggtaataatctggaaat

SEQ ID NO: 34011 - DNA, 124 bp, Glycine max
  Clone ID: LIB3138-043-Q1-N1-D1
aattcggttcgggaaaaaaaaaaaaaaaaaaaaaaaaaaaaaaaaaaaaaaaaaaaaaaaaaaaaaaaaaaaaaaaaaaaaaaaaaaaaaaaaaaaaaaaaaaaaaaaaaaaaagggccgcccc

SEQ ID NO: 34012 - DNA, 145 bp, Glycine max
  unsure at all n locations
  Clone ID: LIB3138-043-Q1-N1-D5
ttcgttaggttgggaattgggttggagttattacaaaatatttataaatgtgactgtaataaactccncttggacactgactttggggtnannnancaaaatctaatgtggaaggtgcttttgtaaggaaagtaattgtatgatg

SEQ ID NO: 34013 - DNA, 317 bp, Glycine max
  Clone ID: LIB3138-043-Q1-N1-D6
gttttcttctcgctgtgttcgtttgtttaattcaatgaaaggaaattagcgcatgcaccctcttgttgagtatgcttctgcctatttgaaaatttccacaccttttttaattgtcgtaatgatgtgtgaagtgtgtgttattttaaaaaaaaaaaaaaaaaaaaaaaaaaaaaaaaaaaaaaaaaaaaaaaaaaaaaaaaaaaaaaaaaaaaaaaataaaaaaaaaaaaaaaaaaaaaaaaaaatattaaaaaataataaaaaaaaaaaaaaaacaaaaaaaagggggggcccccccttttggggctttttcccccc

SEQ ID NO: 34014 - DNA, 367 bp, Glycine max
  Clone ID: LIB3138-043-Q1-N1-E1
ttcttaagtccttttacaagaaaacggttgggattaaatgggcaccgggggaacacccttggattttggttcttgccaggcgaggttttggcaggtttttattggccctttcgggggggggatcttaaggggccaaaccggggaatgggtcccacctataccaaaatcttccattaagtacttattgagaagtgctgcttgggaaaaaggcttgttaatggtcaagattgtgatgtctgggaatgcagcagtcaaaaggagtgattgggcctcattggtaccagtgtttttaacaaacagcaacagtacagagcattttgatgcatgtaagtggacaaaatcagaaccacattcctgggaaatgatc

SEQ ID NO: 34015 - DNA, 84 bp, Glycine max
  Clone ID: LIB3138-043-Q1-N1-F1
actataaaatatctatgacgatgcacgcgctcgtaagaaacctaataagtttgtagcgcgcactctttttctttttgggggccc

SEQ ID NO: 34016 - DNA, 423 bp, Glycine max
  unsure at all n locations
  Clone ID: LIB3138-043-Q1-N1-F6
cttccttagcttggaaattcggttcgagattgagtttcccttacttgatcaaacaaccaaaaattcagttatttcaactacattaaatgatctttcaaattggtcaagattatccagtttatggccgcttctctatggtactagttgttgcttcattgaatttgcttcattaataggatcacgattcgactntgatcgttatggactagtaccacgatcgagtcctcggcaagcagacctaattttaactgcgggcacagtcactatgaaaatggctccttctttagttcgattatatgaacaaatgcccgaacctaaatatgttattgctatgggagcatgtacaattacagggggggatgttagtaccgattcttatagtactgttcggggcgtggataaactaatcccagtggatgtcta

SEQ ID NO: 34017 - DNA, 113 bp, Glycine max
  Clone ID: LIB3138-043-Q1-N1-H12
tttggaatttctgaaacgcactggatttcattgcgatatcatttgtgtcactggatggactgccacccccatgcaggatgttcaaggtacaaatgattgggttattttctctc

SEQ ID NO: 34018 - DNA, 99 bp, Glycine max
  Clone ID: LIB3138-043-Q1-N1-H4
cctttatctttatcacttggatttttaacgacactaacggctggtcttggtatgcttaatcgcatttcaaaaggattggctaacctgtttccttttctt

SEQ ID NO: 34019 - DNA, 56 bp, Glycine max
  unsure at all n locations
  Clone ID: LIB3138-044-Q1-N1-A1
gctgggggatgttaaccaggattttcctagcactggaaagctgcnagtctttgtcc

SEQ ID NO: 34020 - DNA, 278 bp, Glycine max
  Clone ID: LIB3138-044-Q1-N1-B8
tgatggatttttggttggtggtgcatccctcaaggcggaatttgtggacatcataaacgctgctactgtgaagaagaattgaaattcgtagttaggaactgataatgctgcctttcaagctgcttcggaaattgctgtttttgagttttggttctgtgctttgtggccaatgtattgaactctgtttagtacctgaataaacatgctttcctttgatctcatccataggcgatcaattggattttgattaaatttctgattgcaaaaatagtgtaact

SEQ ID NO: 34021 - DNA, 362 bp, Glycine max
  Clone ID: LIB3138-044-Q1-N1-C5
acaagagctgcgcccgtgcatgcacccctgcattagcttcgagctcgagccgaggctgcttggagtgcaagctgagtaaaggtcatgaccgtgttgtttgggcttgcaacacacaacatgagtgatcgtggctgattggcgcatgcagtgttaacactcagaaccaagccatatcgtacctgagcgtgtctgggcccagagtttcaaccaccattctatgcatcttcttaccaataggaaagggttctgctcatgggttcccaacgcagagatttgcgtgggcagactaaacattgtggctgttgaatatacttattgacaatgccaaaccgcctacaccttctgggactgtttggaggatc

SEQ ID NO: 34022 - DNA, 382 bp, Glycine max
  Clone ID: LIB3138-044-Q1-N1-D7
ggaaaattgaaatttgaaacagaagatacacataatttatgatgggtgtcagattgaacagaaaaggcacacactctttgtgatatttgattttctagtcttgtgcatggtgatggttgtaatttatgttttctaagcaggataaggtaatcacagtgtgtcagtcgaggaaaatggagaacatagaaggggagagttctgaagaagaagaacagccatcatatggatcttttatgatggagaggttgacaggaagcatgagtggacgaattgatcacatgcttcaggacaagacctttgagcatccatatctgcaagccattggagctcatacaaactattggcgggattatgatactgctcttttcatattgaaacactt

SEQ ID NO: 34023 - DNA, 85 bp, Glycine max
  Clone ID: LIB3138-044-Q1-N1-E3
ggggcctatcatatcatatcatacacatttcaattttcacaggtccataatggggcttgttcccaccccctgaaaatggtggatt

SEQ ID NO: 34024 - DNA, 229 bp, Glycine max
  Clone ID: LIB3138-044-Q1-N1-H9
agacagaagcaatcgcggaggagcctattgaactggggggaggaggaatgatagcggacaaaaacagagatggacaacactagaaaaataggccgatacagcacgaagagagatgacgcgcgcaacaagaggtgcacggaaaaaacgtgagtctggagacgcagatgaaaaagagcgggggggctggacagacaagtgttttaacaaacacaacagaccgagcaacatg

SEQ ID NO: 34025 - DNA, 343 bp, Glycine max
  Clone ID: LIB3138-045-Q1-N1-A1
accattgaattttgattctagcaagcagagcttttgtcagttttctattgaccttctcggtggaggaatcttagtggacaaaactggagattggatcacacttatacaaaattctccaatttgtaacttattgagagttgctgcttggaagaaaggctgtttaatggtcaagattgtgatgtctgggaatgcagcagtcaaaaggagtgattgggcctcactggtacaagtgtttttaacaaacagcaacagtacagagcattttgatgcatgtaagtggacaaaatcagaaccacattcctgggaattgatcttcccaatagaggtatgtggtcctaataat

SEQ ID NO: 34026 - DNA, 262 bp, Glycine max
  Clone ID: LIB3138-045-Q1-N1-A3
cccaagccactcagattctcctcctgcaccatcaccgtcaccatctgcgtcggcgacaagctcccggaggccaccttctgctacctggactcgtccggcgaggagcagacgacgactgtgtcggaactgacgaatgggaagaaggcggtgctgctcgcggtccccggcgctttcacccccacgtgctcgcagaagcacgtgccgggcttcgtggagaaatcggaggagctgacggcgaaggcgatcgacacactcgcatgca

SEQ ID NO: 34027 - DNA, 420 bp, Glycine max
  unsure at all n locations
  Clone ID: LIB3138-045-Q1-N1-A5
ctccctacattaaatgtacagtctctttcttcatagcatttggaaatttggctgatgataccatcaattntgaggcttttccccacaagctggtgcagtttggagagattcaggaaaaagttgtattgaaattttcacaagaggaatttcttacagcttggtcaactcaggtgcgtcctgcaacaactctgttggctgatgggtgtccatatttgtatgcaatggtgcatgatagttcagtgtctacaataccaggtgattttgtcattggtgtcaagttgacaaccataaacaatatgtgtgcatatgggctcaatcctggtatttcaagttctcgtcttttgggcaccattcctcagtccatttcacagcaaactgtttggaatcaaatggcaacagtgagaacaccattgaattttg

SEQ ID NO: 34028 - DNA, 382 bp, Glycine max
  Clone ID: LIB3138-045-Q1-N1-A6
aaggctgggggtaagaacaaaaagaccaaaagaacagcaccaaaatccaatgacatctacctcaaattacttgtcaagctttatcggttccttgttcgaaggactggcagcaatttcaatgctgttatactcaagcgcttgttcatgagcaaggttaacaagcctccaatttctttgtcaaggttaattaagtatacaaaggggaaggaggataaaattgctgtaatagtggggactgtaactgatgatatcagagtatatgaagttccagcattgaaaattacagcactcaagtttactgagagagcacgtgcaagaatagaaaaggctggtggtgaatgcttgacatttgatgagcttgcccttaaggctcctttgggac

SEQ ID NO: 34029 - DNA, 370 bp, Glycine max
  Clone ID: LIB3138-045-Q1-N1-B1
tgctattctcatgaatatgccaaatgctgctctttcaatgtggagatattttgttggagatctcgtctttgaagtttctaagatgacttctccctacattaaatgtacagtctctttcttcatagcatttggaaatttggctgatgataccatcaattttgaggcttttccccacaagctggtgcagtttggagagattcatgaaaacattgtattgaaattttcacaagaggaatgtcttacagcttggtcaactcatgtgcgatctgcaacaactctgttggctgatgcgcgtccatatatgcatgcaatggtgcatgatagttcagtgtctacaataccaggtgattttgtcattggcgtcaagttg

SEQ ID NO: 34030 - DNA, 409 bp, Glycine max
  Clone ID: LIB3138-045-Q1-N1-B3
ttttgacaatgtcggcggtgatgtgctcaacgaggcgtcgacggtggtgaagcgctatggctgcttctcgatctgaggtgctatcttgggctaccacggggcacccatgacgctcaccaactggcggtaaaccgtttacaacaggctcacgctcaaggggttcatcctctttgaccacctgaaggacctcccgaccgcagggaaggagttggcgggctgggtcaaggaaggcaagctcaacgtctaacaagagacggcggtcgagaccaagtttgatgacatccccaagacgtggatgcgccttttctcgggcgagaacacgggcaagctggtcaccgtattggtataattggctggctagacggcaaacgggaaagagtgcaagagaaaatatggatgtgtagcatat

SEQ ID NO: 34031 - DNA, 421 bp, Glycine max
  Clone ID: LIB3138-045-Q1-N1-B4
gccaaaatcagacccacattcttgggaatggatcttcccaatggaggtatgtggtcctaataatggttttgaaatgtggagttctgagtgggcaaatcaaacttcatggcatttgagtttccttattgacaatcccaaacagtctacagtttttgatattctcttgggaatctctcaagattttgaaattgctggtaatactcttatgccagctttttctgttccacaggctactgccagatcttctgaaaatgcggaatcctctgcatgatctggaatttgtgttttctttcgcttgttcgtttgtttaattcaataaaggaaattaggcatgaccctcttgttgagtatgctctgcctatttgaaaatttccacacctcttttaattgtcgtaatgatgtgtgaagtgtgtgttatttt

SEQ ID NO: 34032 - DNA, 555 bp, Glycine max
  unsure at all n locations
  Clone ID: LIB3138-045-Q1-N1-B6
gaaagatgaatagttaatcaaggccggtcccgaggagagagagtccatggggagtcaccggagagaatcatcctgaacccaaagctcaccgctgcaatgaccgtgtcgaggacgttattcaggcttgctttgagggaaacccattcaagactgttccgggacctttcaagctcttctggcagtgcatgcgttccaaacccggtgaggaaccaacagccccatttacttatctggatttggagcctctaaagagagaaacggaacctgtgaaacctgagtagtgtcacttttacttacaaatgccttaacagctttggcactgcatggtcctttagtggtttctaaatttccctccgtgtggattttttttttttgagaaaaatatgtaactaaattgtttttgttgctttgctacataaaacagacgtcctatgccgctttgttctgttctttggtggtacttgctcaataaaacatggctaggtgcgttcttgaataacttatattantaatgttgatgttataacaaaacattaattaatgttctgctggatt

SEQ ID NO: 34033 - DNA, 471 bp, Glycine max
  unsure at all n locations
  Clone ID: LIB3138-045-Q1-N1-C1
tgtttttaacaaacagcaacagtacagagcattttgatgcatgtaagtggacaaaatcagaaccacattcctgggaattgatcttcccaatagaggtatgtggtcctaataatggttttgaaatgtggagttctgagtgggcaaatcaaacttcatggcatttgagtttccttattgacaatcccaaacagtctacagtttttgatattctcttgggaatctctcaagattttgaaattgctggtaatactcttatgccagctttttctgttccacaggctactgccagatcttctgaaaatgcggaatcctctgcatgatctggaatttgtgttttctttcgcttgttcgtttgtttaattcaataaaggaaattaggcatgaccctcttgttgagtatgctctgcctatttgaaaatttccacacctcttttaattgtcgtaatgatgtgtgaagtgtgtgttatttnt

SEQ ID NO: 34034 - DNA, 403 bp, Glycine max
  Clone ID: LIB3138-045-Q1-N1-C4
aaaccagcctttaccattcaccttctccttcctcctctttctggctctctgcaccccattggctgctaacaacaccgatttcggaggttcagcctgcctcaaggtttcccccacccacttcgccggctcagtcaccgaagtcataactgctatacgacaagtcgcttccatcctctcacgcttcagccctcccttcgccaacttccgcctcgccaccgccctcgccgactgccttgacttgctcgacctctcctccgacgtcctctcctgggccctctccgcctctcagaaccccaaagggaagcataacagtacggggaatctgagttcggatttgaagacatggctaagtgcggcgcttgcgcatccagagacgtgcatggaaggattggaagggacaaat

SEQ ID NO: 34035 - DNA, 469 bp, Glycine max
  Clone ID: LIB3138-045-Q1-N1-C6
atgacctggtggaaatcatccggaaatttccaaaaaaatactcccgaagagcgcaatgttagatttggtgttagagaacatggaatgggagcaatctgtaatggtattgctcttcatagccccggattcattccatactgtgcaactttctttgtcttcactgactacatgagagctgccataaggatttctgcactgtgtgaagctggagttatttatgtgatgactcatgattcgattggacttggagaggatggaccaactcatcagccaatagagcacttggcaagcttcagggcaatgccaaacactttgatgcttcgtccagctgatggtaatgaaactgctggatcatacaaagttgctgtggttaacaagaagagaccctcaattcttgcactttctaagcaaaagttgacccaacttccaggaacttctattgagggagttgaaaagggtggctacatta

SEQ ID NO: 34036 - DNA, 446 bp, Glycine max
  Clone ID: LIB3138-045-Q1-N1-D3
gggttcccgcggcgggacccggagaagatccgcgtggcgctggagcacacggaggcggtgctgtgggtggagcaccgcaagacgcggcggccggtggcgttcgcgagggccaccggcgacggcgtcttcaacgccatcatatgggacgtcgtggtggacccctccttccaggggatcgggcttgggaaggccgttatcgagaggctgctcagggagcttcggggaaagggaatttccaatattgccctctattcggagcctcgcgttttgggcttttatcgtcctttgggatttgttgctgacccggatgggatcaggggaatggtgtactccaggaaacaaaagaaaaaataggataactcttcattttctttctctattttttttaatttatttattgattatatgaaagtagagtaccaagtttaatttccatgcattatgtt

SEQ ID NO: 34037 - DNA, 416 bp, Glycine max
  Clone ID: LIB3138-045-Q1-N1-D4
agactttaatattttttgatctcatttgttactgccctcattggattctatgatttatacaaaaatgttcctgttctcaaggcaactgcatctcgtatatgtgggcctcttcttgattggattgaaacttgggagatggtttcaagggtcaaatacttaggcacaatgctgtttctacataacttccagaaggctgttaggtggtttcttgcctttacacataccatgcgatcatttttttcctttcttgttcaacctcttgtagagtcattggtggagatttttggatttcttctcccaagcttcaagtttttgtttgaattagctgaaagcatcttttctgtcatttggctcgtagtggatacttcttttgatatagtgggaaatgtactggagctgctcttttcaccattttg

SEQ ID NO: 34038 - DNA, 351 bp, Glycine max
  Clone ID: LIB3138-045-Q1-N1-D5
tggtccaacaccaagggaatgcccaaagagtccagttggctgacaagaccttgaacaaggctgcccttggaaatcctcacgaggttgattttaacaggggaattttctaacaatctggaatcggaggcaaagcatacttggcaagtgaatatttatgcacctgaaggtagtgctgatccaggtgctagaagttgtgatcggacttgcgtgtgacattcttagaatactaaatgtcataggtgcaaagagaagatgccacgtcagagatgattgtactatatctaccatattgcactggcatcctctataattttgagttaaagtgtgcactttgattgacgtgctttacaa

SEQ ID NO: 34039 - DNA, 614 bp, Glycine max
  Clone ID: LIB3138-045-Q1-N1-D6
gcttgactccatgccgcgtcgtagctcgaatcgctcggctcggccggacgaccttggagagcgtttttgttgtacggaccgccggggacgggtaaatcgtatttggccaaggccgttgccacagaagctgattctacgtttttcagtgtttcttcgtcagacctggtttcaaagtggatgggagaaagtgaaaagctggtctcaaatcttttccaaatggcacgcgaaagtgcaccttctatcatattcgttgatgaaatagactctctatgtggtcagcgtggagaagggaatgagagtgaagcttcaaggcgtattaaaactgagcttctggtgcagatgcagggtgtaggacacaatgatcagaaagttcttgttctagcagctacaaatacaccttatgctctagaccaggcaataaggcggcgtttcgataagcgtatatacatacccctacctgatttaaaggctcgccaacacatgttcaaggtgcacctaggagatactccccataacttggctgaaagtgatttcgaacatttggctcgcaagacaaaggggttttcaggttcagatatatctgtctgtgtgaaggatgttttaatttgaacctg

SEQ ID NO: 34040 - DNA, 344 bp, Glycine max
  Clone ID: LIB3138-045-Q1-N1-E1
catggggtagacggtgcgcacatggcgcacatgggtacacacctggtgcttacccaccaccatctggggcataccctacacagcaaggatatgctccagctgggtgtgctacacaacatgggtttactacagctgagtaccctccacatcaaatgcatgctgctgctggttaccccccaactggttatcctggttcatcacatgcaccatgttctcatgcgcaccgtggtatgggagcaatgctcgctagaggtgctgctgcggatgctgctgcttatggtgctcaccatgtctctcaatgctcccatggctcctatggccaatatgcacatggtgctcacatg

SEQ ID NO: 34041 - DNA, 405 bp, Glycine max
  Clone ID: LIB3138-045-Q1-N1-E3
acaatgagcaacgacaaggacaccttcaacgtcgctgatctcacttccgctctcaacgaggacaatagagcagaccttgtcaatgctctcaagagcaagatacagagtttggctggacagcattctgatattctagagtctctgtcgcccaatgtcaggaagcgtgtggaggttcttagagagatccagggtcaacatgatgaattagaggcaaaattttttgaggagagagcagctcttgaggccaaataccaaaaattgtatcaaccactttacacaaagcggtatgaaatagtaaatggtgctacggaagttgaagaaggggcagtgaaagaaacaacaccagatggtgaggaggatcaagagaaaggagtgcctgcattttggcttactgccatgaaaaac

SEQ ID NO: 34042 - DNA, 548 bp, Glycine max
  unsure at all n locations
  Clone ID: LIB3138-045-Q1-N1-E5
tcctccttccaacgaaattcatttggtgggaaaatccaagaagagggtggaatttcaagccagggaagatggattatttcaatgcaccaggaagaaaccatctctttgttccggggccggttaacatcccggaccagatcattcgggccatgaacagaaacaatgaggactaccgttctccagcaattccagctatgaccaaaacactgcttgaggatgtcaagaagattttcaagaccataactggaatcccatttctcatccctacaactggtactggtgcttgggagagtgctctcacaaacacactgtctcctgnggatcgaattgtatctttcctgattggccaattcagcttgctttggattgatcagcagcaacgcctgaaattcaatgttgatgttgtagagagtgaatggggccagggtgctaagcttgatgttctggaatcaaagattgcttcagatacttcacacactattaaaggcatttgcattgtccacaatgagactgcaactggngtcaccaatgacttggccaaagtgaga

SEQ ID NO: 34043 - DNA, 384 bp, Glycine max
  Clone ID: LIB3138-045-Q1-N1-F1
cagtgtctacaataccaggtgattttgtcattggtgtcaagttgacaaccataaacaatatgtgtgcatatgggctcaatcctggtatttcaggttctcgtcttttgggcaccattcctcagtccatttcacagcaaactgtttggaatcaaatggcaacagtgagaacaccattgaattttgattctagcaagcagagcttttgtcagttttctattgaccttctcggtggaggaatcttagtggacaaaactggagattggatcacacttatacaaaattctccaattagtaacttattgagagttgctgcttggaagaaaggcttgttaatggtcaagattgtgatgtcttggaatgccacagtcaaaaggagtgattggg

SEQ ID NO: 34044 - DNA, 417 bp, Glycine max
  Clone ID: LIB3138-045-Q1-N1-F3
tttttccgccgtacaagtggaccaaactccaccgactccgttatggacaactccggaaatcctcaagatgtggttgtgccacctgttgaaggtgttgcatgaggtggtacggctcatggttggaatgatggtggcacacatggcttgaatgtcaagggaccaattgaccctacagaaattccaactaaagatttagtgcatgtatggtgcatgccaaacacagcaaatgttggacctcaagatatgcccagacatttggagcctataaacctgctggctgctagaaatgagagggagagtgtgcaaatagctatccgaccaaaggtttcatggggtggttctagtgtcgcacggactgtgcagattcagtgtagcgacctatgttccacatctggagacatactgattgttgggcaa

SEQ ID NO: 34045 - DNA, 546 bp, Glycine max
  Clone ID: LIB3138-045-Q1-N1-F4
aaaaatggttcctgaaaaggccccccttctggtggcttggtggtcaaaggatggcaaattgtaaagaaagatgtttggagagttgaatgtggaatcccttctggatttccgctcacagttatttgcaatagcatttttaatgagatgctcattagatatagctatgaaaaattactgcgccaggctaaagctccaagtatgtttttacaatccttcaaaaattttgtttctttgtgtgtgtatggtgatgataacttaattagtgttcatgaatatgtcaagccttactttagtggttctaaattgaaaagctttctagctagtcataacatcaccattactgatggtattgacaaaactagtgcaactttgcaatttagaaagttagcagattgtgattttctcaagagaaactttaagcagatgtctaatgttttgtgggtggctcctgaggacaaggcgagtttatggtcacaacttcaatatgtttcgtgtaataatctggaaatgcaagaagcttatcttgtcaatctcgtaaatgtgtta

SEQ ID NO: 34046 - DNA, 330 bp, Glycine max
  Clone ID: LIB3138-045-Q1-N1-G2
tcttgtggccacgcctggtttccgttttcatcatcattgcaggacccatggggggaaaattgagggttggtgtgtaagttgagaaaggggaagaagatggcttgttcacaaaggaaagtgtgtgtaaagctgtgaacactgttatagatgatgagattgatcaacttggcagataagtcagagcaaatcacatcacagtgaggagcctcttgctaagtaacaatttcgagacatcttgtgtagatgctttcagccacaagctacatgatttactgctaagctcagcccagtttaattaacacactgcataagttctatattcttgacact

SEQ ID NO: 34047 - DNA, 459 bp, Glycine max
  unsure at all n locations
  Clone ID: LIB3138-045-Q1-N1-G3
gttaatggtcacaacttcattatgtttcgggtaataatctggaaatgcaagaagcttatcttgtcaatctcgtaaatgtgttacgagaattgtatttgcacagtccagaggaagctcgccaattgagaaggaaagctctctctcgtattgaatggctgcaaaaagctgatgtgcctaccatagcacagattgaagagttccattcgatgcagaggatgatgaatgctcctgattcaaatgataatattgatttactgttgagcattgatttgttgggtttacaaggagcaggtaaagcttttccaaacaaaattgtttttgatgataagctngtgttggctaacacacaagaattctttgatggaaattttccagtggattcttggttaccaatttttgtgaattgtctttatcctgtaagtcaattaccttcagaagctgtcgttgtaaatgttacat

SEQ ID NO: 34048 - DNA, 528 bp, Glycine max
  Clone ID: LIB3138-045-Q1-N1-G5
ccaattggaccatggaaaccaattggaccaggggaatttcttccaagttttctgcactagttgagaaatcatttttcttagtggaatttgcatttaactgaaatttgctcgcctctacccccttcctatccatggattattatatggttgtgaatgattaacgtttgctgctgtgacaatgttttttactcttcttttgggagtcaattagaaatagcagggttggacgaacactctatttctgttttgctagcccattgaaatgtagcgaacaccttttctgtccatttatgctcaactgaattttgtttcccaaactattcagcattccaagtcaaagctagaaccatcaagttgaaactatttagccatatattataatactttatttagggctacaaacactataattagtaactacgtaatagggacaagtagtcaatgtctctctgtcatttctagtctaatacttgtgcatcgcttggttacttcggtattttaaatgcgtgatgaataacaactgaaatg

SEQ ID NO: 34049 - DNA, 343 bp, Glycine max
  Clone ID: LIB3138-045-Q1-N1-H6
gacaaccatgccttctagggagccttctctgagtccggtgaaaccgttgaaacgaaaattatcaacgatcgtgagactggcagatccaggggttttggatttgtgaccttcgcctcggagcagtccatgaaagatgcgatcggagcgatgaatggactgaacttggacggccgctatatcactgtcaatgaagctcaatcccgcagtggccgcggcagctgccgtggatgatgaagaggatacaatcgtggtggcggaggatatggtggtcgtagcgacagcagcatgtagccgtggttgctaccgttacccatacactggatatcagcgtggctattgtggt

SEQ ID NO: 34050 - DNA, 262 bp, Glycine max
  Clone ID: LIB3138-046-Q1-N1-B6
gagagactcatgacaaagctggcttgagattttcacatgatgaattatttaccgcttggtcaactcacgtgcgtactgcaactactatgttggctgatgggtgtacatatttgtgtgcaatggtgcatgatatctcaaactgtacactgccaggggatgttgacattggagctcagatgccatccataaacaataggcgcgcatatacggctcaattctgaaccattatgatgtccacatacgggcaccatgactaacaaca

SEQ ID NO: 34051 - DNA, 399 bp, Glycine max
  Clone ID: LIB3138-047-Q1-N1-A1
attggcaaattttttgacagagggcaattttagagcaagtgttgatttgcagcgcactcatcatattagaggaatgattaaaatggtggccacagttggtattcctgagaatacaggtatatcattggcctgtgctatgaatagttcttttagggggcgcgccagttctgatatttacaccatctgctctcaagactgtgaattgtggaatcctgcttgcacaaaagcaatgactatgtcatttaatccaaacccgtgttctgatgcatggagtttggaatttctgaagcgtactggatttcattgcgatatcatttgtgtcactggatggactgccaccccaatgcaggatgttcaggttacaattgattggtttatttcctctcaggaatgtgttcc

SEQ ID NO: 34052 - DNA, 398 bp, Glycine max
  Clone ID: LIB3138-047-Q1-N1-A3
gtgattttggagattccaagactgtttctctatgcgtgaaacggctagtgtacacaaatgaaaatggagaaattgtcaagggagtctgctcaaatttcttgtgtgacctgaagccaggagctgaagtaacaataactggacctgttgggaaagaaatgcttatgccaaaagatcctaatgccaccatcatcatgttgggaaccggaaccgggattgccccatttcgctcatttttatggaaaatgttctttgagaaacacgaagattacaagttcaatggtttggcatggctctttttgggtgtccctacaagcagctcattgctatataaggaggaatttgagaagatgcatgagaaatatcctgacaacttcaggcttgacttcgctgtgagccga

SEQ ID NO: 34053 - DNA, 395 bp, Glycine max
  Clone ID: LIB3138-047-Q1-N1-A5
attagtctctgactctcggccacgaaaatatagtggcaaagataataacaacatacttgggcgaatcccatctgcttcgaaaatccacaacaaggtggaaattgcattggatcacaatgctacaaaagaaggaatcacaagtgttgaaggtgatcatcaagatagtggacgtgagaagttgaagaggcatagagtggaagttgctcgaagggtttggattcctgacatatggggacaagaggagatcttgaaggattggattgattgcacagcatgtgatgctcctttggttccaagcagaatcgtctatggcacgaacggctttggttgaagaatgtagaagagccacatcgggtggatcgagaatcgagaacaggtgctgaatttttttcatc

SEQ ID NO: 34054 - DNA, 390 bp, Glycine max
  unsure at all n locations
  Clone ID: LIB3138-047-Q1-N1-A7
tatttctaagtctctgcgtttgcggctgaggattccgaacgagtgacctttttggtttttggcaaagtttaagtattaatggttaaggaaaaggttaaaatcaccttgtcggcaatggacatgtcgactcttggaagtgaacttacacatggtcacttgatctacaagcttggaggtattgacaagcgtgtgattgaaaggttcgagaaggacgctgtcgagatgaacaagaggtcattcaagtatgcctgggtgctcgacaagctcaaagctgagcgtgaaagaggaattaccattgatattgctttgtggaagtttgaaaccaccgagtactactgcacggtcattgatgcttctggacatcgtgactntatcaagaacatgattact

SEQ ID NO: 34055 - DNA, 398 bp, Glycine max
  Clone ID: LIB3138-047-Q1-N1-B1
tcttgatctgatttttgagggaagacttggaaatgttattgcgagacacaatcgtttatgcgaagcaaccagacttgctgtataggcatggggtttgaagaattgcacccaaaaggaagagtggtacacagacactgtgactgctgttcttgttcctgcttacattgatagtactgaaatagttagaagggcatggaagagatacaatttgagcttaggtcttggactgaacaaagttgctgggaaggttttcagaattggacatcttggcaacttgaatgagttgcaactgttgggatgtctagctggtgtggagatgatactgaaagatgtgggctatcctgtaaagcttggaagtggagttgctgctgccagtgcatacttacaggacactattt

SEQ ID NO: 34056 - DNA, 394 bp, Glycine max
  Clone ID: LIB3138-047-Q1-N1-B3
cacaacttcattatgtttcgtgtaataatctggaaatgcaagaagcttatcttgtcaatctcgtaaatgtgttacgagaattgtatttgcacagtccagaggaagctcgccaattgagaaggaaagctctctctcgtattgaatggctgcaaaaagctgatgtgcctaccatagcacagattgaagagttccattcgatgcagaggatgatgaatgctcctgattcaaatgataatattgatttactgttgagcattgatttgttgggtttacaaggagcaagtaaagcttttccaaacaaaattgtttttgatgataagcttgtgttggctaacacacaagaattctttgatggaaattttccagtggattcttggttaccaatttttgtgaa

SEQ ID NO: 34057 - DNA, 309 bp, Glycine max
  Clone ID: LIB3138-047-Q1-N1-C3
attttatccaattgaaattttaaaaatgactggggttaacttaagaattcaattattggaattggattagttaacaatttaattgggttggtcggatggttttaaaaaaatggaggactaacttccatttcttatttattattggattaacccatccacttggtttgttatcgaacatttttttttggattcaaaagtttttccggaaaaaattgaatttatttttattttccaatcaaatctaataactttggtcccggaggttcctggcctggaaaaaaaaatttgggtcctaatcgcccaaataat

SEQ ID NO: 34058 - DNA, 393 bp, Glycine max
  Clone ID: LIB3138-047-Q1-N1-C5
gaaaaattgatgcgtgaaaggacgcacctgctgttggcttgttgttcaaggatggcaatttgtaagaaagatgtttggagagttgaatgtggaatcccttctggatttccgctcacagttatttgcaatagcatttttaatgagatgctcattagatatagctatgaaaaattactgcgccaggctaaagctccaagtatgtttttacaatccttcaaaaattttgtttctttgtgtgtgtatggtgatgataacttaattagtgttcatgaatatgtcaagccttactttagtggttctaaattgaaaagctttctagctagtcataacatcaccattactgatggtattgacaaaactagtgcaactttgcaatttagaaagttagcagat

SEQ ID NO: 34059 - DNA, 231 bp, Glycine max
  Clone ID: LIB3138-047-Q1-N1-D1
atcaaaacaccactctgacaacattaactccccgaatgttggatggagaagcaacaatgggcacgtgggctcgcatgtgcgacacgtgccgttcggccccctcctccgtgttctgccgcgcccacaccgactttctctgcgccacgtgcgacgcgcgccttcacgccttgctgacgtggcacgagcgcgtgtgggtgtgcgaggcctgcgagcgcgcccctgcggcctttc

SEQ ID NO: 34060 - DNA, 364 bp, Glycine max
  Clone ID: LIB3138-047-Q1-N1-D7
gaaaaaaaaatatctctatgcgtttaaaatataaagttgaggaggatactaaaccatatgaactcggatcataaaaaaataaagttatttgaaaataggggcggccccctatttgtgtgctcgataacccggtaattaatttcgaacgggtccttgatgacgatccagctttgcctatttggagacattttatagctgggctaaactatgggcataacgcattcccggtataaaatgaaacaccgcaagatattcagacaatattgtggtcgaacttataacagtgaaaactgggggcccttaatgggggtggaaaccaacattaattgtgtggctctgactgtccctttacaaggagggaaac

SEQ ID NO: 34061 - DNA, 391 bp, Glycine max
  Clone ID: LIB3138-047-Q1-N1-E5
agaaagaagcacccgaagcggttctcggagaagaagaagaagaagaagaagatgatgatgatgacccatctgcggaactgagctacgtggacccagtaactgaccctgagagcatcacggagtgggagctggacttctgctccaggcccattctcgacgccagagggaagaaggtttgggagttagttgtgtgcgacaagacgctatcgttgcagtacaccaagtatttcccgaacaacgtcattaacagcattacgctgaaggatgctattgttgccgttagtgaccagttgggtgtcccgttgcccagaaacattcgcttctttaggtcgcagatgcagacaattattacaaatgcgtgtaatgagcttcgcataaggcctgttcctag

SEQ ID NO: 34062 - DNA, 369 bp, Glycine max
  Clone ID: LIB3138-047-Q1-N1-F1
gaaccattctgcgtagtgatctattggcaaattttttgacagagggcaattttagagcaagtgttgatttgcagcgcactcatcgtattagaggaatgattaaaatggtggccacagttggtattcctgagaatacaggtatatcattggcctgtgctatgaatagttcttttagggggcgcgccagttctgatatttacaccatctgctctcaagactgtgaattgtggaatcctgcttgcacaaaagcaatgactatgtcatttaatccaaacccgtgttgtgatgcatggagtttggaatttctgaagcgtactggatttcattgggatatcatttgtgtcactggatggactgccaccccaatgc

SEQ ID NO: 34063 - DNA, 150 bp, Glycine max
  Clone ID: LIB3138-047-Q1-N1-F3
tgagaatggagctaaaatacctttcatgatggcaagtgaggggatcaaggagcgaaacatcattcacaaggtcacatcttcattaactggatcaattattgttgaagatgtaatttatgaaaatgttgatagtgaagtcagttgtatttt

SEQ ID NO: 34064 - DNA, 392 bp, Glycine max
  Clone ID: LIB3138-047-Q1-N1-F7
gcttttgtcagttttctattgaccttctcggtggaggaatcttagtggacaaaactggagattggatcacacttatacaaaattctccaattagtaacttgttgagagttgctgcttggaagaaaggctgtttaatggtcaagattgtgatgtctgggaatgcagcagtcaaaaggagtgattgggcctcattggtacaagtgtttttaacaaacagcaacagtacagagcattttgatgcatgtaagtggacaaaatcagaaccacattcctgggaattgatcttcccaatagaggtatgtggtcctaataatggttttgaaatgtggagttctgagtgggcaaatcaaacttcatggcatttgagtttccttattgacaatcccaaacag

SEQ ID NO: 34065 - DNA, 82 bp, Glycine max
  Clone ID: LIB3138-048-Q1-N1-B7
cattcactgtctagtgatccaccttcactgtccgtttccaatagtttaaatcacactctattcagttctcaggattccggtt

SEQ ID NO: 34066 - DNA, 76 bp, Glycine max
  Clone ID: LIB3138-048-Q1-N1-D10
gtggtaccatcttcatctcctgtatcatttccttcattaccggtatctggatggcagctggcgatagctggccaaa

SEQ ID NO: 34067 - DNA, 375 bp, Glycine max
  Clone ID: LIB3138-048-Q1-N1-D6
ttgttcagttcttcagaatacataaacatcaagatttcagttccaaacaaaacttatcaaaatctcatatactgattcagttctatacataaccatcgagatttactatcaaaccaaaaattctcaaaatctcttcacctctgtgatgaccatggaatacagaaccttagaactcaacatcatatccgcaaaggacatcaagaacgttaacctcttctccaagatggacgtatacgccgtcgttacgctctccggcgaccctctccaccctcagggcgccaccacccacgtccacaaagacgccggcagcaaccccacgtggaactaccccggtgaattctccgtcaacgaatcgctggccaaggagaatcgttt

SEQ ID NO: 34068 - DNA, 369 bp, Glycine max
  Clone ID: LIB3138-048-Q1-N1-D7
cggaaactttcacgaggttttcggagaaaaccaaactcggggctttgcatcgcaagtatcataccctttcctatcaaaattcttttgcctttccctaccaagggcgcccctcaaccgatatgtacgccactctctcatattactgataacgtgtatcaattcatgttgctcaaaagcaataactactacgtttatatccagagacgagatctgtatctggatctgggaatctctcaagcaaactttatttcatttggatatgatttgtgtcactacatagactgccaccccaatgcataatgtttacgttacaatatatgggtggatttcctgccatgaatgtgtttccaatacctattgagctttaaa

SEQ ID NO: 34069 - DNA, 379 bp, Glycine max
  Clone ID: LIB3138-048-Q1-N1-F2
gttgccattctcatcctcctctgtctctctctctccaccattgccatggatccttacaagctccggccatccagcgccttcaattctcccttctggactacaaattctggtgctcctgtttggaacaacaactcctctttaaccgttggagctagaggtccaattctgcttgaggattatcatcttgtggagaagcttgcaaactttgacagggaacgtatcccagaacgtgttgtccatgccaggggagctagtgcaaagggtttctttgaggtcacacatgacatttctcacctgacatgtgcagatttccttcgagcccctggagttcagacgcctgtaattgttcgtttctcaactgtcattcatgagcgtggta

SEQ ID NO: 34070 - DNA, 347 bp, Glycine max
  Clone ID: LIB3138-049-Q1-N1-B1
attggtgctgcctcacattcctcagaagattttcctgacaaggaagatcaagaaaaacccaaaaagattgatgccagattgagacaaagaatagatcctcaatacaatgaggttcaagctcagatggaaacaaatttgtttaaattgtctcttgatgatgttgaaactcctaaaggttccatgttggatctgaaaatttctcaatctaaaattgcactttccaagaacacatttggaggaaccattctgcgtagtgatctattggcaaattttttgacagagggcatttttaaaacaagtgttgatttgcaacgcactcatcggattacaggaatgattaaaatggt

SEQ ID NO: 34071 - DNA, 386 bp, Glycine max
  unsure at all n locations
  Clone ID: LIB3138-049-Q1-N1-D2
gaannnggcnngagcccatccatcgccatcggcaccttccttaaacgacatcgcgtccatcaccccttttctcttcctcacagtcacagcagtggtagcttcccaaaaaagagtgccaatggcatcttcttcagactcatgggtgaaggaatataatgaagcactgaaacttgctgatgatatcagtggcatgatttctgagcagagttcatttcctgcatctggaccagaaacccagcatcattcatctgctataaggagaaagattacaatattggggaccaggcttgatagcttgcagtcccttttgtcaaagcttcccggcaagcagcccatatctgagaaggagatgaatcggcgcaaggacatgctttcaaatttgagat

SEQ ID NO: 34072 - DNA, 268 bp, Glycine max
  Clone ID: LIB3138-049-Q1-N1-D3
agtatccatccaattttggaccgtggggggaatagtagtagtagtagtagtatatatatatgccttccctgttatacactcctaatatagtagtatgttattgtgccttgtgcaaggtgatagggggtgtatcggccttgcatttttcaacaatcctaccttgtacatagttttactcgcatccttagtacccaaactcgttaatgtaattaagtgtcatatacaagggcggtttatctgattttaaatatgattgtctcttattttt

SEQ ID NO: 34073 - DNA, 217 bp, Glycine max
  Clone ID: LIB3138-049-Q1-N1-E12
gtttctaaaatgacttttccctacattaaatggcagtctctttcttcatagcatttggaaattaggctgatgataccatcaattttgaggcttttccccacaagctggtgcagtttggagagattcatgaaaatgtcgattgaaattttacaagaggaatttcttcagcttggtaactatgtgcgtctgcacaactctgtggctgtgggtgtcatat

SEQ ID NO: 34074 - DNA, 388 bp, Glycine max
  Clone ID: LIB3138-050-Q1-N1-C11
catcatgtgggaattcgaattaattcccgtttatctacttttatctatgtggggtggaaaaaaacgtttgtattcagctacaaagtttattttgtacactgcgggaagttctgtttttttattactgggaattctgggtatgagtttctatagctctaatgaaccaacattaaatttcgaatcattaactaatcaatcatatcccgtggcactggaaataatattctatatcgggtttcttattgcttttgctgtcaaatcaccaattatacccttacatacatggttaccagacacccacggagaggcacattacagcacttgtatgcttttagccggaatattattaaaaatgggagcatatggggtggttcgaattaatatggaa

SEQ ID NO: 34075 - DNA, 396 bp, Glycine max
  Clone ID: LIB3138-050-Q1-N1-E9
tgtgaattgtggaatcctgcttgcacaaaagcaatgactatgtcatttaatccaaacccgtgttctgatgcatggagtttggaatttctgaagcgtactggatttcattgcgatatcatttgtgtcactggatggactgccaccccaatgcaggatgttcaggttacaattgattggtttatttcctctcaggaatgtgttcccaggacctattgtgttttaaatccacaaaatccttttgtgttaaataggtggatgggaaaattgactttcccccagggcacttcccgaagtgttaagagaatgcctctttctatagggggaggagctggtgcaaagaatgctattctcatgaatatgccaaatgctggtctttcaatgtggagatattttgtt

SEQ ID NO: 34076 - DNA, 144 bp, Glycine max
  Clone ID: LIB3138-051-Q1-N1-A2
atcgcattgcgattaatttaagtgcagatcttccaatgagttttgaaaaccgtgttgcagctgttggaattgccacagagtttcaggagaacagtagccaagtatttgagatggtcgaagaggaaacagacaatgcaaaaactc

SEQ ID NO: 34077 - DNA, 443 bp, Glycine max
  Clone ID: LIB3138-051-Q1-N1-D1
aaaagatttaagacgcacgcacggcgcgctccgataatctgcgaaattcggtctcggggcaaacgtgtttgagattcaattcggcaacagtggcgaacaccattgaggttttgattctagcaagcagagcgttcgccagttttctattgaccttctcggaggaggaatctcattggacaaaactggtgattggatcacacttatacaaaattctccaattagtaacttgttgagagttgctgcttggaagaaaggctgcttaatggtcaagattgtgatgtctgggaatgcagcaatcaaaaggagtgattgggcctcattggtacaagtgtttttaacaaacagcaacagtacagagcattttgatgcatgtaagtggacaaaatcagaaccacattcctgggaattgatcttcccaatagaggtatgtggtgctaataatg

SEQ ID NO: 34078 - DNA, 395 bp, Glycine max
  Clone ID: LIB3138-051-Q1-N1-E5
attggtttatttggcttttggaagaacccattaccctgggttttccaaccaagcattattcccaatttcgattggtttcccttaagggctcagggccccatattccccttgttggacattgcaagacttttgccccggcgtggggtgattgttaccatattcactaccccaaaaaatgcataacgtttcaattttgttctttttcgggctgtttcataaggcctccaaatccggttagttcaactccactttccatccaaagaagcaggactacccgaagggtgcgagaatttcgacatgttaacatcaatggacatgatgtacaaagtcttccacgccatcagcatgctccaaaagtcagcagaggagttgtttgaagcactgataccaaaacc

SEQ ID NO: 34079 - DNA, 408 bp, Glycine max
  Clone ID: LIB3138-051-Q1-N1-G1
tcggtatgccgcgcgttttcaatggtagttaaaaatccgttatctaattatcctttggaggccagttgttcctaaagctgtctcccttcactttttcgctctctgcttcccattcttgcttctgcttgcttcatgcgtttcatagagctcagcagttgatggactgttaccccaagagcagtgacaagaaaacattaaagaggtggttttttattgataaaagagttgggtgaagtgcaaatctgataaatattattttgattggtactctatactccttaaagttcttacattgttgctggactgtaaattgatttaaaatctggatcccatggacttgaagtcgaatcatactcctgttctcactgatgctgcacctgtaacaaagtctagactgggtgtgcattc

SEQ ID NO: 34080 - DNA, 335 bp, Glycine max
  Clone ID: LIB3138-052-Q1-N1-B10
atggagttgaagaagaattatgtttcttttggagttccctttttccttcttttctttcttatgttttggtctttcaggctttcctcttgttttagttcataaaagaaaagaaaaaaaaaggagtctaaaactgagatatataatatgtaaattattttgtggtgtagtacaatcaatgtattcaaatttctggcagtgagaaattggttttattaaattcaggtgttcaattcttagtctgtggtttgtgttgttccttttgagaattaaacatggcaaaggaggcaccagggggcaaaacataaaagtcaaaagacaaagtaaaagattttttg

SEQ ID NO: 34081 - DNA, 305 bp, Glycine max
  Clone ID: LIB3138-052-Q1-N1-D12
ggggaattatggtaattgattttgagggtttgactactcatggattatgatggtatgagaaaaccttccaaaaacttatttcactctcgcttcttcctttttgggttctattgctgggattgggagttcttgaccgctctcctcctttttagttcttccccttaatcttctttcttcacaatttttatttccttccttattagacgtattagatcagattgaacaaaagggtttttctttctttctttcttggggaataatagaaataagaaaagattagtgaagttgaaatgtcgcaacgatcg

SEQ ID NO: 34082 - DNA, 57 bp, Glycine max
  Clone ID: LIB3138-052-Q1-N1-G9
aaaaaaaaaaaaaaaaaaaaaaaaaaaaaaaaaaaaaaaaaaggggaaaaaaagtgg

SEQ ID NO: 34083 - DNA, 237 bp, Glycine max
  Clone ID: LIB3138-052-Q1-N1-H9
ctcgagccgggaaatttggctgatgataccatcaattttgaggcttttccccacaagctggtgcagtttggagagattcaggaaaaagttgtattgaaattttcacaagaggaatttcttacagcttggtcaactcaagtgcgtcctgcaacaactctgttggctgatgggtgtccatatttgtatgcaatggtgcatgatagttcagtgtctacaataccaggtgattttgtcatt

SEQ ID NO: 34084 - DNA, 358 bp, Glycine max
  Clone ID: LIB3138-054-Q1-N1-C3
cggctctcatgcaacaaactacctgttcaacccaaacccaatccaaccaaccacacaggcgaaatgtatgcccccaacgcaaacaacctcaactacggcatcgtcggccaggctgtcaactcgagcaagaacgccgccaactacgtctccgagtctatccagggcacctctgctgaggcttccaaggaggccaacaaggagaaggccaagggcaacgttcccggaaacgcgtccctgaccgaccgtgcctccggcgctctcggtgctgctggcgacaagatcgaccagaccaagcacgagggctctgctgaggccaacaagcgctctatctagagtgttagatcctatgttcgacttt

SEQ ID NO: 34085 - DNA, 232 bp, Glycine max
  Clone ID: LIB3138-055-Q1-N1-B11
attacctcagagacgatcttaagatactgcaaacaacttcgcataccaacaaaagatcaaacaagtcatcatgtttgccaccaatctggtcagtgagatcaaccgtaacttcgacaaccataccgtaaccgaccgggttggttacccggcggcgcaacaaaagggttaagggttgcgtgcttaaaggcaacttggcttcaacccttgaaggggtgcgcccaaaggttgggat

SEQ ID NO: 34086 - DNA, 310 bp, Glycine max
  Clone ID: LIB3138-055-Q1-N1-B4
tgctaccatcatcaccacatgcaagctctcactgcttttgagtcttctctcagtttcacttttgctgggtgtgaggtctgatacccttcagaatgtaggcgcaattccccccacatgcaagcgcatagagtgtcccagctatgatgtcattcacgtaggcaacggctacgaaatccgtcgctataattcacccgtttggatttcaaacagccccattcaggacatttctctcgttgaagccacaagaaccggcttcaggaggtcatttttatctctctctgctaagtctaacttttttcaatatgttagt

SEQ ID NO: 34087 - DNA, 78 bp, Glycine max
  Clone ID: LIB3138-055-Q1-N1-C10
gggagagggaaaactaggaaagatcccaaccgggggaaacccaggggatttggttaccttcccagagaagaaaccttt

SEQ ID NO: 34088 - DNA, 256 bp, Glycine max
  Clone ID: LIB3138-055-Q1-N1-D10
acccagacggatgccctctagctgattggtcggctggatcagttctgtttgggcccattcctatccatttacagaactgtggaataaaggacaggaaacaccatgatttgatttacagcagactttgtcagtttattgacctttggggaggaattatggacaaaactggaatgatcacactatcaaaattcatagtactgtgagagtgtgtgaagaaagtgtaaggcaaatggagttgaatgccatcaaagaggat

SEQ ID NO: 34089 - DNA, 382 bp, Glycine max
  unsure at all n locations
  Clone ID: LIB3138-055-Q1-N1-D6
gcaagaacagaagcctagaaaagattctctagtagtacatgctgctgcagtttcaactagccagggaaccccagttcaaactagctctagcgacccttttaaacaacagcgagtcatggtcattggtggagatggatactgtggttgggcaactgccctccacctttctaacaagggttatgaggttgccattgttgacagccttgttcggcgcctttttgatcaccagcttggactggattctctaacaccaatttcttccatccagaatcgccttcagtgttggaaatctctcactggaaaaactattgagctctacatcggtgacatatgtgattttgagttcttatctgaaaccttnaaagtcatttgagcctgatgc

SEQ ID NO: 34090 - DNA, 392 bp, Glycine max
  unsure at all n locations
  Clone ID: LIB3138-055-Q1-N1-E11
cggctcgaggccactcttatgaacattgctgataaccccaccaatgtgcggcttccaggtatgtacaacaaggaagagaacccccgtgttcccatcattgtcaccggtaacgatttctcaacactctatgcacctctcatccgtgatgggcgtatggagaagttctactgggcaccaacaagggaagaccgcattggtgtttgcaccggaattttccgcactgatggtattcctgaacaggacattgtcaagcttgttgacacctttcctggccaatccattgatttctttggtgcactgagggcccagagtatatgatgattgagtgaggaagtggattttttggtggttggtgttgacaggtgttnggaaaaaaccttgggaactcaaaa

SEQ ID NO: 34091 - DNA, 276 bp, Glycine max
  Clone ID: LIB3138-055-Q1-N1-E3
agtggttctaaattgaatagctttctagctagtcataacatcaccattggtgatggtattgacaaaactagtgcaactttgcaatttagaaagttagcagattgtgattttctcaagagaaactttaagcagatgtctaatgttttgtgggtggctcctgaggacaaggcgagtttatggtcacaacttcattatgtttcgtgtaataatctggaaatgcaagaagcttatcttgtcaatctcgtaaatgtgttacgagaattgtatttgcacagt

SEQ ID NO: 34092 - DNA, 366 bp, Glycine max
  Clone ID: LIB3138-055-Q1-N1-F12
ggccaagcagtgagttgctctgagatcattaaagattccattttggaggcccctgcgatgaattttttcccaaatgtgcgttctggtagctatgccgagattggaccgcgcgtttctatggatgatgaacacatttgtattgatgatctgggagctcatcttggatttgtgttcaagtgtccgataccgagtgcattttatgcagtttttgatggccatggggggcctgatgcaacagcctttgttaagaggaatgctatgaggttgttttttgaagatgcagacatgctgcagtcgtatgatgctgattcgttttttctacagaaattggaggatttccatcggagagcttttctacgggcagat

SEQ ID NO: 34093 - DNA, 288 bp, Glycine max
  Clone ID: LIB3138-055-Q1-N1-F2
tgaaaataaaaatgagatttagacgaacaatgataacaaaccaaccagtgaacatgaaaggactgaaagccctgatagaaggcatgatagaaaaagcagagagagggaccgagatagggagctaaaacgagaaaaagatagagaacttgtaagatatgaaagagaagcacagcgggaacgtgttcggaaagagagggaacaaatacgaaaggttgaggaagctgaacgtcagtatgaaacatatttgaaagattgggagtatagggaacgagagaaagagaaagagcg

SEQ ID NO: 34094 - DNA, 351 bp, Glycine max
  Clone ID: LIB3138-055-Q1-N1-F9
gttcccaggacctattgtgttttaaatccacaaaatccttttgtgttaaataggtggatgggaaaattgactttcccccagggcacttcccgaagtgttaagagaatgcctctttctatagggggaggagctggtgcaaagaatgctattctcatgaatatgccaaatgctgttctttcaatgtggagatattttgttggagatctcgtctttgaagtttctaagatgacttctccctacattaaatgtacagtctctttcttcatagcatttggaaatttggctgatgataccatcaattttgaagcttttccccacaagctggtgccagttggaaagattcaagaaaaa

SEQ ID NO: 34095 - DNA, 315 bp, Glycine max
  Clone ID: LIB3138-055-Q1-N1-G12
gcagccagcagccataatcaacgcaacaattccatttccagtttctgatgcgtcacgtcagacaaaggaaggggttagggtgtgacctgagatcaaaatgttgcggaggcttctctcttctcacctcaaaaccctagcctcctccgccgccgccgccgccaccgccactccccgatctgcttccgcctccgccagattcgccgctctctctcgctcctgcctctacttctcaacccaatccgaggatgctactgcgatcaaaaagaaggttgaggacataatgccaatcgctactggccacgagcgcgaggagct

SEQ ID NO: 34096 - DNA, 303 bp, Glycine max
  Clone ID: LIB3138-055-Q1-N1-G2
ctaaaacatctcaatgggttcttcttctattacaacatcgcccgcaaccgtgaccatggctgcgatcgtgctcctgttcacggtctttgccgtttcctccgccctagacatgtcgataatctcgtacgacagcgcccacgcggacaaggccgccacgttgcgcaccgaggaggagctgatgtccatgtacgagcagtggctcgtgaagcacgggaaggtgtacaacgcgctcggcgagaaggagaagcgcttccagatcttcaaggacaacctgcgatttatcgactaccacaacttcttgga

SEQ ID NO: 34097 - DNA, 382 bp, Glycine max
  Clone ID: LIB3138-055-Q1-N1-H3
aattcctaccaagtttatcaaactgttcccaagcttttcgtgttcgaatggtcttcttccttttttgtccctttgaaaagctaaggaattgctgaattgggataatcaaatagaaccaccttgaagttgagacaagagtaatggccgccctatagtaattagacaatatcaggacaaattactattcaagagatattatgatcactatggatgtgaaaggtataaaatgggttggaaatatgtaccagaaatttgagaatatgttcctggaggtggaagacgtgatgtacgaagatacagttaaatacatagagaatcagatgcaagctgttggggaaatcttaaaaaagtatattcaaaaattgtgggagatttacttccc

SEQ ID NO: 34098 - DNA, 413 bp, Glycine max
  Clone ID: LIB3138-056-Q1-N1-B5
agaagaacaagttgctgagaactaataacgagaagcttacggctggctcaatgatctcttgcgcagctgttaccactgtcaaccgtgccggtggcgacatggttgctacattcactggcctcatgtccatggctggcttgcccaccactaagaccaacgatgacatttcctccattgctagcaacggtggaagagtgcaatgcatgcaggcgtagccaccagttggcaagaagaagtttgagactctttgctacctgccagaccttgatgatgcacaattggcaaaggaagtagaataccttcttaggaagggatggattgcttgctggtaattcgagttggatcacagattctggtaccgtgagcacaacacgtcagcagaatactactactgacgctactggaccatgtgg

SEQ ID NO: 34099 - DNA, 149 bp, Glycine max
  Clone ID: LIB3138-057-Q1-N1-A2
agagctatgacgccccctgccctcaagctcggaattaatttcggggcggtacatgcatgcattccagattttcctatatagagttgtgtcctagcgagtcaccttgctggtcatagatatttcctgcgtctaactgttatacgatctca

SEQ ID NO: 34100 - DNA, 83 bp, Glycine max
  Clone ID: LIB3138-057-Q1-N1-E11
cttccttctccttctgcctccacacactccgcaaggccacttgccctcttcgcgcttcttcctccctttctactccctccatg

SEQ ID NO: 34101 - DNA, 147 bp, Glycine max
  Clone ID: LIB3138-057-Q1-N1-E3
agtttttggagtaaccaaaagcaatggctaatacaccttcgaattcttcaattctcctctccctttttctattggccatcgccctctccctcgctgagtcccaatctttcatcggagtaaactacgggcaggtcgccgacaaccttt

SEQ ID NO: 34102 - DNA, 376 bp, Glycine max
  Clone ID: LIB3138-057-Q1-N1-F2
aggatcccctggggaattccaattccacattttcaagaaataaggaggcaaaaatgttcatatatgaattggaattatttgttttcttattaggcctatcctgaagccaaaggaaatgagatcggaattcctcggggaattccaattccacattttcaagaaataaggaggcaaaaatgttcatatatgaattggaattatttgttttcttattaggcctatcctgaagccaaaggaaatgagatcggaattcctcggggaattccaattccacattttcaagaaataaggaggcaaaaatgttcatatatgaattggaattatttgttttcttattaggcctatcctgaaaccaaaggaaatgaaatcggaattc

SEQ ID NO: 34103 - DNA, 298 bp, Glycine max
  unsure at all n locations
  Clone ID: LIB3138-057-Q1-N1-G4
acaaaacnagggcaactgtgcaatttagaaagctagcagattgtgattttctcaagagaaactttaagcagatgtctaatgttttgtgggtggctcctgaggacaaggcgagtttatggtcacaacttcattatgtttcgtgtaataatctggaaatgcaagaagcttatcttgtcaaacctcgaaatgtgttacgagaattgtatttgcacagtccagaggaagctcgccaattgagaaggaaagctctctctcgtatcgaatggctgcaaaaagctgatgtgcctaccatagcaca

SEQ ID NO: 34104 - DNA, 132 bp, Glycine max
  Clone ID: LIB3138-057-Q1-N1-G6
cattgaagtggttcccatgccagaccaaaaaagaatgagcttcgtttgggacctttacaggcaacggtattcaaaccggggccgtggagctttacattattgagatttttgagaggaccctttacaattcac

SEQ ID NO: 34105 - DNA, 76 bp, Glycine max
  Clone ID: LIB3138-057-Q1-N1-H10
ctcgagccgcatttccattttgagaaactgcactgtgtattaactattaacaaaagttttttttcttcgtaatttc

SEQ ID NO: 34106 - DNA, 415 bp, Glycine max
  unsure at all n locations
  Clone ID: LIB3138-057-Q1-N1-H12
cccgaattcccctccccgcctagtaaatgaattccaaatacttcaccctnnaaaacaccgagaaaaaaaaaaaaaaaacacccccacaaaaaccaaaaaaaaaaaaaaaatccctacaaaaaacacccaaaaaacaaaacccaaccccccaaaaaaaaacaaacccaaaacaacaaaaaaaaaaaaaaaaaccacccccccccccccctaaaaccccccccccccccaaaataattccccccccctccccccaagccccccccctttcccctaaaagaaccccattaaacccccccccaaacccagcccaaccctttccccccggaaaaattttcccccccccccaatccccccccccaacccccccgaacccaaaaagttaaccccccccccccccaaaggggccccacccccc

SEQ ID NO: 34107 - DNA, 401 bp, Glycine max
  Clone ID: LIB3138-059-Q1-N1-A10
aaggatttcagattattcaatatttaatcaaatcatatctatagatcattgtcattttacacatcctactattttccatgatactacggatttattagcaaagaggcggagaaatagattaattattccatttcaattccaatcgattcaagaacgagacaaagagctaatgttagcttccagtatctcgattgaaataccaatcaatggtatttttcgtagaaatagcattcttgcttatttcgatgatcctcaataccgaacaccagagctcgggaattactaaatataggactataggtataaattccatttttaaaaaaggaggatttttaatttgagtatcaaggagtaaaggaattaaggaccaaatacccaatttaaggtggtccatttttttt

SEQ ID NO: 34108 - DNA, 365 bp, Glycine max
  Clone ID: LIB3138-059-Q1-N1-A11
gcgcgacgatccaagtgcagtacccctccgatatcatggccaagaagctgtggaagattctcgaggcgaaagcccgcggagagggcggcgggtgctcgatcacctacggcgcactcgaccccgtgcagatcactcaaatggcaaagcacctcgaaacggtctacgtgtccggctggcaatgctcatcgaccgcgtcgagctcgctcgagccgggacccgatctggctgattacccgtccaacaccgtccccaacaaggtcgcccagctcttcaccgcccagctgttccatgaccgcaaacaacgctggacgcgcagtcaggcactggccaagggcgaagacctgcccccgccatcgactacctgc

SEQ ID NO: 34109 - DNA, 320 bp, Glycine max
  Clone ID: LIB3138-059-Q1-N1-A12
tactgaagcagtagtcaaagaaaggcttcgtatatacaatgaaaagagtcagcccgtggaggaattttaccgtagtagagggaaacttcctccacttcttcctcctgcacactgtatgtcaaagctcattactcggtcagatgatactgaagcagtagtcaaagaaaggcttcgtatatacaatgaaaagagtcagcccgtggaggaattttaccgtagtagaaggaaactgttggagtttgacctgccaagaagtatcccagaatcttggccctaagttgctgcaagctcttaatcttgatgattatgaggagaagcaa

SEQ ID NO: 34110 - DNA, 307 bp, Glycine max
  Clone ID: LIB3138-059-Q1-N1-A3
gcagaggatgccgtatgacgccgtaatgcggtcgccgagtatcggaagaaacttctccagcacaaggaattggaatccagagtccgatccgtcagggagaatttgcgagcttcaaagaaagagttcaataaaacagaagatgatttgaaatctcttcaaagtgttgggcagattattggcgaagttctcaagcctcttgacaatgaacgccgtatgtggttggttgccgcaataaagtggataaggaaaaattgacttcagggacaagggtggttcttgatatgacaacactcaccataatgcgagc

SEQ ID NO: 34111 - DNA, 288 bp, Glycine max
  Clone ID: LIB3138-059-Q1-N1-A4
gggaaatctggggtttttgatgctgaaagatttattgatgtcatgcaagcctctgagaatttgattactgctgccaaaagtggcggtggatagaacatgaatgggaatattgcttaacttgggattcttattactaatcagtcagaatatttggtgccaggattccaatctgtcatttctctatcacagcagccagtgcaaacaaaggcagctttagcgttttggtgtcttacaaggggaattttttccgataatttcttttggacgagatcgtcaagggcatcgatg

SEQ ID NO: 34112 - DNA, 169 bp, Glycine max
  Clone ID: LIB3138-059-Q1-N1-A5
ctttgcacaaattctctgactatgtctgttaatacaaacctgcgtactgatgcatggagtgtgtaattattgaaacgatcccgatatcagtgtgcattcatatgtgtcactggactgactggcacttcaatgcaagatgttcatggctcaacataacggcacatttact

SEQ ID NO: 34113 - DNA, 251 bp, Glycine max
  Clone ID: LIB3138-059-Q1-N1-A6
gcttgcacaaaagcaatgactatgtcatttaatccaaacccgtgttctgatgcatggagtttggaatgtctgaaacgtaccggatttcattgggatatcatttgagtcacttgatggactgccactccaatgcaagatgttcagggtacaattgattggatgatttcctctcaggaatgtgttaccaggacttattgtgttgtaaatccacaaaatccttttgtgttgaataggtggatggggaaactgac

SEQ ID NO: 34114 - DNA, 100 bp, Glycine max
  Clone ID: LIB3138-059-Q1-N1-A7
ggagcattaagtcttagcatgaactacaactgcgaacaccaagacatcataatctatggctgcaaccgtctacaatgtcagagctgtcaacagagcattg

SEQ ID NO: 34115 - DNA, 152 bp, Glycine max
  Clone ID: LIB3138-059-Q1-N1-A8
caatcaatcaacatggcttccgctaaagtctacgtcggtaggtctcactcatccactcgcacaccctctctctctctctccaaccctctcgtcgtcgttggagtgcctcgctttgcgtgtctcaaacgatgcatcttcatgtcatacttaaa

SEQ ID NO: 34116 - DNA, 241 bp, Glycine max
  Clone ID: LIB3138-059-Q1-N1-A9
cttcccgaagtgttaagagaatgcctctttctatagggggaggagctggtgcaaagaatgctattctcatgaatatgccaaatgctgttctttcaatgtggagatattttgttggagatctcgtctttgaagtttctaagatgacttctccctacattaaatgtacagtctctttcttcatagcatttggaaatttggctgatgataccatcaattttgaggcttttccccacaagctggt

SEQ ID NO: 34117 - DNA, 370 bp, Glycine max
  Clone ID: LIB3138-059-Q1-N1-B11
ctcgagccgctttcaatgtggagatattttgttggagatctcgtctttgaagtttctaagatgacttctccctacattaaatgtacagtctctttcttcatagcatttggaaatttggctgatgataccatcaattttgaggcttttccccacaagctggtgcagtttggagagattcaggaaaaagttgtattgaaattttcacaagaggaatttcttacagcttggtcaactcaagtgcgtcctgcaacaactctgttggctgatgggtgtccatatttgtatgcaatggtgcatgatagttcagtgtctacaataccaagtgattttgtcattggtgtcaagttgacaaccataaacaatatgtgtg

SEQ ID NO: 34118 - DNA, 457 bp, Glycine max
  unsure at all n locations
  Clone ID: LIB3138-059-Q1-N1-B12
ctcgagcctttttcaatgtggagatattttgttggagatctcgtctttgaagtttctaagatgacttctccctacattaaatgtacagtctctttcttcatagcatttggaaatttggctgatgataccatcaattttgaggcttttccccacaagctggtgcagtttggagagattcaggaaaaagttgtattgaaattttcacaagaggaatttcttacagcttggtcaactcatgtgcgtcctgcaacaactctgttggctgatgggtgtccatatttgtatgcaatggtgcatgatanntcagtgtctacaataccaggtgattttgtcattggtgtcaagttgacaaccataaacaatatgtgggcatatgggctcaatcctggtatttaaggtcttgtcttttgggcaccattcttcagtccatttacatcaactgttggaatcaaatggc

SEQ ID NO: 34119 - DNA, 285 bp, Glycine max
  Clone ID: LIB3138-059-Q1-N1-B2
caattacaacacaatcagtctgagattcgccatcgaagaacctctcaccatggtttctcgccatgagggttcgctcttcctctgtttcctctgtttcgagatctctgtttcatcaattcgattgcccggtttggaccaagacgccaaggccacgcatggatcggtgcttaagttgaacagaggaagctcttcactgaagtttgatcccacacgggtcactcagctctcgtggagtcccaaggcttttctctacaaaggctttttattcgatgaaaaatgtgatca

SEQ ID NO: 34120 - DNA, 292 bp, Glycine max
  Clone ID: LIB3138-059-Q1-N1-B3
ctaatgctatgtggttggctcctgaggacaaggcaaggaacatggtcacaacttcattatgtgtcgtgtagaatctggaaatgcaagacgcttatctagtcaatctcgacaatgtgttacgagaattgtatttgcacagtccagaggaagctcgccaattgagaaggaaagctctctctcgtattgaatggctgcaaaaagctgatgtgcctaccatagcacagattgaagagttccattcgatgcaaaagatgatgaatgctcctgattcaaatgataatattgatttact

SEQ ID NO: 34121 - DNA, 374 bp, Glycine max
  Clone ID: LIB3138-059-Q1-N1-B4
ggctgatgataccatcaattttgaggcttttccccacaagctggtgcagtttggagagattcaggaaaaagttgtattgaaattttcacaagaggaattttttacagcttggtcaactcaggtgcgtcctgcaacaactctgttggctgatgggtgtccatatttgtatgcaatggtgcatgatagttcagtgtctacaataccaagtgattttgtcattggtgtcaagttgacaaccataaacaatatgtgtgcatatgggctcaatcctggtatttcaagttctcgtcttttgggcaccattcctcaatccatttcacagcaaactgtttggaatcaaatggcaacagtgagaacaccattgaatttgattc

SEQ ID NO: 34122 - DNA, 324 bp, Glycine max
  Clone ID: LIB3138-059-Q1-N1-B5
attgagttcaaggctggctagggaaggcaatctcttccgattagagatagaaggttcatcatctcatctcaaaaaggcttttgtgattgataatcagttctcgatttgatttgatcggaacagaacagaggcatgggtcaagcttttcggaagctcttcgacaccttcttcggcaataccgagatgcgggttgtgatgcttggtctagatgctgctggcaaaacaactatactgtacaagctccacattggagaagttttatctactgttcctacaataggtgcgttttatactataaactcttaatttaatctaattattcta

SEQ ID NO: 34123 - DNA, 129 bp, Glycine max
  Clone ID: LIB3138-059-Q1-N1-B6
aaattttccaggtggtttctgggttaccaattcttttgaattggctgcatcctgtaagtcaattaccttcagaagctgtcgctttaaatgttacatgtggttgtggacgtggtggtccacccaccactg

SEQ ID NO: 34124 - DNA, 223 bp, Glycine max
  Clone ID: LIB3138-059-Q1-N1-B7
gctcaatcctggtatttcaggttctcgtcttttgggcaccattcctcagtccatttcacagcaaactgtttggaatcaaatggcaacagtgagaacaccattgaattttgattctagcaagcagagcttttgtcagttttctattgaccttctcggtggaggaatcttaatggacaaaactggagattggatcacacttatacaaaattctccaattagtaac

SEQ ID NO: 34125 - DNA, 312 bp, Glycine max
  unsure at all n locations
  Clone ID: LIB3138-059-Q1-N1-B8
ctcgagccgattgaatctcagaattctctaaaagagatctttttctgctctttgaagaaagaagggtctttgcttgattttggagatgtctctgctctcagatctcatcaaccttaacctctccgataccaccgagaaggtgatcgcagagtacatatggatcggtggatcaggaatggacctgaggagcaaagcaaggactctcccaggaccagttagcgacccttcagagcttcccaagtggaactatgatggttccagcacangtcaagctcctggtgaagacagtgaaatgattttatacccacaagc

SEQ ID NO: 34126 - DNA, 231 bp, Glycine max
  unsure at all n locations
  Clone ID: LIB3138-059-Q1-N1-B9
aacgatttgatggtttggaatgcatttcccaagcaacgagtcttcggttcgaaaccagcagagagagagaagaagagattttacactgtcatccaattactaatcactatgtatcgtaaaagttaacaaactnacaatatgtgatcgtatattacatatggatcgtgtgatcatgcatggacctgaggagcaaagcaaggactcttccagcaccaattagtgaccattcat

SEQ ID NO: 34127 - DNA, 300 bp, Glycine max
  Clone ID: LIB3138-059-Q1-N1-C1
cctctatcccccctttacttatggctctcttttctgctttcccctttcgctcgtcgtgtggccccgcgacaccatcatcacgcacccttcctgcttccttcatcctcggtattgcaataaatcacacaaatgggtgcttcaaaaaagtcaaagctcgaacctttatgttgctttagctctcgatgcttctctgaaacccgcgttcgcgttgctctttgcgccaatggccgagtcgtccccgccggaaacgccggaactgacaaccgaattcggtgccggatccgggtcgggtcaaaactg

SEQ ID NO: 34128 - DNA, 260 bp, Glycine max
  unsure at all n locations
  Clone ID: LIB3138-059-Q1-N1-C10
tggatttgttttggagggtagacctttaagggcttgttttggaaccacaaaatattgtcatgcatggctccgaaatgtgccttgcagcaatccggattgtctatatttgcatgagattggctcccaagaagatagttttaccaaagatgaaataatttcagcatacactagaagtcgagttcaacaaatcactggtgccacaaacaatatgcaacggcggtcagggaatgtattacctnctncactggatgataatatga

SEQ ID NO: 34129 - DNA, 368 bp, Glycine max
  unsure at all n locations
  Clone ID: LIB3138-059-Q1-N1-C11
ataagggactcatatacccaccattcaccaacataagaaagatttcagcacacatagctgccaatgttgctgctaaggcttatgagcttggcttggccactcgccttcctcaacctaaagatttggtgaagtttgcagagagctgtatgtataccccatcctaccgaagctaccggtgaagcgataataaatagcctatttttctttttccttttcgttttatcattttattgtcaattatttaatttttttaccttctttatgttgctgntctgttcttgtaagttatttgttgggttagtaggttaggacggtggtagttggactaaaaaagtagcttgaaaatttgtgttctgctataaatgtta

SEQ ID NO: 34130 - DNA, 335 bp, Glycine max
  Clone ID: LIB3138-059-Q1-N1-C12
ggaagttgacgctgtcattggcgctgacggggctaattctagagtcgccaagtctattgatgccggtgattatgagtatgccatcgcttttcaggagagggtaaaaatcccggatgataagatggtgtattacgagaaccttgcggagatgtacgtgggcgatgatgtttctccagatttctacgggtgggtgtttccaaaatgtgaccatgtggctgtaggcactggaactgtgacacacaagggggacatcaagaagttccaactagcaacaaggaaaagagcagaagacaagattttgggaggcaagatcatccgagtggaggctcacccta

SEQ ID NO: 34131 - DNA, 285 bp, Glycine max
  Clone ID: LIB3138-059-Q1-N1-C2
ggcgcacagttcgtcctcggtctttaacgaagctcctgccgccaccgaagctcccgagatggttaccgttaccaagacgtcaagctcctccagtgcgcctaccgatgcgagcgtgtcatcagccagtgccacggccacagccacggcttcctctactgttgtggtgacgacgccaccggcgacctctagcgactgcctcaaggcgtccactgggactctttctacgtccagtgtgatggcttctgcggacgtctcgtcgccgtcgtcaactccaaggtacgcatg

SEQ ID NO: 34132 - DNA, 349 bp, Glycine max
  Clone ID: LIB3138-059-Q1-N1-C3
cattcccacaactgcacattcttctttctatatattccaaatcccttttccgatttccaccaaaatctaaaccgaaattcccaattacccttcccaattttcaccaaaacctaatactcccacaccaatcttcgatcatggacgccgattcacaacctcaacaactcgaagagagaacagaggagcaagaactgaagtacctggaattcgtgcaattcgcgaccatacaggctctgatgcgctgcgccatcctctactcatacgccaaggagcgcgcgggtcctctgaagcccggtgtcgacaccgtggaggaggccgtgaagaccgtcgtggctccggtctacgatag

SEQ ID NO: 34133 - DNA, 308 bp, Glycine max
  Clone ID: LIB3138-059-Q1-N1-C4
ggttcacattcttcagaagattttcctgaaaaggaagatcaagaaaaacccaaaaagattgatgccagattgagacaaagaatagatcctcaatacaatgaggttcatgctcagatggaaacaaatttgtttaaattgtctcttgatgatgttgaaactcctaaaggttccatgttggatctgaaaatttctcaatctaaaattgcacttcccaagaacacaattggaggaaccattctgcgtagtgatctattggcaaattttttgacagaaggcaattttagagcaagtgttgatttgcagcgcac

SEQ ID NO: 34134 - DNA, 127 bp, Glycine max
  Clone ID: LIB3138-059-Q1-N1-C6
ctttgtgacgcctctttcacaggccgaaggcccattaccttgattacatgtgcgaataccatggggcacattgaaccaagcatgaattgacggattcagcttccgagtaccacgtccaatgaccatt

SEQ ID NO: 34135 - DNA, 299 bp, Glycine max
  Clone ID: LIB3138-059-Q1-N1-C8
aaacagcgccattaccattatactctctgttgctaatcatggctagcaaattggccttcacactgacatacccgcttccacttacaccaatctcttccttgtcctcctcttctgcttctcgactccaccttcttcaattcaatggccgccacatatgccttcgccctcggctatttctgttttctcccatggccacagccgatcaagacaaggttgaggaagatgctgccgttgttgatagtaaaatcctacaatattgtagcatagacaaaaaagaagaagaaatcagttggtgaaat

SEQ ID NO: 34136 - DNA, 287 bp, Glycine max
  Clone ID: LIB3138-059-Q1-N1-C9
atttcatcgtgcattcaatggccaccacagcagctctatccggaaccatggtgagcacctccttcatgaggaggcaacctatgaccaccacaagcctaaagacattccccaacgttggtgaagctctttttggtctgaaaagtggacgaggtggtcgtgtcacttgcatggcctcgtacaaggtgaagctcataaccccagaaggagaagtggagtttgaatgcccagatgatgttttcattgttgacaaggcagatgacgaatgcatttgaacttcctactcgtgc

SEQ ID NO: 34137 - DNA, 379 bp, Glycine max
  Clone ID: LIB3138-059-Q1-N1-D1
acaaaatcagaaccacattcctgggaattgatcttcccaatagaggtatgtggtcctaataatggttatgaaatgtggagttctgagtgggcaaatcaaacttcatggcatttgagtttccttattgacaatcccaaacagtctacagtttttgatattctcttgggaatctctcacgattttgaaattgctggtaatactcttatgccagctttttctgttccacaggctactgccagatcttctgaaaatgcggaatcctctgcatgatctggaatttgtgttttctttcgcttgttcgtttgtttaattcaataaaggaaaatacgcatgaccctcttgtgagtatgctctgctattagaaatttcacactcttta

SEQ ID NO: 34138 - DNA, 311 bp, Glycine max
  Clone ID: LIB3138-059-Q1-N1-D10
ccagaaggttattcacagattggtgagttccttcaccgtgctgtgactctcacactggagatccagaaggagcatggcaaacttatcaaggatttcaacaagggtctcgtcaacaacaaggctattgaagatctcaaagctgatgttgagaagttctctgccttgtttgacatgcctggcttcctggtatctgaaatgaagtacaaggattaggttcaaccataccactttctactaaattgtgtcactcaagttcgacacaaagtgcagaaatggagaaaaaggaaatatgtgtcttcctgtcctgggag

SEQ ID NO: 34139 - DNA, 291 bp, Glycine max
  Clone ID: LIB3138-059-Q1-N1-D3
ttcaactcccaatgtgttggttcagttggttctgtatgatcacaataatttgatgttccctcgccttatgctatttgcgatggagagcatccctccgatgagagagctcagccttgattatggggtagctgatgagtggacaggaaagctctctatatgcaatgaatgattttgaaagtttcatacactttataatatactgaaactgactttcgggcatttgttgcagagatagtcaagttgatgcaacacaagttttcaacactgccaaattacaaaaagcagtagtag

SEQ ID NO: 34140 - DNA, 386 bp, Glycine max
  unsure at all n locations
  Clone ID: LIB3138-059-Q1-N1-D4
cttctagtgcaagtgatttcagaactgcaatggtgagtaaaaatagcaagcctcaagctactgcaatgcatgtgggagctatagaaattatcattgatagtttcgcaagtcctgattgcaacatagttggtgcaatgcttttggttgatacttatcataccaatcctgaaaatgcagttcgtagtatttttgttgcgcctttcagaggcggaaggcccattcgggtggttacatttccgaataccattgtgcagattgaaccagacatgaattcaaagtttcagcttttgagtaccactaccaatggtgattttggtcaaaggaaagatctcgcaaggttaaaagtaatgtagcatgtgctgctgntggcttgacataaagtacac

SEQ ID NO: 34141 - DNA, 228 bp, Glycine max
  Clone ID: LIB3138-059-Q1-N1-D5
gctactgctacttcttctgctgctactgccacccacccattcactctccgtcatagcactcgccctactctcactctcctgcttgtatataaaatctcctatctgcatatacccgctcaaccatctccggtatctagccggtcaattcgccgccacaactcgccgaccacatcagcgtcatctcacacgctcttcggacccgcacacgcacacgacacctacccgtac

SEQ ID NO: 34142 - DNA, 309 bp, Glycine max
  Clone ID: LIB3138-059-Q1-N1-D6
tggtatttcaggttctcgtcttttgggcaccattcctcagtccatttcacagcaaactgtttggaatcaaatggcaacagtgagaacaccattgaattttgattctagcaagcagagcttttgtcagttttctattgaccttctcggtggaggaatcttaatggacaaaactggagattggatcacacttatacaaaattctccaattagtaacttattgagagttgctgcttggaaaaaaagctgtttaatggtcaagattgtgatgtctgggaatgcagcagtcaaaaaggagtgattgggcctcat

SEQ ID NO: 34143 - DNA, 338 bp, Glycine max
  Clone ID: LIB3138-059-Q1-N1-D8
gttatgagcaagatggcagaaatgataaacagtctttgtggtggtgatgaaaaattgatgcgtgaaaggacgcacctgctgttggcttgttgttcaaggatggcaatttgtaagaaagatgtttggagagttgaatgtggaatcccttctggatttccgctcacagttatttgcaatagcatttttaatgagatgctcattagatatagctatgaaaaattactgcgccaggctaaagctccaagtatgtttttacaatccttcaaaaattttgtttctttgtgtgtgtatggtgatgataacttaattagtgttcatgaatatgtcaagccttactt

SEQ ID NO: 34144 - DNA, 327 bp, Glycine max
  Clone ID: LIB3138-059-Q1-N1-D9
gtcttgcaattgaagttgaagtcttgcccttctctcttcaactccaaacacaagacatcatcatccatggctgcctccgtctccactgtcggagctgtcaacagagctcttttgaacctgaatgggtctggacctggggtttcagctcccagttcatccttctttgggagcagcttgaagaaggttattggctcaagggtccccaacacaaagatttcctctggaagcttcaagattgttgctgtagaagagaagaaagagattgaagagacccagccgaccgacaaggacagatggaaggggtcttgcctatgatatctcagacga

SEQ ID NO: 34145 - DNA, 291 bp, Glycine max
  Clone ID: LIB3138-059-Q1-N1-E1
gaaaaaaggctgtttaatggtcaagattgtgatgtctgggaatgcagcagtcaaaaggagtgattgggcctcattggtacaagtgtttttaacaaacagcaacagtacagagcattttgatgcatgtaagtggacaaaatcagaaccacattcctgggaattgatcttcccaatagaagtatgtggtcctaataatggttttgaaatgtggagttctgagtgggcaaatcaaacttcatggcatttgagtttccttattgacaatcccaaacagtctacaagttttgatat

SEQ ID NO: 34146 - DNA, 351 bp, Glycine max
  Clone ID: LIB3138-059-Q1-N1-E10
attgatagttgcattgagagtttcaatttaggtgatattgacaaatacaatgatatttatttttatagttacatttttttgaagggcagaaattgtagtgaaagcgataattctagtactagtataataactagtacgaatgatacaaatgatagtgattccactataggagaaagttctaataatctcgatgaaagtcaaaaatataagcatttgtggcttgaatgcgaaaattgttatggattaaattataaaaaattttttaaatcaaaaatgaatatttgtgaatactgtggatatcatttgaaaatgggcagttcagatagaatcgaaactttgattgattcgggt

SEQ ID NO: 34147 - DNA, 319 bp, Glycine max
  Clone ID: LIB3138-059-Q1-N1-E11
tgaggatactggatttttcaaaagggaaggaacatggaacactgaatatggacagttctttctggaatggtactccggtaaattgctggaacacggtgagaggatccttgtatctgccaaaggaatatttgaaacaactggggtgaaactatcaaggaaagttgcaggaatccactggcattacagagcaagatctcacgcagctgaactaaccgctggctactacaacacacgaaataacgatggatatctgcctatagcaaggatgctcgcaaaacatggagttgtcttcaatttcacctgcattgaaatgaaagac

SEQ ID NO: 34148 - DNA, 236 bp, Glycine max
  Clone ID: LIB3138-059-Q1-N1-E12
cacataggtagctgatcgcactaatacagcattcttcctaagggctcacatcggcagtggacgatggccagaaaggcagcataatggctaagatcgtgacttgtgggaatgcagcatgcaaaaggagtgattcggactcatcggtacaacgtgtgtttaacatacagcgaccgtacacaccattttgttgcatgtaagtagacaaaatcagaaccacactgctgagaattgatcta

SEQ ID NO: 34149 - DNA, 336 bp, Glycine max
  Clone ID: LIB3138-059-Q1-N1-E2
aaagtattttggtccaccttccgtcttctatcgccgttgtcttcctccatcgtgttagggtttccactttgcagagtttcaatttactctcattatcacatcgcaattcctccgtgtttctgttttgataactcgcaaatattctacttaatagcccgacatctcgttccctgaatactgattttgagctttcccctgatttttttagggaaacaaattattgccccttccttttttccaatcatctccagtgaaaaaaaaaaaaaaaaactatatctgaagtttattggggatcgggtattgggaaatgcctcgagacttgtcacgatcccgatc

SEQ ID NO: 34150 - DNA, 351 bp, Glycine max
  Clone ID: LIB3138-059-Q1-N1-E3
ttattttcttgattgattaattaattaattagtttggatatcctttcttatcttgtgcacaagacaaatgtggtgggcacgctcaacatgttgggtttggcaaagagggtaggtgcccgttttctgattagtagcaccagtgaagtttacggtgatccacttcagcaccctcaggctgagacctactggggaaacgttaatcccatcggtgtaaggagctgttatgacgagggaaagcgcactgcggagactttggcaatggactatcacagaagtgctggtattgaagtgaggattgctcgaatcttcaacacttatggaccgagaatgtgccttgatgatggccgtgtg

SEQ ID NO: 34151 - DNA, 99 bp, Glycine max
  Clone ID: LIB3138-059-Q1-N1-E4
cggagcgtgagcagcctcatcaaggttggacgaatcgagccggtgatggtgctccgtgtcgacaaggaaaagggttacatcgatctcacaagcgcaagg

SEQ ID NO: 34152 - DNA, 246 bp, Glycine max
  Clone ID: LIB3138-059-Q1-N1-E7
cacgaacctggttgataccgaacaaaacatcagccaatatggacttaatcaagagcgcaatggacacgtaccagaagagccagggacaaggacacactggtcagcagaatccagggaacaaccaggctggaggtgactttggcgtcaccggaggcagtcgctttaatgcgcccaacagcgtcagctatggtcagttcgcatgtgacctggacggtgatggtatcatagacactgccaataacgaca

SEQ ID NO: 34153 - DNA, 341 bp, Glycine max
  Clone ID: LIB3138-059-Q1-N1-E8
gttgacaaccataaacaatatgtgtgcatatgggctcaatcctggtatttcaggttctcgtcttttgggcaccattcctcagtccatttcacagcaaactgtttggaatcaaatggcaacagtgagaacaccattgaattttgattctagcaagcagagcttttgtcagttttctattgaccttctcggtggaggaatcttagtggacaaaactggagattggatcacacttatacaaaattctccaattagtaacttgttgagagttgctgcttggaagaaaggcttgttaatggtcaagattgtgatgtctgggaatgcaacaatcaaaaaggagtgat

SEQ ID NO: 34154 - DNA, 360 bp, Glycine max
  unsure at all n locations
  Clone ID: LIB3138-059-Q1-N1-E9
atttgcctctgactgccctcattgagagtcagattttctgcttgcatggaggtctctcaccttctttggatacactggataacatcagagcattggatcgtattcaagaggttccacatgaaggaccaatgtgtgatctcttgtggtctgaccctgatgatcgctgtggatggggaatatctccacgtggtgcaggatacacatttgggcaggatatagctgctcagtttaatcataccaatggcctctccctgatatcgagagcacatcagcttgttatggaaggattcaattggtgccaggacaagaatgtggtgactgtatttagtgctccaaattactgntatcgatgtgggaata

SEQ ID NO: 34155 - DNA, 284 bp, Glycine max
  Clone ID: LIB3138-059-Q1-N1-F1
attgggttttaaatccacacaatccttttgtgttaaataggtggatgggaaaattgactttcccccagggcacttcccgaagtgttaagagaatgcctctttctatagggggaggagctggtgcaaagaatgctattctcatgaatatgccaaatgctgttctttcaatgtggagatattttgttggagatctcgtctttgaagtttctaagatgacttctccctacattaaatgtacagtctctttcttcatagcatttggaaatttggctgatgataccatc

SEQ ID NO: 34156 - DNA, 283 bp, Glycine max
  Clone ID: LIB3138-059-Q1-N1-F10
cacacatagctgccaatgttgctgctaaggcttatgagcttggcttggccactcgccttcctcaacctaaagatttggtgaagtttgcagagagctgtatgtataccccatcctaccgaagctaccggtgaagcgataataaatagcctatttttctttttccttttcgttttatcattttattgtcaattatttaatttttttaccttctttatgttgctgatctgttcttgcaagttatttgttgggttagtaagttaggacggtggtagttggactaaaa

SEQ ID NO: 34157 - DNA, 352 bp, Glycine max
  Clone ID: LIB3138-059-Q1-N1-F11
ttgacctttttggtggaggaatcttagtggacaaaactggagattggatcacacttatacaaaattctccaattagtaacttgttgagagttgctgcttggaagaaaggctgtttaatggtcaagattgtgatgtctgggaatgcagcagtcaaaaggagtgattgggcctcattggtacaagtgtttttaacaaacagcaacagtacagagcattttgatgcatgtaagtggacaaaatcagaaccacattcctgggaattgatcttcccaatagaggtatgtggtcctaataatggttttgaaatgtggagttctgagtgggcaaatcaaactttatggcatttgagttt

SEQ ID NO: 34158 - DNA, 362 bp, Glycine max
  Clone ID: LIB3138-059-Q1-N1-F12
tagatctcagttaagcaaatcgacacaaatacatcctgtgactgctgctttaaatagtcaatgtgggtactcctcagacacccttgaaccaaaacaagacaaggctttgagccatgtggaatcacattcaccaagctcatcgtttggggaatactttcagaaaagctgcgatgacagaaattttgataaccaaaggtggagcagatttcagaaagataattttggtttctggccacaaaatcaatgggtggctttctccacagaatcatcctcatatagcagagtggatgagtgggtgaaagatctcgaaattcaacagccacctcttgaggatgatttcaatgatgacaatattggaagca

SEQ ID NO: 34159 - DNA, 337 bp, Glycine max
  unsure at all n locations
  Clone ID: LIB3138-059-Q1-N1-F2
tgaaaactaatatttttcagtangaactggacaatttaagctgtgcacccttgtacttggcgcacttnanaaaaaaaaaaaaaaaaaaaaaaaaaaaaaaaaaaaaaaaaaaaaaaaaaaaaaaaaaaaaaaaaaaaaaaaaaaaaaaaaaaaaaaaaaaaaaaaaaaaaaaaaaaaaaaaaaaaaaaaagggggccccaaattaaaaaatttttaaacccggaaaaaaatttgaaaccggaacttgaagggtaaaaattttttctaaaaaaaaggtaaataaaaaattggggaaaaaaaggaaaaaattgtttcttgggaaaaaatttaatccgtt

SEQ ID NO: 34160 - DNA, 155 bp, Glycine max
  Clone ID: LIB3138-059-Q1-N1-F3
atgagatcctcattatatatagctatgaaaaattactgcgccaggctaaagctccaagtatgtttttacaatccttcaaaaattttgtttctttgtgtgtgtatggtgatgataacttaattagtgttcatgaatatgtcaagccttactttagt

SEQ ID NO: 34161 - DNA, 351 bp, Glycine max
  Clone ID: LIB3138-059-Q1-N1-F4
gttgtgaaagcttataagtgagatacactaagttatcctcataaatacactctaattaggtggcaagataagtgtctaaccttagtaacattgccacatattgtgttcattttggaattgtgccactaaaattctattcaattcatctatggctgcctcttcttatgctatgcaatcaatcctggcaaaccctttgatccgcatttccagcgggtctagggtgaaccaatttggcgttcctgctttgcacatgagaaggaatgttggcctgagagttaggtccatggctaacgaagaacaaccaagtgagcctgcaacctcagttacaaccgccaccatcagtagaaccca

SEQ ID NO: 34162 - DNA, 260 bp, Glycine max
  Clone ID: LIB3138-059-Q1-N1-F7
atcggttggggttggtagtgttgcgttgcgttgcgtatttgggaaattgatgcagcgcggtgctcgctgaagtgaagtaatcccttttggttgtgttgtgggtaatgcttctcagtaattctagtccaccattttcatttgtctcaagaatcactatgagtatgactaacggaataactccaagagattctcttttgctgaagcccaaccctttatcttctcttaagtcactccattctctccaggtgagctttatttat

SEQ ID NO: 34163 - DNA, 347 bp, Glycine max
  Clone ID: LIB3138-059-Q1-N1-F9
ggcgaaacttgaagttatggagagatgaggatgagactaaggcgggaccatatgtcttccatcctagaggcctctatccggctcctgtaagcgcagacgagccagccgtcgggtcatcaggatccaaattgggttggttcaaaactataggccttttcgccggtcgagccctcctcgactcccgaatcatcgatatcaacctgaacaaggtcttcctccgacatgtattgggacaaccagtcaagaagaatatagcctcgctcaagctggtcgaccctacccttgcccgatccatggaaagattacaggcgtatgcagaggcaaggaaagagatcgaggcgatgaca

SEQ ID NO: 34164 - DNA, 115 bp, Glycine max
  Clone ID: LIB3138-059-Q1-N1-G1
cggctcgaggagcaatgataaatgctgggaatggatatgctagctgatgctgagacatcttcaaaaatggatatcccggtttctgatttcaatcattccaagcatgaatcatgat

SEQ ID NO: 34165 - DNA, 391 bp, Glycine max
  Clone ID: LIB3138-059-Q1-N1-G10
gaaaaacccaaaatgattgatgccagattgagacaaagaatagatcctcaatacaatgaggttcaggctcagatggaaacaaatttgtttaaattgtctcttgatgatgttgaaactcctaaaggttccatgttggatctgaaaatttctcaatctaaaattgcacttcccaagaacacagttggaggaaccattctgcgtagtgatctattggcaaattttttgacagagggcaattttagagcaagtgttgatttgcagcgcactcatcgtattagaggaatgattaaaatggtggccacagttggtattcctgagaatacaggtatatcattggcctgtgctatgaatagttcttttagggggcgcgccagttctgatatttacacca

SEQ ID NO: 34166 - DNA, 323 bp, Glycine max
  unsure at all n locations
  Clone ID: LIB3138-059-Q1-N1-G11
gggcaatagtgaccagccatggaccctttcaccaattttgaaggtggcagtgcttatggcgcagaagacgatgccacctcattttattcgaccgcgatctctcaggcgcctgtccccagtgggagtggcaatgggcatggcggtggacaccaaaatggccgcaacggagcgagggccgatactgcgacggtggcggctgcgttggaagacatgtcgttggcttctgcgacgggggctctggacgatgagaatgcangccagatccacgccgctgtccgcaatggatacgaggaggactttgaggatgtcgatggtctgttgaa

SEQ ID NO: 34167 - DNA, 282 bp, Glycine max
  Clone ID: LIB3138-059-Q1-N1-G12
atcaaccccatcatgatgagtgctggagagttggaaagtggaaatgcaagagagccagcaaaactgatcaggcagagataccgtgaagccgcagacttgatcaagaagggaaagatgtgtgctctcttcatcaacgatcttgatgcaggagctggtcgtcttggtggaaccacccaatacactgtcaacaaccagatggtgaatgccaccctcatgaacattgctgataaccccaccaatgtgcagctttctggtatgtataacaaggaagagaatccccgt

SEQ ID NO: 34168 - DNA, 332 bp, Glycine max
  Clone ID: LIB3138-059-Q1-N1-G2
gtccatatttgtatgcaatggtgcatgatagttcagtgtctacaataccaggtgattttgtcattggtgtcaagttgacaaccataaacaatatgtgtgcatatgggctcaatcctggtatttcaggttctcgtcttttgggcaccattcctcagtccatttcacagcaaactgtttggaatcaaatggcaacagtgagaacaccattgaattttgattctagcaagcagagcttttgtcagttttctattgaccttctcggtggaagaatcttaatggacaaaactggagattggatcacacttatacaaaattcttcaattagtaactta

SEQ ID NO: 34169 - DNA, 374 bp, Glycine max
  Clone ID: LIB3138-059-Q1-N1-G3
gtcaaaaggagtgattgggcctcattggtacaagtgtttttaacaaacagcaacagtacagagcattttgatgcatgtaagtggacaaaatcagaaccacattcctgggaattgatcttcccaatagaggtatgtggtcctaataatggttttgaaatgtggagttctgagtgggcaaatcaaacttcatggcatttgagtttccttattgacaatcccaaacagtctacagtttttgatattctcttgggaatctctcaagattttgaaattgctggtaatactcttatgccagctttttctgttccacaagctactgccagatcttctgaaaatgcggaatcctctgcatgatctggaatttgtgttttctt

SEQ ID NO: 34170 - DNA, 214 bp, Glycine max
  Clone ID: LIB3138-059-Q1-N1-G6
gatgtcttacgtttctcctaaccgtgatcaacccccaaagaaagatttggtgggggggaatttttcctttgatattaaatctcgctctaaattgggaaaaatttcctctacaaaagcccaatttggtagtgggaaaaccttcaaatattatataattggtgcttggtcacattcttaaaaaatttttctgaaaggagatcaagaaaacccaaaa

SEQ ID NO: 34171 - DNA, 312 bp, Glycine max
  Clone ID: LIB3138-059-Q1-N1-G7
gatgtgttgcgttgacaaggaccaggatcagccccaacaaacagaattgttggaggtgattagctcctgttgtcttacacacaacactacattgatagaaattttccatacgactgcacaataccaatgtgggaaaaccgtctaaattcatataatcaatgcccgttcacatccttcagaagaaatgtctcaatgtggaagtcgacgtgaacccaaaaagattgatgccaggttgagacaaagaattgatcctcaatacaatgatgttcacgctcagatggaaacaaatttgtttaaattgtctcttgatga

SEQ ID NO: 34172 - DNA, 354 bp, Glycine max
  unsure at all n locations
  Clone ID: LIB3138-059-Q1-N1-G8
cgagatcaaccccgacgaaggcaaggggttgttctcggcttcttcagatttctgaaatggcgcctgtttcagctttagccaagtacaagctcgtcttcctgggtgaccaatccgtgggcaaaaccagcatcatcactcgcttcatgtatgataaattcgataacacctatcacgctacaattggtattgattttctatcaaaaactatgtatcttgaagatcgaactgttcgactgcagttgtgggatacagctgggcaggaaagatttagaagtcttattccaagctacatcaaggactcatctgtagctgntattgtatatgatgttgcaagccggcagactttcttaaata

SEQ ID NO: 34173 - DNA, 341 bp, Glycine max
  Clone ID: LIB3138-059-Q1-N1-G9
ttaccatgggtcttggtggtgaagggtatttaaattttatggggaatgaatttggccatcctgagtggattgattttccaaggggtgatcaacatcttcctactggcgtaatagttccagggaataacaacagttttgataaatgcaggcgtagatttgacttgggtgatgcggactatctaagatatcgagcgatgcaagaatttgatcaagccatgcagcatctaaaagaaaagtttggtttcatgactgctgagcaccaatatatttcacggaaaaatgaaagtgacaaaattatagtcttcgaaaggggcaacctcatctttgtcttcaattttcat

SEQ ID NO: 34174 - DNA, 198 bp, Glycine max
  Clone ID: LIB3138-059-Q1-N1-H1
cgcggtggctccaaagcacgccaaattacccacacgcaaacgacaacaaccgcgcgcgtttcacacctgcataactcggagtagcatacgcagcgtcgttgactcgcaactcgtaacttggcctcgcgcgccgatggcgtcggtccccaacaccgtcgcttcccgcacctttctgccgtcgatttccaaaccgagagc

SEQ ID NO: 34175 - DNA, 72 bp, Glycine max
  Clone ID: LIB3138-059-Q1-N1-H11
tctaaggatgcacaagatatggttgaggaatggttcgattgtgttgatgaggaggattcctttgaggaagtt

SEQ ID NO: 34176 - DNA, 276 bp, Glycine max
  Clone ID: LIB3138-059-Q1-N1-H2
atttcttacagcttggtcaactcatgtgcgtcctgcaacaactctgttggctgatgggtgtccatatttgtatgcaatggtgcatgatagttcagtgtctacaataccaggtgattttgtcattggtgtcaagttgacaaccataaacaatatgtgtgcatatgggctcaatcctggtatttcaagttctcgtcttttgggcaccattcctcagtccatttcacagcaaactgtttggaatcaaatggcaacagtgagaacaccattgaattttga

SEQ ID NO: 34177 - DNA, 162 bp, Glycine max
  Clone ID: LIB3138-059-Q1-N1-H3
tccctttttttaataatcctttcttctctttctttctctctctctctctcttatcccttgacatgtcttctgccggcggcgacagcggcggcagcgctactttcggcgagcctcgccaatacttctgccaccagtgcaaccgcaccgtcttaatttcccctt

SEQ ID NO: 34178 - DNA, 275 bp, Glycine max
  Clone ID: LIB3138-059-Q1-N1-H5
aaatggaaaagttccattcaatgcaaaggatgatgaatgctcctgattcaaatgataatattgatttactggtgagcattgatttgttgggtttacaaggagcaggtaaagcttttccaaacaaaattgtttttgatgataagcttgtgttggctaacacacaagaattctttgatggaaattttccagtggattcttggttaccaatttttgtgaattgtctttatcctgtaagtcaattaccttcaaaagcgtgtcgtgtaaatgttacatgt

SEQ ID NO: 34179 - DNA, 175 bp, Glycine max
  Clone ID: LIB3138-059-Q1-N1-H6
cctagatgaagaaatccttcgaagcgaagcacaagattgattgacggatgagcatagatgtgttgggatgacaatgagcatgtaaagcttttccaaacaaaatcgcttaagatgataagctggtgttggctaacacacaagaattctttgatggaaatttgccagtggattcttg

SEQ ID NO: 34180 - DNA, 356 bp, Glycine max
  Clone ID: LIB3138-059-Q1-N1-H7
ggctacaataccaggtgattttgtcattggtgtcaagttgacaaccataaacaatatgtgtgcatatgggctcaatcctggtatttcaggttctcgtcttttgggcaccattcctcagtccatttcacagcaaactgtttggaatcaaatggcaacagtgagaacaccattgaattttgattctagcaagcagagcttttgtcagttttctattgaccttctcggtggaagaatcttagtggacaaaactggagattggatcacacttatacaaaattctccaattagtaacttattgagagttgctgcttggaagaaaagcttgttaatggtcaaaattgtgatgtctgggaatg

SEQ ID NO: 34181 - DNA, 235 bp, Glycine max
  Clone ID: LIB3138-059-Q1-N1-H8
gcacccattagaccctttgcctaaccgactcactcccatggaatccgatctaaacgacgccgttttccccgaagaagatctcgacgacgacgacgacgacgacgatgaaactccagaggacgaagaggactacgacgacgaaaccgaaccccctcccttcgtcctcgccgtcgtagcagtcgcgctcgccggtttcaccggcttcgaaacactcgacaccacgttgatcccgatc

SEQ ID NO: 34182 - DNA, 340 bp, Glycine max
  Clone ID: LIB3138-059-Q1-N1-H9
tgaacctattacatattcaatgggactttgatctcgaatgtggcaaattggcaattacttattttatggaggcatcacttttctgtttagtagataccaattactgtaggattttatttgtaccaagcaagagccctatatcaggggagagctgcaggatctcaacacacacattggccattgcaccatctatttctagctagcatttgttctctgttagctggaattgttggtggacttcttggtacaagttctggatttgttatgggtcctttatttctagaagtgggaattgctccacaggtagcaagtgccacaaccacttttggaatgatgtatt

SEQ ID NO: 34183 - DNA, 406 bp, Glycine max
  unsure at all n locations
  Clone ID: LIB3138-060-Q1-N1-A10
ctgcaatcatgtggaacccattctcttccctcccttcggaccattactctcctcacagatacaccaccttcgaagggtattacagcaagttccgactcccatctggcgcttctatagctttgatcatatcgtggattcccggtgtagcgaaagatcgcgattatcctaaatccgatacttgttcttccttttcttccaaaggtgaatccggtgttacgggtgcgccatacctcatcatcttcgcgtacgttacgaaggattgcagacaatggtttctgaaggagtatacgccggagactntatcgcaaggatcaagtgggaaggaccggagagggttcttgatcaagtgggatcaaggggagttcgaatgggatggacaggatgttatgagatgggatattaacta

SEQ ID NO: 34184 - DNA, 327 bp, Glycine max
  Clone ID: LIB3138-060-Q1-N1-A11
gttttctattgaccttctcggtggaggaatcttagtggacaaaactggagattggatcacacttatacaaaattctccaattagtaacttgttgagagttgctgcttggaagaaaggctgtttaatggtcaagattgtgatgtctgggaatgcagcagtcaaaaagagtgattgggccttattggtactagtgtttttaacaaacaggaacagttccgaacattttgatgcatgtaagtggacaaaatccgaaccacattcctgggaatttgactttccaatagaggtatgtggtcctaataatggttttgaaatgtggagttctga

SEQ ID NO: 34185 - DNA, 156 bp, Glycine max
  Clone ID: LIB3138-060-Q1-N1-A12
gagaaactttaagcagatgtctaatgttttgtgggtggctcctgaggacaaggcgagtttatggtcacaacttcattatgtttcgggtaataatctggaaatgcaagaagcttatcttgtcaatctcgtaaatgtgttacgagaattgtatttgca

SEQ ID NO: 34186 - DNA, 247 bp, Glycine max
  Clone ID: LIB3138-060-Q1-N1-A2
ggattcgggaagcactgtcccttttgttggttgcaggggtacccgatgttccaaaacatcaccgaaacattctcaccttccaaggttgcattgttagagaaattgaacccgtgtaccctcctgagaatcagacgcagttcgccatggcatattacgtcatcaactatttcaagctacgtatttgggagtttgtggagttcagcaagatgatatacctagaccgtgatatacaagtgtttgacaatat

SEQ ID NO: 34187 - DNA, 153 bp, Glycine max
  Clone ID: LIB3138-060-Q1-N1-A5
agtacatactttccgtctcaattcaatttcccataaactttctttgagggtctatcgcttcggtaaattctcttttcttcttctggccccttttccacttcaattaggtatatcggcgattcgattaccaatttgcttaaactcaatcaagct

SEQ ID NO: 34188 - DNA, 178 bp, Glycine max
  Clone ID: LIB3138-060-Q1-N1-A6
aatagaggtatgtggtcctaataatggttttgaaatgtggagttctgagtgggcaaatcaaacttcatggcatttgagtttccttattgacaatcccaaacagtctacagtttttgatattctcttgggaatctctcaagattttgaaattgctggtaatactcttatgccagctttt

SEQ ID NO: 34189 - DNA, 174 bp, Glycine max
  Clone ID: LIB3138-060-Q1-N1-A7
cactcactcttgttgccttcatggccaagccagtgtccattgaggtatggaacccaagtggcaaatacagagttgtcagcaccaaaccaatgcctggaactcgttggatcaatcttctcattcaaaatgatgttcgtcttgaaatatgtaccgagaagaaaacgattttgtcag

SEQ ID NO: 34190 - DNA, 432 bp, Glycine max
  Clone ID: LIB3138-060-Q1-N1-A8
gtggattcttggttaccaatttttgtgaattgtctttatcctgtaagtcaattaccttcagaagctgtcgttgtaaatgttacatgtggtagtggacgtggtggtttacccaccactgcttggattagttctgcagttaacaatcgctcctcagatatcaacaaaaggattcgcacagcacttgggaaaggtaagaaaattgtttttcttactagagttgatccttttccagtagctttactggctgttctttttggcgttaagaatgaaattctgagttctaacgccactaatcctatgctgacgcgacttcttgagaactgtaagagtctcaaatatctggttgatgagtgtccttttgcatttgtgaactagtatgtagtattttattcacttaaataaagcgcattactatgtgccatgagtgtgttt

SEQ ID NO: 34191 - DNA, 237 bp, Glycine max
  Clone ID: LIB3138-060-Q1-N1-A9
aatttattgggtcttcatgataatgacattgaggatgatctgcgtatatttagggatgcgggtgaagatgcatctcctgtgccaaggaggcgtcggcgtttgacccggacaaggtccaatgaagatcaaccttgatgactgccaccattttacctggtaatattcatagttcaattttttggcaagaaattacttgaattgttttggatttgtcatcggttaacccacttggtttct

SEQ ID NO: 34192 - DNA, 295 bp, Glycine max
  Clone ID: LIB3138-060-Q1-N1-B10
attttatccaattgaaattttaaaaatgactgggataaacttaagaattcaattattgaaattgaataagtaaacaatttaattggattggtcgaatggtatcaaaaaaatggagtactaactcccatttcttatttattattgaattaaccgatcaacttgctttgttatcgaacatttctttttgatttcaaaaattttccggaaaaaatttgaatctatttttatatgcgaatcaatcctactacttctggtcctgaagtttctgcgcttgaaaaaaaaaatctgggacgta

SEQ ID NO: 34193 - DNA, 315 bp, Glycine max
  Clone ID: LIB3138-060-Q1-N1-B11
ctcgagccggctcgagcttcatcgaacgcgctctgaaaggactctaggatttgcgtgttgcacatcttcagctttgtgctgtcttcatcgcgcagtggttctcatccagtcgtaaagaaagccagcaaccctcgaccgcaaggtagctagctatctagcacgacctccgtacctccatagcagcgaaacatggcgggctacgatccatacgggacatctgccagtggctcatcgtacgggatggctccagatctccagttctacagcggagccacgggcgcgacttcaggaactgggatgcacccctcgacgaca

SEQ ID NO: 34194 - DNA, 301 bp, Glycine max
  Clone ID: LIB3138-060-Q1-N1-B12
ctcgagcttgtttgagcttcatcgaacgcgctctgaagggggtctaggatttgcgtggtgctcatcttcagctatgtgctgtcttcatcgcgcattggttctcatccagtcgtaaagaaagccagcaaccctcgaccgcatggttgctagctatctagcacgacctccgtaccttcatagcagctaaacatggcgggcttcgatccatacgggacatttgccagtggtctatcgttcgggatggcctcagatcttcagttctacagcggatccactgtcgctacttctggaactgtgaatg

SEQ ID NO: 34195 - DNA, 62 bp, Glycine max
  Clone ID: LIB3138-060-Q1-N1-B4
gttgcattgaacgaactgatgttgcagaccacttataggaatacacaaacccaatacaatac

SEQ ID NO: 34196 - DNA, 219 bp, Glycine max
  Clone ID: LIB3138-060-Q1-N1-B6
ttcatgtttgaagtgctgtggattaaaatggtttgaagtgctttagcccctcaaacccgggtctctcctgaattaacccagtgagacaggaaatcaagagcactgagctgcttgctagggtttgaaatgggttgagtttttttttttctccttcaagtttggttagtttttataaaaaacttaatttgggcttggggaaaaaaaaaaaaaaaaaatcaa

SEQ ID NO: 34197 - DNA, 168 bp, Glycine max
  Clone ID: LIB3138-060-Q1-N1-B7
tgtttgtgatgatgcctttggacagcgtgacggcggggaacgcggtgaaccggaaaaaggcgatgaacgcggcgatggctgcgcttaaaagcgcgggggtggagggggtgattattgacgttttgtggggtttggtggaaagagagaagcctggggagtataattggg

SEQ ID NO: 34198 - DNA, 189 bp, Glycine max
  Clone ID: LIB3138-060-Q1-N1-B8
tgataacttaattagtgttcatgaatatgtcaagccttactttagtggttctaaattgaaaagctttctagctagtcataacatcaccattactgatggtattgacaaaactagtgcaactttgcaatttaaaaaggtagcagattgtgattttctcaagagaaactttaagcagatgtctaatgtttt

SEQ ID NO: 34199 - DNA, 246 bp, Glycine max
  Clone ID: LIB3138-060-Q1-N1-B9
ctcttatgccagctttgtctgttccacaggctactgccagatcttctgaaaatgcgggatcctctgcatgatctggaatttgagttttctttcgcttggtcgtttgtttaattcaataaaggaaattaggcatgaccctcttgttgagtatgctctgcctatttgcaaatttccacacctttattaattgtcggtatgatctgtggactgtgtgttattttggacacaacttcattatgtttcgtg

SEQ ID NO: 34200 - DNA, 285 bp, Glycine max
  Clone ID: LIB3138-060-Q1-N1-C10
ttgaagttaaaagccttagccttccctacaactccaaacacaaagacatcatcatccatggctgcctccgtctccactgtcggagctgtcaacagagctcttttgaacctgaatggttctggagctggagcttcagctcccagttcagccttctttgggaccagcttgaagaaggttattgcctcaagggtccccaacagcaaggtttccggtggaagcttcaagattgttgctgtagaagagaagaaagagattgaagagacccaacagaccgacaaggacaga

SEQ ID NO: 34201 - DNA, 470 bp, Glycine max
  Clone ID: LIB3138-060-Q1-N1-C11
ggctgcacaagctcttgtatcatcatcttctcttaccttctcagcggaggctgcaagacaaagtcttggaccaagatcactccaatctccatttggcttctccagaaaagcctcctttcttgttaaggcagctgctaccccccctgtcaagcaaggatcagacagacctttgtggtttgcatcaaagcaaagtctttcttacttggatggcagccttccgggtgactattgatttgaccctctgggactttcaaacccttgaagaacaagaaggttcattgagccgaaatggctagcatatggtgagataatcaatggtcgttatgcaatgttgggtgcagttggtgcaatagcacctgaaattctaggcaaggctggtctgatccctcaagagacagcactcccatggttcaaaacgggtgtgtttccacctgcaggaacctacaactactgggcagactcctacacac

SEQ ID NO: 34202 - DNA, 399 bp, Glycine max
  Clone ID: LIB3138-060-Q1-N1-C12
tgaccttctcggtggaggaattttagtggacaaaactggagattggatcacacttatacaaaattctccaattagtaacttgttgagagttgctgcttggaagaaaggctgtttaatggtcaagattgtgatgtctgggaatgcagcagtcaaaaggagtgattgggcctcattggtacaagtgtttttaacaaacagcaacagtacagagcattttgatgcatgtaagtggacaaaatcagaaccacattcctgggaattgatcttcccaatagaagtatgtggtcctaataatggttttgaaatgtggagttctgagtgggcaaatcaaacttcatggcatttgaagttccttattgacaatcccaaacagtctacaagttttgatattctcttggg

SEQ ID NO: 34203 - DNA, 196 bp, Glycine max
  Clone ID: LIB3138-060-Q1-N1-C2
aaccggttgggatccaaatggcaccaggggggacaccattgaattttgattctagcaagcagagcttttgtcagttttctattgaccttctcgggggaggaatcttagtggacaaaactggggattggatcacacttatacaaaattctccaattagtaacttgttgagagttgcttctttgaaaaaaaggttttt

SEQ ID NO: 34204 - DNA, 116 bp, Glycine max
  Clone ID: LIB3138-060-Q1-N1-C3
tttaaatccacaaaatccttttgtgttaaataggtggatgggaaaattgactttcccccagggcactttccgaagtgttaagagaatgcctttttctataaggggaggagcttgtt

SEQ ID NO: 34205 - DNA, 247 bp, Glycine max
  Clone ID: LIB3138-060-Q1-N1-C5
aattctgcttcacctttcttcatttcacttcagagagagagaacaaaacagaatgggcgtcgtggtgatcgacggcagcaccgtgcgcgacttcgtgaacgacgaaaccgccttcaccaagagcgtggacgagcagttctcggcgctggacctcaacaacgacggcgttctctcgcgctcggagcttcgcacggccttcgagtccatgcgcctcatcgagacgcacttcggcatcgacgttttcacg

SEQ ID NO: 34206 - DNA, 438 bp, Glycine max
  unsure at all n locations
  Clone ID: LIB3138-060-Q1-N1-C7
ccgaggagggcggcgatcggcgatgagcagcggcggcggatcgtcagaggcggcggcggcggcgaaggagaaggagaaggagaaggcgcgtgtgagtcgaacgtcgctgattctgtggcacgcgcaccaagacgacgccgcagcggtgaggaagcttctggaggaggatccatcgcttgtgaaagcgaaggattaccacagccggaccccgctacatgtggcgtcgcttcattgattggttgaaggtgccaattgcttgatccaattccgggctgacgtcaacgctcaagatcgtggaaaaacacttcttggcttatgcagaagggctaaaagactgcatgatgagctttgagtacatgtggctgcgatgcagatggagcatttgacgatctgtctcncatgctacaagtatgagtaccttactgcttcataatgatg

SEQ ID NO: 34207 - DNA, 248 bp, Glycine max
  Clone ID: LIB3138-060-Q1-N1-C8
aagaaatataactaatattctttagaataatcaaaaagaatattaaattcaaataaattttagatagaaaaaagacttaaaaaggaggatttgaaatgcgagatctaaaaacatatctttccgtggcaccagtagtaagtactctatggttcggggctttggcgggtctcttgatagagatcaatcgtttttttccagatgcattgatattcccttttttttcattctagttattgacacggaaaggg

SEQ ID NO: 34208 - DNA, 252 bp, Glycine max
  Clone ID: LIB3138-060-Q1-N1-C9
cggctcgagcaaggctgtgaggactgttcttcatcagttgtatgagatgaatccacctaaatacacgtggttctataattttgttgcttcaaacaaaccagcagatgggaaacgttttattcgatcccttgggaaggagcaacaagagcttgctgaaagagtgatggtaactcggcttcacctttatggaaaatgggtcaagaaatgtaatcatgctgagatatatcaagaaatctctgatgaaaacttgga

SEQ ID NO: 34209 - DNA, 92 bp, Glycine max
  Clone ID: LIB3138-060-Q1-N1-D1
cgagaattgtatttgcacagtccagaggaagctcgccaattgagaaagaaagctctctctcgtattgaatggctgcaaaaagcttatgtgcc

SEQ ID NO: 34210 - DNA, 66 bp, Glycine max
  Clone ID: LIB3138-060-Q1-N1-D10
cttagttgtcaagttggaatcaacccatactccatgtgaatggaccggtttggccaataaattact

SEQ ID NO: 34211 - DNA, 226 bp, Glycine max
  Clone ID: LIB3138-060-Q1-N1-D11
tatggatgtttggtcatggatatgtgagctccccaactcggtggaggggaccgagtcccactcgccacccatgaagttcgaaatcgcgagtgagaagaacgacgacaagctggacaactcaactcgttccattcacctgaaagctgagcgaacctccggctcagactcggaagctgcggtgatcttcaccgtatgcttgcaaggctttcacccacacaacgctcac

SEQ ID NO: 34212 - DNA, 464 bp, Glycine max
  Clone ID: LIB3138-060-Q1-N1-D12
gttctttcaatgtggagatattttgttggagatctcgtctttgaagtttctaagatgacttctccctacattaaatgtacagtctctttcttcatagcatttggaaatttggctgatgataccatcaattttgaggcttttccccacaagctggtgcagtttggagagattcaggaaaaagttgtattgaaattttcacaagaagaatttcttacagcttggtcaactcaggtgcgtcctgcaacaactctgttggctgatgggtgtccatatttgtatgcaatggtgcatgatagttcagtgtctacaataccaagtgattttgtcattggtgtcaaagtgacaaccataaacaatatgtgtgcatatgggctcaatcctggtatttcaggttctcgtcttttgggcaccattcctcagtccatttcacagcaaactgtttggaatcaaatggccacagtgag

SEQ ID NO: 34213 - DNA, 180 bp, Glycine max
  Clone ID: LIB3138-060-Q1-N1-D4
caacaacacaaggccatcatcatggcagctgcttccccaatggcaagccaactcaagtccaccttcactaggactcttgtagctcccaaaggcctttcttgctttttaacactttaacttgtgccttttaaaaaggcatttaactttactggttaaggccttccatcagaaaaacccacc

SEQ ID NO: 34214 - DNA, 303 bp, Glycine max
  unsure at all n locations
  Clone ID: LIB3138-060-Q1-N1-D5
atcgccgattcttcaccgccgtggtgggattcggcaagaagaggggacccaactcgtctgagaagtgaggccgaggcttgaggaatatgttgctactctatttgatttatctttgttgttttttatttatttttaatttgtatgttttgattgtgttctgtgaacggtttttgttagctttatatcaaacttgaaattttgcatacaatatctaactatctaagttcattgctcctttcaactgggaaaggatttggtntnnnaaaaaaacaaccttaccttattcaaaactcattattatcc

SEQ ID NO: 34215 - DNA, 265 bp, Glycine max
  Clone ID: LIB3138-060-Q1-N1-D6
ggcacaagtttgagtttgaaagtgggtggttgagggacggggagaataaagtggtgctgagtttgccgcgcggggcgaccaattatgagagtgccgtgtttccggagagtgtgtatttgcaatattattcctttagggtggaggttatgtgaccgcctttaaaaaaggtgttagagagatttattgggtcaaggcttgtgccttggattaatatttgatgtttgtgaattcactgtagcattgataccaaaaggtgtgggttgtt

SEQ ID NO: 34216 - DNA, 218 bp, Glycine max
  Clone ID: LIB3138-060-Q1-N1-D8
ctgctgttgacaagttgtattctactaaggttaataaatttgcaaaaattatgaaccttagacaaagtgttgttggtgatcttaaacttcttactgatgggaagttgtatgagggtaagcatattcctgtatctaatattagtgcaggggaaaatcatgtagttcaaatacccttaatggcacaggaagaaattctgtcttctagtgcaagtgatttc

SEQ ID NO: 34217 - DNA, 419 bp, Glycine max
  Clone ID: LIB3138-060-Q1-N1-D9
cagccaaatttttaaagaaaatggtgttaatggagaatacctggaaggcatgtccatgtttacgactgaacagatcctacgttttataagacgttgccacatgaagtggggagacttcatcacattatgcaaggaattaagacggattaaagtggcttgtctgaaaggggagcagaaggtgcggcggccatggtgggcaccggcttgcctatctacagtgttcttaaaggttgcaaaatccaacagacaatcaagagttgtttccttgaagctggaaccatgataatacaataagttaaacctctgcatatgtgtaccaatgtacgtatagcaaatttctttttgcctagaaaacaaaagataggaaagaactttttctagccccctttttttaatttaatttaattttcttttgattc

SEQ ID NO: 34218 - DNA, 121 bp, Glycine max
  unsure at all n locations
  Clone ID: LIB3138-060-Q1-N1-E10
atggcctcagccgcatcccccaccactttctctcttcttcactccgccaccccttccttcttcttcaccggcaccttcgncttccccttccccttgcgcgggcagcttaccttcttccttc

SEQ ID NO: 34219 - DNA, 191 bp, Glycine max
  Clone ID: LIB3138-060-Q1-N1-E11
ctcgagccgaatcggctcgagctcattgactaagttcggtgactagcattagctactgtaaaaaaaaaaaaaaaaaaaaaaaaaaaataaaaaaaaaaaataaaaaaaaaaaaaaaaaataaaaaaaaaaaaaataaaaaaatctaataaaaaaaaaaaaaaaaaaaaataataaaaaaaaaaaggggggc

SEQ ID NO: 34220 - DNA, 261 bp, Glycine max
  Clone ID: LIB3138-060-Q1-N1-E5
aagttgacaaccataaacaatatgtgtgcatatgggctcaatcctggtatttcaggttctcgtcttttgggcaccattcctcagtccatttcacagcaaactgtttggaatcaaatggcaacagtgagaacaccattgaattttgattctagcaagcagagcttttgtcagttttctattgaccttctcggtggaggaatcttagtggacaaaactggagattggatcacacttatacaaaattcttcaattagtaactta

SEQ ID NO: 34221 - DNA, 217 bp, Glycine max
  Clone ID: LIB3138-060-Q1-N1-E7
atcaaagttagatgtcaacataagactctgcattagagatagcttgttccggttggctcaaagtgctatgcaaaggaattatgctagtgatacaagcagtacaaacaacagtagcagagaagaacttaaagttgctgcaagagaagaaagaagtagccaaaacagatattctatgattgctgatgttgaaaccaaaacaaattccatcgatcgaact

SEQ ID NO: 34222 - DNA, 199 bp, Glycine max
  Clone ID: LIB3138-060-Q1-N1-E8
ctcaagcgtattttgttcaaactcacagccggatcagggtggaggccaaaagaatatgatttcaaaagcacctggttcacattctacaaccgattaatctgatatggaagatgctgagacacctacttcgaaagatgccccattgaggcaaagactagatcctccctacaatgaggttgccgcttagatagaaacaaat

SEQ ID NO: 34223 - DNA, 338 bp, Glycine max
  Clone ID: LIB3138-060-Q1-N1-E9
aagtagttgagaactaagaaggagaagcaaatggcttcctcaatgatctcttccccagctgttaccactgtcaaccgtgccggtgccggcatggttgctccattcactggcctcaagtccatggctggcttccccaccagaaagaccaacaatgacattacctccattgctagcaacggtggaagagtgcaatgcatgcaagtgtggccaccagttggcaagaagaagtttgagactctttcctaccttgcagaccttgatgatgcacaattggcaaaagaagtagaataccttcttaggaagggatggattccttgcttggaattcgagttggagca

SEQ ID NO: 34224 - DNA, 259 bp, Glycine max
  Clone ID: LIB3138-060-Q1-N1-F1
atttttttttagaaaacaaaaaatgaaaaattactcgatttttatttctccaaaatgatcaattttataagattgaatcgactaaaaaatggaatgaatcatttcatattgatagtattgctatgcttagtgggcgactccgtagttttttagaacggttcccatttaacaaatttataaaccggttcattcgattaatggattaaaaaaggacttattacccacccctcgttcggttatctgatctaaagactagtcc

SEQ ID NO: 34225 - DNA, 381 bp, Glycine max
  Clone ID: LIB3138-060-Q1-N1-F10
aattgtatttgcacagtccagaggaagctcgccaattgagaaggaaagctctctctcgtattgaatggctgcaaaaagctgatgtgcctaccatagcacagattgaagagttccattcgatgcagaggatgatgaatgctcctgattcaaatgataatattgatttactgttgagcattgatttgttgggtttacaaggagcaagtaaagcttttccaaacaaaattgtttttgatgataagcttgtgttggctaacacacaagaattctttgatggaaattttccagtggattcttggttaccaatttttgtgaattgtctttatcctgtaagtcaattaccttcagaagctgtcgttgtaaatgttacatgtggtagtg

SEQ ID NO: 34226 - DNA, 350 bp, Glycine max
  Clone ID: LIB3138-060-Q1-N1-F11
gattatagactatctttatataataatataaataagaataaaaaaataaaaaaaaaaaaagaatctatataaatataaaaataatatatataaggtacaaatagtaaatcgaggtacccattttatgataaactttccttccatttttgttcctctagtaggcctagtatttccggcaattgcaatggcttctttatttctttatgttcaaaaaaacaagattttttagatacagaaaacaaagtaaaattctggggttttttattccccaattataatactaaattcaaaaaaaggagagtaatgagtataatctttcgctcagacgatgtactgatatattctatggc

SEQ ID NO: 34227 - DNA, 467 bp, Glycine max
  Clone ID: LIB3138-060-Q1-N1-F12
caaggagcaggtaaagcttttccaaacaaaattgtttttgatgataagcttgtgttggctaacacacaagaattctttgatggaaattttccagtggattcttggttaccaatttttgtgaattgtctttatcctgtaagtcaattaccttcagaagctgtcgttgtaaatgttacatgtggtagtggacgtggtggtttacccaccactgcttggattagttctgcagttaacaatcgctcctcagatatcaacaaaaaagattcgcacagcacttgggaaaaggtagaaaattgtttttcttactagagttgatccttttccagtagctttactggctgttctttttggcgttaagaatgaaattctgagttctaacgccactaatcctatgctgacgcgacttcttgagaactgtaagagtctcaaatatctggttgatgagtgtccttttgcatttgtgaact

SEQ ID NO: 34228 - DNA, 145 bp, Glycine max
  Clone ID: LIB3138-060-Q1-N1-F3
gaaacaatggccaatgtttcaattccactcccacgaaacggtttctccaaacccaattactcgacaaaacccccatgtttcaccccttcagcttcaacactcaaaatttcttggtcttgagtggcttaatttgatggatcttaat

SEQ ID NO: 34229 - DNA, 109 bp, Glycine max
  Clone ID: LIB3138-060-Q1-N1-F5
tggaaatcttgctgctgatgctggcgaagccattatttattatgactttggcattatgggggcgataaaaactttcacccgtgagggaccgcttgaactgttctatgct

SEQ ID NO: 34230 - DNA, 212 bp, Glycine max
  Clone ID: LIB3138-060-Q1-N1-F6
tggaaatcttgctgttgatgttgacgaagcaattatttattatgactttggcatgatgggggagataaaatctttcacccgagagagactgcttgaactgttctatgctggttatgagaaagatgcccaaaaggttatgccatgccttatagatctgggagcacttcaacccactggtgacctgtcattaatgaggagatctattcaatttt

SEQ ID NO: 34231 - DNA, 217 bp, Glycine max
  Clone ID: LIB3138-060-Q1-N1-F9
gagattttcgtgagtgtaatttcattttctaattatttattttgcttcccctaatgagttttacacctttaacatctctatgtacaagacaaaaagcagcattaaacaaaaacatatacaaaacagattacgccgtgcatcaatatctattttctcttcttttcctctttatctctttcaagtgtaacaggagctgctggtatgctgaaccaccatt

SEQ ID NO: 34232 - DNA, 295 bp, Glycine max
  Clone ID: LIB3138-060-Q1-N1-G10
ggatttcattgcgatatcatttgtgtcactggatggactgccaccccaatgcaggatgttcaggttacaattgattggtttatttcctctcaggaatgtgttcccaggacctattgtgttttaaatccacaaaatccttttgtgttaaataggtggatgggaaaattgactttcccccagggcactttccgaagtgttaagagaatgcctctttctataaggggaggagcttgtgcaaaaaatgctattctcatgaatatgccaaatgctgttctttcaatgtggagatattttg

SEQ ID NO: 34233 - DNA, 343 bp, Glycine max
  Clone ID: LIB3138-060-Q1-N1-G11
ctcgagccgatcaaatggcaacagtgagaacaccattgaattttgattctagcacgcagagcttttgtcagcattctattgaccttctcggaggcggaatcttaatggacaaaacttgcgattggatcacacttatacagaattctccaattcgtaacttgttgagagttgctgcttggaagaaaggctgtttaatggtcgaaactgggatgtctgggaatgcagcaatcaaaatgagtgattgggcctcattggtacaagtgcttttaacaaacagcaacagctcagagcattttgatgcatgtgagtggacaaaatcagaaccacatttctgggaattgat

SEQ ID NO: 34234 - DNA, 437 bp, Glycine max
  Clone ID: LIB3138-060-Q1-N1-G12
cttttggatcttgcacatgccccttttactcacacttcaacttttgctaagggatggagtgttcccagcttggtgaaatttttgacacctgcatctggcctacaaggatactgggacccctatccaattgatatggagtttcggccaccttgcatggttctatcaaccattggaatttcgaagcctgggtaactggaaagacaaagcaccagtcagtgtgccacacacctgcaccaacttcatgtctgcttaccatcttcaaaacaaaaaacaagattgctgtacagaatgtcactggattttgctcctgtgcttaagcatattccttttatgcaacatctatggagatattttgcagagcaggttttaaacgaggatctacggctagtgttaggccagcaagagcggatgaacaatggtgccaatgtgtggaattt

SEQ ID NO: 34235 - DNA, 220 bp, Glycine max
  Clone ID: LIB3138-060-Q1-N1-G3
agcacaaatactagtcccagatggcctctagcacaaccgatgaggcttcttggtcataatggagagatcaacaccatacagggcaacttgaattggatgcaatcacgagaaccatcattgaagtcacctgtatggcgaggtcctgaaaatgaaattcgtccatttggaaatcccaagggatcaaactcaacaaatcttgacagtgcttcagaattattga

SEQ ID NO: 34236 - DNA, 351 bp, Glycine max
  unsure at all n locations
  Clone ID: LIB3138-060-Q1-N1-G4
cctccctcagatcccaaaccagcaaaaacctttcttcacaaaatggcctcaacaactctaacaaccctcaccctccgcacgctatcttatcctacaccctcctcttcttaccctacgcacctctccgccaaaccctcctccctccaattccccaatctctcccaccgcgccgccaccacgcgccgnccccgtgtcgtcgtctccgccgttgaggcgccggagaaaatcaccaagctcggcgacgaaatcgccggactcacgctcgaggaggccaagaacctcgtcgacttcctccaggacaagctcggcgtctccgcggcggcgttcgcccctgtggcagtcgccgcgggt

SEQ ID NO: 34237 - DNA, 188 bp, Glycine max
  Clone ID: LIB3138-060-Q1-N1-G5
ctcgagccgctgagtcttgcaattgaagttgaagtcttgcccttgtctcttcaactccaaacacaagacatcatcatccatggctgcctccgtctccactgtcggagctgtcaacagagctcttttgaacctgaatgggtctggacctggggtttcagctcccagttcattcttctttgggagcagct

SEQ ID NO: 34238 - DNA, 192 bp, Glycine max
  Clone ID: LIB3138-060-Q1-N1-G6
ctccaccaacacataaacacttgcaaactagttttgtttttggaacatatcgcattacattacattagattggtggcaaagcaatggcatcgtcactacaagcagcagctactttcatgcaacccaccaagtttttgcagctaaagtctactcaagccatatctaaagcttttggtttggaacctgctggag

SEQ ID NO: 34239 - DNA, 245 bp, Glycine max
  Clone ID: LIB3138-060-Q1-N1-G7
gccgctgataacgtcacccctccccctgtaattgaagcccaacagagccaattaaacccctccaactcatcctcccctttctcacagaacctcctcctcacagctccaaagccacaagccttctccgacctccccgaaggcaccaactggcgctacagcgagttcttgaacgccgtcaagaagggtaaagtcgagcgagtcaggttcagcaaagacggttccgccctccagctaaccgccattga

SEQ ID NO: 34240 - DNA, 148 bp, Glycine max
  Clone ID: LIB3138-060-Q1-N1-G8
agagtatttatctgtttcagcagtttttttgttttatttattttttaattgggggctacttgtaaaggtgttatcccgattctggaaaggaggtgttttccctttgaatttcgcggacaactggtgactacgagaattgtgattgact

SEQ ID NO: 34241 - DNA, 231 bp, Glycine max
  Clone ID: LIB3138-060-Q1-N1-G9
ataattctgctctttcttttctctcaacatgagccggaaggagtagttgaatacctcttcaggcctagaaagcttgaagccttgattggatttcttgagaatgaagaaaatgccaatgtgcagatagctgctgctggtttactggctaacctgccaaaatccgaaagagaactcactatgaagttgattgagttgggtggactcgatgcaatcataagcattttgaaaact

SEQ ID NO: 34242 - DNA, 206 bp, Glycine max
  unsure at all n locations
  Clone ID: LIB3138-060-Q1-N1-H1
ctcgagccgaatcggctcgagcaattttgaggcttttccccacaagctggtgcagtttggagagattcaagaaaaagttgtattgaaattttcacaagaagaatttcttacagcttggtcaactcaggtgcgtcctgcaacaactctgttggctgatgggtgtncatatttgtatgcaatggtgcatgatagttcaagtgtctaca

SEQ ID NO: 34243 - DNA, 378 bp, Glycine max
  Clone ID: LIB3138-060-Q1-N1-H10
caaaaagaaagaaagaaacaaagatcgttcattgctttgtagtaagatcagatcatcaaaaatggttttgtcttggtcaagaaggaacgttttccgccgtgccaagaaggagaagtcacaaactcaattggaagtggaggttgtgattcccaaccactttcacttgccggtgagtctggagctgatgacagacccaatgactttatcaaccggcatcacctacgaccgtgtgagcattgagaagtggatcgagggagggaacaaaaccttgcccgtcaccaaccaagtgctgacaaccttcgacatcatccccaaccacgccattcgcaggatgattcaagattggtgtgtcgaaaatagttcttatgggattgatag

SEQ ID NO: 34244 - DNA, 206 bp, Glycine max
  Clone ID: LIB3138-060-Q1-N1-H11
tgaaaagctttctagctagtcataacatcaccattactgatggtattgacaaaactagtgcaactttgcaatttagaaagttagcagattgtgattttctcaagagaaactttaagcagatgtctaatgttttgtgggtggctcctgaggacaaggcgagtttatggtcacaacttcattatgtttcgtgtaataatctggaaatg

SEQ ID NO: 34245 - DNA, 280 bp, Glycine max
  Clone ID: LIB3138-060-Q1-N1-H12
gcttctcccaagagaggagagatatgaaactaattgggagtgcttcatccttggactctcagttactatgtcacttgttgaaatttttggttggtgagaaataagagcctgcattgcacccttggaggtattctggggttcttggccagatctttactagcttcaaagctgagtttgctgtaattaagacatctacacaatctcgacctttcctcaaatgtgataagttggatgagacttgcaatcattattgtgttcaagaaatgagaacattttatat

SEQ ID NO: 34246 - DNA, 222 bp, Glycine max
  Clone ID: LIB3138-060-Q1-N1-H2
gctggtgcaaagaatgctattctcatgaatatgccaaatgctgttctttcaatgtggagatattttgttggggatctcgtctttgaaggttctaagatgacctctccctacattaaatgtacaagctctttcttcataacatttggaaaattggctggtgataccctcaaattttaggctttttcccacaaacttgtgcccttttgagagaattaagaaaaa

SEQ ID NO: 34247 - DNA, 280 bp, Glycine max
  Clone ID: LIB3138-060-Q1-N1-H4
cttcaaaccctagctaggatttcaaggtacacttaacgatggcttcaaaacgcattactaaggagttgaaggatctgcagcaggaccctcctgtttcctgcagtgctggccctgttggtgatgacatgtttcattggcaagctacaattatgggtccaactgacagtccttatgctggtggtgtattcctggtgaccattcacttcccaccagattattcatttaagccaccaaaagttttctttcgaaccaaagtatttcaacctaacataaacagcaa

SEQ ID NO: 34248 - DNA, 360 bp, Glycine max
  Clone ID: LIB3138-060-Q1-N1-H5
ggatgttaggatgatatcagccgaagcaccagtcatctttgcaagggcatgtgaaatgttcatattagagttaaccctgcgttcttggaatcacactgaagagaacaaaaggcgaacacttcaaaaaaatgatattgctgctgcaatcacaaggactgacatctttgatttcttggttgacattgtgcctcgtgaggacttgaaagatgaagtgcttgcatcaatcccaagaggaacaatgcctgttgcagggcctgctgatgcccttccatattgctacatgccgcctcagcatgcgtcccaagttggagctgctggtgttataatgggtaagcctgtgatggacccaaacatgtatgc

SEQ ID NO: 34249 - DNA, 136 bp, Glycine max
  Clone ID: LIB3138-060-Q1-N1-H7
cgtttgggtagctgacacagatggctcgtacgaagcagaccgctcgtaagtccacacgaggaaaggctgctacgaagcatcttgcaaccaaggctgcacgttagtctgcacgaactactggtggtgtgaagaagcc

SEQ ID NO: 34250 - DNA, 381 bp, Glycine max
  Clone ID: LIB3138-060-Q1-N1-H8
ggtttggaatgcatgctcaagtgggaactgttagggatgctgagcttagagtgaagattgtggaggagagaggtcgatttgacaaaaatccaaaggaattccgagattcttacaaagccgagcaagagaagctccaacaacaaattacatcagcaaggagtgttctttcttctgttcagattgatcaagatctcaaggtgaaaatctccaaggtgtgtgctgagttgaatgtggatggattaagaagagacatagtaacaaatagagctgcaaaagctcttgctgctctgaaggaaagagacaaagtaagtgcagaggatattgctactgtcatccctaactgcttgagacaccgtcttaaaaaggatcccttggagtcta

SEQ ID NO: 34251 - DNA, 121 bp, Glycine max
  Clone ID: LIB3138-061-Q1-N1-A1
gggacttgacgagaaaggaatggtgagagaaacaagctttgatatttcaagtgctagtgagattgtggctggtttggcccctgccaccatcctaacttgttttccaaaaaaggctgggaaa

SEQ ID NO: 34252 - DNA, 164 bp, Glycine max
  Clone ID: LIB3138-061-Q1-N1-A10
taagaattggatgacgtttaacgaacctcgtgtggtggctgctcttggctatgataatggtttctttgcccctggaagatgctcaaaagaatatgggaattgtactgctggcaactcaagcactgagccttacattgttgcccacaatttgatattgtcgcatg

SEQ ID NO: 34253 - DNA, 265 bp, Glycine max
  Clone ID: LIB3138-061-Q1-N1-A11
gttatttgcaatagcatttttaatgagatgctcattagatatagctatgaaaaattactgcgccaggctaaagctccaagtatgtttttacaatccttcaaaaattttgtttctttgtgtgtgtatggtgatgataacttaattagtgttcatgaatatgtcaagccttactttagtggttctaaattgaaaagctttctagctagtcataacatcaccattactgatggtattgacaaaactagggcaactttgcaatttaaaa

SEQ ID NO: 34254 - DNA, 286 bp, Glycine max
  Clone ID: LIB3138-061-Q1-N1-A12
attttgttggagatctcgtctttgaagtttctaagatgacttctccctacattaaatgtacagtctctttcttcatagcatttggaaatttggctgatgataccatcaattttgaggcttttccccacaagctggtgcagtttggagagattcaagaaaaagttgtattgaaattttcacaagaagaatttcttacagcttggtcaactcaagtgcgtcctgcaacaactctgttggctgatggggtgtcatatttgtatgcaatggtgcatgataagtcaatgtc

SEQ ID NO: 34255 - DNA, 407 bp, Glycine max
  Clone ID: LIB3138-061-Q1-N1-A3
gttggatcttaaaatttataaatctaaaattgcacttatcaagatctcattttgaggaaccattctgcgtagtgatctattggcaaattttttgacagagggcaattttagagcaagtgttgatttgcagcgcactcatcgtattagaggaatgattaaaatggtggccacagttggtattcctgagaatacaggtatatcattggcctgtgctatgaatagttcttttatggggcgcgccagttctgatatttacaccatctgctctcaagactgtgaattgtggaatcctgcttgcacaaaagcaatgactatgtcatttaatccaaacccgtgttctgatgcatggagtttggaatttctgaagcgtactggatttcatcgcgatatcatttgtgtcactggat

SEQ ID NO: 34256 - DNA, 314 bp, Glycine max
  unsure at all n locations
  Clone ID: LIB3138-061-Q1-N1-A6
aataatctggaaatgcaagaagcttatcttgtcaatctcgtaaatgtgttacgagaattggatttgcacagtccagaggaagctcgccaattgagaaggaaagctctctctcgtattgaatggctgcaaaaagctgatgtgcctaccatagcacagattgaagagttccatgcgatgcataggatgatgaatgctcctgattcaaatgatcatattgatttactgttgagcattgatttgttgggtttacaaggagcacgtaaagcttttatcaacaaaatngtttatgatgataagctagtgttggctaacac

SEQ ID NO: 34257 - DNA, 122 bp, Glycine max
  Clone ID: LIB3138-061-Q1-N1-A7
ctcgagccgctcgagccgaatgggctcgggcaaaaactggtaaatatatcacgagaattgtgtgtgctcaccccagatgacgatcgccaattcccaaggatcgctctctctcaaattccatg

SEQ ID NO: 34258 - DNA, 350 bp, Glycine max
  Clone ID: LIB3138-061-Q1-N1-A8
aattagtaacttattgagagttgctgcttggaagaaaggctgtttaatggtcaagattgggatgtctgggaatgcaacagtcaaaaggagtgattgggcctcattggtacaagtgtttttaacaaacagcaacattacatagcattttgatgcatgtaagtggacaaaatcagaaccacattgctgggaattgatcttcccaataaacgtattgtggcctaataatggatttgaaatgtggagttcttagtgggcaacataaactttatggcatttgaatttccttattgacaatagcaaacagtctacaacttttgatattcttttgggaatatctcaagattttgaaa

SEQ ID NO: 34259 - DNA, 291 bp, Glycine max
  Clone ID: LIB3138-061-Q1-N1-A9
ctcgagccgcaaaattaaaatggatggtggacaaaaaagggtgaatattgcacaagaattgtgatgtccggaacttgcaatacacaaaacgaatagaccgagcctcattgaatcaaagaattcataacctgggggccccccctcttagcatttcgatccccgcgaatttaattacctgcgggtcctttgggggcgaacagtttttccttatagaggtctgtttaactcatgggcaaatctcgattttgcctttttcctgggcaaaattggtttcctctccaatttaccccc

SEQ ID NO: 34260 - DNA, 107 bp, Glycine max
  Clone ID: LIB3138-061-Q1-N1-B11
ctcgagccgctcgttgctgtcgtgcataacacaacgtacctggtcgtctctctcgttcatttcctttatcaacatcaaaatttacgtgcccccagattcgtcatgct

SEQ ID NO: 34261 - DNA, 203 bp, Glycine max
  Clone ID: LIB3138-061-Q1-N1-B12
aaagctgcaagaaaggaccgctccaacagtatcttaaatcaaacaagatgggtcgcatgcactctggaggaaagggtatttctggctcagccctgccatacaagaaaactcccccctcttggctaaagaccacaccttctgaggttgccgagcatgtgatgaagctgtcaaagaaaggactcaccccctctcaaatcggtatc

SEQ ID NO: 34262 - DNA, 348 bp, Glycine max
  Clone ID: LIB3138-061-Q1-N1-B2
cttgcccttctctcttcaactccaaacacaagacatcatcatccatggctgcctccgtctccactgtcggagctgtcaacagagctcttttgaacctgaatgggtctggacctggggtttcaacttccaattcatccttctttgggagcagcttgaaaaaaggtattggctcaagggtccccaacacaaaaatttcctcttgaagcttcaaaatttgtgcttgagaagaaaagaaagagattgaagagacccaacagaccgacaaggacagatggaagggtcttgcctatgatatctcagacgaccaacaagacatcacaagaagaaagggtttggttgactcccttt

SEQ ID NO: 34263 - DNA, 432 bp, Glycine max
  unsure at all n locations
  Clone ID: LIB3138-061-Q1-N1-B3
gttggatctgaaaatttctcaatctaaaattgcacttcccaagaacacagttggaggaaccattctgcgtagtgatctattggcaaattttttgacagaaggcaattttagagcaagtgttgatttgcagcgcactcatcgtattaaaagaatgattaaaatggtggccaacagtggtattcctgaaaatacaagtatatcattggcctgtgctatgaatagttcttttagggggcgcgccagttctgatatttacaccatctgctctcaagactgtgaattgtggaatcctgcttgcacaaaagcaatgactatgtcatttaatccaaacccgtgttctgatgcatggagtttggaatttctgaagcgtactggatttcattgcgatatcatttgtgtcactggatggactgccaccccaatgcangatgt

SEQ ID NO: 34264 - DNA, 318 bp, Glycine max
  Clone ID: LIB3138-061-Q1-N1-B4
gtttggagactgccgtgttgctggctttgattggtgccaattccactgttgtggcggcggggctcttgcatgactctctggatgatgcttttctgacttatgattatatagttgggatgtttggcgctggtgttgctgatttggttgaaggggtttctaaattgagtcacttaagcaagcctggctcgagaaaataatacagctagcaagtcagttgaagcagaccggttgcatactatgttccttggcatggcagatgcaagagcttgcctcattaaattggcagatcggttgcataatatgatgacactagatgca

SEQ ID NO: 34265 - DNA, 276 bp, Glycine max
  unsure at all n locations
  Clone ID: LIB3138-061-Q1-N1-B5
aaaaaaaaaaaaaaatttattaaaaaaaaaaaaaaaaaaaaaaatcctggaaattttaaaaattcggttttccaactcataaccccctttatctctccccttcctaatctctttcttctctccctccctcctctcccacattcttcccatccattctacactaaattacttcctacctctctcctctatatttcctttnttttgtccctccccccttttctatacccccccccccctcaatacatatctccccccccctcccctcatactctcccc

SEQ ID NO: 34266 - DNA, 124 bp, Glycine max
  Clone ID: LIB3138-061-Q1-N1-B6
cctgctttgggtggcgagggcccaactcagcagactgctattgacaacttaatggtgtaacaacttgatggaactgttaacgaatggggttggtgcaagcaaaagcttggagcaaatgccatat

SEQ ID NO: 34267 - DNA, 352 bp, Glycine max
  Clone ID: LIB3138-061-Q1-N1-B7
ggcaacagtgagaacaccattgaattttgattctagcaagcagagcttttgtcagttttctattgaccttctcggtggaggaatcttagtggacaaaactggagattggatcacacttatacaaaattctccaattagtaacttgttgagagttgctgcttggaagaaaggctgtttaatggtcaagattgtgatgtctgggaatgcagcagtcaaaaggagtgattgggcctcattggtacaagtgtttttaacaaacagcaacagtacagagcattttgatgcatgtaagtggacaaaattagaaccacattcctgggaattgatcttaccaataaaagtatgtggtcct

SEQ ID NO: 34268 - DNA, 382 bp, Glycine max
  Clone ID: LIB3138-061-Q1-N1-B8
ggcccgtccatgattcagcagatgcagcatgcttgcaatgaatgcaagggtactggagaaaccatcaacgacagagatcgctgcccacagtgcaagggagaaaaggttgtgcaggagaaaaaagtccttgaagttattgtggaaaagggaatgcagaacgggcagaagattacattccctggcgaagctgatgaagcgccagacacaattactggggatattgtctttgtccttcagcagaaggaacatcccaaattcaaaagaaaggctgaagatctttttgtagagcacattttgtcccttactgaagccttatgtggcttccaatttgtgctgactcacttggatggccgtcagcttcttattaaaataaatccttggg

SEQ ID NO: 34269 - DNA, 444 bp, Glycine max
  Clone ID: LIB3138-061-Q1-N1-B9
ctcgagccgaatcggctcgagcagtccctctgagttcttccacctcaccaccaagagcggctgggagttgaggaactagatttgtcgtctacacttcatgcgacactatcttccttgattcacgcgctacgttgcgcgcacatactcaacggatgccacaagcctccagagagcaatgcgcacacgagccgaaaagcatacaccacacaccactttctaaaaagaccttcgaggtcatgacacgattactgcgcacgggttagacggagtttgaggacttgttttgggagcataccacatctgcatttttgcattacgaacggatggtgaaagagagagcattcttgggggaagcatgaaaagcttttgtttttggcatgcgtgcatccggtgaacgcagaactgcgtgccggcgattatagagatatacacaccacacgatgt

SEQ ID NO: 34270 - DNA, 461 bp, Glycine max
  Clone ID: LIB3138-061-Q1-N1-C1
ggataggatattaacagaagtagaagtttcagataaacttcttgagtttcgctcaaaacaagctggtttcctagatactagctttgacacaataagtggttctggtccaaatggcgctatcatacactacaaaccagaaccagagagttgtagttctgtggatgccaataaactgttcttattggatagtggtgctcaatatgttgatggcacaactgacataacacgcacagttcattttggcaagcctacagcaagagagaaggaatgctttacccgagttttgcagggccatatagctcttgatcagtcagtctttccagaaaatacccctggttttgtgctggatgcgtttgcccgatcctttctttggaaagttggacttgactacaggcatgggactggacacggtgtaggagctgcattaaatgttcatgaaggcccgcaaagtattagtcatc

SEQ ID NO: 34271 - DNA, 98 bp, Glycine max
  Clone ID: LIB3138-061-Q1-N1-C10
gtttgttgctcagttggtgatccttgaattgctagacaatgctatttttactgctgggtacaaggctgttctgcacatccactctgtggttgaagaat

SEQ ID NO: 34272 - DNA, 146 bp, Glycine max
  Clone ID: LIB3138-061-Q1-N1-C11
ggcggggataagattaaagattcaacaatggcctctgcttctgctactcttctcaagtcatctcctgttcttgacaagtgcgagtgggtcaaaggccagacccttcgccaacctctcgtgagatgtaacccttcctcagcatcagc

SEQ ID NO: 34273 - DNA, 328 bp, Glycine max
  Clone ID: LIB3138-061-Q1-N1-C12
ctcgagccgctcgtttcgcttgttctgaacgacttttcaagagaatcaaaccatggcagtgaaagtatacggtccccactgtgcttccaccaagcgggtgctggtttgtctggttgagaaggaagtcgaatttgaggttgtccctgttgatgtcactaaaggggagcagaaggatcctgagtacctcaaactacagccatttggagttgttcctgtcatcaaaaattggagattataccttatttggttacactttgtgcttctttgttctgtttttctacttatagtttgtttggtggttaaaccgtactatttcacttgcttttta

SEQ ID NO: 34274 - DNA, 87 bp, Glycine max
  Clone ID: LIB3138-061-Q1-N1-C2
tggaatcaaattacaaggaatctgaaaaaagtagtggtggaagaatgagtttaaaggaagtagtggaagaagtgaagctattttact

SEQ ID NO: 34275 - DNA, 424 bp, Glycine max
  Clone ID: LIB3138-061-Q1-N1-C4
aattgttgaaaaattccttgatgggaatcccgaggctataacccatgtcactgacaatcaccatgcatatatcgaccatggctgacaagtatcgacaaacgaaaattgatcgaatcatacagagaaaaggtgcaattgaatcattggatggccaaatctaagacaaatgatgtactattatgcatgaaagtgcaaggatcgatcactacaaaggggaacacttatctggagtggcattccaactacaaaatgagctgcgttggtatgatgaactaacgaagattgatttctaaacactacaacatgcactgagacatagattggcatacacgcaaagatatgttaaaaatggaacatgatggaaatcttcaagacgcaccaaaatggataaagggaacagctcaatcaagctctactggagcta

SEQ ID NO: 34276 - DNA, 340 bp, Glycine max
  Clone ID: LIB3138-061-Q1-N1-C6
gatttcattgcgatatcatttgtgtcactggatggactgccaccccaatgcaggatgttcaggttacaattgattggtttatttcctctcaggaatgtgttcccaggacctattgtgttttaaatccacaaaatccttttgtgttaaataggtggatgggaaaattgactttcccccagggcacttcccgaagtgttaagagaatgcctctttctatagggggaggagctggtgcaaagaatgctattctcatgaatatgccaaatgctgttctttcaatgtggagatattttgttggagatctcgtctttgaaagttctaagatgacttcttcctacat

SEQ ID NO: 34277 - DNA, 461 bp, Glycine max
  unsure at all n locations
  Clone ID: LIB3138-061-Q1-N1-C7
cacgccggacaacatgagagcgaaatgggtacaagaatggttccaataccaagggatagggtgatcctgcacttcgattacgattgcttctacgcctctgtcttcgaatcggaagatccgagtcttcgatcactccctttcgccgtccagcaaaagcaaatatgcgtaactgctaattatgtggcccgaagcagaagaatctacaagctacagctggtcaaagatgcaaagcgcatgtgtccagatctgatcatcaaactaggtgaagacatcagcaaatttcgcgatgcctccaaggaactctactcgttcatcaagagcttcagctggaataacaaagtggaaaggctcggcttcgatgaagtctggttagatgtgtccgatatcngtgactacaatcaagagatcctgaacaagcacgacttggagcattcatttttccagacgtctaangatgatcc

SEQ ID NO: 34278 - DNA, 426 bp, Glycine max
  Clone ID: LIB3138-061-Q1-N1-C8
aattgattggtttatttcctctcaggaatgtgttcccaggacctattgtgttttaaatccacaaaatccttttgtgttaaataggtggatgggaaaattgactttcccccagggcacttcccgaagtgttaagagaatgcctctttctatagggggaggagctggtgcaaagaatgctattctcatgaatatgccaaatgctgttctttcaatgtggagatattttgttggagatctcgtctttgaagtttctaagatgacttctccctacattaaatgtacagtctctttcttcatagcatttggaaatttggctgatgataccatcaattttgaggcttttccccacaagctggtgcagtttggagagattcaagaaaaagttgtattgaaattttcacaagaggaatttcttacagcttggtc

SEQ ID NO: 34279 - DNA, 441 bp, Glycine max
  unsure at all n locations
  Clone ID: LIB3138-061-Q1-N1-C9
gtgctgcatgtatagtcaaaggtgtctccacttcccttcttaccattcattatatgataacgcgatgatcaagttgtcgtgttggtttgataccaaaacaagcatagttgtaatattttttcagtatcttttaactgtgtcacctcattttatgggataaggttttgttgtttgtttattttcttcgtacctttcaataataatggtttaaaatagatacaaaccgtaattaatgataacaaactcttaaaattactaggaatctcctaattgtttgtgcctaaaatctcctcatatgactngattgttatttcctaaatatctacaagtatataattacatgaaattcacctaatataatttgaaatgaattgaatgtcattgtaattctgggtgttaacgtgcagaaccaagccatgaatgaatctatttctgagcttc

SEQ ID NO: 34280 - DNA, 411 bp, Glycine max
  Clone ID: LIB3138-061-Q1-N1-D10
aacactcataacacatagcacaaagcaaagctcatccttgagttaaaaaatggcagcagcttcttccatggctctctcatccccatccttggctggcaaggccgtgaagctgggcccatcagccccagaagtgggaagggtgagcatgaggaagaccgtcaccaagcaggtctcctcaggaagcccatggtacggcccagaccgagtcaagtacttgggcccattctctggcgagcccccgtcctacctaaccggtgagttcccaagcgactacggctgggacacttgctggctttccgcagacccagaaacccttcgcaagaaccgtgaactcgaagtgatccactccaagtgggccatgctcggagccttgggctgcgtcttcccggagttgctgtcccgcaacggggt

SEQ ID NO: 34281 - DNA, 454 bp, Glycine max
  unsure at all n locations
  Clone ID: LIB3138-061-Q1-N1-D12
caggattgctattctttattgcggttttctggggattttttcctgttttcactgcaatattcacattccctcaagagagagccatgctgagtaaggagagagcagcagatatgtacagattgagtgcatacttactggctagaaccacaagtgaccttccactagacctcattttaccagtgctttttctgcttgttggttatttcatggccgggcttcagactcagtgttgcaccaatttttcctcaccattcttacttgtttcctctgcattgtggctgctcagggacttggacttgctattggagccacacttatggactngaaaagagcaacaactttggcttcagtaactgtgatgaccttcatgctggctggaggattttttgtgcagagagtncccatatttttttcttggatccggtacatgtcattcaactaccacacctacaag

SEQ ID NO: 34282 - DNA, 297 bp, Glycine max
  Clone ID: LIB3138-061-Q1-N1-D2
gcttgatgccatgcaacggatactgcaattaaagggttgggctggtctgtacaaggggataatggcgtccactgacaaagctgcacctgctggcgctgagacattgggagcttatgaattgacatcacattggttagagtacactaacaactgattaccatccactttgtactaattactatagatcatatattgtcaagaaataccaattgcatcccactgagtatatcgaagaaagtgagagggacatgccaaatagccgttatgattgcggacgacgatgaaaaacgacttgct

SEQ ID NO: 34283 - DNA, 180 bp, Glycine max
  Clone ID: LIB3138-061-Q1-N1-D4
ggctcgagattcccaccatgaaggagcaggtgttctcaacctactgtgacaaccagcccggtgtgttgattcacgtctatgaaagtgaacgaacgaagactcgtgacaacaatttgcttggcaaatttgaattatctggaattccttctgcttccaaaggtgttccttaaatcacttgtt

SEQ ID NO: 34284 - DNA, 436 bp, Glycine max
  Clone ID: LIB3138-061-Q1-N1-D5
gcaggtaaagcttttccaaacaaaattgtttttgatgataagcttgtgttggctaacacacaagaattctttgatggaaattttccagtggattcttggttaccaatttttgtgaattgtctttatcctgtaagtcaattaccttcagaagctgtcgttgtaaatgttacatgtggtagtggacgtggtggtttacccaccactgcttggattagttctgcagttaacaatcgctcctcagatatcaacaaaaagattcgcacagcacttgggaaaggtaagaaaatttgttttcttactaaagttgatccttttccagtagctttactggcttgtctttttgggcttaaaaatgaaattcttaattttaacgccactaattctatgcttacgcgacttcttgagaactgtaagaatcttaaatattttgttgatg

SEQ ID NO: 34285 - DNA, 415 bp, Glycine max
  Clone ID: LIB3138-061-Q1-N1-D6
atcagaaccacattcctgggaattgatcttcccaatagaggtatgtggtcctaataatggttttgaaatgtggagttctgagtgggcaaatcaaacttcatggcatttgagtttccttattgacaatcccaaacagtctacagtttttgatattctcttgggaatctctcaagattttgaaattgctggtaatactcttatgccagctttttctgttccacaggctactgccagatcttctgaaaatgcggaatcctctgcatgatctggaatttgtgttttctttcgcttgttcgtttgtttaattcaataaaggaaattaggcatgaccctcttgttgagtatgctctgcctatttgaaaatttccacaccttttttaattgtcgtaatgatgtgtgaagtgtgtgttatttt

SEQ ID NO: 34286 - DNA, 316 bp, Glycine max
  Clone ID: LIB3138-061-Q1-N1-D7
tgatttggttattatctacaaggctcaatgagaaagtcgacatgaaccaagagtagcactacattactactatccattgggccaatcaatctctctaccattggagcaaaacaacctccgattctggataggatatcccatgatcaccatttaccaccaaaattgggaaggcatttaaccttgacccaactaacttaatgaactgaaacaatgccgccgcaattttcttttggtttttttttcaaccgccaagttccggctttttccaaaaaggcctttccgaatccttgggccgaaacaaaatcttgtggccaag

SEQ ID NO: 34287 - DNA, 350 bp, Glycine max
  Clone ID: LIB3138-061-Q1-N1-D8
taaaaaactaaaaaaacatcaaccgaaggggtcatttctcccaatccgtttctgtttctgtcttccaggaacactgtcagtgagtgaaggatacgatgaacatcatgtctacccaccagtgtagttggcctgtgagaattcaggatcatcctgacaaaagaagtattaatagggctccattttccagaagatcagacttccttaatgttggataccatactcaaaaatatggtcatagtgccagaaaatgtaagcccgttttttccagttcagtgagcaacagtacggatccttcagattcagataacacttgatagaaaaaacctcaaaatggtgaaatgggaagagtg

SEQ ID NO: 34288 - DNA, 435 bp, Glycine max
  Clone ID: LIB3138-061-Q1-N1-D9
caagattgtttttaatgataagcttgtgttggctaacacacaagaattctttgatggaaattttccagtggattcttggttaccaatttttgtgaattgtctttatcctgtaagtcaattaccttcagaagctgtcgttgtaaatgttacatgtggtagtggacgtggtggtttacccaccactgcttggattagttctgcagttaacaatcgctcctcagatatcaacaaaaggattcgcacagcacttgggaaaggtaagaaaattgtttttcttactagagttgatccttttccagtagctttactggctgttctttttggcgttaaaaatgaaattctgagttctaacgccactaaccctatgctgacgcgacttcttgaaaactgtaagagtcttaaatatcttgttgatgagtgtccttttgcatttgt

SEQ ID NO: 34289 - DNA, 264 bp, Glycine max
  Clone ID: LIB3138-061-Q1-N1-E10
ctgatggtcatttgccgcagttaagctcgccggataccgttattccggtgctgctcaaacacattcaacttgatattgaggcaagaaggtagtagatatagacgtgacgtgactccgttagaaaaagagaatctatccctgtgtgtggttggggggtgtttttttttttttttttggattcgcagggggaaataacaactgaaatggggggaataaggtcccttcaactggttctgtatctggggttggtcgattcgaacttgg

SEQ ID NO: 34290 - DNA, 377 bp, Glycine max
  Clone ID: LIB3138-061-Q1-N1-E11
tcctaaggtagacgttccctctcgttttgttggcttagttttggagaattgtccttgtgcaaatcatagccatctcatattgggagatccttcgccagttgtgttctatcctataagtagttcagaagtccgttgtcttgttgatgttcctggtcagaaagttccatccatttccaatggtgaaatggcaaagtatttgaagacagtgatagctccacagattcctcttgagcttcatgacgctttcatagccgcagtggacaaaggcaacataaggacaatgcgaaacagaagcaagccagcagcttcttatcctactcctggagcccagcttgatggagatgcattcaacatggggtggaatgaccggggcatta

SEQ ID NO: 34291 - DNA, 359 bp, Glycine max
  Clone ID: LIB3138-061-Q1-N1-E12
gaggaagaagctgtgatttcatacactcagcatttgaatgccattgagagtggtaaagttgaaaatgtccctgcccctgccattgctattgactactggaggcttcccaaggatgcaactctcaaggatgttgtcactgtgattcgcgctgatgaggctcatcacagggatgttaaccactttgcttctgatattcatcatcaagggaaggaattaaaagaagctccagctcctattggttatcactgagtcattgttgtaaattttttaacaaaacgatatctagcctttgctgtctcgagactttctagctatttttaccatctggttcaataaaatttattttcagcgagcacttt

SEQ ID NO: 34292 - DNA, 301 bp, Glycine max
  Clone ID: LIB3138-061-Q1-N1-E2
cgacaagaagactgcgacctctcacaccagtgcacgcggttacacaggagatcagggagcccagggaatccggagcagtgacgacattcgaagttggtccctaccaagtccctcaactgtggactttcttcagcaccatccatcacaaccagcaacaaagtcatcgagcaaacgtagtgacggttctcgttctcagtgatcatccatcgcatttacacgacccagaaggcaacgctacttgaccgacacatacttgcatcacggaactacgcgcctcgagataatcccgcaacgccagata

SEQ ID NO: 34293 - DNA, 193 bp, Glycine max
  Clone ID: LIB3138-061-Q1-N1-E3
gtgcaacttaaccagggatacaaaaccctacttgcttactaaactgccagttcaaaagatccctttggttttgtagtcctggattttgacgtgtctaggttgtaatgatatcccttaaatcctacgtgtatgtgttgtattgatagtgattgacattttactgagccgtaattacaagcacagcgatttcatg

SEQ ID NO: 34294 - DNA, 344 bp, Glycine max
  unsure at all n locations
  Clone ID: LIB3138-061-Q1-N1-E6
cttgtttctcctgcaatcaacgacacccccccaaaaatgacnggagagacagtgaacccaaaagcttaccctttggccgatgcgcaactcgcaataacaatactggatcttgtgcaacaagctgccaactacaagcaactcaaaaagggtgctaatgaagcgaccaagacactgaacagaggcatctctgagttcgttgtgatggccgcggacactgagcctcttgagattcttctccatcttcctctcctagctgaagataagaatgttccctatgtattcgtcccatcaaagcaagcccttgggcgagcatgtggagtcacacggccagtgattgcatgttc

SEQ ID NO: 34295 - DNA, 111 bp, Glycine max
  Clone ID: LIB3138-061-Q1-N1-E7
attcaataaaggaaattaggcatgaccctcttgttgagtatgctctgcctatttgaaaatttccacacctcttttaattgtcgtaatgatgtgtgaagtgtgtgttatttt

SEQ ID NO: 34296 - DNA, 260 bp, Glycine max
  Clone ID: LIB3138-061-Q1-N1-E8
ctcgatcaaacacaaaatggaaaagaatgtggggattctcgccattgacatctacttccctcccgcttgcgttcaacaggaagcattggagactcatgatggtgccagtaaagggaagtataccattggacttggccaagactgcatgtctttctgtaccgaagtagaaagatgtcatctcaatgaggtttgacagtgggttactttctctttctttgaaaaagtattgggaattgatccctaaaacaaaaatccggtcg

SEQ ID NO: 34297 - DNA, 299 bp, Glycine max
  Clone ID: LIB3138-061-Q1-N1-E9
gacaaataatttgctatgtgtacaatactaaacaaaaacaaaacagatccaccaataaggagggtggtttttatcttttttcgaaaaacggaaataatttctacagaaatgacgaggagaaatatgaattaagggttgttaaacaacctctcgtcaaccttctttttaattctaaacgatggcatcgtgcctttcgatatataaaaaatcatcgattacgaaatgacattataaatgaaatttcaaaatctttttttatatacatgtcacagtgattgaaaagaaagaatatctgttat

SEQ ID NO: 34298 - DNA, 161 bp, Glycine max
  Clone ID: LIB3138-061-Q1-N1-F1
ggggggtggttgggaaaaagtggaatggcttccattttattccggaattaacaagcgtaccaaaccattttattttcctaagaattaaccagaaaggccttccaattgttgaacaaggccccaggcttttgattgttgcttttattggattcaaaacttta

SEQ ID NO: 34299 - DNA, 311 bp, Glycine max
  unsure at all n locations
  Clone ID: LIB3138-061-Q1-N1-F10
gtggccacagttggtattcctgagaatacaggtatatcattggcctgtgctatgaatagttcctttagggggcgcgccagttctgatatttacaccatctgctctcaagactgtgaattgtggaatcctgcttgcacaaaagcaatgactatgtcatttaatccaaacccgtgttctgatgcatggagtttggaatttctgaagcgtactggatttcattgcgatatcatttgtgtcactggatggactgccaccccaatgcangatgttcaagttacaattgattggtttatttcctctcaagaatgtgt

SEQ ID NO: 34300 - DNA, 211 bp, Glycine max
  Clone ID: LIB3138-061-Q1-N1-F11
tccttttccagtagctttactggctgttctttttggcgttaagaatgaaattctgagttctaacgccactaatcctatgctgacgcgacttcttgagaactgtaagagtctcaaatatctggttgatgagtgtccttttgcatttgtgaactagtatgtagtattttattcacttaaataaagcgcattactatgtgcaatgagtgtgttt

SEQ ID NO: 34301 - DNA, 399 bp, Glycine max
  Clone ID: LIB3138-061-Q1-N1-F12
gggcctcattggtacaagtgtttttaacaaacagcaacagtacagagcattttgatgcatgtaagtggacaaaatcagaaccacattcctgggaattgatcttcccaatagaggtatgtggtcctaataatggttttgaaatgtggagttctgagtgggcaaatcaaacttcatggcatttgagtttccttattgacaatcccaaacagtctacagtttttgatattctcttgggaatctctcaagattttgaaattgctggtaatactcttatgccagctttttctgttccacaggctactgccagatcttctgaaaatgcggaatcctctgcatgatctggaatttgtgttttctttcgcttgttcgtttgtttaattcaataaaggaaattaagca

SEQ ID NO: 34302 - DNA, 362 bp, Glycine max
  Clone ID: LIB3138-061-Q1-N1-F2
atcgtgcattcaatggccaccacagcagctctatccggaaccatggtgagcacctccttcatgaggaggcaacctatgaccaccacaagcctaaagacattccccaacgttggtgaagctctttttggtctgaaaagtggacgaggtggtcgtgtcacttgcatggcctcgtacaaggtgaagctcataaccccagaaggagaagtggagtttgaatgcccagatgatgttttcattgttgacaaggcagaagacgaaagcattgaacttccctactcgtgcaaggccggttcttgcgtttcctgtgttggcaaaattgtggaaagtaacgtggaccagtcagatggtagcttccttgatga

SEQ ID NO: 34303 - DNA, 355 bp, Glycine max
  Clone ID: LIB3138-061-Q1-N1-F3
ctcgagccgttttagcgctgcttcttctagatttaacgaagatgggtaaggaaaaggttcacatcagtattgtggtcattggccatgtcgactctgggaaatccactaccactggtcacctgatttacaagcttggaggcattgacaagcgtgttattgagaggtttgagaaggaagctgctgagatgaacaagaagtctttcaagtatgcctgggtgctggacaaacttaaagctgagcgtgaaagaggaatcaccattgatattgctttgtggaagtttgaacaacaaagtattattgcacaattattgatgcgcctggaccataaggattcattaagaatatgattactggg

SEQ ID NO: 34304 - DNA, 306 bp, Glycine max
  Clone ID: LIB3138-061-Q1-N1-F4
ggaaaattgaattcaatctgaaacgccctgtggtcatagttccaattccgaaagaatttcggggtgtttccgatttccaaacactcactcacacccatccttctttctttcaccgcaatattttttcctttttgaatcaaacttcggtttcttaatttctcattatcatatcttaaatcttcagttttggatccacacaataatttgggggaaattgaattgaagcatcatcatcatcgtcatggatagcataatgagcaagctccgcaacctcgacgcgtaccctaaaatcaacgaggatttcta

SEQ ID NO: 34305 - DNA, 351 bp, Glycine max
  Clone ID: LIB3138-061-Q1-N1-F5
caagaagcttatcttgtcaatctcgtaaatgtgttacgagaattgtatttgcacagtccagaggaagctcgccaattgagaaggaaagctctctctcgtattgaatggctgcaaaaagctgatgtgcctaccatagcacagattgaagagttccattcgatgcagaggatgatgaatgctcctgattcaaatgataatattgatttactgttgagcattgatttgttgggtttacaaggagcaggtaaagcttttccaaacaaaattgtttttgatgataagcttgtgttggctaacacacaagaattctttgatggaaattttccagtggattcttggttaccaattttt

SEQ ID NO: 34306 - DNA, 290 bp, Glycine max
  Clone ID: LIB3138-061-Q1-N1-F6
ggccacagttggtattcctgagaatacaggtatatcattggcctgtgctatgaatagttcttttagggggcgcgccacttctgatatttacaccatctgctctcaagactgtgaattgtggaatcctgcttgcacaaaagcaatgactatgtcatttaatccaaacccgtgttctgatgcatggagtttggaatttctgaagcgtactggatttcattgcgatatcatttgggtcacttgatggactgccaacccaatggcaagatgtcaggttacaaattgattggttt

SEQ ID NO: 34307 - DNA, 275 bp, Glycine max
  unsure at all n locations
  Clone ID: LIB3138-061-Q1-N1-F8
attaaaagtagtagtagccaaaggcattgccatcctccatcttcatctttgattaatgctgcttcagcttcaaccttaacagtgaagtaaaaagctttgacagaaactcaggttctgaaatataggggtttagaattatgtaagcaacccaagataagcaaaaggaagaaaaatggttgctttgttttgtctctgttcgttgtaaaatgctttctttagtaaatgggaagttcctttgtttctaaaaaaaaaaaaccaaaaataattctttnggg

SEQ ID NO: 34308 - DNA, 234 bp, Glycine max
  Clone ID: LIB3138-061-Q1-N1-F9
gttggatctgaaaatttctcaatctaaaattgcacttcccaagaacacagttggaggaaccattctgcgtagtgatctattggcaaattttttggcagagggcaattttagagcaagtgttgatttgcagcgcactcatcgtattagaagaatgattaaaatggtggccacaagtggtattccttgaaatacaagtatatcattggcctgtgctatgaataggtcttttaaggg

SEQ ID NO: 34309 - DNA, 359 bp, Glycine max
  Clone ID: LIB3138-061-Q1-N1-G1
aaattgaaaagctttctagctggtcataacatcaccattactgatggtattgacaaaactggtgcaactttgcaatttagaaagttagcagattgtgattttctcaagagaaactttaagcagatgtctaatggtttgtgggtggcttctgaagacaaggcgagtttatgggcacaacttcattatgtttcgtgtaataatctggaaatgcaagaagcttatcttgtcaatctcgtaaatgtgttacgagaattgtatttgcacaatccaaaagaagctcgccaattgagaaagaaagctctttctcgtattgaatggctgcaaaaagcttatgtgcctaccatagcacaaattgaaaa

SEQ ID NO: 34310 - DNA, 254 bp, Glycine max
  Clone ID: LIB3138-061-Q1-N1-G10
aaacagtctttgtggtggtgatgaaaaattgatgcgtgaaaggacgcacctgctgttggcttgttgttcaaggatggcaatttgtaagaaagatgtttggagagttgaatgtggaatcccttctggatttccgctcacagttatttgcaatagcatttttaatgagatgctcattagatatagctatgaaaaattactgcgccaggcttaagctccaagtattgttttacaatccttcacaaaattttgttctt

SEQ ID NO: 34311 - DNA, 108 bp, Glycine max
  Clone ID: LIB3138-061-Q1-N1-G11
aagagtctcaaatatctggttgatgagtgtccttttgcatttgtgaactagtatgtagtattttattcacttaaataaagcgcattactatgtgcaatgagtgtgttt

SEQ ID NO: 34312 - DNA, 391 bp, Glycine max
  Clone ID: LIB3138-061-Q1-N1-G2
attcacagttatactctctctctctttgtcgcttggatcactgatctcatctcaattttcagatatgtcgacatctgataagccagaagtggtggaaaggggtagcaaggatgaaaaacacaaggaagatgatcaagaggaggggaagggtggattcattgagaaggtgaaggatttcattcatgacattggtgagaagattgaggaagctattgggtttgggaagccaactgctgacgttactgcgattcacattccatcgattaatcttcacaaggcagatcttgttgttgatgtgctcatcaagaacccgaatccggtgccaatccctctgattgacatagattacttggttgacagtgatgaaaggaaagctagttctggattgata

SEQ ID NO: 34313 - DNA, 85 bp, Glycine max
  Clone ID: LIB3138-061-Q1-N1-G3
ccctaagcatcaacggaggggaaaagattggagttgttggtccaacaggaagtggaaaatcaactttaattcaagttttcttcag

SEQ ID NO: 34314 - DNA, 378 bp, Glycine max
  Clone ID: LIB3138-061-Q1-N1-G5
ctcctaccccacaagatgagatgagggcaggaatgagctactttcatggagacaatttggaaaggtgtaccacagtttctgcgtcgggtagatacagctctgaagaacattggaattaatgaacgtgtcccatataatgctcctgttattcagttctcttcttggatgggaggagaccgtgatggtaatcctagagtaacccctgaagttacaagggatgtgtgtttgctggctagaatgatggctgctaatatgtacttctctcagatagaagatctcatgtttgagttgtctatgtggcgttgcactgacgagctacgtgttcgtgctcatgaactccataggtcctcaaagagagatgcaaaacattatattgag

SEQ ID NO: 34315 - DNA, 274 bp, Glycine max
  Clone ID: LIB3138-061-Q1-N1-G6
gttacatttccgaataccattgtgcaaatggaacccaacattgattcaaagtttcaacttttggagtccacttcccattgggattttggtcaaagggaaaaacttgcaatgggttaaggttatttaacatttgcctcttgtggctttgcattaaagttcccttccacttcatttgttggattttggtttgcaaaaaaccaaagggttatttgtgggtttttttgaaaggatgtttaacgttgttattaacgttaatcagccccaaaagaaaaat

SEQ ID NO: 34316 - DNA, 353 bp, Glycine max
  Clone ID: LIB3138-061-Q1-N1-G7
gagacagaggcacagatagaaaatggtttcggggtcagggatctgtgccaagagggtaattgtggacgcacgacaccacatgctggggaggctggcatcgatcgtggcgaaagaacttctgaatgggcagaaggtggtggtggtacgctgcgaggagatttgcatctccggtgggctcgtcaggcagaagatgaagtacttgcgtttcctccgcaagcgcatgaacaccaagccctctcacggccccatccatttccgtgcacccggcaagatcttctggcgcaccgttcgtgggatgataccacacaagacaaagcgcggggaagctgctcttgcgcgattgaacgtgtatg

SEQ ID NO: 34317 - DNA, 240 bp, Glycine max
  Clone ID: LIB3138-061-Q1-N1-G9
attgaattctgcaaactggagaggataaggctttgcatttcatttgagagagagagcgtcttacctttccattatcaaaatggctgtttcggctatcacaggagcgaggctaaccctagggatagggttggcgatacctctttcctttcccacgcgctctcgaaccgtcgcaatggccgtatccgtcgaccccaagaccgacaacaaactcactcttaccaagtccgaagaagctttcgc

SEQ ID NO: 34318 - DNA, 390 bp, Glycine max
  Clone ID: LIB3138-061-Q1-N1-H10
atgataaacctctctctcttctcttgttaatcaattagaatcagattctttcttctttctctctccgttttagttgctatggaaaatactaagaagcgagaggtgagggagggtgaagatgatgaagatgaaatgaagatggagaagttttacgcgctgttaaggagcttccgagacgcgcgtgatcggcggcgaagggagttggaaaaagaaaaacacgagagccgccacagctggaagaagatgaagaccaccgccgcaacaaccaaggacaataaatcacaagtttcttttgaatttcaagacttcaccaccgagattcatttcaaaaagccacctttgacttttgcaaattcaattgcattatgtgacacttggatcaaagacgac

SEQ ID NO: 34319 - DNA, 453 bp, Glycine max
  Clone ID: LIB3138-061-Q1-N1-H11
ttcgaagctcatcaacaaaatggctgctactcgactctactcaaaaggccgaatccttggtcacaagcgaggaaagaggaactcgaggcccaaccagtctcttgttcagatcgagggtgtcgacaaccaggaggccgccaagcactacctcggaaagcgaattgcctacgtctacaaggccaagagggagatcaacggatcgagggttcgagttatctggggccgagttacgagaccacacggaaactctggtgtcgtcaagtcgaagttccgagtcaatcttcccgcccgagtgttcggtgcttcgtgccgaatcatgctctacccattcgccatctaaaccgactacccgcacagcgatatgatcgctaattctacctacctctaacacgttacgaccttgatgtaacaagttaacatgttccgctttttttcgaggcatgcagacattgc

SEQ ID NO: 34320 - DNA, 231 bp, Glycine max
  Clone ID: LIB3138-061-Q1-N1-H12
accgagttgaatcgcgacgaagatgaagaccgaatcgcgttcgaaagaggaaacaaagacgtatcaagaatggtttaatttggcagattcagatggagatggtcgaatctctgggaacgacgccacaaagttcttcgctctcttcaacttgtcgcgctcgcaactgaagcaacttttggctctcgccgatgtcaaaaagcaaaggtttttgggcttcacaaaatttggtac

SEQ ID NO: 34321 - DNA, 360 bp, Glycine max
  Clone ID: LIB3138-061-Q1-N1-H2
agcatccacagcattgttttcacccaaggaaatggtggtcctggcaccatcaagaagatcaccaccattgaaggtgacaaaaccaagtatgtgctgcacagagttgatgcaattgatgaggctaactttgtatataacttcagcataactgagggcactgccttggctgacacattggagaaggtctcattcgagagccaattggtggaagctccaaatggaggatccattaggaaggtaagtgtccaatttttcaccaaaggcgatgctacgcttagtgaggaggagctcactgccaacaaagccaagatccaagggcttgtaaagctagttgaagggtaccttttggcaaatcctgat

SEQ ID NO: 34322 - DNA, 333 bp, Glycine max
  Clone ID: LIB3138-061-Q1-N1-H3
gaagatatcaacaagcataccgagccttcaatcgtatcaggaacacggagctcatctctgctcgagagctcttctacgctcattgccaaattgtggctgagactgagatcttcggtggcaagtcacttggcagaagagtgttggagcttttcacagtaccacgaatcaagccgtgcgactgtctcttcctctattattgttatcgctcaacagttctctgggatcaacatcatggcgttttatagctcaaccatctttcaagaggcaagttacagcgtgaaacagtcgctgttggcttctttcggctttggactcgtcacattcgtcttcgca

SEQ ID NO: 34323 - DNA, 248 bp, Glycine max
  Clone ID: LIB3138-061-Q1-N1-H4
ctcgagccgctcgagccgcaaagcacactcaagacatggggtggaaagaaggagaatgtcgccaaagctcaagaggcatttctggcaagatgcaaggccaattctgatgctactctgggaaagtatgttggtggaagcggaagtggcttgacttctgagagtttgtatgtcaagaactacaagtattaaacttctaaaaagggtggttggttcttcctttggaaacctcaattcatgcctttgggtca

SEQ ID NO: 34324 - DNA, 287 bp, Glycine max
  Clone ID: LIB3138-061-Q1-N1-H5
tcctaaagttggaaattcggttggtgctggacccgttcgagccgtttcggttcgaggattgatgtgggccagtaattacaaattcgtggcagcacgttttgcgtggcattttttccattaattccgaccatccaatttgctactcctacttgtcaaaacaacaaacgcgaacacagaaaatactagtagtatcaaatttaagaacccgagaccaagagtgctagaaaaatgaaataaaacactacatataaaattagagagaacgggagcgtgagtgtgtctgtgtc

SEQ ID NO: 34325 - DNA, 261 bp, Glycine max
  Clone ID: LIB3138-061-Q1-N1-H6
tacttactacatctaatttcatttgcctcttttagtagccatggttttccaaacaaacaataatcctcactttatcttgtttcccttaatggctcaagggcatatcattcccatgatggacatagcaagactattggctcaccgtggtgtgattgttacaatattcaccaccccaaaaaatgcattacgttttaaatctgttctttctcgggctatttcattaagccttcaaattcgcctattaccacttcacttttcatt

SEQ ID NO: 34326 - DNA, 261 bp, Glycine max
  Clone ID: LIB3138-061-Q1-N1-H7
ggtgtggtacccatactgagtatataatttcacttgatgctgatgacttatcccaaggaagcaatgcttatgttggaaagctaagctcggattttcttggcaccaacttcacaatttatgacagccagccaccccatagtggtgcaaaaccatcaagtggcagggccagccgtcggtttgccagcaagcaaataaacccgcaagttcctgcaagtaattttgaagtggggcaggtctcctacaagttcaaccttttgaaat

SEQ ID NO: 34327 - DNA, 241 bp, Glycine max
  Clone ID: LIB3138-061-Q1-N1-H8
gcaagctaggactcaaagagaaacttacaatggctctcgagtggagtaaattatacaaaacagaccaaaaaactggatttactttgacattgtaataacttttccatcaggtagaataactatgcaatcaatattgcgcgtgggatccactttaaggaatactaaagccgggattaaaatacattctccacacctgaggcctacgattttgacttatagtgggttattatatacgtgaaag

SEQ ID NO: 34328 - DNA, 382 bp, Glycine max
  Clone ID: LIB3138-061-Q1-N1-H9
attccaacctacccttattcttcttcttcaattccacacccatcatggaccgttttccgatcctctttctcctcgccaccctcatcaccctcgcctccggtgcccgccacgatattctccggttaccctccgaagcatccacttttttcaaagcacccggtggcgatcaaaacgatgagggcacgaggtgggccgttttaattgccggttccaatggctactggaattacaggcaccagtctgatgtttgccatgcgtatcaactactgaggaaaggtggtctcaaagaagaaaatattgttgtatttatgtatgatgacattgctttcaacgaagagaacccgcgacctggagtcattattaacagtccacatggaaatga

SEQ ID NO: 34329 - DNA, 327 bp, Glycine max
  Clone ID: LIB3138-062-Q1-N1-A1
tcaatccaggttgagtgagtgtagtggggagtccaatgctctagttaagggtattcaaattgatactaaagaaaactgctgtcaatatgatgtagaagttgaagatagcattaacaaaaaggactgtggaaatgttggtgaagacattcagcaacatcaagacataagtttagatgcttatactgaatcaagttatggaaaattggatctgaattctgtacaaaagatgtttcttaagggaatgtgtagttttggcagtactgatttctgacattttttgagatttacccactgctcatgtgcgtcaatgcaagcacgattggaagc

SEQ ID NO: 34330 - DNA, 268 bp, Glycine max
  Clone ID: LIB3138-062-Q1-N1-A10
gagagagagagagggaaggggatgagagagggaggatgaggggcggtgaggagcgatcgacagggattcgaaagaagggaagcggtgtgagacaatggctggtcctggacggcttaggagagacagaggtggtcgaggccgggaagcacgccatcatgaggaggacgggacttccagcgcgtgacctgcgtatattggaccctatcttgtcatacccatctacccttctgggtcgtgagagggccatcgtcatcaactcggagcacat

SEQ ID NO: 34331 - DNA, 286 bp, Glycine max
  Clone ID: LIB3138-062-Q1-N1-A11
ctgctatttcaagttctcgtctttggggcaccatggcgaagaccacttcacaggtgaccgtgagtattcaaagggctactgtgagggcaccatagagttaagcttcttgcctgctgagctcatgaccgtttctgatggacctgacaagacgaggactcctagtggacataactagtgagcggatcacacttatacaaaatgatacaattagcaactggctgatagttgctgcttggctgataggctcatggctagtcaatagtgacatgtctaggattgcagcagt

SEQ ID NO: 34332 - DNA, 169 bp, Glycine max
  Clone ID: LIB3138-062-Q1-N1-A12
ggtggccacagttggtattcctgagaatacaggtatatcataggcctgtgctatgaatagttcttttagggggcacgccagttctgatatttacaccatctgctctcaagactgtgaattgtggaatcctgcttgcacaaatgcaatgtctatgtcatttaatccaaac

SEQ ID NO: 34333 - DNA, 273 bp, Glycine max
  Clone ID: LIB3138-062-Q1-N1-A2
gtagtagtagattattttgatggtacttttatggtaatggagcacatggtgtatgacctgaaagggctgattgaggttaaaaagcatccctttagcatgagtgaaattaaatccttggtacggcaacttcttgaaggtgtcaagtatctccatgataattgggttatccatagggacttgaaatcatcaaacatcctgctgaaccatgatggggagcttaaaatatgccactttgggttgtcaaagcaatattgaaacccactgaaaccatat

SEQ ID NO: 34334 - DNA, 318 bp, Glycine max
  Clone ID: LIB3138-062-Q1-N1-A3
ggaacatgttaatctcttacaaacaaaattgtttttgatgataagcttgtgttggctaacacacaagaattctttgatggaaattttccagtggattcttggttaccaatttttgtgaattgtctttatcctgtaagtcaattaccttcagaagctgtcgttgtaaatgttacatgtggtagtggacgtggtggttttcccaccacttgtttggattagttctagtattaacaatcgctccttatatatcaacataaggattctcacagctcttgtgtaaggttaaaaatattgtttttttactaattatttatctct

SEQ ID NO: 34335 - DNA, 351 bp, Glycine max
  unsure at all n locations
  Clone ID: LIB3138-062-Q1-N1-A4
caccattgaattttgattctagcaagcagagctnttgtcagttttctattgaccttctcggtggaagaatcttagtggacaaaactggagattggatcacacttatacaaaattctccaattagtaacttgttgagagttgctgcttggaagaaaggctgtttaatggtcaagattgtgatgtctgggaatgcaacattcaaaaagagtgattgggcctcattggtacaaagtgttttaacatacagctacagtacagatcattttgatgcatgttagtggacaaaatcagaaccacattcctgggatttgatctttccaaataaaagtatgtggtccctaatatggtttt

SEQ ID NO: 34336 - DNA, 353 bp, Glycine max
  Clone ID: LIB3138-062-Q1-N1-A5
cgacattcttccccgacaaatttggagttagaccaattcatgacaatccagatgaaatgactgctgctttgtatctacaagtcagtatagttagccaggctttgatatttgtcacccgttcgcgcagctggtccttcatcgaacgccctggattgctgttagagactgctttcgttattgctcagctgattgctacagtaatagcagtgtatgccaactggggctttgcaaggatccaaggaattggttggggttgggcaagagtgatttggctctacagtattgtcttctattcccacttgacatcatgaattcgccatccgctacattttgagtggcaaacatgaacaatc

SEQ ID NO: 34337 - DNA, 317 bp, Glycine max
  Clone ID: LIB3138-062-Q1-N1-A6
cacacaacaatttcttggtctttttcttctcaatgcaaagctcttcacaaatcagttcctttggctgcttcacttgcaattcttctctggtcaacccctgcacatgctggtttcatgtcaagaatttctggaatagaggctattcctggtcctcagctacctcagattgactttctcaagcagctcaatgaagaaaaccagaagaaatatgctgagaatgatgagagaattaaatcatcccccttgatgaaagaactgcttgagaaatccaagttgaacaaagagaagaaccgttaagaaattgagaacaaatactg

SEQ ID NO: 34338 - DNA, 287 bp, Glycine max
  Clone ID: LIB3138-062-Q1-N1-A7
ctgcagtctcgatattttttgagacaatgccatatcgattgaatgaaagtacaggatacatcgactatgaccagatggagaaatctgctacactcttcaggccaaaattaattgttgctggagctagcgcttatgcacgtctctatgattatgaacgtgtacgcaaggtttgcgataaacagaaagctatactattggcagatatggcacacatcaatggattggttgcagctggtgtcatcccatcaccctttgattatgctgatgtagttactaccacaactcac

SEQ ID NO: 34339 - DNA, 336 bp, Glycine max
  Clone ID: LIB3138-062-Q1-N1-A8
atcaaagtttcttcctttctctgctctttgccttctctgacacatttggtgccttgtagagcgtgttttggcaggaaggtggtatggcgaaggacgttgaggttgctgagcgtggctccttctctgggaaggactaccaggacccttcaccagcaccactcattgatgctgaggagctcacaaagtggtccttttacagggctctcattgctgaattcattgccactttgctcttcctctacattactgtgctcacagtcatagggtacaagcaccagactgacctcaaggaaaatggtgaaatcttgggtggggttggcattcttggcattgcat

SEQ ID NO: 34340 - DNA, 362 bp, Glycine max
  Clone ID: LIB3138-062-Q1-N1-A9
gatgaagaacacatacacttgtgtagagttccatgattaccatcagttgatagccattttaaaagatggtgatacattttgtgtgagtaagagaaatccaccttttgataaagggttggagttaaaacaatgcggggttcatttaatctttgaaggggatgatgattatgatggatgggaagaatcattggacaatgacctacaatctgtcttataaaaattagccaactttttcaagacttatgaagatgagagtgtcaggaatctgaatgaattggagatgatgggacaagtaccaagaacttttcttgttacacttagaagcaattttatttttttttttctgatttgagctattcttt

SEQ ID NO: 34341 - DNA, 345 bp, Glycine max
  Clone ID: LIB3138-062-Q1-N1-B10
atggacaaaaccatactccagggaatatgcagccttcccagaacctgtctaactcggatgtgttacgagaattgtatttgcacagtccaaaggaagctcgccaattgagaaggaaagctctctctcgtattgaatggctgcaaaaagctgatgtgcctaccatagcacagatagaagagttccattcgatgcagaggatgatgaatgctcctgattcaaatgataatattgatttactgttgagcattgatttgttgggtttacaaagagcaggtaaagcttttccaaacaaaattggttttgatgataaacttgtgttggctaacacacaagaattctttgatg

SEQ ID NO: 34342 - DNA, 328 bp, Glycine max
  unsure at all n locations
  Clone ID: LIB3138-062-Q1-N1-B11
aaagattttatccaattgaaattttaaaaatgactgggataaacttaagaattcaattattgaaattgaataagtaaacaatttaattggattggtcgaatggtatcaaaaaaatggagtactaactcccatttcttatttattattgaattaaccgatcaacttgctttgttatcgaacatttctttttgatttcaaaaattttccggaaaaaatttgaatctatttttatatgcgaatcaatcctactacttctggtcctgaggtttctgcgcttgaaaaaaaaaataattatanaattttttattattttttttattatttttaa

SEQ ID NO: 34343 - DNA, 364 bp, Glycine max
  Clone ID: LIB3138-062-Q1-N1-B12
ctctgattctctccatatattatctcaaacccctctcacagaatgggaagtgctggaggaactgactatggtgcatacacttatgagaatcttgagagagagccttactggccatcagagaagcttaagatttccatcactggtgctgggggttttatcgcgtcacacatagctcggcgcctcaagacagaggggcattacattattgcttctgattggaagaaaaatgagcacatgactgaggacatgttctgtgatgaattccatcttgttgatctcagggtcatgaataactgcctcaaggttacagagggggttgatcatgttttcaatcttgccgcatacatgggtggggatggggttt

SEQ ID NO: 34344 - DNA, 114 bp, Glycine max
  Clone ID: LIB3138-062-Q1-N1-B2
ctcaacaaatagcaccaccctttactgttcccacatagaaaagcttgaactttggaatttcctagctgaaattcgctcgttcggttactgggtcggctccgagctatgcgtgga

SEQ ID NO: 34345 - DNA, 243 bp, Glycine max
  Clone ID: LIB3138-062-Q1-N1-B3
ataaaaaaaaatttattatataaaataaataaaaatttaaaaaaaaataaatttaaaaaaaaaaaaaataaaattaattaaaataaaaataaaataaaaataggggcggccttcttttattaatctcttcaccccggaatttatttccgaaccggtccttgtaggcttaccagttttccttttagtaaattttattaaaacttggcttattaatggtcattgtttttccctgttaaaaattgt

SEQ ID NO: 34346 - DNA, 295 bp, Glycine max
  unsure at all n locations
  Clone ID: LIB3138-062-Q1-N1-B4
ttttcttaagtgtctntattatgtccttgcgaaaactactctttttatcttcctctttccagtgaagttgaagtcttgcccttctctcttcaacttcaaacacaagacatcatcattcatggctgcctccgtctccactgtcggagctgtcaacagagctcttttgaacctgaatgggtctggacctggggtttcagcttccagttcatccttctttgggagcagcttgaagaaagttattggctcaagggtccccaacacaaagatttcctctggaagcttcaaagattgtgct

SEQ ID NO: 34347 - DNA, 131 bp, Glycine max
  Clone ID: LIB3138-062-Q1-N1-B5
gtgggcaaatcaaacttcatggcatttgagtttccttattgacaatcccaaacagtctacaaggttttgatattctcttgggaatctctcaagattttgaaattgctggtgatactcttatgccagctttt

SEQ ID NO: 34348 - DNA, 162 bp, Glycine max
  Clone ID: LIB3138-062-Q1-N1-B6
ttaatggttccggggccaccattaaaaagctcacttttgttgaggatgggcaaaccaagtacgtgttgcacaaagttgaagcaattgatgaggctaattggggatacaactacagcgttgttgggggtgtggggttgccagacacagtggagaagatctcat

SEQ ID NO: 34349 - DNA, 321 bp, Glycine max
  Clone ID: LIB3138-062-Q1-N1-B8
caagtgttgatttgcagcgcactcatcgtattagaggaatgattaaaatggtggccacagttggtattcctgagaatacaggtatatcattggcctgtgctatgaatagttcttttagggggcgcgccagttctgatatttacaccatctgctctcaagactgtgaattgtggaatcctgcttgcacaaaagcaatgactatgtcatttaatccaaacccgtgttctgatgcatggagtttggaatttctgaaacgtactggatttcattgcgatatcatttgtgtcactggatggactgccaccccaatgcaagatgttc

SEQ ID NO: 34350 - DNA, 363 bp, Glycine max
  unsure at all n locations
  Clone ID: LIB3138-062-Q1-N1-B9
cacaagttgatcgccggtgtcgccggcgtcggattcctcgaaacctcgtacctcacttaccttaaactcaccggcgcagacgccttttgccccgtcggcggcggcacctgctctaaaatactcgacagtgattacgccctcgttttcggtattcctcttcctctgattgggatggctgcgtatggcttggttgctgcacttggtgttcaattggcttcgaagaattttcgttttgggattgagaaaccaactgctgaagcagtgttgcttggagccacaacctccatggcagctgctagtgcgtatnttttgtacattctaaccaccagattctctgactcgtcttgctcctactgcttactt

SEQ ID NO: 34351 - DNA, 468 bp, Glycine max
  Clone ID: LIB3138-062-Q1-N1-C1
caacagtacagagcattttgatgcatgttagtggacaaaatcagaaccacattcctgggaattgatcttcccaatagaggtatgtggtcctaataatggttttgaaatgtggagttctgagtgggcaaatcaaacttcatggcatttgagtttccttattgacaatcccaaacagtctacagtttttgatattctcttgggaatctctcaagattttgaaattgctggtaatactcttatgccagctttttttgttcacaagctactggcagattttctgaaaatgccgaaatcgtctcatgatctggaattttcgttttctttcgcttggtcgtttgttaattcaattaaggaatttttgctttcccttttgtttagtttgttttgctttttaaaatttcacacccttttaattgtctattatttgtgaagtgggggtttttttttatttttatttttaattttttt

SEQ ID NO: 34352 - DNA, 367 bp, Glycine max
  Clone ID: LIB3138-062-Q1-N1-C10
atttcaatctctctctctctctgtctctctctctctagacttagattttgtgaatggctgaagtggaagagggacaggtcatcggcgtccacaccgttgatgagtggaagctgcaactccagaatgcaaaagactccaaaaaactgattgtggtggattttactgcttcctggtgtggtccatgccgttttatggccccagttcttgcagagattgcaaagaaaactcctgaattgatcttcctcaaagtggatgtggatgaagtgaggcctgttgctgaggaatattccattgaggccatgccaaaccttctctttttgaaagatggcgagatcgtggacaaggtggttggtgctagtaggatgac

SEQ ID NO: 34353 - DNA, 353 bp, Glycine max
  unsure at all n locations
  Clone ID: LIB3138-062-Q1-N1-C11
cccatgttgagtccaaaaccagtctgccagaatgagagttctccctttcccacaagtacctcctcccagtccaatcctgaaagtcactgctcagatcaacctcatgactgttccaatgatgctacttgtcttgatcaaaatgtaaaggataatactgattcagatcacgcaaggcatgagtctcctgctgctgatcagagtgctggtaataatttatgccatgatgctgcaaatcatgttaatagtagtgcatatggaagcatggacagtggaaatgatggacatgctacttcagctatagtatccaagaacacctcagatggtttcagtgatagtggntgtcataattatga

SEQ ID NO: 34354 - DNA, 325 bp, Glycine max
  Clone ID: LIB3138-062-Q1-N1-C12
gttgaatgtggaatcccttctggatttccgctcacagttatttgcaatagcatttttaatgagatgctcattagatatagctatgaaaaattactgcgccaggctaaagctccaagtatgtttttacaatccttcaaaaattttgtttctttgtgtgtgtatggtgatgataacttaattagtgttcatgaatatgtcaagccttactttagtggttctaaattgaaaagctttctagctagtcataacatcaccattactgatggtattgacaaaactagtgcaactttgcaatttagaaagttagcagattgtgattttctca

SEQ ID NO: 34355 - DNA, 329 bp, Glycine max
  unsure at all n locations
  Clone ID: LIB3138-062-Q1-N1-C2
ggcaacagtgagttcaccattgaattttgattctagcaagcagagcttttgtcagttttctattgaccttctcggtggaggaatcttagtggacaaaactggagattggatcacacttatacaaaattctccaattagtaacttattgagagttgctgcttggaagaaaggctagttaatggtcaagattgtgatgtctgggaatgcaacagtcaaaaggagtgattgggcctcattggtacaagtgtttttaacaaacagcaacagtatagagcantttgatgcatgtaagtggacaaaatcaagaccacatttcctggaattgatct

SEQ ID NO: 34356 - DNA, 332 bp, Glycine max
  Clone ID: LIB3138-062-Q1-N1-C3
attccccctgctgtccctggaattatgtttttgtctggtggacagtctgaggttgaagctaccctcaatttgaatgccatgaaccaatctccaaacccgtggcacgtgtcattctcgtatgccagagccctccaaaacactgccttgaagacatggggaggccgcccagagaacgtgatggcagcacaagatgcactcgcattccgtgccaagtccaactcactcgctcagcttgggaagtacactggtgagggtgaatccgaggaagccaagaaggaattgttcgtcaaaagctactcctactaagatgtttgcagtgaatatgatacttg

SEQ ID NO: 34357 - DNA, 305 bp, Glycine max
  unsure at all n locations
  Clone ID: LIB3138-062-Q1-N1-C4
cagtccttggcttcaagagtggcatcttcctctaggagcagttgtatgtccgcttgctgagcctcctgatggggaagaggtgcctatagttaattttgctccagctagtgttgtccgctgcaaaagatgtcgcacatatgtgaatccttatatgacatttacggaagctggaagaaagtttcgttgcaacgtctgtaccttgcttaatgatgtgcctagtgagtattatgcacaattagatgcaactggaaaaagagtngacataaatcaacgacctgaacttacaaaaggggacctgtaaattt

SEQ ID NO: 34358 - DNA, 340 bp, Glycine max
  unsure at all n locations
  Clone ID: LIB3138-062-Q1-N1-C6
tctcaatcgttttctacataatacaaacctctctaatttttgaagcttattatacccaatctcgatatgcagatcttcgtgaaaaccctaactggcaagacgatcaccttggaggtggagtcctctgacaccatcgacaacgtgaaggccaaaatccaagacaaggagggcattcctccggatcaacagcgtttaatcttcgccggaaaacagctcgaagacggcagaaccctcgccgactacaacatccaaaaggagtccacgctccaccttgttctccgncttcgcggcggcatgcatatcttcgtcaaaacccctactggcaaaacaatcacgctag

SEQ ID NO: 34359 - DNA, 234 bp, Glycine max
  Clone ID: LIB3138-062-Q1-N1-C7
caaacttcttcttggaatgtcccttcctaaataaccctcaaacaaaagccaccttaacatctcttctctgaaaattctctttagagagatagagagatagagagagagagaaagaaattaagaaaaaatggcagcctgcactgtctactcaacacaatctctgagcacaaattgctccatctcaaccccatcaaagacacagctgagttctttcaccaaaaacaggtagttttc

SEQ ID NO: 34360 - DNA, 300 bp, Glycine max
  Clone ID: LIB3138-062-Q1-N1-C8
ctcatcattccgtactctcgggaagttacttcctcttccctctcactctcaatggggtctccatttcctcgcccacgctcaccgactccaccagatgaagaaaaggccatgtggggtatatgcatccctctccgagagtggagagtattattcccaccgaccgccaactcccctactagacaccgtcaactatcctattcatatgaagaatctctctgccaaggagctgaaacaactcgcggatgaactgcgttctgatgttattttcagtgtttctaagactgggggccatttgggctc

SEQ ID NO: 34361 - DNA, 419 bp, Glycine max
  Clone ID: LIB3138-062-Q1-N1-C9
gcagcagtcaaaaggagtgattgggcctcattggtacaagtgtttttaacaaacagcaacagtacagagcattttgatgcatgtaagtggacaaaatcagaaccacattcctgggaattgatcttcccaatagaggtatgtggtcctaataatggttttgaaatgtggagttctgagtgggcaaatcaaacttcatggcatttgagtttccttattgacaatcccaaacagtctacagtttttgatattctcttgggaatctctcaagaatttgaaattgctggtaatactcttatgccaactttttctgttccacaggctactgccagattctttgaaaatgcggaatcctctgcatgatctggaatttgtggtttcttttcgcttggtccgtttagttaattcaaataaaggaaatt

SEQ ID NO: 34362 - DNA, 342 bp, Glycine max
  Clone ID: LIB3138-062-Q1-N1-D1
ccattaacgggtggtgcctctcttccatctccccagccaaaacgctctctcaagaatgccacattaggcccttctgtcttcgcaaccgttagcactccttcttctccttcttcttcttcttcttcttccttcccttctctcattcaagacaggcctgtctttgctgcccctgcccccatcatcaccccaactgtgagagaggatatggcaaaggtatacgagcaagctattgtagaactccaaaaattgttgagggagaagagtgaactcaaagccacaactgctgataaagtggagcagattacagcttcttttggaacatcatcatctgatggcatccca

SEQ ID NO: 34363 - DNA, 297 bp, Glycine max
  Clone ID: LIB3138-062-Q1-N1-D10
aatcgctcctcagatatcaacaaaaggattcgcacagcacttgggaaaggtaagaaaattgtttttcttactagagttgatccttttccagtagctttactggctgttctttttggcgttaagaatgaaattctgagttctaacgccactaatcctatgctgacgcgacttcttgagaactgtaagagtctcaaatatctggttgatgagtgtccttttgcatttgtgaactagtatgtagtattttattcacttaaataaagcgcattactatgggcaatgagtgtgtttaatatt

SEQ ID NO: 34364 - DNA, 162 bp, Glycine max
  Clone ID: LIB3138-062-Q1-N1-D11
atcagatgctggatccagaatactcggaagctcaacaagctcaacattcagcttcaaagtcaccagctgccattttatcagattctgagagtggagatgccaagttaaatacttcatcaaaggttactgatcatgagacgaacaaaacaatttctgagcacc

SEQ ID NO: 34365 - DNA, 378 bp, Glycine max
  unsure at all n locations
  Clone ID: LIB3138-062-Q1-N1-D12
cgagaattgtatttgcacagtccagaggaagctcgccaattgagaaggaaagctctctctcgtattgaatggctgcaaaaagctgatgtgcctaccatagcacagattgaagagttccattcgatgcagaggatgatgaatgctcctgattcaaatgataatattgatttactgttgagcattgatttgttgggtttacaaggagcaggtaaagcttttccaaacaaaattgtttttgatgataagcttgtgttggctaacacacaagaattctttgatggaaattttccagtggattcttggttaccaatttttgagaattagtcttatcctgtaagtcaattaccttcagaagctgtncgtgtaaatgttacatgt

SEQ ID NO: 34366 - DNA, 258 bp, Glycine max
  Clone ID: LIB3138-062-Q1-N1-D5
cgcgtcgctccgcaccagtttcaccgcacgaatatcttgttgtttggagcgatccgagaaaaactctgttaacatgttggtttaccaggacctccttacaggtgatgagcttctctctgacttctttcgttacaaggaaattgagaatggaatgctgtgggaagttgaggggaagtgggttgttaaaggagcagttgatgttgacattggtgcaaacccttctgctgagggtggaagagaagatgagggattttgtga

SEQ ID NO: 34367 - DNA, 164 bp, Glycine max
  Clone ID: LIB3138-062-Q1-N1-D6
accgcatatcgtcatttacccatagctcaaatagctcttcaagcaaagtaccatcaaaatggccggagcacaagtcatcgtcgcataccctcgcaaggagggcttcaagttcaacaaggagtactatctgtcaacgcacatgccacttgccgcaaagcactgga

SEQ ID NO: 34368 - DNA, 368 bp, Glycine max
  Clone ID: LIB3138-062-Q1-N1-D8
gaaaaattgatgcgtgaaagagacgcacctgctgttggcttgttgttcaagagatggcaatttgtaagaaagatgtttggagagttgaatgtggaatcccttctggatttccgctcacagttatttgcaatagcatttttaatgagatgctcattagatatagctatgaaaaattactgcgccaggctaaagcaccaagtatgtttttacaatccttcaaaaattttgtttctttgtgtgtgtatggtgatgataacttaattagtgttcatgaatatgtcaagccttactttagtggttctaaattgaaaagctttctagctagtcataacatcaccattactgatggtattgacaaaactagtgca

SEQ ID NO: 34369 - DNA, 353 bp, Glycine max
  Clone ID: LIB3138-062-Q1-N1-D9
ttcgttcagctggtggagatgggtttagtggcaccttactctgctggaacatgtcttccttcccttcaacgccttccaaccctgcaagcccaaaaatggaacaacttctcagcacctcttagttgccaccgccaagtgaaatgtgctgtccaagtccaaccacaagtagcaccacgaattacacctgatgagagcctgcaagtgaagagaagaactctcataggccttctagcatttgatgctgtccttgcttattcttcattgcaagcagcaccagcagctgaaaatccgtgtgaatttcaagtggcaccttcaggccttgccttctgtgacaaacttgtgggagctggtcc

SEQ ID NO: 34370 - DNA, 349 bp, Glycine max
  Clone ID: LIB3138-062-Q1-N1-E10
acttttgtcttcgttccattatctagttctcaattctcttcaccctttgcctctgaaagaaatgggtagtcttgaagcggaaagaacaacagtaggattggcagcaagagacccttcaaggattctctccccatacacctacaatctaagaaacacaagccctgatgatgtttacattaaagttcactactgtggaatttgccattctgatctccaccagattaaaaatgatcttggcatgttcaacaccccttttcaatttgttagccccatggtcatgctagggaggaagtcaattacgggaagcttcattgggagcatgaatgagacagaggagatggtggagttc

SEQ ID NO: 34371 - DNA, 337 bp, Glycine max
  Clone ID: LIB3138-062-Q1-N1-E11
tacgaatggtccgggcgtgctgcctaggacttatccttagtcgaatcgccgttatcgggccccagggaactccgcgcccagccgcggcaagttgcgagctcgtggctttatcgcaccgcggccgtgcgggcgcggccctatcgtcccgcgtacggcttaaccggctgcccggcgcgctggataccgcccggccccgccgagacggaaccgggaggcccgcgccgggaatcggccgcgccgaagcgcgagccgactctcgttgcctgtccgtgcagcgacggcggacggcaccgggaccgaccgaacgcccgaggacgctcgacagccccggcgtgac

SEQ ID NO: 34372 - DNA, 194 bp, Glycine max
  Clone ID: LIB3138-062-Q1-N1-E12
ctcgttaatgctaataactagtttaccttaagcacaaattgttcagcacttgaactctctattctagccaccaacaaagagcaccaaagggactataaagcactaagctagtgtgagcttatgtagaggttgttagctatgttgatcttatttcaaggtttgatcataaatcatgatatacatctttgagcttt

SEQ ID NO: 34373 - DNA, 302 bp, Glycine max
  Clone ID: LIB3138-062-Q1-N1-E2
aaattctacaacgtcataactagcaaggtgggggcccacactgggttcctgtgcctcgtaaggttgatgagcacatgttcattaccattgggttcaacacagaattttgtgattccaagaatcccaacaatgcctcgtgtaagggcccaaatggtcaaagattttctgccagcatgaacaacgagtcatttgctgttcccgcgggtgtgaagttttctttgttggaagcattctatgaaaacatgagtggagtttacactacggatttccctaacaagccaccagttatgttcgacttcaca

SEQ ID NO: 34374 - DNA, 330 bp, Glycine max
  Clone ID: LIB3138-062-Q1-N1-E3
atcatcttatccgaactccgaagcatggttcgaccccacaactagtatacaatgcgacgtcgtcactcgtcaggaagtggatcgaggaaaaaaaatatcattttttagctctcacagaaagagagagagagagagagagtgtgtgtttatttgagtttgcgatttgtgatttctgatttgttggcccaacttggcaaagcaatggctctttctgtatcccttatgcaactcagttgcgtctctcttcttcacaataatccctcatcatcatcatcaccggtgacccttttgcccaaatccctctttccttgtggaatttccctgaaactg

SEQ ID NO: 34375 - DNA, 305 bp, Glycine max
  Clone ID: LIB3138-062-Q1-N1-E4
gtttgttgttgtaactcgttcttcttctttagttgttctgagtttgagtttgttttttctctcacctgaaaatgtcttgctgcggtggtaactgtggttgctgaagctcctgcaagtgcggcaacggctgcggaggctgcaagatgtacccagacttgagctacactgagtcaaccaccaccgagaccttggtcatgggagtggcacctgttaaggctcaatttgagggtgctgaaatgggtgtgcccgcttagaacgatggctgcaaatgtggaccaaactgctcctgcaacccctgcacttgc

SEQ ID NO: 34376 - DNA, 255 bp, Glycine max
  Clone ID: LIB3138-062-Q1-N1-E5
gaaagaagcggttttatatttctcgcgcgattcgtttcaagcaagtgctgtgcagaaacaaagcgacgtcgttcattggacgatgaaagaagctcaacaagtgctggatctctgaactctttgcgattcgaatctcgagtcgttgatcgtttcggacaatggattcgtggctcaaagccgctgaaggttatttgaagttgtagatcgacgagcgaaagcttgtgccagtgacttatcagaggagcaaggtgatct

SEQ ID NO: 34377 - DNA, 333 bp, Glycine max
  Clone ID: LIB3138-062-Q1-N1-E6
ctcaagagaaactttaagcagatgtctaatgttttgtgggtggctcctgagaaaatcacaatcttcttaccacaacttcattatgtttcgtgtaataatctgtaaatgcaagaagcttatcttgtcaatctcgtaaatgtgttacaagaattgtatttgcacaatccatatgaagctctccaattgagaatgaaagctctcttttgtattgaatggcttcataatacctattttccttccatagctcagattgattagttcctttcgattcaaataatttagaatgctcctgattcaaatgataatttagatttactgtttagcatttatttg

SEQ ID NO: 34378 - DNA, 169 bp, Glycine max
  Clone ID: LIB3138-062-Q1-N1-E7
gttggcttacacacaagaattctttgatggaaattttccagtggattcttggttaccaatttttgtgaattgtctttatcctgtaagtcaattaccttcagaagctgtcgttgtaaatgttacatgtggtagtggacgtggtggcttacccaccattgtttggactatt

SEQ ID NO: 34379 - DNA, 334 bp, Glycine max
  Clone ID: LIB3138-062-Q1-N1-E8
gcaacacactttcactgagaaaggatctctatctaccaaggagcagaataaaacccttctctctggtaagtgaataagagaatggcttcagatcggaaacttcacactttcgaggaggtggcaaagcacgaccagaccaaggattgctggctcatcatttctggcaaggtgtatgatgtcacccctctcatggaggatcatcccggaggtgatgaggttttgttatctgcaacagggaaagatgcaaccaatgattttgaagatgttggacacagcgattctgctagagatatgatggaaaaatactacattggtgagattgattcatcaactg

SEQ ID NO: 34380 - DNA, 390 bp, Glycine max
  unsure at all n locations
  Clone ID: LIB3138-062-Q1-N1-E9
ggagattggatcacacttatacaaaattctccaattagtaacttgttgagagttgctgcttggaagaaaggctgtttaatggtcaagattgtgatgtctgggaatgcagcagtcaaaaggagtgattgggcctcattggtacaagtgtttttaacaaacagcaacagtacagagcattttgatgcatgtaagtggacaaaatcagaaccacattcctgggaattgatcttcccaatagaggtatgtggtcctaataatggttttgaaatgtggagttctgagtgggcaaatcaaacttcatggcatttgagttttcttattgacaatcccaaacagtctacagnttttgatattctcttgagaatctctcaagattttgaaattgctggt

SEQ ID NO: 34381 - DNA, 163 bp, Glycine max
  Clone ID: LIB3138-062-Q1-N1-F1
ctcgagccgggttcttaaagctgatttctatgatttatcgaaacaaatggtccaaatttgtgacaagcgttcattttcctgcataattgagcacaagcattgatgcatgttctggggcggcgcgattcttatataacttcacacccgaaattaaattccgatc

SEQ ID NO: 34382 - DNA, 341 bp, Glycine max
  unsure at all n locations
  Clone ID: LIB3138-062-Q1-N1-F10
gccaacacacggtgtttgagatagcagaccatctgagaaaattcgggtggatagttccggcctatacaatgccaccggacgcgcaacacatagcggtcctccgggtggtgatcagggaggatttcagccgtggcttggccgagagacttgctgctgacatagagaaggttgtgaagctcttggacacacttcctagccccctcactaccaaagttgctcatatcacagccatcactagtgagactagtgagactagtgagaagggtaagagtgcaatagagactcagaaagagattgctttgtactggaagcgacttgtggatggcaagagactnggagca

SEQ ID NO: 34383 - DNA, 251 bp, Glycine max
  Clone ID: LIB3138-062-Q1-N1-F11
atcatgtggaagttcagtttagatgtcttgtatattctttagagttttcatgctttatagtgaaatttgtcagagacttgtatagtaacatgtttatatatagctttgaactcatttttatgatcatgaatttcataatgtacaagacattacacaaatatttcctttgcttctctaataaaaaaaaaaaataattaaaaaataaaaataaatataaattataaaaataaaaatattaataattaaaataa

SEQ ID NO: 34384 - DNA, 373 bp, Glycine max
  Clone ID: LIB3138-062-Q1-N1-F12
ggcaacagtgagaacaccattgaattttgattctagcaagcagagcttttgtcagttttctattgaccttctcggtggaggaatcttagtggacaaaactggagattggatcacacttatacaaaattctccaattagtaacttgttgagagttgctgcttggaagaaaggctgtttaatggtcaagattgtgatgtctgggaatgcagcagtcaaaaggagtgattgggcctcattggtacaagtgtttttaacaaacagcaacagtacagagcattttgatgcatgtaagtggacaaaatcagaaccacattcctaggaatagatcttcccaataaaggtatgtggtcctaataatggttttgaaatgtgg

SEQ ID NO: 34385 - DNA, 386 bp, Glycine max
  Clone ID: LIB3138-062-Q1-N1-F2
agatgaccttggacgtgaagctgttatctatgatttatcgaaacaaatttaccaaatatgtgacaagcgttcagtttcctgcattattgagcacaagcatgatgcaggtgctgtgatttgtgattcggatctaagttcacagctcaagtcagcagcttattctgcactcaagaagatggagggtgacattcaggatgaagtgccaacattaatgagcggagcatggcatgatgcaatggcaatatctcacttaacaaaggtgggaatgctgtttgtgcgttgtcgcggaggcataagtcactctccacaagagcatgtgctagataatgatgtctgggcagcttgtttagcaaccttgtcatttcttggaaacctatcataagtga

SEQ ID NO: 34386 - DNA, 296 bp, Glycine max
  Clone ID: LIB3138-062-Q1-N1-F3
gtttagttttctgggattggatgaagaatgttgagaattgaattgtggaatatattataggctctagaattatttttttccatgtaaatgaatttctcgtcgtttttatgaaggagagttccactcattcatggcttattcctcttcttgttgtcgtctatcctctctcacacacaagagattttgtttgtgtatagttgctgcttcctagcttcggcaacaagtggctgataagttgatggtgcagtctctttggagcaatggtgattccaatagcagtgtcgctggtagtgatt

SEQ ID NO: 34387 - DNA, 366 bp, Glycine max
  Clone ID: LIB3138-062-Q1-N1-F5
ttccgaataccattgtgcagattgaaccagacatgaattcaagagtttcagcttttgagtaccactaccaatggtgattttgttcaaaggaaagatctcgcaatggttaaagttaatgtagcatgtgctgctagtggcttgacatcaagttacactccaactccattgttggaatctggtttgcaaaaagacagagggttaattgcggagtattttggaaggatgtcttacgttgctcataacgtttatcaaccccaagagaaagatttgttggaaggaaatttttcctttgatattaaatctcgctctaaattggaaaaagttttctctacaaaagcacaatttgttagtggaaaaaccttcaaa

SEQ ID NO: 34388 - DNA, 354 bp, Glycine max
  unsure at all n locations
  Clone ID: LIB3138-062-Q1-N1-F6
atttcttttcattctccaaaaactctntaattttccttcccttttctgagctattctctcctcactggtcaaaaggtttgtgggattttgctaatttggtgcaaatctgattcctttgacaaatccctcttgatctcctggcttattgaaaactactacaattccgagttgctttttttccctagttgcttttctgggccttgaaatcttgcttggagaaagctcaattttggtggaaacctctaccacaagaaagcatagtttttttgggttaatcatacttgaagtgtttagagatggtgagaggaaagactcagatgaggcgcatagagaacgccacatgcatgcaagtca

SEQ ID NO: 34389 - DNA, 188 bp, Glycine max
  Clone ID: LIB3138-062-Q1-N1-F8
ctcgagccgtttttgttcaagaactttgagttgttgataagatctttctctctgtcgcccagaattgtgattgaggatataaaaagagaatcaacaacggatgattcgatatgcatgaaggttaattgattctctcatgtttgtgtttcaatttgttgaaagttactttcacctttttcttttctttc

SEQ ID NO: 34390 - DNA, 342 bp, Glycine max
  unsure at all n locations
  Clone ID: LIB3138-062-Q1-N1-F9
gtgtttttaacaaacagcaacagtacagagcattttgatgcatgtaagtggacaaaatcagaaccacattcctgggaattgatcttcccaatagaggtatgtggtcctaataatggttttgaaatgtggagttctgagtgggcaaatcaaacttcatggcatttgagtttccttattgacaatcccaaacagtctacagtttttgatattctcttgggaatctctcaagattttgaaattgctggtaatactcttatgccagctttttcttgtccacatgctactgccagatcttctgaaaatgcggaattctctgcatgatctggaanttgtgttttcttt

SEQ ID NO: 34391 - DNA, 284 bp, Glycine max
  Clone ID: LIB3138-062-Q1-N1-G1
cccaatttcaattttgttggaagacttctgggacccagaggcaattctctaaaacgggtagaagcttctacaggttgtcgtgtgtatattagaggaaagggttcaataaaagatccagacaaggaagaaaaatttagaggaagaccaggctatgagcatctcaatgagcaactccacattttgattgaagctgatttacctgctaatagtgttgacttaagactccggcaagctcaggaaattatagaagaattgctcaaacctgtggaagagtctgaggacta

SEQ ID NO: 34392 - DNA, 342 bp, Glycine max
  unsure at all n locations
  Clone ID: LIB3138-062-Q1-N1-G10
gtttccattaaggttttgttcaaagtgatggtggttgatggatggagggtgagttctgtggacaaaacagcatatggggttctctgtttcttgctcttgtcttgttagttcctctttgggcttgttcttcaaactgtgctctactttgtttgcaagtcctatcaccatgagaatattgacaaatcggctttggcagatcatcttgaagggtatagaagagagtatgttccattgacagctaaagatgttcagctggagcaataccaagtttgattaataatttataatatagctnggataaattatattggtgatgtggttaattatatctgctatggtttc

SEQ ID NO: 34393 - DNA, 379 bp, Glycine max
  Clone ID: LIB3138-062-Q1-N1-G11
gaaaaattgatgcgtgaaaagacgcacctgctgttggcttgttgttcaagagattgcaatttgtaagaaagatgtttggagagttgaatgtggaatcccttctggatttccgctcacagttatttgcaatagcatttttaatgagatgctcattagatatagctatgaaaaattactgcgccaggctaaagctccaagtatgtttttacaatccttcaaaaattttgtttctttgtgtgtgtatggtgatgataacttaattagtgttcatgaatatgtcaagccttactttagtggttctaaattgaaaagctttctagctagtcataacatcaccattactgatggtattgacaaaactagtgcaactttgcaattt

SEQ ID NO: 34394 - DNA, 389 bp, Glycine max
  Clone ID: LIB3138-062-Q1-N1-G12
aatgaatttatcgagtctctatcggctagtgagattgaactctctgaggattacacctgtgtgatttcccatggttctaatccaaaaacaacccatattttctgagactgcattttggaaagtcatgttaatgattctgaaagacattataaggctgaagaggagggaacgggattgccccttttcagtgttaacattttgcatactccaagccaatatccttctcatgacttcttaagtgtctgtcaccattgcaacaagaagttggaagatgggaaagatatttacatatatagaggtgaaaaatcattttgcagtttgagctgccgcgaaatagagatcacgaacgatgaggagcaagagaaatccaattcatcacctgaaaactc

SEQ ID NO: 34395 - DNA, 296 bp, Glycine max
  unsure at all n locations
  Clone ID: LIB3138-062-Q1-N1-G2
ctttcttcgccccgtccaacttcgctttccagaagcttggccctcgcatcaacgccttcctcttcagcaagtacggccagaagtacctcaaggctctgcttgagtaccaccttgtccctgacaacaccctctactcagatgccttttacagctcggatagcaagagccaggaaggtgtgcccaaaggatactttcacgttgaccttcctaccttgctcgaagaccgcagcctcagcattgacatcgnccgctacagtggcttcatcagcatcaagatcaatggatttggtcgcgtc

SEQ ID NO: 34396 - DNA, 346 bp, Glycine max
  Clone ID: LIB3138-062-Q1-N1-G3
ctgccaccccaatgcaagatgttcaggttacaattgattggtttatttcctctcaagaatgtgttcccaggacctattgtgttttaaatccacaaaatccttttgtgttaaataggtggatgggaaaattgacttttccccagagcacttcccgaagtgttaagagaatgcctctttctataaggggaggagctggtgcaaagaatgctattctcatgaatatgccaaatgctgttctttcaatgtggagatattttgttggaaatctcgtctttgaaatttctaagatgacttctccctacattaaatgtacagtctctttcttcatagcatttggaaatttggc

SEQ ID NO: 34397 - DNA, 271 bp, Glycine max
  Clone ID: LIB3138-062-Q1-N1-G5
caccgcacgaatatcttgttgtttggagcgatccgagaaaaactctgtgaacatgttggtttaccaggacctccttacaagtgatgagcttctctctgactccttccgttacaaggaaattgagaatggaatgctgtgggaagttgaagggaagtgggttgttaaaagagcagttgatgttgacattggtgcatacccttctgctgagggtggaggagtagatgaaggagttgattgatcagctgtttaggttgttgacattgttgacaca

SEQ ID NO: 34398 - DNA, 311 bp, Glycine max
  Clone ID: LIB3138-062-Q1-N1-G6
gtttttacaatccttcaaaaattttgtttctttgtgtgtgtatggtgatgataacttaattagtgttcatgaatatgtcaagccttactttagtggttctaaattgaaaagctttctagctagtcataacatcaccattactgatggtattgacaaaactagtgcaactttgcaatttaaaaagttagcagattgtgattttctcaagagaaactttaagcagatgtctaatgttttgtgggtggctcctgaggacaaggcgagtttatggtcacaacttcattatgtttcgtgtaataatctggaaatgc

SEQ ID NO: 34399 - DNA, 346 bp, Glycine max
  Clone ID: LIB3138-062-Q1-N1-G7
ggcggtggcatgaaatttaacatcaacggcaagacccatgacgcggacgtggacatccgtacctcgctgctcgacctgtgtcgcgaacatctggggctgaccggctccaagaagggttgcgaccatggccagtgcggcgcgtgtaccatgctggtcgacggccgacgcatcaacagctgcctgacgctcgccgtcatgcaccatgacagcgagatcgtgacgatcgaaggtctgggtcaggtcggcgacctccacgcgatgcaagacgccttcgtccggcatgacggctatcagtgcggctattgcacgccgggccaaatctgctcggcggtcgggatgctcggcg

SEQ ID NO: 34400 - DNA, 316 bp, Glycine max
  Clone ID: LIB3138-062-Q1-N1-G9
catcatcataaaccccctccagagaacaagaatcaaagaatggcaactatgactggtgtgagcctttcaagccccagggttttcttcaacgcatcaccctcaccgcaaaacacgtacgccgtaaagttcgcagttccactcagccaaaggatgcgacttggtagtgtcaggttgggtcgggtgatgaggatccgacccgttcgcgcagctccagagcgcatttcggagaaagtggaggagagcataaagaacgcgcatgatgcgtgcgccggcgacccgactagcggcgagtgcgtggcggcgtgggacgaggtgg

SEQ ID NO: 34401 - DNA, 361 bp, Glycine max
  Clone ID: LIB3138-062-Q1-N1-H1
cttatattttgggtggccaagacaaatcacagaactggcatgtctactctgcttctgcagattctgtaactccatgcgacaatgtttacactctagagatgtgcatgactggcctggatagagagaaagcacaggttttctacaaagaacaatctgcttcagctgccattatgactgttaattctggcattagaaaaattcttccaaattctgagatttgtgactttgactttgagccatgtggttattcaatgaactctgttgaaggtgctgctgtttctaccattcatgttaccccagaagatggtttcagttatgcaagctttgagacttgttggtatgacttcaagtggtgaatctg

SEQ ID NO: 34402 - DNA, 210 bp, Glycine max
  Clone ID: LIB3138-062-Q1-N1-H10
tacaccgatcactgtatcaacaccagaacttccgtcaaaatgaagaccttcaccatcgctaccatcgtcgctctggcctccgttggcgccgctcagcttgacaacatcccgtcttgcgctctcaactgcttcgtcggtcccctcaccagcgacggctgctcctctctcaccgacttcgcctgccactgcaagaagggtgctcagctcctc

SEQ ID NO: 34403 - DNA, 259 bp, Glycine max
  Clone ID: LIB3138-062-Q1-N1-H11
ctcgagccgctcgagccgattcggctcgagcgccggcagcctgtccccctccctctgctccggcgacatgctcctcgacgcactcgtcgcctgttccggggtgactctcaaagccgtcgccaccgcactcgacatccccataatctccgggacggtgagggctgaaggcgatttggattttaaggggacgttgggggtgaagtaaaatgttgcggtggggatgagtgggattcggttggagtttgatttggtatttggg

SEQ ID NO: 34404 - DNA, 387 bp, Glycine max
  unsure at all n locations
  Clone ID: LIB3138-062-Q1-N1-H12
tcacaaatgaggctgtctacgagaagataccttctggtgaactcctccgccttatggccgtactgaagaagtcgtaccacttcgctaagcgcttcaatgcgaatcgcgatctgcgatcacgtttgtttagggaaggtttcatgaagcaaccgccaaacctgctcaagcaggagagcggatcggcgtcggtgtacgttagcattctatttagaatgtaccacgacacatncaacgaccgcgccgtctcacgcgccgataccgaagccgccctgatcccgctctgcgaagacatcattgcctcctatgtcgatcttgacgaggaaacacaacaacgcaacatcgtcacttggcgccccgttgtcgtcaccgtgctggacggatacactg

SEQ ID NO: 34405 - DNA, 296 bp, Glycine max
  Clone ID: LIB3138-062-Q1-N1-H3
gttgaatgtggaatcccttctggatttccgctcacagttatttgcaatagcatttttaatgagatgctcattagatatagctatgaaaaattactgcgccaggcttaagctccaagtatgtttttacaatccttcaaaaattttgtttctttgtgtgtgtatggtgatgataacttaattagtgttcatgaatatgtcaagccttactttaagggttctaaattgaaaagctttctagctagtcataacatcaccattactgatggtattgacaaaactagtgcaactttgcaatt

SEQ ID NO: 34406 - DNA, 335 bp, Glycine max
  Clone ID: LIB3138-062-Q1-N1-H6
ggcttttccccacaagctggtgcagtttggagagattcaagaaaaagttgtattgaaattttcacaagaggaatttcttacagcttggtcaactcaggtgcgtcctgcaacaactctgttggctgatgggtgtccatatttgtatgcaatggtgcatgatagttcagtgtctacaataccaggtgattttgtcattggtgtcaagttgacaaccataaacaatatgtgtgcatatgggctcaatcctggtatttcaagttctcgtcttttgggcaccattcctcagtccatttcacagcaaactgtttggaatcaaatggcaacagtgagaacac

SEQ ID NO: 34407 - DNA, 215 bp, Glycine max
  Clone ID: LIB3138-062-Q1-N1-H7
ataattatgaggctcactttaattactctgaaagaatggctaaataagtgtacccaaaaataaaggacccatatatcattgtatagtcgtatacatggatcttacattattgttctcacttctcatttgattccaatgtcatagatcggtctttatcgtgggacagtaggaggaatagtcatgtagttgagaatgcttcaacgttcattttcaaa

SEQ ID NO: 34408 - DNA, 414 bp, Glycine max
  unsure at all n locations
  Clone ID: LIB3138-062-Q1-N1-H8
accactttcaattccaaattcactctcagaaattagaatggctagccaatcaaacactaaatcagttcacgatttcacagttaaagatgccaggggaaatgatgttaatctcgccgattacaaaggaaaggtccttctccttgtcaatgttgcctcacaatgcggcttgactaattcaaactacacagagcttaatcaattgtntgagaaatacaaagggaaaggacttgaaattctggcattcccgtgcaatcagtttggggctcaagagccaggaactaatgaagagattgtggagtttgcttgtactcgcttcaaagctgagtttcccattttcgacaaggtggatgtgaatggtgacaatgctgctccactgtacaagttctgaaatcaaacaaggtggactctttggga

SEQ ID NO: 34409 - DNA, 393 bp, Glycine max
  Clone ID: LIB3138-062-Q1-N1-H9
gaaaagctttctagctagtcataacatcaccattactgatggtgttgacaaaactagtgcaactttgcaatttagaaagttagcagattgtgattttctcaagagaaactttaagcagatgtctaatgttttgtgggtggctcctgaggacaaggcgagtttatggtcacaacttcattatgtttcgtgtaataatctggaaatgcaagaagcttatcttgtcaatctcgtaaatgtgttacgagaattgtatttgcacagtccagaggaagctcgccaattgagaaggaaagctctctctcgtatagaatggctgcaaaaagctgatgtgcctaccatagcacagattgaagagtttcattcgatgcagaggatgattgaattgctctgatt

SEQ ID NO: 34410 - DNA, 162 bp, Glycine max
  Clone ID: LIB3138-063-Q1-N1-A1
gttggctaacacacaagaattctttggtggaaattttccagtggattcttggttaccaatttttgggaattggctttatcctgtaaggcaattaccttcaaaagctgtcgttgtaaaagttacattttgtagtggacctggtggtttacccaccactgcttg

SEQ ID NO: 34411 - DNA, 287 bp, Glycine max
  Clone ID: LIB3138-063-Q1-N1-A11
gggctttttccctttttgaaccagcttaactgaaagagtttttgttgttgggtggcaatggaagttttgcgaccaaaacttccttctttcaaatttccaagtgccactaattgctgctcgatcactagtaggagctcatcatttgtcagatttgggttccgtcgcgtttctgtttgtgcatcaactgtcaatgaagcagtagctaaaccaattgttggtttcctttctttgggtcactccacccgactccatttccccatacttaaccaggaagtaaatggctcaaa

SEQ ID NO: 34412 - DNA, 265 bp, Glycine max
  Clone ID: LIB3138-063-Q1-N1-A12
gcagaaactaacaagttaataaatgcattgtggaactgcttgttgacctttaagcagtataagcagagcttggaaaggctccaacggcgagggatgacgcaagatcttagttgggacaatgctgctcaacagtatgaggaggttcttgttgctgctaagtaccaatggttaatttttggcttctactttacctaagcagactgatcaatatggagtgctctcatgcttagtgatattaaggtctgtgcagggaaaggacttggtc

SEQ ID NO: 34413 - DNA, 369 bp, Glycine max
  Clone ID: LIB3138-063-Q1-N1-A4
gcaaggtatagctcaatggcatcatcatttgtgggtactttattacccaaccacttcacacaaaccaaacactcagctgttcctgcaagtagatcaggtgctccaagaaggaggagagtgcacttagcaacaacaagagcagagaccatgactactgtcatagaaaaactgggcattaagattgagaggaaccctcctgagtccaagctcactcaactgggtgttaggcaatggcccaaatggggttgccctccaagtaagttcccatggacatatgaagccaaagagacttgctatcttctggaaagaaaaaggaaagtctttcctagtgggtcgaatgagtcaagtgaaaatgctgctggtgacttg

SEQ ID NO: 34414 - DNA, 129 bp, Glycine max
  Clone ID: LIB3138-063-Q1-N1-A5
tgaaaagcttcttagctggtcataacatcaccattactgatggttttgacaaaactagtgcaactttgcaatttagaaagttggcagattgtgattttctcaagagaaactttaagcagatgtctaatg

SEQ ID NO: 34415 - DNA, 383 bp, Glycine max
  Clone ID: LIB3138-063-Q1-N1-A6
agctgggatttgggctcgcgcagatacaaaaatgctttcagttgcaaaaaggggggcttttaaatttgcatttataaacgctcctaacttctggagatgttatgcatttaaatttactgtaccagtacagagttccaatctggctcttactcctccaggattcaaaaagatcaaagtcgctaacccagtagtagacttagacggggatgaaatggctcgtttcttctggcaaatgatcaaagattatttgggcttgccttatttggatattgatatcaaatactacgacttatcttttcaaaaaagagatgaaactgacgatcaaatcactgtagactctgcaaacgccatcttaaaatacaatgttggtattaaaatgcgct

SEQ ID NO: 34416 - DNA, 342 bp, Glycine max
  Clone ID: LIB3138-063-Q1-N1-A8
ggctaggatagttgccgatgttgttggaaacccagttctctttaatgaatggaaagcagagatggaaatgatggctggaaggataaagaatgttagacagcagctatatgatagtattacttcaaaagacaaaagtggaaaggattggtcattcatacttaagcagataggcatgttctcattcactggcttgaacaagaaccagagtgacaacatgacaaacaagtggcacgtatacatgacaaaggatggaaggatttccctggcaggattgtcgttggctaaatgcgaataccttgcggatgctattattgattcatatcataatgtcagctgaaactc

SEQ ID NO: 34417 - DNA, 381 bp, Glycine max
  Clone ID: LIB3138-063-Q1-N1-A9
gggacctaagaaaatatttatctgggttttttgacactacagtggggaacaaaagagagacacgcagttatgttgaaatttctgagtcactcggggttgaaaaaccatcagatattttatttgtcactgatgtatatcaagaagccacagctgcaacggctgcaggtatgaatgtttttcttaatccatcatttaatttttttaagttaaattttatccattatctcttaaacttgttacgttatcaataaacttagtccatgtctggcataggttattttttgaaaaataatctttttattcaaaacttctttttaaagtaactaaaccatatacttaaaagtgtcacatgattatagtaactgagtcttttccatagca

SEQ ID NO: 34418 - DNA, 206 bp, Glycine max
  Clone ID: LIB3138-063-Q1-N1-B1
cttttggtggatactaatcataccaatcctgaaaatgcagttcgtagtatttttgttgcccctttcaaaggcggaaggcccattcgggtggttacatttccgaataccattgtgcagattgaaccagccatgaattcaaggtttcagcttttgagtaccactaccaatggtgattttgttcaagggaaagaactcgcaatggttaa

SEQ ID NO: 34419 - DNA, 235 bp, Glycine max
  Clone ID: LIB3138-063-Q1-N1-B12
ctccagccctcttttttaatattaaaataatattttttagggtccaattgttaaatgggggtccccttttattataaaacttcccttccattttggtcccctaggaaggccaagattttccggcaattgcaagggctttttatttctttatttttcaaaaaaacaaaatttttttattccaaaaaaacaaagaaaattttgggggttttatttccccacatttattcctaatttc

SEQ ID NO: 34420 - DNA, 304 bp, Glycine max
  Clone ID: LIB3138-063-Q1-N1-B4
ctaatcctagttccttcaactcctcgctggcaacaacagcagtactaccattagccgcgtttttcaaaagtgattttcgagaattagcgatgggaattgaaagaggaggcttcaagggattcaggagcgcctggagcgtgccgcccaagccgtgcgattcctgcaagctggcctcggcggcgcttttctgccgccccgattccgcgtttctctgcatcgcctgcgattccaacattcactgctcgaacaaactcgcgtcgcgccacaagcgcgtgtggatttgtgaagtgtgcgagcaggcacc

SEQ ID NO: 34421 - DNA, 358 bp, Glycine max
  Clone ID: LIB3138-063-Q1-N1-B8
gcttttccaaacaaaattgtttttgatgataagcttgtgttggctaacacacaagaattctttgatggaaattttccagtggattcttggttaccaatttttgtgaattgtctttatcctgtaagtcaattaccttcagaagctgtcgttgtaaattttacatgtggtaatggacgtgtggtttacccaccactgcttggattagttctgcagttaacaatcgctcctcagatatcaacaaaaggattcgcacagcacttgggaaaaggtagaaaattgtttttcttactagagtttatccttttccagtagctttactggctgttctttttggcgttaagaatgaaattctgagttc

SEQ ID NO: 34422 - DNA, 374 bp, Glycine max
  Clone ID: LIB3138-063-Q1-N1-B9
ctgcatttatgcttgctaacatcatgggtcgttctcagtggctaacgtgtccaaggaaggatttgtcaactggttggcttcactgtgatcctggtccactgtttaagccggaatcttatcccttacaaggatggatttcccactggtttgcttggaaagagatatcaatcctaccaattcaatggcattctttatgtcttggcttggttgcttcaattattgcaccttttggaggcttctttgcaagtggttttaaaagggcttttaaaataaaggattttggtgatagtattccaggacatggtggaattaccgacagaatggattgccagattgttattgcggtgtttgcatatatatatcatcaatcattt

SEQ ID NO: 34423 - DNA, 175 bp, Glycine max
  Clone ID: LIB3138-063-Q1-N1-C12
ctcgagccgctcgagccgattcggctcgagaccaacattccaatgcctcctccataaccatattggagaataagataaatacaacaaaacctctagatggaagaagcacacgtgcacgtattggaagggtatgtatattggggggacacgcccaccctaaaaagaggctatgggg

SEQ ID NO: 34424 - DNA, 260 bp, Glycine max
  Clone ID: LIB3138-063-Q1-N1-C5
ctgacactgacatatatgtcacggcctggcgctatacattccattcaatgccataataactccagcgcttatctgttggctgcacaaaaatgtatagggcaatattatgaatcatatattcagtaacaccattgtgcaattgttagaaagcaatagtccattcatttatgattggttgatattctatgaaggcaattatctatcttggataaccaagtgattgaacacaagcgttaatatgcttaagttaagggtgaatc

SEQ ID NO: 34425 - DNA, 389 bp, Glycine max
  Clone ID: LIB3138-063-Q1-N1-C8
tggaaatgcaagaagcttatcttgtcaatctcgtaaatgtgttacgagaattgtatttgcacagtccacaggaagctcgccaattgagaaagaaagctctctctcgtattgaatggctgcaaaaagcttgtgtgcctaccatagcacaaattgaagaggtccattctatgcaaaggatgatgaatgctcctgattcaaatgataatattgatttactgttgagcattgatttggtgggtttacaaggagcaagttaagcttttccaaacaaaattgtttttgatgataagcttgtgttggctaacacacaagaattctttgatggaaattttccagaggattcttggttaccaatttttgcgaattgtctttatcctggaagtcaatta

SEQ ID NO: 34426 - DNA, 377 bp, Glycine max
  unsure at all n locations
  Clone ID: LIB3138-063-Q1-N1-C9
ggaatcttagtggataaaactggagattggatcacacttatacaaaattctccaatttgtgacttattgagagttgctgcttggaagaaaggctgtttaatggtcaagattgtgatgtctgggaatgcagcattcaaaaggagtgattgggcctcattggtacaagtgtttttaacaaactgcaacagtgcagagcattttgatgcatgtaagtggacaaaatcaggaccacattcctgggaattgaacttcccaatagaagtatgtggtcctaattatgggtttgaaatgtggagttctgagtgggcaaatcaaactttatggcatttgagtttccttattgacaattccaaacagnctacaggttttgatattct

SEQ ID NO: 34427 - DNA, 90 bp, Glycine max
  Clone ID: LIB3138-063-Q1-N1-D10
accgaattcactattacatccacacctccgcaataaaataaaaagggaggttatctccctcagtgcctcgctcatggaagagctctccgc

SEQ ID NO: 34428 - DNA, 174 bp, Glycine max
  Clone ID: LIB3138-063-Q1-N1-D11
gcctgaagctgtcttcaatttcaatggcggcgccaaaaaatcgaggccttgaacggactcctttccaactggtttaagaagcaaatcggagccatgcccaaaggttttcagcaccttccgctggccatttggtggaaggtggcacttcctgcattatgttcctgggggctttaa

SEQ ID NO: 34429 - DNA, 62 bp, Glycine max
  Clone ID: LIB3138-063-Q1-N1-D12
atcagcaacaaaagctgcaaatgtcagcataaccagagatgctttcccttgcatgtttgatg

SEQ ID NO: 34430 - DNA, 361 bp, Glycine max
  Clone ID: LIB3138-063-Q1-N1-D4
cacattttgattaaacttgtggtttatgattttcaagcgttttttagtttcgtacctgcacatagctctgggcaaagctagcctagtcaaaaccatatacaagggatgcatatatgaagtataaaaattaatgcgtgggggtcaacatttaggaaatgtcttctagagttactgtacattttaaaatgtttgttggcttggtttattattttcatctttgaattccaagactagtttggtcgactgttgtcacgttagtttgtattctgctgcagaataacttgcttgtaattgtatactgattagttgatatatagtgatatattatatgtactaaatgcattaatgcaggttatgattt

SEQ ID NO: 34431 - DNA, 183 bp, Glycine max
  Clone ID: LIB3138-063-Q1-N1-D5
caaaatccttttgtgttaaatagggggatgggaaaattgactttcccccagggcccttcccgaggggttaaaaaaatgcctctttcttatggggggggagctcggtgcaaaaatgctcttctcatgaatatgcccaatgctgttcttttaaagtggagatattttgttggggatctcgtcttt

SEQ ID NO: 34432 - DNA, 129 bp, Glycine max
  Clone ID: LIB3138-063-Q1-N1-D9
ccttcgttcactcatctggtaatgcggctagggataccgcgcagcttcttgtatatttaaagaagatgggtcaggaaaaagagcaccacaaaattgtggttattggacatgtacactatggaaagttca

SEQ ID NO: 34433 - DNA, 203 bp, Glycine max
  Clone ID: LIB3138-063-Q1-N1-E11
agcgtttccaaacaaaattgtttttgatgataagcttgtgttggctaacacacaagaattctttgatggaaattttccagtggattcttggttaccaatttttgtgaattgtctttatcctgtaagtcaattaccttcagaagctgtcgttgtaaatgttacatgtggtagtggacgtggtggtttacccaccactgcttgga

SEQ ID NO: 34434 - DNA, 320 bp, Glycine max
  Clone ID: LIB3138-063-Q1-N1-E4
ctcgttggaaaaactcctctcttctcatcttcatcatcagaagcttcgtcgtccttcttccagaaccttcgggaatcgatgacgaactcaagttgcggaggcgcggagttggagctatgccgagatgaatcagccgcattggttctcaagttcgtcgccatcgcttccattctcctctccggcatggccgggatcgccatcccgctcatcggaaaacaccgccgctttcttcgcaccgacggcaacctcttcgtcgctgccaaagccttcgccgccggcgtcattctcgccaccggattcgtgcacatgctcttcgacgc

SEQ ID NO: 34435 - DNA, 179 bp, Glycine max
  Clone ID: LIB3138-063-Q1-N1-E8
cgtcgacccagagatgaaagactttacctagtccttactcactgtttgtgtttgcatcggaaggtagagaagattatttagaatattattgagaaagtgagcgcacttgtagagcgcctgaaaaacaaaagccttgaaaaacggataaagatgatcgaagggattagctccattagttt

SEQ ID NO: 34436 - DNA, 411 bp, Glycine max
  unsure at all n locations
  Clone ID: LIB3138-063-Q1-N1-E9
ttggactctgttagtgaagtggaagaacatgaangaagtttgtggataggctctgctgtgcaaccattcattggtcttataaaagcttaggcctttatttacgtgtttgtggaaaaattattaagtggtcctcaatcactaccttattcatggtgttagcagatttttatatgacacataattaagtatgtgtcacgtaaaaattagttaagactatagataagtaatgatttaaaattacctaataatttttcgtgtttgtgtgttttattttcaggtcaaattttaaaatccaaattccaaaataaaatgtattttggataaaataaggttgggttagttttctttatctgatgttaaaagagctttcttctgattttaagaataataaaaaatggtattcttattctt

SEQ ID NO: 34437 - DNA, 166 bp, Glycine max
  unsure at all n locations
  Clone ID: LIB3138-063-Q1-N1-F10
cgtgcttcaagagagacggagagttaaactttgtaaatatcttcgtgacggagaagaagctgtgtcaagtttgtggtacaaaatgatacgagtttgagtttggtttgtgnccaaacaaaacaacttgggtattaagaaacaaaatatgcaaggtttatttattaac

SEQ ID NO: 34438 - DNA, 474 bp, Glycine max
  Clone ID: LIB3138-063-Q1-N1-F11
caagtggctgtgactaggcctgtgagaatgcattggactggctgccccaacacttgtggccaggtgcaagttgctgacattggtttcatggggtgcatggctagggatgagaatggtaaggccactgaaggtgtggatattttcctgggagggagaattggaagtgattcacatctagctgaggtgtataagaagggtgtgccttgcaagaacttggtgcctattgtggtagacatactattaaagcattttggtgctgtccaaaggaatagagaggaaggggaagattaaactttatggccattggcaattttagtttctttactaaatctaccattgtccctgaacaaaagtatcaatgtcctctacataaaagaaaaagggatgatcatgagacatgcattatatcatatgcatgtacacttttggataaaacatgtacattcctttgtagttcctagatacactttattt

SEQ ID NO: 34439 - DNA, 181 bp, Glycine max
  unsure at all n locations
  Clone ID: LIB3138-063-Q1-N1-F3
tcctttggcttttgggaccaattttgtggattttattcaactaaaataaagggctttcttttggcgcatgggggggttaaatttttnaaaaaaaaaaaaaaaaaaaaaaaaaaaaaaaaaaaaaaaaaaaaaaaaaaaaaaaaaaaaaaaaaaaaaaaaaaaaaaaaaggggggggccccc

SEQ ID NO: 34440 - DNA, 141 bp, Glycine max
  Clone ID: LIB3138-063-Q1-N1-F4
gttctactgggcaccaacaagggaagaccgcattggtgtttgcaccggaattttccgcactgatggtgttcctgaacaggacattgtcaagcttgttgacatcatatttggttgatcaaccgaacactttggtgcactgag

SEQ ID NO: 34441 - DNA, 139 bp, Glycine max
  Clone ID: LIB3138-063-Q1-N1-F8
ggcccagcaataattctcggtgcacaggtggctcctcttttcattcgaaatcatgtcggaacccaagatacccgatgtgcttattaactgcgcccaaaacacacaccaagggtttgtggggcatcttttttaatttttt

SEQ ID NO: 34442 - DNA, 105 bp, Glycine max
  Clone ID: LIB3138-063-Q1-N1-F9
gattaaaatggtggccacaggtgggattcctgagaataccaggttattaatggcccgtgctatgaataggtcttttaaggggggcgcccggtcttatatttacac

SEQ ID NO: 34443 - DNA, 332 bp, Glycine max
  unsure at all n locations
  Clone ID: LIB3138-063-Q1-N1-G4
gttcagnttatgttcagaaatcattcattgattaccatatttccgtttcggtcttcttcctgggcgggctgtccgtccttccacaaatgttgcactctcactctcaccatcaccaccttctcttctccagtctccctctttgtctctcactcaccaccacccatcacaactcttctttaccatctcttcattttcttcacagacccattattaccaccaccaccacaacaacttctgttttagccattctctctactgctgcattgctttgcatagctcacaacacaaagactttgcccacctttgaactctcttccttcccatctttttac

SEQ ID NO: 34444 - DNA, 340 bp, Glycine max
  Clone ID: LIB3138-063-Q1-N1-G7
ctcgagccgcaaaactggagattggatcacacttatacaaaattctccaattagtaacttattgagagttgctgcttggaagaaaggctgtttaatggtcaagattgtgatgtctgggaatgcagcagtcaaaaggagtgattgggcctcattggtacaagtgtttttaacaaacagcaacagtacagagcattttgatgcatgtaagtggacaaaatcagaaccacattcctgggaattgatctttccaatagaggtatgtggtcctaataatgggtttgaaatgtggagttctgagtgggcaaatcaaacttcatggcatttgagttttcttattgac

SEQ ID NO: 34445 - DNA, 381 bp, Glycine max
  Clone ID: LIB3138-063-Q1-N1-H10
gagtgattgggcctcattggtacaagtgtttttaacaaacagcagcagtacagagcattttgatgcatgtaagtggacaaaatcagaaccacattcctgggaattgatcttcccaatagaggtatgtggtcctaataatggttttgaaatgtggagttctgagtgggcaaatcaaacttcatggcatttgagtttccttattgacaatcccaaacagtctacagtttttgatattctcttgggaatctctcaagattttgaaattgctggtaatactcttatgccagctttttctgttccacaggctactgccagatcttctgaaaatgcggaatcctctgcatgatctggaatttgtgttttctttcgcttgttcgtttg

SEQ ID NO: 34446 - DNA, 352 bp, Glycine max
  Clone ID: LIB3138-063-Q1-N1-H11
gggcacttcccgaagtgttaagagaatgcctctttctatagggggaggagctggtgcaaagaatgctattctcatgaatatgccaaatgctgttctttcaatgtggagatattttgttggagatctcgtctttgaagtttctaagatgacttctccctacattaaatgtacagtctctttcttcatagcatttggaaatttggctgatgataccatcaattttgaggctttttcccacaagcttgtgcaatttggagagattcaagaaaaagttgtattgaaattttcacaaaaggaatttcttacaacttggtcaactcaagtgcgttctgcaacaactcttttggctgat

SEQ ID NO: 34447 - DNA, 126 bp, Glycine max
  unsure at all n locations
  Clone ID: LIB3138-063-Q1-N1-H12
ctactcttcnncccattgtttcttctntaaatccctcgcctatatcgttcaganaaattaagatcttgcttcacgatctagaggttgtcccttttcccaaatcacgagtccgttgagttttgattt

SEQ ID NO: 34448 - DNA, 85 bp, Glycine max
  Clone ID: LIB3138-063-Q1-N1-H4
tcgagcttgccaaggttagagatgagtttaaaatgtccgactccgattgcggttctgcgcgtgttcaaattgcacaactcacaac

SEQ ID NO: 34449 - DNA, 263 bp, Glycine max
  Clone ID: LIB3138-063-Q1-N1-H5
ttaaaatgtccactccgagggcggtctgcgcgtgtgaaagtgcctctcaaacaaaattaagcatctttagcagttctacacaagaaggatgttcattctcgtaaaggtttgctagcaatggttcacaggagaaaaagattactgaaatacctcaaaagaactgattgggattcctattgtttcgtatcttcaagctgggtctacgtgataatcccgatcatttttatagagctcgatctggttccgcgacataggatcacata

SEQ ID NO: 34450 - DNA, 226 bp, Glycine max
  Clone ID: LIB3138-063-Q1-N1-H9
ggaagagaacccccgtgtgcccatcatcgtcaccggtaacgatttctcaacactgtatgctcctctcatccgtgatgggcgtatggagaagttctactgggcacctacaagggacgatcgtgttggcgtctgcaatggaattttccgcactgacaatgttcctaaggatgacattgtcaagcttgttgacaccttccccggccaatctattgatttctttggtgca

SEQ ID NO: 34451 - DNA, 241 bp, Glycine max
  Clone ID: LIB3138-064-Q1-N1-A10
aagaaattaataaagaacctactcaaataattgggaaacaaaaacatgcttagtggtgttattagctatgcttacttttccttgtatacatacataaaataagaatttatgtggagggagcctagctgcccgggcaaaattcctctcaaatattggtaatgtttaaaagagatattccttttctgaagatattttactaaaagtaatatgtgaaatgtaatttagagtaaaagctttcatc

SEQ ID NO: 34452 - DNA, 486 bp, Glycine max
  unsure at all n locations
  Clone ID: LIB3138-064-Q1-N1-A11
gagaagcattagcactaggagcagcaacaactagtctcagctgaaatggcctcttcagtgatggcatctgtggccctcaaacctgcccctttcactgttgagaagtcctcagtgagaggccttccctctctctcaaggaactcttcttcattcagagttgtggccagtggcaagaagatcaagactgacaaaccttatggaattaatggtggcatggctttgaaggatggaactgatgcatctggcaagaaaagaaaaggaaagggtgtttaccagtttgtagacaaatacggtgctaatgtcgatggttacagtcctatctacgacaccaaagactggtcttcaaccggtgatgtctacgctggcggtacgactggcttggctatcttggctgtgactctacttttgtctttagctngtggtgcacttcttgtctacaacacaagtgctttgttcaatagactttgcaatcatgttaagtataca

SEQ ID NO: 34453 - DNA, 407 bp, Glycine max
  Clone ID: LIB3138-064-Q1-N1-A12
tgactatctaggcactgtccaccatgagtttaccttcactgttcaggatggaatagatgccattgaagatgttatctaccatattgaacatatgatgtgactacaattagagcaagcacacctatgtttctcatgtctcggaagattaaatcacttggtgtcaaatgggttatctcaagagaaggatctgatgagatctttggagggtatttgtacttccacaaggcacccaacaaggaggagttccacagagaaacatgccgcaagatcaaagcacttcaccaatatgattgcttgcgagccaaataaataacatttgcttggggtctaaaagcccctgtaccatttttggacaaagcgtttattaatgctgcaatgagttttgacccttagtgcaagatgataaa

SEQ ID NO: 34454 - DNA, 256 bp, Glycine max
  unsure at all n locations
  Clone ID: LIB3138-064-Q1-N1-A2
aaaaaaaaattttttttnnnntntnnnnntaaaaaaaaggagggtaaatatataaaggggggggggttaaatattaggggggttaaataaaagggggggaattttacgacggggggaccgcccccaaccaaactttaacccccagaaataattttttaaccctgaccaataggggggccccccccacttttttgcccccccccccccccaattaaatttcccccccccccccccgggcccccccacctttcctttt

SEQ ID NO: 34455 - DNA, 152 bp, Glycine max
  Clone ID: LIB3138-064-Q1-N1-A7
atttgggcctagtgttggaatggcttctcatcaacagcaatcattgtatgggtttggatctggttcaaactcctatggtagaggatacctgcctaaccagggttctagctttggaagcacttccatttccaatcttaatgataggagttttg

SEQ ID NO: 34456 - DNA, 279 bp, Glycine max
  Clone ID: LIB3138-064-Q1-N1-A8
gatttacgtaattggaagtaaccaactaggtttacggcgaaacctagaaatcgatcactgatccaattggagtacctctacaggatagacctcaacagaaaactgaagagtaacggcagcaagtgattgagttcagtagttcctcatataaaattattgactctcgagatataataatatggagaaaacaaaattggttcaagcaccgacagaaccggaagcaccctttgtttcaaagtttcaaaagagggaagacgggttattcacatttcatttgat

SEQ ID NO: 34457 - DNA, 363 bp, Glycine max
  Clone ID: LIB3138-064-Q1-N1-A9
cttgtgcatcgatccatttgaacctttcttgtatttccaaccgtgccatcaacaggtgcaactatgatcaggaacaacaattcaacactgcttaagggtgcaatatcttctgaggaggcaccatgaatatagactgttctgaacaacaaaatagctccaccactgtgcataatctcattaagaccaattaacattaaaacaaccaacttactcacatgtgcgcaactgcactgcattaaaaagattatcaaattggcacttgcagatcaacgcacagcattaacatcaacaacaccaccgccaacaacaacaacaataaggccttctctcttcttagaagcttatgcataaaatctgatcatc

SEQ ID NO: 34458 - DNA, 115 bp, Glycine max
  Clone ID: LIB3138-064-Q1-N1-B1
atattaatacctccttttcctttggttccccccttctgtcacaaaaatttttatttggcttgggaaaggggattttgggaaaaaaggggaggcttaattggcctccggggttccg

SEQ ID NO: 34459 - DNA, 354 bp, Glycine max
  unsure at all n locations
  Clone ID: LIB3138-064-Q1-N1-B10
gttgaagagtattttagttcaagaaaacatgtgaatcaaaatgaacatggacataaaactttggattgtctatttattgtcatagattttagataaaattatcttcttttttttttgtagttctaaactgatgagatgttatgatttgtgttctacaacctttaaagcagttaacttcttcaggcagttggtaatggggaagtccaaattatgcttggttgaattccattatttctcacaaagtataagtctatgtgggtgcaagaggagtttgtaacatggctgctctacctactgcngagcttagtgatgcaaatgcaacacatgtagcaggtggtgatgtgagggtgctgc

SEQ ID NO: 34460 - DNA, 307 bp, Glycine max
  Clone ID: LIB3138-064-Q1-N1-B11
cccgaagtgttaagagaatgcctctttctatagggggaggagctggtgcaaagaatgctattctcatgaatatgccaaatgctgttctttcaatgtggagatattttgttggagatctcgtctttgaagtttctaagatgacttctccctacattaaatgtacagtctctttcttcatagcatttggaaatttggctgatgataccatcaattttgaggcttttccccacaagctggtgcagtttggagagattcaagaaaaaagtgtattgaaattttcacaagaagaatttcttacagcttggtc

SEQ ID NO: 34461 - DNA, 298 bp, Glycine max
  Clone ID: LIB3138-064-Q1-N1-B12
gaactccagtcatttccttgaagttccttatgcaaatcccttcagaaaatctctaatatccaattgtcaacaatcaccattgcggaagcccaaaacaaatccatttcaccgaagaaccatgaccgttacaacagaattcgcagcagcgacaaacgacgaggaagtgccattcggcgtcgttttgttcgggaagtatgagttaaagccgttgctgggagctggcgcattcgccaaagtgtaccacgcgacgagcgtggacgacacgcgccaaagcgtggcggtgaaagccgtgagcaaa

SEQ ID NO: 34462 - DNA, 156 bp, Glycine max
  Clone ID: LIB3138-064-Q1-N1-B3
gagcttgacgtcgatgcgcgcgttccttagcttggaatttgggttggggaaataattaattaattggaggtttcaaattattaaattaaggttccaaaattttaatccatggttttagtcgtttttttttcctttccggctcccagataataaatt

SEQ ID NO: 34463 - DNA, 391 bp, Glycine max
  Clone ID: LIB3138-064-Q1-N1-B7
caaaattctccaattagtaacttgttgagagttgctgcttggaagaaaggctgtttaatggtcaagattgtgatgtctgggaatgcagcagtcaaaaggagtgattgggcctcattggtacaagtgtttttaacaaacagcaacagtacagagcattttgatgcatgtaagtggacaaaatcagaaccacattcctgggaattgatcttcccaatagaggtatgtggtcctaataatggttttgaaatgtggagttctgagtgggcaaatcaaacttcatggcatttgagtttccttattgacaatcccaaacagtctacagtttttgatattctcttgggaatctctcaagattttgaaattgctggtaatactcttatgccaacttttt

SEQ ID NO: 34464 - DNA, 395 bp, Glycine max
  Clone ID: LIB3138-064-Q1-N1-B8
aaataaataaattaattgaagattcaaaataataaattaagggggggaaattttaatacatcgggatagtcgtttttttttcctttccagctaccagataataaattgatgtaacaaatgtatatgctcctcgttcaataattgcaagatgttttaaaatagtccgtactattttattttgtacaaaatgaatcttaatatttaataattatccatacaaaatgataaagacacaagtaattaatatattgaagttaaagtaatacttgaatttaatttttgatgaaaataatttttgatcagattctatctatttcctgactgaattctaaattagtcagagttaattttctctaatataaactagatcatttagacaaaaattaagcagcaca

SEQ ID NO: 34465 - DNA, 423 bp, Glycine max
  Clone ID: LIB3138-064-Q1-N1-B9
gtttggagagattcaggaaaaagttgtattgaaattttcacaagaggaatttcttacagcttggtcaactcaggtgcgtcctgcaacaactctgttggctgatgggtgtccatatttgtatgcaatggtgcatgatagttcagtgtctacaataccaggtgattttgtcattggtgtcaagttgacaaccataaacaatatgtgtgcatatgggctcaatcctggtatttcaggttctcgtcttttgggcaccattcctcagtccatttcacagcaaactgtttggaatcaaatggcaacagtgagaacaccattgaattttgattctagcaagcaaaacttttgtcaagtttctattgaccttctcggtggaggaatcttagtggacaaaactggagaatggatcacacttatacaaaattc

SEQ ID NO: 34466 - DNA, 212 bp, Glycine max
  Clone ID: LIB3138-064-Q1-N1-C10
ctcactggtgtctacctctgtgagatctgcttgatcggactgttcgccatctccactgccaacaacatccaggctgtcggtcccctgattatcgaggccatcatgctcgctctcacagttctgttcaccttgagcttgaacagggcccttgcccacgaggaggctcggcttggctataccgaccctttggcaatcaacggtcaccacgagga

SEQ ID NO: 34467 - DNA, 466 bp, Glycine max
  Clone ID: LIB3138-064-Q1-N1-C11
tggtacaagtgtttttaacaaacagcaacagtacagagcattttgatgcatgtaagtggacaaaatcagaaccacattcctgggaattgatcttcccaatagaggtatgtggtcctaataatggttttgaaatgtggagttctgagtgggcaaatcaaacttcatggcatttgagtttccttattgacaatcccaaacagtctacagtttttgatattctcttgggaatctctcaagaatttgaaattgctggtaatactcttatgccagctttttctgttccacaagctacttgcagatcttcttgaaatgcggaatcctttgcatgatctggaaaattgtgtttctttcgcttggtcgtttgttaattcaataaggaaattaggcatgaccctcttgtgagtatgctctgctatttgaaattccacacctttttaattgcgtatgatgtgtgagtgtggtattt

SEQ ID NO: 34468 - DNA, 57 bp, Glycine max
  Clone ID: LIB3138-064-Q1-N1-C4
aaaaaaaaaaattttttaaaaaaaaaaaaaaaaaaaaaaaaaagggggaaaattaaa

SEQ ID NO: 34469 - DNA, 93 bp, Glycine max
  Clone ID: LIB3138-064-Q1-N1-C6
tgttattaaatcttgtttttgttccatggggggtggagcactttttttttttggcggggggggggccattggttaaggtttgacattgccccc

SEQ ID NO: 34470 - DNA, 210 bp, Glycine max
  Clone ID: LIB3138-064-Q1-N1-C7
gctttttctgttccacaggctactgccagatcttctgaaaatgcggaatcctctgcatgatctggaatttgtgttttctttcgcttgttcgtttgtttaattcaataaaggaaattaggcatgaccctcttgttgagtatgctctgcctatttgaaaatttccacacctcttttaattgtcgtaatgatgtgtgaagtgtgtgttatttt

SEQ ID NO: 34471 - DNA, 204 bp, Glycine max
  Clone ID: LIB3138-064-Q1-N1-C8
cacattctgaagatttttatattctcctatgggatgcaacagcgcggacttgaattcaaacgggccgtctacagcatgacatgttttggattcttgctcaccatcctgaaatgaatctgctcgcacactagtcatgacagtgacatgattgtttttaatctcgcaagagaaaggcctgcatttgatgttagcggtgattctttg

SEQ ID NO: 34472 - DNA, 421 bp, Glycine max
  Clone ID: LIB3138-064-Q1-N1-C9
gagaattgtatttgcacagtccagaggaagctcgccaattgagaaggaaagctctctctcgtattgaatggctgcaaaaagctgatgtgcctaccatagcacagattgaagagttccattcgatgcagaggatgatgaatgctcctgattcaaatgataatattgatttactgttgagcattgatttgttgggtttacaaggagcaagtaaagcttttccaaacaaaattgtttttgatgataagcttgtgttggctaacacacaagaattctttgatggaaattttccagtggattcttggttaccaatttttgtgaattgtctttatcctgtaagtcaattaccttcagaagctgtcgttgtaaatgttacatgtggtagtggaccttgtggttacccaccactgcttggattagttct

SEQ ID NO: 34473 - DNA, 236 bp, Glycine max
  Clone ID: LIB3138-064-Q1-N1-D10
tgatttactgttgagcattgatttgttgggtttacaaggagcaggtgaagcttttccaaacaaaattgtttttgatgataagcttgtgttggctaacacacaagaattctttgatggaaattttccagtggattcttggttaccaatttttgtgaattgtctttatcctgtaagtcaattaccttcagaagctgtcgttgtaaatgttacatgtggtagtggacgcggtggttaac

SEQ ID NO: 34474 - DNA, 345 bp, Glycine max
  Clone ID: LIB3138-064-Q1-N1-D11
aaaaaaaaaatttaaaaaaaaaaaaaaaaaaaaaaaaaaaaaggaaaaaaaaaaaaaaaggaaaaaaaaaaaaaaaaaaaaaaaaaaaaaaaaaaaaaaaaaaaaaaaaaaaaaaaaaaaaaaaaaaaaaaggggggggcccccctttaggggctttttcccccgggaattaatttcgggccgggtcctgggggggttccaatttttccttttggggggggttttaaaacttgggggaaaaaagggaaaaagtttttcctggggaaaaatgttttcccgttaaaaattccaaaaaaaaaacaaccgggaagtttaaagggaaaacccggggggccttatgggggg

SEQ ID NO: 34475 - DNA, 330 bp, Glycine max
  Clone ID: LIB3138-064-Q1-N1-D12
aaaaaaaagattctaaagaaatataactaatattctttagaataatcaaaaagaatattaaattcaaataaattttagatagaaaaaagacttaaaaaggaggatttgaaatgcgagatctaaaaacatatctttccgtggcaccagtagtaagtactctatggttcggggctttggcgggtctcttgatagagatcaatcgtttttttccagatgcattgatattcccttttttttcattctagttattgacacggaaaggggtgaagaagattatagatccaattaagtattaaatatatgtaattaatatgtaattaaatctcctct

SEQ ID NO: 34476 - DNA, 111 bp, Glycine max
  unsure at all n locations
  Clone ID: LIB3138-064-Q1-N1-D2
accggggaaaaaatagttacagttttttttttctttttttttttgtccgaaggacagtgtaaggagattaaaaaaaaaagtagactgtagaattcttttgttgnnnaaaaa

SEQ ID NO: 34477 - DNA, 72 bp, Glycine max
  Clone ID: LIB3138-064-Q1-N1-D3
gttccttccaccctttttttttaaaataatttcccgaacctttggtttttccccctctttcttgggtctcct

SEQ ID NO: 34478 - DNA, 217 bp, Glycine max
  Clone ID: LIB3138-064-Q1-N1-D5
tcctgattgcaacatagttggtgcaatgcttttggttgatgcttatcataccaatcctgaaaatgcagttcgtagtatttttgttgcgcctttcagaggcggaaggcccattcgggtggttacatttccgaataccattgtgcagattgaaccagacatgaattcaaggtttcagcttttgagtaccactaccaatggtgattttgttcaagggaaa

SEQ ID NO: 34479 - DNA, 246 bp, Glycine max
  Clone ID: LIB3138-064-Q1-N1-D6
tccttaacttcggatttcggttcagccaaaatccaagttggcccggggggggattggggggccaaatcccgtgggtttggggaattttaaatttgggaaaggaggggaccggattggtgccactgatcgggccggtgaaagggggggccaaaatatttgtgaccttgagaatttgggatcttccaagtgtggggcaaaacaaatgccaaccatttctggttctaaagaatctaattttctgggatt

SEQ ID NO: 34480 - DNA, 421 bp, Glycine max
  unsure at all n locations
  Clone ID: LIB3138-064-Q1-N1-D7
agctggtgcaaagaatgctattctcatgaatatgccaaatgctgttctttcaatgtggagatattttgttggagatctcgtctttgaagtttctaagatgacttctccctacattaaatgtacagtctctttcttcatagcatttggaaatttggctgatgataccatcaattttgaagcttttccccacaagctggtgcagtttggagagattcaagaaaaagttgtattgaaattttcacaagaggaatntcttacagcttggtcaactcaagtgcgtnctgcaacaactctgttggctgatgggtgtccatatttgtatgcaatggtgcatgatagttcagtgtctacaataccaggtgatnttgtcattggtgtcaaagtgacaaccataaacaatatgtgtacatatgggctcaat

SEQ ID NO: 34481 - DNA, 358 bp, Glycine max
  Clone ID: LIB3138-064-Q1-N1-D8
ctcgagccgtttaaaaaaaaaataaaaaaaaaaaaccaaaagagaaaaaaaaaaaaaaaaaagaaataaaaaaagaagaataaaaggagagcagaggataaaatactggaaccaaaatgaagaaaaaaaaacaagactaaaaatgaaggggcggcgcacatttattggtcctcatcccacgcggaataaaattccgtccagcttcctgtaagggcacctattttccttaaagggggcaatgataagttcagggaattatcgaatatggatgattctcggtgaaaagttgataacattaaaaattgcataacaaatatgaccctgaaagttaaagttaaaaaccgggggtgcctaaagg

SEQ ID NO: 34482 - DNA, 366 bp, Glycine max
  Clone ID: LIB3138-064-Q1-N1-D9
cttttatagtcagaacttcaattatattcagcaacaaataacataccatacaagaacgacaaactgaagtgtgtgtagctctatgggattatcactttccttactccaatctgcgtgggaaggaattgttagacattttcccttttctgatttgcctctcagcatcagctttgcttccaaagatggaactttgattttaagggcatcaagcttcaagagaagagaatcagaaagtgctattactggtttgtcaaacgggtccagaagttcgaaccggttgagggataacagaccccaacatgtgatccttgaaagaaacttttcgtttgttcaagatgaggaagacaacaaaatgggttgggatac

SEQ ID NO: 34483 - DNA, 348 bp, Glycine max
  unsure at all n locations
  Clone ID: LIB3138-064-Q1-N1-E11
attcaatggccaccacagcagctctatccggaaccatggtgagcacctccttcatgaggaagcaacctatgacgaccaagagcctaaagacattccccaacgctctttttggtctgaaaggtggacgaggtggtcgtgtaacttgcatggcctcgtacaaggtgaagctcataaccccagaaggagaagtggagtttgaatgcccagatgatgttttcattgttgacaaggctgaggaagaaagcattgaacttccctactcgtgcagggctggttcttgcgtttcatgtgttgggaaaatngtgaaaagtgacgtggaccagtcagatggtagcttccttgatgatg

SEQ ID NO: 34484 - DNA, 300 bp, Glycine max
  Clone ID: LIB3138-064-Q1-N1-E12
cttattgacaatcccaaacagtctacagtttttgatattctcttgggaatctctcaagattttgaaattgctggtaatactcttatgccagctttttctgttccacaggctactgccagatcttctgaaaatgcggaatcctctgcatgatctggaatttgtgttttctttcgcttgttcgtttgtttaattcaataaaggaaattaggcatgaccctcttgttgagtatgctctgcctatttgaaaatttccacacctcttttaattgtcgtaatgatgtgtgaagtgtgtgttatttt

SEQ ID NO: 34485 - DNA, 365 bp, Glycine max
  Clone ID: LIB3138-064-Q1-N1-E3
ttttcaagggccaataattggtttatgccttctttttcccttacaattattaaggttaacctttggcggtggttacctacccccctttcttaatttatatttggaaatattcggaactaattttttgggcaatgggcagtaccccattaaattcaatagtcggggtagcccaccatggtgcattaatgcgaccctatggttggttggatatggctgctgtttaactggctaattcatggactctcttcccatacatggatgaaatatctgagaagctggactatataggcataaactactatgggcaggtttgctttattaaccttgaaagtgcactgtgcatgatatctggcatactcacatga

SEQ ID NO: 34486 - DNA, 253 bp, Glycine max
  unsure at all n locations
  Clone ID: LIB3138-064-Q1-N1-E5
aaaaaaaaaaatttaaaaaaaaaaaaaaaaaaaaaaaaaaaagaaaaaaaaaaaaaaaagggagaaaaaaaaaaaaaaaaaaaaaaaaaaaaaaaaaaaaaaanggggggggcccccaataaaaaactttttaaacccgaaaaaaaattcggaaccgtaccttgaagggtaccaaatttccctaaaagaaagcctattaaaaattggggaaaaaaaaggaaaaactgtttccttgggaaaaaagttaatccct

SEQ ID NO: 34487 - DNA, 330 bp, Glycine max
  Clone ID: LIB3138-064-Q1-N1-E7
ctcgtcgccctcctcaatggcaagacaaagccagagtggtacgagtggatgaaggagcgcgtcaagaacaatgttggctactcgacgccgaccgacctgccagacccgtttgcgaatcggggccagcagcaacagcaacagggcggcgcgaggggcgcgctgtccggcccctcgtccttcctttcgaacgccatcaacaacgggacgctgcgcttcgggcggggcgacgacgacgacgatatggagggcgacgattccgaccagtacaacacgacaaaatccgccacgtcgctcgacgaggacgccatgatcgaggacacgtcgtcgtcg

SEQ ID NO: 34488 - DNA, 440 bp, Glycine max
  Clone ID: LIB3138-064-Q1-N1-E8
cctttgtgttgtgttgcccactctaaaaaagtgagagagagagagagagagagagagagaggacaacatcccaccatttgtggctgccctctattttagtccctaaccttaatcatgccatcaggtgctaagaagaggaaagctgccaagaaaaagaaagaaaaagaaactgaaattaacaccaaccaccctttaaccaccaaccctcaaggcaatgatgaagtgaagtctcaagatgagaaagggagtgattgtggttcaccaacacattgtgaacatgatcttgcattcaatgaagaagaggaagagaaggacccttcagctgctcaaccatctcatgctgctgctgcttccaaggactttgaagaagtccctggtgatgctaataggattgatgaaacagaaggaggtaaaaaaggtattgttgtgatagagtggga

SEQ ID NO: 34489 - DNA, 442 bp, Glycine max
  Clone ID: LIB3138-064-Q1-N1-E9
ggcagtggccctgctgaatctggggttatttgcttgtatcaatgttgccctgcatgcctccacagtctccatcacttgacaaagaaaatacttgttgaaaaatggggtttaaacagtgagcagtggacggcagaagatgtccatgatgctgttgcatcattatctgtggatcttatttcagcagttagaaaatgctctatgcctcaagatttcattgattcatcaaataaaacctcaagaaatgaaaagcatggaacatctctcgactgtttgaagctgagaacgtgtaataatggaaaccaaggcaaggatgttgtgccagctgaatgtttttctcacgcagcaagccaacatgcaactgcaatggaagatatggcactgaatgaaaaatcgacgaagcttgatcttaaatttgttttcagagatggtgtactagttcata

SEQ ID NO: 34490 - DNA, 106 bp, Glycine max
  Clone ID: LIB3138-064-Q1-N1-F1
ccttccttaacttcggatttcggttcggggtttttttaacttatttatgaaggtagtagagtcatatcataaagaagcaagtctgaatacaagtttccaacaaaaa

SEQ ID NO: 34491 - DNA, 301 bp, Glycine max
  Clone ID: LIB3138-064-Q1-N1-F10
atggagagcaatttgaagaaatgactttaaatctttgtgtactgacccccaatcgaattgtttgggattcggaagtgaaggaaatcattttatctactaatagcggacaaattggagtattaccaaatcatgcgcctattgccacagccgtagatataggtattttgagaatacgtcttcttaaaagaccaatggttaacgatggctctgatgggcggttttgctagaataaacaataatgagatcactgttttaagtaatgatgcggaaaaaggtagtgacattgatccacaagaagcac

SEQ ID NO: 34492 - DNA, 285 bp, Glycine max
  Clone ID: LIB3138-064-Q1-N1-F11
tgcaattgaagttgaagtcttgcccttctctcttcaactccaaacacaagacatcatcatccatggctgcctccgtctccactgtcggagctgtcaacagagctcttttgaacctgaatgggtctggacctggggtttcagctcccagttcattcttctttgggagcagcttgaagaaggttattggctcaagggtccccaacacaaagatttcctctggaagcttcaagattgttgctgtagaagagaagaaagagattgaagagacccagcagaccgacaagg

SEQ ID NO: 34493 - DNA, 290 bp, Glycine max
  Clone ID: LIB3138-064-Q1-N1-F12
aggacctattgtgttttaaatccacaaaatccttttgtgttaaataggtggatgggaaaattgactttcccccagggcacttcccgaagtgttaagagaatgcctctttctatagggggaggagctggtgcaaagaatgctattctcatgaatatgccaaatgctgttctttcaatgtggagatattttgttggagatctcgtctttgaagtttctaagatgacttctccctacattaaatgtacagtctctttcttcatagcatttggaaatttggctgatgataccat

SEQ ID NO: 34494 - DNA, 232 bp, Glycine max
  Clone ID: LIB3138-064-Q1-N1-F3
attgcacttcccaagaacacagttggaggaaccattctgcgtagtgatctattggcaaattttttgacagaaggcaattttagagcaagtgttgatttgcagcgcactcatcgtattagaagaatgattaaaatggtggccacagttggtattcctgagaatacaagtatatcattggcctgtgctatgaatagttcttttagggggcgcgccagttctgatatttacacca

SEQ ID NO: 34495 - DNA, 476 bp, Glycine max
  Clone ID: LIB3138-064-Q1-N1-F8
tgcaaaaatggcatcattcaccatgacagcttccatccttggcggcccagccgtcaccaaccggttggcagtagcaacgcagaggagatcactcgtagtgaatgctgccaaagctgttgaagcggaaaaggtcagttatgacaatgacatggatggtagcaatggaaggaggaacttgatgttcgccgtggcggttgcggctgctgtttgctctgttgctgggatggcagtggcagatgagccaaaaccaggaaccccagcggtcaagaaaaagtatgctccgatttgtgtcaccatgccaactgctatgatttgtcgcaattgaaggactcggattttattttacttctgatgatcggaaatgtgcattagggttggagtgatgttttgatttcacatgatcctcactgtactagatgttcataaaactatcgactttgctttgtctatttggtgtcgccgtttatgttcataaa

SEQ ID NO: 34496 - DNA, 373 bp, Glycine max
  unsure at all n locations
  Clone ID: LIB3138-064-Q1-N1-G10
aaataattctcctctcacccttataaaaacactcattttaactcccacttttgcatttccacctatctatctatccatctatcttttctaacatggctgctgggactggactctttgcagagattttggatggagatgcgtacaagtactatgctgatggagagtggaagaaatctgcttctgggaaaagtgtttccatcatcaaccccactaccagaaagactcaatacaaagttcaagcttgttcacaagaggaagttaataaagtcatggacttaacaaaatctgcacaaaagttatgggcaaagaccccactatggaaacgtgctgagcttcttcacaaggcagctgctatccttnaagagcacaaaac

SEQ ID NO: 34497 - DNA, 207 bp, Glycine max
  Clone ID: LIB3138-064-Q1-N1-G12
agaattctctaaaagagatctttttctgctctttgaagaaagaagggtctttgcttgattttggagatgtctctgctctcagatctcatcaaccttaacctctccgataccaccgagaaggtgatcgcagagtacatatggatcggtggatcaagaatggacctgaggagcaaagcaaggactcttccaagaccaggtagcgaccct

SEQ ID NO: 34498 - DNA, 406 bp, Glycine max
  unsure at all n locations
  Clone ID: LIB3138-064-Q1-N1-G7
ggcacagcacagcgcagcgccgcctcaacatctcaactntcccttcgatctcattctcaggtgttgttgaagcttcctgtgttggctcggtatccctgcaagttctgctgtagcagattccaaggtgaaggtgtcacgttaaagtttctttcatgtttgaacaggctactattcatttgggagcaactgagctgcttggagagtatttttcttcctctaggaaaaattacagaccctcaccacagagacctagttgtatgaacggttggccaccttccattatcnctgaagggagatgttcaaggatacagactacctttgaggttgaaattgcngctgcatataatttgaatccagcattttctgcctctgaatatctctggaactttgtaagtcaacaaacatg

SEQ ID NO: 34499 - DNA, 297 bp, Glycine max
  Clone ID: LIB3138-064-Q1-N1-G8
gatgaatttgatgttgaagtaccaatttattttcgtggtggggaagatggctctgttactgcgtatgcacgaatttctcgtcaggtttacaacaaggttgaggactattataagttcaggaatgcggttaatcaacttgtgcaagatgggtttacttgtgctcttctttccgcttgaaattggggtagcctatgctctgctcttaattttaattaactcctcaataacatattcgtccattttatatgtgggatactatttgcaaatgttgagtttgcactttgctgattgcgctat

SEQ ID NO: 34500 - DNA, 324 bp, Glycine max
  unsure at all n locations
  Clone ID: LIB3138-064-Q1-N1-G9
aaaaacatatctttccgtggcaccagtagtaagtactctatggttcggggctttggcgggtctcttgatagagatcaatcgtttttttccagatgcattgatattcccttttttttcattctagttattgacacggaaaggggtgaagaagattatagatccaattaagtattaaatatatgtaattaatatgtaattaatctcctcttctttatttcgncttttatttcttcttttttttacaattgtaatagaataagttaggaaagagaaagaataaaggttaatttggcctaattgaaattcggagtgaaacttcggatc

SEQ ID NO: 34501 - DNA, 279 bp, Glycine max
  Clone ID: LIB3138-064-Q1-N1-H1
gccaaattcagaaccacattcctgggaatggatcttcccaatagaggtttgtggtcctaataatggttttgaaatgtggagttctgagtgggcaaatcaaacttcatggcattggagtttccttatggccaatcccaaacagtctacagttttggatattctctggggaatctctcaaaattttgaaattgctggtaatactcttatgccgcttttttctgttcacaggctactgccagatcttctgaaaatgcggaatcctctgcatgatctgggaat

SEQ ID NO: 34502 - DNA, 184 bp, Glycine max
  Clone ID: LIB3138-064-Q1-N1-H10
aaaactagtgcaactttgcaatttagaaagttagcagattgtgattttctcaagagaaactttaagcagatgtctaatgttttgtgggtggctcctgaggacaaggcgagtttatggtcacaacttcattatgtttcgggtaataatctggaaatgcaagaagcttatcttgtcaatctcgtaa

SEQ ID NO: 34503 - DNA, 308 bp, Glycine max
  Clone ID: LIB3138-064-Q1-N1-H11
aaaaaaaaaatttaaaaaaaaaaaaaaaaaaaaaaaaaaaagggaaaaaaaaaaaaaaaaaagaaaaaaaaaaaaaaaaaaaaaaaaaaaaaaaaaaaaaaaaaaaaaaaaaaaaaaaaaaacaaaaaaaaaaaaaaaaaaaaacaaaaaaaaaaaaaaaaagggggggggcccccattttggaatttcttcccccccaaaataatttcgggccgggctcttggggggcaccaatttttcttttttgggggctttttaaaaattgggggaaaaaaggaaaaaagttttttcctgggaaaaattttttt

SEQ ID NO: 34504 - DNA, 55 bp, Glycine max
  Clone ID: LIB3138-064-Q1-N1-H12
aaaaaaaaataaaaaaaaaaaaaaaaaaaaaaaaaaagggaaaaaaaaaaaaaaa

SEQ ID NO: 34505 - DNA, 315 bp, Glycine max
  Clone ID: LIB3138-064-Q1-N1-H3
atgattcagttgaattttttctgcttctgggcctgggtcggggaaggcactttgtttattctgtctgcctctctctcttataagtattgttacttttttttttttttaattttaaatatcaaatatgtaataaagagccataatgaatggtttttaggtgttttgaattaaaattagaattgagagaggtgttggtatggactaggggtttctcgtgtagagatgtgatagacagtcataacataacaccgccgcacattagcatttttttgaggtggatgtggtatcagtgttactggggtgagggtagttaaa

SEQ ID NO: 34506 - DNA, 195 bp, Glycine max
  Clone ID: LIB3138-064-Q1-N1-H4
ctcgcgttgtctccaaagcacgccaaattacccacacgcaaacgacaacaaccgcgcgcgtttcacaccttcataactcggagtagcatacgcagcgtcgttgactcgcaactcgtaacttggcctcgcgcgccgatggcgtcggtccccagcaccgtcgcttcccgcacctttctgccgtcgattcccaagccg

SEQ ID NO: 34507 - DNA, 292 bp, Glycine max
  Clone ID: LIB3138-064-Q1-N1-H7
gctctctccaccttcagggcaaaggaggaagagattgaaaggaagaagatggaggtcagagaaaaggttcagcttcagcttggtcgtgtcgaagaagaaactaagcgtcttgcaaccattcgtgaggagcttgaagccctggcagatccaatgaggaaagaagttgcgcttgttcgaaaaagaattgattccgtaaacaaagaattaaagccactgggtcatacttgccagaagaaggagaaagaatacaaagacgcccttgaagcttttaatgaaaaagacagggaaaaag

SEQ ID NO: 34508 - DNA, 274 bp, Glycine max
  Clone ID: LIB3138-064-Q1-N1-H8
atctgtttgtgtttcttttggaatctctgccagatgaaaggagtcttccccaacccttgcctgtgcaagggagaaatcaagcggataatgggagtaggtcaagcagttccagtagctccagcagtgattctggttcttcttcaagtgattctgatagtgacaggtcctcaacatctggatctgatgcaaggtcgcaagggacctgactatgctctgtcaaaatctaaatttttagagtaaatagtgtcttgatgccagcctattttggtttttt

SEQ ID NO: 34509 - DNA, 167 bp, Glycine max
  Clone ID: LIB3138-064-Q1-N1-H9
caaacagcaacagtacagagcattttgatgcatgtaagtggacaaaatcagaaccacattcctggggattgatcttgccaatagagggttgtggtcctaatgatgggtttggaatggggaggtctgagtgggccaattaaacttcatgggatttgggtttccttaat

SEQ ID NO: 34510 - DNA, 395 bp, Glycine max
  unsure at all n locations
  Clone ID: LIB3138-065-Q1-N1-A1
atcatcactgacctcgccatgttcattactccgctttggattgcgggtatcgtcggcgtcgtcgtgggctgggcctggaagcccaaatgggcctttcaccccaaagacgctcttctcaagtttcgctcccctcgcccttccaatccccaaaacgacaccgctttcaccttctccaccaccagttcctccgcgcgtgaaaaagacgcgagtgcgagtgcgagtcatttagtgacggaatacgatttgctgcatctgtggaagttggttgaggaaaaagacggagggccggcatggattcagatgatggaccgttctaccccgaccatgagatatcaagcgtggcgtanggatcctgagagtggaccgccgcagtatcggagcagaacagtgttcga

SEQ ID NO: 34511 - DNA, 246 bp, Glycine max
  unsure at all n locations
  Clone ID: LIB3138-065-Q1-N1-A10
gtgaattgtggaatactgcttgcacaaaagcaatgactatgtcatttaatccaaacccgtgttctgatgcatggagtttggaatttctgaagcgtactggatttcattgcgatatcatttgtgtcactggatggactgccaccccaatgcangatgttcangttacaattgattggtttatttcctctcangaatgtgttcccnagaccctattgtgtttaaatccacanaaatcttttgtgttaa

SEQ ID NO: 34512 - DNA, 270 bp, Glycine max
  unsure at all n locations
  Clone ID: LIB3138-065-Q1-N1-C6
ttccgctcgagattttcttaatgttttggagtagagtattttgggaggggatgatagcaatcttgtgagagatcagtctaaaactcgcacagaaactggattttttaataaaaatgtgtgcctcagagtgtgtcatattcaaatactccgattttgatgatgatgtaataacgacaataccaccccccgttggctgctgcaactgttgtctactacttactacgaagcaccgtggttgggcaaccnnnnnaaaaaaaaaaaatttattat

SEQ ID NO: 34513 - DNA, 178 bp, Glycine max
  unsure at all n locations
  Clone ID: LIB3138-065-Q1-N1-H5
gggggggggggggaaggggttaaaagaaaaaaaaaaaaaaattttaaaannaaaanaaaaaaccacggggccgttaggtttgtannnnnaattaacacacaaaaaaaaacttcacaaacaaaaaaggggggggggagtctgactttaaataatttccctgggagggcttaacgtctga

SEQ ID NO: 34514 - DNA, 147 bp, Glycine max
  Clone ID: LIB3138-066-Q1-N1-G11
gcttgactgatgcacctactagctgaattggtgagggaatgctcaccatcggtcggtcagaaggacgttatgggacgcaaattagcgtggtaccataacactggtgtgcacgttatggacgcagttacgacaatcggaaaagatgct

SEQ ID NO: 34515 - DNA, 246 bp, Glycine max
  Clone ID: LIB3138-069-P1-N1-A10
atgggctcaatcctggtatttcaggttctcgtcttttgggcaccattcctcaggccatttcacagcaaactgtttggaatcaaatggcaacagtgagaacaccattgaattttgattctagcaagcagagcttttgtcagttttctattgaccttctcggtggaggaatcttagtggacaaaactggagattggatcacacttatacaaaattcttcaattagtaacttggtgagagttgctgctt

SEQ ID NO: 34516 - DNA, 206 bp, Glycine max
  Clone ID: LIB3138-069-P1-N1-A11
caatgcaggatgttcaggttacaattgattggtttatttgctctcaggaatgtgttcccaggacctattgtgttttaaatccacaaaatccttttgtgttaaataggtggatgggaaaattgactttcccccagggcacttcccgaagtggtaagaagaatgcctttttctatagggggaggagctgggtccaaaaatgctttttt

SEQ ID NO: 34517 - DNA, 89 bp, Glycine max
  Clone ID: LIB3138-069-P1-N1-A12
ctcgagccgaatcggctcgagcggctcgagatgaaatttaaggaaaaaaaaaaataataataaaataaaattataaataaaataaataa

SEQ ID NO: 34518 - DNA, 384 bp, Glycine max
  unsure at all n locations
  Clone ID: LIB3138-069-P1-N1-A2
ctgattttgtccatccaaaccttaaaaagattcagtgaagaacaacgttaatggcatctgttggtgtgcaagcagttcatcctcctccattaacatccaccttcgacccacctnctctttttgatggcaccaccaggttgtacatcagttattcttgcccctatgcacaacgtgtatggatcgctcggaacttcaagggactaaaagacaagatcaatttggtccctataaaccttcaagacaggccagcttggtataaggagaaagtctaccctgaaaataaggtgccatccttggagcacaatggcaaggtgttgggagaaagtcttgatttgatcaaatatgtagatgaaaactttgaagggacacctttggttccaaaga

SEQ ID NO: 34519 - DNA, 388 bp, Glycine max
  Clone ID: LIB3138-069-P1-N1-A4
cagagcttttgtcagttttttattgaccttctcggtggaggaatcttagtggacaaaactggagattggatcacacttatacaaaattctccaattagtaacttgttgagagttgctgcttggaagaaaggctgtttaatggtcaagattgtgatgtctgggaatgcagcagtcaaaaggagtgattgggcctcattggtacaagtgtttttaacaaacagcaacagtacagagcattttgatgcatgtaagtggacaaaatcagaaccacattcctgggaattgatctttccaatagaggtatgtgggcctaataaatggtttggaatgtggagttttgagtgggcaaaataaaacttcatgggcatttgagttttcttattgacaa

SEQ ID NO: 34520 - DNA, 376 bp, Glycine max
  Clone ID: LIB3138-069-P1-N1-A7
ctcgtattgaatggctgcaaagagctgatgtgcctaccatggcacagattgaagagttccattctatgcaaaagatgatgaatgctcctgattcaaatgataatatcgatttactgatgagcattgatttgttggctttacaaggagcaggtaaagctttctcaaacaaaattgtttttgatgataagcttgtgttggctaacacacaataattctttgacggaaattttccagcggattcttggttaccaatatttgtgaattgtttttatcctgtaaggcaagtaccttctgaaacttaacgttttaattggacattaagtcttttattctgaaattttttccctaaaaacttttgaaggggcctctttttttt

SEQ ID NO: 34521 - DNA, 336 bp, Glycine max
  Clone ID: LIB3138-069-P1-N1-A8
gtcaagccttactttagtggttctaaattgaaaagcttggtagctagtcataacatgaccattactgatggtattgacaaaactagtgcaactttgcaatttagaaagttagcagattgtgattttctcaagagaaactttaagcagatgtctaatgttttgtgggtggctcctgaggacaaggcgagtttatggtcacaacttcattatgtttcgtgtaataatctggaaatgcaagaagcttatcttgtcaatctcgtaaatgtgttacgagaattgtatttgcacagtccagaggaagctcgcctattgagaaagaaagctctctcttgtatt

SEQ ID NO: 34522 - DNA, 215 bp, Glycine max
  Clone ID: LIB3138-069-P1-N1-A9
attcacagtttatcaaaactatcatacccacatggattggcgatgaatgtgagagagtccaattattcaaacgctttgtgatgcttgtgagagcgcccaggctatagttatttgcgcctctgataaggctgcactttgtctagcctgtgatgagaagattaatctttttgagcttacaggatcacatgtgcaacaagctatctcgtacgtatgtt

SEQ ID NO: 34523 - DNA, 214 bp, Glycine max
  Clone ID: LIB3138-069-P1-N1-B2
attaaagattcaacaatggcctctgcttctgctactcttctcaagtcatctcctgttcttgacaagtgcgagtgggtcaaaagccagacccttcgccaacctctcgtgagatgtaaccctttcttagcattagctcttaccatcaaagctgctttctatgctgacgagctcgtcaaaaccgccaaaacagtggccttaccggggcgtggtattt

SEQ ID NO: 34524 - DNA, 350 bp, Glycine max
  unsure at all n locations
  Clone ID: LIB3138-069-P1-N1-B3
cggctcgagggagtattgaccagctggaattaatcatcaatctccttttccttatttctattttttattttccaaaattggatctgctatggaatttgtgccttgtttctcagatagtggaatatttgttggaccatgaagcataaagatggaaaaccgattaatcagccaaataagaaccgggctgtgactttggcagtcactttaattgctctatgtggnttttctttctatctgggaggaatcttttgctctggaaaggatggggttgtggttaataccattcagaagacccttgattctcctaagcaatccttaagttctctgcaaattaagccaatcagtttccc

SEQ ID NO: 34525 - DNA, 410 bp, Glycine max
  Clone ID: LIB3138-069-P1-N1-B4
gaaacaggcatagcatgctacactcgcgggcctttcttgcctagtgtttcttccaagcactctccaccttccatttctccatcttttggcttgaggagtctgaaatcaagctctttatttggagaatcgctaagagtggcctccaaatcaacaataaaggtttcaaagacaaagaatacttcactcgtgaccagatgtgaaattggtgacagtctctaagaattcctcacaaaagcaacaccagataaggggttgatcaggttgttggtgtccatgggagaagcattgagaacaattttctttaaagtgaagacggcttcatgtggtggaacacaatggtgttaatactttttggtgatgagccagctttgcaatggatttgcttagctaatcaagctttttttttgagg

SEQ ID NO: 34526 - DNA, 395 bp, Glycine max
  Clone ID: LIB3138-069-P1-N1-B5
aacacaaagacatcatcatccatggctgcctccgtctccactgtcggagctgtcaacagagctcttttgaacctgaatggttctggagctggagcttcagctcccagttcagccttctttgggaccagcttgaagaaggttattgcctcaagggtccccaacagcaaggtttccggtggaagcttcaagattgttgctgtagaagagaagaaagagattgaagagacccagcagaccgacaaggacagatggaagggtcttgcctatgatatctcagacgaccaacaagacattacaagaggaaagggtttggttgactcccttttccaagctccacaggatgctggaactcactatgcagtcatgagcttctaccagtaccttaacactggact

SEQ ID NO: 34527 - DNA, 404 bp, Glycine max
  Clone ID: LIB3138-069-P1-N1-B6
gaaaagctttctagctagtcataacatcaccattactgatggtattgacaaaactagtgcaactttgcaatttagaaagttagcagattgtgattttctcaagagaaactttaagcagatgtctaatgttttgtgggtggctcctgaggacaaggcgagtttatggtcacaacttcattatgtttcgtgtaataatctggaaatgcaagaagcttatcttgtcaatctcgtaaatgtgttacgagaattgtatttgcacagtccagaagaagctcgccaattgagaaggaaagctctctctcgtattgaatggctgcaaaaagctgatgtgcctaccatagcacagattgaagagttccattcaatgcaaaggatgatgaatgctcctgattcaaatgataata

SEQ ID NO: 34528 - DNA, 331 bp, Glycine max
  Clone ID: LIB3138-069-P1-N1-B9
gcaatttgtaagaaagatgtttggagagttgaatgtggaatcccttctggatttccgctcacagttatttgcaatagcatttttaatgagatgctcattagatatagctatgaaaaattactgcgccaggctaaagctccaagtatgtttttacaatccttcaaaaattttgtttctttgtgtgtgtatggtgatgataacttaattagtgttcatgaatatgtcaagccttactttagtggttctaaattgaaaagctttctagctagtcataacatcaccattactgatggtattgacaaaaactagtgccaacttttgcaattttaaa

SEQ ID NO: 34529 - DNA, 371 bp, Glycine max
  Clone ID: LIB3138-069-P1-N1-C12
gaaagatgtttggagagttgaatgtggaatcccttctggatttccgctcacagttatttgcaatagcatttttaatgagatgctcattagatatagctatgaaaaattactgcgccaggctaaagctccaagtatgtttttacaatccttcaaaaattttgtttctttgtgtgtgtatggtgatgataacttaattagtgttcatgaatatgtcaagccttactttagtggttctaaattgaaaagctttctagctagtcataacatcaccattactgatggtattgacaaaactagtgcaactttgcaatttagaaaggttgcagattgtgattttttcaagagatactttaagcagatgtcttatgttt

SEQ ID NO: 34530 - DNA, 342 bp, Glycine max
  Clone ID: LIB3138-069-P1-N1-C4
ggcaaaccccgagtatgtagacaagacctatctttctgtcaaaggtggtcttgcacgaggcgagttccgtcctgacgcctcagaggagaacttgagggcttccgtcaccaccatcaacgacaccctgggtggcaaaaagaagatggatctgtttgaaatggctcgagtggacaagtcgcggtctatcgaggaaacaatgaagaccttgctcaagttgcgggacgaggggcacttcaaagatatcgggttgagcgaggtgtctgcaaagaccatccgtgctgcagctgcagtggcacctattgctgctgttgaagtggaatactctccttggtcacttgatat

SEQ ID NO: 34531 - DNA, 128 bp, Glycine max
  Clone ID: LIB3138-069-P1-N1-C5
ctctgatcctcaagaggaactagccgacagggggacacaactctgataatgtataaacggagacataattggtactgatggcattgccatgggtgctcaccaaaaggccatcgttcattggtgggctc

SEQ ID NO: 34532 - DNA, 125 bp, Glycine max
  Clone ID: LIB3138-069-P1-N1-C9
atgagaactgttgctgctgttgacatggaatttagtgggacggctaaaactggtgtggcagccactgatttaaatgttgcaaagcttaaaatgatccttgatgagtatcaattatgatttcgttt

SEQ ID NO: 34533 - DNA, 149 bp, Glycine max
  Clone ID: LIB3138-069-P1-N1-D1
gtaagaatgctagttcttctgaaataaagaaagcatactatgggcttgcaaagaagcttcattcagacacaaacaaagatgatccttaagctgaaaagaagtttcaagaagtttcaatggcatatgaagttttgaaggatgaggaaaaa

SEQ ID NO: 34534 - DNA, 367 bp, Glycine max
  Clone ID: LIB3138-069-P1-N1-D11
actcatcaagggttgtgaaagcagagaagtgagatacactaagttatcctcataaatacactctaattaggtggcaagataagtgtctaaccttagtaacattgccacatattgtgttcattttggaattgtgccactaaaattctattcaattcatctatggctgcctcttcttatgctatgcaatcaatcctggcaaaccctttgatccgcatttccagcgggtctagggtgaaccaatttggcgttcctgctttgcacatgagaaggaatgttggcctgagagttaggtccatggctaaagaagaacaaccaagtgagcctgcaaccccagttacaccgtcaccatcagtagaacccaagccac

SEQ ID NO: 34535 - DNA, 327 bp, Glycine max
  Clone ID: LIB3138-069-P1-N1-D12
attgaagagttccattcgatgcagaggatgatgaatgctcctgattcaaatgataatattgatttactgttgagcattgatttgttgggtttacaaggagcaggtaaagcttttccaaacaaaattgtttttgatgataagcttgtgttggctaacacacaagaattctttgatggaaattttccagtggattcttggttaccaatttttgtgaattgtctttatcctgtaagtcaattaccttcagaagctgtcgttgtaaatgttacatgtggtagtggacgtggtggtttacccaccactgcttggattagttctgcagttaac

SEQ ID NO: 34536 - DNA, 207 bp, Glycine max
  unsure at all n locations
  Clone ID: LIB3138-069-P1-N1-D2
gcttgctcatcaaggtcaagaaccaacctaccttttgcaatctgaattcaatggcgtcctctctcattgcgaagcgcttnctcttctctttcctcctcttcaggtcccttcttcggcccgccgctttcgctttccaccggtctttcaacaccaacgccatgcgccagtatgacaaccgcgccgacgaccacaggaccgacattgatc

SEQ ID NO: 34537 - DNA, 184 bp, Glycine max
  Clone ID: LIB3138-069-P1-N1-D5
ctcgagccgccaaaataaaaaaacttccttttttgcaattggcatttgtcaccaaacaattgttggtaggtcttacaagcaagctttagcaacgacaatgaagaaaggggtcttacagctggacttacatgggggtagaatcaagccaaaagcttttgaaaccgcatcttggcctttaaggggt

SEQ ID NO: 34538 - DNA, 200 bp, Glycine max
  Clone ID: LIB3138-069-P1-N1-E10
ctagactcgctgcacgcaacgaagctcgtttcggctcgaggaatatgatattgttcatgaccataataaccctcagcggggattcactctggggaaagtgctacataaaacacacccatacatatacagtaatattgttttcatgtctttactaataattgtattaaaaaatacttttttctaagaagaattctttcaaa

SEQ ID NO: 34539 - DNA, 396 bp, Glycine max
  unsure at all n locations
  Clone ID: LIB3138-069-P1-N1-E2
gatgtctgggaatgcagcagtcaaaaggagtgattgggcctgagtggtacaagtgtttgtagacaaacagcaacagtacagagcattttgatgcatgtaagtggacaaaatcagaaccacattcctgggaattgatcttcccaatagaggtatgtggtcctaataatggttttgaaatgtggagttctgagtgggcaaatcaaacttcatggcatttgagtttccttattgacaatcccaaacagtctacagtttttgatattctcttgggaatctctcaagattttgaaattgctggtaatactcttatgccagctttttctgttccacaggctactgccagatcttctgaaaatgcggaatcctttgcatgatctggaanttgtgttttctttc

SEQ ID NO: 34540 - DNA, 344 bp, Glycine max
  Clone ID: LIB3138-069-P1-N1-E7
gaacaaatgaaaaacatggtcctcatccttcgtctccaccacttccgcaacaccagaccacccattcttctcaagcaactccttatagtacaaacccctgtccctcaccaaatccttctccgaacacaaagaagcaatctttcacaagctaacttccccagcttcggatccttactcgggttaataatcgggtcatcggatccactctcactagggcacgcaaaccgccacaaatcgtgtatcttcttcgcttgttcaggcctggtttgcttcacacccaaacggttcctcttccccagaaaaagggatgcaccaaaacaaccccttcaagtttcacaccaagc

SEQ ID NO: 34541 - DNA, 70 bp, Glycine max
  Clone ID: LIB3138-069-P1-N1-F1
ctttccacatacaccatttttgtattacaaagccggcgaacacggcaacaacgccaatggaactttactt

SEQ ID NO: 34542 - DNA, 199 bp, Glycine max
  Clone ID: LIB3138-069-P1-N1-F2
gccactaatcctatgctgtctcgacttcttgagaactgaaagagtctcaaatatctggttgatgagtgtccttttgcatttgtgaactagtatgtagtattttattcacttaaataaagcgcattactatgtgcaatgagtgtgtttaaattttaaataaaattttattaaaattataataatttttacttatattttt

SEQ ID NO: 34543 - DNA, 169 bp, Glycine max
  Clone ID: LIB3138-069-P1-N1-F6
gaattctttgatggaaattttccagtggattcttggttaccaatttttgtgaattgtctttatcctgtaagtcaattaccttcagaagctgtcgttgtaaatgttacatgtggtagtggacgtggtggttttctttctattgttttgatttatctttatcttatttttc

SEQ ID NO: 34544 - DNA, 363 bp, Glycine max
  Clone ID: LIB3138-069-P1-N1-G1
gggacatgcgtcaaactgtggctgtcggagtcatcaagagtgttgagaagaaagaccccaccggagccaaggtcaccaaggccgctgccaagaagaagtgattgcatttgggcaattttgctagcacatgtgatcatcatcgtggttactcctttatagtagttttatccttgcagagtcttaggtgttttgtttaagttatatttttaagtttctgccgatttcatgtagccgtaactttcaaaactaggttcttgatcggcggtggtcaattttcattgctgtttgtttttgatgagtactggttttttgtttttgatgggaagaaagaggtctgagaatattttcgaaattttacaaagc

SEQ ID NO: 34545 - DNA, 419 bp, Glycine max
  Clone ID: LIB3138-069-P1-N1-G10
tcaaccgcaaacctcaccgttctggtcgtaggaagaaaaacaaaagaaggtgggaccccaattatccaaagccgaataggagtggctataacttcttctttgctgaaaagcattacactctcaaaactctctacccaaacagagaaagggagtttaccaaaatgattggccagtcatggaacagtcttagcccagaagaaagaatggtttatcagaacattggcttaagagacaaagaaaggtacaagagagaattgacggagtacaaagagaagatgaagcttaggcagacctcagaagttggacgtccatagaatctcattggtacccgtttgtggaggcgaaagaatggcttagaaaatttttataatcttgtgacttttacgtgcatattggtgtggataatgggccactggact

SEQ ID NO: 34546 - DNA, 202 bp, Glycine max
  Clone ID: LIB3138-069-P1-N1-G12
agacaatgcagcactctgacagtggggctgtcatctcgggacacaaaggttttctacaccaatccactgcccggttcttgtaacacagtggcttttgccaaactctaaaaaagattcgctctgaagcgcatttcgagaaaaatggatttgatgggattcccagttgttctggaagaaatgtgtcttaagtattttgatatat

SEQ ID NO: 34547 - DNA, 172 bp, Glycine max
  Clone ID: LIB3138-069-P1-N1-G2
atatgctattctttaatcaatgttgaacatcctcataagtatatatcaaattaccttgctaccctggaaacacctccagaattgaggcaagaggcttggaatctggctatatgatagtttgagaactacattgtgtgttcgatttaagagtgaggttgtggcttgtggagtt

SEQ ID NO: 34548 - DNA, 321 bp, Glycine max
  Clone ID: LIB3138-069-P1-N1-G5
ctcgagccaaatcatctctaggaagaacaagttgttgagaacgaagaaggtgaagcaaatggctgccttaatgatctctttcccagctgttaccactgtcaaccgtgccggtgccggcatggatgttccatttactggcctcaagtacatggatggttttccttccatgatgtccaacattgacattaccttcattgttagcaacggtggatgagtgcaatgtatgcttgataggtcaccatatggcaagaagaagtttgagactcttttccacctgccagaccttgatgatgcacaattggttaaagaagtattattcct

SEQ ID NO: 34549 - DNA, 275 bp, Glycine max
  Clone ID: LIB3138-069-P1-N1-G6
tagcaatggtagcatttgtctagatatcctgaaggagcagtggagccctgcactcaccatctctaaggtaactgctttctatctgctcattgctgactgatccaaaatctgatgatccacttgttccggaaatcgctcacatgtacaaaactgaccgtgccaagaatgaggccactgcacgcagatggacccaaaagtatgccatgggctgatttgtgtttggaaaaagtatattgaaaaggaattgcattttataaaaactttttgtggggttt

SEQ ID NO: 34550 - DNA, 147 bp, Glycine max
  Clone ID: LIB3138-069-P1-N1-G7
ctcgagccgctttttcatttgatatatatatatatatatatgaattaattaatatatattattggaggaggagaatgcatgtgtgttgcagttattatagtactatatattgatatacaagtgcgttaggattattattatgcatgt

SEQ ID NO: 34551 - DNA, 347 bp, Glycine max
  Clone ID: LIB3138-069-P1-N1-G8
ctctacttcaatcaagcgaaggtggtctcgattgcaagtgatccatgattcactctacgcttcacataacctttaaacccaattccacagaattcttttgcttcaccatgccatcaaagcctttagactatgggtcaataaatgaaaacgtgtagaagagtctatttgctgtcagaggtgatatataccttcgagcttctgtactttagaatgagggctaaaagattatctttacttatgttggcatcccgcatgcattgggacagaaaccactgtgctttcctcgccaggttggtgctttgtgccaagcatcaattcttactttgatgaatcttaatggttggact

SEQ ID NO: 34552 - DNA, 323 bp, Glycine max
  Clone ID: LIB3138-069-P1-N1-H1
atatcattggcctgtgctatgaatagttcttttagggggcgcgccaggtctgatatttacaccatgtgctctcaagactgtgaattgtggaatcctgcttgcacaaaagcaatgactatgtcatttaatccaaacccgtgttctgatgcatggagtttggaatttctgaagcgtactggatttcattgcgatatcatttgtgtcactggatggactgccaccccaatgcaggatgttcaggttacaattgattgggttattttcttttaggaatgtgttcccaagacctattgtgttttaattcacaaattcctttgtgttaa

SEQ ID NO: 34553 - DNA, 377 bp, Glycine max
  Clone ID: LIB3138-069-P1-N1-H10
tgatggtattgacaaaactagtgcaactttgcaatttagaaagttagcagattgtgattttctcaagagaaactttaagcagatgtctaatgttttgtgggtggctcctgaggacaaggcgagtttatggtcacaacttcattatgtttcgtgtaataatctggaaatgcaagaagcttatcttgtcaatctcgtaaatgtgttacgagaattgtatttgcacagtccagaggaagctcgccaattgagaaggaaagctctctctcgtattgaatggctgcaaaaagctgatgtgcctaccatagcacagattgaagagttccattcgatgcagaggatgatgaatgctcctgattcaaatgataatattgatttac

SEQ ID NO: 34554 - DNA, 386 bp, Glycine max
  Clone ID: LIB3138-069-P1-N1-H11
tgagtgaagagaatgggggtgagagtttcaagcgtgatatgagggatttggaagagcttttgtcaaaattgaatcccatggctgaggaatttgtgcctccatcactagccaatacgcatggccttttagctggacctaatgctgggtttggttacactaacaattttatactgcctaataactatggaaatactaatggccaaactaacaacagaaggaggaagaatggctataatcccgggaagcgaagaatgaatcataaaatggatatggagaaaagggaggagatgattcggaggaccgtttatgtgtctgacattgatcaactggttactgaagagcagctgggcagttttctttttaaactgcggccacggtgttgattg

SEQ ID NO: 34555 - DNA, 294 bp, Glycine max
  Clone ID: LIB3138-069-P1-N1-H12
cttccctacaactccaaacacaaagacatcatcatccatggctgcctccgtctccactgtcggagctgtcaacagagctcttttgaacctgaatggttctggagctggagcttcagctcccagttcagccttctttgggaccagcttgaagaaggttattgcctcaagggtccccaacagcaaggtttccggtggaagcttcaagattgttgctgttgaagagaagaaagagatttgagagacccatcagaccgacaaggacagatggaaagggcttgcctatgatatctcaga

SEQ ID NO: 34556 - DNA, 90 bp, Glycine max
  Clone ID: LIB3138-069-P1-N1-H2
ggagatttagctgcagatgttacagatagtttgttgcatgaaacttttgctagagtatatccttctggtaaagctgcaaaagttgttttt

SEQ ID NO: 34557 - DNA, 303 bp, Glycine max
  Clone ID: LIB3138-069-P1-N1-H6
aacaactaaatcatatcccataatgcaaggttggctacattcatggatggaatgaaatcattaaagggaaccgacactaaatgtattactatcttttaatcagataaaaaaagttcacctgtcatgctctttgtcagtttgattaatgctaaaaaaaatcggttaatacctaccatttacattttttatcagaatgctgtatacagttcttaacctcgtaaacttgcaggttattagatggtgcatagcagattttcacctttttgtgcttttcaaaagttaaaccatttttctgggaacaca

SEQ ID NO: 34558 - DNA, 247 bp, Glycine max
  Clone ID: LIB3138-069-P1-N1-H7
gaggaatactgcctcgtcacaggcaatggctatgtcatataatggaaacccgtgctctgatgcatggagaaaggaatatctgtaacgggctggatttcactgcgaggtcattggggtcactggatggcctgccaccacagtgcacgatgttcgagatacaattgagaggcttataagcttttaagaatgctggtccaacacctatggcggcttaaattcacacacaggctactggctaaatttgtgg

SEQ ID NO: 34559 - DNA, 421 bp, Glycine max
  Clone ID: LIB3138-069-P1-N1-H8
tgaatgtggaattctttctggatttacgctcacagttggggtggatagcatttgtggggagatgctcattacatatagctatgaaaaattactgctccaggctaaagcttcaagtatgattttacaatccttcaaaaatattgattttatgtgtgtttatagcgatgattacataattagtgttcaataatatgtcaagccttactttattgtttttatattgaaatatcttttatctatatcattacattaccattactgttgtgattgattaaatcttattcttacttttcatatttagaaattgttttcttaatttttgtaattttctcaaaattatactctttaaacatatgactatacttctttctttgctttctattttaatatctaggcttttttttttgttattatattttaa

SEQ ID NO: 34560 - DNA, 410 bp, Glycine max
  Clone ID: LIB3138-069-P1-N1-H9
caagattgtgatgtttgggaatgcagcagtcaaaaggagtgattgggcctcattggtacaagtgtttttaacaaacagcaacagtacagagcattttgatgcatgtaagtggacaaaatcagaaccacattcctgggaattgatcttcccaatagaggtatgtggtcctaataatggttttgaaatgtggagttctgagtgggcaaatcaaacttcatggcatttgagtttccttattgacaatcccaaacagtctacagtttttgatattctcttgggaatctctcaagattttgaaattgctggtaatactcttatgccagctttttctgttccacaggctactgccagatcttttgaaaatgcggaatcctctgcatgatctggaatttgtgttttctttcgcttgt

SEQ ID NO: 34561 - DNA, 368 bp, Glycine max
  Clone ID: LIB3138-070-P1-N1-A10
tgttgattctactggacatatcaataagaaagcagttgaacttgagtctattgctggtgcatactggagaggagatgaaaggaagccaatgttgcaacggatatacggtactgcatgggagaatgaagagcagttgaaagcttaccttcacttcaaagaggaagccaagcgtcgagatcacaggcgcctagggcaagatcttgatttgttttctatacaggatgatgctggtgggggtctagttttctggcacccaaagggtgctatggtcagacacataattgaagatttctggaaaaaaattcacatgaaacgtggctatgatctactgtacacaccgcatgtggcaaaagctgatctttggaaag

SEQ ID NO: 34562 - DNA, 318 bp, Glycine max
  Clone ID: LIB3138-070-P1-N1-A11
ctcgagccgtggagattggatcacacttatacaaaattctccaattagtaacttattgagagttgctgcttggaagaaaggctgtttaatggtcaagattgtgatgtctgggaatgcagcagtcaaaaggagtgattgggcctcattggtacaagtgtttttaacaaacagcaacagtacagagcattttgatgcatgtaagtggacaaaatcagaaccacattcctgggaattgatcttcccaatagaggtatgtggtcctaataatggttttgaaatgtggagttctgagtgggcaaatcaaacttcatggcattt

SEQ ID NO: 34563 - DNA, 391 bp, Glycine max
  Clone ID: LIB3138-070-P1-N1-A12
ggaggaacaccactgaacttaagcgcgtgttcttccattcaggcaagtccacaatcctcgtcatacccgagtcctgtaccatcctaccatgctagcccaacctcttcctcgttcccaagccccacgcgcattgacggaaaccacccttcttcctttctcatcccattcatccgcaacataacttccatccccggcaaccttcctcctgtcaggatatccaacagcgcccccgtcaccccacctctttcttcttcccgaagctcaaagcgcaaggcggatttcgactccctccgccaccctctttttgcctaccttcgcccgtccaggcccacgcgccggcaccacgttggcaccttcaccattccggagtgcgacgagttcgacgccttca

SEQ ID NO: 34564 - DNA, 390 bp, Glycine max
  Clone ID: LIB3138-070-P1-N1-A7
caaatggcaacagtgagaacaccattgaattttgattctagcaagcagagcttttgtcagttttctattgaccttctcggtggaggaatcttagtggacaaaactggagattggatcacacttatacaaaattctccaattagtaacttattgagagttgctgcttggaagaaaggctgtttaatggtcaagattgtgatgtctgggaatgcagcagtcaaaaggagtgattgggcctcattggtacaagtgtttttaacaaacagcaacagtacagagcattttgatgcatgtaagtggacaaaatcagaaccacattcctgggaattgatcttcccaatagaggtatgtggtcctaataatggttttgaaatgtggagttctgagtgg

SEQ ID NO: 34565 - DNA, 321 bp, Glycine max
  Clone ID: LIB3138-070-P1-N1-A8
aaaaaaaaaaaataaaaaaaaaaaaaaaaaaaaaaaaaaaaaaaaaaaaaaaaaaaaaaaaaaaaaaaaaaaaaaaaaaaaaaaaaaaaaaaaataaataaaaaaaaaaaatagattaaaaaaaaaaattaataaaaaaactctaataagaaaaattatataatagttaagccaaaaaaaaaagcttggcggtaccaactatattggcttcttgccctccatatttttttgctatggctcatgaggggtaagtgtctttaactttagaggacactgttaaagacgacagggttacaaggctaaacattttctttggataaa

SEQ ID NO: 34566 - DNA, 390 bp, Glycine max
  unsure at all n locations
  Clone ID: LIB3138-070-P1-N1-A9
ctgcatgtttgttctctcaacgactcctccgcgaaagagtattattcaatattttggttgggttgaatcccggggttgaagcgttgcagacatcacggctattctaagagtgtctcgctccctcattcatgtccgatctgtacgacggaggacgggtagttgcgtaactgccgttaacccttcgccgcacggtgggcgtggtgctttgccttctgaaggtggtagcccttcagacttgctcttcctcgctggtggtggtttcttctagtttcttcactcttttcattacttttagcctgcatagttttaaataagaaaaaaaaaacagcgactttgtgactagttaagatcaccgnntcttcttcttcttcttcttcttcttcttctact

SEQ ID NO: 34567 - DNA, 299 bp, Glycine max
  Clone ID: LIB3138-070-P1-N1-B1
aattgaagttaaaagccttagcctttcctacaacttcaaacacaaagacatcattatccatgggtgccttcggctccactgtcggagctggcaacaaaactcttttgaacccgaatgggtctggggctggggctttagcttccaatttagccttcttttggacccacttggaaaaaggtattggctttagggttcccaacaacaaaggtttcgggggaagctttaaaaatgttgctttttaaaaaaaaaaagagattggagagacccacccaacccaccagggccgattggaagggctt

SEQ ID NO: 34568 - DNA, 388 bp, Glycine max
  Clone ID: LIB3138-070-P1-N1-B10
aaaatggtggccacagttggtattcctgagaatacaggtatatcattggcctgtgctatgaatagttcttttagggggcgcgccagttctgatatttacaccatctgctctcaagactgtgaattgtggaatcctgcttgcacaaaagcaatgactatgtcatttaatccaaacccgtgttctgatgcatggagtttggaatttctgaagcgtactggatttcattgcgatatcatttgtgtcactggatggactgccaccccaatgcaggatgttcaggttacaattgattggtttattttctctcaagaatgtgttcccaggacctattgtgttttaaatccacaaaatccttttgtgttaaataggtggatgggaaaattgactt

SEQ ID NO: 34569 - DNA, 382 bp, Glycine max
  Clone ID: LIB3138-070-P1-N1-B11
ctcgagccgctccaagtatgtttttacaatccttcaaaaattttgtttctttgtgtgtgtatggtgatgataacttaattagtgttcatgaatatgtcaagccttactttagtggttctaaattgaaaagctttctagctagtcataacatcaccattactgatggtattgacaaaactagtgcaactttgcaatttagaaagttagcagattgtgattttcttaagagaaactttaagcagatgtctaatgttttgtgggtggcttctgaggacaaggcgagtttatggtcacaacttcattatgtttcgtgtgataatctggaaatgcaagaagcttatcttgtcaatctcgtaaatgtgttacgagaattgtatttgca

SEQ ID NO: 34570 - DNA, 238 bp, Glycine max
  unsure at all n locations
  Clone ID: LIB3138-070-P1-N1-B4
gcattttgatgcatgtaagtggacanaatcagaaccacattcctgggaattgatcttcccaatagaggtatgtggtcctaataatggttttgaaatgtggagttctgagtgggcaaatcaaacttcatggcatttgagtttccttattgacaatcccaaacagtctacagtttttgatattctcttgggaatctctcaagattttgaaattgctggtaatactcttatgccagctttt

SEQ ID NO: 34571 - DNA, 318 bp, Glycine max
  Clone ID: LIB3138-070-P1-N1-B6
caccgccctttaggggacaccaaaccgaaatccccttaggatccaaaaaatccgaaagggaagtgggggaaaaaagggagaggaagaggtccgagaggaagaagaagaagaagagggggacgaggaaaaagaggaggaggaagaagaagaagaagaagaaaacgacgtcgtcaaacaacagcagcagcaacagcaagacgaagacgacattccgatatcgaaacttctggaaccgttgggcaaggaccagcttctgaaccttctttgcgacgcggcggcgaagcaccgcgatgtggaggagaggatccgaaaggcggc

SEQ ID NO: 34572 - DNA, 350 bp, Glycine max
  Clone ID: LIB3138-070-P1-N1-B7
gcagaaagcaagctcatcctagagttttaaaaatggcagcagcctcctccatggctctctcttccccatccttggctggcaaggccgtgaagctgggcccatcagcccccgaagtcgggagggtcagcatgaggaagaccgtcaccaagcaggcctcctccggaagcccatggtacggcccagaccgcgtcaagtacttgggcccattctctggcgagcccccgtcctacctcactggcgagttcccaggtgactacggctgggacactgctgggctttcggccgacccagaaaccttcgccagaaaccgtgagctcgaagtgatccactccaggtgggccatgctcggg

SEQ ID NO: 34573 - DNA, 372 bp, Glycine max
  Clone ID: LIB3138-070-P1-N1-B8
ctctccgtacattaaatgtacagactctttcttcatagcatgtggaaatatggttgctgataccattaattttgaggctttatcgcacaagctggtgcaggttggagagatgtaagaaaaagttgtattgtaatactcacacgaggaatttcttacagcttggtcaactgaggtgcgtcctgcaacaactgtggtggctggtgggagatcatatttgtatgcaatggtgcatgatagttgagtgtctacaataccaggtgactatggcattggtgtcaaggtgacaaccataaacaatatgtgtgcatatgggctgaatactgggatattaagttctcgtattttgggcaccatttctcagtccatttcaca

SEQ ID NO: 34574 - DNA, 390 bp, Glycine max
  Clone ID: LIB3138-070-P1-N1-B9
attctgcgtagtgatctattggcaaattttttgacagagggcaattttagagcaagtgttgatttgcagcgcactcatcgtattagaggaatgattaaaatggtggccacagttggtattcctgagaatacaggtatatcattggcctgtgctatgaatagttcttttagggggcgcgccagttctgatatttacaccatctgctctcaagactgtgaattgtggaatcctgcttgcacaaaagcaatgactatgtcatttaatccaaacccgtgttctgatgcatggagtttggaatttctgaagcgtactggatttcattgcgatatcatttgtgtcactggatggactgccaccccaatgcaggatgttcaggttacatttgattgg

SEQ ID NO: 34575 - DNA, 329 bp, Glycine max
  Clone ID: LIB3138-070-P1-N1-C1
cacatgacgctgaagatctcgcaagacctcgacggcacgtcggacatccaaaagttcacgcagatgcgggtacagctgcaagccgtctcgctccggatgcagacgttgaggagcaacgagcagatggcaacggcgatgaagggtgcgactagggctatgggacagatgaaccgaagtctcaatctttcacaaatccaaaagatcatgaacgacttcgagaaagaatcgtccacgatggacatgaaagaggagatgatgtcggacgctgtcgacgacgcgattgacggtgaagacgagggcgagggcgaggagatggaaagcgacacgat

SEQ ID NO: 34576 - DNA, 193 bp, Glycine max
  Clone ID: LIB3138-070-P1-N1-C10
tgttgccactaggttcatgtataaccactacataacaatagcgagtcctctagatcaattcgaaataagaaacctatttagtattgatacaccattgttagcggatattaacatatttattacaaatataggactatatattacaatcgctgcgattatagctttttacttaagggttgtagctactaacctt

SEQ ID NO: 34577 - DNA, 377 bp, Glycine max
  Clone ID: LIB3138-070-P1-N1-C11
ttcacacatcattacgacaattaaaagaggtgtggaaattttcaaataggcagagcatactcaacaagagggtcatgcctaatttcctttattgaattaaacaaacgaacaagcgaaagaaaacacaaattccagatcatgcagaggattccgcattttcagaagatctggcagtagcctgtggaacagaaaaagctggcataagagtattaccagcaatttcaaaatcttgagagattcccaagagaatatcaaaaactgtagactgtttgggattgtcaataaggaaactcaaatgccatgaagtttgatttgcccactcagaactccacatttcaaaaccattattaggaccacatacctctattgggaagatc

SEQ ID NO: 34578 - DNA, 391 bp, Glycine max
  Clone ID: LIB3138-070-P1-N1-C12
ctcgagccgctcgagccgattcggctcgaggctcaatcctggtatttcaggttctcgtcttttgggcaccattcctcagtccatttcacagcaaactgtttggaatcaaatggcaacagtgagaacaccattgaattttgattctagcaagcagagcttttgtcagttttctattgaccttctcggtggaggaatcttagtggacaaaactggagattggatcacacttatacaaaattctccaattagtaacttgttgagagttgctgcttggaagaaaggctgtttaatggtcaagattgtgatgtctgggaatgcaacagtcaaaaagagtgattgggcctcattggtacaagtgtttttaacaaacagcaacagtacagagcatttt

SEQ ID NO: 34579 - DNA, 348 bp, Glycine max
  Clone ID: LIB3138-070-P1-N1-C2
gagagagtatagagagaagtgtgtgcgtgcgtgcgtgtgtgtgcagcgttttcttttgcatcaaccaacccaagtacaaccgccaactacgtcattttaatccaacaaaaattcccattcagcttcttttagagagagaaaagattcgaattttaacggagaaaaatagcgaaaagacttcaaatattcttaattgtgcgactacaaacgtcggactagtaactcaaagaaagaagggaaacaaaatgcatctatctttgacggctgtctatgaaactatcatattgtgaaaacgcaccaaggaaacacatcaggcgctttcgaacatacacattactgtgcagattt

SEQ ID NO: 34580 - DNA, 249 bp, Glycine max
  Clone ID: LIB3138-070-P1-N1-C3
gcgtgttcctttcaaaggaagcgccgcctttgagaaccaccaagtgccactgggatcgctgatggattcgcatctgttttcactcatttcttccttttcatatttctttattgattggttacttttggacataggtccttcagggttatcccttcgctcgaggggatttttgctccattctttatcctttatatcacactcttgtcgttatttgttaataaatcaattttattttcattccccttcttc

SEQ ID NO: 34581 - DNA, 388 bp, Glycine max
  Clone ID: LIB3138-070-P1-N1-C4
cttgttgagagttgttgcttggaagaaaggctgtttaatggtcaagattgtgatgtctgggaatgcagcagtcaaaaggagtgattgggcctcattggtacaagtgtttttaacaaacagcaacagtacagagcattttgatgcatgtaagtggacaaaatcagaaccacattcctgggaattgatcttcccaatagaggtatgtggtcctaataatggttttgaaatgtggagttctgagtgggcaaatcaaacttcatggcatttgagtttccttattgacaatcccaaacagtctacagtttttgatattctcttgggaatctctcaagattttgaaattgctggtaatactcttatgccagctttttctgttccacaggctact

SEQ ID NO: 34582 - DNA, 337 bp, Glycine max
  Clone ID: LIB3138-070-P1-N1-C5
gatgtagccttccaagtgcatggagtagaaaagtgtgaattcagagattttacgttggtcactcggtgcgtctgaacaactctggtggctgatgggtgtccatatttgtatgcaatggtgcatgatagttcagtgtctacaataccaggtgattttgtcattggtgtcaagttgacaaccataaacaatatgtgtgcatatgggctcaatcctggtatttcaggttcttgtcttttgggcaccattccttagtccatttcacagcaaactgtttggaatcaaatggcaacagtgagaacaccattgaattttgattctagcaagcagagcttttgtc

SEQ ID NO: 34583 - DNA, 366 bp, Glycine max
  Clone ID: LIB3138-070-P1-N1-C6
gaaacgcgttcctacatgttgcggcgtcgagtgtcccaaggaggggaaacttcctcgacgcaaaatttttgacaaacctaagacacgctggttaactattatccctatggagatcaatctcgcggtccgacaaaagatgttaaattttgcgaggtacattatgaagaaaagggacaaacttaggtgtcaagttggaatcaacccatactccatggaatggactgatttggccaatagatgactgagtaagggcaatgatattctgtgttgcgattatgctaagtttgatggtttgattaccaagcacgttatgagcaagatggcagaaatgataaacagtctttgcggtggtgatgaaaaattgat

SEQ ID NO: 34584 - DNA, 381 bp, Glycine max
  Clone ID: LIB3138-070-P1-N1-C7
ctggtgcaaagaatgctattctcatgaatatgccaaatgctgttctttcaatgtggagatattttgttggagatctcgtctttgaagtttctaagatgacttctccctacattaaatgtacagtctctttcttcatagcatttggaaatttggctgatgataccatcaattttgaggcttttccccacaagctggtgcagtttggagagattcaggaaaaagttgtattgaaattttcacaagaggaatttcttacagcttggtcaactcaggtgcgtcctgcaacaactctgttggctgatgggtgtccatatttgtatgcaatggtgcatgatagttcagtgtctacaataccaggtgattttgtcattggtgtcaagt

SEQ ID NO: 34585 - DNA, 332 bp, Glycine max
  unsure at all n locations
  Clone ID: LIB3138-070-P1-N1-C8
gtaacctaagcttttcttccagagactctgaaccatggcttcatgtaccgcacctccctccctcatgctcgtccactctcaagacctttctccctctcttcgctccttctctcacaggcccatttctagaaccaccttctctctctatcctctccttttgaagccctccaaatggctccacatagagcccaaatccaggacttgccatgccctcgtcgccgctttgtctgcagaggtccaagtgcccgaaactttcgacgacacgggaggaggacgacggtgctgatggctncaccgncaccaacaccgtnctcaccaccaagcctaagaaa

SEQ ID NO: 34586 - DNA, 327 bp, Glycine max
  Clone ID: LIB3138-070-P1-N1-C9
tgtttctctagtgctgttatttatcagcgcgtaaagcatggctttgttggtggagaaaaccacgagtggtcgcgagtacaaggagaaggacctttcccaggccgacttgggacgcctagagatcgtgctggccgaggctgagatgcccagcctaatggcctgtcagaccgcgttcgggccctagcagaccttaacgggggcccctatgaccggatcgcttcacatgatcatacacaccgacgatcgtattgagacccttaccgaccttgtcgcccaagattcgtgttgctgcttgcacatcttttacaccgatgaccacccctgctc

SEQ ID NO: 34587 - DNA, 388 bp, Glycine max
  Clone ID: LIB3138-070-P1-N1-D1
gggactggttttggcaagctgcttccatttgatttcataattgggttttgtggtgtaatccaattgtcttatctcacatgcaccaaccagatgttaattaaattaaatactgtacagtcttgggctcttagtgttatcatcaatttaggtctaacaactcattggtgtcaagtaatatcaaacgattagtcgttaggttggacaatttggtatatatagcttttggttattctgatggaattatgtgtggtacctgtgttggaagtgtaattgataaaacgtgttgtttatgttggtgtgattggcaataggtgcctacaagtatgtttcagagctatggcgcaagaagcagtctgatgtcatgcgcttcttgcagcgggtgaagtgc

SEQ ID NO: 34588 - DNA, 393 bp, Glycine max
  Clone ID: LIB3138-070-P1-N1-D10
ggttaattgtggagtattttggaaggatgtcttacgttgctcataacgttaatcagccccaagagaaagatttgttggagggaaatttttcctttgatattaaatctcgctctagattggaaaaagtttcctctacaaaagcacaatttgttagtggaaaaaccttcaaatatgatataattggtgctggttcacattcttcagaagattttcctgaaaaggaagatcaagaaaaacccaaaaagattgatgccagattgagacaaagaatagatcctcaatacaatgaggttcaggctcagatggaaacaaatttgtttaaattgtctcttgatgatgttgaaactcctaaaggttccatgttggatctgaaaatttctcaatctaaaattg

SEQ ID NO: 34589 - DNA, 296 bp, Glycine max
  Clone ID: LIB3138-070-P1-N1-D11
ctcgagcccaatcggatcgagtgtgcgtatacatatacgcgcgtgcggaacatctttatggcaggaacagacccgagttccgcgacaatagtttgggcaatgaatgcactgatgaagaattccaatgtgatgagcaagggtcacggcgaagtgagaaatttattctgtgaccaaaattggataaactaagatgatgtcgaaagccttggttgtctaaaagcactggtgacggagacattgagagtattccgaccttgaccactacctttgacaagggtgacaatggaaacatgcaa

SEQ ID NO: 34590 - DNA, 332 bp, Glycine max
  Clone ID: LIB3138-070-P1-N1-D12
caaaaatatagtggaacgcctgtctgctctaagaactcgtatagttgtaatggctggccaagaaggtcctacaattacaagaacaaaaagggaaagtgccacccaacatggaggttcaacactggctgatctttaacaggctcttgaagactacttgcttgtacttttgggattaggtgaaaatggaagccatttacaatacaaagtacaatttgcttgggtgaatcaagaggatgaagcagaggaaacaaccatgtctaatgcttggtatgaaatggtgtcgggtttgcacttgatggcaatgctattggtgtcacagtctgatttattac

SEQ ID NO: 34591 - DNA, 393 bp, Glycine max
  Clone ID: LIB3138-070-P1-N1-D3
ccccttccgtaggttcggatttcggttcgggcttttttttccccattcccaaaccaaacttaaccggggtttggccttggttctttttttttttcattacccattttaaaaggtaaaaccccccccaccctttttttttttttgtttttgggagtagctttacctgcccaggtttaatgggaccgcaccatgggggttggttggggcccccaattaaaggctgaaggccatattacactggggtcaattcaaaggttgtgagtaccgatggaaatgatttcggcagcacaaacgataaggtttcagcaaactcaattcctcaaactcctcggagtgagggtgagatcttgcggtcatccaatttgaagagctttcccttgtcagaacttaaga

SEQ ID NO: 34592 - DNA, 131 bp, Glycine max
  Clone ID: LIB3138-070-P1-N1-D6
cccccgtccgtaggttgggatttcggttggggttttgagcaaatgttttttcagcgggggttttcaaaacaaggcaaggttgtggtggtttaattccaataccaggaattttaacaaggatttcccctggc

SEQ ID NO: 34593 - DNA, 387 bp, Glycine max
  Clone ID: LIB3138-070-P1-N1-D7
aaagaaatggctaagaacagaccaattgatactaaggggaagaaaggatttaaagtacttgtgctcaatgacgttgacaaactctctagagaagcccaacattctctccgcagaaccatggagaaatacagtgcttattgcagattaattctatgttgcaatagttcttctagagttacagaagcaatccgctctcgatgtctcaatgtgcgaataaatgcaccaagtgaagaacagattgttgaagttttagaattcattggtaagaaggaagggctgcaacttcctcctggttttgctgctcgcattgtggagaaatcaaatcgaaatttaaggagggccatattgtcatttgagacttgtcgtgtccaacaagatcctttcact

SEQ ID NO: 34594 - DNA, 374 bp, Glycine max
  Clone ID: LIB3138-070-P1-N1-D8
gccttgaagacatggcagtgttttggagggctttagcatacgagagacaactcgtggccttgtgctcggtgactgtgacaaactctctagagaagcccgaacattctctgcgcagaaccatggagaaatacagagcttattgcagattaattctatgttgcaatagttcttctagagttacagaagcaatccgctctcaatgtcttaatgtgcgaataaatgcaccaagtgaagaacagattgttgaagttatagaattcattggtaagaaggaagggctgcaacttcctgctggttttgctgctaccattgtggaaaaatcaaattcaaatttaacgagggccatattgtcatatgagacttgtcgtgtccaa

SEQ ID NO: 34595 - DNA, 355 bp, Glycine max
  Clone ID: LIB3138-070-P1-N1-D9
gttcccaggacctattgtgttttaaatccacaaaatccttttgtgttaaataggtggatgggaaaattgactttcccccaaggcacttcccgaagtgttaagagaatgcctctttctatagggggaggagctggtgcaaagaatgctattctcatgaatatgccaaatgctgatctttcaatgtggagatattttgatggagatctcgtctttgaagtttctaagatgacttctccctacattaaatggacagactctttctttatagcatttggaaatttggatgatgataccatcaattttgaggctttatctcacaagctggcgcattttggagagattcatgaaaacgttg

SEQ ID NO: 34596 - DNA, 348 bp, Glycine max
  Clone ID: LIB3138-070-P1-N1-E1
catggcccccgtccgtaggttgggatttcggttgggggggatgcttatttaattggttttgaaaaatactggggccgggttaaagttccaagattttttttccaatccttaaaaaatttggttttttggggggggattggggtggttacctaaattggggtgcaggaaattgtcaggccttactttaggggttttaaattgaaaagctttttggctgggcttaacataaccattcctgtggggtttgccaaaactggggcaactttgcaatttaaaaaggtggcaaatggggatttttttaagggaaactttaagcagttgtttaatggtttggggggggttcctggg

SEQ ID NO: 34597 - DNA, 61 bp, Glycine max
  Clone ID: LIB3138-070-P1-N1-E10
gaactgggtccggtacggtccaacagtggcagatttgcaattcaattcaatttatttgttt

SEQ ID NO: 34598 - DNA, 357 bp, Glycine max
  Clone ID: LIB3138-070-P1-N1-E11
tcttattcttcaccaaaccgataagcaggtgagactaatccatcatccaaacctttccgatccaatgacctctaaactaattgcttccaatctccgtcaccaaatcacaaaatcagctcaaaaccttcgccggcagcttctttccacggcggcggcggtggcggtgcctgaacacgatgggaacaactccaactcgtcgggaatgacgatgaagggcgttcgaatctccggaagacccctttacctggacgtgcaggcaacatctacggtggacccgcgcgtgctcgacgcgatggctcctttctacctatctcgctacggaaaccctcacttccgcacccacttatacggctggga

SEQ ID NO: 34599 - DNA, 204 bp, Glycine max
  Clone ID: LIB3138-070-P1-N1-E12
ctgaagccaaatttgctagagcgattaaggagggccacgttctattaatagatgttgaatggggcgcgccagtgattgtatttacaccatgtagtctcaagactgagaattgggcaatcgcgcttgcacaaaaacgagcactatatcagtcaatactaacccctgtattggtgcaaacgatttggaatttatgcagcactctgg

SEQ ID NO: 34600 - DNA, 297 bp, Glycine max
  Clone ID: LIB3138-070-P1-N1-E2
cgagatcctaactagttccctatcaaaacttactgcgccagggtcaaggtccaaatatgttctgacaatcctacataaatcgtgaaaatacgcacaaccgtcttgactatatcttaacaggagtgagatgcactgcacacgatttatttgatcgcatcatgatagaatagttgagcagctagaactaacctcaccgtccatgttacaatggacacaactcaaacaatgtgactaccgatggaaatcatttatggcgctcacaccatcaggaacgagcaaactcaatatctcaaactc

SEQ ID NO: 34601 - DNA, 385 bp, Glycine max
  Clone ID: LIB3138-070-P1-N1-E3
ccttccttccccccttccttagcttcggtttctccttcccgaaaaaaaaaaaaaattttttttaaaaaaaaaaaaaaaaaaaaaggagaaatattttattatattatataaaatttaaaaaaaaaaaaattataaataaaaataattaaatttaattttttttatttttttagggcccccccccccctttttgccttttccccccccgtttttttttcccccccgtcccttggggcttccccctttttcttttttggggccctttttaacctttcccttttcttggcctttcctttttcctttttgaattttttttcccttcccatttccccccccctttccaccccgaaccttttttttttaacccttgggtcccttttggggg

SEQ ID NO: 34602 - DNA, 390 bp, Glycine max
  Clone ID: LIB3138-070-P1-N1-E4
cacaatctttgggatttatttgataaaagaagaccatgaaccaaccattgaagatgttttgcaacccgggaagaacatgttggcagctggttattgtatgtatggaagctcttgcacgcttgtgttaagcactggaagtggtgttaatggtttcacccttgatccatctcttggggaattcattctaactcaccctgacatcaagattccaaagaaaggcaagatctattcagtgaatgaaggaaatgctaaaaactgggatgaccctactaccaagtatgtggagaactgcaagtatccaagagatggttcatcaccaaagttcctaagatatattggaagcatggtagctgatgttcaccgcacattgctttatggaggtatttttct

SEQ ID NO: 34603 - DNA, 330 bp, Glycine max
  Clone ID: LIB3138-070-P1-N1-E7
ccgaagtgttaagagaattcctctttctatagggggaggagctggtgcaaagaatgctattctcatgaatatgccaaatgctgttctttcaatgtggagatattttgttggagatctcgtctttgaagtttctaagatgacttctccctacattaaatgtacagtctctttcttcatagcatttggaaatttggctgatgataccatcaattttgaggcttttccccacaagctggtgcagtttggagagattcaagaaaaagttgtattgaaattttcacaagaggaatttcttacagcttggtcaacttaagtgcgttctgcaacaac

SEQ ID NO: 34604 - DNA, 147 bp, Glycine max
  Clone ID: LIB3138-070-P1-N1-E8
aaaaaaaaaaaaaaaaaaaaaaaaaaaaaaaaaaaaaaaaaaaaaaaaaaaaaaaaaaaaaaaaaaaaaaaaaaaaaaaaaaaaaaaaaaaaaaaaaaaaaaaaaaaaaaaaacaaaaacaaaaaaaaaaaaaaaaaaaaaaaaaaa

SEQ ID NO: 34605 - DNA, 349 bp, Glycine max
  Clone ID: LIB3138-070-P1-N1-E9
tcaagagaaactttatgcagatgtctaatgttttgtgggtggctcctgaggacaaggcgagtttatggtcacaacttcattatgtttcgtgtaataatctggaaatgcaagaagcttatcttgtcaatctcgtaaatgtgttacgagaattgtatttgcacagtccagaggaagctcgccaattgagaaggaaagctctctctcgtattgaatggctgcaaaaagctgatgtgcctaccatagcacagattgaagagtttcattcgatgcagaggatgatgaatgctcctgattcaaatgataatattgatttactgttgagcattgatttgttgggtttacaaggagc

SEQ ID NO: 34606 - DNA, 342 bp, Glycine max
  Clone ID: LIB3138-070-P1-N1-F1
agagcttgacctcgatgcaccccttccttagcttcggatttcgcttgaggccaaagcctttggtactttattcccccagggagggccctaagtttctctctcttcaacttaaaagttcaccctcacccctcttcttcttcttcttcaacccttccggaccggggcggtttttccagggtccaccaaaatggggggctttcggttaaccggggttttttcccccagggcttaccttaggggggggggggggtaaaaccaaggccccttggtgggtttcctaatcaacccccatggaaagggggggtttaaagagcttaaaatttaaagggcccacctccttgg

SEQ ID NO: 34607 - DNA, 91 bp, Glycine max
  Clone ID: LIB3138-070-P1-N1-F10
aaacaaagaaaaaaaaaaacccttagccaacacaaccatcatggccacctctgctattcagcaatcagcattcactggtcaaactgctctg

SEQ ID NO: 34608 - DNA, 262 bp, Glycine max
  Clone ID: LIB3138-070-P1-N1-F11
gttacttacaacttctcaaatttttctaattttcttgctccctttcttttctggtgtgtgcacttcgtcactttttgtgccattcaaaggtgccgcataagaagtaagaggaagttgcctagtgtttgagatgtctggtgttcttctttgggtgagttgtggacccaaagagaaccccatcttcattgttggtcttgctggaagaagtggcagaagccaaaagaggtttggactgggcaatgggatcagttttgcaagcttt

SEQ ID NO: 34609 - DNA, 360 bp, Glycine max
  Clone ID: LIB3138-070-P1-N1-F12
gggtgcagctaagaagctcaaaaagattcaatttcaaggttcgtagtggaagttatgatgatggttatgtgattggcgaagaggaagcaagggatatttcagggttagaggagcctgtaacaaccaaggatctgattccagggctgcctgatgattcaaaaggcgaatctggggctgcaataagtagttgattttggcgatggaaacctacactcaatgtgcactatgagaacgccggttgcgaaaacgtcaatgatttgcctcgtgttctctatttaccaggctttggtgtaggctctttccattatgagaagcaacttaaggatatgtggcgtgactacaaaatgagggctctggatt

SEQ ID NO: 34610 - DNA, 352 bp, Glycine max
  Clone ID: LIB3138-070-P1-N1-F2
gcaaaagcttcagttccttaatgccaaacggaagggacatggtgttctttcttttgaacaaacagtttcaatatgcctctcattcatggtgtaatcgatcatttctgatctgtgctgcattgtcacgggcgcaacaaaagtgggtgctcaccgcttaactgagatgactacgccagtgcttaccatagggcaggaggacggtaaaagcaatgtcactttgaaggcttacgcaacaaccacgacggaaagtgagtggctaccgagctcagaagtctaagagccccgctacacggggccatatgattggtcgtctgtgcacaggtagggtacactcttgtttgcagcgactaaa

SEQ ID NO: 34611 - DNA, 256 bp, Glycine max
  Clone ID: LIB3138-070-P1-N1-F3
gggaatctctcaagattttgaaattgctggtaatactcttatgccagctttttctgttccacaggctactgccagatcttctgaaaatgcggaatcctctgcatgatctggaatttgggttttctttcgcttgttcgtttgtttaattcaataaaggaaattaggcatgaccctctttgttgagtatgctctgcctatttgaaaatttccacacactctttaattgtcgtaatgatgtgtgaagtgtgtgttattt

SEQ ID NO: 34612 - DNA, 341 bp, Glycine max
  Clone ID: LIB3138-070-P1-N1-F7
tggcaggccaactcgtgattctctatttgtggatccagccagagataggactagcttgctcaaaatatggaacctgaacaaatgctctggagttgttggtgtatttaactgccaaggtgctggatggtgcaagatagagaagaaaacccgcatccatgatacatctcctggtacactcaccgcctctgtctgcgcctctgatgttgacctcatcacacaagtagcaggtgctgaatggcttggagatacaattgtttatgcttacagatcaggtgaggtgattcggctaccaaaaggggtttcaattccagtgacactaaaagttctggagtttgagcttt

SEQ ID NO: 34613 - DNA, 383 bp, Glycine max
  Clone ID: LIB3138-070-P1-N1-F9
aaggtgtttccttcaccatcgaagacttcactgctgctcttgacaagtacgacttcgattctgaagttggcggcaagattaaaggcactgtgttctacacagataacaatggagcagttgttgatatcactgcaaagtcttcggcatatttgccactgcaagaggcgtgcatccacagggttaagcatgttgaagaagcaggcttagttcctgggttcaaagaggagtttttgatcattggtgagaactcaatagatgatagcttggtcttgagtttaaggtctcttcagtttgaccttgcatgggaacgttgtagacagcttcaagctgaagatgtcacagtcaagggtaagattgggggggtgaacaaaggtggagtggtg

SEQ ID NO: 34614 - DNA, 386 bp, Glycine max
  Clone ID: LIB3138-070-P1-N1-G1
ggcttcctttactacaaccccaagaccttccttttttcgttctcccatcaaacccccatggaagtattcccaaggtgctgtcttcgatgttccaacacatgaagaaactgaagtgggtactcgcgaactcgtttcaccgaactggagaaagaggtaatagactccatggctgagttatgccccataacaacggtgggcccactagtccctccatcgttactcggccaagacgaaaacatcgaaggagacgtgggaatcgaaatgtggaagccacaagactcgtgcatggagtggctaaaccagcaacctccttcttcggttatctacgtttcctttgggagcattattgtgcttaccgctaaacaattggagagcatagcgagggc

SEQ ID NO: 34615 - DNA, 209 bp, Glycine max
  Clone ID: LIB3138-070-P1-N1-G10
cagattttgatattctttagggaaggtttcaagattggggaatagctggtgatactcttatgccaactttttgtgcttcacaggctactgctagatcttctgaaaaatgcgagcatgctctgcatgatctggaatttgtgattgcttgcgctagctcgtttggttaattcaataaaggaaaggaggcatgactctcttgttgagtatgc

SEQ ID NO: 34616 - DNA, 336 bp, Glycine max
  Clone ID: LIB3138-070-P1-N1-G11
gggaaaattgactttcccccagggcacttcccgaagtgttaagagaatgcctctttctatagggggaggagctggtgcaaagaatgctattctcatgaatatgccaaatgctgttctttcaatgtggagatattttgttggagatctcgtctttgaagtttctaagatgacttctccctacattaaatgtacagtctctttcttcatagcatttggaaatttggctgatgataccatcaattttgaggcttttccccacaagctggtgcagtttggagagattcaagaaaaagttgtattgaaattttcacaagaggaatttcttacagcttggtc

SEQ ID NO: 34617 - DNA, 290 bp, Glycine max
  Clone ID: LIB3138-070-P1-N1-G12
gtgatggagaaaattgtgtataaagacgacgagggcgcaggaactgaggtttgtttttatatccaaattgcagaacctgtaataaatcatttaaagccattggtcctttattattcattctttgttcaatacttttaccacgtcttgattgtgagtatcgaggattattcatgatcacaaagcatatgccaaactcagatgaaagagttatcaaattgagcatttgccaaactgaaatgcaagtgttatcaaattactatacttgtgatgatactctgcggtaatgtatg

SEQ ID NO: 34618 - DNA, 310 bp, Glycine max
  Clone ID: LIB3138-070-P1-N1-G7
ctggaagttgtctctaccaccctctcagccatggcaacaattccccctagccgatcatcatcacacgcgtttgttgccatggcaaccttcacgactctgttgttgtgcacggcggcggcgaaagaaagcgtgtaccagatacttcccaagtaccggctcccgagtggtctgttaccggataccggcaccgactacaaactcgacgaggatgggccattcgtcggcggtttggcgaaaccctggttcatacaagtcgattacttgggttacttccagagcaagatcttccgcaaggtcaagtattggttca

SEQ ID NO: 34619 - DNA, 349 bp, Glycine max
  Clone ID: LIB3138-070-P1-N1-G8
cgaggttatgctgtactgattgacctgaaggtctagaaatacgatggtaatacatggtttgtggtactgtatttaaaggcaaaccaggccttgaaggatatgggaaaggctgctctggatattatgacctacgatgctgatcaggctggctatggttatgtagaagatcttgacaggaatactattctgatattggcttacagacctatacagatggaaacaattgacgatacaactagggtgtgacttgagcaagaatgcaagttgtcataaactgattatgcaggattggaaagaactatttgaggcgctcgcacggtcgcagagactttcttttagatgtcattgc

SEQ ID NO: 34620 - DNA, 378 bp, Glycine max
  Clone ID: LIB3138-070-P1-N1-G9
aatatttttctcactgtctctccagagaacttgatagagagatggcagctgcaacatctggtgctgtgttaaatgggttgggatcttccttcttgagtggaggaaacaggagccaaacccttctggcctctgctattggaggcaaagttggtgctgctgttactgttaatcccagaagactcattgtggtagctgctgctgcaccaaagaagtcatggctccctggtgttagaggtggtggcaatctcgtcgacccagaatggcttgatggatcgctaccaggtgactatggttttgatccactaggccttgggaaggacccagcattcctcaaatggtacagagaagctgagctcattcatgggaggtgggcaatgg

SEQ ID NO: 34621 - DNA, 358 bp, Glycine max
  Clone ID: LIB3138-070-P1-N1-H10
tccatctttgccttctgcatgttgggtctctgtaaacagatactgcaaaagaagaataatattgaatatttggttggggtgaattcctggggtgaagcgttgcagacattacggctattctaagagtgtctcgctctcttattcatgttccaactggaccaccggggacaaggtgcgtaactggcaccaacccttcgccggacggtgggcgtggtgctttggcttctggaagggggaggccttcaaacttggtcttcttaacttgtggggggtctgctggcttctaacctcttcttaactcttttttctttttactacttttaaactaccttggtttcaaaataacaaaaacaaacac

SEQ ID NO: 34622 - DNA, 311 bp, Glycine max
  Clone ID: LIB3138-070-P1-N1-H11
gcttttccaaacaaaattgtttttgatgataagcttgtgttggctaacacacaagaattctttgatggaaattttccagtggattcttggttaccaatttttgtgaattgtctttatcctgtaagtcaattaccttcagaagctgtcgttgtaaatgttacatgtggtagtggacgttgtggtttacccaccactgcttggattaggtctgcagtgtacaatcgctcctgagatgtcaacaaaaggattcgtacagtacttgtggaagggaagaaaattgtttttcttactagagtagatccttttccagt

SEQ ID NO: 34623 - DNA, 277 bp, Glycine max
  Clone ID: LIB3138-070-P1-N1-H2
cccccgtccgtaggctcggatttcggttgcggaggatttggaaatggtgggtattcctttattcccgctttttttggttcaccaggttcttgccaatttttttgaaatggcggattctttggatggacctggaattggggtttcttttccttggtccgttggttaaattcataaaaggaattaggcatggccctcttgttgagtatgctctggctatttgaaaatttccacacctcttttaattgtccgaatgatgtgtgaagtgtgtgttattttt

SEQ ID NO: 34624 - DNA, 223 bp, Glycine max
  Clone ID: LIB3138-070-P1-N1-H3
tcacacttatacaaaattctccaattagtaacttgttgagagttgctgcttggaaagaaggctgtttaatggtcaagattgtgatgtctggggaatgcaacaagtcaaaaggagtgattggggccttattgggtacaagtgtttttaacaaacagcaacagttcagagcattttgatgcatgtaagtggacaaaatcagaaccacattcctgggaattgatct

SEQ ID NO: 34625 - DNA, 392 bp, Glycine max
  unsure at all n locations
  Clone ID: LIB3138-070-P1-N1-H4
gcctttgctgttcagtgctcccactcccagtccgggccgaggcagaaaatatcggaaactaacctttcaccctcacacatgcatcgtcatatctgaattggcaactcattattaaatcaattacgaaaacgaagaaacccaacaaaacaatggtagtagcttagctaattgcctaattgaatgaatctcaatggaacctnctctcatcaacgactccacattctcttccgctaacccttccttgtccgagatttggccctctcattttcccacagaccacactcccagtaacaagagacacctctccccctcgactgattgtggcagcaataaacatatcaaatcatcacgatcaggatcccaggatcaaaacggtgccttgaaagcgggtg

SEQ ID NO: 34626 - DNA, 377 bp, Glycine max
  Clone ID: LIB3138-070-P1-N1-H7
aatatatatctcactctctctgcagataacttgatagagggacggcagctgtaacatatgctgctgagttaaatgggttggtatctcccttcttgagaggaggaaacatgagccaaacccttctggcctctgctattggaggcaaagttggcgctgctgatactgttaatcccagaagactcattgtggtacgctgctgctgcaccaaagaagtcatggctccctggtgttagaggtggtggcaatctcatccacccacaatggcttgttggatcgctaccaggggactatggttttgatccactaggccttgggaaggacccagcatttctcaaatggtacagagaagctgagctcattcatgggaggtggtcaat

SEQ ID NO: 34627 - DNA, 298 bp, Glycine max
  Clone ID: LIB3138-070-P1-N1-H8
atggtattgacaaaactagtgcaactttgcaatttagaaagttagcagattgtgattttctcaagagaaactttaagcagatgtctaatgttttgggggtggcttctggggacaaggcgaggttatgggcacaacttcattatgtttcgtgtaataatctggaaatgcaagaagcttatcttggcaatctcgtaaatgggttaccaggattggatttgcaccatccaaaagaagcttgcccattgggaaaggaagctctcttttggattggatggcttgaaaaaggtgatgggccttc

SEQ ID NO: 34628 - DNA, 366 bp, Glycine max
  Clone ID: LIB3138-070-P1-N1-H9
ctgccactgccatcagcattctcaacacctcctccctcactcactcatcaatggcatcaacaatatcagcaatggccatgatcaacgccaaatgcgtcaacccaaagttccccaaccccaccaagctcgtaccatcaaaaccttcccttcaggtcaaccttccaaagggcctaatagcctcacccgaaaacaccaaactttccactgcgacagcaatcgcaggagcaatattcacaaccctcggaacctgcgacgccgctttcgccgttcaacaaatagccgacatagcagaaggcgacaaccgcggtctggcactgttgctgcccataattcctgcaatagggtgggttctgttcaacattctgc

SEQ ID NO: 34629 - DNA, 346 bp, Glycine max
  Clone ID: LIB3138-071-P1-N1-A10
ccatatttgtatgcaatggtgcatgatagttcagtgtctacagtaccaggtgattttgtcattggtgtcaagttgacaaccataaacaatatgtgtgcatatgggctcaatcctggtatttcaggttctcgtcttttgggcaccattcctcagtccatttcacagcaaactgtttggaatcaaatggcaacagtgagaacaccattgaattttgattctagcaagcagagcttttgtcagttttctattgaccttcttggtggatgaatcttagttgacaaatctggagattggatcacacttattcataattttacattttgttaacttgttgagagttgttgtt

SEQ ID NO: 34630 - DNA, 406 bp, Glycine max
  unsure at all n locations
  Clone ID: LIB3138-071-P1-N1-A12
gtgattgggcctcattggtacaagtgtttttaacaaacagcagcagtacagagcattttgatgcatgtaagtggacaaaatcagaaccacattcctgggaattgatcttcccaatagaggtatgtggtcctaataatggttttgaaatgtggagttctgagtgggcaaatcaaacttcatggcatttgagtttccttattgacaatcccaaacagtctacagtttttgatattctcttgggaatctctcaaggattttgaaattgctggtaatactcttatgccagctttttctgttccacaggctactgccagatcttctgaaaatgcggaatcctctgcatgatctggaattgtgttttctttcgcttgttcgtttgttaattcaatanaggaaattaggcatg

SEQ ID NO: 34631 - DNA, 361 bp, Glycine max
  Clone ID: LIB3138-071-P1-N1-A4
attttgtaactctggcttcaagtttgatgcaattattaatggtaatgcaagtagatgaatgcctcatttagaacatgattgatgatagttctaaataacagtggcgtggtttataaagttgatatactttggctaagatttcaaaatctttctttttgcaatagtggtctttgcacagttttttggtttagtaactagtgataacatgctaatttaagtctaagtatactagatgtaatcttttgttatgtttgaaatggaatgatatatttgctattttctgcttgaagctaattatgtttaaacaaaaccaacacaagtagcaaggagcttggttaaagcaaggttttggttttgagtt

SEQ ID NO: 34632 - DNA, 408 bp, Glycine max
  Clone ID: LIB3138-071-P1-N1-A6
tgttattgaagttgaagtcttgcccttctctcttcaactccagagcacaagacatcatcatccatggctgcctccgtctccactgtcggagctgtcaacagagctcttttgaacctgaatgggtctggacctggggtttcagctcccagttcatccttctttgggagcagcttgaagaaggttattggctcaagggtccccaacacaaagatttcctctggaagcttcaagattgctgctgtagaagagaagaaagagattgaagagacccagcagaccgacaaggacagatggaagggtcttggcctatgatatctcagacgaccaacaggacatcacaagaggaaagggtttggttgactcccttttccaagctccacaggatgctggaactcactatgctgtcat

SEQ ID NO: 34633 - DNA, 153 bp, Glycine max
  Clone ID: LIB3138-071-P1-N1-A8
accatacgtaagctcttattcgctctagattttcatacactttggggattaacttctggaggctattttacttaggggcgtagtcctactatcctattattacttcctttaatcttatttttctaacatagtatttataaccctctacttatt

SEQ ID NO: 34634 - DNA, 181 bp, Glycine max
  Clone ID: LIB3138-071-P1-N1-A9
gcttataataccatcaattttgaggcttttccccacaggctggtgcattttggagagattcaggaaaaagttgtattgaaattttcacaagatgaatttcttacagcttggtcaactcaggtgcgtcctgcaacaactctgttggctgatgggtgtccatatttgtatgcaatggtgcttg

SEQ ID NO: 34635 - DNA, 404 bp, Glycine max
  Clone ID: LIB3138-071-P1-N1-B11
attgaaggtgaagtcttgcccttctctcttcaactccgagacacgagacatcatcaggcatggcgtgcctccgtctccactgtcggagctgtcaacagagctcttttgaacctgaatgggtctggacctggggtttcagctcccagttcatccttctttgggagcagcttgaagaaggttattggctcaagggtccccaacacaaagatgtcctctggaagcttcaagattgttgctgtagaagagaagaaagagattgaagagacccagcagaccgacaaggacagatggaagggtcttgcctatgatatctcagacgaccaacaggacatcacatgaggaaagggttgggtgacttcatattccaagctccacaggatgctggaactcactatgctggcatg

SEQ ID NO: 34636 - DNA, 399 bp, Glycine max
  Clone ID: LIB3138-071-P1-N1-B2
gttgaacgcagatgtttggaaaagatcatgtgccttacaattttggtggaagatgggcaattcaatgaaaggtacattgtatggttaaattttggaagctatgacgtaaacactattcactattatttggccagtatgaaccttaggactgcagcaagaggttattttcctggaagaataaacgggagataaagtagttaagaacagttagagccattaatttaaggagactctattggatagacgggcaaataagggtagaaaggaggtatacaggaagctgtatttgtgtgaactaagcaagtgctcaatcgtaaaaggtaaatccatggaggagagtttctctctttgttcttgtcaatttcagttaatctgttaaatcatctttttttttctttc

SEQ ID NO: 34637 - DNA, 414 bp, Glycine max
  unsure at all n locations
  Clone ID: LIB3138-071-P1-N1-B3
agaggattagcggccaaaggtatctatccagcagtagatcctgtagagtcaacctcaactatgctccaacctcgaatcgttggtgaagaacattatgagactgcgcaaagagttaaacaaactttacaacgttacaaagaacttcaagacattatagctatccttggcttggacgaattatccgaagaagatcgcttaaccgtagcaagagcacgaaaaattgagcggttcttatcacaaccttttttcgtagcagaagtttntaccggttcgccggggaaatatgttagtctagcagaaacaattagaggggttaaattgattctttctggagaattagatggtcttcctgaacaaggcttttatttggaaggtaatatcgatgaagctcctgcgaaagctacgaacttatga

SEQ ID NO: 34638 - DNA, 275 bp, Glycine max
  unsure at all n locations
  Clone ID: LIB3138-071-P1-N1-B5
ggctcacttcgggtaacggttcagggcgaagtcattgagcaggctgggggagaggaacacttgtgcggtagaacacttcagcgcttcactgcagctacacttgagcatggcatgcatcctcctgtgtcaccgaaacccgaatggcgtgccctcatggatgaaatggctgtcattgcaacaaangattatcgctctcgtgttttcaaagaacctcgttttgttgaatatttcacatgtgcaactcctgagttggagtatggaagaatgtacattgg

SEQ ID NO: 34639 - DNA, 377 bp, Glycine max
  Clone ID: LIB3138-071-P1-N1-B7
tataaaagctgaaaagcgcgagagaacgaggtctgaaacttatgagcactagcacgcataattggtggagctcctaaccagacgggactcctccctagctccgtccacgcgccgccgtacgctctgaaatcttccgtcgtctccgccatctccgctgccagcctttcgatctgtcataccaaatggccaacagagttcaaattcctaccaacaattcagccctcattgctatgattgcagatgaggatactgtagttggatttctgttggctggagtgggaaatgttgacatacgtaggaagacaaattacctcattgtggattcaaaaacaactgtcaaacaaattgaggatgcattcaaagaaattacaacaagg

SEQ ID NO: 34640 - DNA, 387 bp, Glycine max
  Clone ID: LIB3138-071-P1-N1-B8
agtaaagcgggggataaagagaggcagcaaacaaaaacaatggcgacgtcgctctctggttcggcatctctctctctcaacactctcttcatcgccaaagcgcttccactatctcgcccctcctttctctctctccctctccccaaatccctactctctctctccacgcgccgccgcaccttcatcgtccgcgccgaatcccaaaacggggccgaccccgttcccgcccactacgacttcgacctcttcaccatcggcgcaggcagcggcggggtccgagccggtcgcttcgccgccaactacggcgcttctgtcgccatctgcgagcttcctttctccactatcttctccgaaaccaccggaggtgtcggcggaacctgtgttata

SEQ ID NO: 34641 - DNA, 245 bp, Glycine max
  unsure at all n locations
  Clone ID: LIB3138-071-P1-N1-B9
gataagctttctagctagtcataacatcaccattactgatggtattgacaaaactagtgcgactttgcaatttagaaagttagcagattgtgattttctcaagagaaactttaagcagatgtctaatgttttgtgggtggctcctgaggacaaggcgagtttatggtcacaacttcattatggttcgngtaataatctggaaatgcaagaagcttatcttgtcaatctcgtaaatggtgtacgag

SEQ ID NO: 34642 - DNA, 166 bp, Glycine max
  Clone ID: LIB3138-071-P1-N1-C1
atcattttgatcgagtttctgaacacaaaataagcctttctgtcggttctgtatccaatgttgggtgttcgacagcttggtttttcttcacaataatcttgttactaggtaagacctttttccaatttcgcgcttgctccaataaagttcattagtcaggatttgt

SEQ ID NO: 34643 - DNA, 378 bp, Glycine max
  Clone ID: LIB3138-071-P1-N1-C11
ggcaacagtgagaacaccattgaattttgattctagcaagcggagcttttgtcagttttggattgaccttctcggtggaggaatcttagtggacaaaactggagattggatcacacttatacaaaattctccaattagtaacttattgagagttgctgcttggaagaaaggctgtttaatggtcaagattgtgatgtctgggaatgcagcactcaaaaggagtgattgggcctcattggttcaagtgtttttaacaaacagcaacagttcagagcattttggtgcatgttagtggaccaaatcagaaccacattcctgggaattgatctttccaattgaggtatgtggacctaataatggtttttaaaacgagttgtt

SEQ ID NO: 34644 - DNA, 333 bp, Glycine max
  unsure at all n locations
  Clone ID: LIB3138-071-P1-N1-C2
gaattaatgaagatggcagttataccgcgaaatgctcaagggcatggatggctgangcctgcaattggtgttgttgagctttctcaatgtatcgtccaggctgttcctctcagtgctagaaagtctactggtggatcacctgaaggaattgcaccatttctgcagttgccacatataagtgagactattattaagaaggtggcccgcaagaaagtgagaacatttcaggaacttcatgacatggactctcangagcgagctgaccttcttattcaaacaggtgggttatcttccgctgaagtggaagacatngagacggtactggacatgatg

SEQ ID NO: 34645 - DNA, 401 bp, Glycine max
  Clone ID: LIB3138-071-P1-N1-C3
aaaatggtggccacagttggtattcctgagaatacaggtatatcattggcctgtgctatgaatagttcttttagggggcgcgccagttctgatatttacaccatctgctctcaagactgtgaattgtggaatcctgcttgcacaaaagcaatgactatgtcatttaatccaaacccgtgttctgatgcatggagtttggaatttctgaagcgtactggatttcattgcgatatcatttgtgtcactggatggactgccaccccaatgcaggatgttcaggttacaattgattggtttatttcctctcaggaatgtgttcccaggacctattgtgttttaaatccacaaaatcctttttgtgttaatagggggatgggaaattgacttttcccccaggcact

SEQ ID NO: 34646 - DNA, 243 bp, Glycine max
  Clone ID: LIB3138-071-P1-N1-C4
gtacaatcatgtgatcaaggccatgactcaaaagggttacaggttggttggttatctacctttgattcccattgaagagatagccaaggcattcaagcagggagaggctaacttgaaaggagataatgcagcctctgaggaacagagatcagaatcatctgattctgattaaatcgagctttacttttttaaaaaatttgcttttgagtgaccttgttttatgggttgtgacattgtggggca

SEQ ID NO: 34647 - DNA, 122 bp, Glycine max
  unsure at all n locations
  Clone ID: LIB3138-071-P1-N1-C6
gtttttcaccttttttattggtgggaaacacacaagaaaccggggggttggatttggagtgagatcgaaagcaaaagaaggcntcgacctcggcggcggagaaggagaaccggaataagcat

SEQ ID NO: 34648 - DNA, 335 bp, Glycine max
  Clone ID: LIB3138-071-P1-N1-C7
ggtggtttacccaccactgcttggattagttctgcaggtaacggtcgctcctcagatatgaacaaaaggattcgcacagcacttgggaaaggtaagaaaattgtttttcttactagagttgatccttttccagtagctttactggctgttctttttggcgttaagaatgaaattctgagttctaacgccactaatcctatgctgacgcgacttcttgagaactgtaagagtctcaaatatctggttgatgagtgtcctttttgcatttgggaactaagatgtagtattttattcacttaaataaaagcgcattactatgtgcaatgagtgtgttt

SEQ ID NO: 34649 - DNA, 287 bp, Glycine max
  Clone ID: LIB3138-071-P1-N1-C9
attggaactgtgccagtgggacgtgttgagaccggtgtcttgaagcctggaatggtggtgacttttgcaccaactggactgacaactgaagtcaagtctgtggagatgcaccatgaatctcttacagaggcacatcctggtgacaatgtgggattcaatgttaagaatgttgctgttaaggatttgaagcgtggttatgttgcctcaaactcaaaggatgaccctgcaaaggtggctgctaactttacagcccaagtcattatcatgaaccaccctggtcagatttg

SEQ ID NO: 34650 - DNA, 266 bp, Glycine max
  unsure at all n locations
  Clone ID: LIB3138-071-P1-N1-D1
caatctttgttccatttcggcatgaaaccctaattcactcggttgggatctcgttagagcaggctttccacgctcgtcttcgcgctccatctgtacaagaagatccgtcacgagcgttggttatacgatggatgggaacaaggacgacgcgttgaaatgtttaagaatcggcaaagaggcgatggaaagcggngatcggtcacgcgctttgaagttcgtgacgaatgcgcgtcgcctcgaccccacttttcccgtngacgatctat

SEQ ID NO: 34651 - DNA, 402 bp, Glycine max
  unsure at all n locations
  Clone ID: LIB3138-071-P1-N1-D11
gtttgattgggcctcattggtacaagtgtttttaacagacaggaacagtacagagcattggggtgcatgtaagtggacaaaatcagaaccacattcctgggaaatgatcttcccaatagaggtatgtggtcctaataatggttttgaaatgtggagttctgagtgggcatatcaaactnnanggcatttgagttnccttattgacattcccaaacagnctacagtttttgttatttttttggtaatctctcaagatttttaaattgctggtaatactcttatgccagcttatttttttttcacaggctaactgctttatcttttgaaaattgcgaattctatgctatatcatgaattattttttccttttccttttttttttttatattaataatatatctt

SEQ ID NO: 34652 - DNA, 248 bp, Glycine max
  Clone ID: LIB3138-071-P1-N1-D12
atgaatttcattcacagggatgaggaggttaattacttcccggcaaggtatgatcctgtggggcatgcagaaacgttccccatacctcctgctatctgcagtggaaggcgtgaaaagtgtggatttgagaaggagaacaactttaagcagcccggagagagataccgatcttgggcacctgacatgtaagatagatcaaatcgccgatgggttgatgctttatctgacccacgggtcacccatgaaat

SEQ ID NO: 34653 - DNA, 346 bp, Glycine max
  Clone ID: LIB3138-071-P1-N1-D2
cacagattcagcctttctcagtttctctctctagaaaaaccaaacctcgctactctcttgtccgtttttttttgtagttctttccttatttggccttcacactccgaactgcgaaatccttttttagcaaaaaaaaaaaaaaaaaagagtgagagagcgtgagacagagagagtggtcatcagtcatcaccgttgattgattaagatgcagcaatcaaacggctctgattcgtccacgacggagcagaaagcgccgccgccgaggcaatcaccggcggtggcgaggccgcagcaatggctgccgatgcaataccctgcggcggcgatggtaatgccccaccacatg

SEQ ID NO: 34654 - DNA, 386 bp, Glycine max
  Clone ID: LIB3138-071-P1-N1-D3
cacacaaacgtttacaaaacatgaaaggaaaattgatgtcgacgccttgccattttggcaggtacttttgccttgatggtgaatgccactttggtggaagttcaccctaaataccactgcgcatttgccaacaaagaatgcagcggacacgattgggcctctactgtaagagcctcacctcaatctactcacactgtcttcattgccgtttccctcaaagaaaacgccgcagccacttgcgattctctcatctaccaatctgcttccaacttaactgctgctcatttgactttggaacaaatcaacaagatctttagaagcaatgaaaacatgaacgcagtcactttcttcttggaagaagaggattgattacgtcatcatggaga

SEQ ID NO: 34655 - DNA, 394 bp, Glycine max
  Clone ID: LIB3138-071-P1-N1-D4
accagctgggtaaattaaggtccttcctgcaccacctggtgtgcttgatgggggtccatatttgtatgcaatggggcatgatagttcagtgtctacaataccaggtgattttgtcattggtgtcaagttgacaaccataaacaatatgtgtgcatatgggctcaatccttggatttcaggctctcgtcttttgggcaccattcctcagtccatttcacagcaaactgtttggaatcaaatggcaacagtgagaacaccattgaattttgattctagcaagcagagcttttgtcagttttctattgaccttctcggtggaggaatcttagtggacaaaactggagattggatcacacttatacaaaattcttcaattagtaaacttgtgagagtt

SEQ ID NO: 34656 - DNA, 236 bp, Glycine max
  Clone ID: LIB3138-071-P1-N1-D5
aatggcctcagccgcatcccccaccactttctctctcctccggtccgccaccccttcctgggtgcgccaccgccacctccgcctccccctccccctcgcgcgtgcagctcacctcctccctccgcgcccgcccgctgcgccgcctgggcttcgccgcggcggacccgctgctcgcggcgagtgtagcggcgcgcgtggcggcggtgagaggaggaggaaagggcgcgaggggggtg

SEQ ID NO: 34657 - DNA, 349 bp, Glycine max
  unsure at all n locations
  Clone ID: LIB3138-071-P1-N1-D7
ctcgagccttatcttttcgagctgattacaaggccagggtagggtcacaacttcaggagggggcgtgtaataatctggaaatgcaagaagcttatcttgtcaatctcgtaaatgtgttactagaattgtatttgcacagtccatttgtagctcgccaatttgtgaaggaaagctctctctctnnttcaactgcttctaaaagtttaatttcctaccatatctacatattgtagagttccatcctatgcataggatgattaaatgctccttcttcaaatgataatacttgatttactgttgaacattttatcttttttcgttttacaatcgagcatgataaaaccttttt

SEQ ID NO: 34658 - DNA, 402 bp, Glycine max
  Clone ID: LIB3138-071-P1-N1-D8
agaaaattgaaggaggtaaacctaacatccctgaccttaatggtgtttctaataatggggttctaaataaaaatatactattgactgttgagaccatatgatgaaagaggagcagaagaagatagaatgaagctctcaaaggaagagcaaacttttctagaaggattgatgttaaacatggcacaaaatgttgatccacagccaaaaaaagttgttgagcaaggtcaggtggaccagattgctcaagataaagaaatcaacatcctgaatctgcatgtgacctcaaatatcaggttccatgtccttatggagatggaaatctccgtgaaagttactcctatcctaactcctcaagtagcaacttctgatgccacctttggcacaaaaagtattaataggttc

SEQ ID NO: 34659 - DNA, 386 bp, Glycine max
  Clone ID: LIB3138-071-P1-N1-E10
gagacaatgacgtcttcaatggtggaaggtggacgcgacgaggggaaacacgagccgtcggatttgatcacggaaaccatgaatctgacggctccaaacctttcacttcccagtgaaactgaaacattcttgagcgcagcaatttccctcaaggacaaggtggtggaggagacttggaaccggagagatcaagtggttgatccgacggtgtacacgggactgttgggcaccgcctttacttgcttgcggtcctaccaggttaccggttgccggaacgacttaatattatccagcgaaatcattgacacgtgtgtcaccgctgcacgtgcctccctcaggcacgtgacttttttgtgtggtagaggaggcgtttatgcgcttggtgc

SEQ ID NO: 34660 - DNA, 165 bp, Glycine max
  Clone ID: LIB3138-071-P1-N1-E11
gttatcatacacatactactactcgtttcatttgcctctggtgggagccaatagccatggggtttcaaacaagcaataattcccatttactattgtatcccctaatatgtcaacgccacatcatccttttgattgacattgaacctctatcgttgcctcacaatc

SEQ ID NO: 34661 - DNA, 403 bp, Glycine max
  Clone ID: LIB3138-071-P1-N1-E12
ttctgatcattattttaggaaaaataataatggcaagaaaccagggatgaaaaagaggaaggcttgtggtgtagatgagacagaaaaagagattaattcagatgctttaaaaggaagttatgctaatgatgttactgtgagtaccagtgacaatgaaattgtgatcgaattgaagtgcccctcgaaagcaggaaggctgctagaaattatggaagcaatcaacagtttcaatatagattttagttcagttcagtcaacagaagctgatggaaatctttatctgaccattaaatctgtgctcacaggaccaagtgttgcaacaaccaaaagaatcaaacaagcactccaaaaattggcttccaagtgctgaatttttatctataccttaaaaaccgtggggggt

SEQ ID NO: 34662 - DNA, 336 bp, Glycine max
  Clone ID: LIB3138-071-P1-N1-E2
ccacactcttattgttttcttcatatctaccttgtcactgcccgtgtgtcgccgccatggccaccgtgaccacccaagcctccgccgtaattttacggccatgtacctcgaaatcgaggtttttgaccggctcttccggtaaacttaaccgggaagtgactatgcggccaatggagtgccctccttctgcctctatcaaggttgaagccaagaagggagagtggttacctggcttggcctccccaacttacctcaatggcactcttcctggtgacaatggatttgaccctctggtgctagctgaggacccagagaacttgagggtggtacgttcaa

SEQ ID NO: 34663 - DNA, 399 bp, Glycine max
  Clone ID: LIB3138-071-P1-N1-E3
gataactagaaacagtgtgatgaaaatgaaggtccttgtttgcttggttgctacaattttggtaggcatggcaatgccatgcgtacgatatgttccctctccgaatgaacactggctatggtgcccgtactccggaggtgaaatgcgcaagttggaggcttgctgtggaagcacacaacatctttggctttgagaccattcctgaagagtgcgttgaagcaacaaaggaatacatccatggcgaacaatttagatcagactccaaaacaggtaaccaacaagcttacttttatgccagagacctcgaagtccatcccaaggacacatttgtgttcagtatagatggcaccgtactctctaatattcatactacaaaaaacattgatttggggggagaaa

SEQ ID NO: 34664 - DNA, 403 bp, Glycine max
  Clone ID: LIB3138-071-P1-N1-E4
cacattatgcgtagtcttcaaaggaacatgtgtgatgatgagacaggccatattctttatgagaccatgtttgtttggaacgaattcttaactcgaggaattcggaatcacctccagaatactatttggacagttgcactagtgtatggattttttaaacaggaaatgcttatgatatccagacgggagttcacacttacgctcattgcaagacgatcacgtcattatgctggcactaggtatttgaggcgtggtgttaatgagaaaggaagagtagcaaatgatgttgagacagaacaaatagtctttgaggatgttgctgaaggtcttcccatccaaataagctctatcattcagaaccgtggttcaatccctttttttggtcacaggaaacttcaaaact

SEQ ID NO: 34665 - DNA, 409 bp, Glycine max
  Clone ID: LIB3138-071-P1-N1-E5
agaacatgtagtggagaactaagaaggagaagcaaatggcttcctcgatgatctcttccccagctgttaccactgtcaaccgtgccggtgccggcatggttgctccattcactggcctcaagtccatggctggcattccccaccaggaagaccaacaatgacattacctccattgcttagcaacggggaagagtgcaatgcatgcagttgtggccaccagttggcaagaagaagattgagactctttcctacctgccagaccttgatgatgcacaattggcaaaggaagtagaataccttcttaggaagggatggattccttgcttggaattcgagttggagcacggtttcgtgttccgtgagcacaacaggtcaccaggatactacgatggacgcttctggaccatgt

SEQ ID NO: 34666 - DNA, 370 bp, Glycine max
  unsure at all n locations
  Clone ID: LIB3138-071-P1-N1-E6
gcagtgagcccactactaagagggatcgaggtgggcctggcccatggctaccttctggtgggcccattcgtgaaggccgggcctctgaggaacaccgagatcgccgggcaagcaggctctctcgccgctggtgggcttgtggtgatcctcagcctttgcctcacaatctatgggatttcatcttttaacgaaggagacccatccactgccccgtcactgaccttgacgggccgcaagaaggagcccgatcagctccaaactgctgatgggtgggccaagttcaccggaggcttcttcttcggaggcatttcgggtgttatttgggcctacttcctcctctacgtcttggaccttnctttcttcacttgat

SEQ ID NO: 34667 - DNA, 193 bp, Glycine max
  unsure at all n locations
  Clone ID: LIB3138-071-P1-N1-E7
gagagaaatagagagagaacttcaagtgagggtgagagtgacgacaaatctatagagagcgctagtactctaaaagtctattatattcttcaaaatatgaccatgcatcgcgagtcttgggcttttgtcttcggcgttatgggcaacatcatctcctttggagtgtgccttgctccattgccaacctntttcc

SEQ ID NO: 34668 - DNA, 391 bp, Glycine max
  Clone ID: LIB3138-071-P1-N1-E8
gagcacagacggtgatgacacagtggtgcacaagagcagcagggtgtgggcaattgaggatgagcactaacactaacactcccaaacacgacgatatcgacgccattttcaaacaaaagcgctttcttcgaacgcaggtcagaaaaaccctcaagtccatcgatccctccctcaaatcccaccaagataacaccgttcaagacatagttttgggagctccgtggttcagatccagtcgcaggttgtgcgcgtacataagctgcgctgctcttcgcgaagtcgacacttcaaaaatcttgtcacagattttgcaacataatagtactactgatggaaaaaaactttatgtgccacgcgtggaggataagaatagcacatgcgtatgtttaca

SEQ ID NO: 34669 - DNA, 112 bp, Glycine max
  Clone ID: LIB3138-071-P1-N1-E9
acactcatgcctgttatacacacagacacaccagccaggaggtgttttataaaatgtgggggagcactacctctaacactcctctacactatcatttcccccaccactttta

SEQ ID NO: 34670 - DNA, 369 bp, Glycine max
  unsure at all n locations
  Clone ID: LIB3138-071-P1-N1-F1
aaacactcataacacanagcacanagcaaagctcatccttgagttaaaaaatggcagcagcttcttccatggctctctcatccccatccttggctggcaaggccgtgaagctgggcccatcagccccagaagtgggaagggtgagcatgaggaagaccgtcaccaagcaggtctcctcaggaagcccatggtacggcccagaccgagtcaagtacttgggcccattctctggcgagcccccgtcctacctaaccggtgagttcccaggcgactacggctgggacactgctgggctttccgcagacccagaaaccttcgccaagaaccgtgaactcgaagtgatcccactcaggtgggccatgctcggag

SEQ ID NO: 34671 - DNA, 123 bp, Glycine max
  Clone ID: LIB3138-071-P1-N1-F10
tgcttctttattttatgcgttaactctttctctttctgtgtgctgttcaaaaaatgtaagagagtaatttgaatgtcttaactctatgaatttgaatgtttatttattttcctatgtattctt

SEQ ID NO: 34672 - DNA, 381 bp, Glycine max
  Clone ID: LIB3138-071-P1-N1-F12
gccgaaagccaagaaaaagctttcgatccctgtaactgcgttcgactatttagggttttttcggagacaatggcggatgaatcggagcacacggcggcgccggctgccggcgaatcgctgctcgacaagatcgccgagaagattcacggccacgacgactcttcctcttcctccgattccgattcggataaaaaggaatcttcgtcgattaaggagaaggttttccgcctctttggaagggagaagccagttcactccgtcctcggcggcggaaaacctgctgatgttctcttgtggaggaacaagaagatatctgctggtgtacttggtgtagccccgggtatttggatcttttttgagttgcctgaatatcacctgctt

SEQ ID NO: 34673 - DNA, 377 bp, Glycine max
  Clone ID: LIB3138-071-P1-N1-F3
caagcttgtggcaggtgcttgagggtgacaaacactagaacaaaggcgtcaggaaacggggagagttgtagatcagtgcataaacgggggcttgcggtgactaaattttctatagccagagctggattagttcctactagttatattacatgctctactcagtcacaaaaggaattcaataaagaaagccatacaagtgcttcattgctgaatgataataaaataaataaagcgatgctatttggctgttcttgatttgaaaggagtaattaatagtattaccatgctgcatacatttttatatcatgtaatagccgaaatggctgactgttgtgttgcgtgtctaaagctgccattctaagcggtttgagtaccgt

SEQ ID NO: 34674 - DNA, 409 bp, Glycine max
  Clone ID: LIB3138-071-P1-N1-F4
gcaacaactctgttggctgatgggtgtccatatttgtatgcaatggtgcatgatagttcagtgtctacaataccaggtgattttgtcattggtgtcaagttgacaaccataaacaatatgtgtgcatatgggctcaatcctggtatttcaggttctcgtcttttgggcaccattcctcagtccatttcacagcaaactgtttggaatcaaatggcaacagtgagaacaccattgaattttgattctagcaagcagagcttttgtcagttttctattgaccttctcggtggaggaatcttagtggacaaaactggagattggatcacacttatacaaaattctccaattagtaacttgttgagagttgctgcttggaagaaaggctgtttaatggtcaagattgtgatgt

SEQ ID NO: 34675 - DNA, 311 bp, Glycine max
  unsure at all n locations
  Clone ID: LIB3138-071-P1-N1-F5
ctcataaccgttcgttcgttcgttcgttccccacttgctttggattgtttttctccctgtgcggtaacctcaaagagagttcagtatttatacaaataaaagttttttctttttttatttctggttttcgttttggaatggctgggatttgctgtggagttgttggagaagccgccgagacttnttntcccatcgaacccaccttacgctctttcgcacgccggagtttggacctcttgcccatgaaatacatagctgttgacgtgtcagtcccttcgctggagaacagccggaagcgccagaggctggat

SEQ ID NO: 34676 - DNA, 400 bp, Glycine max
  unsure at all n locations
  Clone ID: LIB3138-071-P1-N1-F6
acctcgaattttgcttctagagcttatagctaaaatcaaggtcacgaacataaatgtcctggtggtcttttttgctacgaggggggggcaccatggcaatgccatccttactatatgttccctctcctaatgaacactggctatggtgcccgtactccggaggtgaaatgcgcaaattggaggcttgctgtggaagcacacanncatctttggctttgagaccattcctgaagagtgcgtttaagcaacaaatgaatacatccatggggaacaatatatatcacactccaaaacagttaaccaacaagcttacttttatgccagagacctcgaagtccatcccaaggacacatttgtgttcagtatagatggcaccttactctctaatattccatactac

SEQ ID NO: 34677 - DNA, 362 bp, Glycine max
  Clone ID: LIB3138-071-P1-N1-F7
agcagctctatccggaaccatggtgagcacctccttcatgaggaagcaacctatgacgaccaagagcctaaagacattccccaacgctctttttggtctgaaaggtggacgaggtggtcgtgtaacttgcatggcctcgtacaaggtgaagctcataaccccagaaggagaagtggagtttgaatgcccagatgatgttttcattgttgacaaggctgaggaagaaggcattgaacttccctactcgtgcagggctggttcttgcgtttcatgtgttgggaaaattgtgaaaggtgacgtggaccagtcagatggtagcttccttgatgatgaacaaatagaaagtggatgggttctcacct

SEQ ID NO: 34678 - DNA, 343 bp, Glycine max
  Clone ID: LIB3138-071-P1-N1-F8
attaaatgtacaggctatctcttcatagcatgagaaaattagggtgataataccatcaattttgaggctgtttcacatacgctggcgcagtttggagagattcaagaaaaagatgtattgaaattttcacaggaggaaattcttacaggtcggtcacataaggtgcttcctgccacaactctgttggctgacggcggtacatatctgaatgctatggtgcatgatagttgatagtctacattaccatgagatattggcatagtggtcaagctgtcaaccatagacaatgtgtgtgcatatgggctcaatcctggtatttcaggttctcgtcttttgggcacca

SEQ ID NO: 34679 - DNA, 125 bp, Glycine max
  Clone ID: LIB3138-071-P1-N1-F9
actaacagtatactttctctctccataacattactaagtgtctgctgataataccaatggagtttgaggcatttatcactcatccttgctcatattgtatagattcaaaaaaaaattgtattcaa

SEQ ID NO: 34680 - DNA, 365 bp, Glycine max
  Clone ID: LIB3138-071-P1-N1-G1
ctcgagccgaatcggctcgagagaatatcaaaaactgtagactgtgtgggattgtcaataaggaaactcaaatgccatgaagtttgatttgcccactcagaactccacatttcaaaaccattattaggaccacatacctctattgggaagatcaattcccaggaatgtggttctgaatttgtccacttacatgcatcaaaatgctctgtactgttgctgtttgttaaaaacacttgtaccaatgaggcccaatcactccttttgactgctgcattcccagacatcacaatcttgaccattaaacagcctttctttcaagcagcaactctcaacaagttactaattggagaatttgtataagtgtg

SEQ ID NO: 34681 - DNA, 404 bp, Glycine max
  Clone ID: LIB3138-071-P1-N1-G2
cgcgacaaaggggagtggcagaaatcgtttcaggttctgaaggatatgaagagcaatggtgtgcagcctgataggcatttttacaatgtcatgattgatacgtttgggaagtataactgtctcgatcacgccatggctacattcgagaggatgttatcggaggggattcggcctgataccgttacttggaacacgctgatcaattgtcattgtaagtccgggcgccacaatatggccgaggagttgttcggcgaaatgcagcagaggggatactcgccttgcattactacttataacattatgattaactctatgggggagcagcagaggtgggagcaagtgagtttgtttttgagcaagatgcagagtcaggggttgctgcctaattcaattacttacacaac

SEQ ID NO: 34682 - DNA, 390 bp, Glycine max
  unsure at all n locations
  Clone ID: LIB3138-071-P1-N1-G3
ttcaaactcagtctttccgtgctgctcacatcaaatggacctgcatgtggccaggaagcttctagtacatatgagcttacagaggtaagcacgggaggaaaactggggaggcacaatcttcatatccagcaattgggcccagacaccgtcactgagttatcaactttgcacttgtctgttgctgatcaaacgcaggatctccacagtactcttgtgttggatcatccacgcggctattctcggcaactccataaatgcattgttacacattcacagggacaagcagtttttgatggaaacattaaggttaacaggtatgctcagcagacagatgcangacagttaacaagaacncttctgcttgaacctcgtgcgactggtaatgttaaa

SEQ ID NO: 34683 - DNA, 411 bp, Glycine max
  Clone ID: LIB3138-071-P1-N1-G4
gtcaagattgtgatgtctgggaatgcagcagtcaaaaggagtgattgggcctcattggtacaagtgtttttaacaaacagcaacagtacagagcattttgatgcatgtaagtggacaaaatcagaaccacattcctgggaattgatcttcccaatagaggtatgtggtcctaataatggttttgaaatgtggagttctgagtgggcaaatcaaacttcatggcatttgagtttccttattgacaatcccaaacagtctacagtttttgatattctcttgggaatctctcaagattttgaaattgctggtaatactcttatgccagctttttctgttccacaggctactgccagatcttctgaaaatgcggaatcctctgcatgatctggaatttgtgttttctttcgcttg

SEQ ID NO: 34684 - DNA, 408 bp, Glycine max
  Clone ID: LIB3138-071-P1-N1-G5
aatcgaagtactactacaagggaagaaaaacttagctactaaggaaggatcaaagagaatggctcaagcaatggcatcaatggctggcttgcgtggttcctctcaggctgtgttggaaggtagccttcaggtgagtggctccacacgcttgaatgtggggagtggaagcagggtggcctcagtcacacgtgcagggttcacagttagagcacaacaacaacaagtgagtggtgaggtacaaagcagccgtagggcagtgctttcacttgttgctgctggtttggccactggctcttttgttcaagctgtgcttgctgatgccaaatctatcaaagttggaccacctcccccaccttctggtggattgcctggatcgttgaactcagatgaagcaagagaccttcagct

SEQ ID NO: 34685 - DNA, 413 bp, Glycine max
  Clone ID: LIB3138-071-P1-N1-G6
cggctcgagagaagcaactacccaagctggttgttgggttattgttaattggagcagggcttgtgctctacacaaatagaacagagaggagtgcccagctgcttcagcagccagaagtcattgcaaccactgttgaagaagtttcttcaactgcaaagccattggttagagagcttcaggagcttcccaggagaattaagaatattattgcatcattacctgatcaagaggtgaatgaggaggaagcctccctctttgacatgctctggttactacttgcaagtgttgtatttgtgccaatatttcaaaagattcctggaggaagtcctgttcttggctacttggctgctggtatcttgattgggccttatggtctctctatcattcgtcatgttcatgggacaaaagcaata

SEQ ID NO: 34686 - DNA, 407 bp, Glycine max
  Clone ID: LIB3138-071-P1-N1-G7
ttttgggaatggaattagatagaagggacaatgcccatactgtgaaaaggaaattgcaggttgccttcaatgtcccaactgaggcaagctcacttatatgtggggacatggtcttgaagaatgacctaagtgtggttagaaatgattctccacttctactcactaggacctttttacataggagttcatctaccccttgcctttcacctactggcagggatcttctgcagagggatcagagtggaccaattgaggttataggctgctcagatatgttttcaggaaccaaacagctggcttaggatattatgaaggcaataaaagttggcattgaacctatccccattcagagtggattaggaggtgcatattattttaggaacagcaatggtgaaaatgttgctatt

SEQ ID NO: 34687 - DNA, 359 bp, Glycine max
  Clone ID: LIB3138-071-P1-N1-G8
gttccaggacttggtcagtacatctctggtgccattctcttggaggaaactctctaccaatccacaactgatggcaggaagattgttgacgtgctcctcgagcaaaacattgttcccggtattaaagtcgacaagggtttggtaccccttgctggttccaacgatgagtcatggtgccaaggtcttgatggtcttgcctttcgctcggctgcatactaccagcaaggtgcccgtttcgccaaatggcgtactgttgtgagcatccccaacggtccctctgctctggcagttaaggaagcaacctggggtctggctcgctatgcctgaattgcttaggacactggattggtcccaattgt

SEQ ID NO: 34688 - DNA, 264 bp, Glycine max
  unsure at all n locations
  Clone ID: LIB3138-071-P1-N1-H11
gcttcctgctgtgatgaccactacagttgctgccctgcagactatcccatctgcaacactgacgctggaacttgtctcaggagcaagaacaacccctttggagtgaaggcattaaggcgtactccagcgaaaccccattggaccttcggacgtaagaacaaggtcagcagtgcttaagcaggtnaaggaaatgtgaacgtgcacattgagccactgatgaagtcaaacggaagacgaaggactaaagcaccagctgtgtgcact

SEQ ID NO: 34689 - DNA, 388 bp, Glycine max
  unsure at all n locations
  Clone ID: LIB3138-071-P1-N1-H12
gttgaatgtggaatcccttctggatttccgctcacagttatttgcaatagcatttttaatgagatgctcattagatatagctatgaaaaattactgcgccaggctaaagctccaagtatgtttttacaatccttcaaaaattttgtttctttgtgtgtgtatggtgatgataacttaattagngttcatgaatatgtcaagccttactttagtggttctaaattgaaaagctttctagctagtcataacatcaccattactgatggtattgacaaaactagtgcaactttgcaatttagaaagttagcagattgtgattttctcaagagaaactttaagcagatgtctaatgttttgtgggtggctcctgaggacaaggcgagtctat

SEQ ID NO: 34690 - DNA, 375 bp, Glycine max
  unsure at all n locations
  Clone ID: LIB3138-071-P1-N1-H2
gtggtgactgtgctctgctctcatctcattcatattcatttcaatggcaactcaaggtcaagtcattacctgcaaagctgcggtggcctgggaacccaacaagcccttaaccgtccaagacgttcaggttgctccgcctcaggccggcgaggtccgtgtccaaatcctcttcaccgctctctgccacaccgatgcttacactnggggcggcaaggatcccgaaggtcttttcccctgtattctcggccacgaagctgcaaggattggggagagtgttggagaaggtgttactaatgttcagcctgnggatcatgtcattccctgttaccaggctgagtgtggggagtgcaagacttggcaaaacggggaagacaa

SEQ ID NO: 34691 - DNA, 231 bp, Glycine max
  unsure at all n locations
  Clone ID: LIB3138-071-P1-N1-H4
ggacataggcaatctgtccggtgtcttcgaaggacaagtagcaatatgtatcatcaattaatataatgccctgaaaagttcttaatatatctcgtgtatttggattttggattgctcaataagtgtaaattggtgttctaactctgttaccaaaaccataaaataataatatatttggataatcggatgcatgtttatgttattatgcatgatcctcatactaccttgntt

SEQ ID NO: 34692 - DNA, 371 bp, Glycine max
  Clone ID: LIB3138-071-P1-N1-H8
gtgttcccaggacctattgtgttttaaatccacaaaatccttttgtgttaaataggtggatgggaaaattgactttcccccagggcacttcccgaagtgttaagagaatgcctctttctatagggggaggagctggtgcaaagaatgctattctcatgaatatgccaaatgctgttctttcaatgtggagatattttgttggagatctcgtctttgaagtttctaagatgacttctccctacattaaatgtacagtctctttcttcatagcatttggaaatttggctgatgataccatcaattttgaggcttttccccacaagctggtgcagtttggagagattcaggaaaaaggtgtattgaaatttcac

SEQ ID NO: 34693 - DNA, 367 bp, Glycine max
  Clone ID: LIB3138-071-P1-N1-H9
ggttaaggagatgtttgaataaaaataattccccttcaagttcttattttttgagaggacaggacaatatgaatgttttattatgctctatcaacacatttaaaagattatatgatatatctgctgtggaagtaggtcaacatttctattggcaaatagggagtttccaagtacatgcccaagtacttattacttcttgggttgtaattgctctcttattggtttcagccattctaattattcgaaatctgcacaccattcccgctcttggccagaatttctttgaatatgttcttgaattcattcgagacgtgagcaaaactcatattgcagaataatatgatcccggggattcctttattggaac

SEQ ID NO: 34694 - DNA, 262 bp, Glycine max
  unsure at all n locations
  Clone ID: LIB3138-072-P1-N1-A11
cgccggacgcacgcgaacgaaagcncggaaaacggcacgtggtggccacagttgatatccctcagaatacaggaatatggggggcctgtgctaagggggggggggggtaagaggagcgccagatctgatatttacaccatttgctttcaagactgagaattgaggaatcctggttggacaaaagcaaagactaatgcaataaagccaaacccaggttcagatgcatggagtttgaaatatcagaagcgtactggaataaata

SEQ ID NO: 34695 - DNA, 109 bp, Glycine max
  Clone ID: LIB3138-072-P1-N1-A12
caacgatataaaacaagaaagcaaaggaggttaattaagggcggcgaaaggcattatggtgggtggtcatcccataatccctaacaagaaatatgaattatgctcttct

SEQ ID NO: 34696 - DNA, 408 bp, Glycine max
  unsure at all n locations
  Clone ID: LIB3138-072-P1-N1-A3
gacacaagagctgagttgtgacatgccctgcacccgtacctaagctttggattcgagtaacagcataacaaagcgggttactgtctgttcaagctaccatgtctgtgtctctttcttagtgggtccttgccagaagttaaaatggcccaagaaactttcctattcacatctgaatcagtgaacgaggggcaccctgacaagctctgtgaccagatctccgatgctgtgctcgatgcatgcttggagcaggacccttgacagcaaggttgcctgtgaaacctgcaccaagaccaacatggtgatggttttcggagagatcacaaccaaggccaacgtggactatgagaagattgtgcgtgacacatgcangaacattggtttttgctctgatgatgttggtcttgatgc

SEQ ID NO: 34697 - DNA, 218 bp, Glycine max
  Clone ID: LIB3138-072-P1-N1-A4
atatggatcgggaagctcttatcagagaggttgctagcaagacgaacgactctgcgggtgagtgggactaccacggcttcggttcttgctcgcgagataattaagctggggcttctcagtgtgacttctggggcaaatcctgtgtctcttaagagagggattgataagactgtgcatggttttggtggaggagttggagaagaaggctaggcctgtca

SEQ ID NO: 34698 - DNA, 221 bp, Glycine max
  Clone ID: LIB3138-072-P1-N1-A5
gtttctttctatagttgttggcgctgcggcaaagaatgctatggtcatcaatatgccagaggcggcgctttcaatgtggagacattttgctggaaatctcgtctttgaagtttctaagatgacttctccctacattaaatggacagtctctttcttcatagcatttggaaatctggttgttgagaccatcaattttgaggcttttccccacatgctgttgc

SEQ ID NO: 34699 - DNA, 296 bp, Glycine max
  Clone ID: LIB3138-072-P1-N1-A6
acttgttgaacggtgtgaaccggagtgataggttaacggattgcatggtttcggcgttgaaatcgaggatgaatccgggggagcatcctccgccggtggcggagcttttcagaaaggagcacgccgagtcgtctcagctgcttttggataactcagtgtgcttcaaggtagggttcatggcggcgaattacgcgattctggaagccgcatttgaggagaaaacggagaataacaggttctgcgtggtggattttgagattggaaagggaaagcagtatttgcaccttctcaacgcg

SEQ ID NO: 34700 - DNA, 393 bp, Glycine max
  Clone ID: LIB3138-072-P1-N1-A7
gaaaaacccaaaaagattgatgccagattgagacaaagaatagatcctcaatacaatgaggttcaggctcagatggaaacaaatttgtttaaattgtctcttgatgatgttgaaactcctaaaggttccatgttggatctgaaaatttctcaatctaaaattgcacttcccaagaacacagttggaggaaccattctgcgtagtgatctattggcaaattttttgacagagggcaattttagagcaagtgttgatttgcagcgcactcatcgtattagaggaatgattaaaatggtggccacagttggtattcctgagaatacaggtatatcattggcctgtgctatgaatagttcttttagggggcgcgccagttctgatatttacaccatc

SEQ ID NO: 34701 - DNA, 320 bp, Glycine max
  Clone ID: LIB3138-072-P1-N1-A8
attagaactgtaagttgctgtgtcgttgacaaaaagatggccagtgcacgggatcttgaggagacatactggaggatgctattagaagtggacaccctatattgattattgctgaggatattgaacaagaggctttagcaactcttgtggtgaacaaacttagaggatcactgaagattgcagcactgaaggcccctgggtttggagagcgcaagagccagtaccttgatgatattgccatcttgactggaggtactgtaatcagagaagaggttggccttactttggacaaagctgggaaagaagttctcggatatgcc

SEQ ID NO: 34702 - DNA, 344 bp, Glycine max
  Clone ID: LIB3138-072-P1-N1-A9
tgtcacccctctatctcttggtttggagactgctggcggtgtgatgactgtcttgatcggtaggaacactacaattccaaccaagaaggaacaggttttctcaacatactctgacaaccagcctggtgtgttgatccaggtctttgaaggtgaaagagcaaggactaaagataacaatttgttgggcaaatttgaactttctggcattcctcctgcccccaggggtgtttctcagattactgtgtgctttgacattgatgccaatggtattttgaacgtctctgccgaaaattagaacacctggcagaaaaattagatcactatcaccaatgacaaggggtgac

SEQ ID NO: 34703 - DNA, 106 bp, Glycine max
  Clone ID: LIB3138-072-P1-N1-B1
gcttctttatccactcatttatcccgctattaaaatcatcaaggggtgggtgacctcagtgggcggcagcaacaaatcattataccatatgttgattaaattggca

SEQ ID NO: 34704 - DNA, 395 bp, Glycine max
  Clone ID: LIB3138-072-P1-N1-B12
attttgttggagatctcgtctttgaagtttctaagatgacttctccctacattaaatgtacagtctctttcttcatagcatttggaaatttggctgatgataccatcaattttgaggcttttccccacaagctggtgcagtttggagagattcaggaaaaagttgtattgaaattttcacaagaggaatttcttacagcttggtcaactcaggtgcgtcctgcaacaactctgttggctgatgggtgtccatatttgtatgcaatggtgcatgatagttcagtgtctacaataccaggtgattttgtcattggtgtcaagttgacaaccataaacaatatgtgtgcatatgggctcaatcctggtatttcaggttctcgtcttttgggcaccatt

SEQ ID NO: 34705 - DNA, 382 bp, Glycine max
  Clone ID: LIB3138-072-P1-N1-B2
gtagtgtttaggatctggcggtgtatgatgggatcttgcatatgcgcgttggagactccggcgaggttgctttggaccacaagctttcttccgtcataagcttatgatcttctaatagttactaattcacacacaaacaaaacacttcataacaacaacccttctgaaattctcaacactagtttcgaaaaacagagtaaaacacacagaacaaacacacacatacaagagcaaagacaccttttaagtactaaggtgtctctttctctcgccggaaagtgtctttggcagcggtgattgaccggagtgccatggagtctggacggattttctttgatgccttttgtttttgcgggaacaacatgctctttcttggcaacac

SEQ ID NO: 34706 - DNA, 379 bp, Glycine max
  Clone ID: LIB3138-072-P1-N1-B3
tgtcattggtgccaagttgacaaccataaacaatatgtgtgcgtaggggctcaatcctggtattgcaggttctcgtcttttgggcaccattcctcagtccatttcacagcaaactgtttggaatcaaatggcaacagtgagaacaccattgaattttgattctagcaagcagagcttttgtcagttttctattgaccttctcggtggaggaatcttagtggacaaaactggagattggatcacacttatacaaaattctccaagtagtaacttatttagagttgctgcttggaagaaaggctgtttaatggtcaagattgtgatgtctgtgaatgcagcattcaaaaggagtgattgggcctcatttggacaagtgttt

SEQ ID NO: 34707 - DNA, 419 bp, Glycine max
  Clone ID: LIB3138-072-P1-N1-B4
ttctagctagtcataacatcaccattactgatggtattgacaagaactagtgcaactttgcaatggagaaagttagcagattgtgattttctcaagagaaactttaagcagatgtctaatgttttgtgggtggctcctgaggacaaggcgagtttatggtcacaacttcattatgtttcgtgtaataatctggaaatgcaagaagcttatcttgtcaatctcgtaaatgtgttacgagaattgtatttgcacagtccagaggaagctcgccaattgagaaggaaagctctctctcgtattgaatggctgcaaaaagctgatgtgcctaccatagcacagattgaagagttccattcgatgcagaggatgatgaatgctcctgattcaaatgataatattgatttactggtgagcattga

SEQ ID NO: 34708 - DNA, 418 bp, Glycine max
  Clone ID: LIB3138-072-P1-N1-B5
tgcatgtaagtggacaaaatcagaaccacattcctgggaattgatcttcccaatagaggtatgtggtcctaataatggttttgaaatgtggagttctgagtgggcaaatcaaacttcatggcatttgagtttccttattgacaatcccaaacagtctacagtttttgatattctcttgggaatctctcaagattttgaaattgctggtaatactcttatgccagctttttctgttccacaggctactgccagatcttctgaaaatgcggaatcctctgcatgatctggaatttgtgttttctttcgcttgttcgtttgtttaattcaataaaggaaattaggcatgaccctcttgttgagtatgctctgcctatttgaaaatttccacaacctctttaattgtcgtaatgatgtgtga

SEQ ID NO: 34709 - DNA, 388 bp, Glycine max
  Clone ID: LIB3138-072-P1-N1-B6
agtaatgaagcttgaaatagatttcttctctgctcagccactctttcagccaactatagtacccttgactaaaggacataagcctgcggaagatcatctcatagttttttctgattttgatttaacatgcactgtagttgattcgtccgccatcttggctgaaattgctatagtgacggcaccaaaatctgatcagaatcagcctgaagatcaaattgttcggatgttatcttctgacctcaggaatacatggggttttctatctaaacagtatacggaggagtatgagcaatgtatagaaagcattatgccttccgatagattgaacaatttcgattataaagaattgtctatggctcttgagcaactttcaaaatttgagaacact

SEQ ID NO: 34710 - DNA, 406 bp, Glycine max
  Clone ID: LIB3138-072-P1-N1-B7
aattgacattaaattattcagaataatggaagtatcattcacatcttattatgtatgtgagaagtcacaaaattcataaattattatagggattaaaatgggataggggttctttaagattctaaaataggaacaatacttatttattatgagccaagccgttaaaataatattggatgaacctccaaaattctttatcatgaactatttaacgtgcacatcaacattaacaattattttggccactaaaaacaaatagtatgatcatgggagatgaagaaaaccggtaataacttaatgaaagaacgggctcgattttttttgggaatccaattacgatgaaatttgaattattccactccacccatgaaccttattagagttgacttttaggtctttaaaccaa

SEQ ID NO: 34711 - DNA, 399 bp, Glycine max
  Clone ID: LIB3138-072-P1-N1-B8
catcaaactgtttggaatcaaatggcaacagtgagaacaccattgaattttgattctagcaagcagagcttttgtcagttttctattgaccttctcggtggaggaatcttagtggacaaaactggagattggatcacacttatacaaaattctccaattagtaacttgttgagagttgctgcttggaagaaaggctgtttaatggtcaagattgtgatgtctgggaatgcagcagtcaaaaggagtgattgggcctcattggtacaagtgtttttaacaaacagcaacagtacagagcattttgatgcatgtaagtggacaaaatcagaaccacattcctgggaaatgatcttcccaatagaggtatgtgggcctaataatgattttgaaatgtggagt

SEQ ID NO: 34712 - DNA, 143 bp, Glycine max
  Clone ID: LIB3138-072-P1-N1-B9
gttgattcttggttaccaatttttgtgaattgtctttatcctgtaagtcaattaccttgagaagctgtcgttgtaaatgttacatgtggtagtggacgtggtggatattatcttacataactgtaaattgttttatatttata

SEQ ID NO: 34713 - DNA, 312 bp, Glycine max
  Clone ID: LIB3138-072-P1-N1-C1
gaaactcgcttgctgaagctgaggttgaaggtgcaggagatcgttggtgtgagtacatgactggaggctgtgtggttgtcttgggaaaagtgggtagaaatgtaactgctggaaatgactggaggattggcttactttcttgatgaggacaatactttcatacccaaggtaaatggagaaattgtaaaaagtcaacgggtgtcaggctctgttgggcagatgcaactgaagagcctgattgaagctcatgttgaaaaaaccgtgagtacaaaaggtgctgatattttgaatgacttgtagaagtattttatt

SEQ ID NO: 34714 - DNA, 54 bp, Glycine max
  Clone ID: LIB3138-072-P1-N1-C2
aattattcatggtttttattaactaccctaaatgttaaaatcgctgggcatact

SEQ ID NO: 34715 - DNA, 314 bp, Glycine max
  Clone ID: LIB3138-072-P1-N1-C3
gaaggttagtgccttatatgagcaggctctggtggatgcacgcaaggttattgagcgtgaaatggaaagattcaagatctgtgagaaggagacaaaaacaaaagcattctccaaagaaggcttaggtcaacagcctaaaactgatcctagagagaaggctaaatcagagacaagggattggttgaacaatgtgtttggtgagttagaaaatcaaatcgatatacttttgaagcttaacttgagggactttcttttaagataggatatgatatcaggccccttataattggactcattttagaaaacattaattt

SEQ ID NO: 34716 - DNA, 288 bp, Glycine max
  Clone ID: LIB3138-072-P1-N1-C5
ctcgagccgaatcgtttcgagctccctttctctctgtctctcgctggctcttcttctcatccaggaccgagtcacatactcaccgatcttccgattccctttcgtcttggtttatgagctcgaaggagagacccactcttggtggcacgcgtattaagaccctcaaacggaatattgctgcgcccctggaccctgcatcattttcggatgcagaggtccacatttattttggataatgctgcttatctggaactaattgctaagagcattgaatcttcagaccttaac

SEQ ID NO: 34717 - DNA, 409 bp, Glycine max
  Clone ID: LIB3138-072-P1-N1-C6
cctaggtagattcggatactgcgagttttctgcttcctggattgccccatgaattgaagatgacgcgtttgcagttaccggattggcttagagcaccgacaggttatacttatttgatgaacatgatgaaagactcggagagaaagagctatggatcgctgttgaatactttttatgagcttgagggagattatgaggagcattacaagaaggccatgggaactaaaagttggagtgttggaccagtttccttttgggtgaaccaagatgctttggataaggccgatagagggcatgccaaagaagagcaaggtgaaggagaagaagggtggcttacatggctggattccaagacagagaactctgttctctatttgagttttgggagcatgaacatggtccctacttc

SEQ ID NO: 34718 - DNA, 298 bp, Glycine max
  Clone ID: LIB3138-072-P1-N1-D10
ggaatttcttacagcttggtcaactcaggtgcgtcctgcaacaactctgttggctgatgggtgtccatatttgtatgcaatggtgcatgatagttcagtgtctacaataccaggtgattttgtcattggtgtcaagttgacaaccataaacaatatgtgtgcatatgggctcaatcctggtatttcaggttctcgacttttgggcaccattcctcagtccatttcacagcaaactgtttggaatcaaatggcaacagtgagaacaccattgaattttgattctagcaagcagagcttt

SEQ ID NO: 34719 - DNA, 401 bp, Glycine max
  Clone ID: LIB3138-072-P1-N1-D11
gacagagggcaattttagagcaagtgttgatttgcagcgcactcatcgtattagaggaatgattaaaatggtggccacagttggtattcctgagaatacaggtatatcattggcctgtgctatgaatagttcttttagggggcgcgccagttctgatatttacaccatctgctctcaagactgtgaattgtggaatcctgcttgcacaaaagcaatgactatgtcatttaatccaaacccgtgttctgatgcatggagtttggaatttctgaagcgtactggatttcattgcgatatcatttgtgtcactggatggactgccaccccaatgcaggatgttcaggttacaattgattgggttatttcctcttaggaatgtgttcccaggacctattgtgttt

SEQ ID NO: 34720 - DNA, 414 bp, Glycine max
  Clone ID: LIB3138-072-P1-N1-D12
aacaagttcacattgtaggaacctttgtcttgtcgtgtcgggtagtggctcatattgatattggtatggtctttctttgaaccccatttgcaaaaaggaagaagaagaacatgaagattcagtgtgatgtgtgtgagaaagcccctgcaaccgtgatttgttgcgcagatgaggcagctttgtgtgccaaatgtgacgttgaagttcatgctgcaaacaagcttgcaagcaagcaccagaggcttctccttcaatgtctatcaaacaagctttccagatgtgacatatgccaagataagccagctttcatattttgtgttgaggacagagcactcttctgtaaagactgtgatgagccaattcatttagccagtagcctttctgcaaaccaccagcgctttctcgctactggta

SEQ ID NO: 34721 - DNA, 327 bp, Glycine max
  Clone ID: LIB3138-072-P1-N1-D2
gtgctgagtttgacggtgaatcagaggcaggcgtacgtatacgtgtagtagggtgattgagagatggacgctcccctgctgctggtgaacggcgagggggcggcgctggtggcggagaatggtgactacgtggcggtgagggagctgaaggaggtgaagaaggtgttttggattgagaccaagagagtgtgggagattgcgatgcccatcgttttcaacatatggtgtcagttcggtgtcaacttcgttaccagcatgtttgttggacactctggtgacattcagctctctgctatttctctcattaactccgtcattggcactttt

SEQ ID NO: 34722 - DNA, 168 bp, Glycine max
  Clone ID: LIB3138-072-P1-N1-D3
gttcttagtgtgacacagaatcatacccaagcttacgaatacgcggagtactgtgaatgagcgggggactctcccctcttgctgttgaacggcgagggaacgcaacaaaggaaataaagcgtgaccttcttggcggggatgctcctgctatatgaaaatatccacacc

SEQ ID NO: 34723 - DNA, 348 bp, Glycine max
  Clone ID: LIB3138-072-P1-N1-D4
atttcttaagcgtcctggattccattgcgatatcatttgtgtgactggatggactgccaccccaatgcaggatgttcaggttacaattgattggtttatttcctctcaggaatgtgttcccaggacctattgtgttttaaatccacaaaatccttttgtgttaaataggtggatgggaaaattgactttcccccagggcactttccgaagtgttaagagaatgcctctttctatagggggaggagctggtgcaaagaatgctattctcatgaatatgccaaatgctgttctttcaatgtggagatattttgttggagttttcgttttttgagttttctaagatgactt

SEQ ID NO: 34724 - DNA, 419 bp, Glycine max
  Clone ID: LIB3138-072-P1-N1-D6
gtccatctggtaagaaatatgatgctgtgattcactgtgcaatgggctttccatggtccacctttgagcctaacttgaccgtgactggaaaggttgtagacataactccaagctctgcttcaatgctgacatttgctctgaaaaaacttaccttctccaaaaagcaacttgtgcctttgcttttatttcctaaaggtgaggaccttcaacatcttattcatttagtcaaggaaggaaagcttaaaacagttgtggactccaaatatcctctaaccaaggctgaagatgcctgggctaagagtattaatggccatgcaactgggaagataattattgagttctagatatgcataagatgtgaatggattcaggaatacccttgcagtttactttggtatgacatgagacgaatatcattt

SEQ ID NO: 34725 - DNA, 237 bp, Glycine max
  Clone ID: LIB3138-072-P1-N1-D7
caataaccggtccttaaccggcgtcggatttgaaccctgggaagaggttaagaaggagctggaccttgtttccactgacccacacgcttaccttacgtcgacagaagtacacccatgagtctgaggctactattaacgaacagatcactgtgccgtacaatgattcaaacgttgatcatgcgatgattgcctacttgggtaggcacaaagcagcgcttaaagttattgccaagtttt

SEQ ID NO: 34726 - DNA, 257 bp, Glycine max
  Clone ID: LIB3138-072-P1-N1-D8
tgatattctgtgtttcgattatgctagttttgatggtttgatgaccaagcaagttatgagcaagatggcataaatgataaacagtctttgtggaggtgatgaaaaataattgcgcgtaacgactcacctgatgttggcttgactattataaaatttattcactttttaataatttgttttattgattgttaagtttgttttttttttattattttttaataattatttttactttattatatatatatattcttttt

SEQ ID NO: 34727 - DNA, 258 bp, Glycine max
  Clone ID: LIB3138-072-P1-N1-D9
ggcagaaatagagattggtgacgggctacctgacattggagggactgctaaatgagttggagctctgaagcaagcacgctttgaggttagatgaaagaaagatatgacattgggctcgactctttctgtggatatgcctttagacaaaagaaacttctcacacgagtagctaccgtctaactgatgtcgggcagagtgtgacctttaacaaggtcaaggttctggagtatgttggactggctccaaagggtagtctaa

SEQ ID NO: 34728 - DNA, 167 bp, Glycine max
  Clone ID: LIB3138-072-P1-N1-E1
gcatgatgttcaggttacaattgattggtttatttcctctcaggagtgtgttcccaggacgtatggtgttttaaatccacaaaatccttttgtgttaaataggtggatgggaaaattgtctttcccccatggcacttcccgaagtgttaatagaatgcctctttcta

SEQ ID NO: 34729 - DNA, 327 bp, Glycine max
  Clone ID: LIB3138-072-P1-N1-E11
caaaaggagtgattgggcctcattggtacaagtgtttgtaacggacagcaacagtgcagagcattttgatgcatgtaagtggacaaaatcagaaccacattcctgggaattgatcttcccaatagaggtatgtggtcctaataatggttttgaaatgtggagttctgagtgggcaaatcaaacttcatggcatttgagtttccttattgacaatcccaaacagtctacagtttttgatatttttttgggaatttttcatgatttttaaattgctggtaatacttttatgccatctttttctgttccacaggctattgtcagattttt

SEQ ID NO: 34730 - DNA, 404 bp, Glycine max
  Clone ID: LIB3138-072-P1-N1-E12
gtttaaaccaagcctcaactgatgaaggcaagttccttctttgtgcacgcaagtgccgacgtgcaactcacactgactatattatctctctaaactgtgatgatgtatcaagagggagtagtacctatattggaaagttgagatcaaactttcttggcaccaaattcacagtgtatgatgcacaccctccaatttatggagccaaagttacaaagtctcgttcctccaggctagttagtctcaagcaagtttctccaagagttcctgctggcaactatcccattgctcatgtgtcatatgatctgaatgttttgggctctaggggccctagaataatgcaatgtgttatggatgccatccctgcctcagctgttgaacctggaggtgtggccccaacacagact

SEQ ID NO: 34731 - DNA, 154 bp, Glycine max
  Clone ID: LIB3138-072-P1-N1-E2
ctattattcctccttttttcacatcccatacttattcctccgaccgggtatattttagccggcagtgcaaaaaatcccttcaaccatctctcttattaactactgttctctcctcatcatacattgcaccttatgatctctctatcattcgtca

SEQ ID NO: 34732 - DNA, 412 bp, Glycine max
  Clone ID: LIB3138-072-P1-N1-E3
ggggttatgtcgtcgaatgcccgggtccgtaggttcgaatttcgcttgagcttctaaagggtccatggttgatctggaaaattcttaatttaaaatgggactttccaagaacacgggtggaggaaccattcttcgtaatgatctattggcaaattttttgacagagggcaattttagagcaagtgttgatttgcagcgcactcatcgtattagaggaatgattaaaatggtggccacagttggtattcctgagaatacaggtatatcattggcctgtgctatgaatagttcttttagggggcgcgccagttctgatatttacaccatctgctctcaagactgtgaattgtggaatcctgcttgcacaaaagcaatgactatgtcatttaatccaaacccgtgttctgatgca

SEQ ID NO: 34733 - DNA, 276 bp, Glycine max
  Clone ID: LIB3138-072-P1-N1-E6
cctcaatcacacttaatctctctctcctgcccaaaactcatggtcatgaatcacatagttggcaggcgtacccatctctctatactgtacacttatgactcactccttcataggaaatacccactctttctgcatctctcctcaaaacactgacacaaaataatgcttccccattaaaccctccagcattcttaccaccattgtcccacattctaccaaataatcttcccgacccatatcctattgctaataatatggtatctccatacctttaca

SEQ ID NO: 34734 - DNA, 374 bp, Glycine max
  Clone ID: LIB3138-072-P1-N1-E7
gggcagcactagtgcgagtgccctcaggctatcgtcgatggtcagcgtgtccccgaattgcaattgctcatcgatgacgcttatgaagaagacggcgatggcgatggcgatggctcctttttcacttgcaatgaaaatcaaaagcaaaaggggtggtattaggtgcgaggtggctattaatgcggtggatgaggagtcgaggacgtcaccggaggagacgaagatcggagcgcgtgtgaaggtgaaggaggcgggtttgaaggtgtaccacgtccccaaagttggggagcttgacctaacgggtctggaaggcgagatcaagcagtacgttggcctctggaacggtaagcgaatcttcgccaatcttccttaca

SEQ ID NO: 34735 - DNA, 294 bp, Glycine max
  Clone ID: LIB3138-072-P1-N1-E8
cattgatcctataacaactgcacctatagtaactcacacggcgtatgttaggaggtggtggaattgatcatcgataacacttatgaataaaacagcgatggctattgcgattgctactttttcacttgcaatgaaaatcaaaagcaaaaggggtggcattaggtgcgaggtggctattaatgcgctggatgaggagtcgaggacgtcaccggaggagacgaaaatcggagcgcgtgttaaggtgaaggaggcggttttgaaggtgtaccacgtccccaaagttggggtgcttga

SEQ ID NO: 34736 - DNA, 310 bp, Glycine max
  Clone ID: LIB3138-072-P1-N1-E9
aaaagccttagccttccctacaactccaaacacaaagacatcgggatccatggctggctgcgtgggcactgtcagagctgtcaacagagctcttttgaacctgaatggttctggagctggagcttcagctcccagttcagccttctttgggaccagcttgaagaaggttattgccttaagggtccccaacagcaaggttttcggtggaagcttcaagattgttgctgtagaagagaatatagagattgaagagacccagcagaccgaccaggacagatggaagggttttgtctatgatatctcatacgac

SEQ ID NO: 34737 - DNA, 403 bp, Glycine max
  Clone ID: LIB3138-072-P1-N1-F1
gtcatttaatccaaacccgtgttctgatgcatggagtttggaatttctgaagcgtactggatttcattgcgatatcatttgtgtcactggatggactgccaccccaatgcaggatgttcaggttacaattgattggtttatttcctctcaggaatgtgttcccaggacctattgtgttttaaatccacaaaatccttttgtgttaaataggtggatgggaaaattgactttcccccagggcacttcccgaagtgttaagagaatgcctctttctatagggggaggagctggtgcaaagaatgctattctcatgaatatgccaaatgcttgtctttcaatgtggagatattttgttggagatctcgtctttgaagttctaagatgacttctccctacattaaat

SEQ ID NO: 34738 - DNA, 407 bp, Glycine max
  Clone ID: LIB3138-072-P1-N1-F10
caaattagatgttgtggtttataacattgtcattcgagccattggtctatcacatggagttgatttttcaattagggttttccgtgaaatgaaggagttgggtatcaaccccactgttgtcacttacaacacattgattaggcttctgtgtgattgctatagacacaaggaggcacttgcgttactccgaaccatcatgccccgtgatggctgccaccccactgccgtttcttaccattgtttttttgcctccatggagaagcctaaacagatacttgctatgtttgatgagatggtggagagtggggttaggcccaccatggacacctatgtcatgctcctcaacatgtttgggaggtgggggttttttcgcccggtttttatggtgtgggaatagatgaagcaac

SEQ ID NO: 34739 - DNA, 256 bp, Glycine max
  Clone ID: LIB3138-072-P1-N1-F11
aaaattctccaattagtaacttgttgagagttgctgcttgggagaaaggctgcttaatggtcaagattgtgatgtctgggaatgcaacagtcaaaaggagtgattgaacctcactggtgcaagtgacaacaccatacagtagccattcatgagcatgctatacacacaaggtggcacaaagcggtcctaccaaccatcaagccccttgattgctgtcacctcactgccgttatttaccattgttttttttgccttc

SEQ ID NO: 34740 - DNA, 123 bp, Glycine max
  Clone ID: LIB3138-072-P1-N1-F2
atatgctttaccggataaacattcctgctcatacaatgtagagttggaagatcaagctgttttcacttgtcagactaatatgctatcaatagtaactcatacacgaatgaagaaaacaaacca

SEQ ID NO: 34741 - DNA, 415 bp, Glycine max
  Clone ID: LIB3138-072-P1-N1-F3
gaggttggtggtccaagccccccgacctaagcttcgaattccgcttgagggccggtttaggcgttgaagggttctccggactggcccaacaatggtgtggaactttggtaccgggtctttggttttccggggggggggaacatggtgagagacctcttccccaacggggttgggaaaaggatgccggtgcccaaggtgatggcgattccctttctggttggggcctactttgccattgaaatgtgccttgggagtttggtgggttacgggtggctcaagcttaacacttagaaggcagaggccatgattccagcaactgcctttggactcatttgtggagaaggccctgtggctcttcccgctttcaattcttgcttttggcaaagttaacccctcctattttcatgaaattttc

SEQ ID NO: 34742 - DNA, 188 bp, Glycine max
  Clone ID: LIB3138-072-P1-N1-F4
ctcgagttcgaagaattctttgatggaaattttccagtggattgttggttaccaatttttgtgagttgggtttatcctgtaagtcaattaccttcagaagctgtcgttgtaaatgttacatgtggtagtggacgtgtgtgatttcctctcacgaatttttttccagtatctaatgtgttttaaattca

SEQ ID NO: 34743 - DNA, 404 bp, Glycine max
  Clone ID: LIB3138-072-P1-N1-F6
ggatcacacttatacaaaattctccaattagtaacttgttgagagttgctgcttggaagaaaggctgtttaatggtcaagattgtgatgtctgggaatgcagcagtcaaaaggagtgattgggcctcattggtacaagtgtttttaacaaacagcaacagtacagagcattttgatgcatgtaagtggacaaaatcagaaccacattcctgggaattgatcttcccaatagaggtatgtggtcctaataatggttttgaaatgtggagttctgagtgggcaaatcaaacttcatggcatttgagtttccttattgacaatcccaaacagtctacagtttttgatattctcttgggaatctctcaagattttgaaattgctggtaatactcttatgccagctttt

SEQ ID NO: 34744 - DNA, 362 bp, Glycine max
  Clone ID: LIB3138-072-P1-N1-F7
gcctcagaagcagaacaacaatggccactgccactgtttcaatttcaacactatgcgctaccttcggaacccattgcgccatttcccacgaccctaaacctctttttttctcaacctttcagtctcaatcgctttccttctacctcttacaagctcactttatcgcctcgctcacctatttcaacccttcctaaggtctctgaatccgcggttgccgaaaccgaaaccggttcgtccgagcccgaaccggaccaaattgtcccggctcagcctccctcctgggaacccggtctcttcgctgtcgtaatgattggtggacgccaatatattgttcacccggggcgacatcttactgttcagag

SEQ ID NO: 34745 - DNA, 392 bp, Glycine max
  Clone ID: LIB3138-072-P1-N1-F8
gagcttttgattgtcaatttctgtctgcatctcctcgtctcgtccttcatttgactgtacagctccaactagttggttgcgctcctctttctccttttacattttaatttaaataaaaacttcaaaatgtccaacattggaatcaacggatttggccgtatcggacgtttggtcttgagagcatctttggaacgaggagctcaagctgttgccatcaatgatcccttcattggtctcgattatatgatctaccttttcaaatatgattccactcacggacgtttcacgggtgaagtgaaagcagaatgagacttcttggccgacaatggaaagaaacatcatgtcttctttgagcgtgacccaaagccattccatgggccaaagctggagct

SEQ ID NO: 34746 - DNA, 307 bp, Glycine max
  Clone ID: LIB3138-072-P1-N1-F9
ggctgatcttcgccgggaagcagctcgaggacggacgcaccgttgctgactacaacatgcggaaggagtcaactctccacttggtgttgcgtcttcgtggtggtatgcagattttcgtgaagactcttacgggtaagactattaccctcgaggtggagagctctgacaccattgacaatgtgaaggccaagattcaggacaaggaaggcattccaccgaaccagcataggctgatttttgctgtgaagcagctctaggatggaaggaccctcgctgactacaacattccagaaggaattaattcttt

SEQ ID NO: 34747 - DNA, 418 bp, Glycine max
  Clone ID: LIB3138-072-P1-N1-G1
ctggccaatccattgatttctttggtgcactgagggccagagtatgtgatgacgaagtgagggagtggatttctggtgttggtgttgacggcattgggaagaagcttgtgaactcaaaagatggacctccaacctttgagcagcccaagatgactctggagaagctcttgacgtatggtaacatgcttgtccaagaacaagagaatgtcaagagagtccaattggctgacaagtacttgaacgaggctgcacttggaaatgctaacgaggatgctattaacaggggaactttcttccaatcttgaattggaggcaaagcaaacttggcaagtaaatatttctgttcctgaaagttgtgctgatccaagtgctaaaagttgtgatgggactttgcgttgtacaattcttagaaattctt

SEQ ID NO: 34748 - DNA, 397 bp, Glycine max
  unsure at all n locations
  Clone ID: LIB3138-072-P1-N1-G10
attcttaagaatcctgttgtcacagagattgcagagagattggggaagacaccagcacaagttgcccttcgatggggcttgcaagcaggtcatagtgtgcttcctaagagcactaatgagtccagaatcaagggaaattttgatatctttgactggtctattcctcaagatttgatgaccaagatctctgaaattaagcaggaaaggctagttaaggccagtttttttgttcacgagacctatggtgcctataggagcattgaagacttctgggatggtgaactctgagcaatatgcatctttgagacgttgaaaaatacattgctcctagagcaaatttattctgccttatacccactangtgtagtgattcaagtgagattttgagaaagtgtac

SEQ ID NO: 34749 - DNA, 403 bp, Glycine max
  unsure at all n locations
  Clone ID: LIB3138-072-P1-N1-G11
cattttgatgcatgtaagtggacaaaatcagaaccacattcctgggaattgatcttcccaatagaggtatgtggtcctaataatggttttgaaatgtggagttctgagtgggcaaatcaaacttcatggcatttgagtttccttattgacaatcccaaacagtctacagattttgatattctcttgggaatctctcaagattttgaaattgctggtgatactcttatgccagctttttctgttccacaggctactgccagatcttctgaaaatgcggaatcctctgcatgatctggnaatnntgtgtttctttcgcttgttcgtttggttaattcaataaaggaaataggcatgaccttttgttgggttgctctgcctatttgaaaatttcacacctttttaa

SEQ ID NO: 34750 - DNA, 275 bp, Glycine max
  Clone ID: LIB3138-072-P1-N1-G3
agtggcagaaaattgtagtgctgaggatgaacagctatttcacgagggtgttttcaataatccagtatcccttgacaagaacttctggaactatctttccattgcttttccttcacgaaccaaaaaggaaatagtgagttactactttaatgtcttcatgcttcaaaggagggcagagcagaacaagaaccacctgttaagcattgacagtgataatgatgaatggcaaggtagtgagggcaatgattttgcaacctcgagaggaagactaggac

SEQ ID NO: 34751 - DNA, 403 bp, Glycine max
  Clone ID: LIB3138-072-P1-N1-G4
ctcgagccgaatcggctcgagggctcctgaggacaaggcgagtttatggtcacaacttcattatgtttcgtgtaataatctggaaatgcaagaagcttatcttgtcaatctcgtaaatgtgttacgagaattgtatttgcacagtccagaggaagctcgccaattgagaaggaaagctctctctcgtattgaatggctgcaaaaagctgatgtgcctaccatagcacagattgaagagttccattcgatgcagaggatgatgaatgctcctgattcaaatgataatattgatttactgttgagcattgatttgttgggtttacaaggagcaggtaaagcttttccaaacaaaattgtttttgatgataagcttgtgttggctaacacacaagaattctttgat

SEQ ID NO: 34752 - DNA, 164 bp, Glycine max
  Clone ID: LIB3138-072-P1-N1-G6
gccaaatgctgttctttcaatgtggagatattttgttggagatctcgtgttttaagtttctaagatgactctctactacattaaatgtacagtctctttcttcatagcatttggaaatgcggctgatgataccatcaattatgatgctttttcccacaagctgg

SEQ ID NO: 34753 - DNA, 218 bp, Glycine max
  Clone ID: LIB3138-072-P1-N1-G7
gtctgggaatgcatcagccaacaggagtgattgggcctcattggtacaagcgttgttatcgaacagcaacagctcacagcattttgatgcatgtaagtggacaaaatcagaaccacatttctggtaatcgtactttccaatatatgtgtgaccagctaaagcagggcaaacaacatggacgaggattacaaggtgaaaaagtctatcaacttggggag

SEQ ID NO: 34754 - DNA, 335 bp, Glycine max
  Clone ID: LIB3138-072-P1-N1-G8
tgaggttcaggctcagatggaaacaaatttgtttaaattgtctcttgatgatgttgaaactcctaaaggttccatgttggatctgaaaatttctcaatctaaaattgcacttcccaagaacacagttggaggaaccattctgcgtagtgatctattggcaaattttttgacagagggcaattttagagcaagtgttgatttgcagcgcactcatcgtattagaggaatgattaaaatggtggccacagttggtattcctgagaatacaggtatatcattggcctgtgctatgaatagttcttttagggggcgcgccagttctgatatttacacca

SEQ ID NO: 34755 - DNA, 115 bp, Glycine max
  Clone ID: LIB3138-072-P1-N1-G9
gtgaaagagaatcctaggcgaagagaagagaaaaattaagatggaggggaaggagcaggatgtgtctcctttacctaacaaattcccggagagacagcccattgggaccgcttcc

SEQ ID NO: 34756 - DNA, 412 bp, Glycine max
  Clone ID: LIB3138-072-P1-N1-H1
atttgttagaggaaaaaccttcaaatatgatataatgggtgcgggggcacattcttcagaagatgttgctgaaaaggaagatcaagaaaaacccaaaaagattgatgccagattgagacaaagaatagatcctcaatacaatgaggttcaggctcagatggaaacaaatttgtttaaattgtctcttgatgatgttgaaactcctaaaggttccatgttggatctgaaaatttctcaatctaaaattgcacttcccaagaacacagttggaggaaccattctgcgtagtgatctattggcaaattgtttgacagagggcaattttagagcaagtgttgatttgcagcgcactcatcgtattagaggaatgattaaaatggtggccacaagtggtattcctgagaatacaggt

SEQ ID NO: 34757 - DNA, 411 bp, Glycine max
  Clone ID: LIB3138-072-P1-N1-H10
tacgttagggttcgtcttcatttcaaattcaacaacttcgccgaccacgccatggcaactcttcaatcactgcgaccttctttccgtccatcaatcccatccccaaattctcacactttcccagccactccctttaattattcccccaaatcgattggctcaaagggtggcagtgttaccgtaagacactctatcgtttctcccagggtttcggtttccaattcggagtatagtacccaaattgcggaaaatctcggtgacgttactattttcactgccactggcgagccagtaaggttcagtgatctctgggatcagagccagggtatagctggggtgggactgttgaggcactttggatgcccatgctgcttggaattgggttcagcctttaagaaatcaaagcaaggt

SEQ ID NO: 34758 - DNA, 272 bp, Glycine max
  Clone ID: LIB3138-072-P1-N1-H11
ctcgagccgcaattcctctttctctctgatctacgtacgtgtccgcaaactgcacctccactctccactcattccatctaatcttcccttttcgcttcagagatccaactcctcatataattcaagacaaaatcccgcgttttctgcatttctagacgttctaccctacaagctgccgtagaaattcattatggtggcaacagctgcaacttcatcatttttccctgttacttcaccctcgccggactctggtggagcaagcagcaaacttg

SEQ ID NO: 34759 - DNA, 355 bp, Glycine max
  Clone ID: LIB3138-072-P1-N1-H12
gttcctctcattcttggtatctggggaggcaagggacagggaaaatcttttcaatgtgagcttgtctttgacaagatgggaatcaacctcatcatgatgaggggtcgagaggttgaaaagtggaaatgcaggagagccagcaaaactgatcaggcggagataccgcgaagccgcagacttgatcaagaagggaaagatgtgcgctctcttcatcaacgatcttgatgcaggagctggtcgtcttggaggaaccacccaatacactgtcaacaaccagatggtgaatgccaccctgatgaacattgatgataaccccaccaatgtgcagcttcctgggatgtatcacaaggcagag

SEQ ID NO: 34760 - DNA, 411 bp, Glycine max
  Clone ID: LIB3138-072-P1-N1-H3
ctttatttgtatgctatggtgcatgatagttcagtgtctacaataccaggtgattttgtcattggtgtcaagttgacaaccataaacaatatgtgtgcatatgggctcaatcctggtatttcaggttctcgtcttttgggcaccattcctcagtccatttcacagcaaactgtttggaatcaaatggcaacagtgagaacaccattgaattttgattctagcaagcagagcttttgtcagttttctattgaccttctcggtggaggaatcttagtggacaaaactggagattggatcacacttatacaaaattctccaattagtaacttattgagagttgctgcttggaagaaaggctgtttaatggtcaagattgtgatgtctgggaatgcagcagtcaaaagagtgatt

SEQ ID NO: 34761 - DNA, 324 bp, Glycine max
  Clone ID: LIB3138-072-P1-N1-H4
ctttggcgtgtggttggaaacaaataatagagaaaataaaaaaatgagggttaaggtgcatagctctgatgataccaagaaggatgaagaggttgtgcttcctggctttagattccaccccacggatgaagagcttgttgggttttatctgcagagaaaggtggacaaaaagcctctaaaaattgaactcatcaaacaggttgatatctacaaatatgatccatgggatcttccaaaggtgaattcttttggggacaaagagtggtattttttctgcataagagggaggaagtacagaaacagcgtgaggccaaacagggtaac

SEQ ID NO: 34762 - DNA, 314 bp, Glycine max
  Clone ID: LIB3138-072-P1-N1-H7
gataacttaattagtgttcatgaatatgtcaagccttactttagtggttctaaattgaaaagctttctagctagtcataacatcaccattactgatggtattgacaaaactagtgcaactttgcaatttagaaagttagcagattgtgattttctcaagagaaactttaagcagatgtctaatgttttgtgggtggctcctgaggacaaggcgagtttatggtcacaacttcattatgtttcgtgtaataatctggaaatgcaagaagcttatcttgtcaatctcgtaaatgtgttacgagaattgtatttgca

SEQ ID NO: 34763 - DNA, 402 bp, Glycine max
  Clone ID: LIB3138-073-P1-N1-A1
cgttattcatctggtctttgcgtctgcccttcgaattgctattgcgccaggatagcaaccatcatgtcatttcgttttccagcaaggacactctggcaagctgccccgagattcgcgaatataccacgagtagctccccaaacaacacgttgggctcgcagttacgcagttgcatcggatcaaaatcggacagccatagtaacaggctctgctcgtggaatcggcaaggccattgctcttcgactagctaacgatggatatgatgtctgcatcaacgacatagaagccaacaaatctgaagccgacgaagttgtgaaacagatacaaggcttagggcgcaagtctttctcatatagcgccgatgtatcgaacctgagccaggtccagggcctagtgaaagcg

SEQ ID NO: 34764 - DNA, 382 bp, Glycine max
  Clone ID: LIB3138-073-P1-N1-A10
gtcacaacttcattatgtttcgtgtaataatctggaaatgcaggaagcttatcttgtcaatctcgtaaatgtgttacgagaattgtatttgcacagtccagaggaagctcgccaattgagaaggaaagctctctctcgtattgaatggctgcaaaaagctgatgtgcctaccatagcacagattgaagagttccattcgatgcagaggatgatgaatgctcctgattcaaatgataatattgatttactgttgagcattgatttgttgggtttacaaggagcaggtaaagcttttccaaacaaaattgtttttgatgataagcttgtgttggctaacacacaagaattctttgatggaaattttccagtggattcttggtta

SEQ ID NO: 34765 - DNA, 224 bp, Glycine max
  Clone ID: LIB3138-073-P1-N1-A11
gaagaccaagactgtatagcccgccattcaggagtatgataagaacctgttatgaatagacatgagctggaacacccctgatgactgattcccaccataggtctatgacactggtgagagcggaagctctgctgtacaaaatgaccgactgactgatctaactcaaaccctcgttttcatgcatgtcgtcaacaattcttgaagcgtgctggatcacattgcga

SEQ ID NO: 34766 - DNA, 387 bp, Glycine max
  Clone ID: LIB3138-073-P1-N1-A12
atttgtaagaaagatgtttggagagttgaatgtggaatcccttctggatttccgctcacagttatttgcaatagcatttttaatgagatgctcattagatatagctatgaaaaattactgcgccaggctaaagctccaagtatgtttttacaatccttcaaaaattttgtttctttgtgtgtgtatggtgatgataacttaattagtgttcatgaatatgtcaagccttactttagtggttctaaattgaaaagctttctagctagtcataacatcaccattactgatggtattgacaaaactagtgcaactttgcaatttagaaagttagcagattgtgattttctcaagagaaactttaagcagatgtctaatggtttgtgggtg

SEQ ID NO: 34767 - DNA, 331 bp, Glycine max
  Clone ID: LIB3138-073-P1-N1-A3
cttcaacatgcacagttacctgaagaagcaagagaacttgacaaggaggtgaggcagattattaaggagaaagaagaagctgttcgcaaccaagactttgaaaaggctggagagctacgtgatagagagatggatcttaaggcacagatctcaacacttgtagagaaaggcaaggagatgagcaaggcagagactgaggcaggggatgaaggtcctattgtgactgaagctgacatacagcatattgtctcatcctggactggtattcctgttgagaaagtctcaacagatgaatctgatcgccttctgaagatggaagagactttacata

SEQ ID NO: 34768 - DNA, 402 bp, Glycine max
  Clone ID: LIB3138-073-P1-N1-A4
ccaccggcggcagtatggcttcaaatagaatcgaaatcatggggagctggggtgactgtccctgaaggacgatgtgtagtcaatctggacgacagtgccctgcggatgctcgagccagcgcaacatcgcaagaatccagctcagagcacgtttcatagtttcaaggacccactttaagcccgaatcgattgatattcggaaaccgggcaaggttcagacgcctaatccaccaaaggcagccggagatggtggagcgtcactggatgtagagctgttgggacccaacagcgaggataaacatcttttcacggctgttgaacaggcgacgaaagacttggatgtatttatgatatttgaccccgtaaccaggacttttactatgtacgaagccgatagcagcgt

SEQ ID NO: 34769 - DNA, 425 bp, Glycine max
  Clone ID: LIB3138-073-P1-N1-A7
agtaaaagataacagaaggcttaatgtgccagtgaatgagaatgtctatggtggaatgacagaggcagagatctcacaagctcgtgaaaaagaactccagttggcccatcaggacagaattgtagagcaaaccaaagaaaagaagaacagcttggagtcttatgtctatgatatgaggagtaagctcttccacacataccgaagctttgcaagtgaacaagagaaggatgacatatctaggacccttcaagagactgaggaatggctttatgaggatggtgttgatgaaactgaacatgcttattcttcaaaactggaagaacctgaaaaggctggacaatccaattgagaatcggacaaagatgtttaagaaagagtgcatgctccaagagatttatcgtagtgcatttttaagcatccggctt

SEQ ID NO: 34770 - DNA, 304 bp, Glycine max
  Clone ID: LIB3138-073-P1-N1-A9
gtgttcttatttgctcgtccttactgagagctgaatttaccggctaacaaaaacaggtttttgctgtgcacaagatcaataaaagcaatatcgaacaagccttgatcaacgaatgcgacattgatggccctgaacagtgcaggagttgaaacagaaatggtggatgcttggacgggttaggatgacatcgaaaagactcacacgtacaaccatgagctatacgtggaacttgtacagacattgctactgtattatttaaagctggacatgatgctgtcattaactacatgttagcctacaaatc

SEQ ID NO: 34771 - DNA, 309 bp, Glycine max
  Clone ID: LIB3138-073-P1-N1-B1
gggagaaggtgcttgcttcatcggttgcacataaccacaatgattcgaagagagtacctgtgtatgtgatgctgccactggacacggtaacaatggaaggaagattgaacaagcctagagcaatgaatgcgagtttgatggccctgaagagtgcaggagttgaaggtgtaatggtggatgcttggtggggtttggaggagatcgaaagtccacagacgtacaaacaggctctgttcgctgaatttgtacagacagtgctcttgcactagctgacgatggatatgatgattgcattaactacatataagg

SEQ ID NO: 34772 - DNA, 344 bp, Glycine max
  Clone ID: LIB3138-073-P1-N1-B11
ctcgagccgaatctgctcgaggaaaaacccaaaaagattgatgccagattgagacaaagaatagatcctcaatacaatgaggttcaggctcagatggaaacaaatttgtttaaattgtctcttgatgatgttgaaactcctaaaggttccatgttggatctgaaaatttctcaatctaaaattgcacttcccaagaacacagttggaggaaccattctgcgtagtgatctattggcaaattttttgacagagggcaattttagagcaagtgttgatttgcagcgcactcatcgtattagaggaatgattaaaatggtggccacagttggtattcctgagaatac

SEQ ID NO: 34773 - DNA, 415 bp, Glycine max
  Clone ID: LIB3138-073-P1-N1-B12
aaagctccaagtatgtttttacaatccttcaaaaattttgtttctttgtgtgtgtatggtgatgataacttaattagtgttcatgaatatgtcaagccttactttagtggttctaaattgaaaagctttctagctagtcataacatcaccattactgatggtattgacaaaactagtgcaactttgcaatttagaaagttagcagattgtgattttctcaagagaaactttaagcagatgtctaatgttttgtgggtggctcctgaggacaaggcgagtttatggtcacaacttcattatgtttcgtgtaataatctggaaatgcaagaagcttatcttgtcaatctcgtaaatgtgttacgagaattgtatttgcacagtccagaagaagctcgccaattgagaaagaaagctc

SEQ ID NO: 34774 - DNA, 340 bp, Glycine max
  Clone ID: LIB3138-073-P1-N1-B2
tgaaaagctttctagctagtcataacatcaccattactgatggtattgacaaaactagtgcaactttgcaatttagaaagttagcagattgtgattttctcaagagaaactttaagcagatgtctaatgttttgtgggtggctcctgaggacaaggcgagtttatggtcacaacttcattatgtttcgtgtaataatctggaaatgcaagaagcttatcttgtcaatctcgtaaatgtgttacgagaattgtatttgcacagtccagaggaagctcgccaattgagaaggaaagctctctctcgtattgaatggctgcaaaaagctgatgtgcctaccat

SEQ ID NO: 34775 - DNA, 343 bp, Glycine max
  Clone ID: LIB3138-073-P1-N1-B3
tgtagggtcgcctttacatccaatttaatgatgatttccccgactcagggattctttccgctgaccaatgccagttattggaaacggtgtcgcctcataagagcagcaagcacgtttcagatatggagctggatgattgggaggagaccactttgcatgatgtcaactttaaggaggagattagacgaaagcagcatcagcaacaccgcgaggcatacgacgaagatgatgatgagccatctggtgaccgagtgcaaggtgctcaacagtagtgcaatttatgggagaaggagggctcataattctgtttggtgtattcttagggcggataatgctactataa

SEQ ID NO: 34776 - DNA, 373 bp, Glycine max
  Clone ID: LIB3138-073-P1-N1-B5
gataggcaagtggcgagtgaggaatgcagagaaatgagaattcgtcattggctgagtccttctgaggcaggtggccctgccaaacgcagaagctccggcagaaattgccaccgcaaacacgtcgaagacgggtagtaatagcccctcggttcattctcccacattcccaattctgagcgttaagatgagtggagaaagagaaaaggcaataatagtgagggacagtcgacgttgctgcacggcaagtacgagcttggtcgtgtgctggggcacggaacgttcgccaaggtgtaccacgcgcggaacctgaatacagggcagcacgtggccatgaaggtggtgggaaaagaaaaggtgataaaggtccgaatga

SEQ ID NO: 34777 - DNA, 387 bp, Glycine max
  Clone ID: LIB3138-073-P1-N1-C1
ctcgagccgctcgagccgtgcccttatggatgtgggcaacgaaataatttggagaccatgcaccccgagtgaaccacttgttgcagaagttgttcatagagaccagagggcacctacagttgaagaaaagcagtcctcatcttcagtgaatcaaaaagtggatgagatacctggtggtcgagaagggaatgacctacatacaacaacatgaaggtagagtcaatgtccctccttagctatgattaatacagaaaatgttataataatttatcaaaatactgcacaaggcttgttgaagattgtatatcagttgaaggctatgtatgaccatacctagttggctaggacgtgaatcgtgttacacatttcttatgttgggtcttttac

SEQ ID NO: 34778 - DNA, 327 bp, Glycine max
  Clone ID: LIB3138-073-P1-N1-C11
tagcgcggccattctcatcctctcatttctctctctaccatcgccatggatccctacaagcaccggccatgcatcgccttcaattctcccttctggactacaaagtctggtgctcctatttggaacaacaactactgtttaaccgttggagctagaggtccaattctgctggaggattatcatcttgtggagaagcttgcaaattttgatagggaacgtatcccagaacgtgttgtccatgccaggggcgctagtgcaaagggtttctttgaggtcacccatgacatttctcacctgacatgtgcagattttctttgagcccctgga

SEQ ID NO: 34779 - DNA, 411 bp, Glycine max
  Clone ID: LIB3138-073-P1-N1-C12
aagatcgttcaagtggtgtcatccaagatcgtggcagtggacttgggcaagattcatgcggaagcagtaagcatgctgatcacaggtatctggatccgaaggaggttgagagccatggcctctacaatcacgaattgtcagttgcagatatgacccacagacgtaggaaccattatcctgaaaatgttagtggggtggatgacacatcatctgagagcagctcatttttgcaagaaaggttttctcaaggtcaggatccgtatgatatggagccttctagacatcttacacctaatggagctcttccacccctaaatcccaaaggtgcagttaagatggggcacaaaccatcaggatatttgaaagtgaaaggcgagatagagcatgctgctataactgctgttagaaagc

SEQ ID NO: 34780 - DNA, 382 bp, Glycine max
  unsure at all n locations
  Clone ID: LIB3138-073-P1-N1-C2
aacacaccaacttctccatcgtcttcgttggctcattcgattccttagcttcacatctccatggcgctgcaccggttactgaagaggaaaggaggcgtcgatgaacttaacgacgatttccctctcgcttctccggcaaccaagattcgccgtctcgacgctgagttgccgccaattttggaagaggacgaaccgttacctaacgaggagagagctctcgttctcttcaagcctctcgtccattccccttcctctttctctctcactctcgattctgaccttatgaaaggaattaggaacaatcaatatctgtggtccaaacaatgtgagcgcgtgacagagttagaatcacgtgaggaggaaaatgatgatngaatggctc

SEQ ID NO: 34781 - DNA, 303 bp, Glycine max
  Clone ID: LIB3138-073-P1-N1-C3
caagaaacagctgatccgaagaaagatggttaaaagtgccaaggaaagcataaggcagaaagctagcaagtctgaaatatatggggaagatgcaagcagtgtttatagaaatggatagctgtccagataatcatttagtggtcaaagagttagaggatttgaaagaggttgtcctaaacggtgaagacaaagggctcaacaataagagtacctttgatcctgagaaacacattgatgcatatttgcctgtcagagtcaaggagcagagagtgagcaatctttacaatcactgctagtggagca

SEQ ID NO: 34782 - DNA, 393 bp, Glycine max
  unsure at all n locations
  Clone ID: LIB3138-073-P1-N1-C6
gttaaaagccttagccttccctacaactccaaacacaaagacatcatcatccatggctgcctccgtctccactgtcggagctgtcaacagagctcttttgaacctgaatggttctggagctggagcttcagctcccagttcagccttctttgggaccagcttgaagaaaggttattgcctcaagggtccccaacagcaaggtttccggtggaagcttcaagattgttgctgtagaagagaagaaagagattgaagagacccagcagaccgacaaggacagatggaagggtcttgcctatgatatctcagacgaccaacangacatcacaaggaggaaaggntttggttgactcccttttccaagctccacaggatgctggaactcactatgca

SEQ ID NO: 34783 - DNA, 380 bp, Glycine max
  Clone ID: LIB3138-073-P1-N1-C7
gatacacagtagttaggtagcaagcataagtgtctaaccttagaaacatatctgctacatatcgggtgcattttggaattgtgccactaaaattctattcatctatggctgcctcatcttatgctatgcaatcaatccttgcaaaccctatgatccgcatttccagcgggtctagggagaaccattttggtgttcctgcttatcacatgagaaggaatgttggcctgagagttaggtccatggctgaggaagagcaaccaagtcagcctgcgaccccagttacaccaccaccagcagaacccaaaccacagccagtctttacttctttaccaaaggtgagcaccaagttttctgatgtgttggcgttcatgggccagcac

SEQ ID NO: 34784 - DNA, 366 bp, Glycine max
  Clone ID: LIB3138-073-P1-N1-C8
attctctctttcttctaacctaaccctacaattatgccccattaacacaaatcgcaattaccccaaattcctcaccctaccgtagatccatctcctcttccttcgtgaattctggttcagggtggttgccatgtatggcacttagtattttttttccctttttaggattattaggggtgggtgggttgtgtctcgcttatgagtacaaggtttggcgctttgaatggaaccttgcgttgggaataagtttcgcctgggtaggaagatcggaagcggcttctctggggagatctatttaggcactaatattcagacaaacgaagaggttgcaatagagctcgaaaatgtcaaggcaaagcattccca

SEQ ID NO: 34785 - DNA, 330 bp, Glycine max
  unsure at all n locations
  Clone ID: LIB3138-073-P1-N1-C9
attttgtcttggtacgcacttactgccctatatgttttaagcgagtttcatacttcacacgcacaccagaaacattgtgattttcaaggtaggcttttctccagaagatagaagatgtttggccaacttgagcatgagctagagctgcacgtgccggcgagtgaggcatgggatctgtttggtgcccttgaaataggaaaacttgttgcccaagagctgccggaattgtttcaaaaggtggagctaacagaaggagatggaggggttgggactgtncttaaactaacttttgctccaggtgtacctgggccagctggtttcaaagagaag

SEQ ID NO: 34786 - DNA, 229 bp, Glycine max
  Clone ID: LIB3138-073-P1-N1-D1
aacaaggagtgacagcttattatagattgaaaaacgtgatacatttttcaagtgcattttgagtgcaagcacgtaaatcttattttagaccgcgcaaacatctttgtaatgttcaaattcaagtttctgttttaaagaatataaaatacgtttttgagctgtcaaagaataaaatacacccattaaaaacttaggtaaaatgaagagcaacctcatatgtgaagacctt

SEQ ID NO: 34787 - DNA, 412 bp, Glycine max
  Clone ID: LIB3138-073-P1-N1-D10
gttgttcaggagaagaaagtacttgaagttgttgtggagaagggaatgcagaatggacagaagattacattccctggtgaagctgatgaagcgcctgatacagtcacaggggatattgtctttgtcctacaacagaaggaacacccaaagttcaaacgaaaggcagatgacctttttgtagaacacacattgtctcttactgaggctctatgtggcttccagtttgtgctgactcacctggatagcaggcagcttctgatcaaatcaaaccctggggaggttgttaagcctgagtcattcaaggcaataaatgatgagggaatgccaaactaccagaggcacttcctgaagggaaagctttacattcatttctcagtggaattttctgataccctgagtcttgatcaggtga

SEQ ID NO: 34788 - DNA, 414 bp, Glycine max
  Clone ID: LIB3138-073-P1-N1-D2
gaagggctatatagcataaacatttgagtcttcattgcacaatgtcgacctcttccattaacgggtggtgcctctcttccatctccccagccaaaacctctctcaagaaggccacattaggcccttctgtcttcgcaaccgttagcactccttcttctccttcttcttcttcttcttcttccttcccttctctcattcaagacaggcctgtctttgctgcccctgcccccatcatcaccccaactgtgagagaggatatggcaaaggaatacgagcaagctattgaagaactccagaaattgttgagggagaagagtgaactcaaagccacagctgctgagaaagtggagcagataacagcttctctgggaacatcatcatctgatggcatcccatcatcagaagcctcagaca

SEQ ID NO: 34789 - DNA, 335 bp, Glycine max
  Clone ID: LIB3138-073-P1-N1-D3
cccaagaacacagttggaggaaccattctgcgtagtgatctattggcaaattttttgacagagggcaattttagagcaagtgttgatttgcagcgcactcatcgtattagaggaatgattaaaatggtggccacagttggtattcctgagaatacaggtatatcattggcctgtgctatgaatagttcttttagggggcgcgccagttctgatatttacaccatctgctctcaagactgtgaattgtggaatcctgcttgcacaaaagcaatgactatgtcatttaatccaaacccgtgttctgatgcatggagtttggaatttttgaagcgtac

SEQ ID NO: 34790 - DNA, 427 bp, Glycine max
  unsure at all n locations
  Clone ID: LIB3138-073-P1-N1-D4
cgcgcagacctagctttctctttctcttcatcgctcagactcgcaactccgtcatctcgcgacccaacaagtacaactcgaccgtctacaatccactcgtcagacctctaaaacccacgcgatccgcgcaaactcatacatcaaaatgcctgcctccacaaactccgtctcctcggccgctggctctatcgtcaagcctcagggggggcaagtgcagctgcatcagcacagacgactgcagttgctgctgcattccttgcacggtcatgtaaacgcgacagtaaaaataccacatacggcggtatatgagtcccatcgatgacagcgcatgcgtgtgcgaaagcggagacatgccacacgcggnctacaacgcanacgataagggaacagcgatcggattaaggtgttttgggacattttgagcgag

SEQ ID NO: 34791 - DNA, 301 bp, Glycine max
  Clone ID: LIB3138-073-P1-N1-D6
ctagcatgtaggactttattcacttaaatacagcgcattactatgtgcaatgagtgtgtttagatatcaaaaacactgataatactctcatgccagctttttctgttccacaagctactcgccagaacttctgaaaatgcggaatcctctgcatgatctggaatttgtgttcactttcgcttgatcgatctgtaaaactcaatgggggcgccccccccatgaccgtcttgttcccccgggatttaattctgtgccggtccccacaggcttcccaaattttccataatgaggtgcgaataag

SEQ ID NO: 34792 - DNA, 338 bp, Glycine max
  Clone ID: LIB3138-073-P1-N1-D7
attgtttgacagagttcaattctagagcaagtgttgatgtgcggcgcactcatcggattggaggaatgattaaaatggtggccacagttggtatttctgagaatacaggtatatcattggcctgtgctatgaatagatcttttagggggcgcgccagttctgatatttacaccatctgttctcaagactgtgaattgaggaatcctgcttgcacaaaatcaatgactatgtcatttaatccaaacccgtgttctgatgcatggagtttggaattcttggagcgtacttggttatcattgcgatgttatatgtgacactggatggactgcctccccaat

SEQ ID NO: 34793 - DNA, 410 bp, Glycine max
  Clone ID: LIB3138-073-P1-N1-D8
ctcgagccgaatctgctcgagagttgctgcttggaagaaaggctgtttaatggtcaagagtgtgatgtctgggaatgcagcactcaaaaggagtgattgggcctcattggtacaagtgtttttaacaaacagcaacagtacagagcattttgatgcatgtaagtggacaaaatcagaaccacattcctgggaattgatcttcccaatagaggtatgtggccctaataatggttttgaaatgtggagttctgagtgggcaaatcaaacttcatggcatttgagtttccttatttgcatttccaaacagtctacagtttttgatattcttcttggaatctctcaagattttgaaattgcttggtaatactcttttgccttctttttctgtttcacaggctactgccagattt

SEQ ID NO: 34794 - DNA, 219 bp, Glycine max
  Clone ID: LIB3138-073-P1-N1-D9
gcaacagtacagagcattttgatgcatgtaagtggacgagaatgagaaccacattcctgggaattgatcttcccaatagaggtatgtggtcctaataatggttttgaaatgtggagttctgattgggcaaatcaaacttcatggcatttgagttatcttattgacaattccaaacagtttacagtttttgatatatttttttggaatctttcaagattt

SEQ ID NO: 34795 - DNA, 330 bp, Glycine max
  Clone ID: LIB3138-073-P1-N1-E1
attcccagaaaggataggacagccagaatgccagtactatttgaagacaggaacttgcaaatttggagccacatgcaggtttcatcattctagagacaaggctgggattgctggaagagttgcctttaatattttaggctattctcttcgcccaaatgaaccagaatgtggttattatttaagaactggacaatgtaaatttgggaacacttgcaaattttaccattctcaaccaaacaatatggtgcttttcatgcgaaggtcttctggttattctactgtgcattcttcaactacaccaggtcaccagtcatatgcgacagggattac

SEQ ID NO: 34796 - DNA, 498 bp, Glycine max
  Clone ID: LIB3138-073-P1-N1-E4
gttctcaatcaagttatgagcaagatggcagaaatgataaacagtctttgtggtggtgatgaaaaattgatgcgtgaaaaggacgcacctgctgttggctttgttgttcaaaggatgggcaaatttgtaaagaaaaggatgttttggaggagtttgaaatgtgggaaatcccctttcttggaatttcccgcttcacaggttatttttgcaattaagcaattttttaaatgaggatggctcatttagaatattagcctaatgaaaaaatttacttgcgcccagggcctaaaagcttccaaagtattgttttttaaccaatcccttccaaaaaaatttttggtttcttttggtggtgtggtatcggtggatggataactttaaattaggtgttcaatgaatattgtcaaggccttacttttagtgggttctaaaattgaaaagctttcttagctagtcataacatcaccattacttgatggtattgacaaaactagtgca

SEQ ID NO: 34797 - DNA, 399 bp, Glycine max
  Clone ID: LIB3138-073-P1-N1-E6
ctttttactaagcagaggaccatggtgtcaaaaaatccgaacccctctgaggctttaaacttggacccctccggcatgtcgctccccggaatcctccccttcgccgccgccgccgccgccgcagtttcctttgaggatcctgctaagaagactcgcaagccttacactatcaccaagtctagggagagttggaccgaacctgagcacgacaagttccttgaagctcttcaattatttgaccgtgactggaaaaagaatgaagcatttgttggatcaaagacagttatccagatacgtagccatgctcaaaaatactttctaaaagttcagaagagtgggacaagtgaacatcttcctccacccagaccaaaaagaaaagctgttcatccatatcctcag

SEQ ID NO: 34798 - DNA, 251 bp, Glycine max
  Clone ID: LIB3138-073-P1-N1-E8
ggttgatcaataaatacccaagacgattgaagcctgattgagagaaataaattatcctcagtgcaatgatgttcaaactcaaaaagaaacaaatgtgaataaattgaatgttgatcaagaataaacttctaacagttccaaggaagctctgcaattgagaaagaaagatatttctcttattgaaagcatacataaagctgccatgcctaccatagcacaaattgcagattttcattctatgcacatgttta

SEQ ID NO: 34799 - DNA, 87 bp, Glycine max
  Clone ID: LIB3138-073-P1-N1-E9
tccatttagcttttttgtcaactcgcaaaatcacgtcagatggctgtgattgacgcttgggacaatcaccactcacacccaacttca

SEQ ID NO: 34800 - DNA, 343 bp, Glycine max
  Clone ID: LIB3138-073-P1-N1-F4
tgataacttaattagtgttcatgaatatgtcaagccttactttagtggttctaaattgaaaagctttctagctagtcataacatcaccattactgatggtattgacaaaactagtgcaactttgcaatttagaaagttagcagattgtgattttctcaagagaaactttaagcagatgtctaatgttttgtgggtggcttctgaggacaaggcgagtttatggtcacaactttcatatgtttcgtgctataatcttggaaatgcaaagaagcttatctttgtaattctcgtaaattgtgttactatgaattagtattttgcacatgtctcataggtatagctc

SEQ ID NO: 34801 - DNA, 400 bp, Glycine max
  unsure at all n locations
  Clone ID: LIB3138-073-P1-N1-F5
gcgtgacaaaagcaaaaggaaagaatatcaacaaggtaaagtagattccttactagacatggcgttggaaggacaacattctacatatctcatggatcaccaactttgtccatagatgaatccattcaggccagggaaggtcctttcagtcatggaagaaaggcgtgttttctcaaagaccctcttcaattcttggtcatctctgggtcatggggaaaccgcagtttccacggtcaacgtcgttgactccatcaacgacaccatctacgatttctatggctttcccaaacanatgtaccagcttaaatatcctgcacctggagctccacaattggcaaggagggtgaaggaactactcaagaaatctggtttcagccatgttgatgaagatacaaagcga

SEQ ID NO: 34802 - DNA, 376 bp, Glycine max
  Clone ID: LIB3138-073-P1-N1-F6
agattactgagtaagggcaatgatattctgtgttgcgattatgctagttttgatggtttgattaccaagcaagttatgagcaagatggcagaaatgataaacagtctttgtggtggtgatgaaaaattgatgcgtgaaaggacgcacctgctgttggcttgttgttcaaggatggcaatttgtaagaaagatgtttggagagttgaatgtggaatcccttctggatttccgctcacagttatttgcaatagcatttttaatgagatgctcattagatatagctatgaaaaattactgcgccaggctaaagctccaagtatgtttttacaatccttcaaaaattttgtttcttttgtgtgtgtatgggggatgataa

SEQ ID NO: 34803 - DNA, 332 bp, Glycine max
  Clone ID: LIB3138-073-P1-N1-F8
cggctcgagggaggaacactcgtggaagggattcgacgcttgtttcaacgacgcgcttcttcttcttcttcttctgaccatcacgaccacaacaatgtcaatgccaataatagtctcgtcttagtgagagatttgcgcgcgcaattggcttcaattccaaacacgcttcaccccgattccgattccgatttcgatttcgatttctctaccttgaagcccatcaaagttccctcacaaatccccttcagaccctcttccatggatcatcacaaaaagggtgcaccagagacagagttttttaccgagtatggagaggcaagtcaatatcagat

SEQ ID NO: 34804 - DNA, 391 bp, Glycine max
  Clone ID: LIB3138-073-P1-N1-F9
gtcagttgcaggaaaaatggtttcgctgaaactgcagaagcgggtcgccgcgagcgtgctgaagtgtggcagaggaaaggtttggcttgaccccaatgaagtcaacgaaatctccatggccaattctcgccaaaacataaggaagctggttaaggatgggtttatcatcaggaagcccaccaagattcactctcgctcacgtgctcgtcgaatgaaggaagccaagaggaaaggacgtcactctggatacggtaagcgtaagggtacaagggaggcaaggcttcccactaaaattctatggatgaggagaatgcgtgtgctcaaacacttgcttcgcaagtacagggaatctaagaagattgacaagcacatgtatcatgacatgtacatg

SEQ ID NO: 34805 - DNA, 401 bp, Glycine max
  Clone ID: LIB3138-073-P1-N1-G1
cccctgtattattcttgcttgcaattagcacattttttactaatttttataattaaagatttaactcttattataactcaccaattttgaatgttcagcataatttatccgactaattaacaagagacataatttatccatactcttattataaactctctctcacattattcttgattatgatgatggtatattgatttctaaagtgagtgggagagaatagagtatatactgggaatatgccttatggcacattacatggttggatccaagcataactaaccaagacagtcgattccaaatcctaatcaatctggttccagtttgagttgcgattatggcaaaccaggcagtgttttcggtgtgggcgattccacccggaagacgtgggcgccagatgc

SEQ ID NO: 34806 - DNA, 365 bp, Glycine max
  Clone ID: LIB3138-073-P1-N1-G11
gccattcgcaacggttaaagaaagagagaccgagagcgagcgagagagaaagagagagagagagcccgaccttcctctatcgagctctgaacctttctcccccctttaagaaacgtgatatgctcaatgctcgcagaatccaaaacgagtgcgtacgttagagtccccctcacatcacgagttgctgagagaaacaagctgggtctgtaggaacacggaaaaagagagcgcctaccataccacgaagaggagtccattcaggcaaaggatgagaaagctcctgaccaaaagaaaaattgattactgtgagcattgaattgtgggttacaaggagcacgaaagcttttccaaaccaaatgttttga

SEQ ID NO: 34807 - DNA, 403 bp, Glycine max
  Clone ID: LIB3138-073-P1-N1-G12
agaaactttaagcagatgtctaatgttttgtgggtggctcctgaggacaaggcgagtttatggtcacaacttcattatgtttcgtgtaataatctggaaatgcaagaagcttatcttgtcaatctcgtaaatgtgttacgagaattgtatttgcacagtccagaggaagctcgccaattgagaaggaaagctctctctcgtattgaatggctgcaaaaagctgatgtgcctaccatagcacagattgaagagttccattcgatgcagaggatgatgaatgctcctgattcaaatgataatattgatttactgttgagcattgatttgttgggtttacaaggagcaagtaaagcttttccaaacaaaattgtttttgatgataagcttgtgttggctaacacac

SEQ ID NO: 34808 - DNA, 92 bp, Glycine max
  Clone ID: LIB3138-073-P1-N1-G2
gagatgcatcataggaacattgttaggttgcaggatgtactgcacagtgtgaagcgatagtatccggttattgagactctggacttggatct

SEQ ID NO: 34809 - DNA, 271 bp, Glycine max
  Clone ID: LIB3138-073-P1-N1-G3
gcccattctggtggttacttttccgaataccattgtgcacattgaggcatacatgaagggaagggtggagcttttgagtaccactaccaatggtgaatttgttcaagggaaagatctcaacatgggacatgttaatgtaccatctgctgctgaagccttacatccagttacacttcaactccattagtggatatctggtttgaaaaagacagagggataattgaggagtatcttggaaggatctctatcgttcattatatcgttgagtaca

SEQ ID NO: 34810 - DNA, 413 bp, Glycine max
  Clone ID: LIB3138-073-P1-N1-G4
tttcactctagtttctctttctgtttcacgggttgcaacagaaccaacaagtttcaggaaggagatgcaaggagaacatgacacgtctccttaaacctgctggtcaaaggataatcttgatcggtcaatggtgaaaacagacccaagcctgtaaactgtaaagtgtttttgtaacagtttcactttcatgttgatataaaaaagaaccaaaatgatgaattagccgtgagttctgttccgccaggggtttgaaagagcaatcagtgtacgatggcgatggtgctccctgaggagctgatagtggagattctgtcatgggttccggtgaagcctctgagacttggaatttccttatcttccggtgtacgatagcaatcagtttcactttcaatgacggttactcttttataagt

SEQ ID NO: 34811 - DNA, 252 bp, Glycine max
  Clone ID: LIB3138-073-P1-N1-G5
ggttacaattgaatggtttatttcctctcaggaatgtgttcccaggacctattgtgttttaaatccacaaaatccttttgggttaaaaaagtgggtgggaaaaatgacttttccccaaggcactttcccgagggttaagaaaatgccctctttctatttgggggggggagctggtgcaaagaatgcttttctcatgaatatgccaaatgctgttctttcaatgtggggatattttgttggagaactcggttt

SEQ ID NO: 34812 - DNA, 148 bp, Glycine max
  Clone ID: LIB3138-073-P1-N1-G8
tttttgccactaccttatagcaattcacacaacacaacacaggcgaataatcttcaaccacatcctccttttctttcttccttaacccaaaaggttgggggtactgggccgattaatggggagggtggtccccccccctttacctccc

SEQ ID NO: 34813 - DNA, 225 bp, Glycine max
  Clone ID: LIB3138-073-P1-N1-H10
gggtgtaccatattaaattattacattacactctttttactttcttggactgaggctactgcatttgaaaataagcaatacagacaatgaacaaggaaactaagaaataatatatgccaaactagagagtttctttgggtggatgcgtggatatatcaagcctcaagttgaaagctgcacattcaagcgtattttcttaggaaccttttcttcaccttgggtgta

SEQ ID NO: 34814 - DNA, 343 bp, Glycine max
  Clone ID: LIB3138-073-P1-N1-H12
attcattccctcaaatacgcttgccgccaagagctttagaggctgctaaacaggctggaaaggttccagatgtttactactgcctcaagcttttggaagccactggcatgtccactgttcctggttcaggatttggtcccaaagaatggtacaaacttatacatttattctcacgattatccccttttcttttcctttctttagagtgattccacatgcctattcctatggttttcatgcaatgagaatgtgctttagctaggccatatatatttctgccgtatatatatcttgaacttccagagctaccacatatatgaggtaaaaagcacatattccactg

SEQ ID NO: 34815 - DNA, 266 bp, Glycine max
  Clone ID: LIB3138-073-P1-N1-H2
gcttgacgcttatcttgacaatctattacatgtgcaactagagtagggggtgcactaaccagaggaggggggacaacttacaaggaaagctctctctcgcattgaatggctgcaaaaagcttatgtgcctaccatagcacatattgaagagttccattccattcataagatgatgaatgcttctgatttaaactataatatttatttactggtgagcattgaatctgttgggattacaatgagcatgtaaatcttttccaaaacaa

SEQ ID NO: 34816 - DNA, 339 bp, Glycine max
  Clone ID: LIB3138-073-P1-N1-H3
caagctggtgcaatttggttagattcaccataaatttgtattgaaggtttcacaagaggaatgggttgcagcttggtcaactcaagtgcgtcctgcaacaactctgttggctgatgggtgtccatatttgtatgcaatggtgcatgatagttcagtgtctacaataccatgtgattttgtcattggtgtcaagttgacaaccataaacaatatgtgttcatatgggcttaatcctggtattttaggttctcgttttttgggcaccattccttattccatttcacaacaaactgtttggaatcaaatgctaccagtgtgaacaccattgaattttgattc

SEQ ID NO: 34817 - DNA, 359 bp, Glycine max
  unsure at all n locations
  Clone ID: LIB3138-073-P1-N1-H4
cagcaacaacagcagcagcagcagcagttctctcaagaagaatcggatcgccgctgccagaaccgccgattctacggtgaagaactacgaaagcaccgaccagagcttcaacaacaacaaccannaacagcggaaacgcgagtgagggagcgtcggatatggctttgggtgaatcgaaccagccggacatcgatgaggatctccacagtcggcaactcgccgtgtatgggcgagagaccatgcggaggctctttggttccaacgttctcgtctccgggatgcagggtcttggcgttgagattgctaagaatctcattcttgctggtgtcaagtcagtgaccttgcatgatgaggggact

SEQ ID NO: 34818 - DNA, 274 bp, Glycine max
  Clone ID: LIB3138-073-P1-N1-H6
ttaattgttttttttaacgcgcacgaatatgtgagggcgttctttagtggttgtagagtgaaaagctttctaactagtcataacatcaccattactgatggtattgacaaaactagtgcaactttgcaatttagaaagttagcagattgtgattttctcaagagaaactttaagcagatgtctaatgttttgtgggtggctcctgaggacaaggcgagtttatggtcacaactacattatgtttcgtgtaataatctggaaatgcaataaactt

SEQ ID NO: 34819 - DNA, 107 bp, Glycine max
  Clone ID: LIB3138-073-P1-N1-H7
gcctaatcaagaggcccaagccagaactaaatcaaacaatgtcaatgccatagtgttgtattatgaatcatgtttatagtttatagacaaactattgaccccttttt

SEQ ID NO: 34820 - DNA, 363 bp, Glycine max
  Clone ID: LIB3138-073-P1-N1-H8
gtgggaagaagataacaatgttgaagttgggaattgggtttcgaatatcgatactaacgcctttactgccggcggcactgtctaagtatgaagccatagagcctttgctgcagcgcttggactccaaaagggcacctccatccgtgcaagaagccgccgccattggtcttctcaaaaggctgcttcctatccatttctccagttttcagttcaaaatagtttccaaggatgtctgtggcggagacagttgttttctaataaacaatcacaacaagtcaagccagaatgagcctgagattatcattagaggaaccacggctgttgagattgcatctggccctcattggtaatttaagtattggt

SEQ ID NO: 34821 - DNA, 406 bp, Glycine max
  Clone ID: LIB3138-074-P1-N1-A10
ctgattccgggaaccagtgttgaagaggcttacaacaagctaatagttgaacttgagaaaagtgttcctacattggttggcattgaatgtcccaaggatgagaaacttcctcgtcgcaaaatttttgacaaacctaagacgcgctgcttcactattctccctatggagtttaatcttgtggtccgtcaaaagtttttaaattttgtgaggttcattatgaagaaaagggacaaacttagtagtcaagttggaatcaatccatactccatggaatggactgtgttggccaattgattactgtattatggctatgatttttttgtgttgtgaattatctatttttttcggatatatttcccaatgatgatctattttcttctttttcttatttttttactcatttttc

SEQ ID NO: 34822 - DNA, 260 bp, Glycine max
  Clone ID: LIB3138-074-P1-N1-A12
cccaatttgtaaaataattacccatatcataaaaatgctatctttcgccataaccacacatgctttcctcgttattaccattaacaaatgaaagcagagacatatgcaaaggcaaaggcaaagggtgtcactttcactttcagcttccattcaccatgacagcttgagagtgctcgaatgggacaagctatgctacttggtcgcttcctttgcttgcacttccttgggccgcaaagccctcaaggtcaaaacttccattc

SEQ ID NO: 34823 - DNA, 408 bp, Glycine max
  unsure at all n locations
  Clone ID: LIB3138-074-P1-N1-A4
cttttagtcaactccaatttcagagccatattttcaccancaactcttggagcggagtggttccccagatacgtaaattgatgattggcggcgatgcttcacttcatgtgattcaagactctgttaccatggttggtgaagccgccgttccaattataacccttataatgggagcaaacctccttaaaggcttgaagggagcaaatacttctatttggacagttataggaattatagtagttcgatatattttcctgccaattttgggtattctagttattaaaggagcaacacaattgggtttggtgcaaccagatcccttgtatcagtttgtgcttctccttcaatatgcactttcacctgcaatggctataggcaccatcgcgcagttgtttggagctggtgaag

SEQ ID NO: 34824 - DNA, 365 bp, Glycine max
  Clone ID: LIB3138-074-P1-N1-A5
ggctctttctaccacagggggagctagctcttatgacgctaaagtcatggatatggccaatgcttgcatgataatggggagataaaaaaggaccgatctcacactatgaaggaagtatgctggctcctacctacaggaacagtacaaacgatatcttcatagcattggaagggctgattgatgataccatgaatattgaggctactacatacaagctgcagccaaccggagagactaaggaaaaggctgaattgaaatggttacaggaggtattaatcacagcttggtcaactgaagtgcgttctgcaacaactatgttggctgatgggtcgtgcatattagaatgcaatggtgcatgtaagatc

SEQ ID NO: 34825 - DNA, 165 bp, Glycine max
  Clone ID: LIB3138-074-P1-N1-B10
gaaattctgagttctaacgccactaatcctatgctgacgcgacgtcttgagaactgtgagaggctgaaatatctggttgatgagtgtccttttgcatttgtgaactagtatgtagtattttattcacttaaataaagcgcattactatgtgcaatgagtgtgttt

SEQ ID NO: 34826 - DNA, 409 bp, Glycine max
  Clone ID: LIB3138-074-P1-N1-B11
cacactatggatgtttggtcatggatatgtgagctccccaactcggtggaggggaccgagtcccactcgccacccatgaagttcgaaatcgcgagtgagaagaacgacgacaagctggacaactcaactcgttccattcacctgaaagctgagcgaacctccggctcagactcggaagctgcggtgatcttcaccgtatgcttgcaaggctttcacccacacaacgctcacaagcctctatgggtctccgaaaagtgccacctctcatcagaaaagccgttcctccctctcctcctccaactcctccaggaaatcatatcccactcccccacggcgcacgatagcacctgcccccgttcccagctccagaaactaaaacccgaccccatcgcatggatcatggactcgc

SEQ ID NO: 34827 - DNA, 376 bp, Glycine max
  Clone ID: LIB3138-074-P1-N1-B3
catatttgtatgcaatggtgcatgatagttcagtgtctacaatgccaggtgattttgtcattggtgtcaagttgacaaccataaacaatatgtgtgcatatgggctcaatcctggtatttcaggttctcgtcttttgggcaccattcctcagtccatttcacagcaaactgtttggaatcaaatggcaacagtgagaacaccattgaattttgattctagcaagcagagcttttgtcagttttctattgaccttctcggtggaggaatcttagtggacaaaactggagattggatcacacttatacaaaattcttcaattagtaacttgttgagagttgctgcttggaagaaaggctgtttaatggtcaagattgt

SEQ ID NO: 34828 - DNA, 146 bp, Glycine max
  Clone ID: LIB3138-074-P1-N1-B4
cttattctaaggcaaacattaatatacaaaaactgaggaagggggctggaacacacaaggggggctgatgtgaactaatggtaacatatccttcaacccacgggtttaatgaggaaggtattgacgtaatttttcaatattattca

SEQ ID NO: 34829 - DNA, 386 bp, Glycine max
  Clone ID: LIB3138-074-P1-N1-B5
gccaagtttggcaagccgctgtactccacgcgcatcatcctcggcgaggtcaacccggtcttcgaggagacgacggtcttaatggtgtcgatggacgaggtcaagtctaaggaggaccttgcggcgatgctttgggacagtgacaagatgagcgccgatgaccttgttggacgggtgcagatcccggtcacggagctcatgagcaagccgaaccagatgcaccgtcgtgaggacagcctcatgggctttgaggacgccaatgacatgcccggtaaactcgtctggtccatcggatacttcgagaaggtgccgctcaggaaagagctcgaacgagcgccaacagccgaagaggtcaaggtcacccctgagccatcaaagaccgtgcc

SEQ ID NO: 34830 - DNA, 407 bp, Glycine max
  Clone ID: LIB3138-074-P1-N1-B6
caaaaccctagctcgcgttctgctttcgtcttttacatcaggatggagtctcaggtgaagcacgcacttgttgtcaaagttatgggtcgtactggatccagaggacaagtaacccaggttagagtgaaatttttggatgatcagaaccgtcacatcatgaggaatgtgaaaggacctgtgcgagaaggagacattctcaccctactcgagtctgaaagggaagcaagaagattgcgctagatggtttcttttggcttgcctccaaattcgaacaaaacagtgtgattttgttgattttaatggtaggttggtgatgtcaaaggttttagcaccctatcttattgtctgtctttggtctatttttattcgaattatggcgtgaactttggatgatttgagtttaaagc

SEQ ID NO: 34831 - DNA, 406 bp, Glycine max
  Clone ID: LIB3138-074-P1-N1-B7
cattcatagacatggccaccgtcacttctgcagccgttgctattccctcattcactggcctcaaggcaagcgcaggcaaagtgagtgccgcagttaaagtctcagctccccaagccacaaggttgggcatcaaggcttcgctgaaagacgttggagtcgctgttgtggccactgccgcgagtgcagtgctggctagcaacgccatggccattgaagtgttgctgggtggtgatgacgggtctctggctttcgttcccaacaatttctccgtggcctctggggagaagatcgtgttcaagaacaacgcaggtttcccccacaacgttgtgttcgacgaggacgagattcctagcggcgtggatgcagggaaaatctccatgagcgatgaagaccttctcaatgcgcc

SEQ ID NO: 34832 - DNA, 403 bp, Glycine max
  Clone ID: LIB3138-074-P1-N1-C10
tcaattttgaggcttttccccacaagctggtgcagtttggagagattcaggaaaaagttgtagtgaaattttcacaagaggaatttcttacagcttggtcaactcaggtgcgtcctgcaacaactctgttggctgatgggtgtccatatttgtatgcaatggtgcatgatagttcagtgtctacaataccaggtgattttgtcattggtgtcaagttgacaaccataaacaatatgtgtgcatatgggctcaatcctggtatttcaggttctcgtcttttgggcaccattcctcagtccatttcacagcaaactgtttggaatctaatggcaacagtgagaacaccattgtattttgattctagcaagcagagcttttgtcagatttctattgaccttctcgt

SEQ ID NO: 34833 - DNA, 400 bp, Glycine max
  Clone ID: LIB3138-074-P1-N1-C11
tttaatccaaacccgtgttctgatgcatggagtttggaatttctgaagcgtactggatttgattgcgatatcatttgtgtcactggatggactgccaccccaatgcaggatgttcaggttacaattgattggtttatttcctctcaggaatgtgttcccaggacctattgtgttttaaatccacaaaatccttttgtgttaaataggtggatgagaaaattgactttcccccagggcacttcccgaagtgttaagagaatgcctctttctatagggggaggagctggtgcaaagaatgctattctcatgaatatgccaaatgctgttctttcaatgtggagatattttgttggagatcttgtttttgaagtttctaagacgacttttccctacattaaat

SEQ ID NO: 34834 - DNA, 406 bp, Glycine max
  Clone ID: LIB3138-074-P1-N1-C12
taaggttgtgctggataagaataagccaaggatacaaacggttgtgaacaagattgatacaattcaaaatgagtacaggaccatgcagcttgaggttttagcaggaaaccactctcttgtgactacagtagttgagaatggtattcactttcaggttgacttagcgacagtatattggagttctaggctaggaactgaaagacaaaggcttctgagtggttttacacggaacgatgtcgtctgtgatgttttctctggagttggtcctttagccatatctgcagcaaggatagttaaacgtgtttttgctaatgacttaaatccttatgcagttgagtatctggaaagaaattgtgttctaaacaaacttgacaggaagattaaggtctttaacatggatggaaga

SEQ ID NO: 34835 - DNA, 360 bp, Glycine max
  Clone ID: LIB3138-074-P1-N1-C2
gcatactgtttggaatcaaatggcaacagtgagaacaccattgagtggggattctagcaagcagagcttttgtcagttttctattgaccttctcggtggaggaatcttagtggacaaaactggagattggatcacacttatacaaaattctccaattagtaacttgttgagagttgctgcttggaagaaaggctgtttaatggtcaagattgtgatgtctgggaatgcaccagtcaaaaggagtgattgggcctcattggtacaagtgtttttaacaaacagcaacagttcagagcattttgatgcatgtaagttgacaatattagaaccccattccttgtaaatgaatctttccaatat

SEQ ID NO: 34836 - DNA, 335 bp, Glycine max
  Clone ID: LIB3138-074-P1-N1-C6
gggttttcctcatgtgctttcacccaaaaatggtgaaaaagggggagggagattagaaatggggggggggaataaaaacacttttttttaaaaaaatattaattttattctctattatttatcattatttatactacaaaaaaaaataattttaaaattaatatatttaatttttttattaattataaaatttaaatagtggttacacggaacgatgcgctgagatgttttcttggagatggccttagccatatctgagaaggatagtaaacgtgtttatgatatgactttaaacctattccatattctatttataataaaaatttttttaaaat

SEQ ID NO: 34837 - DNA, 314 bp, Glycine max
  Clone ID: LIB3138-074-P1-N1-C9
ggctgcacaagctcttgtatcatcatcatctcttaccttgtcagggcgggctacaagacaggggcttggaccaagatcactccaatctccatttggcttctcaagaaaagcctcctttcttgttaaggcagctgctactccccctgtcaagcaaggatcagacagacctttgtggtttgcatcaaagcaaagtctttcctacttggatggcagccttccgggtgactatggatttgaccctctgggactttcggaccctgaaggaacaggatggttcattgagcccaaatggctagcatatggtgagataatca

SEQ ID NO: 34838 - DNA, 295 bp, Glycine max
  Clone ID: LIB3138-074-P1-N1-D11
aaaagctgatgtgcctaccatagcacagattgaagagttccattcaatgcagaggatgatgaatgctcctgattcaaatgataatattgatttactgttgagcattgatttgttgggtttacaaggagcaggtaaagctttttcaaacaaaattgtttttgatgataagcttgtgttggctaacacacaagaattctttgatggaaattttccagtggattcttggttaccaatttttgtgatattggttttatcctgttatgtcaactattttcatattctacttgttttaatt

SEQ ID NO: 34839 - DNA, 407 bp, Glycine max
  Clone ID: LIB3138-074-P1-N1-D12
gttgagcttgtgtcgttgaataattaataaaccaatcaaattcaccatccaataatatttggaatcaaataaatcaaccttgccaatcaaataacttctattcaccatctaaccaaatttatcaaagatcattagaagataattcgactattcattcgatgacgcctatgaatcctcaacatattcagcaaactaaccagcatcaagcacaatattatgaacagatcaatagcttgccctcttcagaatttatgaatcaacagctaaacactcttcatacatcgaattctcaatcatctaatcaacaatctaatgctcaatatggcacaaactctacaaatattcaatcgaatcaagagtataattatgttaatgatcttataaatataggacaagttgatgagcta

SEQ ID NO: 34840 - DNA, 408 bp, Glycine max
  Clone ID: LIB3138-074-P1-N1-D3
gaattgttgtaactttttgattcctaaattctctaaaattcgaaattcttaatttcgttaggggaaagagattgtttgtgtgtgagtgagtatggctggaaaaggcgagggtcctgctatcggaatcgatttgggaacgacgtactcttgcgtcggcgtgtggcaacacgatcgtgttgaaatcatagccaacgatcagggtaacagaactaccccatcctacgtggctttcaccgacacagaacggttgatcggcgatgcggcgaagaaccaggtcgctatgaaccccaaccaacaccgttttgatgctaagcgtttgattggaaggcgtttttccgatgcatcagtacaaggtgacatgaaattgtggccgttcaaggtgattcctggccctgctgagaaacctat

SEQ ID NO: 34841 - DNA, 406 bp, Glycine max
  unsure at all n locations
  Clone ID: LIB3138-074-P1-N1-D5
gaagaatcagaagatgagtcaaccaataagaaagataagcttctcatgggaaaagaagcctggtgtctccaaagtaacaactactactcatggtgaaaatctgatcccaaaagaggaagagtttttggccaagttgccaccaccaccttgcacaccagaagaatcaagtgctactcatcatcacanaaaccaccaccctcttcttgattttcaaattccacttcctccttgtgcttttcagcctcccttttatagaacttcctccaagaggggcctttgggttcaagacaaagaccctttcttagcagctttcaaagagtgcaccaagaatcatcagaaaactagtgctaaggtgaacaaaaagttgatcaaagatggaattgaagcaagggtaaggaagagcatg

SEQ ID NO: 34842 - DNA, 149 bp, Glycine max
  Clone ID: LIB3138-074-P1-N1-E11
tttctgctttggaagcgatcaggcagaactctgctggagagaggactgccagattggagtgggcggggagacactgtaacgatgaaccaatggtgcaacattaagaacacgactatcaagcaaatgtgaataggcttgagttagcactt

SEQ ID NO: 34843 - DNA, 397 bp, Glycine max
  Clone ID: LIB3138-074-P1-N1-E5
aattgattggtttatttcctctcaggaatgtgttcccaggacctattgtgttttaaatccacaaaatccttttgtgttaaataggtggatgggaaaattgactttcccccagggcacttcccgaagtgttaagagaatgcctctttctatagggggaggagctggtgcaaagaatgctattctcatgaatatgccaaatgctgttctttcaatgtggagatattttgttggagatctcgtctttgaagtttctaagatgacttctccctacattaaatgtacagtctctttcttcatagcatttggaaatttggctgatgataccatcaattttgaggctttttcccacaagctggtgcagtttggagagattcaggaaaaagttgttttgaaattt

SEQ ID NO: 34844 - DNA, 351 bp, Glycine max
  Clone ID: LIB3138-074-P1-N1-E6
catagaccgagagagcaactgcacgcactgtaactctctcaccggttgttccgctttgatggaacagtacgagaaggttgagaagataggcgagggaacatacggcgtcgtttacaagggtcgcgaccgctccaccaacgagaccatcgccttgaagaagattcgcttggagcaggaggatgagggggttcccagcaccgccattcgcgagatttctctcttgaaagaaatgcagcacaggaacattgttaggttgcaggatgtagtacatgatgagaagaagttgtatctggtttttgagtaccttgactcagatctaaagaagcacatggtttcatcttcagaatttgc

SEQ ID NO: 34845 - DNA, 262 bp, Glycine max
  Clone ID: LIB3138-074-P1-N1-E7
cacataaaccttcgtggacatggcaacaacagccttgtcgcacggccagtgtgctttgcaggaggaaacctcagcacatgcatattatcctaccctcttcacagacactccaaaatggaactctaagaactgatgtaactgcttcagcctcaaaagataatatcagcatagaaagtgagaagtgttgttcctctttgttggtgaacagaagaacagttttggcttctggggtttccttgttgggtttcccgggtgtgagttt

SEQ ID NO: 34846 - DNA, 402 bp, Glycine max
  Clone ID: LIB3138-074-P1-N1-E8
ggcaaataaggaagataacagatcgagtttttgacaaagtaaagagtcaaatagaaactgataacttgagttttgaagatctgtatattgctgttttacttgtgtacaatgatatcaacaagtatatacctggtccccattttgaccctccatcaaaagacaaagtcagagaagtcaaacagcaccaacagttgcagtggcaacaaagaaagctactgaaggtgttccaggtgttgggagactggtgcaaaagataccgaattcagtttatgcttccctcgtgacaattgcagctgtgtggttccaaaaaaaggctcagagttctccactgtagccattgctcatcatgtgtttcacacagaaagatagaattctcttgattgtacacataggattgaaact

SEQ ID NO: 34847 - DNA, 191 bp, Glycine max
  Clone ID: LIB3138-074-P1-N1-F10
catgcacccctacctaaacttcgaaatccgctcttgccactacaacaacatttattcattcacacctttcacaccgcgagccgaaaatatcaacggggggacgcacatttccccctataacacaatgcaacagaacgacaccctgcgcgtctgttgccgcccacctctacagtactctcctcattttccct

SEQ ID NO: 34848 - DNA, 136 bp, Glycine max
  Clone ID: LIB3138-074-P1-N1-F11
aacacacaagaattctttgatggaaattttccagtggatgcttggttaccaatttttgtgaattgtctttatcctgtaagtcaattaccttcagaagctgtcgttgtaaatgttacatgtggtagtggacgtggtg

SEQ ID NO: 34849 - DNA, 92 bp, Glycine max
  Clone ID: LIB3138-074-P1-N1-F12
ggggataagattaaagattcaacaatggcctctgcttctgctacgcttctcaagacatgctgcgtgggcttgacaagatgcgagtgggtcaa

SEQ ID NO: 34850 - DNA, 288 bp, Glycine max
  unsure at all n locations
  Clone ID: LIB3138-074-P1-N1-F3
aaagccaatggttggggtttaatttcaaaaacaaattccccagagaggcttttactgatggtaaatatgggtcaagtttacaatgtagttgatgattatgagcaacanagaatctgtagtgcagttgctagtggcaatactggatcataagaggcatcgtgaggacgaaatgacagctagcataactcacacaagtactgacagagagaatcgttgcaaggtcacatgtaatagacggaaggagtgccagaagtttcaaacgatgtggagattgtgtagcgggcaaat

SEQ ID NO: 34851 - DNA, 160 bp, Glycine max
  Clone ID: LIB3138-074-P1-N1-F5
ggttaacttttacatttttttaacaccactgaaatcctcaaatagtgtggtatatacaagcagagaggcttatttagtttatttcaaaacaattactatagagcttttacttattttaatatcctttatgcctacaatgaatctgatgattattagcaac

SEQ ID NO: 34852 - DNA, 399 bp, Glycine max
  Clone ID: LIB3138-074-P1-N1-F6
ggagaatgggaaatagaccctattctctcagcaaattaaaagacgacagcctttgatttgcatgaggagaatggggtcacatgagaaatcaaacaagataaaagtggaagaaaaaagagggtgagattagtaaggagtgtggataaaacatgtactccaccacccaatcagaactcagagaaatcctactctttcaaatccgtccaaatccttttcctttcgccacatctcttgcaccatttccacataggcccaaacccaaatcaaaacccaaacattcactaagaaagaaagaaagaggttttaatttttttagcttatgcacaccaactaactcctcctaacttctttctcttgggttctttttcatttaattggttttaaagacaccaacccaat

SEQ ID NO: 34853 - DNA, 318 bp, Glycine max
  Clone ID: LIB3138-074-P1-N1-F7
ccaggacctattgtgttttaaatccacaaaatccttttgtgttgagataggtggatgggagagtggactttcccccagggcacttcccgaagtgttaagagaatgcctctttctatagggggaggagctggtgcaaagaatgctattctcatgaatatgccaaatgctgttctttcaatgtggagatattttgttggagatctcgtctttgtagctcctaagatgacttcttcctacattaaatgttcagtctctttctttatagcattctcggaacatttggctgatgatgcccataaattttgtaggctttttccc

SEQ ID NO: 34854 - DNA, 404 bp, Glycine max
  Clone ID: LIB3138-074-P1-N1-F8
ccaacccacaaatcatatcaatctcatttattccaatttgcaaagtacccttcttgcacaccacactccactcagatttcttaatattctcacaaaattattctctcccttccgtaatggagtccacgccggtgaattgggaagccctcgacgctctgctcatcgatttcgccaaatcggaaaacctaatcgaggactcctccgcgctctctccgtcgtcgccgtcgtcatcttcgtatcactcccgcctcgtcatccgtcagatcagacgcgccgtcgagaccggagccattgacgccgccgtcgctctccttcgccttcacgctccctccattctcactgacctcaagattctcttccgcttgcgcaaacagaaatttattgagcttctacggaaggggact

SEQ ID NO: 34855 - DNA, 393 bp, Glycine max
  Clone ID: LIB3138-074-P1-N1-F9
aattagtgttcatgaatatgtcaagccttactttagtggggctgaattgaaaagctgtctagctagtcataacatcaccattactgatggtattgacaaaactagtgcaactttgcaatttagaaagttagcagattgtgattttctcaagagaaactttaagcagatgtctaatgttttgtgggtggctcctgaggacaaggcgagtttatggtcacaacttcattatgtttcgtgtaataatctggaaatgcaagaagcttatcttgtcaatctcgtaaatgtgttacgagaattgtatttgcacagtccagaggaagcttgccaattgagaaggaaagctctatctcgtattgaatggctgcaaaaagctgatgttcctaccatagtaca

SEQ ID NO: 34856 - DNA, 316 bp, Glycine max
  Clone ID: LIB3138-074-P1-N1-G1
gggaaaaagttaaaaaaagaatggccggaaaaattaaaaaaaggtttgcgtgggatattatgaatggggatgatcctatccaaaagccacctgaaaaaccaattacctttttctttgagaaccttgttgttaaaaggaggaggagccctcaaattaaggagattgaggaccaaagccttgaaaagattgatggcctaaacaaagcaagcaaaaaggacctggaactgctccttgctgatgataaggggacagatcctgttgtcaaggaatataatctaaaatttaaaaaaggcaagggaaaaaaatggagaaagat

SEQ ID NO: 34857 - DNA, 259 bp, Glycine max
  Clone ID: LIB3138-074-P1-N1-G10
caatggcgtctctctctcacctcaacaaactcctctgcatgccgccgctcaactcttcaccctctatttcgccaccacgcagcagcgtcggaatttggaccaaacctgtcggaaggccgaggctactggtgcgtgtccgagcggtcacgagcgacgacgagtgggggccggagaaggaggaggcgtacggcggcggcgtagcggtggaggagaaaccgacgaagtcggggacggagacggagaacctgtagaaggcctt

SEQ ID NO: 34858 - DNA, 254 bp, Glycine max
  unsure at all n locations
  Clone ID: LIB3138-074-P1-N1-G12
ctgctgcgccgtatcggtggcttcctttggctaccttcacccgtggaaaacttcctccaccactgagagaataccaacttgggtttttgctctcttcctttgcgttcaatcttaccaacttgtttgtctttacacccatgaccattgagatgatgaagcagaggcataaagtggagagagaaaataatataggggaagaagttgggtggtnaataaatggttaagttgtttagttttaaccccatagttttgca

SEQ ID NO: 34859 - DNA, 318 bp, Glycine max
  Clone ID: LIB3138-074-P1-N1-G3
tattaagctgcttcattatcataatggttcaagtctccctaagtgcatgagcctctaacattttgattcaaacacttatttctcaacatcttatctatattcacattccagatcaagtttatagcaattctaagtactcagctactcaagcaatgatgggtgataaacaacggtacccgacaatagaacaaaagcttgctggccagctttacttgagatccaactccaaccttttcccacatgttggaacttgttacgaacgtctgaaaagaccagctctgtttcagcaacgattttcactaaaaaatcattcaaatg

SEQ ID NO: 34860 - DNA, 319 bp, Glycine max
  Clone ID: LIB3138-074-P1-N1-G4
gcttaccttgctccattattttcttgagcaaaggctccctaagggcaggagcctataacatctggattggaacacttatttatcaacatgacatctatacccacattccagatcaagcttatcgcaattctacggactcacctactcaagcattgataggtgataaacaactgtaccctacaatagaacacaaccttgctggccagctacactagagagccaacttcaaccttttcccacatgttcgaactagttacgaacgtctgaaaagaccagctctgttacagcaacgattttcactaaaaaatcattcaaatgc

SEQ ID NO: 34861 - DNA, 365 bp, Glycine max
  Clone ID: LIB3138-074-P1-N1-G5
gcttgtcataacatcaccattactgatggtattgacaaaactagtgcgagctttgcaatttagaaaggtagcagattgtgattttctcaagagaaactttaagcagatgtctaatgttttgtgggtggctcttgaggacaaggtgagtttatggtcacaactgaattacgactcttcccaacatttgaacatgcacgaggcttatagtttcaatctagaaactgtttcaccctatttccacatgttcaacttagtaactatcgtctgaatagaccagatttgttttagcaattgtttatcactattaaaatatttccaaatgcacttatcttttgttgccctcttgtaagcactttctttgtaaa

SEQ ID NO: 34862 - DNA, 194 bp, Glycine max
  Clone ID: LIB3138-074-P1-N1-G6
ggatcaggtaaagcttttccaaacaaaattgtttttgatgataagcttgtgttggctaacacacaagaattctttgatggaaattttccagtggattcttggttaccaatttttgtgaattgtctttatcctgtaagtcaattaccttcagaagctgtcgttgtaaatgttacatgtggtagtggacgtggggt

SEQ ID NO: 34863 - DNA, 363 bp, Glycine max
  Clone ID: LIB3138-074-P1-N1-G7
aagctcgccaattgagaaggaaagctctctctcgtattgaatgggtgcaaaaagctgatgtgcctaccatagcacagattgaagagttccattcgatgcagaggatgatgaatgctcctgattcaaatgataatattgatttactgttgagcattgatttgttgggtttacaaggagcaggtaaagcttttccaaacaaaattgtttttgatgataagcttgtgttggctaacacacaagaattctttgatggaaattttccagtggattcttggttaccaatttttgtgaattgtctttatcctgtaagtcaattaccttcagaagctgtcgttgtaaatgttacatgtggtagtggacgtg

SEQ ID NO: 34864 - DNA, 390 bp, Glycine max
  Clone ID: LIB3138-074-P1-N1-G8
caattcctcatcgttgcaattcttccctctctagattctcatcggtcctctcttctatctccttcagaaaaaaaaaaacaaaaaaaccacagcttcatattatatatctagctcttcattttctcttgttcaatcaaggttatgctttaaaattctgaaactcacagtttcaggcaaattttagcctaaagatctgtgcgttgacccttggcaggttcagcttttggaggggttggagttgttctttcacataagccattgattattccaagtttctcttttctctctctcaagttcaaaaaatagtttttttacattctgtctctacggcggacttgtggattgctagggtcagagatttttgctacatgttctagcttgacttatggt

SEQ ID NO: 34865 - DNA, 404 bp, Glycine max
  Clone ID: LIB3138-074-P1-N1-G9
cttgtcaatctcgtaaatgtgttacgagaattgtatttgcacaggccagaggaagctcgccaattgagaaggaaagctctctctcgtattgaatggctgcaaaaagctgatgtgcctaccatagcacagattgaagagttccattcgatgcagaggatgatgaatgctcctgattcaaatgataatattgatttactgttgagcattgatttgttgggtttacaaggagcaggtaaagcttttccaaacaaaattgtttttgatgataagcttgtgttggctaacacacaagaattctttgatggaaattttccagtggattcttggttaccaatttttgtgaattgtctttatcctgtaagtcaattaccttcagaagctgtcgtttgaaatgttacatgtgg

SEQ ID NO: 34866 - DNA, 203 bp, Glycine max
  Clone ID: LIB3138-074-P1-N1-H1
gcattattgttgttcccaggacctaatggggtttaaaatccacaaaaggccggttgggttaaataagggggatgggaaaattgactttcccccagggcacttcccgaagtgttaagagaatgcctctttctatagggggaggagctggttgcaaagaatgctattctcatgaatatgccagacgctgttctttcaatgtggag

SEQ ID NO: 34867 - DNA, 405 bp, Glycine max
  Clone ID: LIB3138-074-P1-N1-H11
caaaactggagattggatcacacttatacaaaattctccaattagtaacttgttgagagttgctgcttggaagaaaggctgtttaatggtcaagattgtgatgtctgggaatgcagcagtcaaaaggagtgattgggcctcattggtacaagtgtttttaacaaacagcaacagtacagagcattttgatgcatgtaagtggacaaaatcagaaccacattcctgggaattgatcttcccaatagaggtatgtggtcctaataatggttttgaaatgtggagttctgagtgggcaaatcaaacttcatggcatttgagtttccttattgacaatcccaaacagtctacagtttttgatattctcttgggaatctttcaagattttgaaattgctggtaatactct

SEQ ID NO: 34868 - DNA, 410 bp, Glycine max
  Clone ID: LIB3138-074-P1-N1-H12
acataggacaacagcctgatatagagatagcggcggaatggacattcaaccttcaaaaagacgatcgagggaaaaaaaaaaaaaaaaaaaaaaaaaaaaaaaaaaaaaaatcgcagaaagtgcaaaacaaaaaatggcataaaaaaaaaaaaaaaaaaacaacgaaaaaaaaaaaaacaaaaaaaaaaaaaaaaaagagggggggcctccacttagagttccccccacccccgttttaatttaccccccgttcccaatcgtgggacaaatttcccattaagggaacttaaataaaattcggtgaaatccctgcccaaacctttatccggggaaaaatttgtttcttggcttttttaacccaacagaattctttgcggaaaaaaaaaggtttactcctgggggcccaaaag

SEQ ID NO: 34869 - DNA, 391 bp, Glycine max
  Clone ID: LIB3138-074-P1-N1-H3
gagataagctgccatgtcgatcttgtccgttccgtcaccaacacagcgttgttccatttcgatttctcggctgccattgccattgccattgccgtttcaattgcaagtaagaagaagagcaaaagggggaaaagtggtaatgagcatggaggcaggtattggagtgatgggcaccaagttgggtatgatgagctatttcgaatccgacggagaggttgttcctgtcactgtcgtgggtttcaaagaaggcaacatcgtcacccagatcaaaactgaggccaccgatggatacgacgccgtccaggttggttaccgaagggtcagagaccgcaaattgaccaaacccgaaatgggtcatctccataaggtcggcgccattcccatgcgccat

SEQ ID NO: 34870 - DNA, 410 bp, Glycine max
  unsure at all n locations
  Clone ID: LIB3138-074-P1-N1-H4
gccaatgtagcccttggtgtgtttgcaattgaggaagactttggaagagccagagcatacaaccaatgtggggaccctgaattagttcaacaggcgattgacagttgccctgttagctgcattcattggacatcttctgcacagctatcattactggaagatgagatgcgccgtgtagaaagagtcaatgttgccctaatggtatcaggaatgggaacagcatcaattgatgttttcagaatggcaagttccagatgggaaaagaggcagtcaaaagtcttggcacaagcaaaattgagaatgatgagggaagaaggttctgataagaaaaattcgtactgggacaatctttgtggcaaacagaaagactatcaaagttcagatgaggaagttgnagaaagagcaaaaag

SEQ ID NO: 34871 - DNA, 411 bp, Glycine max
  Clone ID: LIB3138-074-P1-N1-H5
ggctagattctcgatgactcatttgagatagatgactactgtggtggagccaaatcatacaaccaatgtggggaccctgaattagttcaacaggcgattgacagttgccctgttagctgcattcattggacatcttctgcacagctatcattactggaagatgagatgcgccgtgtagaaagagtcaatgttgccctaatggtatcaggaatgggaacagcatcaattgatgttttcagaatggcaagttccagatgggaaaagaggcagtcaaaagtcttggtataagcaaaattgagaatgatgagggaagaaggttctgataagaaaaattcgtactgggacaatctttggggcaaacagaaagactatcaaagttcagatgaggaagttgaagaaagagcaaaaaga

SEQ ID NO: 34872 - DNA, 312 bp, Glycine max
  Clone ID: LIB3138-074-P1-N1-H7
aaggtgagaaaatatggcatttgcaggaacaactcataagtgcgtggcttgtgacaaaacaggttatctggttgataagttgaccgcagataaccgagtgtaccataaggcttgcttcagatgccaccactgcaaaggaacactcaagctcagcaactataacttttttgaaggagttctttactgcaggccacactttgaccaactgttcataagaactggtagtcttgacaaaagcttctaagggacaccaaaaattgctaaaccagaaataaccggttaagagaatcttgcatctaccaaagttttaag

SEQ ID NO: 34873 - DNA, 394 bp, Glycine max
  unsure at all n locations
  Clone ID: LIB3138-074-P1-N1-H8
ggactgcaaggtggccctcacaaccacactattactggtttagctgttgcgttgaagcaggccactactcccgaatatagagcatatcaagagcaagttctcagcaacagctttaaatttgcacaggctctgagtgagagaagctatgagcttgtctctggtggaaccgagaatcacctggttttggtgaatctgaagaataagggtattgatggctccagagttgagaaggtgttggaagcagttcatattgcagctaataaaaacactgttcctggagatgtgtctgccatggntcctggtggcatcaggatgggaacccctgctcttacttctagaggaattgttgaggaggattttgtcatggttgcagagtttttttgtgcatctgtga

SEQ ID NO: 34874 - DNA, 275 bp, Glycine max
  Clone ID: LIB3138-074-P1-N1-H9
cgaatactagaggccagggactcggagtgtttggatttgtttatttgagacaccacgtgctgagctgacatgtgtataacacaaagctacaaaatatggctgaagactcatcactgatgatggcaactcctactcttatcaacctcattgggcttgacatacgaccagcacatcaccagtctctttatggtactcttcatgctatgatgtcctggaccgttgtatcactctatgacgctggtgtcacctgtgacactcctttgggagcacaagaa

SEQ ID NO: 34875 - DNA, 204 bp, Glycine max
  Clone ID: LIB3138-075-P1-N1-A10
cgagtaatgagtgactcattggttgccttgatcttaaactgtttggatggtgactcttgctgcaactgattgtcttgattttttactgattggaaggggaacatctgttggtactgccagattgggggtgcagctctcaccttgtgcgtcgtagtaattcatttagacaacagagaatttgtacaggttgtggagagggggagg

SEQ ID NO: 34876 - DNA, 410 bp, Glycine max
  Clone ID: LIB3138-075-P1-N1-A12
gggaaagagaagccacttccaatttcacacacacacagcaacacactgcactgtgtggaaagtaagcatggcaagagtggtggcactccaacagaaccaactatctttctctcccttagcttcctctctttttgacttcagtggaaccagacttcaaactcaacttcagttcaagagaaaactatgccatccaaaagggtctttctacgtctcggcatcgagcaccaagaaaatcctaataatgggaggcaccaggtttattggtgtgtttttatctaggctccttgttaaagagggtcaccaggtgactttattcacaagaggtaaagcgcctgtcactcaacagttgccaggtgaatcagacaatgattatgctgatttttcttccaagatcttgcatttgaaaggag

SEQ ID NO: 34877 - DNA, 412 bp, Glycine max
  Clone ID: LIB3138-075-P1-N1-A4
gttcggtggagggagggagccgtagcagcggaagctctagcttgggtagcgaatcacaatggcgagaggattaaagaagcatctgaagaggcttaatgccccaaagcattggatgcttgacaaactgggtggtgcatttgctcctaagccctcatctggaccacacaaatcgagggaatgcctgccactcatactcattttgcgaaaccggctgaagtatgctctaacataccgtgaagtcattgctattctgatgcagcgacatgtccttgttgatggcaaagtcaggactgacaaaacataccctgctggttttattgatgttgtatcaatccctaaaacaaatgagaacttccgcctgctgtatgacaccaaaagtcgattccgtctccactcagtcagggatgacgag

SEQ ID NO: 34878 - DNA, 55 bp, Glycine max
  Clone ID: LIB3138-075-P1-N1-A5
aaaaaagaaaaaataaacaaaagaaagagaaaaataggcaaatacaataaaaaaa

SEQ ID NO: 34879 - DNA, 336 bp, Glycine max
  Clone ID: LIB3138-075-P1-N1-A8
ctcgagccgaatcggctcgagggcgcgccagttctgatatttacaccatctgctctcaagactgtgaattgtggaatcctgcttgcacaaaagcaatgactatgtcatttaatccaaacccgtggtctgatgcatggagtttggaatttctgaagcgtactggatttcattgcgatatcatttgtgtcactggatggactgccaccccaatgcaggatgttcaagttacaattgattggtttatttcctcttaagaatgtgttcccaggacctattgtgttttaaattcacaaaatccttttgtgttaaataagggggatgggaaaatttgacttt

SEQ ID NO: 34880 - DNA, 407 bp, Glycine max
  Clone ID: LIB3138-075-P1-N1-B1
aaaagaaaagaagcaccaagcgaagccaggcgaagctgtctttcgattccttcgtgcgtgcgagtctcctgatatccaaggtgaagcaccgacaccggacctatcttcggcgaatccccagtccccactttcttccttcgaaatgaatcccgagtatgattatctgttcaagctccttcttattggagactctggtgttggcaaatcatgccttcttctgagattctctgatgattcgtacatcgaaagctacataagcaccattggagttgattttaaaatacgtaccgttgagcaagatggaaagaccattaaactacagatctgggacacagctgggcaagaacgatttaggacaatcaccagtagctactaccgtggtgcccatgggatcattattgtttatg

SEQ ID NO: 34881 - DNA, 381 bp, Glycine max
  Clone ID: LIB3138-075-P1-N1-B10
gttctttcagagcatattcatgttctcatcatattattcatatgtaaaatagtgtttggtaggcctccaagctgtgataatgatcatgttcttttataaacagtttcaggataacattgaactcttttgtcagacaaggcgcaatattaataccgttcttaatgaaatgagaacgatgcctggcataatgagccaaatgcccccttttcctgttttcatgaatgaggaacttgcaagtagtatattacccaataaatctgaggcagcaaattattgaccccatttaagattgccaactcagtgcacaagtctggagttgttgacatttttgaatggaaatcttagctgaatttttttgggtgctacatgcatttgttgagc

SEQ ID NO: 34882 - DNA, 185 bp, Glycine max
  Clone ID: LIB3138-075-P1-N1-B11
aagtgatttaatgaaagaaattgaggaaaaatattttgggaaggatgatgatattgtaggagaagagaccactactgaaatttcttctgctactctaagtcttaactatcatagtcttgcagggatattcttgattactggcatttctactttattagcgctattggtcttacaaacttgttttt

SEQ ID NO: 34883 - DNA, 116 bp, Glycine max
  Clone ID: LIB3138-075-P1-N1-B7
caaaactagtgcaactttgcactatataacgttagcaggggggggttttttcaagagagactttattcacatgtctaatgatatgtgggtcgttccagtggtcaaggccatgtcaa

SEQ ID NO: 34884 - DNA, 407 bp, Glycine max
  Clone ID: LIB3138-075-P1-N1-B8
ccgaagtgttaagagaatgcctctttctatagggggaggagctggtgcaaagaatgctattctcatgaatatgccaaatgctgttctttcaatgtggagatattttgttggagatctcgtctttgaagtttctaagatgacttctccctacattaaatgtacagtctctttcttcatagcatttggaaatttggctgatgataccatcaattttgaggcttttccccacaagctggtgcagtttggagagattcaggaaaaagttgtattgaaattttcacaagaggaatttcttacagcttggtcaactcaggtgcgtcctgcaacaactctgttggctgatgggtgtccatatttgtatgcaatggtgcatgatagttcagtgtctacaataccaggtgattttg

SEQ ID NO: 34885 - DNA, 395 bp, Glycine max
  Clone ID: LIB3138-075-P1-N1-B9
gtctgggaatgcagcagtcaaaaggagtgattgggcctcagtggtacaagtgtttttaacaaacagcaacagtacagagcattttgatgcatgtaagtggacaaaatcagaaccacattcctgggaattgatcttcccaatagaggtatgtggtcctaataatggttttgaaatgtggagttctgagtgggcaaatcaaacttcatggcatttgagtttccttattgacaatcccaaacagtctacagtttttgatattctcttgggaatctctcaagattttgaaattgctggtaatactcttatgccagctttttctgttccacaggctactgtcagatcttttgaaaatgcggaattctctgcatgatctggaatttggttttctttcgctt

SEQ ID NO: 34886 - DNA, 367 bp, Glycine max
  Clone ID: LIB3138-075-P1-N1-C10
gactcgaaaaacgcaatcaactggaatgaaacggatgctattgctgttgaattaacggccatctttagtcaggtttcggatagtaacgttgatgagttcacatcgacgatcgaaaagttgagatactaccttcaaatcgcaaaaaaagttgatcgtaagcaattcacggaaggctgcattaaagaacttgatggcctcttgcaagactacaaactacttttggagaagttggcaaaatctaaccgcttagaacgttttctatcgtcttataggttgagaactcccctggagcaaaccaacattcgcattgacatgcttaccaacgtggccttttccattttgccaaaaccagagaaagtgggtggaa

SEQ ID NO: 34887 - DNA, 402 bp, Glycine max
  Clone ID: LIB3138-075-P1-N1-C11
caaaaacaactttgcaatttcgtaggagatgctcaggagcaggacgctaacacagagtgttacagtcacctgtgttcgtcacagtcacagacaatggttccaatcaattcccgtaaattatagattctttgacgctgctcggaactctctatcatcacccaactccgcgatcttcaaatggaaaagaaaggccaattataaccgtcatagttctggaatggggaccttcaccactcgcgcgttggcgcagccgcttcagaacgccgacgaactcatcgactccgtcgagacatttatcttcgattgtgacggagttatatggaaaggtgataaattaatatacggagtgcctgaaacgcttgacatgcttcggtcaatgggcaaaagattagtttttgtcac

SEQ ID NO: 34888 - DNA, 402 bp, Glycine max
  Clone ID: LIB3138-075-P1-N1-C12
ccatctgaatttgggctggatgtggaccgtcacgatgcaactgagccagtcagagaagttttcgaggaaaaagcgaaaatccgaagagtaattgaagctgaaggaattccatacacttacctatgttgccatgcctttactggttacttcttacgtaaccttgcacagattgacatcactgttcctcctagggacaaggttttcattcaaggagatggaaatgtcaaaggagcgtatatcactgaggccgatgtgggagtttttacaatccaagcggcaaatgaccctaatgccttgaacaaagctgtgcacataagactccctaacaattatttgtccttaaatgatatcatctctttgtgggagaaaaaaattaggaagactcttgagaaaaattatgtt

SEQ ID NO: 34889 - DNA, 408 bp, Glycine max
  Clone ID: LIB3138-075-P1-N1-C2
ggcaattttagagcaagtgttgatttgcagcgcactcatcgtattagaggaatgattaaaatggtggccacagttggtattcctgagaatacaggtatatcattggcctgtgctatgaatagttcttttagggggcgcgccagttctgatatttacaccatctgctctcaagactgtgaattgtggaatcctgcttgcacaaaagcaatgactatgtcatttaatccaaacccgtgttctgatgcatggagtttggaatttctgaagcgtactggatttcattgcgatatcatttgtgtcactggatggactgccaccccaatgcaggatgttcaggttacaattgattggtttatttcctctcaggaatgtgttcccaggacctattgtgttttaaatccacaaaat

SEQ ID NO: 34890 - DNA, 407 bp, Glycine max
  Clone ID: LIB3138-075-P1-N1-C7
ctcgagccgaatcggctcgaggacaccaaaggcaccatcgggcccttagaccacatggcccatcgctctttcttcttcggccccagtgaagtcgccgccatccgctccctcatcccccaaactgatcaacgctgctccaacttcgaggtcctcaccgcatgcctctggcgctgccgcaccattgcgctgcagcccgacaaagacgaggaggttcgcatcctctgcatagtcaacgctcgctccaagtttgaccctcctctgcctagcggttactacggcaacgcttttgccttccccgttgctgtcaccactgcggggaagctgtgcgataaccctttgggatacgctctcgagttggtgaggaaagccaaagcggatgtgactgaggaatacatgcactcggtggc

SEQ ID NO: 34891 - DNA, 399 bp, Glycine max
  Clone ID: LIB3138-075-P1-N1-C8
ggaacttcactctaaagggatcttcattctgaacaccttgcggtttaatgttcttctcaatggtaatgatcaagcaattttgggagatgttggtattcctagccttttgcttggctcatcattcataagctcggacatggctaagaggtttggaactcccaattacatggctccagagcaatgggaaccagaggtcagaggtcctatatcttttgaaacagattcttggggattcggttgcaccattgtcgaaatgttgaccggtaatcaaccttggtatggatgtcctgttggcagaatataccagtctgttgttgtaaagcatgaaaaacccaatattccaagtggcctttcttcttcagttgagaatgtcctcagtggatgctttgagtttgattt

SEQ ID NO: 34892 - DNA, 412 bp, Glycine max
  unsure at all n locations
  Clone ID: LIB3138-075-P1-N1-D10
caatagagtccctaatcgtaatagggtggctaactggaataaaacaagatttcgagttcctgtagatcagagaagggctgctaatggaggctttgctgctaagcagcaaccacttccttcccctcagaagcagcaggagaatgtggatatagtgccaaagcaaaagcctcagacgctggattccctgtttgcaaacatgaaggagcaaagaatgagagttttgtcaatgcagaataatgctgtgcaacgcaatggaggtggaaataagaggctcccatggagaagaggccgatttggcaactaagttgttcacacaatggggaatttcatgatatcaccttttgaacctatgtcctggcctgctgcgtcctgactccttctgngttgatgcaagtgaaaaatttctcgagtg

SEQ ID NO: 34893 - DNA, 412 bp, Glycine max
  Clone ID: LIB3138-075-P1-N1-D11
ctacaatcaaaagatctctcactatgccacagtatgattccacttggatcttgtacaatgaagctgaatgcaacaactgaaatgatgcctgtgacatggcccagctttactgatattcacccttttgcaccagttgaccaggctcaaggttatcaggaaatgttcaataatttgggtgaactgttgtgcaccatcactgggtttgactccttctccttgcaaccaaatgctggtgctgctggagaatatgccggacttatggttattcgtgcatatcatttggcaaggggagaccaccaccgcaatgtttgcattatacctgtctcagcacatggtacaaatcctgctagtgctgctatgtgtggaatgaaaattgtctctgttggaactgacgccaagggtaacattaata

SEQ ID NO: 34894 - DNA, 366 bp, Glycine max
  Clone ID: LIB3138-075-P1-N1-D12
atggcggttcatgtacggatttagtgctccagttgctgtattaatggggcttggaatgtggactctccccaattctccacggtggttgcttctcagagcagtgcaaggaaaaggttcttttcaagatttgaaggaacaggcaattgcttccctgagcaaattaaggggccgaccacctggtgacaaagaatctgagaagcaaatagaagagacccttgtctcattgaaatctgtctatgcagaccaggaatccgaggggaatttcttagaggtgtttcagggtcccaatctgaaagctttcataattggtggggggctagtcctatttcaacagataacaagtcaaccaaagtgtctgtattatgc

SEQ ID NO: 34895 - DNA, 405 bp, Glycine max
  Clone ID: LIB3138-075-P1-N1-D8
gttttctattgaccttctcggtggaggaatcttagtggacaaaactggagattggatcacacttatacaaaattctccaattagtaacttattgagagttgctgcttggaagaaaggctgtttaatggtcaagattgtgatgtctgggaatgcagcagtcaaaaggagtgattgggcctcattggtacaagtgtttttaacaaacagcaacagtacagagcattttgatgcatgtaagtggacaaaatcagaaccacattcctgggaattgatcttcccaatagaggtatgtggtcctaataaaggttttgaaatgtggagttctgagtgggctatacaaacttcatggcatttggagtttctttattgacaattccaaacagtcctacagtttttgatattctt

SEQ ID NO: 34896 - DNA, 192 bp, Glycine max
  Clone ID: LIB3138-075-P1-N1-E1
aaactcaagggttactggtcattcaagggggactcttgggaattcacaaatgggtcatttcttcataccagaagaatctttaacttttttttgagagggaaaggtttaggcaacaccccaaaccaagtatttccgggggggccgggattatttttggacctgttgccaaaggttggaggggggttaccgaaa

SEQ ID NO: 34897 - DNA, 407 bp, Glycine max
  Clone ID: LIB3138-075-P1-N1-E10
cttcgatggggcaagagtcccaccatcctccacaaggtttgcgatctgccattaggagctttccatttgatgggcttccttctttctcattgtgccagcaagtggaaagctcctaatgatcaggttggttcacttgtgcttgaatctctatctcttcttggtcactttgcattgtttcatcctggaaatcaagctgtccttcgatggggcaagagtcccaccatcctccacaaggtttgcgatctgccattcgttttcttcagtgacccagagttgatgccaatcttggctggcacgttagttgctgtatgctacgggtgtgagcagaacaagtttgtagttcagcaagaactgagtgttgacatgctactttccttgctaaggtcttgcagaaatgctgcgcctgc

SEQ ID NO: 34898 - DNA, 394 bp, Glycine max
  Clone ID: LIB3138-075-P1-N1-E11
gcaagttatgagcaagatggcagaaatgataaacagtctttgtggtggtgatgaaaaattgatgcgtgaaaggacgcacctgctgttggcttgttgttcaaggatggcaatttgtaagaaagatgtttggagagttgaatgtggaatcccttctggatttccgctcacagttatttgcaatagcatttttaatgagatgctcattagatatagctatgaaaaattactgcgccaggctaaagctccaagtatgtttttacaatccttcaaaaattttgtttctttgtgtgtgtatgcggatgataacttaatcagtgttcatgagtatgtcaagccttactttagtgatatcaattgaaaagctttctatctagtattacatgaccattactga

SEQ ID NO: 34899 - DNA, 409 bp, Glycine max
  Clone ID: LIB3138-075-P1-N1-E12
ggtgcgtcctgcaacaactctgttggctgatgggtgtccatatttgtatgcaatggtgcatgatagttcagtgtctacaataccaggggattttggcattggggtcaagctgacaaccataaacaatatgtgtgcatatgggctcaatcctggtattttaggttctcggcttttgggcaccattcctcagtccatttcacagcaaactgtttggaatcaaatggcaacagtgagaacaccattgaatcttgattctagcaagcagagcttttgtcagttttctattgaccttctcggtggaggaatcttagtggacaaaactggagattggatcacacttatacaaaattcttcaattagtaacttattgagagctgctgcttggaagaaaggctgtttaatggtcaag

SEQ ID NO: 34900 - DNA, 407 bp, Glycine max
  Clone ID: LIB3138-075-P1-N1-E2
ctcgagccgaatcggctcgagaaactctcaatcaattcatcaaccggcttcgtcttgcacaaactcagggataactgatcattcagtggtgactctaggaaatccacaaatggatcatttctccatacaagaagattcttcagcttctgttggagaggaagagtttgagcaaacaccgcaaaccagttattccggaggagacggagataatcttggacctgatgccaaaagatggaagggagataacgaaaacgatggctattcagtctcagcaagcagatctgttagagagcctagagttgttgttgaaaccacaagcgaaattgatatacttgatgatggctttaggtggaggaaatatggacagaaagtagtcaaaggaaactcaaatgcaaggagctattaca

SEQ ID NO: 34901 - DNA, 308 bp, Glycine max
  Clone ID: LIB3138-075-P1-N1-E3
cgatatccgaatacacttgtactacaggcagccaatttagcaacggtaagacattcacgcatactccaccatctgaccctgatgagcgccacccttgtggatgatgacattgggtaaaaggggctccggactaggaggttataacgagtgtggaccggagggattgaccgggccatcgccgtggaccagtttttcaaacagtgacggagataaatgcgcacctgctgccataatgatggaagggagattacttaaacaattgctagagcattctcaaccaggcaaaacatgtgagagagccttaaagt

SEQ ID NO: 34902 - DNA, 403 bp, Glycine max
  Clone ID: LIB3138-075-P1-N1-E7
atttccgctcacagttatttgcaatagcatttttaatgagaggctcattagatatagctatgaaaaattactgcgccaggctaaagctccaagtatgtttttacaatccttcaaaaattttgtttctttgtgtgtgtatggtgatgataacttaattagtgttcatgaatatgtcaagccttactttagtggttctaaattgaaaagctttctagctagtcataacatcaccattactgatggtattgacaaaactagtgcaactttgcaatttagaaagttagcagattgtgattttctcaagagaaactttaagcagatgtctaatgttttgtgggtggctcctgaggacaaggcgagtttatgtgcaccaacttcattatgtttcgtgtaataatttgga

SEQ ID NO: 34903 - DNA, 243 bp, Glycine max
  Clone ID: LIB3138-075-P1-N1-E8
ctcgagccgcaggttacaattgattggtttatttcctctcaggaatgtgttcccaggacctattgtgttttaaatccacaaaatccttttgtgttaaataggtggatgggaaaattgactttcccccagggcactatccgaagtgttaagagaatgcctctttttatagggggtggagctggtgcaaagaatgctattttcatgaatattgcccaatgctgttttttcaatgtttagatattt

SEQ ID NO: 34904 - DNA, 327 bp, Glycine max
  Clone ID: LIB3138-075-P1-N1-F1
agaaaaagggggccacagttggaattcttgagaatacaggtatatcaggggcctgtgctatgaatagtggtttagggggctcgccagttctgatatttacacccatttgttctaagactgtgaattgtggaatctgcttgacaaaagcatgactatgttatttaatccaaacccgtgttctgatgcatggagtttggaatttcttgaagcgtactggatttcattgcgatattcatttgagtcactggatggactgccactcccaatgcatgattgttaggttacaatctgattggtttattttcctctcaaggaatgtgtttccca

SEQ ID NO: 34905 - DNA, 409 bp, Glycine max
  Clone ID: LIB3138-075-P1-N1-F10
caattacaccctctcttctcccattcgcaactttcctcacggcatcctcagcgaagacggattttacaaagtggcagtaaacgataccacactttggtttcagctttgcgatggaatgattttcaatcatgatcctccaatatgtgctgactgctgggattgtggagggccaaaacgttgtgggatggagtgcaatgctcttgtggcaaacaacgttgggggttatcatgtatgcacagccataggacgtggccaaaaaatagatgttgacattattgataagaaaaatccccacactggtgtcattgttaaaatgtcgaacagtggccctaagtacaactgttctctagctgtgtctgttctttgcaatttaaatggagtgcaaggaccgtgaacttttgagagatta

SEQ ID NO: 34906 - DNA, 240 bp, Glycine max
  Clone ID: LIB3138-075-P1-N1-F11
caattacactgtttgttcttccattggcagcttttctgagggcgtgctcatccaagacggattttacaaagtgacagttaacgataccacactttggtttcagctttgcgatggaatgattttcaatcatgatcctccaatatgtgctgactgctgggattgtggaggtccaaaactttgtggtatgtagtgctttgctattgtttcaaacatcgtttgttgttatcatgtatgcacagt

SEQ ID NO: 34907 - DNA, 408 bp, Glycine max
  Clone ID: LIB3138-075-P1-N1-F12
gaccacgggttcagggatggaaggcccctctgttcctgcagttggtagggatagcgaatctgggacggggaacatctccactttcccatggtctctcttcacaaaatcccctaggagaaggatgctggtggcttttacttgtaccatctgtggccagcgaactacaagggctattaatccccatgcttacactgatggcactgtttttgtgcagtgctgtggatgcaatgcatatcataagctcgtggatcacttgaacctgtttcaggagacaaattgctatttgaattcaagttttaattataaaggagaaggatgggatgatcttaagttcaggtatatggatgataacgatgatgatgacatattccccattgcataagtgaactgcctgcatatggagcatat

SEQ ID NO: 34908 - DNA, 78 bp, Glycine max
  Clone ID: LIB3138-075-P1-N1-F5
aaaaaaaaaaacaatatttattaaacattcattcctaaaatctcgggggttatttaaaaatacgtaagcaactaaaaa

SEQ ID NO: 34909 - DNA, 429 bp, Glycine max
  unsure at all n locations
  Clone ID: LIB3138-075-P1-N1-F6
ggctggaatttcggttcgggctcttttctgcatgtttgttctctcaacgactcctccgcgaaagagtattattcaatattttggttgggttgaatcccggngttgaagcgttgcagacatcacggctattctaagagtgtctcgctccctcattcatgtccgatctgtacgacggaggacgggtagttgcgtaactgccgttaacccttcgccgcacggtgggcgtggtgctttgccttctgaaggtggtagcccttcagacttgctcttcctcgctggtggtggtttcttctagtttcttcactcttttcattacttttagcctgcatagttttaaataagaaaaaaaaaacagcgactttgtgactagttaagatcacccgttcttcttcttcttcttcttcttcttcttctactactactactact

SEQ ID NO: 34910 - DNA, 279 bp, Glycine max
  Clone ID: LIB3138-075-P1-N1-F7
ctctattctggctgtttgagctataagccacagcctcgcgtacgagtactaacacatatacaggatggtccaggactcgcctgctgaacgcactggcagacctgacggctgagctaagagggacctgcatggtcattgaggtgcagcctgagctaccaaggacggcttgtttgggacctgccggaaaaacgttatcgcctggagggtgccgagcattgaggtttgcgggggaaggttcaagagagttgctgttgaacagaggagggagattgtagaaac

SEQ ID NO: 34911 - DNA, 401 bp, Glycine max
  Clone ID: LIB3138-075-P1-N1-F8
ctgatggtcgtgagtggttcctccccactaacttcgaagaggagaagggtcaccaacttttgttccaccgacatggacgctgaaactgctaaggccaagcttgctgctgtgaaagaaagatttggacgagagatccatgtttttgaaacatcagttctttcttcatcttcaaaggctgcgttatccaatgaaggagaggagacggatgacttctatgagtttactgctgaagattattacagacttttggctactaaaaaagaagataaattcttgaagactcgaaaactacgagaagcagaagaggcagctcgtaggtcaagaataaccaaagctgtaatcagaattcgctttcctgataatcacactttggaggctacattccacccattcgaaacaat

SEQ ID NO: 34912 - DNA, 254 bp, Glycine max
  Clone ID: LIB3138-075-P1-N1-F9
aagttgacaaccataaacaatatgtgtgcatatgggctcagggctggtatttcaggttctcgtcttttgggcaccattcctcaatccatttcacagcaaactgtttggaatcaaatggcatcagtgagaacaccattgaattttgattctagcaagcagagcttatgtcagatttctattgactctcctggtggaggaatcctagatgactaatctggagattgtgttcacactttattcacatattttttcaa

SEQ ID NO: 34913 - DNA, 417 bp, Glycine max
  Clone ID: LIB3138-075-P1-N1-G1
tcggttcgggcaactttgttggctgttgggtgtccatatttgtatgcaatggggcatgatagttcagtgtctacaataccaggtgattttgtcattggtgtcaagttgacaaccataaacaatatgtgtgcatatgggctcaatcctggtatttaaggttctcgtcttttgggcaccattcctcagtccatttcacagcaaactgtttggaatcaaatggcaacagtgagaacaccattgaattttgattctagcaagcagagcttttgtcagttttctattgaccttctcggtggagaaatcttagtggacaaaactggagattggatcacacttatacaaaattctccaattagtaacttgttgagagttgctgcttggaagaaaggctgtttaatggtcaagattgtgatgtct

SEQ ID NO: 34914 - DNA, 376 bp, Glycine max
  Clone ID: LIB3138-075-P1-N1-G10
cttttgattgataacagtgggatattgaaaattgcagactttggtttggcaagctttactgatcccaatcaagctcagccactgacaagccgagttgtcactctatggtataggccaccagagcttttgcttggagccacttattatggcactgctgtggatttatggagtacaggatgcatacttgctgagctggatgcaggcaagcctataatgcctggaagaactgaggtggagcaattgcataaaatttttaaactttgtggttcaccttctgaggactattggagaaaatcaaagttgccttatgcaacattatttaagtcttaacaaccctataggcgatgtgtttctgaaacgttcaaggagtttcctg

SEQ ID NO: 34915 - DNA, 245 bp, Glycine max
  Clone ID: LIB3138-075-P1-N1-G11
acaggagaaaccctcttcggcttgacacgagcctcgaagtggagcctttgtgacacgaaaatgaccctagcacccatgttgctgctggagaaccacccaattcacctgaaccctgcgcactacatcagtgagattattagagaaggcacaaataatggcactgctttctttaagtgccatggacatgagctatttgagatgacggttttggatcctgagtattataggttgttcaatgagggctt

SEQ ID NO: 34916 - DNA, 306 bp, Glycine max
  Clone ID: LIB3138-075-P1-N1-G12
agttaatgtagcatgtgctgctgttggcttgacatcaagttacactccaactccattgttggaatctggtttgcaaaaagacagagggttaattgtggagtattttggaaggatgtcttacgttgctcataacgttaatcagccccaagagaaagatttgttggagggaaatttttcctttgatattaaatctcgctctagattggaaaaagtttcctttacaaaagcacaatttgttagtggaaaaaccttcaatatgatataattggtgctggttcacattcttcagaagattttcctgaaaag

SEQ ID NO: 34917 - DNA, 161 bp, Glycine max
  Clone ID: LIB3138-075-P1-N1-G2
tcataatgttggaagcattatcttccagtgatggtatcgggagtgctatcgtatcaaaagtccacagtaggaccaatcccaatattatttcctttttttttatttatcctacagtttgagagtgtttaatattggttttaggcatttactttctccagatt

SEQ ID NO: 34918 - DNA, 402 bp, Glycine max
  Clone ID: LIB3138-075-P1-N1-G7
ctcgagccgaatcggctcgaggaggaatgattaaaatggtgggcacagttggtattcctgagaatacaggtatatcattggcctgtgctatgaatagttcttttagggggcgcgccagttctgatatttacaccatctgctctcaagactgtgaattgtggaatcctgcttgcacaaaagcaatgactatgtcatttaatccaaacccgtgttctgatgcatggagtttggaatttctgaagcgtactggatttcattgcgatatcatttgtgtcactggatggactgccaccccaatgcaggatgttcaggttacaattgattggtttatttcctttcaggaatgtgttcctaggacctattgtgttttaaattcacaaaatccttttgtgttaaataggt

SEQ ID NO: 34919 - DNA, 409 bp, Glycine max
  Clone ID: LIB3138-075-P1-N1-G8
cggctcgagggaaaacccacaggcacgctgagcatggaacacagaaccctagaactcaacctggcttcagcaaaggatctcaaagacttgaatatattctcaaagatggatgtatatgctgtgctttcactctccggcgatcaaaagaccaagactcccgtccacagaaacggcggcaccaacccaacatggaattttccggtcaagttcacttttgatgaatcggtggcgcggcagaaccgtttggccctcgaaatcaagatccgctccgagcgcgccctcgccaccgataaggacatcggccaggtccacgttcctctcatggaactcctcaagcaacctggcgacggtaaatccttccagcacgttagttaccaggtcagaaaaccctccggcaaacccaagggag

SEQ ID NO: 34920 - DNA, 404 bp, Glycine max
  Clone ID: LIB3138-075-P1-N1-G9
ctgatatgactcgactggtggctcttgttccgtattacattgacttgatcggacgatacaaattaagttctcaggctcggtctaagacagaggctgcgcgacaaaaggctgctgtagaagcacagaaagaactccgaaatgcacagcaagaggccatgcagagaagaaaggcagagaggaaaaagatggtggaggaggctgaggcaaagctcagtgcagaggctattcgaaagaaagaagcaaaagagcgtgctcgtcaaatgaagaaggcaatgccaaggatgaaaatggctcgtggtgcctaattcttgaattgatgattcgtttgccagtagaattgaaggccttccccgcccccagcgtacgttgtattggagttggccttttgtagaatttacggcaat

SEQ ID NO: 34921 - DNA, 418 bp, Glycine max
  Clone ID: LIB3138-075-P1-N1-H10
gcaaaaaaaaatctcaaaataaaacaaccaaaccacacacctcacaccctcttcaacatcctcagcaagaacaagaagaagaagaagaaacaatgtcttgctccaatctgacaatgttggtgtcctcaaaaccttccctttccgacccctcgaacctctccttccgctctgtcctgaacccttttcagctccctacacaaaacccagcttcatgcaccccttcacgctcctcaagcacccaaattcagtgtggtctgagagaactgagaacccgcattgagtctgtgaagaacacgcagaaaatcacggaggcaatgaagcttgttgctgcagccaaagtgagaagagctcaagaagctgttgtgaacggaagacccttctcagagaccctggttgaagtcctctacaacatcaacga

SEQ ID NO: 34922 - DNA, 262 bp, Glycine max
  Clone ID: LIB3138-075-P1-N1-H11
agcttgtgttggctaacacacaagaattctttgatggaaattttccagtggattcttggttaccaatttttgtgaattgtctttatcctgtaagtcaattaccttcagaagctgtcgttgtaaatgttatatgtggtagtggacgtgtcgaacctttcatttctctctgtcttgaacctttttcagttctttacactaaacccatcttcatgcactcctttatgctcctcaagctcctaaatacattgtggtttgagagaac

SEQ ID NO: 34923 - DNA, 326 bp, Glycine max
  Clone ID: LIB3138-075-P1-N1-H12
aggaagtcctcgttttgcacagctaagtagtgccatatttgggttattttattgtggatatcttccctctttttggcttaaacttcgatgtggtttagcagctccagccttgaacacaagaataggagcaacatggcctatacttcttggtggccaagctcattggacagttggtcttgtggcaactttgattaccataagcagcgttattgcagcggatacatttgcatttcttggtggcaaggcatttggtagaacaccacttaccagtatatgtcccaagaagacatgggagggtactattataggcttttggggggtgtata

SEQ ID NO: 34924 - DNA, 212 bp, Glycine max
  Clone ID: LIB3138-075-P1-N1-H3
gatgattgctacactttctctaccgatgaacctaaaccagtgagggggtttcggcttttggggcgcattatacactcagaccaaagcctagactcaaagccttatttagcttatcggacattctgactttgtcaaaccacatacccatggtcatttacactaaacgattgcagtttaggccaacctggctatatggaggtttgaatagggag

SEQ ID NO: 34925 - DNA, 400 bp, Glycine max
  Clone ID: LIB3138-075-P1-N1-H5
ccttctttttaaccctttttttcaagtttcatctcttttcctcaggggattcttctaactggctctccgtttacttcacttcatgacggattcttctcctcttatccctccctcaccggtcacagtcaccgtgatcgacctcgaagtgggaccctcctatcaaattcaatgccggattcgtcttgtaactgatggttgaatttttcattgttccttgtaagtgcaaaggtacgctatagtacttacattgagagtgttttgtatctttgactccctctgatgctggggatttcttcctcttttatattttttttttttgttctccatctcatcctgttttatcaaagtttttttttcatatattcactttttttctttattttttcatatttttttcttt

SEQ ID NO: 34926 - DNA, 69 bp, Glycine max
  Clone ID: LIB3138-075-P1-N1-H7
gtctctaatttctaaaactcgtcagtgcaatagcataattgggcgactttttatatgcttcagagccat
